United States Patent Application Publication US 2021/0199660 A1 - sequence listing, part 62

SEQ ID NO: 892671 - DNA, 120 bp, Artificial Sequence
  ENSG00000231666_10 (sequence is synthesized)
atcgctgctggaaagactgtggaaatggtactgttggtgcccatagacctccagacccccatgggacagcagctgggcattcctccaccattgaatgaagtgtgagcagggactggaaac

SEQ ID NO: 892672 - DNA, 120 bp, Artificial Sequence
  ENSG00000231666_11 (sequence is synthesized)
actcagggcctggttcagagtccatggaggactcaggtatttgaggtttaagtggttggtacgtaatgtctccattttccaccttaatataaaacgtgtctctttttctcatccaagttt

SEQ ID NO: 892673 - DNA, 120 bp, Artificial Sequence
  ENSG00000231666_12 (sequence is synthesized)
tggaccagcggagacaaagaaatgaggcagatagcaaaactcacctttataactgattgaaaaaaaacatggtggactgactcaccacccaacataattatcgatggaaaacacaggtct

SEQ ID NO: 892674 - DNA, 120 bp, Artificial Sequence
  ENSG00000231666_13 (sequence is synthesized)
ctcactcctggggacatagccctgggaaatgtacagaaagcagcaggtgcatggggtgctttctgcatcctggggccaagagtgacagccagagcctagagaggccaggagtgtttgttt

SEQ ID NO: 892675 - DNA, 80 bp, Artificial Sequence
  ENSG00000230393_0 (sequence is synthesized)
tcggggtcccgcggcgctcgcaggccgcgccgccctgccgcccctctctcgtggcttttacggcccgcccgcccctcagc

SEQ ID NO: 892676 - DNA, 80 bp, Artificial Sequence
  ENSG00000230393_1 (sequence is synthesized)
cagcagccctggggtgcccggggcggccctgcaagcgggagagagcggcgaggcggcggcgccgagtgcggggggatgcg

SEQ ID NO: 892677 - DNA, 120 bp, Artificial Sequence
  ENSG00000230393_2 (sequence is synthesized)
cccgggctgcacgcacttctcccgcggcccagaatccacttgaccctgctgggcgctcccgcgggcggcggacccgggtgggtgcgggggaattccccggccgcccaggcgcggggagag

SEQ ID NO: 892678 - DNA, 120 bp, Artificial Sequence
  ENSG00000230393_3 (sequence is synthesized)
ccgcccaggcgcggggagagtgagctgtgccgcccgcagcagcgccccaaacaaaccgtttaaggtctctggagcccgcaagttcagcgaaataaagcggcggcgcggaggaaacctctt

SEQ ID NO: 892679 - DNA, 120 bp, Artificial Sequence
  ENSG00000230393_4 (sequence is synthesized)
ccacccggacctgctctccgttgcggtttggcctccagtggtggtcccacccaccctctagctggccagccctggaaaccaacctcctttctttttatttctcaccgggaagggggacaa

SEQ ID NO: 892680 - DNA, 120 bp, Artificial Sequence
  ENSG00000230393_5 (sequence is synthesized)
actggcctctgggtgtcgacttcaaacttgccgcccgtctccggtctggaaaggcaggtgatcagctagaagggtgataagagtatcatcgtggctcctaaagagtaataataatctccc

SEQ ID NO: 892681 - DNA, 120 bp, Artificial Sequence
  ENSG00000230393_6 (sequence is synthesized)
tcattgtaaagacagctcttccccctggcttacttttttagacatgctgagaagcgcatgtctccatcagggccctacctctgcttctccacagttggcctagaaccggaagcccctcca

SEQ ID NO: 892682 - DNA, 120 bp, Artificial Sequence
  ENSG00000230393_7 (sequence is synthesized)
aggccccctgactctcctgacctcttggccacagctccggattctcaccagggattccccagaattcctagagagcagctcagagccctgcagttgtgcctcaccacgcgaaccaaacct

SEQ ID NO: 892683 - DNA, 120 bp, Artificial Sequence
  ENSG00000230393_8 (sequence is synthesized)
cgcactccccgccaaaagggagtcccttccagcactctcccctttgttcctttttctgggcaagaaccgctgactggggctgccagaaatgtaaaccctgggtgcaagtgacgggatccc

SEQ ID NO: 892684 - DNA, 120 bp, Artificial Sequence
  ENSG00000230393_9 (sequence is synthesized)
tccagcgtcaagccgaagagtcatcctctcacctcacccacctccgaatgaggattaacaaactcaattcaggacacaggtagaagaccaaaaggccaatgagacttctttcctatttga

SEQ ID NO: 892685 - DNA, 120 bp, Artificial Sequence
  ENSG00000230393_10 (sequence is synthesized)
ttagcatccataactaatgtgcaaaatgtaaaacgctaaattaagacagagttggcatcaacatagtctgagaaaatgaaattgttattttacaagctgataactctcagccctcaaaaa

SEQ ID NO: 892686 - DNA, 120 bp, Artificial Sequence
  ENSG00000230393_11 (sequence is synthesized)
cccctctcattagctgaaggtagcaagtagcaagaagattaggtaaaaacatagagaatatgaatataggaaaaagtacaggtgtgaagggctggctgcccaaatcccaatgcacagtgt

SEQ ID NO: 892687 - DNA, 120 bp, Artificial Sequence
  ENSG00000230393_12 (sequence is synthesized)
atttggaaaaagaaaaaaaagaaaaagaaaatctgtctttctaatatccccttagcatacgccttgttggaaatgtttgctttggcgaaagtgagatcgagacattgagacagcattccc

SEQ ID NO: 892688 - DNA, 120 bp, Artificial Sequence
  ENSG00000230393_13 (sequence is synthesized)
aggaacaaaggctgggggtggagggtggaggagggagcaggaacagcccctgtctggaagaactgcaagttctgaggcctgaacaagaaatgtgtcctgttcccgtgctcctggctgcag

SEQ ID NO: 892689 - DNA, 120 bp, Artificial Sequence
  ENSG00000230393_14 (sequence is synthesized)
ctgggaagcttcttcagaaaggagacctcccggccctcaccgggatctggctttccttcccttcccaccacatctgtttatacaaaggagggccgctgaaggacaaacataaccgtgttt

SEQ ID NO: 892690 - DNA, 120 bp, Artificial Sequence
  ENSG00000230393_15 (sequence is synthesized)
actgcgagtcccatgctgggcctggagctcagatacagatttgccctcaccatggaggctgaagataaatagatgatcccagaaaaggaaagagggaaggccctgggatggtatagagct

SEQ ID NO: 892691 - DNA, 120 bp, Artificial Sequence
  ENSG00000230393_16 (sequence is synthesized)
ggttgaggggtttactcatgaaaggcctctcccaaaaagccatgtagtaacgggcagatttacgtttgaatttaaactctggtgccttgtgttaatatatgagagtgtgtgcacctaaag

SEQ ID NO: 892692 - DNA, 120 bp, Artificial Sequence
  ENSG00000230393_17 (sequence is synthesized)
caattgcaaggcgggtatttaaaaatgtttctttaggaatagccatgattttctgtttggggcctctaacatggggatagttggattgattatttccagtgttatgttttcatgtaatag

SEQ ID NO: 892693 - DNA, 120 bp, Artificial Sequence
  ENSG00000230393_18 (sequence is synthesized)
tgtcttggagaatgaggacttttgaggaaacccaaatagtagttgcagatcctgttttttactaagctgtcatggagataaatccaaaatagtttttacaagtaaaatgtagaacagtta

SEQ ID NO: 892694 - DNA, 120 bp, Artificial Sequence
  ENSG00000230393_19 (sequence is synthesized)
gtgagagcctttatgggagatctttattatttatctggtttatgaagatgttcctattatcctccagcctctgggtatgcaaaccaaaacaagcacttaatctagttgtcaaaattttaa

SEQ ID NO: 892695 - DNA, 120 bp, Artificial Sequence
  ENSG00000230393_20 (sequence is synthesized)
ctccttaatacaaagcaaaaaaagggtttggacttttggggattagaatgtcagaactaaaagggaacttttttatgtaaaagagaaagagactctctaaaaataaaaatgttagagtga

SEQ ID NO: 892696 - DNA, 120 bp, Artificial Sequence
  ENSG00000230392_0 (sequence is synthesized)
gtgaaggtgtgcttgcttccccttcatattttgccatgattataagtttcctgaggcctacccagccatggctcctgtatagcctgcagaacttttcactcttgttgcccaggctacagt

SEQ ID NO: 892697 - DNA, 66 bp, Artificial Sequence
  ENSG00000230392_1 (sequence is synthesized)
caattatctattatgcaccagacactgtactggatgtgagggtcatggctgcccataggccatgag

SEQ ID NO: 892698 - DNA, 120 bp, Artificial Sequence
  ENSG00000230392_2 (sequence is synthesized)
gtactggatgtgagggtcatggctgcccataggccatgaggtgactgcgtgcaaatttgaaaaaggctctccagatgcacacctctgcaccaggttgcatgaattgctgtaacactcccc

SEQ ID NO: 892699 - DNA, 83 bp, Artificial Sequence
  ENSG00000230392_3 (sequence is synthesized)
tgctgtaacactccccgtggaagcctactgggaggaatgaacaactccagacgtgctaccttaagagctgtaacactcactgt

SEQ ID NO: 892700 - DNA, 89 bp, Artificial Sequence
  ENSG00000230392_4 (sequence is synthesized)
gagctgtaacactcactgcgagggtctgcggcttcattgttggagtcagggagaccaaaaacccaccaattccggacacaaaatgtacc

SEQ ID NO: 892701 - DNA, 120 bp, Artificial Sequence
  ENSG00000230392_5 (sequence is synthesized)
cagcatgctggcagtcctcacagccctcattcgctcttggtgcctcctctgcctgggctcccactgtggcggcacttgaggagcccttgagcccaccactgccctgtgggatcccctttc

SEQ ID NO: 892702 - DNA, 88 bp, Artificial Sequence
  ENSG00000230392_6 (sequence is synthesized)
tgggctggccaaggccagagccggctccccaacgtggaaggaggtgtggagggagaggcaccagtgggaaccggggctgcacgcagcg

SEQ ID NO: 892703 - DNA, 78 bp, Artificial Sequence
  ENSG00000230392_7 (sequence is synthesized)
ggccgggagggtgtactggggcccccagcagtgccagcccactggcgctgcgctcaatttctcaccagggctgagctg

SEQ ID NO: 892704 - DNA, 90 bp, Artificial Sequence
  ENSG00000230392_8 (sequence is synthesized)
cggctggggagggtgtactggggcccccagcagtgccagcccactggcgctgcgctcaatttctcaccagggctgagctgccttcccggt

SEQ ID NO: 892705 - DNA, 77 bp, Artificial Sequence
  ENSG00000230392_9 (sequence is synthesized)
ggcgcaggactggcatgcagctgcacctgcagtcccggtgcagaatccagtgggtgaagccagctgggtttctgagt

SEQ ID NO: 892706 - DNA, 76 bp, Artificial Sequence
  ENSG00000230392_10 (sequence is synthesized)
catggcgcaggactggcatgcagctgcacctgcagtcccggtgcagaatccagtgggtgaagccagctgggttaaa

SEQ ID NO: 892707 - DNA, 89 bp, Artificial Sequence
  ENSG00000230392_11 (sequence is synthesized)
gctatttttgtgtgtggctgcccaggttggtcttgaactcctgactcaagcaatccacccatgtcagcctcccaaagtgttgggattac

SEQ ID NO: 892708 - DNA, 120 bp, Artificial Sequence
  ENSG00000230392_12 (sequence is synthesized)
gcccagcctcttttaatatctgtatagtttcatgtattacacttggatccttgatccatttagagttaattcctgtgtgtggtgtacagattggacctcattttatatttttccagataa

SEQ ID NO: 892709 - DNA, 120 bp, Artificial Sequence
  ENSG00000230392_13 (sequence is synthesized)
ctagtcagtatacccagcaccttttacaaatctttgtcccagtaacatatatttattctttaaaaattctggtgataaatacaagtttaaggaagaaaaaaatcacaaacaaatcctacc

SEQ ID NO: 892710 - DNA, 120 bp, Artificial Sequence
  ENSG00000230392_14 (sequence is synthesized)
cagagataaccgcaaattatgttttggtagactgctctggtttaaatatttgacccctctgaaactcatgttgaaacgtactccccaatgtaacagtattaagaggtgaggcttttaaga

SEQ ID NO: 892711 - DNA, 120 bp, Artificial Sequence
  ENSG00000230392_15 (sequence is synthesized)
ggttattgggtcatgagggctgtgccctcattaatggattaatccattcatggattcatgggtaatcatgggactgggtctgttataaaagccagtttggcaagttcttgtcctctcacc

SEQ ID NO: 892712 - DNA, 120 bp, Artificial Sequence
  ENSG00000230392_16 (sequence is synthesized)
atgtgatgccctctgccatattatgatgctgtaagaagtcccttaccagaagtggtccctcaaccttggacaaccagcctccagaactgtaagaaataaatttcttttctttgtaaatta

SEQ ID NO: 892713 - DNA, 120 bp, Artificial Sequence
  ENSG00000230390_0 (sequence is synthesized)
catcatgattgtgaggcctccccagccacatagaattgtgtcatgagagccacccttcccaaagtagcacttgtgagcagaggtgatcagagggctttctgaagagtgaggagtgacttc

SEQ ID NO: 892714 - DNA, 120 bp, Artificial Sequence
  ENSG00000230390_1 (sequence is synthesized)
ggctttctgaagagtgaggagtgacttcagagggccaaaaagaagaaaagggagtgagacagtcgttaagactcctaatcccggcttatttttactgcttctcaacacagcattgcaagt

SEQ ID NO: 892715 - DNA, 120 bp, Artificial Sequence
  ENSG00000230390_2 (sequence is synthesized)
gttctggctaatgagatgtctgaaacttaaagtggaagagatgtatcatctccttttccttgctccatcctgctacctgaaaaatggatgtggtgacaagccctggaaaaccacaaggat

SEQ ID NO: 892716 - DNA, 120 bp, Artificial Sequence
  ENSG00000230390_3 (sequence is synthesized)
gagaacagcactggagagatggtgcagcgcatgatgcaattgcctaggtatctgatggctgagtagaatttctctcctccgacttttacatgggaaggaaataaaactctattttgtttg

SEQ ID NO: 892717 - DNA, 120 bp, Artificial Sequence
  ENSG00000258017_0 (sequence is synthesized)
gaggaaacccaggacttgagagagccatacaatttgaaagacgaagcaccgtgaaatgcagaaagttgtggttcggatagctcagctgattaatttcatgttgccacagtttgtcaaaca

SEQ ID NO: 892718 - DNA, 120 bp, Artificial Sequence
  ENSG00000258017_1 (sequence is synthesized)
taaggatggaggaagatagagtctaggtgcctgatgacaacatggagctgtcaagccctgcattgcctccccctggacgtctcattatgggagaaaatgaagcaatttgtttaagccaca

SEQ ID NO: 892719 - DNA, 120 bp, Artificial Sequence
  ENSG00000258017_2 (sequence is synthesized)
ttttgatgttaatgactttactttgagatatgatggaaaaatattacaggtacacatggaaaagacatgatcaccaagtgaaaacaatctaaccagaaagctttaacgtctgtcagttaa

SEQ ID NO: 892720 - DNA, 120 bp, Artificial Sequence
  ENSG00000258017_3 (sequence is synthesized)
gctgaagctgaaattctgggagcatgacatgctgcagggccaaaaggaatggataattagtattcctctccttcttcctcaccctctccttcaacagaatccacaccaacctcctcataa

SEQ ID NO: 892721 - DNA, 120 bp, Artificial Sequence
  ENSG00000258017_4 (sequence is synthesized)
tgaacaaaggcacgcttggcatacatcaggtcaaacttgtggtccaggcgagcccaggcctcagcaatggctgtggtgttgctcagcatgcacacagctctctgtaccttggccaggtta

SEQ ID NO: 892722 - DNA, 120 bp, Artificial Sequence
  ENSG00000258017_5 (sequence is synthesized)
gtgtaggttgggcgctcgatatcgaggtttctacgacagatgtcatagatggcctcattgtctaccatgaaggcacaatcagagtgctccagggtggtgtgggtggtgaggatggagttg

SEQ ID NO: 892723 - DNA, 120 bp, Artificial Sequence
  ENSG00000258017_6 (sequence is synthesized)
tagggctcaactacagctgtggaaacctggggtgctgggtaaatggagaactccagcttggacttcttgccataatcaactgagagacgttccatgagcagggaggtgaacccagaacca

SEQ ID NO: 892724 - DNA, 120 bp, Artificial Sequence
  ENSG00000258017_7 (sequence is synthesized)
tttctccatgttggtcgggctggtctcgacctcccgacatcacgtgatctgcccgcctcagcatccgaaagtgctgggattacagatgtgacctatcgtgcccagccgctaaacctcatc

SEQ ID NO: 892725 - DNA, 120 bp, Artificial Sequence
  ENSG00000258017_8 (sequence is synthesized)
tacagatgtgacctatcgtgcccagccgctaaacctcatctttaaaaaagaagaacaaaatagaacatggacaagatggctggggtcctgtggagttctagtaatcttcttacgataata

SEQ ID NO: 892726 - DNA, 120 bp, Artificial Sequence
  ENSG00000258017_9 (sequence is synthesized)
gggactgtgtaagttttgtcttctgatgtttttctttttttttttcttcttcagtgaaacagggatggggagatcattagctaaatgtaaggattggggaaggagtgtgggaggtttgtg

SEQ ID NO: 892727 - DNA, 120 bp, Artificial Sequence
  ENSG00000258017_10 (sequence is synthesized)
gagagagaatgtgtgaaatgtgggaagtttgtggagagagaatttgtgaaatagttatctctgaatggtagagtaaattaagtagggagaggtagtaggtcattcagacatctgtggttg

SEQ ID NO: 892728 - DNA, 120 bp, Artificial Sequence
  ENSG00000258017_11 (sequence is synthesized)
taaatataaaatgagatcagtcatctgggttgtatttttccctagtcaggtttacctgctcaggagaaggtataaacctgatagtgaattgggtttaaccaggatttatattttgctaaa

SEQ ID NO: 892729 - DNA, 120 bp, Artificial Sequence
  ENSG00000258017_12 (sequence is synthesized)
ttgctaaagccattgtgtcaccatttgtgaaatagaagaagatactgtagagtcactaagaagacagttgactgaatggatttataaaaacatgtagccgggcacagtggctcatgcctg

SEQ ID NO: 892730 - DNA, 120 bp, Artificial Sequence
  ENSG00000258017_13 (sequence is synthesized)
gagtaagactctgtctcaaaaaaagaaacaaacaaacaaaaaacatgtaattaataaaagcagtagacttgaaagcaaaactttacacatattttttgaataggtaaagttcccatggtt

SEQ ID NO: 892731 - DNA, 120 bp, Artificial Sequence
  ENSG00000258017_14 (sequence is synthesized)
taaagttcccatggttcaaacattgaagaggtaaaaagatacacagacataccttactttattgcacttcactttactgaacttgttttgttttgttttgtttttcttttgagacagttt

SEQ ID NO: 892732 - DNA, 86 bp, Artificial Sequence
  ENSG00000258017_15 (sequence is synthesized)
actttactgaacttcacagatgatgagagttttctctttcttttttttttttaaaacgtattgaaggtttatggcaaccctgcatc

SEQ ID NO: 892733 - DNA, 120 bp, Artificial Sequence
  ENSG00000258017_16 (sequence is synthesized)
ttttttaaaacgtattgaaggtttatggcaaccctgcatcaagcaagtctgttagcaccatttttccaacagcatttgctcacttcatgtctctgtgtcacattttggtaattttcataa

SEQ ID NO: 892734 - DNA, 120 bp, Artificial Sequence
  ENSG00000258017_17 (sequence is synthesized)
agtgagggctggaagagtccgcgcgcgcgtccacccaaggcggagtaagggcatgcgctggaaaggactgcggggactcgagggaccgcacccaggacacagttacgcgacaaaagagag

SEQ ID NO: 892735 - DNA, 120 bp, Artificial Sequence
  ENSG00000258017_18 (sequence is synthesized)
ctccggatacggcggagggcagcccgagccccccatcccttccagagtccgagaagaaatcctggcgcccctcgacctttccgggcccccgctatttacacacaccgaggtctcaccact

SEQ ID NO: 892736 - DNA, 120 bp, Artificial Sequence
  ENSG00000258017_19 (sequence is synthesized)
agggccccagcgccccgccggctcgcttttccctgcttccctgaaagcagccgggagccgcacggcttactcaccatagtggctagggattaggaggcgaaggcgacaggagcagacacc

SEQ ID NO: 892737 - DNA, 120 bp, Artificial Sequence
  ENSG00000258017_20 (sequence is synthesized)
gggtcccggttaccgtccccgacaagctaagagtcgagtcagctcctgacagaagaggttcagtgagggcgaaccccgcccagtggctccaacgccatagaagccagaaacaaacaaccc

SEQ ID NO: 892738 - DNA, 120 bp, Artificial Sequence
  ENSG00000258017_21 (sequence is synthesized)
cgcccctgcgccgccctgacacccgctgccgggggctccggcagaaactcaccatgttttcccgggaatgtgtgggtatctttccaaaacgccaaagaccgcggagggtcttcccacgct

SEQ ID NO: 892739 - DNA, 120 bp, Artificial Sequence
  ENSG00000258017_22 (sequence is synthesized)
tgccaaccttgaagccagtggggcaccaatccacaaactggatgctgcgcttggttttgatggtggcaatggcagcattgacatctttgggaaccacgtcaccacggtacaacaggcagc

SEQ ID NO: 892740 - DNA, 120 bp, Artificial Sequence
  ENSG00000258017_23 (sequence is synthesized)
agcaagcattggtgatctctgctacagaaagctgttcatggtaggctttctcagcagagatgacaggggcatatgtggccagagggaagtggatgcgggggtagggcaccaggttggtct

SEQ ID NO: 892741 - DNA, 120 bp, Artificial Sequence
  ENSG00000237626_0 (sequence is synthesized)
ggagaaggcaaagtgcagaggaaggaggagccactgctagtgggtacgaggtttcttcttggtacaaggacttctacgttctgtcctcctgcagccatctaaaatcagccagaaaggttt

SEQ ID NO: 892742 - DNA, 120 bp, Artificial Sequence
  ENSG00000237626_1 (sequence is synthesized)
aggatcccatttcctgttcttgcatcggctgtccaagctgctgttcctctctccgcagtaagagggtgtttctctccctgttcaagaggagcaccaacacttgaggacagtatcatccct

SEQ ID NO: 892743 - DNA, 120 bp, Artificial Sequence
  ENSG00000237626_2 (sequence is synthesized)
agaccttggcaagagagaccactgagtgaggcatccatggaacccaaggaagaggcctacgaagaacctgcagtcaccttctagaccattctccctcaccaaactgtcccctccagagag

SEQ ID NO: 892744 - DNA, 120 bp, Artificial Sequence
  ENSG00000237626_3 (sequence is synthesized)
ctgaggactggatcttcccatgctgacacctccagtgggaaagaaaattctagattcagctctgggtgtccaagtcattatgaaggcatatttgtcaaggtggaagaaaaggacatattc

SEQ ID NO: 892745 - DNA, 120 bp, Artificial Sequence
  ENSG00000237626_4 (sequence is synthesized)
tatttagcagtttccagggctgtgctgatcaaggagtctcactggctctccagaagagcacagaagtcctaatttgtagcctttgctgacttccgtgattccagttccctcactgacggc

SEQ ID NO: 892746 - DNA, 120 bp, Artificial Sequence
  ENSG00000237626_5 (sequence is synthesized)
agagtcgggaggaggagccgtgatgctgacatgccacaccgggtcaagaaagaagtaatgcatgactctgatttgcggctgcaggataaatccgaactatttcagggagatgtcatggag

SEQ ID NO: 892747 - DNA, 120 bp, Artificial Sequence
  ENSG00000237626_6 (sequence is synthesized)
agctcatctctcagcatcaaagttgcctctcctgacttttgaattttaagtgttctgtgtggaagaaaaatggagacaacaaatttctatgcatggattcaaagaatcctcgtaatatac

SEQ ID NO: 892748 - DNA, 120 bp, Artificial Sequence
  ENSG00000237626_7 (sequence is synthesized)
cacattacatttttcatcaatagttgaagacctatgtatgtaaatatcaggaactatcagaactccctgcaacaggaaacctgacccccaactcccccgaaatgcatcatgataaacagt

SEQ ID NO: 892749 - DNA, 120 bp, Artificial Sequence
  ENSG00000237626_8 (sequence is synthesized)
cacttgccaaaataacaaatcagcttcctggaacatgcttgctcaaaaccaggagaggagcttagagacgtcagcttgacttctgcctcgtacgcaggaagggtgaccttcaaagatcaa

SEQ ID NO: 892750 - DNA, 120 bp, Artificial Sequence
  ENSG00000237626_9 (sequence is synthesized)
acatcgtcccaaatctcccttcatcttgtagtactcctgcttgtcgtagctcctgttaccatcagagacagaatgtgctataaccttctggaaacttctactattttcctgcaacctgac

SEQ ID NO: 892751 - DNA, 120 bp, Artificial Sequence
  ENSG00000237626_10 (sequence is synthesized)
taccccttaggtgagggagtccagaatgctggcttgaaatgggagagagaaagaactgccacataatttgcaagatcttttttgaaaaagaaaaggtattaagaattccaggacagcatt

SEQ ID NO: 892752 - DNA, 120 bp, Artificial Sequence
  ENSG00000237626_11 (sequence is synthesized)
aggaatgtattaaaccagaataaggaacagcggagcttccccctaagaccctggtgtgtttctgcatcaggaaaccttctctcctgcaatgtgtcgtttaagattgaacaacatggtgcc

SEQ ID NO: 892753 - DNA, 120 bp, Artificial Sequence
  ENSG00000237626_12 (sequence is synthesized)
tttgccagaagttaacaggaaacccaaaaggagatgagccagactggttagttcagaagagaatcgttggggaagacaatgggagctgctgtttgaatgtggccctgagattatttgtgc

SEQ ID NO: 892754 - DNA, 120 bp, Artificial Sequence
  ENSG00000237626_13 (sequence is synthesized)
ttttcaatcccatgttaccaaaacacatttcaagctggcctataaatcacaccttgtgcataattttaagtggataaatatttgtcgcccaagtgaatgatgcttccagctttcaaaaaa

SEQ ID NO: 892755 - DNA, 120 bp, Artificial Sequence
  ENSG00000237626_14 (sequence is synthesized)
ggaaggaggagccactgctagtgggtacgaggtttcttcttggtacaaggccaagatccaactcagaagactagaaaatgaacaacccagcaaacttaggagatggggaaggaagggaat

SEQ ID NO: 892756 - DNA, 120 bp, Artificial Sequence
  ENSG00000237626_15 (sequence is synthesized)
catccgtcatgtcagaagagagttggggacaatccctggattatttcacctttgccctgctggtatagacaatgtgtgttatggctgggtgacttgctgacttttactctgagcaacagc

SEQ ID NO: 892757 - DNA, 120 bp, Artificial Sequence
  ENSG00000237626_16 (sequence is synthesized)
tttgtcagagtaaactaaaacagagacttcagagcataataaaatatgacattttttctgtatagaactaaagacacgggggagagagaacaacttaattaaaaagacagtgccctttca

SEQ ID NO: 892758 - DNA, 120 bp, Artificial Sequence
  ENSG00000237626_17 (sequence is synthesized)
tttagaggacaacttctcttcactgaggacaacacagaatcctggagatatttttgatgagtagtagacagaatgtgctataaccttctggaaacttctactattttcctgcaacctgac

SEQ ID NO: 892759 - DNA, 120 bp, Artificial Sequence
  ENSG00000237626_18 (sequence is synthesized)
gcagttttttagaggacaacttctcttcactgaggacaacacagaatcctggagatatttttgatgagtagtatgagagagaaatacattgaaagaggatgtgcttgacctctgcagact

SEQ ID NO: 892760 - DNA, 120 bp, Artificial Sequence
  ENSG00000237626_19 (sequence is synthesized)
acatgagatttgggtggggacacagacacaaactgcatcacggagtgtgtttcctttcatttgaagagaatcgcattcagggtgatttccaagtgtctccagacttgaagaccactgcct

SEQ ID NO: 892761 - DNA, 120 bp, Artificial Sequence
  ENSG00000237626_20 (sequence is synthesized)
cactgcctggtagcttctagtggatggagatgatgtgcataagcccttctggtcgaagacccccaggccagatctttggagggcccttcttggtcttcttggaaccaggacttctacgtt

SEQ ID NO: 892762 - DNA, 120 bp, Artificial Sequence
  ENSG00000237626_21 (sequence is synthesized)
tatttagcagtttaatattactcctatcatggtttaagtataggactgacacaccacctcaaagcatgtcaggaattgaaagcatcttcttttttatatttgatacaaaatgtatcctgg

SEQ ID NO: 892763 - DNA, 120 bp, Artificial Sequence
  ENSG00000237626_22 (sequence is synthesized)
tcttgctgtctgctgctggccccgtgctagtttagaggacaacttctcttcactgaggacaacacagaatcctggagatatttttgatgagtagtaaagaagtaatgcatgactctgatt

SEQ ID NO: 892764 - DNA, 120 bp, Artificial Sequence
  ENSG00000237626_23 (sequence is synthesized)
aacaccagaggagctgctcccagatggagtggacttgccatacaaagcaagagagtcccagcagggcagggatctgtagtggatggtgatgcagcacccaggaaacctcatcaggatgta

SEQ ID NO: 892765 - DNA, 120 bp, Artificial Sequence
  ENSG00000237626_24 (sequence is synthesized)
gctactccttctcccactgcgggtggtaccagctgctgaaggctcacagctgagactctctaaggaaaggggacacatagcccaggtgatgcccactctccagggacagcctgcaccagt

SEQ ID NO: 892766 - DNA, 120 bp, Artificial Sequence
  ENSG00000237626_25 (sequence is synthesized)
gactagacgcaggaggaagatgcccactgcctggcttctatttgtgatggcctctgaagggctatctcagatccactgctgcctttgggggaatggaggtccttgtggagaccacattcc

SEQ ID NO: 892767 - DNA, 120 bp, Artificial Sequence
  ENSG00000237626_26 (sequence is synthesized)
acctgaaatgcctctgcccaatcctgctttcctgacttatggttgttgttcccaagaaaacaccctcataaatcatttccagggaacccaactgaagccataaatccctccagaaaaaaa

SEQ ID NO: 892768 - DNA, 120 bp, Artificial Sequence
  ENSG00000237626_27 (sequence is synthesized)
ctgatcgtatgtgatggggggtgaggaggagatactttgcatggcccccagtgacaaagaagaggcccttagctatagctactcttgtaaagaagtaatgcatgactctgatttgcggct

SEQ ID NO: 892769 - DNA, 120 bp, Artificial Sequence
  ENSG00000253848_0 (sequence is synthesized)
gagaaattcagagacacattcagggctcagccggtagatgtgctgagaatcttcggtagacaactgtcgaagtacggcggacaaactttaaagatttccagaagttaaggaaagagatgc

SEQ ID NO: 892770 - DNA, 120 bp, Artificial Sequence
  ENSG00000253848_1 (sequence is synthesized)
ttaaggaaagagatgcaaaagcagagaaaaggcgacttgtcttttcagtgttgcattactgtgtggcgtaaaacatcttctaaaaagctcctgtggccgggcacggtggctcacgtctgt

SEQ ID NO: 892771 - DNA, 120 bp, Artificial Sequence
  ENSG00000253848_2 (sequence is synthesized)
ccccagaaaaacaaaaaccaaaacatttagatccagaaatgcctgagtgaagatgaactttggtgaactccccttacaatcctgctaaaatccccacccagggaagagcttattcaccat

SEQ ID NO: 892772 - DNA, 120 bp, Artificial Sequence
  ENSG00000253848_3 (sequence is synthesized)
tttctatacatgcaacatgtgtagaagcatgatcggcaattgtgtcttcgctgcctttactccacctgtacatacaatgactgagctaaccagcccaataaaagcactgttttcactgtt

SEQ ID NO: 892773 - DNA, 120 bp, Artificial Sequence
  ENSG00000253849_0 (sequence is synthesized)
ctttccatgctttgtggcttatcactgagctgtccatggagattctacatggatcaaagatgaggctgtctgcaaactgaggattaaagaaaccagtctgagtcccaaaaactgaagaac

SEQ ID NO: 892774 - DNA, 120 bp, Artificial Sequence
  ENSG00000253849_1 (sequence is synthesized)
cgtcttttcacatttctctgcctcctttttatattctagccatgctggcagctgatcagatggtgcccacccagattaagggtggttctgactttcccagcccagtgattcaaatgttaa

SEQ ID NO: 892775 - DNA, 120 bp, Artificial Sequence
  ENSG00000253849_2 (sequence is synthesized)
tcttggcaaaatcctcacagatgcacccaggatcaatactttgtatccctcaatccaataaagttgatactgagtattaaccatcatatctatgttactaataaaccagctacaaatgaa

SEQ ID NO: 892776 - DNA, 120 bp, Artificial Sequence
  ENSG00000253844_0 (sequence is synthesized)
gacaaaggatcaagagatggtttccacactggcaaggagtaatcttggagacaggaagagactggtgattcaagagagagtagacagaagaaggcgctgtctgggggagacaggttaata

SEQ ID NO: 892777 - DNA, 120 bp, Artificial Sequence
  ENSG00000253844_1 (sequence is synthesized)
ttcatctgtagcctgagtgaccccaaaaagatgacactcttctgtccaccaaaaccttccagaggcttcctgtgctcacttgaagtaaaatccaaagtgctgactgtggttaccagctcc

SEQ ID NO: 892778 - DNA, 120 bp, Artificial Sequence
  ENSG00000253844_2 (sequence is synthesized)
gtctgcatggttcctgagcatcccaagcacattcccacctcaaggccttggtgcttgcagttcatctgcttctctcctggtctatgcctggctggttcttatttcttttgaattcggacg

SEQ ID NO: 892779 - DNA, 120 bp, Artificial Sequence
  ENSG00000253844_3 (sequence is synthesized)
aggtgcacctcatgagagaggccttccttgacctccctcctccattcctctcacaggccccatctgacatgcttgccctccccctcccctacccccatccccttgtgagccccatgagag

SEQ ID NO: 892780 - DNA, 120 bp, Artificial Sequence
  ENSG00000253844_4 (sequence is synthesized)
aagggcctctgtccttaggtagatgtgattccccagaacccaggacaggacagccacacaggaggaaactgacacacttttcttaaatgatggaataaagtactgactgtgtttcaagca

SEQ ID NO: 892781 - DNA, 120 bp, Artificial Sequence
  ENSG00000259802_0 (sequence is synthesized)
ctgtcggtcggcggctaaggaggggaggcacctgcatctggggcgcggcgaatcctcgcgtgcgccaggccgcctggggtagtcgccgagactgcgccggccagcggggccgaaacctaa

SEQ ID NO: 892782 - DNA, 120 bp, Artificial Sequence
  ENSG00000259802_1 (sequence is synthesized)
tcaggagctgagctttgatggcggcttctggagggacaaagaaggcgcagagcggtgggaggaggctgcgagaacctagctcccgccccagccgacgtgcgagacaaaggccccggcgcg

SEQ ID NO: 892783 - DNA, 120 bp, Artificial Sequence
  ENSG00000259802_2 (sequence is synthesized)
gggctcttcggaaggccgggaggttcctgtgacaatgcgagtctgcgccccacgctcccgcaccgtgatgccgaggccaaatggctagagtgggcccaggcatcagcatttctgtttggc

SEQ ID NO: 892784 - DNA, 120 bp, Artificial Sequence
  ENSG00000259802_3 (sequence is synthesized)
caaaagctgacttcaccaaaattactcccagggagacttctgcatttggctggaaggacatttgagtaaaccgctgaggctggtggttgaaacataatcctctaagggagatcggttccg

SEQ ID NO: 892785 - DNA, 120 bp, Artificial Sequence
  ENSG00000259802_4 (sequence is synthesized)
ataccctgagttagggacgcttgcctgggcagagctaaggggagaatgatcaaaagccaagctctgtccccgtcagcacgtcaccctccctcactgtaatccctgactgttttctctaaa

SEQ ID NO: 892786 - DNA, 120 bp, Artificial Sequence
  ENSG00000259802_5 (sequence is synthesized)
tgaagaattatttagagaatataaattagaagggccgccacgtcagaattgcctgagtgggagcagtctttccagcctcgaaaaatgtttaaacaatatgcagatgacctagcacaaata

SEQ ID NO: 892787 - DNA, 120 bp, Artificial Sequence
  ENSG00000259802_6 (sequence is synthesized)
aagaatgctagcaaccgctgttatgtgtgagcggtggaattgggagggctcttcccccaatcttcatcaaacagagtaaggtttagaataaaaataatgaaatacagtctttcaaaaaga

SEQ ID NO: 892788 - DNA, 120 bp, Artificial Sequence
  ENSG00000248261_0 (sequence is synthesized)
agaactctggctgagatacatgaggaacaagatgcagtggaagaacaccagcgatcccaggagacgctcaacagaataaacacacttgagacatcaaagaaatatcatattaagagaact

SEQ ID NO: 892789 - DNA, 120 bp, Artificial Sequence
  ENSG00000248261_1 (sequence is synthesized)
gttcagaaaatggtgaagactggcagtccaaaatcaaggttggtgtatggtgaagcctcttctcctggctttcagatctccagcttctgtgcccttgcatggctttctttggtgtgaatg

SEQ ID NO: 892790 - DNA, 120 bp, Artificial Sequence
  ENSG00000248261_2 (sequence is synthesized)
aatgttaccttctaaggaaaaagagtctttgcagatataattaaattaaagatctttatatggagagattatcctgcattttatggatgggccctgtatgtaatcaccagtgccctcata

SEQ ID NO: 892791 - DNA, 120 bp, Artificial Sequence
  ENSG00000248261_3 (sequence is synthesized)
agaaaggagatttcatgcacacagaagaggaagaggcaatgtgaccatggaggcaaagattggagtgatgtggacacaagtcaaggaatgtcagtggtcactagtagctgaaagaagcaa

SEQ ID NO: 892792 - DNA, 120 bp, Artificial Sequence
  ENSG00000248261_4 (sequence is synthesized)
agaatggattcccctagtgactgttgatggggcacagccctaagttttgacccagtaataatgattctgggcctctagcctccagaatgatgagaaaataaatttctgttttaaactacc

SEQ ID NO: 892793 - DNA, 120 bp, Artificial Sequence
  ENSG00000248262_0 (sequence is synthesized)
gttctaatacttttgagctactgaatctgatccaggacagcttacctttggacactgactagaaacctgtattccttaagtgcctaagatccctggtgccaagacacttggggacctctg

SEQ ID NO: 892794 - DNA, 120 bp, Artificial Sequence
  ENSG00000248262_1 (sequence is synthesized)
agagtaaggtcagtcagtccattatttattcaaggatttttggaaagttgaaaaaagcatggcttgactaatgacagaataaaatttaataggactcatatacagttctggtaaaataag

SEQ ID NO: 892795 - DNA, 120 bp, Artificial Sequence
  ENSG00000248262_2 (sequence is synthesized)
ataaagttttcagccactactaagagatttttattttttttaataataaaaaaagaagattacacagacatcccccattattatgtgtttgtttctctcttgaaagtctgccttctggca

SEQ ID NO: 892796 - DNA, 120 bp, Artificial Sequence
  ENSG00000248265_0 (sequence is synthesized)
ttttctctcccattgcctttatattcggcagcgcctctgacctctcccccacccccatctctgaccctcccaagccagcccttgctcagccctggtctccagataggatgccactgcttt

SEQ ID NO: 892797 - DNA, 120 bp, Artificial Sequence
  ENSG00000248265_1 (sequence is synthesized)
tgtaggactggggatttcttgcccagagtaatgggagaggcaaggcgcatgaatgcctgtaagtgcattgtatccctctctcttcaatggctaagtaaaaagaagacgggtgaaatgtcg

SEQ ID NO: 892798 - DNA, 120 bp, Artificial Sequence
  ENSG00000248265_2 (sequence is synthesized)
acaccaatcttccagggttccttctctccaagcgccaggagatccccacaggccaaagatcccattgacacaactgcaaggtccatgagggcagaggcagtgtctgttgctgggtgagtg

SEQ ID NO: 892799 - DNA, 120 bp, Artificial Sequence
  ENSG00000248265_3 (sequence is synthesized)
actggattgagctcaaagcatgtctgaagactgaaatgggccaggcaaggagatggaaactggaggcctggattctggctcggtcatacctccaagaacgtaactttccctcgaccctgg

SEQ ID NO: 892800 - DNA, 120 bp, Artificial Sequence
  ENSG00000248265_4 (sequence is synthesized)
ggagtcttcacagaccttccttctgctgtgaggcactggagaatcacttgagaccagactcaggaaactcttccctgatgggaagacattcattcatccactccacatctctgaagcccc

SEQ ID NO: 892801 - DNA, 120 bp, Artificial Sequence
  ENSG00000248265_5 (sequence is synthesized)
aagagaaggatctgaatcccctagtctgaagagtcagcaagtgtccaacatagcaatcttgataaaaagggagaattgataaaggagggagcagccccacctcagtaacaagagggagga

SEQ ID NO: 892802 - DNA, 120 bp, Artificial Sequence
  ENSG00000248265_6 (sequence is synthesized)
aaattccagctagtacatgtacttaacatgaaagcagacatgtgccaagaccctgctttcatggatattaggtgttcccaaatataagaaacacccattcttgcccacaggcctcactgg

SEQ ID NO: 892803 - DNA, 120 bp, Artificial Sequence
  ENSG00000248265_7 (sequence is synthesized)
atactatccaagatgtctagagaataagaggaaagagagaatcataatatccaaaaggtggaaacaacccaaatgttcaccaataggtgaacggataaacaaagtgtgatatatccatac

SEQ ID NO: 892804 - DNA, 120 bp, Artificial Sequence
  ENSG00000248265_8 (sequence is synthesized)
aatggaatattagtcagccctgaaaaggaatgaagtactgataaatgctacaacatggatgaactttgaaaacactatgctcaatgaaagaagctagtcacagaaggtctcttattatat

SEQ ID NO: 892805 - DNA, 120 bp, Artificial Sequence
  ENSG00000248265_9 (sequence is synthesized)
gatgccattcatatgaaagtccagaatagggaaatctacagagactgaaagtacattagtgttgttaagggcaagaaggaatatggggggatagggaggtgatagctaaaggttacaaga

SEQ ID NO: 892806 - DNA, 120 bp, Artificial Sequence
  ENSG00000248265_10 (sequence is synthesized)
tttctttttgaggtgatgaaaatgttctaaaattaactatggtgatggttcgacatacttgtgaatatactaaaaccattgaattgtacatttcaaatggtgaattgtatgacacatgaa

SEQ ID NO: 892807 - DNA, 120 bp, Artificial Sequence
  ENSG00000248265_11 (sequence is synthesized)
ttatacctcaagaaagttgctttttaaaaagacagcgtaaggggtggggggcagttgagatgaagcaggaaaactgtgatcagaagcaaagctcaggggctgtctggcctggctgcccca

SEQ ID NO: 892808 - DNA, 120 bp, Artificial Sequence
  ENSG00000248265_12 (sequence is synthesized)
agtcaaagcctgcatttcatacaggcaatgttagggtagcccccaagccatgattcggaaagataaattgaccccagatggaatagggctgggtcccttctcccttgacagctccctttc

SEQ ID NO: 892809 - DNA, 120 bp, Artificial Sequence
  ENSG00000248265_13 (sequence is synthesized)
tgtgttttttctggcacaagaaactctgtcatcttgtataaataggagaaatttatggcagttttccctcttcttctccctggtgggctactaggaaaggtctagggggaggagggagcc

SEQ ID NO: 892810 - DNA, 120 bp, Artificial Sequence
  ENSG00000248265_14 (sequence is synthesized)
tgaaattccaaaaatataaatgtggaaagactggagggggtcgaggagtctctttgcctgccttagctctggccccagctctcctttccctttgcatgtttgaccatctgggtgatgagg

SEQ ID NO: 892811 - DNA, 120 bp, Artificial Sequence
  ENSG00000248265_15 (sequence is synthesized)
agggtagagaactggtgcagcccgtcctctctgcaagcccaaaagagatgggtcccaaagcagatatccgacaggaggggcacaagggaaatcaaggaaataggcttggctgtcccatga

SEQ ID NO: 892812 - DNA, 120 bp, Artificial Sequence
  ENSG00000248265_16 (sequence is synthesized)
gtcctcgatttagaaagattgacagagaaactaagtgtgtgaccttaagcaagtcatatcttgtctccgggcctcacctgtaaaaagagggaggggactgaatttatcaggggttttcaa

SEQ ID NO: 892813 - DNA, 120 bp, Artificial Sequence
  ENSG00000248265_17 (sequence is synthesized)
atgattttaactctggggtccttccttcaaataaaaccgtatgcagtgacccaacatgaacatgagtagtaggctgctgagcttcttgaaggtaggaatgggagtctcagggccctgtgg

SEQ ID NO: 892814 - DNA, 120 bp, Artificial Sequence
  ENSG00000248265_18 (sequence is synthesized)
tgactggcgagaggcttgtccaagcacaagatgatctccatggcttttccagccccgtcctcaggagggatttgcccccatggtgaagaggctcagttctgcacacccagtgggcttgaa

SEQ ID NO: 892815 - DNA, 120 bp, Artificial Sequence
  ENSG00000248265_19 (sequence is synthesized)
atccagctccaccccctcctgtgtgtccctcagcacataacttaccttccttgaacctgtttcctcgtgtgtaaattggaataatagtaacacatatctcagaggattgtcacatagatt

SEQ ID NO: 892816 - DNA, 120 bp, Artificial Sequence
  ENSG00000248265_20 (sequence is synthesized)
acactaaataatgtgcatagagtccttcgcatacttatctggcccaataaatattattatagttattccgtgatctgatgtaatcatttttttattttgagacagaatctcattttgtag

SEQ ID NO: 892817 - DNA, 66 bp, Artificial Sequence
  ENSG00000248265_21 (sequence is synthesized)
taatcatttttttattttgagacagaatctcattttgtagcccagactggtgcacagtggcatgat

SEQ ID NO: 892818 - DNA, 63 bp, Artificial Sequence
  ENSG00000248265_22 (sequence is synthesized)
ccacacagtgctgggattacaggcgcaagccattgcacctggcccgatacaatctttttaatt

SEQ ID NO: 892819 - DNA, 120 bp, Artificial Sequence
  ENSG00000248265_23 (sequence is synthesized)
cgcaagccattgcacctggcccgatacaatctttttaatttgaaatatctggtgtgagaaggtgaattagaaaggatgacagcaaaactgctataacacaaaggccccaaaacacagtag

SEQ ID NO: 892820 - DNA, 120 bp, Artificial Sequence
  ENSG00000248265_24 (sequence is synthesized)
catatagaaaacagaagtttatttctcacttagtctgggaggaagcggttccagacagcaggcagctctgttcctcctagtcagtcagggacgtgtgttcctttcatacctttgctttgt

SEQ ID NO: 892821 - DNA, 120 bp, Artificial Sequence
  ENSG00000248265_25 (sequence is synthesized)
acctgtctcaggcacatctgcccagctcatgaaagagagaacacaaaggagaatttacccaatgtcatcaggctttgaggacatgcttgcctcacattcccctgtgtctacacctggcaa

SEQ ID NO: 892822 - DNA, 120 bp, Artificial Sequence
  ENSG00000248265_26 (sequence is synthesized)
gcttgcctcacattcccctgtgtctacacctggcaacaagagcagctgggaaatggagtgtccagctgggtgtctctctaccctcgtgcagcaaggaaagaagagattttagtggacaac

SEQ ID NO: 892823 - DNA, 120 bp, Artificial Sequence
  ENSG00000248265_27 (sequence is synthesized)
gggcagtcttaatccagggctcaaacccacacccgagctgtcctcttcctcttctcttcccaaaggaagggaaataaagtctacagcccagaaaacaatgtgaccacccatcccctaccc

SEQ ID NO: 892824 - DNA, 120 bp, Artificial Sequence
  ENSG00000248265_28 (sequence is synthesized)
caatcaggtccctgccattcatcccaagatcagcagtcttgggaaagtggcttggaagcctccctccagaaagaccacccttttgtccatcttcttcacatgggtggatgtgagaaaagt

SEQ ID NO: 892825 - DNA, 120 bp, Artificial Sequence
  ENSG00000248265_29 (sequence is synthesized)
ttctctccccactgcctgcctgccactccctgtctcagtttcagctcacgctctagccctttgttcccagtcaccaagagtgactacaaatgcgggggaacaggaggacctgaaacttca

SEQ ID NO: 892826 - DNA, 120 bp, Artificial Sequence
  ENSG00000248265_30 (sequence is synthesized)
tggaaattgagactgggacacagaagccatgctcagaggcagcctaggtgagggttctgatgccaggaaatccagctactactgtgtagcctaaagcggggattaagctctcagaacttc

SEQ ID NO: 892827 - DNA, 120 bp, Artificial Sequence
  ENSG00000248265_31 (sequence is synthesized)
aatgaactcttttggaaataggggtaagaagcccacttgtcagggctgttgtgaacatcaaatgtgatcatgtatgtacctagtacatagtatgccttcaataaatggtaaggcaaaccc

SEQ ID NO: 892828 - DNA, 120 bp, Artificial Sequence
  ENSG00000248265_32 (sequence is synthesized)
ccgcctggcctggcccgcgagatccctgccgctccagttcggaatctgggatccgcaggctcccagatccgcccctggcccggctccgacccgcccgtcagccgcctcccactcagcgtt

SEQ ID NO: 892829 - DNA, 120 bp, Artificial Sequence
  ENSG00000248265_33 (sequence is synthesized)
aattaaaacttgcgagatggagaggctggcgcggacggctccgttttatttgcagcatctttcatgctgctgacgatcgtaaagggctttaatattgaaatatgggccattttcccagct

SEQ ID NO: 892830 - DNA, 120 bp, Artificial Sequence
  ENSG00000248265_34 (sequence is synthesized)
ccagccctcgccgcgctctctccgcacccccacacccagccaccccgcgcttgatgaaagagcccctgcaaatccattaaggagagataattgaaaactccggggtaatatttaagaccg

SEQ ID NO: 892831 - DNA, 120 bp, Artificial Sequence
  ENSG00000248265_35 (sequence is synthesized)
cgtgccgacgcggggtggagggcctaactgcgcccgctttgtccgtcagtgctggtgcgtgccagtccctagcgctctaggcccaccaaggccccgccgacgcccagccaaggcccgccg

SEQ ID NO: 892832 - DNA, 120 bp, Artificial Sequence
  ENSG00000248265_36 (sequence is synthesized)
tcttagcggtgcctcctcactccctgcactcaaagggctggctctgcgctaacctggctgtgcctggagacccgacttgcctggagacccgagttccaaaaggagccacagggcacgctg

SEQ ID NO: 892833 - DNA, 120 bp, Artificial Sequence
  ENSG00000248265_37 (sequence is synthesized)
tgtgacagatggattagggccagcatgaacgggggccaaagcatcttgtcccactgcttcagcttcggtttggtgcaccagcatcaggcactgctcaagcttctgagcacggcatcccct

SEQ ID NO: 892834 - DNA, 120 bp, Artificial Sequence
  ENSG00000248265_38 (sequence is synthesized)
ctgcctgcaagcttttccctccagcactttctacttgcggaactgctgttcctctttcaaaaccaacccagttccaccccaaaactgcaaggtccatgagggcagaggcagtgtctgttg

SEQ ID NO: 892835 - DNA, 120 bp, Artificial Sequence
  ENSG00000259805_0 (sequence is synthesized)
atgatactccccctcatttctcaatgattttagctctagatcacagtccctctctcctacactaatcttgtcttgattctttgtgatttcaatacacacatagatggttcttccagctgg

SEQ ID NO: 892836 - DNA, 120 bp, Artificial Sequence
  ENSG00000259805_1 (sequence is synthesized)
gctcagttcttgaccttctcttctcttgcctctccaactccctgtcataacctttcattaccagtaagtccaacccatctataatcttcatgtcatatatcccactccctgacactgaca

SEQ ID NO: 892837 - DNA, 120 bp, Artificial Sequence
  ENSG00000259805_2 (sequence is synthesized)
ataatcttcatgtcatatatcccactccctgacactgacacacactgtcccagtccacacgggctgctatcacaaaatacgagaggctgcgtatagcttataaacaacagaaatttattt

SEQ ID NO: 892838 - DNA, 120 bp, Artificial Sequence
  ENSG00000259805_3 (sequence is synthesized)
tcacagatggcatactctcactgtatcctcatgtgatggaagcagcaaggcagctctctcaggcctcttttataaggaccgctttagtttgtctgtcccctccaaaactcatgttgaaat

SEQ ID NO: 892839 - DNA, 79 bp, Artificial Sequence
  ENSG00000259805_4 (sequence is synthesized)
gctttagtttgtctgtcccctccaaaactcatgttgaaatttaatttcgaccaggtggggtggcttacactctgagctt

SEQ ID NO: 892840 - DNA, 120 bp, Artificial Sequence
  ENSG00000248268_0 (sequence is synthesized)
gctcaagaccccagttttgatacatttataaggctagcgacaagtggtacaacctgtgatgctgggcagcagcagagaactacagctcccagtcagccacatgatcacaaggataaacaa

SEQ ID NO: 892841 - DNA, 120 bp, Artificial Sequence
  ENSG00000248268_1 (sequence is synthesized)
ctgatactctgcagtgtgatgtgctgccaggtgattttgcccaattgtgggctaatggctgctggaatttatgatctcctaccaaaactgaagtaactgtaactcttactatggggaact

SEQ ID NO: 892842 - DNA, 120 bp, Artificial Sequence
  ENSG00000249792_0 (sequence is synthesized)
taggtgtcaagtagttttctaaagtgttaagtttatgagatttgttttacttcatcttctcactaaaacttgaaattatctgttttttctttcctatttttgtttcactcataaagctct

SEQ ID NO: 892843 - DNA, 120 bp, Artificial Sequence
  ENSG00000249792_1 (sequence is synthesized)
ttgatctattgtatagctttgggacataagttgcttttcttaggtaacatcaaacatgttttaaagttattcattgtctatttagttagcttacttttagagtgactgtctacacctgtg

SEQ ID NO: 892844 - DNA, 120 bp, Artificial Sequence
  ENSG00000249792_2 (sequence is synthesized)
gaagctggaaactatcattctaatttttttgattcttaaattatttttaatcttctgagtataacattattgactttttgtatcctgtgtaataaatatttgcttacaccaatatcataa

SEQ ID NO: 892845 - DNA, 120 bp, Artificial Sequence
  ENSG00000249792_3 (sequence is synthesized)
tctttttttctttttttttctaaatgctcacttgtttaacctttcagatttaggactgtaatacataaaggaaattttttgtatatgttgtcaataatatactaaaaccattttttccta

SEQ ID NO: 892846 - DNA, 120 bp, Artificial Sequence
  ENSG00000249791_0 (sequence is synthesized)
ctgaacattttgaaacagaaacccgagaataatgccttgcggggagaaaagcttcagattaaaatttcggaataaaaataaggagaaaaataattttacccaaacaccactttgcctttc

SEQ ID NO: 892847 - DNA, 120 bp, Artificial Sequence
  ENSG00000249791_1 (sequence is synthesized)
aaattcaagagtctcaaataaccatttaaatactgtgaagttaaagaattttcttaattataaataaattgtgcttaagggaaacctggaagctttagtaagtttctaatttttaaaatt

SEQ ID NO: 892848 - DNA, 120 bp, Artificial Sequence
  ENSG00000249791_2 (sequence is synthesized)
atgtgcaccaccttatttatattttctaaatgactattccaagtgggaaataaatacagtaatacagttatgtcttcacctgccaaccaacaccacagttatggtccaatgaactgtatt

SEQ ID NO: 892849 - DNA, 80 bp, Artificial Sequence
  ENSG00000249790_0 (sequence is synthesized)
atgagctgtaacactcaccacgaagggccgggaggaacgaacaactccagatgtgccgccttaagagctgtaacactcac

SEQ ID NO: 892850 - DNA, 120 bp, Artificial Sequence
  ENSG00000249790_1 (sequence is synthesized)
ttcgcctatcaccaagcggtgagaccatcacctatagctgagcggtgagaccatcacctatagctgagcggcgagaccatcacctatcaccaagcaatgggaaacactcaggcatcaaca

SEQ ID NO: 892851 - DNA, 120 bp, Artificial Sequence
  ENSG00000249790_2 (sequence is synthesized)
agccattgggaccaatttgatccacaaaccttgaaaaagaggcggctcatttttttctgcactatggcttgggcccaatattctctctctgatgaggaaaaatggccacctgagggaagt

SEQ ID NO: 892852 - DNA, 120 bp, Artificial Sequence
  ENSG00000249790_3 (sequence is synthesized)
accatcacctatagctgagcggcgagaccatcacctatcaccaagcaaatcaaggccatcaagctacagatgggcttacaaatggaacccaaaatgagttcaactaacaacttctaccaa

SEQ ID NO: 892853 - DNA, 120 bp, Artificial Sequence
  ENSG00000249790_4 (sequence is synthesized)
gggcccctggaccgacccactggcacttcccctggcctagagttcccctctgaaggacactacaactgcaaggccccttcttcaccccatccagcaggaagtagctagagcggtcatcgg

SEQ ID NO: 892854 - DNA, 61 bp, Artificial Sequence
  ENSG00000249790_5 (sequence is synthesized)
gccctcactcactcttggcacctcctctgcccgggctcccactttggtggcacttgaggag

SEQ ID NO: 892855 - DNA, 77 bp, Artificial Sequence
  ENSG00000249790_6 (sequence is synthesized)
gccaaggccagagccggctccctcagcttccagggaggtgtggagggagaggctcaagcgggaacgggcgtgggctt

SEQ ID NO: 892856 - DNA, 90 bp, Artificial Sequence
  ENSG00000249790_7 (sequence is synthesized)
gtgggcttggcgggccctgcactcagagcagccagccggccctgccggccccgggcagtgaggggcttagtacctgggccagcagctgtg

SEQ ID NO: 892857 - DNA, 72 bp, Artificial Sequence
  ENSG00000249790_8 (sequence is synthesized)
gcccaccggcgctgcactcgatttctcaccgggccttagccgccttcccaccccctccatgggctcctgtgc

SEQ ID NO: 892858 - DNA, 78 bp, Artificial Sequence
  ENSG00000249790_9 (sequence is synthesized)
ggcgcacgcatcaccgggtgaagccagctgggctcctgaatctggtggggctttggagaacctttacaatccctgagc

SEQ ID NO: 892859 - DNA, 85 bp, Artificial Sequence
  ENSG00000249790_10 (sequence is synthesized)
ccggtgcgggattcaccgggtgaagccagctgggctcctgaatctggtggggctttggagaacctttacaatccctgagctagac

SEQ ID NO: 892860 - DNA, 120 bp, Artificial Sequence
  ENSG00000249797_0 (sequence is synthesized)
aggctggaagtccaagatcaaggtgctatcagggttggtttcggctgtggcctctcttcctggcttgtagacagctatcttctcgcagtgtcctcacgtggcctctttgtgtgaagttaa

SEQ ID NO: 892861 - DNA, 120 bp, Artificial Sequence
  ENSG00000249797_1 (sequence is synthesized)
gaagttaaaaatgaacagatcaaccttttactcttctctgaaaaatatagtgaaattaataatcaagaacgattttctgaaatgaaaacatccgaacagcatactgcaaagacattcagg

SEQ ID NO: 892862 - DNA, 120 bp, Artificial Sequence
  ENSG00000249797_2 (sequence is synthesized)
cagagccaccattgccaatttcaccactgtctttcaccaagttgattcattttgaactggctccagcaatctactcagagttgacctcagagcaaaaaattgaagtgggaagctgctaaa

SEQ ID NO: 892863 - DNA, 120 bp, Artificial Sequence
  ENSG00000249797_3 (sequence is synthesized)
gaatgtgcttgactaaaacaaggcaataagcaaaaggaagtcatagcatccagaaaatgggatccatcatgcgcacaaagaaaaggtgaagaaaatttccaggatgttcagaacccacca

SEQ ID NO: 892864 - DNA, 120 bp, Artificial Sequence
  ENSG00000249797_4 (sequence is synthesized)
aaaacgaaagattctggtccagatcagaagagagggaaacactctgaaaaagtccctcaaatacaaaattaaacagagtttaaatgatgtgcttgaccacaataaaaggcttcttgctct

SEQ ID NO: 892865 - DNA, 78 bp, Artificial Sequence
  ENSG00000249797_5 (sequence is synthesized)
aagctcacaaaatctgatggctttataaacaggagtttgcctgcacaagctctttttttctttctggccgctgtccac

SEQ ID NO: 892866 - DNA, 120 bp, Artificial Sequence
  ENSG00000249797_6 (sequence is synthesized)
tatagagaaaatatgagtctcaccacactagaagcaacatatgcaaaatccatcaaacacaccataaaatcaatgtgggagtaacaacaccttggcctactgctccctgaaaagtttttc

SEQ ID NO: 892867 - DNA, 120 bp, Artificial Sequence
  ENSG00000249797_7 (sequence is synthesized)
ggataatatctctgttcagcaaactgagatcttttgagaatcttaacaaatgtatacccctccctctcaccttttcctctctggtgtatttcataggcagctttgctaactgactgcact

SEQ ID NO: 892868 - DNA, 120 bp, Artificial Sequence
  ENSG00000249797_8 (sequence is synthesized)
actacaaatagattctgtcactttagaaataggatttttccttttataggcagattgatggactaagtgtcaaggttttagaacagtagcatgactggggcagacactataaaccataaa

SEQ ID NO: 892869 - DNA, 120 bp, Artificial Sequence
  ENSG00000249797_9 (sequence is synthesized)
tccagtattgacaaatgttctagccaatccagattttctatttgttaaattgcctttatgaagtcatacttgtgcagcacagaatatggaaaataattgacaagttctgagaagccagtt

SEQ ID NO: 892870 - DNA, 120 bp, Artificial Sequence
  ENSG00000249797_10 (sequence is synthesized)
actgagctcatagtttaataaagaaaatgttaatgaacacttgagtattataaattgttataagaagattctctcttcattgtttgccaaagtatgctaataattcttgactgactaata

SEQ ID NO: 892871 - DNA, 120 bp, Artificial Sequence
  ENSG00000249797_11 (sequence is synthesized)
agcagaggtcattctagatctacagattttgaaagttggaactttttatttgtaccttttgtttcacttgtcaaagtgagctagtaacatagaataaactataaaaaatatgtaacagaa

SEQ ID NO: 892872 - DNA, 120 bp, Artificial Sequence
  ENSG00000230539_0 (sequence is synthesized)
gcattagttctcttccccactctcgcttaatgcaagttatctgggaaacagcacatccaagcatcatgagtaggttagacatttatttgtaggacagattcatgcagcagaggctacaga

SEQ ID NO: 892873 - DNA, 120 bp, Artificial Sequence
  ENSG00000230539_1 (sequence is synthesized)
aatgggagtctggcaggaaagtgtgtgtgaaagccaaggaaggctctgaaagttgcataatgtggtgctcccacaagaaaggcactaaggtaatgggagcggtggggacctgagcagatg

SEQ ID NO: 892874 - DNA, 120 bp, Artificial Sequence
  ENSG00000230539_2 (sequence is synthesized)
aggagccaactagcggaactgggagacccatggttccaacgctaaggctcccgctgaggaatacaaactcaccctggccccagttgtgattcagcaccagccactgtccactccagctga

SEQ ID NO: 892875 - DNA, 120 bp, Artificial Sequence
  ENSG00000230539_3 (sequence is synthesized)
aatcctaatggggatgattccaagactaactagtttctgagatatcagcaaggattccaggaatctcccagagccagacgcagaagacagatcatccgatttctagagcaaagccctttc

SEQ ID NO: 892876 - DNA, 120 bp, Artificial Sequence
  ENSG00000230537_0 (sequence is synthesized)
gaaaaaaagaaaagcattaggtaaggccacagctgtcatagatagtgattcctctgatgtatctgggccaagtaaattgaaaaccttctggaagggattaaccattttagatgccattaa

SEQ ID NO: 892877 - DNA, 120 bp, Artificial Sequence
  ENSG00000230537_1 (sequence is synthesized)
gaacatttgcgattcatgaaaggtggtcaagatattgatattctcagaagtttggaagaagttggttccaaccctcacaaatgactttgaaaggtttaacacttcagtggaagaagtcac

SEQ ID NO: 892878 - DNA, 120 bp, Artificial Sequence
  ENSG00000230537_2 (sequence is synthesized)
gaagtcaccgcacatgtggtggaaacagcaagagaactagaattagaagtggtgcctcaagatgtgactgaattgccgcaatctcatgatcaaacttgaatggatgaggagttgcttctt

SEQ ID NO: 892879 - DNA, 120 bp, Artificial Sequence
  ENSG00000230537_3 (sequence is synthesized)
gcaaagaaaatggcttcttgaaatggattctactcctggtgaagatgctgtgaacgttgttgaagtgacaacaaaggacttagaatattacataaatgtagttgataaagcagcagcagg

SEQ ID NO: 892880 - DNA, 120 bp, Artificial Sequence
  ENSG00000230537_4 (sequence is synthesized)
gtttgagaggactgactccaatttgaaagaagttctactgtgggtataatgctgtcaaacagcatcacattctatggagaagtcttttgtgaaaggaaaagtcaatcaatatgacaaagt

SEQ ID NO: 892881 - DNA, 87 bp, Artificial Sequence
  ENSG00000230537_5 (sequence is synthesized)
ttgccacagccaccccagccttcagcaatcatcaacatcaaagcaagaccctccattagcaacaagattatggctcgaaataaagta

SEQ ID NO: 892882 - DNA, 120 bp, Artificial Sequence
  ENSG00000230537_6 (sequence is synthesized)
ttagcattttttagaaataaagtatttttaaattaaggtatgtacatttttttaagacataatgctattgcatgcttaatagactatagaacactataaacataatgtttgtatgcattg

SEQ ID NO: 892883 - DNA, 120 bp, Artificial Sequence
  ENSG00000230537_7 (sequence is synthesized)
aaaaccaaaatattagtgtaactagccatattctgatatttgctttattgcggttatctagaaccaaacctgaaatatttctgaggtatgtttgcaacattctcaaaaaatgcaaacctt

SEQ ID NO: 892884 - DNA, 120 bp, Artificial Sequence
  ENSG00000230537_8 (sequence is synthesized)
aaaccctgaatttgagttacagaaagccagagacacatatatacttacatatgtacatttattcagatttatcgaagaccgagttattctgcataaagttccaagtggcattaaatttca

SEQ ID NO: 892885 - DNA, 120 bp, Artificial Sequence
  ENSG00000230537_9 (sequence is synthesized)
tttagaaataagaatttttgaaacaaatgtttataagccatatcataattttccttctctttttaaaaaacattttctgaaaacaacttgaccttttgcttagtgacttagcattttttt

SEQ ID NO: 892886 - DNA, 120 bp, Artificial Sequence
  ENSG00000230537_10 (sequence is synthesized)
ttcccaggagaggtgcccgatgagctcccagtcatgtggttcagggcgggctctggaagactcacagaggagactcctccgagaaaccaagaaggtttctgtccaagtcgggatctgctc

SEQ ID NO: 892887 - DNA, 120 bp, Artificial Sequence
  ENSG00000230537_11 (sequence is synthesized)
tgctcaggatgctcctccaacacacacagtgaaaaactgagcacctagagagcaacaccaaaaacccatggccaataatggagagccaaatcaggagagcattcagcaaagcaattcttg

SEQ ID NO: 892888 - DNA, 120 bp, Artificial Sequence
  ENSG00000230537_12 (sequence is synthesized)
ctgtagaaggaacagcacaaaaagctggaaggaaactgaggcatgcgtgaaagataacttgtcagtgtttgcagtctactgagatccccgctgcaagaaaaggcaggatttccacttgct

SEQ ID NO: 892889 - DNA, 120 bp, Artificial Sequence
  ENSG00000230537_13 (sequence is synthesized)
tcttggcccgcctctgttgtccagaatccaggacaggtgacaagagaagcagatgtgatctgcacaagctggctcagctgggttgggagttgctcttcctggacaggccgggaagggtgc

SEQ ID NO: 892890 - DNA, 120 bp, Artificial Sequence
  ENSG00000230537_14 (sequence is synthesized)
tggaggggagggaggaggagagaggttttaggggaggggtgctgagcagtcagggacctgtaaggtcacatttctttcaggtattctttctaggtgtactgaatgggaacattgtctgtc

SEQ ID NO: 892891 - DNA, 120 bp, Artificial Sequence
  ENSG00000230537_15 (sequence is synthesized)
gtatcagataaacacccattttactgtggatttacatcctcattgtggcgacttcattgctatttgaaggcatgtaggcttcatttttttaattctgaaacttacattttttaacttagg

SEQ ID NO: 892892 - DNA, 120 bp, Artificial Sequence
  ENSG00000230537_16 (sequence is synthesized)
actcgcaggccatttttagcggcctgttggaaagggaagacgatgaagtcgggctaagcagggcaacgccttgccctctgagaggcgtggagggcccttgggaagctcagagagctacga

SEQ ID NO: 892893 - DNA, 120 bp, Artificial Sequence
  ENSG00000230537_17 (sequence is synthesized)
tacctggtgacacagagcacagctctgtgtttttatgggttgcttagttcaagatctggatgaaagaagcctgaacccatttttgtgcaaaagcctaagggtgtacagcagggatgctca

SEQ ID NO: 892894 - DNA, 120 bp, Artificial Sequence
  ENSG00000230537_18 (sequence is synthesized)
aacttttgtttttataagaacccacttttatattaagtaggttttctgtgtgtgagaagaaatgcttgaacatggaaatgaaaagttctaactgtaggatggagtttacagtgagtatga

SEQ ID NO: 892895 - DNA, 82 bp, Artificial Sequence
  ENSG00000230537_19 (sequence is synthesized)
aaaagttctaactgtaggatggagtttacagtgagtatgaacctccctccccacctccaatcccagggccccttccatctgt

SEQ ID NO: 892896 - DNA, 65 bp, Artificial Sequence
  ENSG00000230537_20 (sequence is synthesized)
aggggaatcgcttgaacctgggaggagagactccgtcgcaaaacaaacaaacaaacaaacaaaca

SEQ ID NO: 892897 - DNA, 120 bp, Artificial Sequence
  ENSG00000230536_0 (sequence is synthesized)
acacttggcagttacacacacaataagcaaaattctctgtgcttccgagaagacagcccctcaggatttgaaagcttgaatgccgctgagggcacctcccactccagagtaatggctttc

SEQ ID NO: 892898 - DNA, 120 bp, Artificial Sequence
  ENSG00000230536_1 (sequence is synthesized)
ttctccaactgaagattaactgtgatggtgagcaaacgtttggcttttttttaaaaaaaaaaaaaaagaaaaggaaaacgcgacagccaagcagaccactcccggaggcagcaagcaact

SEQ ID NO: 892899 - DNA, 120 bp, Artificial Sequence
  ENSG00000230536_2 (sequence is synthesized)
tcgagctcccagttattcagctgtcctcgctcatcacccaagccgaggacccgagcatccagtctgcattctcactgcagcagagcccggccaatcacctctgccgacactaccaagttc

SEQ ID NO: 892900 - DNA, 120 bp, Artificial Sequence
  ENSG00000230536_3 (sequence is synthesized)
cctgcatgaagcccggcaattctgcagggaggtgcggactcaagctccagatgaggctcagcttacagaatccactctgagctggctccgtagcaaaagtaactccctgccctccactcg

SEQ ID NO: 892901 - DNA, 120 bp, Artificial Sequence
  ENSG00000230536_4 (sequence is synthesized)
ggttgcttccagaaggcattcaccatcaagtgcaacaccatcaagagtccttggcagcatgtcctaagagcattctagaaacatttttccttgtttcaagatccagttttctccagcaga

SEQ ID NO: 892902 - DNA, 120 bp, Artificial Sequence
  ENSG00000230536_5 (sequence is synthesized)
gcacatgccacatcacagcagctacttctgctgcgtctccctccagaagatgagctgcctgggggcagggaccaagtcacagacctttctacccctaggaccaggcacagattaagtctg

SEQ ID NO: 892903 - DNA, 120 bp, Artificial Sequence
  ENSG00000230534_0 (sequence is synthesized)
gccgaccccggaccaaaagtagcgctgcagccgaccgaaccgcgtcctcccgccccgtcctcccctcccccacgccgggacggcctcccgggggaggccccgaggaaaaaaatccaggct

SEQ ID NO: 892904 - DNA, 120 bp, Artificial Sequence
  ENSG00000230534_1 (sequence is synthesized)
cgaactccgccccctgccggccgccagcaggagtgaagcgccacaatccaacaatgaaatggaaccggggaggggcggcgggaaggttatagtgccatcatgtggatactttgttttctt

SEQ ID NO: 892905 - DNA, 120 bp, Artificial Sequence
  ENSG00000230534_2 (sequence is synthesized)
cagccatcccaacacccaggctgtgcaaagaaattggggccaaacgtttttttgccatgttctgaaaaggatagaggcactctccattcctgattgttccaaggctcaagtggtcagaaa

SEQ ID NO: 892906 - DNA, 120 bp, Artificial Sequence
  ENSG00000230534_3 (sequence is synthesized)
tgactgggaagaagggagaaaaactcaggtggcaaaggacatggacgaaaacccatggcgacatggaaagaaaaccctgtgatatagagaggaaaagcacaggacagcttattggggaga

SEQ ID NO: 892907 - DNA, 120 bp, Artificial Sequence
  ENSG00000230534_4 (sequence is synthesized)
caatgacttgtcagccagagtaacggctgttgtcaggtcttcagggtctcgaggttatagtgccatcatgtggatactttgttttcttcaaataaaatgtaacctttttataacagagac

SEQ ID NO: 892908 - DNA, 120 bp, Artificial Sequence
  ENSG00000230534_5 (sequence is synthesized)
gcttattggggagaatggaactcttctgtatcctgattgcggtgatggccacgcatggcttagagacgggctttcaccacgttgactaagctagtcttgaactcgtgacctcaggtgatc

SEQ ID NO: 892909 - DNA, 120 bp, Artificial Sequence
  ENSG00000230534_6 (sequence is synthesized)
taactttcaaccagaattgtctaggagaggcaaagatataacctgttcatctggtaccactatcacccacagaatatgatatgagttctgagcttttccgattaaagaccttgtactttt

SEQ ID NO: 892910 - DNA, 120 bp, Artificial Sequence
  ENSG00000230534_7 (sequence is synthesized)
atccaatgacttgtcagccagagtaacggctgttgtcaggtcttcagggtctcgaggtcggtttcttcctaacgccgccaaccccaagctaaggtagacatgatcgccaaggcagctgat

SEQ ID NO: 892911 - DNA, 120 bp, Artificial Sequence
  ENSG00000230534_8 (sequence is synthesized)
tgtcccaaggaataagtatgagcaatgagcacagagggaaaatcatgaaacatctgaggaccatgagaactgctaaaacaatacgtagaactagctataccagagaaagtcaagtgaatg

SEQ ID NO: 892912 - DNA, 120 bp, Artificial Sequence
  ENSG00000230534_9 (sequence is synthesized)
gggagaatgttggaaacacaaagcacaaacaagcatttgtgaattggatgttgacaaatattaatgaaataactcaatggatgggttgaatatagctggacagttcactcatgaaccgga

SEQ ID NO: 892913 - DNA, 120 bp, Artificial Sequence
  ENSG00000230534_10 (sequence is synthesized)
agattagagcaaggaaggaactaagaaatggaaagcatgaaaggagagttaagaaatgtggaaggtagaagcataaatatttttctaatggaaattccagaaggggaaaaaaagaacatg

SEQ ID NO: 892914 - DNA, 120 bp, Artificial Sequence
  ENSG00000230534_11 (sequence is synthesized)
tgaaagaattattgctgagaatttcccagaattgaagacatactttagaatgaaaaaggccaactctaactttgggatttctagcttcagagaaatgaaaatttagaatgaccaagggga

SEQ ID NO: 892915 - DNA, 120 bp, Artificial Sequence
  ENSG00000230533_0 (sequence is synthesized)
ggaacggaacttccctttgtggaagttcctggatcttccagagcctggggagttttcctcttccttggattccaggagatatgttaatattcttttaataaatgccttttttgtgtagaa

SEQ ID NO: 892916 - DNA, 120 bp, Artificial Sequence
  ENSG00000230533_1 (sequence is synthesized)
atgcttgtttggtttctgatagttgtaacctaaaaaatctttagtaagccattggtctgctgtggggagcgtcgagatgaaactggaacgttgtttgaacctagatcataaagtgactcc

SEQ ID NO: 892917 - DNA, 120 bp, Artificial Sequence
  ENSG00000230533_2 (sequence is synthesized)
aacatcttcataccagggagaggaggaagctgtgctgtgaaggatcctttttcatcatgattattgcatccacagaagcagtgataaattctaacagataatgcaactcagtctacttgg

SEQ ID NO: 892918 - DNA, 120 bp, Artificial Sequence
  ENSG00000230533_3 (sequence is synthesized)
atgttcacacctgagactggagaagacctgctgccttctgcagagccaaacattcctcacatgctcctccacaatgctccttacactggtctacctaaagaaaacctctacagacaaagg

SEQ ID NO: 892919 - DNA, 120 bp, Artificial Sequence
  ENSG00000230533_4 (sequence is synthesized)
cttgtttacagtgaatctaagcagattcctcatctgttctgggatacgtgcgtcgagattgccagactgtggataaaatctcccctcatgagtttttgcttcttttgggagtgtcagcat

SEQ ID NO: 892920 - DNA, 120 bp, Artificial Sequence
  ENSG00000230533_5 (sequence is synthesized)
ctagccagcctccatcggttgaacttaggtgggaacagatcaaaggctcatgggaaatgggcatggaactccccaccgtccgatgccaagtggtgaccagaacagatgggagcagaatga

SEQ ID NO: 892921 - DNA, 120 bp, Artificial Sequence
  ENSG00000230533_6 (sequence is synthesized)
taagcacagcatcccacatcaatggatacttatttggaagtaactgaagtggaaaggtcaggataaaatgtcagcatctctgtgtgggtgaaaatatgtctgagaaactaacttcgctcc

SEQ ID NO: 892922 - DNA, 120 bp, Artificial Sequence
  ENSG00000230533_7 (sequence is synthesized)
aagaaatatgaaggcaaaggggaatgccttggaatcaaagagaagacactttcagtgcctttatcccagctgaatgtactcttagactccctaaacctgattaaagttttctcttaccct

SEQ ID NO: 892923 - DNA, 120 bp, Artificial Sequence
  ENSG00000230533_8 (sequence is synthesized)
agtattttctgtagagaaggctgttcagagagagaaagtcaaatgaaagaagaacatcttgaatttatacaatgactgggagaaggcttaatgtgttcttagaattgtaactcctatttg

SEQ ID NO: 892924 - DNA, 120 bp, Artificial Sequence
  ENSG00000230533_9 (sequence is synthesized)
gagagattgcaaaaaggagcaccagggacagaacccttggaagggccacaggggatggcaaatggctctctcagttagctggctgagcatgtgagcagtccgtacgaccaagatcattgt

SEQ ID NO: 892925 - DNA, 120 bp, Artificial Sequence
  ENSG00000230533_10 (sequence is synthesized)
tgtctccagcagtggagagcaccagatctgaaatccccagggcaatttctgttcatggataagccggataagcctggacttcccaagtgatgtcacagtgagacttgagcttcgataacc

SEQ ID NO: 892926 - DNA, 120 bp, Artificial Sequence
  ENSG00000230533_11 (sequence is synthesized)
gaccaaaccatcatttcaagagattatcgagaaaatgaatgtgagaagagcttgttgcaggaatttcatcaggggcatacaagtcgtggatttgactgggacaatttcttgtacatttcc

SEQ ID NO: 892927 - DNA, 120 bp, Artificial Sequence
  ENSG00000230533_12 (sequence is synthesized)
cactgtgtctacattgctcactgcagtatcccaacatctaagaccatggtcttagatgtctggtacaggactggtgctcagtatgcattgaatgaataaatgaatgaatatagcaaagca

SEQ ID NO: 892928 - DNA, 120 bp, Artificial Sequence
  ENSG00000230533_13 (sequence is synthesized)
aggacaaaaccacagtccttagcaaagcatataagatcttgaagacttgttcctgccagcaatggttaggggtgctttcatctgcaagtaataagacattcaatcaacagtggctccaat

SEQ ID NO: 892929 - DNA, 120 bp, Artificial Sequence
  ENSG00000230533_14 (sequence is synthesized)
cagtgcttcttaagctctagtaaaccttccaatcaccagggcttcttattaaaatgcacattctgatttaggaggttggagtgggggcctgagattctgcatttctaacaagctcccagg

SEQ ID NO: 892930 - DNA, 120 bp, Artificial Sequence
  ENSG00000230533_15 (sequence is synthesized)
tgatgctgattctgctggtctaaggcaaacttgtgaatagcaagagcttaaaaagacctttaaaagatggagttttctgcctctcacataacaagaaatccgaaagttgttctacacttg

SEQ ID NO: 892931 - DNA, 120 bp, Artificial Sequence
  ENSG00000230533_16 (sequence is synthesized)
attcagaagatcaacaatgtcattgctctgggattggcagatcagggagtagcaaattatgccccaaaggccaaatctagtccaacaattgcttttgtaaataaagttttattggaacac

SEQ ID NO: 892932 - DNA, 120 bp, Artificial Sequence
  ENSG00000230533_17 (sequence is synthesized)
aataggcggctttgggtgtgggctgtgtgtcagggaaataggagctgtaattgtctcctcttatcgttctatcagactctctcagcttctagcagaagcagtgataaattctaacagata

SEQ ID NO: 892933 - DNA, 120 bp, Artificial Sequence
  ENSG00000230533_18 (sequence is synthesized)
acaatacactctattccatgaggcacatgatggagttcaaggattgctcatcattatccagttggacactaggacaagaaacttctggaaaacagttttactccagggcatctgctcctc

SEQ ID NO: 892934 - DNA, 120 bp, Artificial Sequence
  ENSG00000230533_19 (sequence is synthesized)
tctagtttaaatgtctgacactcttcagaagacatagtcttttttactcaagattctcaaggaagcaatgtggtgatggaagaggcctggactcttgagtcagggctttgctctaaacct

SEQ ID NO: 892935 - DNA, 120 bp, Artificial Sequence
  ENSG00000230533_20 (sequence is synthesized)
gcacctgctaaaactagctgagtgacctaaggccagttacttaatgtctctgaggctaggtggaaatactgatgcattccctcacacagtcattgagatgaataaatacagtggtatgtt

SEQ ID NO: 892936 - DNA, 120 bp, Artificial Sequence
  ENSG00000230532_0 (sequence is synthesized)
acaagagacttacccagacaggaggaaaagctgtcaagcatgagagaacacagaaaatgtttaaaggttccagcggggagagagagaagtgactttcagcatgacagagcctggcccagt

SEQ ID NO: 892937 - DNA, 120 bp, Artificial Sequence
  ENSG00000230532_1 (sequence is synthesized)
gctttgcactgtagctgctcaataaatgtctgctgaacaagcacaggcctgagtagttcatccactggatagtctcagcaaaagacctgcataatggggagcacgagctgagaactgctc

SEQ ID NO: 892938 - DNA, 120 bp, Artificial Sequence
  ENSG00000230532_2 (sequence is synthesized)
acttgcctcacagactgtcccttgcacacacacacactcgaaggtgcaccagtacctctgccagctgcagcaccacggtgtgatccatattgagctcagctggaacagactgaatgagag

SEQ ID NO: 892939 - DNA, 120 bp, Artificial Sequence
  ENSG00000230532_3 (sequence is synthesized)
aagtccagagtccagttcacaggacctagccaccctcacctccattccgatgcttcagcgccaggcacacttcgataatttggacacctagttcgtaatagaagtcccccacgcccagca

SEQ ID NO: 892940 - DNA, 120 bp, Artificial Sequence
  ENSG00000230530_0 (sequence is synthesized)
gggcgcgttttggggaaaggcagagcagcgggagcgcggcgcaagggcaaaatggatcgttggtacccggaagcccgttcaaactgtataagggtgatcagctatcacggagaaggcttt

SEQ ID NO: 892941 - DNA, 120 bp, Artificial Sequence
  ENSG00000230530_1 (sequence is synthesized)
taacgcgtctgactacggatcagaagattctaggttcgactcctggctggctcgcgatgtctgttttgccacacttgacccatgtactactgggtcttgtaaagatgtatattcacaatg

SEQ ID NO: 892942 - DNA, 120 bp, Artificial Sequence
  ENSG00000230530_2 (sequence is synthesized)
ggtcttgtaaagatgtatattcacaatgtgaaagtattacaagaccttggaaaggtgtatggttagaatgtgaaagttaaatatctgaaattttgatgccgctttgctcacaatgtcatc

SEQ ID NO: 892943 - DNA, 120 bp, Artificial Sequence
  ENSG00000230530_3 (sequence is synthesized)
ctttatcctttaaacctggagttgtctgaggtggtttgcaaactgcaaagcgccctgttcccaatgatgcacctgagaagtctgtaaatggggtaaatttaggcaaacacacctggaaaa

SEQ ID NO: 892944 - DNA, 120 bp, Artificial Sequence
  ENSG00000230530_4 (sequence is synthesized)
gtggcattttggagtggggaatgctgtggccggaggttagcaaccggatgatgcaaaagcgtatttaaggcagcagttctggcctttccccgccacggagcagaagcccccatagtgatg

SEQ ID NO: 892945 - DNA, 120 bp, Artificial Sequence
  ENSG00000230530_5 (sequence is synthesized)
aaaacctgcggtgcggctgcgctcggtagtaggggtccacaaagcgtcagaatctgcagcagccccggcctttgcgagctccagctccgaagtcaacccggcccccaaattccactggga

SEQ ID NO: 892946 - DNA, 120 bp, Artificial Sequence
  ENSG00000230530_6 (sequence is synthesized)
aaccttaagacaccggtgtttttaccgtaagaagacctcagaagcccatggaaacaaggcgatgacggcgcttgagggtgaccagacctcctcaatcattccatcagccacccaggactc

SEQ ID NO: 892947 - DNA, 120 bp, Artificial Sequence
  ENSG00000230530_7 (sequence is synthesized)
aacagcagaacctcagaggactcagctgaaagaggttttcactcgagcactaaccacagagaaatgggaagtgccatcctgctgtcatacgcagccgatggctgggtaggactaaatgcc

SEQ ID NO: 892948 - DNA, 120 bp, Artificial Sequence
  ENSG00000230530_8 (sequence is synthesized)
cttctgtggtgagatgaaccaagacggcagatgggggaataacatcagtgagagagagattacgaatggatccttgtattgcagatcaaactgggttgtctcttctcaaaccacccaggc

SEQ ID NO: 892949 - DNA, 120 bp, Artificial Sequence
  ENSG00000230530_9 (sequence is synthesized)
agtttctgaatgtcccaagataggggtaggagaaaagaaaaaaaagacaaaacaggagacggtgggtaagaaaacctaaaaggcacaatgaggcaaaggcctaagatggaggctggcttt

SEQ ID NO: 892950 - DNA, 120 bp, Artificial Sequence
  ENSG00000230530_10 (sequence is synthesized)
gggatctgaaatccggccacaatcctccttgttttacctcaagtccaagaattgtcaaaaagaaaacccagaagggctattcattctaaattttaaaatcttttcttcctggcctaccaa

SEQ ID NO: 892951 - DNA, 73 bp, Artificial Sequence
  ENSG00000230530_11 (sequence is synthesized)
ccggaagcccgttcaaactgtataagggtgatcagctatcacggagaaggctttagcaagtcttctagaagcc

SEQ ID NO: 892952 - DNA, 120 bp, Artificial Sequence
  ENSG00000230530_12 (sequence is synthesized)
attacagttctatttggctaataatttacagaacatttaaaataccgggtaggtgaacatctcttcatggcttttgtgtaagggcctgaagcgaagagaaaaacaactgattggagattc

SEQ ID NO: 892953 - DNA, 120 bp, Artificial Sequence
  ENSG00000230530_13 (sequence is synthesized)
ctatctggcgccttctccagggaaactgacaaccagagaaatctgttgctaggatttctaggacatctggaaattccctttttgttctttctcaacaatataaaatggtatattcgcaaa

SEQ ID NO: 892954 - DNA, 120 bp, Artificial Sequence
  ENSG00000230530_14 (sequence is synthesized)
atttcatttaaaaatgtaatcacagatttttaaactaattacccaatttgcaaacaaatcccagctacttctggtcttgaacatggagcaaaggtgtgtcagtaaggccaacattcttag

SEQ ID NO: 892955 - DNA, 120 bp, Artificial Sequence
  ENSG00000230530_15 (sequence is synthesized)
gttgacagagacaggttaacacattggctggcttcatttacccccctgccacgccccacactgagctggatgatttgatgggaagagagggtccccacctcagggttcacttccccagcc

SEQ ID NO: 892956 - DNA, 120 bp, Artificial Sequence
  ENSG00000230530_16 (sequence is synthesized)
ccagcgttcatgggttttcaggaggctcagcctgtgaaaaagaaccaatgatgatgcacaccctggctgaagtgacatctggccaaaggattccaacagaatgaattccatcaacatgga

SEQ ID NO: 892957 - DNA, 120 bp, Artificial Sequence
  ENSG00000230530_17 (sequence is synthesized)
aaagataatccatggcaccaattctgtgctgcttacaggcaatggttaccaaatgagtcaaaacatggcctagaagtggagccgggcccaatgaaaagcctgagttcacacgtgctaggg

SEQ ID NO: 892958 - DNA, 120 bp, Artificial Sequence
  ENSG00000230530_18 (sequence is synthesized)
gagtgcacacaccggctcctgtgtccccggcctggctggcaatggtaaaatgggctgcctttcttttgcagcttcttctaatcgaaataccaaagggtactgacctctggcctcagggat

SEQ ID NO: 892959 - DNA, 120 bp, Artificial Sequence
  ENSG00000230530_19 (sequence is synthesized)
gtgacttgcagtgcaaattttacctcttcagtgcagagagtggtcttgaaatcttgccagtgtgtggccctccctcagctcctgccaccctggggagccaggatgctgaaatgcataagg

SEQ ID NO: 892960 - DNA, 120 bp, Artificial Sequence
  ENSG00000230530_20 (sequence is synthesized)
caaaagcactgaatcggatctattccccactgacctttagttacgatcactctgccctgaccagctggagttgggcctgtgtgaagccagtgatttccaacacactgaagaaggtatctg

SEQ ID NO: 892961 - DNA, 120 bp, Artificial Sequence
  ENSG00000230530_21 (sequence is synthesized)
agtccagtgtgaaagccaaattcctcctgaatctgtgatttggtgaagctctgtgaggtattttttgtgtgtggaagactgaaagtgaagggaaacaactaaaaaaattaaacagacaaa

SEQ ID NO: 892962 - DNA, 120 bp, Artificial Sequence
  ENSG00000230530_22 (sequence is synthesized)
agcagtgtaccttatcctggtttcttcaaacataatgcctgtgccaagaattgggcaggagagaaaccaacgaaatgaatataataacttatcctgaggcgctccctcccacgctggctt

SEQ ID NO: 892963 - DNA, 120 bp, Artificial Sequence
  ENSG00000230530_23 (sequence is synthesized)
agagatctcgcacacacaaaaactctccttgtttataagaagctgtctctcagtatgcgggcagctcttcccaaaagcccgtcattaaataagctaaaaacaggtgcaagcgatgtacct

SEQ ID NO: 892964 - DNA, 120 bp, Artificial Sequence
  ENSG00000230530_24 (sequence is synthesized)
gcatgggttcctgagacttgccttgcagaagcggccttccaagtcaccaactcttgagaactccagagaaaaacagcgcaaacacgtgggcaaaaaaaaaaatcctggtgcctgcaccaa

SEQ ID NO: 892965 - DNA, 120 bp, Artificial Sequence
  ENSG00000230530_25 (sequence is synthesized)
gttcttctcccaaagtatgttttactcacatagggcaaatttctgtcgcggactcagctgcctttaggagagtaaggatttgaaggggtacagagaatgctgtcagtgtctaaggaggaa

SEQ ID NO: 892966 - DNA, 120 bp, Artificial Sequence
  ENSG00000230530_26 (sequence is synthesized)
accctgcctcacctatttcaaatcttgactctggttttctaagcaaatttatcttaggatacaaagcacacattagagcttccttcttgccttaatgcaattaaatttgcagccattctg

SEQ ID NO: 892967 - DNA, 120 bp, Artificial Sequence
  ENSG00000230530_27 (sequence is synthesized)
cagaagaactgaagctctcaggtgaaaagaagccttaaatcatgccatgatatatgtcgggggagggaacatttgggtataggtattttcctgaaggaagagaaagggttgaatgtattg

SEQ ID NO: 892968 - DNA, 120 bp, Artificial Sequence
  ENSG00000230530_28 (sequence is synthesized)
gcagctgagctgtcccttcaaggggatattgtgaaacaagctcaataaaaacctctccctctgaagcatgaaatgttcccagaggggacaggaggattcctttggtgctatgatgcaacc

SEQ ID NO: 892969 - DNA, 120 bp, Artificial Sequence
  ENSG00000230530_29 (sequence is synthesized)
tcaggtcatgtgctcgcacatgctggagcattttcctgagtaacctgaggaaaatgtggcaacagagaaaagcacttggaaaatacacgcaggaggcaggtagtgttcacctccctggtt

SEQ ID NO: 892970 - DNA, 120 bp, Artificial Sequence
  ENSG00000230530_30 (sequence is synthesized)
aaaggaaaggcaccccccacatgctcacaggaactctccctcctgcccctcctcttcccctaccccacttccaccccaggggccaccggaagcagcagcagcaaccccggctcctcatcc

SEQ ID NO: 892971 - DNA, 120 bp, Artificial Sequence
  ENSG00000230530_31 (sequence is synthesized)
cctgccgtgatgtctgcaagtggctctggctagaagtggtgctggtgaagggctgtagatgagggtctcttctccagcctcttcacgtggcaggagtgacagaacaggtggtcctccagc

SEQ ID NO: 892972 - DNA, 120 bp, Artificial Sequence
  ENSG00000230530_32 (sequence is synthesized)
ggataacagcggtggccatcttcatcattgagctccagaccacagtcctgtggggaggcagacatgtccaggggaagcaaaacaaaacagactgcaagactgacctgaaggccacagtcc

SEQ ID NO: 892973 - DNA, 120 bp, Artificial Sequence
  ENSG00000230530_33 (sequence is synthesized)
ccaaaatcagcagagggtgctgtgtgtttctgtataggcaggaaatgccagtgcagaaacacagctcctgccccgtggaggcctgtccaacacaggagacactgccacaaggcacttgct

SEQ ID NO: 892974 - DNA, 120 bp, Artificial Sequence
  ENSG00000230530_34 (sequence is synthesized)
cacttgctgtgaaccacttaaaatgtgctgtcagtgtaaatgcagattccgaagacttaggacaaaaagaggatgtaaaaatatctcatgggaaaaaggaatgagatcatgtcctttgca

SEQ ID NO: 892975 - DNA, 120 bp, Artificial Sequence
  ENSG00000230530_35 (sequence is synthesized)
caacacacaccagggcctgttgggaggtgggggtgaggggagggaacttagaggatgggacaataggtgcagcaaaccaccctggcacacgtacaacatatatctatgtaataaatcttc

SEQ ID NO: 892976 - DNA, 120 bp, Artificial Sequence
  ENSG00000258232_0 (sequence is synthesized)
caatttacggcaatagacatttacagaacaaaaataagacagttccaagacaaaggagtgtaaaagtacagcacacaggttaatactcttcaccctcatcctctccgtcagcactatctg

SEQ ID NO: 892977 - DNA, 120 bp, Artificial Sequence
  ENSG00000258232_1 (sequence is synthesized)
ctccaacctcctcataatccttctcaagggcagccatgtcctcacgggcctctgaaaactcgccttcctccatcccctcacccacgtaccagtgaacaaaggcacgcttggcatacatca

SEQ ID NO: 892978 - DNA, 120 bp, Artificial Sequence
  ENSG00000258232_2 (sequence is synthesized)
ttggccaggtctccgccaggcaccacagtgggaggctggtaattaatgccaaccttgaagccagtggggcaccaatccacaaactggatggtacgcttggttttgatggtggcaatggca

SEQ ID NO: 892979 - DNA, 120 bp, Artificial Sequence
  ENSG00000258232_3 (sequence is synthesized)
gcattgacatctttgggaaccacgtcaccacggtataacaggcagcaagccatgtatttaccatggcgagggtcacatttcaccatctggttggctggctcaaagcaagcattggtgatc

SEQ ID NO: 892980 - DNA, 120 bp, Artificial Sequence
  ENSG00000258232_4 (sequence is synthesized)
tctgctacagtaagctgttcgtggtaggctttctcagcagagatgacaggggcatatgtggccagagggaagtggatggaaccccactcaccatgactagaacttgaaggggtctgcggc

SEQ ID NO: 892981 - DNA, 120 bp, Artificial Sequence
  ENSG00000278910_0 (sequence is synthesized)
taaggtcttgtaagctgtctctggctttttcttgggctgtgtggaggaatccactctgtatggagaatgaagctgacgggcagagagaaatagagatccaagaaccttcttgtagggtct

SEQ ID NO: 892982 - DNA, 120 bp, Artificial Sequence
  ENSG00000278910_1 (sequence is synthesized)
ggattgggacccttttctggtaacatcttcctggtgaccatgaagggacaatactgaagagacccctgaccctaaggaaatagactgcagcaccaatgggccaactttggtgatctctgg

SEQ ID NO: 892983 - DNA, 120 bp, Artificial Sequence
  ENSG00000278910_2 (sequence is synthesized)
ggaatcagctagcaaccacatatcagcttggtttcaacagtttcccagttcatgctgctgagaagttcagagtcaaacctgaatctcacctctgcaaagagcacaggactccatggcaaa

SEQ ID NO: 892984 - DNA, 120 bp, Artificial Sequence
  ENSG00000278910_3 (sequence is synthesized)
caaacgttgtatatacgcaagtcatccctggcaccacattgatttactgcaccaggctttcttcattgtgatgatgttctctctcttttctaaaaaaaaaataaaaataaaatttaaaaa

SEQ ID NO: 892985 - DNA, 76 bp, Artificial Sequence
  ENSG00000278910_4 (sequence is synthesized)
cttactttcttaataaactcgctttcactttatggattcaactgtaattctttcttgtgtgagatccaagaacctt

SEQ ID NO: 892986 - DNA, 120 bp, Artificial Sequence
  ENSG00000278910_5 (sequence is synthesized)
gggtgctgagtggagtggcgactatagcaaacctgtgatctctggctgctgctcagaagaaacaagagggagggatgaataatgtaaaactctggatcaatattctaattctgagcctct

SEQ ID NO: 892987 - DNA, 120 bp, Artificial Sequence
  ENSG00000226825_0 (sequence is synthesized)
gagcctcacggatttgctcatcgccctctgaacacctgtggccttctcactcctctgtgtctttgcacatcctttccccaacctcatgccaggccattgcattgtgatccaggctcagtc

SEQ ID NO: 892988 - DNA, 120 bp, Artificial Sequence
  ENSG00000226825_1 (sequence is synthesized)
gactgcagtcttcgactttgacatcaaatttgacacctcagtggcccaagctttcagaaacttggaattgcagacattatggatttggacctgccctcagaagagctacctactgaaata

SEQ ID NO: 892989 - DNA, 120 bp, Artificial Sequence
  ENSG00000226825_2 (sequence is synthesized)
tttacaagtgaaatgatgtgagatgtgggatttgattcaaaatgatcctttatgtatgaagagtggggcgtggagaatgcatgaagatacagataaaataaacgtgtctatgggttaata

SEQ ID NO: 892990 - DNA, 120 bp, Artificial Sequence
  ENSG00000226825_3 (sequence is synthesized)
agagtgagtaaaaccccccttctaaagaaagcctccatcctgcttcacattcaaggggcttctaggccatttgcacttcgtttacacctcattaaactgcccacattatatgcctgggtc

SEQ ID NO: 892991 - DNA, 120 bp, Artificial Sequence
  ENSG00000226825_4 (sequence is synthesized)
ccaggtgactgtgggaaaagatcaaggtttcctgcaacctcactgggcattttcagaatgatctgtacaagcgttgactgaatgattgattccaagttcccccttcctaggatttcagac

SEQ ID NO: 892992 - DNA, 120 bp, Artificial Sequence
  ENSG00000226825_5 (sequence is synthesized)
ctcctcttgacaagtgatgaatgggccatcttaatcttgtttggatcagaaaggaccatacaattgagctttagacaagactaaaaatatcaaaagtagcactctgcaattttatgtgca

SEQ ID NO: 892993 - DNA, 120 bp, Artificial Sequence
  ENSG00000226825_6 (sequence is synthesized)
atatcgcatagcctagcgctcctaggctacaaacctggacagcatgttaccatactgaattatgtgcgcaactgtaacacaatgaacctcctttagacgtccttcacttccaggatccag

SEQ ID NO: 892994 - DNA, 120 bp, Artificial Sequence
  ENSG00000278915_0 (sequence is synthesized)
agagtccagaggcgcagattcagaaacaggtaccttttgttccctttctctgaacaccggcgggttgtcgttaatgtccttcacctccacgtccacatggaaaacctgcagcggcctgtc

SEQ ID NO: 892995 - DNA, 120 bp, Artificial Sequence
  ENSG00000278915_1 (sequence is synthesized)
ctccacgtccacatggaaaacctgcagcggcctgtccacgatcacctccaggtggatactgcactccgcgctccgcccgcacagcttctcgcggtcgatccgagaattcacaaacaaaat

SEQ ID NO: 892996 - DNA, 120 bp, Artificial Sequence
  ENSG00000278915_2 (sequence is synthesized)
tcctcgtagacggagtagtggagctggccgctccccacctcccaggctgcaaggagcagaagcgagagcagcagacgctgggatcccgggcctcttggtccgataatcaccattgcagaa

SEQ ID NO: 892997 - DNA, 120 bp, Artificial Sequence
  ENSG00000278915_3 (sequence is synthesized)
aatgagggcctctgagttgggacaatcagttttaagggatcgcttgcctgaggtattttatgagcagtcacccttttctgtaagtacatatttagtaaattttttccagcatcacagtca

SEQ ID NO: 892998 - DNA, 120 bp, Artificial Sequence
  ENSG00000278916_0 (sequence is synthesized)
acccacgccaccgacgccggttgctgccggagccgttagagggaggagacaaacgaaccgaggcgggagcggccacgggtgacagcggcagcggcggggccgggctgcgctcccgaaggc

SEQ ID NO: 892999 - DNA, 120 bp, Artificial Sequence
  ENSG00000278916_1 (sequence is synthesized)
gttcctggagggccctgggatggactcagagatccccagagccccaggggacggaaaatctagccccgggcacttgccttggagtctgagtgatgcgcgtcgttggagcgcgaagccggt

SEQ ID NO: 893000 - DNA, 120 bp, Artificial Sequence
  ENSG00000278916_2 (sequence is synthesized)
ctccctagcctccgcccgacacagcgtctccaggggttttcctccttttcgcgcctctccttccctcttccccacaccatttgagagcctcaaatggtagtcctgccgccacctctctcc

SEQ ID NO: 893001 - DNA, 120 bp, Artificial Sequence
  ENSG00000278916_3 (sequence is synthesized)
cttcgccagcctgccatcgtccccatgggtgcagatatgcgctcccgaagccgcctgcctgccgcgtctgcctcgggcatcagcccacgagtggggagtcggctcagcttgccacgaggg

SEQ ID NO: 893002 - DNA, 120 bp, Artificial Sequence
  ENSG00000278916_4 (sequence is synthesized)
aacctcgggttaggaccaatcgcccgggagagagccctcctcgcccccgcacctcctgctccaagtctcctgtcctggttatcccaagttcagggcccacctggggtcacatggggaact

SEQ ID NO: 893003 - DNA, 120 bp, Artificial Sequence
  ENSG00000278916_5 (sequence is synthesized)
acttgtcttaaggctgtaaacaatagttggaagaggagttgctagcttttgagaacttccatgatcatccaaagtctgaaacaaagtaggcggtcagcctttcaaaatacgtgttggaag

SEQ ID NO: 893004 - DNA, 120 bp, Artificial Sequence
  ENSG00000278916_6 (sequence is synthesized)
aaacagacaccttcccatccccagcgtttgttcagtgccttggttgggctttgattctcactgctttgtgaagtacagcttatttttacccccaagattatgattttcaggctgtagtta

SEQ ID NO: 893005 - DNA, 120 bp, Artificial Sequence
  ENSG00000278916_7 (sequence is synthesized)
ttattggacaactgagaggtgattttgttgttgttgaaatgagggaaaacgggccattagaaaggaccgtgtctcttaagaggagggaaaaaaaggacagcgagttggtaatggaatgtt

SEQ ID NO: 893006 - DNA, 120 bp, Artificial Sequence
  ENSG00000278916_8 (sequence is synthesized)
gctggatggattacatagatgagacatgggagatagaatagagaatccagaaattctcatgtatgtgtgcgtgtttagtataataacagtagctcacatttgctgagcatttgtgtggca

SEQ ID NO: 893007 - DNA, 120 bp, Artificial Sequence
  ENSG00000278916_9 (sequence is synthesized)
agtactggagtactttttcaggttatcttatttaactctaacatttctgtaaggtaggtgcaattgttatctccatttcacagagttgcccaaaaccattacttttaaacgctggagcca

SEQ ID NO: 893008 - DNA, 79 bp, Artificial Sequence
  ENSG00000278916_10 (sequence is synthesized)
ccctggccaacatggtgaaatcccatctattaaaaatacaaaaagccaagaaaaacaaatattcaattaacaaacggaa

SEQ ID NO: 893009 - DNA, 120 bp, Artificial Sequence
  ENSG00000278916_11 (sequence is synthesized)
aaaaagccaagaaaaacaaatattcaattaacaaacggaaagttgtcccacttccaaacagttgttttttgtctatcattgttgataggggtgtgggatacaattactgtcaggcatttt

SEQ ID NO: 893010 - DNA, 120 bp, Artificial Sequence
  ENSG00000278916_12 (sequence is synthesized)
tggtgtgaaggtgaaattggtacaaccctatttaccaaaatttaacatatgcattagcctttgccccacagctgtctcatttccgaggcatataccctaaggaaaataagggattcataa

SEQ ID NO: 893011 - DNA, 120 bp, Artificial Sequence
  ENSG00000278916_13 (sequence is synthesized)
ggatactatttgccaccttttttaaaaataatgcttctagaaacaagtgtccatcactaggacactagttaagaaaattatgattggtacatgcaatggaatactcttgacccattaaaa

SEQ ID NO: 893012 - DNA, 120 bp, Artificial Sequence
  ENSG00000278916_14 (sequence is synthesized)
actgatggaaagttctttatttgcattaaagtatgtccaaaaaatatagtttcccctcaggaaaaaaaaagcagaatgtagtttagcaagtacagtgctgtcctaatgtgaatatatgtg

SEQ ID NO: 893013 - DNA, 120 bp, Artificial Sequence
  ENSG00000278916_15 (sequence is synthesized)
tgtacatatgttaatataagtgtacaaaaatatctggaagaaggtcagtcaaaatacaagtgttttacattttgtcttttggactttttatctggttggtgttttttgtaatttattatt

SEQ ID NO: 893014 - DNA, 120 bp, Artificial Sequence
  ENSG00000278916_16 (sequence is synthesized)
ttacaaaaacaaagttgtgttttatgttttaattaaagctgtgccagtgaaaagggagccagttgactcttgaccttcacaagtaggtaaccatgatgaagtaactatgtctggggatct

SEQ ID NO: 893015 - DNA, 120 bp, Artificial Sequence
  ENSG00000278916_17 (sequence is synthesized)
gagtctcagcttttttgtgtctataaatttgattatattcatttacctatagttggacaagctaacctaccacctggacatcatagttttgactccccaaattggactgggtatccattc

SEQ ID NO: 893016 - DNA, 120 bp, Artificial Sequence
  ENSG00000278916_18 (sequence is synthesized)
tatgtgttctctgtgtgcctgtcatggtatttgtcacactgtactgtaattccctctgtgccagtagattgtttgctcctgccatacatatacacatgcacatacatactttttctgcta

SEQ ID NO: 893017 - DNA, 120 bp, Artificial Sequence
  ENSG00000278916_19 (sequence is synthesized)
tatgttacacatttcttttgatttattatttgtcatctacatttgtatacagaagttttaattttcattagccaaaatgctaatgaaatcacatagatattaaagggatacttggaacaa

SEQ ID NO: 893018 - DNA, 120 bp, Artificial Sequence
  ENSG00000272455_0 (sequence is synthesized)
gccgagatcccgccattcattgcactccagcctcggaaactagcaaaactccatcttaaaaaaaaagaggaggccgggtgcagtggctctgcacaacactttgggaggccgaggcaggtg

SEQ ID NO: 893019 - DNA, 86 bp, Artificial Sequence
  ENSG00000272455_1 (sequence is synthesized)
atggtggaaccccatctctactaaaaatgcaaaaagtagccgggcgtggtagcgggccccagtaatcccacaaggctgcagtgagc

SEQ ID NO: 893020 - DNA, 120 bp, Artificial Sequence
  ENSG00000272455_2 (sequence is synthesized)
gagccaagatcgcaccactgcactctagcgtgggtgacagatcaagaccttgtctcaaaaaacaagaagaagaaaaactactttttttttttcagatggggtctcactctcacccagtct

SEQ ID NO: 893021 - DNA, 120 bp, Artificial Sequence
  ENSG00000272455_3 (sequence is synthesized)
tgcagtggcgccatctcagctcattgcagcctctgcctcctgggcttgagtgatcttcccacctcgacctcctgagtagctgaaccacaagtgcatgcctggccaatttttgtatttttg

SEQ ID NO: 893022 - DNA, 86 bp, Artificial Sequence
  ENSG00000272455_4 (sequence is synthesized)
tgggcttgagtgatcttcccacctcgacctcctgagtagctgaaccacaagtgcatgcctggccaatttttgtatttttggtagaa

SEQ ID NO: 893023 - DNA, 120 bp, Artificial Sequence
  ENSG00000272455_5 (sequence is synthesized)
gcctacctgcaggattttcagtttatggacatgactgactggagacatggagaagctgttgttattggagatttttattactcgcatttcctgagcgatggggacactcactgtggggaa

SEQ ID NO: 893024 - DNA, 120 bp, Artificial Sequence
  ENSG00000272459_0 (sequence is synthesized)
atggatgagtgaattaatttctatagtgttacaatactttcacacccatcgtctgactccttccgacagcacagcgaggcaggtacggatcattcccattttgcaggtgagaaatattga

SEQ ID NO: 893025 - DNA, 120 bp, Artificial Sequence
  ENSG00000272459_1 (sequence is synthesized)
ggcaacataaaggcctggaaaaggttgctgtacatcattttgttggaactcctgggctcgtggacggcctgagttgaaagggacgaaggtctttatttgcaacatatggtctactgggag

SEQ ID NO: 893026 - DNA, 120 bp, Artificial Sequence
  ENSG00000272459_2 (sequence is synthesized)
ggggaaggtagacacgtaggtacatagttacaaccggtgtgataacgatgagacgactaggtgtttccaaaaaaatagtatgtgcaggagaggattttggagtggtacacaaaggagaat

SEQ ID NO: 893027 - DNA, 120 bp, Artificial Sequence
  ENSG00000272459_3 (sequence is synthesized)
ttttaaaacttaataattatgtatttaattgttaaaaatggaatttcccccctctttttgtgaatatactgtataatacatgtacatggcacagattaaaaaaaaaaagttttgagtgaa

SEQ ID NO: 893028 - DNA, 120 bp, Artificial Sequence
  ENSG00000261207_0 (sequence is synthesized)
cacagtgactcggcctccatcgtgccaacaggatgggcggatgcgcaggccacagagtccctggttggtgaggaagctgccaatcctggtcatctcttggagccgggcgggggtcagagt

SEQ ID NO: 893029 - DNA, 120 bp, Artificial Sequence
  ENSG00000261207_1 (sequence is synthesized)
gtggctggagcacgattcacagcctcccaaaggtggaaagcaccaagcaggggcccattagggcaaacaggtgagcacaacgtggtctgtccatgcaacgggcactactcagcagtgaaa

SEQ ID NO: 893030 - DNA, 120 bp, Artificial Sequence
  ENSG00000261207_2 (sequence is synthesized)
tgctgtgaaacgtctggaacaggcaaatctacagagacagagcatggatttgtggttgcctggggctggggacgaggggcagacaaagcgactgctcatgggcacggggtttccttttgg

SEQ ID NO: 893031 - DNA, 120 bp, Artificial Sequence
  ENSG00000261207_3 (sequence is synthesized)
gggtgaagacgatgtgactgtcaacaccgagcatgctaagacccactggactgtacaccgtaagtgaatgaattacacagtgtggaaatcacatctcaatagagctactgaacagcacag

SEQ ID NO: 893032 - DNA, 120 bp, Artificial Sequence
  ENSG00000249131_0 (sequence is synthesized)
cacagaacgaaaagccccccgctgggggtgggggaaggctcagaagctccaagtgacacagcctggagacccagctctgtcactcaactctacatagccttcacccagagcctgacagtg

SEQ ID NO: 893033 - DNA, 120 bp, Artificial Sequence
  ENSG00000249131_1 (sequence is synthesized)
tatatgaacaagaggctgtgcctggtgagtgcttctgccactttctccaggatgacagctgtggactcctgccacatccaacacccccttgctgctccccaccgccctccttggcaccca

SEQ ID NO: 893034 - DNA, 120 bp, Artificial Sequence
  ENSG00000249131_2 (sequence is synthesized)
ggtggctgatctcctatggtcttgctggcttctctaccttgtatgctgagggcgggcccagcctgccccagctcagggtctgcacatagtaggtgcttgcatgttgcctgctaaactgac

SEQ ID NO: 893035 - DNA, 120 bp, Artificial Sequence
  ENSG00000249131_3 (sequence is synthesized)
accccactagccatatctgatgagaaccatagcaaaagatcagaatgtaatggcttcatccagaagcaaagcatgaggttccaaaccatgtccctgacctgaaggggcacctgcccaggc

SEQ ID NO: 893036 - DNA, 120 bp, Artificial Sequence
  ENSG00000249131_4 (sequence is synthesized)
ccaggggtgccaactcctagaggcagctggcatgtgactactgtgcccagtagagaaaggcagacactcagtccccagagcccagagccccgagggaattatggaacatcctccatattt

SEQ ID NO: 893037 - DNA, 120 bp, Artificial Sequence
  ENSG00000249131_5 (sequence is synthesized)
gattcaaaataaaaaccacagtaaaccatagacccaaaacttatacgtcggctgaaattaaaatagcttcttgctacgttttctggtttcaatattctggataaactcatggaagctgaa

SEQ ID NO: 893038 - DNA, 120 bp, Artificial Sequence
  ENSG00000249131_6 (sequence is synthesized)
acagaacgaaaagccccccgctgggggtgggggaaggctcagaagctccaaggtttcatgtagggctccccaggccaagctttgagggaagatggggagcttagatatagttttgtccag

SEQ ID NO: 893039 - DNA, 120 bp, Artificial Sequence
  ENSG00000249131_7 (sequence is synthesized)
ctttcacgatacaaatgaccaacttgagtctggagagacagagaggtggagcttggcctggatccaggagatgagttcggcctagcgctctgcagtgggcccaccacccctgatacctag

SEQ ID NO: 893040 - DNA, 120 bp, Artificial Sequence
  ENSG00000249131_8 (sequence is synthesized)
acgtgtggtcaccttggcggtggggaggaggggcttggtcctggcaacccctctcatccaatagcaagagaggggctgattcaatggtttgagggggcaggagcagtgacacagcctgga

SEQ ID NO: 893041 - DNA, 120 bp, Artificial Sequence
  ENSG00000249131_9 (sequence is synthesized)
atccgcagaggcctgaagcgtgaaggttaacagctgggggggaggctgcgtctccctctctcacccccgctctgctgcagccccgcccacctgccagcccaggggatgtcgtaaacaggg

SEQ ID NO: 893042 - DNA, 120 bp, Artificial Sequence
  ENSG00000268987_0 (sequence is synthesized)
acagctgatctcagtcccaggggcccattggctgggcaagtggggcaggaggtgggcaggactggggcaggctagggaaaggtcatttatggctgattaaatctttctctcctgtctcaa

SEQ ID NO: 893043 - DNA, 120 bp, Artificial Sequence
  ENSG00000268987_1 (sequence is synthesized)
tctcttgattacctttcctcttgcttcccctacttcatttttggtggggagtggggagggaagaagtccctactttttatttatatatatttaaatttgtattatcttaagagttattgt

SEQ ID NO: 893044 - DNA, 120 bp, Artificial Sequence
  ENSG00000268987_2 (sequence is synthesized)
tcctctcctctcctcccctctcctttttcttttcttttctttttccctttcctttcctttccttttctcttctcttttctctctctctttctttctgtacctctctttcctttttctttt

SEQ ID NO: 893045 - DNA, 86 bp, Artificial Sequence
  ENSG00000268987_3 (sequence is synthesized)
tttcctcgcctaggctggagtgcagcagcatgatcttgacttactgcaatctctgcctgccgagttcaagtgattctcctgcctca

SEQ ID NO: 893046 - DNA, 120 bp, Artificial Sequence
  ENSG00000268985_0 (sequence is synthesized)
aggcacagcggctcaacccagaaggcagacagtgagcgaagacagaccagatcttgcagaaggtgggctacccgggccccaagtccaagccgaggaaggacagaggccactcaccaggat

SEQ ID NO: 893047 - DNA, 120 bp, Artificial Sequence
  ENSG00000268985_1 (sequence is synthesized)
ttccagcaaaccccaaaccctttcaacatgctcatgcatggcctcggtccccgggacaggcagtcgctgttatgggttaaacagtgtccccctagattacatccgttgaatcctaacccc

SEQ ID NO: 893048 - DNA, 84 bp, Artificial Sequence
  ENSG00000268985_2 (sequence is synthesized)
acagtgtccccctagattacatccgttgaatcctaaccccaagtagggtctttagaaagactcattacaggtgtgtgtcagcac

SEQ ID NO: 893049 - DNA, 120 bp, Artificial Sequence
  ENSG00000268983_0 (sequence is synthesized)
tccctttttagtaatggtgtctttttattgataacttcccaacagcatctgtaaacatcgggtacaaaaatattccattaaactctttcccgaggtggctccgtttgctccatggaggcc

SEQ ID NO: 893050 - DNA, 120 bp, Artificial Sequence
  ENSG00000268983_1 (sequence is synthesized)
gggtgacagaacggggcagcaaaggagccctggatgacagaacaaggcagggttacccgctgccaccttgtatgctgctgccctgagaccccctcaaggcaccgggcagcagggctattc

SEQ ID NO: 893051 - DNA, 120 bp, Artificial Sequence
  ENSG00000268983_2 (sequence is synthesized)
gcccgtcatctcctcgtcatctgtctggctgcggccgttgatggctggggagccaggctggacatgggacaggtcctcgaagccggggctcagggagggcgagacggtgtcggggctggt

SEQ ID NO: 893052 - DNA, 120 bp, Artificial Sequence
  ENSG00000268981_0 (sequence is synthesized)
tgtgacatgttaccatgttcaacagctaaatgatgtgactcttttctcctgagtgagccctactcataagccttgaacccagatgatttaactctcctatctgggcttcgcctatggaga

SEQ ID NO: 893053 - DNA, 120 bp, Artificial Sequence
  ENSG00000268981_1 (sequence is synthesized)
acactgtgacatacctctgcacccatcatctaggtgatgtgactctcctctcctgcctggttctggctcacagaagggaatgtaacatgtctctggatccagcacctaggtgggattgtg

SEQ ID NO: 893054 - DNA, 120 bp, Artificial Sequence
  ENSG00000268981_2 (sequence is synthesized)
cacaggtgtgatgatgactgtcatatgtggacccaaccaacagaaaagattttgactctcatggctagaattaggggaatagattcagggaatacacctgcagattggtagcataggtat

SEQ ID NO: 893055 - DNA, 120 bp, Artificial Sequence
  ENSG00000268981_3 (sequence is synthesized)
actgcatggtgttgaagtttggacacttttaactatcccattgcccaagcagtgtacactacacatgggtttttcttcgatataaattctctgatgttgaacaaagtttgagcaattgcc

SEQ ID NO: 893056 - DNA, 120 bp, Artificial Sequence
  ENSG00000268981_4 (sequence is synthesized)
tcagggtttgctctaatacagaatgaatacaacaagatctgtgttacaagtaaagttaccacaacttcgtttatatttgtaatgtttgtcttcaaaataaatcctcttcagcactttaaa

SEQ ID NO: 893057 - DNA, 120 bp, Artificial Sequence
  ENSG00000268981_5 (sequence is synthesized)
aaaactgatgaagagaagacacatttggttcttacttacacttcacttccactcactatttgtcagtgtggatagagctgagaacagcagtttcctggcaggacagccacttgtcagcaa

SEQ ID NO: 893058 - DNA, 120 bp, Artificial Sequence
  ENSG00000268981_6 (sequence is synthesized)
taaacaacacactgaaagaaaagtacaaatctttcatcaaaagctaatggatttttaagcaaaataagcatatgcatcaataacaaaatgcttgtggtaaaataaagatgaattttgttg

SEQ ID NO: 893059 - DNA, 120 bp, Artificial Sequence
  ENSG00000274124_0 (sequence is synthesized)
aataaaaataaaaaccacctctgctttgctcacctcctcccttaataaaacatgtatagaagactttgagctcaatggattacatatgcatcgtactcagatattttacaaagaacatga

SEQ ID NO: 893060 - DNA, 120 bp, Artificial Sequence
  ENSG00000274128_0 (sequence is synthesized)
gtccctttgcccttcctttgtcttctgccatgattgtgaggcttccctagccacgtggaactgagtctattaaacctctttcctttataacttacccagtcttgggtatgtctttattaa

SEQ ID NO: 893061 - DNA, 120 bp, Artificial Sequence
  ENSG00000274128_1 (sequence is synthesized)
ttcctcatccttcttagtagcaagtcaataaatactctcctaagtcaaattgtcattaaaaataactatccaaatctcttgttggtttatttaatcttctttattaactttagagtgttc

SEQ ID NO: 893062 - DNA, 120 bp, Artificial Sequence
  ENSG00000274128_2 (sequence is synthesized)
tttcgggaattaatcatggtttaaaaaatatcaaacattcaacaactctaattttactttaatgtctttttttctaatatatctaataaaattgcattaaatttttaagttgaaattgca

SEQ ID NO: 893063 - DNA, 70 bp, Artificial Sequence
  ENSG00000235578_0 (sequence is synthesized)
gtgggcagtgccttcctggagaggggaacacagcaggatgactatccttgacctcccagtatgacagctt

SEQ ID NO: 893064 - DNA, 89 bp, Artificial Sequence
  ENSG00000235578_1 (sequence is synthesized)
ctgctcagaccttccgacaccgcaaaatgattgtcaaaaatgggtctgcaaagagtaacttcccttccactgatcaaacctgaatgtgc

SEQ ID NO: 893065 - DNA, 120 bp, Artificial Sequence
  ENSG00000235578_2 (sequence is synthesized)
aaagagtaacttcccttccactgatcaaacctgaatgtgcaagctactgtcaattaactggaaaagtggccgtgtgggctggtgctttggtgatttaatgagtaaagtctacaaccccca

SEQ ID NO: 893066 - DNA, 120 bp, Artificial Sequence
  ENSG00000235570_0 (sequence is synthesized)
cttctacaaggtgcggatccataaggaagatattaggaaacatctaattgaagcttgaagaaccaaaatgaggaaggcagaattaggaaagaccctgtccggtgacgcctccccttctgg

SEQ ID NO: 893067 - DNA, 120 bp, Artificial Sequence
  ENSG00000235570_1 (sequence is synthesized)
tttccatctgtgccccctctcaggagccgcgggaacacaagcctcgagcagaatccaaccacttgatgattcgaaatcaccgcaatgccatggaatgtaaaaactgctctcgccacgtct

SEQ ID NO: 893068 - DNA, 120 bp, Artificial Sequence
  ENSG00000235570_2 (sequence is synthesized)
acggttttatttgccctctgggacgcgctgacattgttctaagcacattttctaagtgattgtgtgagtgtgggtgtgttttgttggacttgaagggagtctaatttctagaagttcctt

SEQ ID NO: 893069 - DNA, 120 bp, Artificial Sequence
  ENSG00000235570_3 (sequence is synthesized)
tcaggagtctgcctttactgcaaagttgatgtattcgaaaacacagtaactcttaatggcaacagaatttgtcacctaattaagtgcaattcggtcataaaagaagccacagaatcagca

SEQ ID NO: 893070 - DNA, 120 bp, Artificial Sequence
  ENSG00000235572_0 (sequence is synthesized)
aagccatccagcaaaatgtcggcgtcttcttcggcccaaggggtccttcagccagctccagttgtggtgggagagctgcagactgctcacggcctgcccggcccctgtgtcgacggcccc

SEQ ID NO: 893071 - DNA, 120 bp, Artificial Sequence
  ENSG00000235572_1 (sequence is synthesized)
caggcccctggtgctctcaggattgttttaagactgctgtgacaacctggagatcatcaccagcctcctggggtcccatctgaccccagctgtgatgccgtctgcacggcaccctccatc

SEQ ID NO: 893072 - DNA, 120 bp, Artificial Sequence
  ENSG00000235572_2 (sequence is synthesized)
atccctaacgcagacacccccaactgagcctacagacgaggacacgcctgacgccggccccaggagaacatactgacctaaaagaggaggcagaagtggacgctctcgtctcctgctgtg

SEQ ID NO: 893073 - DNA, 120 bp, Artificial Sequence
  ENSG00000235572_3 (sequence is synthesized)
agagctaactgaagccatccagcaaaatgtcggcgtcttcttcgggtatgaaatattaattgcacccaagcttgggctggaaggcactcatcccaggggctttgaaccaggctggaggtg

SEQ ID NO: 893074 - DNA, 120 bp, Artificial Sequence
  ENSG00000235572_4 (sequence is synthesized)
acttgcacattctgcagaccagagcaatgccattccagaccccaaaaggggccctcaacttcctgacccttcttgctgttcctcctgcagcccaaggggtccttcagccagctccagttg

SEQ ID NO: 893075 - DNA, 120 bp, Artificial Sequence
  ENSG00000235575_0 (sequence is synthesized)
tgcattctccactctccccctctgaagattcagaattaagagaaatttggagatgaagatcacctgagtgtcctcattttactaatgatgaaactaggcctaccaagccccttttacaga

SEQ ID NO: 893076 - DNA, 120 bp, Artificial Sequence
  ENSG00000235575_1 (sequence is synthesized)
tctcttctaaatcaaaactgagaaaaagaatgatgaatgcagctttgacaaacaatagagagaagaacagggacacatgtggaggcaccatgtcacagtttctctcacagaaagagccac

SEQ ID NO: 893077 - DNA, 120 bp, Artificial Sequence
  ENSG00000235575_2 (sequence is synthesized)
atgcagtgggaggaagatagggaggcggggatgccagccagtgggaaactcttcctttagacataccgtacctccagacatttcgatgacataaatttattcattcatatatttaacaaa

SEQ ID NO: 893078 - DNA, 120 bp, Artificial Sequence
  ENSG00000235576_0 (sequence is synthesized)
tcataagatggggacgttaagcatgcagcaactacagtcatttgttctcagaggtctggaccaaagagaaacaagaaaagctggagtcacactaccaaaggccgaagctgagcaacagag

SEQ ID NO: 893079 - DNA, 120 bp, Artificial Sequence
  ENSG00000235576_1 (sequence is synthesized)
tggagtcagctgcctgggttcagcatgcagcgctgccgtggacgatctgtctctcttgcatatatgacttaccagttttactttcagtctctccatttctaattaaatgagatgcagaaa

SEQ ID NO: 893080 - DNA, 120 bp, Artificial Sequence
  ENSG00000234626_0 (sequence is synthesized)
cttcagaatgcagcaaagcatgagagagtattagaaggccgctgagaaagacaaacaagttttaggattacagaagtattcaacaaccaaccattgaaggtgcaagaactgggccatccc

SEQ ID NO: 893081 - DNA, 120 bp, Artificial Sequence
  ENSG00000234626_1 (sequence is synthesized)
tgggtccaccagggctttgacaaggcaggtgctggggcagagcactctggccaggaagcaaaagatgaaggttcccatcttggccccagcctggatctgtgcccagtgatagtcatcagc

SEQ ID NO: 893082 - DNA, 120 bp, Artificial Sequence
  ENSG00000234626_2 (sequence is synthesized)
ctggatctgtgcccattgcattgtgtggacataccacgccatgtttctccatcaccttttgaggaaacttctgttgtttccaccttctaaccgtcatcagtaaagctgctgtgaaccttc

SEQ ID NO: 893083 - DNA, 120 bp, Artificial Sequence
  ENSG00000234626_3 (sequence is synthesized)
gaggtggagagggcagaggtgggtcctgaggggctaggacaggtcacagaaaggacgttggggaagcagccccagcatcaggggcgggccaggaatgcagaatgcatggaagctggtcag

SEQ ID NO: 893084 - DNA, 120 bp, Artificial Sequence
  ENSG00000234626_4 (sequence is synthesized)
gtcagagcccgggctgaaggaagcacggagatgcaagggcaccagggcctgtgggaccaggagccgatgatcagggccacagtgcacacagccttggagtgaaggtgcaagaactgggcc

SEQ ID NO: 893085 - DNA, 120 bp, Artificial Sequence
  ENSG00000234625_0 (sequence is synthesized)
cttctgcgagaaaaacaagggtgatccacatcccccatccctcatcttaaagtcaggttcataacggataaggcctctgatcagccaaataacaagctggaggactcaggaggcccttgc

SEQ ID NO: 893086 - DNA, 120 bp, Artificial Sequence
  ENSG00000234625_1 (sequence is synthesized)
tttaaagtgatgtaaattgctaagacaacactgcaaagcattcatatcattttttttttcaaggaagaaaatctaaacattttcctcaggatcttcaataataaaaatctatttatcaaa

SEQ ID NO: 893087 - DNA, 120 bp, Artificial Sequence
  ENSG00000234622_0 (sequence is synthesized)
cctccccagcgtgtctacaggtatcacgtcccaggcccccaggaggtaaggaggagggtgagagctcctcacatctgtggctccgtggaagaggacgcgtcctgtgcctccacaccacac

SEQ ID NO: 893088 - DNA, 120 bp, Artificial Sequence
  ENSG00000234622_1 (sequence is synthesized)
ccttgacattggctgttgtgatgctctgggtataatcagtccctgctccaactctttccatggcactgaagcctggataacacagtagatggggtctcagtctgtggcccaggctgcagt

SEQ ID NO: 893089 - DNA, 120 bp, Artificial Sequence
  ENSG00000234622_2 (sequence is synthesized)
ctgaaatgaaggagattctctctctctttctctctagaggtggggtctctgtggcccaggctgtagtgcagtggggccatcatggctcactgtaggcttggcccccagcctgaagcaatc

SEQ ID NO: 893090 - DNA, 120 bp, Artificial Sequence
  ENSG00000234622_3 (sequence is synthesized)
aatcctcccatctcagcctcccaaataggcctgactgcagatgcttaccaccacacctggctaaattttctatttttattattttattttattttttgagatggattcttgctctgtcgc

SEQ ID NO: 893091 - DNA, 120 bp, Artificial Sequence
  ENSG00000273476_0 (sequence is synthesized)
gactggtcttcccacctcagacgtccttactcagtccatcatctctttcaggattttcttctgtggtctttttcaaactactagctgacttttcccttttatttcccactaggaacccct

SEQ ID NO: 893092 - DNA, 120 bp, Artificial Sequence
  ENSG00000273476_1 (sequence is synthesized)
tgtgcataagcttgaacatttctacctttgccaatggtatttccccttctggcttaccctgcttcctccttctcagacttttccagtcttgattgtcctctccataaacacaagaatgaa

SEQ ID NO: 893093 - DNA, 120 bp, Artificial Sequence
  ENSG00000273476_2 (sequence is synthesized)
cttcaaggcaagttacttaatgtcttagagcctgtttccccatccataaaatggggctataaattcctcaggatgggatgagggtacaaataaaaaatgaagcaggatattctttgtaaa

SEQ ID NO: 893094 - DNA, 120 bp, Artificial Sequence
  ENSG00000273474_0 (sequence is synthesized)
gcctcccaaagtgctgggattccaggtgtaagccaccgtgcccagccctaaaacgtatttaaaatgttattttgttcccttaaaaatacttattatttttgcttagtgcaaagataatgt

SEQ ID NO: 893095 - DNA, 120 bp, Artificial Sequence
  ENSG00000273474_1 (sequence is synthesized)
ttggccttttttctaagtacatatatttaaaaaataaaattagaatgctattgtattttttaacttcatgttttgtatcatgagcaaattccctcctaataaaagttatacatattttaa

SEQ ID NO: 893096 - DNA, 120 bp, Artificial Sequence
  ENSG00000273473_0 (sequence is synthesized)
aggaaaacagtgcaggtaggagaaaagaggggcctgggaagggaagaaaacagcagggaagaggagggctgaagacagagcaggaggaaggctgagtggctttagctctttggcctaacc

SEQ ID NO: 893097 - DNA, 120 bp, Artificial Sequence
  ENSG00000273473_1 (sequence is synthesized)
cagaccagtcagagttcactctgggcacctcccagtggcagccacttgatttgcaggcaaagagcttggagaccggctctgcaaattcagccttatccatgtccacatgggtatggcccc

SEQ ID NO: 893098 - DNA, 120 bp, Artificial Sequence
  ENSG00000273473_2 (sequence is synthesized)
aaaagtactccccgctcatccggatgcagggataccttccaagaccccctgtggaggcctgaaactgtggattgtaccgaactgtagaaatacagtactgtttttttttcctatacatac

SEQ ID NO: 893099 - DNA, 120 bp, Artificial Sequence
  ENSG00000273473_3 (sequence is synthesized)
atacctatgataaagctaggcacagtaagagattaacagtaattactaatgataaacagaacgattgccacaatatactgctgtaataaagttagtgtgtgtgatctctctttcacaata

SEQ ID NO: 893100 - DNA, 120 bp, Artificial Sequence
  ENSG00000273472_0 (sequence is synthesized)
ctcccgcggcgccgactggagctccagagcccctcccgtctctacctgctcgagctcccgaagtcgccgcgccttaacgcgccgtgtcggggccgcaggcgccactagggaagcccagct

SEQ ID NO: 893101 - DNA, 120 bp, Artificial Sequence
  ENSG00000273472_1 (sequence is synthesized)
ccccgctggaaggacgctccggacactgcgaatgaatgacgacaacgcggctcacttggagcgggtccgggtttgtgcggactcggtaccaccgcgggctccgcgcgccgagctgagcag

SEQ ID NO: 893102 - DNA, 120 bp, Artificial Sequence
  ENSG00000273472_2 (sequence is synthesized)
ctgtggctggcttcgggggaaccttcgggggaagctcctggggaccgtgtgccaagcactgggcccgacgcccatcccagcagggaggacgccgccagcctgcgtgggtgcgtgtgtgct

SEQ ID NO: 893103 - DNA, 120 bp, Artificial Sequence
  ENSG00000273472_3 (sequence is synthesized)
gtttgtgtttaaggttgacgctctatgggatagcgccaccccttttcccaggaaaagtgtttcaaggttccagacctggagctcggttagagacccggggtcggaagccaacgcagccaa

SEQ ID NO: 893104 - DNA, 120 bp, Artificial Sequence
  ENSG00000273472_4 (sequence is synthesized)
tggtcgtcgatgtttttgtttcctgcatccccagggcaagtcatgcgctaaacttgtcaccgcttgtgacccctcccccctctccattccattgtaattaaagtggcctagctaagtgca

SEQ ID NO: 893105 - DNA, 120 bp, Artificial Sequence
  ENSG00000273472_5 (sequence is synthesized)
actaattcacaccacagctgttcctatatcgcatttggggcttcgaaaactgggcatggcagaattttaaaatttatccactcttggtagatggattttttttttaatcagtgaaaccag

SEQ ID NO: 893106 - DNA, 120 bp, Artificial Sequence
  ENSG00000273472_6 (sequence is synthesized)
aaacacacaaaccagggcagctttatccctagacagtttcagtttccccaaatacttcgagcttccagtggtgatcacagcccatctgcctacatatctgatgaccatttttttttcctc

SEQ ID NO: 893107 - DNA, 120 bp, Artificial Sequence
  ENSG00000273472_7 (sequence is synthesized)
aaaaaaaaaaaaaaaaaaaaagttcctcttcccaaatgatgggaatttagcagactctgctttgttgtggatgctgggcaatcctagggacttttccctttccaaatgagcagagattca

SEQ ID NO: 893108 - DNA, 120 bp, Artificial Sequence
  ENSG00000273472_8 (sequence is synthesized)
atcctagggacttttccctttccaaatgagcagagattcaaatgaaaccttcttgtgtgggcttcaaaattgtgacttttgtagctccgacttgaattgttgaattccttcaattagtcg

SEQ ID NO: 893109 - DNA, 120 bp, Artificial Sequence
  ENSG00000273472_9 (sequence is synthesized)
aatgagcaaatcaccagccattctaatgagactgccatttcatctgttcgcttcctaccgcttgggctctcaaggaatggaagtttcccttgatgttaccacacagactgatctgcttct

SEQ ID NO: 893110 - DNA, 120 bp, Artificial Sequence
  ENSG00000273472_10 (sequence is synthesized)
tccaggcatcagtggaaacctcatgtatttaacacagactcaaaaaactcatttggcacttttggtcacagtgcagtgccttcagtcacaaaatctgcaaataaaaagcaaacaataaga

SEQ ID NO: 893111 - DNA, 120 bp, Artificial Sequence
  ENSG00000261351_0 (sequence is synthesized)
tttccaggaaggtgtggttaagtgtaagtggtgaaagaagggaaaccattgcttaatgtcgcaaaggagacagactgtcctatgttgtgcagaaagctcccacaccaggtgaaatgcaca

SEQ ID NO: 893112 - DNA, 120 bp, Artificial Sequence
  ENSG00000261351_1 (sequence is synthesized)
tctgaacagagacaggcatgggaaggaggcccaaaagcgacatggcaaaccaccgggcaggggactcgctctttgttgcttcccaaacacttagacgccagcagcatgggttggtgtgct

SEQ ID NO: 893113 - DNA, 120 bp, Artificial Sequence
  ENSG00000261351_2 (sequence is synthesized)
gggctggttaaggccgatggtggagcagagccaacctgcaaaatccacttcctcagcatcagatctcttgataaaagcatgaacctgcatgtaaggaaacgagaggacgtggtgttaaaa

SEQ ID NO: 893114 - DNA, 120 bp, Artificial Sequence
  ENSG00000261351_3 (sequence is synthesized)
agaaacaaaaaaacaaaacccaccaggaaggaaaatccaagagtttcaggtctagagcttgtgctgcacttggaaagagcacctggcacctgcccctgagcaacagtggggccagctgca

SEQ ID NO: 893115 - DNA, 120 bp, Artificial Sequence
  ENSG00000261351_4 (sequence is synthesized)
ggcccaaagacctgctccaccagtcacagcagctgtgaggccttgggcaagtcacctcttggagcctactcgtgcagtatggagacagtaactctgccttaaatgcctcacaggcttgtt

SEQ ID NO: 893116 - DNA, 120 bp, Artificial Sequence
  ENSG00000261351_5 (sequence is synthesized)
agaagggacaaagaaaatgatggacttagtgcatattatatactatatacaccgtctatggctgtccagatatttacagtattacttagctatttccactgccaccaaacgagacagcag

SEQ ID NO: 893117 - DNA, 120 bp, Artificial Sequence
  ENSG00000261351_6 (sequence is synthesized)
gcggagagtgactctggaaggaggctgaatgtaagatgaggcagtcagtattagggaaaggccgcatccccatgaagggggtgggctggccttttctttcccatggccccctcaggcatt

SEQ ID NO: 893118 - DNA, 120 bp, Artificial Sequence
  ENSG00000261351_7 (sequence is synthesized)
tcctctggcatatgcttactcaggctgcgggggtcaccccagctttcccttaaactgatgggagagcaaaggagactggtgtttggtattctgcagccccaggctcagctggaccacagt

SEQ ID NO: 893119 - DNA, 120 bp, Artificial Sequence
  ENSG00000261351_8 (sequence is synthesized)
gggcagggaatgaatgggctctggaagtactgcacagatgactgacagagaagaacaaatgaataaacaggtactgtaagaatccggaataaatagactcaccatgagttgcttcaaatc

SEQ ID NO: 893120 - DNA, 120 bp, Artificial Sequence
  ENSG00000261351_9 (sequence is synthesized)
ctgcggggttttttattaagcttaaaggaagaaagacaaggtaagagctgttgcctggcactggttctagctcaaataacatgtttgcatgcctgtcttctctgcacactagaggccgag

SEQ ID NO: 893121 - DNA, 120 bp, Artificial Sequence
  ENSG00000261351_10 (sequence is synthesized)
gattgcctgggcttgattcatcctcctgttctaagcacagtatcatgcccacagtaagttaatacattcttgctgagttaaactaaggtcaaaaagcaacgtgccaatccctggagagca

SEQ ID NO: 893122 - DNA, 120 bp, Artificial Sequence
  ENSG00000261351_11 (sequence is synthesized)
agtaccaaaaggagcagctactacatccatgatgtagttagacatgccacataagtcttggcactctaaaaaagggcttatggcagcagccaagaatcatcagacgggagggtaaagggc

SEQ ID NO: 893123 - DNA, 120 bp, Artificial Sequence
  ENSG00000261351_12 (sequence is synthesized)
aaaactctgcctgcagaagcaatgctggtgcttccagaaatggggtggggagcctgacaaatccagagtatacgcttccagagaacaaggagccaacttaccatttattcacaaaatctt

SEQ ID NO: 893124 - DNA, 120 bp, Artificial Sequence
  ENSG00000261351_13 (sequence is synthesized)
gaaattccagactgaacactccactgggcagttttggaggaggctgcaaacacatgttgagataagaaaaatgcctggctccttgctccagccatctcctctccccatcccacccctccc

SEQ ID NO: 893125 - DNA, 120 bp, Artificial Sequence
  ENSG00000261351_14 (sequence is synthesized)
accagccagtgctacttttttttaaagtcttctctgcagtccaaaggcagtactactctcatccagtcaaggaaaggcacaggtagaaggccagtgctgcctgttgggtaaccatgttgg

SEQ ID NO: 893126 - DNA, 120 bp, Artificial Sequence
  ENSG00000261351_15 (sequence is synthesized)
aaccactgatctcaaatagcacatttagaattgggaccaagtcaagtccactcacttgtcgggtgattttgaactaatcactattcctctatgagcctcagtttactcttctatgacatg

SEQ ID NO: 893127 - DNA, 120 bp, Artificial Sequence
  ENSG00000261351_16 (sequence is synthesized)
aagaggttgggcctaatgatctcagggaccctttcaagctctgacactctacaatggtaaatcttggagtgcggcatgggaacgtaaccagcaatttactggcagcaacagctaggggca

SEQ ID NO: 893128 - DNA, 120 bp, Artificial Sequence
  ENSG00000261351_17 (sequence is synthesized)
cgtgcaaaccaccaggcatagcccaggtctgacagcacctgcagaagcaaaccggtttttaaaaatcccttttctgagccctagagaagcagtgaaaagttaataaaacattaactgaca

SEQ ID NO: 893129 - DNA, 120 bp, Artificial Sequence
  ENSG00000261350_0 (sequence is synthesized)
aggaggacgaggtgtctccaatgccaagcttcggcagcagaagcagcagccacagcgtacacaaaagcccgaactgttgggaggcggagggtggagggatcctgagagagggactgcggc

SEQ ID NO: 893130 - DNA, 120 bp, Artificial Sequence
  ENSG00000261350_1 (sequence is synthesized)
cggatgcccagctgtcggagccccggccagaaactgaacaacccacatggatttgacatcccctcatgatcatcctcatgatcatcccctcatgagaaattccaagtttcttcatttgaa

SEQ ID NO: 893131 - DNA, 120 bp, Artificial Sequence
  ENSG00000261350_2 (sequence is synthesized)
atactgctctcttcaagaaaccacaattgtaataatttgtagaatgtattaccattagaaaattaattatgtattatgcacacgtttctgaaatacttcactgcagtaaatagtatatgg

SEQ ID NO: 893132 - DNA, 120 bp, Artificial Sequence
  ENSG00000261350_3 (sequence is synthesized)
tgagaattattgtttcctttaacaaaaaactaatgtgggtaaaattatttacataaattcagatgttttggcttcaactgccattctacctcattagcacttccctaacttcataaaagg

SEQ ID NO: 893133 - DNA, 66 bp, Artificial Sequence
  ENSG00000261357_0 (sequence is synthesized)
atctataaatctttgtcaacattttttctccttagaaacagagacctaggccaggcgtttgaggtc

SEQ ID NO: 893134 - DNA, 60 bp, Artificial Sequence
  ENSG00000261357_1 (sequence is synthesized)
ggacaaagtctcagctgggcgtggtggtgtgtgtacctgtaatcccatctacttgggagg

SEQ ID NO: 893135 - DNA, 120 bp, Artificial Sequence
  ENSG00000261357_2 (sequence is synthesized)
ggaaacagagacctagaagtggtattacagcaaaggttttgaacattttaaggcttttgagcgccagattcagacactcagtagttttacatgagagtgctacaacatcctcactaagta

SEQ ID NO: 893136 - DNA, 120 bp, Artificial Sequence
  ENSG00000261357_3 (sequence is synthesized)
gtatttgggttcatcataattttaaattattttggtgtgtcaatttgaacactagagtgatataaaaactaaaaacttgaattcaataattttacaattgtattccatcttaaaatattt

SEQ ID NO: 893137 - DNA, 120 bp, Artificial Sequence
  ENSG00000261357_4 (sequence is synthesized)
tatggtaaacttggataaagtatataaataatccaagggtgtaaagtagaaagtgaaagctcccttctcccagttccagccccctgatgttgccaatattaaacgttgtatatccttgca

SEQ ID NO: 893138 - DNA, 120 bp, Artificial Sequence
  ENSG00000261359_0 (sequence is synthesized)
gcctgtccctgctgaacttgagttcttcaggaattcctctgcaagcctaggggcagggctccagggggcggccaccaggaccccacatgcagtgggatgagggcccatgtcgcgcagcac

SEQ ID NO: 893139 - DNA, 120 bp, Artificial Sequence
  ENSG00000261359_1 (sequence is synthesized)
gttagcggtgagctcggcgccgtaggtctccaggtagaagctgaccagcttgtcggtgaggtccaaggcgtccatggacagcagcgcgccccgcgggatgcgcccgtagccctcgcgcag

SEQ ID NO: 893140 - DNA, 120 bp, Artificial Sequence
  ENSG00000261359_2 (sequence is synthesized)
cggcaccgacagcagcttcagcttgaacttcttgagctcctcggcggtcaggttctccagcgcatccaggatggcgtcgcgcgcgcgccccatggctccaggatccccggccgctgccgc

SEQ ID NO: 893141 - DNA, 120 bp, Artificial Sequence
  ENSG00000261359_3 (sequence is synthesized)
cgctcaccccgctgcagccgccgaccaggaggaagtcggctccggggcggaacctggactccccgccttcctcccactctggtctcccgactccccgccccggtccgttgccctccagca

SEQ ID NO: 893142 - DNA, 120 bp, Artificial Sequence
  ENSG00000261359_4 (sequence is synthesized)
ctacacccttggtcccctcccacccaggcctctggattggggccccaggccgtcgggggacgccaggatcgcgccctccagctggcctgcgaggtgggacccgggagggggccgcagagg

SEQ ID NO: 893143 - DNA, 120 bp, Artificial Sequence
  ENSG00000261359_5 (sequence is synthesized)
ggctcatgggtggcgcctgcttgtctctgggcttgcaccagcgggtacagaccggaaacctgggctggctctcactgggtttattggagcacctaggcttagaacctcggatttctagaa

SEQ ID NO: 893144 - DNA, 120 bp, Artificial Sequence
  ENSG00000261359_6 (sequence is synthesized)
ccccgaaacctccgcggttccccgaaccttaggatcctctcccacatgtcgtagaatcttggaatcatgacagctagaagcgtgaagctccctcaattccacatactggggaaaaatgag

SEQ ID NO: 893145 - DNA, 120 bp, Artificial Sequence
  ENSG00000261359_7 (sequence is synthesized)
ttgtacaaaagggcagagagtgcaaatctctctgagcttcagtttcattttctacgacatggggataaccctccggtgcttataaatattccagcataacatggccaacccgatggctcc

SEQ ID NO: 893146 - DNA, 120 bp, Artificial Sequence
  ENSG00000261359_8 (sequence is synthesized)
cgaaaccttgccagatgcttcctaggggagccagaatttgatcccaacactgattaaaaaaaagaaaaaagaaagagagacagcctccaggagattaaagaccatgaacttgaagccata

SEQ ID NO: 893147 - DNA, 60 bp, Artificial Sequence
  ENSG00000269161_0 (sequence is synthesized)
tttttttttttgagatgaactctcgatcttatcccccaggctggagtgtgatggcgtgag

SEQ ID NO: 893148 - DNA, 120 bp, Artificial Sequence
  ENSG00000269161_1 (sequence is synthesized)
cacaaaaaacaaaaaaaaaataaaaatatatttccagtttcttctgtagttgttggtcttttcaatgaaggcaactaaaacctttttaattatttagtttatttttaatgctgtaatgaa

SEQ ID NO: 893149 - DNA, 120 bp, Artificial Sequence
  ENSG00000269161_2 (sequence is synthesized)
attatttagtttatttttaatgctgtaatgaatttgtattttcctaaaatactttacataacagtacctttttttattcataataccacgtgatttttttttctcttgattagccttgtc

SEQ ID NO: 893150 - DNA, 120 bp, Artificial Sequence
  ENSG00000229918_0 (sequence is synthesized)
cagctgatacagaggtgccatttgtgacatcttaattccaacagagaagtgccatcacaggtccagtgaattgtgaatctatcacagctggcagaacacctggaattcacagtgatcttt

SEQ ID NO: 893151 - DNA, 120 bp, Artificial Sequence
  ENSG00000229918_1 (sequence is synthesized)
ctaagacgacctaagcctcatgtgtctgccgaccaggctcattgttgtgcaaagcagatcacaagctgcctcgcaagcctccggtgcccatgtgctcctccctgtcttggttcctattgc

SEQ ID NO: 893152 - DNA, 120 bp, Artificial Sequence
  ENSG00000229918_2 (sequence is synthesized)
tcctgattatgtgttagtcctcactgtgcagttcaaatcaagaagaggcactaaaaatggaactgctaaaaacacatttccagattaaatctgtgaacacattaaaaatattataaacta

SEQ ID NO: 893153 - DNA, 120 bp, Artificial Sequence
  ENSG00000253742_0 (sequence is synthesized)
ctacacagactctgtgaagggctgattcaccatctctagagacaatgcccagaattcactgtctctgcaaatgaacagcctgagagccgagggcacagttgtgtactactgtgtgaaaga

SEQ ID NO: 893154 - DNA, 120 bp, Artificial Sequence
  ENSG00000253741_0 (sequence is synthesized)
cccagcagcgcgagaccctcgccaggctctgaagacgcggcctggccctggccgttcggcccttcgtctgagcgcaaaggctccagcacctccgcggccgaagccgcgggacttttcgtg

SEQ ID NO: 893155 - DNA, 120 bp, Artificial Sequence
  ENSG00000253741_1 (sequence is synthesized)
gaaaatgggacccagcccgatcgccagcggcgctgcagcggactctgcgggaacctagcttctgctccaggacctccagggccaccccagctcgcagggcgttcgcagcggctcagggcg

SEQ ID NO: 893156 - DNA, 120 bp, Artificial Sequence
  ENSG00000253741_2 (sequence is synthesized)
aatcacgctcatggtccccgtgcgcattttcagccccagccggggagggacccagagctggaggcttagccctggagataccggtgaagatggatgaatgagaaaccagttggagcttcc

SEQ ID NO: 893157 - DNA, 120 bp, Artificial Sequence
  ENSG00000253741_3 (sequence is synthesized)
aaggcctgtcgtccatcaggagaagcaaaaggttttattctagagacaagtccttccaactgtacagctgatggagtagccaaggaaacctggacaggaggtagcttctgacctttggga

SEQ ID NO: 893158 - DNA, 120 bp, Artificial Sequence
  ENSG00000253741_4 (sequence is synthesized)
gccagaagggccagtaaatggattctcttctcggaggcctccgctatccacgtcacctgaggtgtcttggggtctttccagagacacatagaaggtgccatctatgaggaacaggccttc

SEQ ID NO: 893159 - DNA, 120 bp, Artificial Sequence
  ENSG00000253741_5 (sequence is synthesized)
accagacatcaaatctgttggcatcttgatctttgacttctccaccgccagaactagatcaagacatgaaacccatgttcaagatactttccagtgtgtcttcatgtgatcctctgagtc

SEQ ID NO: 893160 - DNA, 120 bp, Artificial Sequence
  ENSG00000253741_6 (sequence is synthesized)
cagccatcaggctaccagcagctcttggaaaccctgacatacttattcttagaagactgctttccggactcaaagtggaacctcaaattttcaattttctttgtttttaaagcctacaca

SEQ ID NO: 893161 - DNA, 120 bp, Artificial Sequence
  ENSG00000253741_7 (sequence is synthesized)
tagattacatccttcatttgaagagactctaatggaaggctgccatggaaactctctcatgtggctgacctcctacctcacttgctctttctgaatgaagttcccacttttgcctgcctt

SEQ ID NO: 893162 - DNA, 120 bp, Artificial Sequence
  ENSG00000253741_8 (sequence is synthesized)
aatgaaagtaatgctccccaaactcaagcccagggctgcgaattggaagcagctggggctactgtttctgggtgctggtgtgaatggcaggatgtgaacaccagcctgtgacgggcaaaa

SEQ ID NO: 893163 - DNA, 120 bp, Artificial Sequence
  ENSG00000253741_9 (sequence is synthesized)
agatggacacacaggcagagcctgacaggtgctggtggtcctatctggtcctgagttgctgggaccctccttgcccactgcccctagaatggactttggcctcaggttcgaagtgttcag

SEQ ID NO: 893164 - DNA, 120 bp, Artificial Sequence
  ENSG00000253741_10 (sequence is synthesized)
atgtgactgagatgagccttttccccatgcctcaggaatagcgaagaaactctatctggaaggttccccaggcttccccacccagcagcctctggtattagaccaggcagtggctggcca

SEQ ID NO: 893165 - DNA, 120 bp, Artificial Sequence
  ENSG00000253741_11 (sequence is synthesized)
ggatggtggggacagaagggagacaaaggtgagcagtgggtggggtcacatcctccctgacattgaatagacaacatggggaggaaggatgagtgatctttagaatgttcatggaaaatg

SEQ ID NO: 893166 - DNA, 120 bp, Artificial Sequence
  ENSG00000253741_12 (sequence is synthesized)
catattgggaaaaagaatgcatgaatttcaaattgttttgcaacaaaataaacttgtactaacttgtgaaaacacgtccgaacaggatctagtttgaggccctaagaagtataagacaac

SEQ ID NO: 893167 - DNA, 120 bp, Artificial Sequence
  ENSG00000253741_13 (sequence is synthesized)
agtttgaacagagctcctatcagacacatgaattctgctaaaattgaaaccagaacaaacatgcaattgatggtgaagcttggctggaaacatggtgaaatcattgatgatttattgaaa

SEQ ID NO: 893168 - DNA, 120 bp, Artificial Sequence
  ENSG00000253741_14 (sequence is synthesized)
gtttatagggacaatgcctcaaagaaatcagcaatttaagtaagtggataactcattggaagaagagaagagatgatgttggagaggaagtccacagcagcaggccagccacatcagtct

SEQ ID NO: 893169 - DNA, 120 bp, Artificial Sequence
  ENSG00000253741_15 (sequence is synthesized)
gtgaggaaacaattcatcttgtttgtgccctaatttaagaggactgattaatagcagcagaaacaatagccaacgctgtaggtatcccaaggtgttcagcttacacaattctgactgaaa

SEQ ID NO: 893170 - DNA, 120 bp, Artificial Sequence
  ENSG00000253741_16 (sequence is synthesized)
ttaaagttgagtaaactgtccactcggtgggtgccaaaactttctcccagctcagctgcagataagagaaaagcgttctatggccattttaaacaagtggaatcaagatcctgaagcatt

SEQ ID NO: 893171 - DNA, 120 bp, Artificial Sequence
  ENSG00000253741_17 (sequence is synthesized)
aggcaaagcacaagcaaagcaatgactacctagaggtgggcgtggtcccatcagagtaaaagcagacatgtcaagggcaaaggtcgtggcaaccgttttgtgaatgctcaaggcatcttg

SEQ ID NO: 893172 - DNA, 120 bp, Artificial Sequence
  ENSG00000253741_18 (sequence is synthesized)
cttattgactttctggagggccaaagaacagtaacatcttattatgagagtgtatagagaaagtcagccaacgatttagcaggaaaacacccaggaaatcgtcaccccggaaagcttcac

SEQ ID NO: 893173 - DNA, 120 bp, Artificial Sequence
  ENSG00000253741_19 (sequence is synthesized)
cagagagcccttctccaccatgacaatgctcctgctcattcctctcatcaaacaaggccagttttgtgagagtttcaatgggaaatcactaggcatacaccttccaggcctgatttggtt

SEQ ID NO: 893174 - DNA, 120 bp, Artificial Sequence
  ENSG00000253741_20 (sequence is synthesized)
acttctgttttataattttaaaaaatctttaaagggcacccacttttcttcagttaataacgtcacaaagactgaagtggcatggttaaattcccagggtgcccaattctttagggatga

SEQ ID NO: 893175 - DNA, 120 bp, Artificial Sequence
  ENSG00000253741_21 (sequence is synthesized)
actgaatggctggtaccattacttgcagaagcgtctcgaccttgatggagctcatgctgagaaataaaacattttttaatttttatcttttaattcaattttttcgtgaacttttgaagt

SEQ ID NO: 893176 - DNA, 120 bp, Artificial Sequence
  ENSG00000253741_22 (sequence is synthesized)
ccccttgtatttgtttttggtggaactttgagtctgatttctcagctccccatggatggctgcatcttaacagagaaatgaacgccatttaccctgatgctctctacttggcctaagttt

SEQ ID NO: 893177 - DNA, 120 bp, Artificial Sequence
  ENSG00000253741_23 (sequence is synthesized)
cagatgttgaacacacacgtgtgggaatttatgaatctgtgcacctgtgccagctggtgggtgaagtctaagtttcttcaacacaattagttatcttctgcctcctggaatctggtagga

SEQ ID NO: 893178 - DNA, 120 bp, Artificial Sequence
  ENSG00000253741_24 (sequence is synthesized)
aaggttgaggaaaagcagccatccacagcgcctccaccactggaatgggggcagccctaacgtgtgccccactgccccccatgctgaggagtccttcactccagggatgtcttcacccca

SEQ ID NO: 893179 - DNA, 120 bp, Artificial Sequence
  ENSG00000253741_25 (sequence is synthesized)
atcattcagactcccccagtgttcctgcgtcacctgaaaggtcggaagcatctcagcacatactctccatgagtggtacttaggcctccctccccatcaatactgaagccctcagaggca

SEQ ID NO: 893180 - DNA, 120 bp, Artificial Sequence
  ENSG00000253741_26 (sequence is synthesized)
gaggggagtcaaggaaaagagtggccatcagcaataaatgagttacaaggtttgatttcaaagagaaaaacttgtcaccaaaatcactactcaggagatctggacttcctctgaatgtga

SEQ ID NO: 893181 - DNA, 120 bp, Artificial Sequence
  ENSG00000253741_27 (sequence is synthesized)
gttaaagaacccttgagggttaagagccaactgcacctgatccccactctcccatcccaagaccctgggaagtcaaaccaagaggtaatcaacagaaaacaagtttaatgcaacaggtga

SEQ ID NO: 893182 - DNA, 120 bp, Artificial Sequence
  ENSG00000253741_28 (sequence is synthesized)
caacggtctggagcgagtccatgctccggaaggctcagtctgtggcagtcccgtggctcaagacaggctgaggccggctgcaatggaggccagcagcaggaggatggccagccacagccc

SEQ ID NO: 893183 - DNA, 120 bp, Artificial Sequence
  ENSG00000253741_29 (sequence is synthesized)
accacagctctcacccatgctcccagcatattctttgaacactgatgagttgataggtggcccctctaaattgcagtagcgaattttacaacacttgaggtaaaagaagggcatgggctc

SEQ ID NO: 893184 - DNA, 120 bp, Artificial Sequence
  ENSG00000253741_30 (sequence is synthesized)
ttccaggagaaaccgcttctcctctggcttgggtctctccatcgctgcacaaccagcggagcactgcttcgcaaccatgaaaaaacgtggaaatatttctaataggaaataaagaccgag

SEQ ID NO: 893185 - DNA, 120 bp, Artificial Sequence
  ENSG00000253741_31 (sequence is synthesized)
agaaggcaatcacgcaattccaatgcctgacaccgaggcccttctgtctgggtcaaagcctcacccctggcggccctgctcaaaggtgcacagtcaactggggcaccaagggggagtcgg

SEQ ID NO: 893186 - DNA, 120 bp, Artificial Sequence
  ENSG00000253741_32 (sequence is synthesized)
gaggacgagggccaggcctgtgtgttgaatgctgcttcagggaagggctggcttctgcgtggtatggcctgtccatatgcactgggaatgcgggtctaggggttgctgtttgggaacaaa

SEQ ID NO: 893187 - DNA, 120 bp, Artificial Sequence
  ENSG00000253741_33 (sequence is synthesized)
caggtctcaacttctcaaacacagggttggctcaggcctttgtgaccacagacagacacatgactcccagccattctggccatcacccagggtgtggagctggcctcttggtgggcctgg

SEQ ID NO: 893188 - DNA, 120 bp, Artificial Sequence
  ENSG00000253741_34 (sequence is synthesized)
ctcgactctgagctgggggtcttgtctcatgaccacacttcatcttatacatcactgtacaaatcattttgccatattaagttataaagtcgatgtgggccacactgagtctgaagcatc

SEQ ID NO: 893189 - DNA, 120 bp, Artificial Sequence
  ENSG00000253741_35 (sequence is synthesized)
cctgaagatctccctgtgggcagaatgtgctgggtgtccagattccccttggggagggcttcatgtacccagaggttttcaggggaatcacagatgacagagcagtggtctccacaattt

SEQ ID NO: 893190 - DNA, 120 bp, Artificial Sequence
  ENSG00000253741_36 (sequence is synthesized)
ttaaggcatgcaccctcctttgagaacacacttgaaggctgtacaccttggttttgtgcatctcttgtaagagtgacatagacactgttctctgtggcgcatttaacactattaaagctt

SEQ ID NO: 893191 - DNA, 120 bp, Artificial Sequence
  ENSG00000253741_37 (sequence is synthesized)
gatgatatatacatgcatatatattttggagaatttataattctgaaaacaatgctggtcttatggaacccatccattcccctttccccgtgtgtgctccgagctgtggtggcacgtgaa

SEQ ID NO: 893192 - DNA, 120 bp, Artificial Sequence
  ENSG00000253741_38 (sequence is synthesized)
aaggggtccttccagcagtggcccacagccctgggctgcttacttgctcacttcatttacaagagcaagaaatacacattcttgtgttgtttaagtcattatgatgtggggatttccatt

SEQ ID NO: 893193 - DNA, 120 bp, Artificial Sequence
  ENSG00000253741_39 (sequence is synthesized)
actcacacacctgatctagtagtaacacagtagcctattttagcaatatcatttattcaataatccattctttccccattagttttgagccttcatttattgtgtactaagttctggtta

SEQ ID NO: 893194 - DNA, 120 bp, Artificial Sequence
  ENSG00000253741_40 (sequence is synthesized)
tttttagtggttgtaatctccttctttcctactctcttaatcatgggattgccaatatctgctctgtgtttctgtgccatctatagcctctggccttggtactgcttcaaaactgatatt

SEQ ID NO: 893195 - DNA, 120 bp, Artificial Sequence
  ENSG00000253741_41 (sequence is synthesized)
tctaaccttactttgacttctccattcagtgaagttcccatagttcatcactcaactgctctctttccatcgtgaccttctgaactagctcacacccagatgtacttttgttatctgcct

SEQ ID NO: 893196 - DNA, 120 bp, Artificial Sequence
  ENSG00000253741_42 (sequence is synthesized)
agccatgacctccacaatgctgggctatcctatgttatgtcccctaagatatcccttctctcttacctttggggatagtcctaagcttccatcatggcactcaaagtccaaccttatttg

SEQ ID NO: 893197 - DNA, 120 bp, Artificial Sequence
  ENSG00000253741_43 (sequence is synthesized)
taccctcattctctgagcagacaccaccgtattctgtttcacagagaaaatgtgactgctggggataattctttcaacttcctggcctcttcctatacatgatctttctctgtattcttg

SEQ ID NO: 893198 - DNA, 120 bp, Artificial Sequence
  ENSG00000253741_44 (sequence is synthesized)
cctattgctcttccatgttgatagaagtgtctgttctccttgtcagtgtctcggccttggatctgtcccctagactattctgcctgtgtaaggaccttccctgaccagctgggccaccat

SEQ ID NO: 893199 - DNA, 120 bp, Artificial Sequence
  ENSG00000253741_45 (sequence is synthesized)
ctcctgcttctccaatccctcactctagactgactcttaacctttggtcaacaatacttgagcttttacattcataatggagcatctgtgttgaaccttgttcttttctagacactaccc

SEQ ID NO: 893200 - DNA, 120 bp, Artificial Sequence
  ENSG00000253741_46 (sequence is synthesized)
tccgttctgtcttccatccatggtgacttttctagaaagagcatctatcacactggagacagcaaactccttgatccattctaattcctaaccctgcaataattttctatctcccttact

SEQ ID NO: 893201 - DNA, 120 bp, Artificial Sequence
  ENSG00000253741_47 (sequence is synthesized)
tatttcatctggacccactgtagcaggcactgccttacactagcacagttcctacacctctctctggcctctgaggactttgctcttcacattttaaagggaaaaaaaggcagggcgcgg

SEQ ID NO: 893202 - DNA, 64 bp, Artificial Sequence
  ENSG00000253741_48 (sequence is synthesized)
ccccacctctactaaaaataaaaaattagccagtgtggtggcgcgcatccaggttgcagtgagc

SEQ ID NO: 893203 - DNA, 120 bp, Artificial Sequence
  ENSG00000235399_0 (sequence is synthesized)
tacttattaatgcatattacctgtgaataagaaaaaggtgcttgcatttcagaagtttgtgtgaatcacgtgtcctcctcatttcctaccagagttcagatacagaggaccaactatact

SEQ ID NO: 893204 - DNA, 120 bp, Artificial Sequence
  ENSG00000235399_1 (sequence is synthesized)
ctcagctccacttgaacctcaggcacagagatggaatctgaagcggaccaaagggtggcttcttggagatggtgaggcgtggccacaggaggaacaggatgcatgacagctgcctcccac

SEQ ID NO: 893205 - DNA, 120 bp, Artificial Sequence
  ENSG00000235399_2 (sequence is synthesized)
acagatataccgcatctaagaagatgtcgccacccccatgagaaatatctactgtatgctcatgtttgaatgtgtgtatatatataggttcaatatatacataagttgcaaagaactgaa

SEQ ID NO: 893206 - DNA, 120 bp, Artificial Sequence
  ENSG00000224075_0 (sequence is synthesized)
atagagacctccgtggagatgggtcagcagtgtactctcacctgtcttctaggtgggatccactggattatttcattgtcctaggaaaggccagacatgagccagcatgaagaaacatca

SEQ ID NO: 893207 - DNA, 120 bp, Artificial Sequence
  ENSG00000224075_1 (sequence is synthesized)
agcagaaccctaggaataaaatgcaaaatccctatggatccaagaaaatctgcaggattcctcaggcctcactagacgttgtaggagacaatacgaggtgtgagaacactgtttcacctt

SEQ ID NO: 893208 - DNA, 120 bp, Artificial Sequence
  ENSG00000224075_2 (sequence is synthesized)
ggactttccttcatcttggttcctgcctttcccagagagcctctgtgaggccaaggataaagggagacagtgaggtcaagagtccggccatccttcactgacatctgcatctatggtctc

SEQ ID NO: 893209 - DNA, 120 bp, Artificial Sequence
  ENSG00000224075_3 (sequence is synthesized)
agggtttcctgcatctggctcaatgacttccacactaagcatttcccagttcatggagaacgacactcattggaatccactacgaggcttttgggtcctctgacaggaatcatcgaagat

SEQ ID NO: 893210 - DNA, 120 bp, Artificial Sequence
  ENSG00000224075_4 (sequence is synthesized)
tgcctgatgccagcacaaggcagctcattgtctcagtggctcttgatggtactgctggacacccttttcaggattgctatcaccacagacggcctttgagacactgactcaacatcatct

SEQ ID NO: 893211 - DNA, 120 bp, Artificial Sequence
  ENSG00000224075_5 (sequence is synthesized)
gcaactgtgagaagccaatcagaggtgtgagaacacagctccaccttggtcttgccgttgtcatggttactgcctttccctgagagcctctgtgaggcccaggatgaagagagacagtgt

SEQ ID NO: 893212 - DNA, 120 bp, Artificial Sequence
  ENSG00000224075_6 (sequence is synthesized)
cagcctctggggtctcagcccttcttgggaatggagttagaagagcatattccagcgataacctcacagtcatgaaatggttcttcctccagcgtgacccaaccatggtgatggtcatag

SEQ ID NO: 893213 - DNA, 120 bp, Artificial Sequence
  ENSG00000224075_7 (sequence is synthesized)
gagtcctaaggatgaaatcccaagacgatggaggagtgtcacctcacaacatgaagcacccactcagctgtgaaccaaattcgaggatcatgggactatactgtggatcccacaaaaaag

SEQ ID NO: 893214 - DNA, 120 bp, Artificial Sequence
  ENSG00000224075_8 (sequence is synthesized)
acagttcattaaatacacaaaggtaggactgctacaggaagaaagtggtggagtcagaggtcacaatccaaagcaaggtgacagtctcttgaagaagacaccctgagtgctgaattaagg

SEQ ID NO: 893215 - DNA, 120 bp, Artificial Sequence
  ENSG00000224075_9 (sequence is synthesized)
attgaggccatcaagctacagttgatcttacaaatggaaccccaatgagctcaactaataacttctaccaaggaacctggatcaacccactggccctttggctggcctagaatattcccc

SEQ ID NO: 893216 - DNA, 120 bp, Artificial Sequence
  ENSG00000224075_10 (sequence is synthesized)
tctggaggacactaccaccagagaccccttctttacctctatccagcatctcctttttcagatcggcttctgccaccatctcctatagatgtcacataacttgagctaccataggcttca

SEQ ID NO: 893217 - DNA, 120 bp, Artificial Sequence
  ENSG00000224075_11 (sequence is synthesized)
caaggagcagtgtgcaccctgtccagagaaaatggattccttccgtcttttctgccactgtgctcacaaccgcaggaataaaaattactgcagcttcttagttgcataaccaacatcttt

SEQ ID NO: 893218 - DNA, 120 bp, Artificial Sequence
  ENSG00000224075_12 (sequence is synthesized)
tgatgacacatggtcatttctccaggaaaagactgactgtctctgtggaggaactccataattctctcttccattacatttaatattaaaatgatggaacataatgtaaagaacacgaaa

SEQ ID NO: 893219 - DNA, 120 bp, Artificial Sequence
  ENSG00000224075_13 (sequence is synthesized)
tgtggggtccacaggatattcccatagttctaggagaggacagacattagcctgcctaaagaaacatcaagcagagccccaggaataaactgtggaattcctaacgattcaaaaagattt

SEQ ID NO: 893220 - DNA, 120 bp, Artificial Sequence
  ENSG00000224074_0 (sequence is synthesized)
agagcagatgaaaccaaagccttgggcccacacagcaaacctttgggtagcaacgagttctagaaaaatggagcctaaggagtccagattgtttttccttgaaataccaagcaagtctaa

SEQ ID NO: 893221 - DNA, 120 bp, Artificial Sequence
  ENSG00000224074_1 (sequence is synthesized)
aatgattactacccatgagatatatttttaatgatgttaggtttgggggtgtgttagattgttttgcattgctataaatgaatacctgaggctgagtaatttgtaaagaaaagaggttta

SEQ ID NO: 893222 - DNA, 120 bp, Artificial Sequence
  ENSG00000224074_2 (sequence is synthesized)
tttggctcacatttctgcctggcagtggctatagttggcttctagtgaggcttcaggaagcttttactcatggtagaaggcaaggggggggcaggcatgtcacatagcaagaggaggagt

SEQ ID NO: 893223 - DNA, 120 bp, Artificial Sequence
  ENSG00000224074_3 (sequence is synthesized)
gagagagagaaggaggtgccaggctcctttaaattgtaaactaacagcaagaactcactcattcccatgaggaagggaccaggccattcatgagggatcctccctcatgacccaaacacc

SEQ ID NO: 893224 - DNA, 120 bp, Artificial Sequence
  ENSG00000224074_4 (sequence is synthesized)
cccgactaggccctacctccaattctgaggatcacattccaacataagattcagagagtgaaaacattcaaagtctaccaggaggtgattaaagtgatatgacaatgtgaggtatatgtt

SEQ ID NO: 893225 - DNA, 120 bp, Artificial Sequence
  ENSG00000224074_5 (sequence is synthesized)
acctggaaggtagtaggagcagatggtgggaagaagaaaagtgtagcaactacccagtcctctgcatgaaagagccctccctcaagagcttggaagcaacacaaaatggggagtagacca

SEQ ID NO: 893226 - DNA, 120 bp, Artificial Sequence
  ENSG00000224074_6 (sequence is synthesized)
ggtctactatcagcacagagataagagactctgaacagagaagacggatccaagggggacagcctggagtcgggggacccagctggaggccagcacagttgcctgggcgagaggtgagcc

SEQ ID NO: 893227 - DNA, 120 bp, Artificial Sequence
  ENSG00000224074_7 (sequence is synthesized)
ctccctcctggagaggtgagcccttcagaggaagagatgagaaacggaaacccctgactcattaccatcggccttggcttgctgttccattggcagccctttctacctgtgatcaacaca

SEQ ID NO: 893228 - DNA, 120 bp, Artificial Sequence
  ENSG00000224074_8 (sequence is synthesized)
tgcctatctagcagcatactaactctgtctctcattctagagcacgcatccgcccagagttaataagttttagaatgtcggcgtcctgtcattgcatcatccacagattcagtgaccaga

SEQ ID NO: 893229 - DNA, 120 bp, Artificial Sequence
  ENSG00000224074_9 (sequence is synthesized)
gaggaagaaacacagggaagctttatattaataaaggtcttgcgttgaatattcctaagcaactgtcaaaagtaagcagttcgtatgcttcttttctggtgacaataatagactgggccc

SEQ ID NO: 893230 - DNA, 120 bp, Artificial Sequence
  ENSG00000224074_10 (sequence is synthesized)
catcccttcccagagctcccgataagcaactggatccagtctccactccagaacctgaatggactttttgctcaatacagctactgctggccagtcagcttcatgggacatgtgccaaga

SEQ ID NO: 893231 - DNA, 120 bp, Artificial Sequence
  ENSG00000224074_11 (sequence is synthesized)
ggtcttccattccatcttgagtaaacaaattagagtcctagcaaaaactcttcccatgagccctttaactgacctaaattcaacatatgtcataatctaggaggaagcaccaaaatggaa

SEQ ID NO: 893232 - DNA, 120 bp, Artificial Sequence
  ENSG00000224074_12 (sequence is synthesized)
ggaaacgcacaccagcccctgcagggattctgggctacgagtgcatgaaggcagagtcgagactgtggattctggaagaagaatccccttgagagagcatctgattcaaaattcatccat

SEQ ID NO: 893233 - DNA, 120 bp, Artificial Sequence
  ENSG00000224074_13 (sequence is synthesized)
atatgacttaaaagccacccaggttgtcatatcatctgtaatgattattcactagagccaagagtgtttatattctgaagatcagaacaagattcccaacaaaacagaaactaaggttct

SEQ ID NO: 893234 - DNA, 120 bp, Artificial Sequence
  ENSG00000224074_14 (sequence is synthesized)
cagcatgtccatggaggcggattacatggatcaggctgttctctggagcggtagttgtttatctccgtctgccttctctctcaccgaagtgtatgtcaccaccccaaggaagattcaatg

SEQ ID NO: 893235 - DNA, 120 bp, Artificial Sequence
  ENSG00000224074_15 (sequence is synthesized)
gacatggacacaagccccctgtggctccagaactatcttttggttgtgaactaaaggccgatgaagatgatcggtttcgggtggataatgatgaaaatgagcaccagttatctttaagca

SEQ ID NO: 893236 - DNA, 120 bp, Artificial Sequence
  ENSG00000224074_16 (sequence is synthesized)
cggtcaggttaggggctgtgtaaaagatgaattgcacattgttgaagcagaggcaatgaattatgaaggcagtcctattgaagtaacactggcaactttgaaaatgtcagtacagtcaac

SEQ ID NO: 893237 - DNA, 120 bp, Artificial Sequence
  ENSG00000224074_17 (sequence is synthesized)
ggtttcccttgggggctttgaaataacatcagccgtgggattacagttgaagtgtggatcaaggccaatgcatattagtgggcagcacttagcagctgtggagggagaggcagagtcaga

SEQ ID NO: 893238 - DNA, 120 bp, Artificial Sequence
  ENSG00000224074_18 (sequence is synthesized)
agatgaagagcagggggatgtgaaactcttaggtatttaatatatctggaaggcaatcttcccctggaggtagcagcaagtttccacagaaaaaaaagtaaaacttgctgctgatgaaga

SEQ ID NO: 893239 - DNA, 120 bp, Artificial Sequence
  ENSG00000224074_19 (sequence is synthesized)
tgatgatgatgataattttgatgatgaagaaattgaagaaaaagctccagtgaagaaatctatataagatgctccagccaaaaatgcaccaaaatcaaaccaaaatggaaaaactcaaaa

SEQ ID NO: 893240 - DNA, 120 bp, Artificial Sequence
  ENSG00000224074_20 (sequence is synthesized)
ctatcaagaccaagatcaaaaggtcatgaatacttcaaaaaaaacaggaaaaaactcctaaaaatccaaaaaggacctagttctatagaagacattaaagctaaaatgcaagcaagtaca

SEQ ID NO: 893241 - DNA, 120 bp, Artificial Sequence
  ENSG00000224074_21 (sequence is synthesized)
gaaaaagcacattgaacagtcctgggcaatactgcaaaattaagtccaaagatggggacagaggaaagagaaatatagtccatgctgagtatcatcagccatccagactgaagtcttctg

SEQ ID NO: 893242 - DNA, 120 bp, Artificial Sequence
  ENSG00000224074_22 (sequence is synthesized)
ttttaatctgaatccccttttctgatttgccagccatgctccttccaggctggaaacgaactcactcttcatgtcctaaagcactttcttttgacagctgtgattctgtgaacctagccc

SEQ ID NO: 893243 - DNA, 120 bp, Artificial Sequence
  ENSG00000224074_23 (sequence is synthesized)
cttgctttctgttacttgcacatttgcctcacctctctgaccatgttttaatcacctttgggtctccttggctgctcaataaatatttgaatgaatcaaaaaagaaaagaaaaaagaaaa

SEQ ID NO: 893244 - DNA, 120 bp, Artificial Sequence
  ENSG00000224074_24 (sequence is synthesized)
tggaaggccaaggcaagaagagcacatgagcccaggagttcaagttcagccagagcaaccctcaggctgaggcaggagggtcacttgacccagggaggtcgatgctgcagtgagctatgg

SEQ ID NO: 893245 - DNA, 120 bp, Artificial Sequence
  ENSG00000224074_25 (sequence is synthesized)
ctgtctcaaaaaaaaaaaaaaaaaagtcattactttaaagggcttccaaagtctatatagaatgaactgccagcagcccaaggaactataaatggagctccatgtatttatgcaaatgtt

SEQ ID NO: 893246 - DNA, 120 bp, Artificial Sequence
  ENSG00000224074_26 (sequence is synthesized)
aggaactataaatggagctccatgtatttatgcaaatgttgagggcatatattcatttcaaagagtgtttggttcctgctgtattatcaatgcctgtcagtaaaacataatgtttaacac

SEQ ID NO: 893247 - DNA, 120 bp, Artificial Sequence
  ENSG00000253747_0 (sequence is synthesized)
gtggattgggtgcataggtcatgaagggagcacacattactcccctttcctcaagagtccagtcaccatccccagatccatgtccaaaaacagttcttcctacagctgagctacatgagc

SEQ ID NO: 893248 - DNA, 120 bp, Artificial Sequence
  ENSG00000264456_0 (sequence is synthesized)
gaaagcttgtcaacttagctgttacacagcttggcatatttcaacttcttcccaatcgatcttcggtctctttctctgaaacttgtaaaattgtggtaagatctatataacattaaaact

SEQ ID NO: 893249 - DNA, 70 bp, Artificial Sequence
  ENSG00000264456_1 (sequence is synthesized)
acttgtaaaattgtggtaagatctatataacattaaaactggccattttaacctttttctttatggcgtg

SEQ ID NO: 893250 - DNA, 120 bp, Artificial Sequence
  ENSG00000264456_2 (sequence is synthesized)
atctcggctcactgcaacctccgccccccagggtcgagtgattctcttgcttcaggctcgagagtagctgggattacaggcgtgcgccatcacgcccggctaattttggtatttttagta

SEQ ID NO: 893251 - DNA, 77 bp, Artificial Sequence
  ENSG00000264456_3 (sequence is synthesized)
cgcctggcctcattttaaccttttatttttttgagacggagttttgctttgtggcccaggctggagtgcagtggcgc

SEQ ID NO: 893252 - DNA, 120 bp, Artificial Sequence
  ENSG00000264456_4 (sequence is synthesized)
aactatcacttctgtttccaaaactgtttcatcatcataaacagaaactttgtactcattaagcagtaactcctcatttctcctccctctagcccctgctcacatctaagctactttctg

SEQ ID NO: 893253 - DNA, 120 bp, Artificial Sequence
  ENSG00000264456_5 (sequence is synthesized)
tatctgagtttgcctgttctagatatttcatataactggaatcgttcaatgtttgtccctttgtgcctggtttctttcacttagcatagtgttttcaaagttcattcatgttgtagcatg

SEQ ID NO: 893254 - DNA, 120 bp, Artificial Sequence
  ENSG00000264456_6 (sequence is synthesized)
ttcattcatgttgtagcatgtgtcagaactttattccttttatggggctgaatgatattccattgggtggatgtgccacattttttttgtttgttttgttttgagatggagtcttgctct

SEQ ID NO: 893255 - DNA, 120 bp, Artificial Sequence
  ENSG00000264456_7 (sequence is synthesized)
ctcactgtgattttgatctggatttccttaatgactaatgatgttgcccatcttttcttgtgcttgttggtcatttatagatcttcattgcagaaatgtctattcaagtcctttgaccat

SEQ ID NO: 893256 - DNA, 120 bp, Artificial Sequence
  ENSG00000264456_8 (sequence is synthesized)
tttaaaattgggttgtttatctttttgttgttgagttttagagattccttctatattctggatatcaaattagatatgactcacagatatattataaaatatatattctcccattctaag

SEQ ID NO: 893257 - DNA, 120 bp, Artificial Sequence
  ENSG00000264451_0 (sequence is synthesized)
catgcccttgtcacttcggcctgagtcccagaatgagaagttacatggagcagacctgaacaagattcacaacctgaacagaatcactgcagccaatccacaaacctaaaattgtctaca

SEQ ID NO: 893258 - DNA, 67 bp, Artificial Sequence
  ENSG00000264451_1 (sequence is synthesized)
gaatcactgcagccaatccacaaacctaaaattgtctacattcctgccgagtcacttgagtcaggag

SEQ ID NO: 893259 - DNA, 120 bp, Artificial Sequence
  ENSG00000264451_2 (sequence is synthesized)
gagccaagatcacgccactgcactccagagtgggaaacagagcaagactccacctcaaaaagaagaaggagaaggagaaggagattatctacattcctgaggaggagaagttgtacttaa

SEQ ID NO: 893260 - DNA, 120 bp, Artificial Sequence
  ENSG00000264451_3 (sequence is synthesized)
gtacttaaactaccttgatccaacttccagctttacaatcattgccccccaccatgcatatatcatacatatatacctgctagcatgaatacctgcatcatatctagaattaatgggaat

SEQ ID NO: 893261 - DNA, 120 bp, Artificial Sequence
  ENSG00000264451_4 (sequence is synthesized)
agtcatagggccaatctttcttatatcaagcaagctgaacaagggtccaagggataaggccacagctacttcctcctgctttagaacagagctaaataaacctgttcctaagtcttgtga

SEQ ID NO: 893262 - DNA, 120 bp, Artificial Sequence
  ENSG00000253746_0 (sequence is synthesized)
aaagtgctttgaacagcgtttggcacatggagaattaaatgagcaaacggaagagcagcaaccctgagttacatttctcaagacaccggggctcttgatggcacagcagcagcttgctag

SEQ ID NO: 893263 - DNA, 120 bp, Artificial Sequence
  ENSG00000253746_1 (sequence is synthesized)
agcttggtaaagagacttgggcctggtacctgaagggcaattccttggccatgacattgtagggaaagacctctatgggtgttgaaaagacaaggcgaggacaagaagagttgaaaagga

SEQ ID NO: 893264 - DNA, 120 bp, Artificial Sequence
  ENSG00000253746_2 (sequence is synthesized)
gtttggtgggtagcgaagggcagaatctggcttcaaggtgacagagtttgcatagagatggccttcttgagcaaaggtagtgactcctacattttttttttttgtagagttgtgataccc

SEQ ID NO: 893265 - DNA, 120 bp, Artificial Sequence
  ENSG00000253746_3 (sequence is synthesized)
gttgtgatacccatgagttagtcagcttgggctatcataacaaaataccacacattggttggcttaaacaacagaaattcattttcctgtaattctggaggctggaagtccaagatcaag

SEQ ID NO: 893266 - DNA, 120 bp, Artificial Sequence
  ENSG00000269292_0 (sequence is synthesized)
ggtagtcactgtattttattggaaaacattgatatatatttttcttcacagcttgaactgaacacaatattgcccggtttaaaaaaaacaaaaccaaaacattccgaaaatgtccacagc

SEQ ID NO: 893267 - DNA, 120 bp, Artificial Sequence
  ENSG00000269292_1 (sequence is synthesized)
tccctccttccctcagaggcgagggcaaaaggaagagatgaggggcatggagagagactcagggaagaaggagaaagagcaatcatgcagcttgggacaaatcttttgttgctttatcag

SEQ ID NO: 893268 - DNA, 120 bp, Artificial Sequence
  ENSG00000269293_0 (sequence is synthesized)
aaacagcccccgaaaacgctacgtgagctgggccctgggccagaggcagaaaacggacggaagaaaaggtctggccggtatctatgttccaatcttcagcactgtattaaagagaacaac

SEQ ID NO: 893269 - DNA, 120 bp, Artificial Sequence
  ENSG00000269293_1 (sequence is synthesized)
ttggaaatgagcttaggatccacaggtcctgggaaatagcttaggacccatagataaagttggtgaagatatttcaaacgaagtatcttcaaaggaatacttcaaagaaaatatagccct

SEQ ID NO: 893270 - DNA, 120 bp, Artificial Sequence
  ENSG00000269293_2 (sequence is synthesized)
gtataactgtcaatcgtatttttatggttaatagataataaaaacaatttattgttagaaaatacagaaaaagttaaataattaaaattgtacttgccttttcttaaagtatccatgagg

SEQ ID NO: 893271 - DNA, 120 bp, Artificial Sequence
  ENSG00000269293_3 (sequence is synthesized)
ccatgaggaaatagtgtcaggacttacttccgttctatttcttcatctcttagtcttcttttcttacttctgaagattagttttagtattaggagctggtcagtggtctctgttcttgag

SEQ ID NO: 893272 - DNA, 120 bp, Artificial Sequence
  ENSG00000269293_4 (sequence is synthesized)
aatatttgcccttttgtgacttcaccttgtaacttgcttctgaacttgcataaataattcctacagggaggccagtctgaaagagagagaccattcaccaaacaaatgtgtaattcacta

SEQ ID NO: 893273 - DNA, 120 bp, Artificial Sequence
  ENSG00000269293_5 (sequence is synthesized)
ccacaatcctgacttcaggacactgtgaccctcaacttgtgttaagctgaaacacagtggcaggattcctgttaaattggtacattttccatttgtgaagtcatcctgaagttcttgata

SEQ ID NO: 893274 - DNA, 120 bp, Artificial Sequence
  ENSG00000269293_6 (sequence is synthesized)
ctttaacatttcacaaaacatctcagattggagagctaaaaatgttttattctcttcactgaagctttcgggaatatatgctccattgaagcaattagacaaatttgcttttctgtccag

SEQ ID NO: 893275 - DNA, 120 bp, Artificial Sequence
  ENSG00000269293_7 (sequence is synthesized)
aaaggaagaccagtgggacatgtctaagaaaacttctaacatctgcatttcccttagactttgagtacacctgcagggatgggggcagacttgtttcatttcaggaaaagaagaatgatc

SEQ ID NO: 893276 - DNA, 120 bp, Artificial Sequence
  ENSG00000269293_8 (sequence is synthesized)
atcaaaggcaaatggcagttgctatgcagcaacaccaagaactggcttcacgctccagagaaaatgctgtgcctcctcctggtggtttccggtgctccacatgttcaaagaaattacccg

SEQ ID NO: 893277 - DNA, 120 bp, Artificial Sequence
  ENSG00000269293_9 (sequence is synthesized)
gaaatgtagaaatgatccctgaaagtatagtcttccagtaatgtttcttttagcaaaaggatccaatctaagatctcatgtgttttagttttcttcaatgtggaaaagttcctcagtctt

SEQ ID NO: 893278 - DNA, 120 bp, Artificial Sequence
  ENSG00000269293_10 (sequence is synthesized)
tgcttgacttccatgactttgatattttgaagggtacatggtagttattttataaaatgatccgaatttctcaatttgaaattattcaatatttccttatgattagatagaggttacaca

SEQ ID NO: 893279 - DNA, 120 bp, Artificial Sequence
  ENSG00000269293_11 (sequence is synthesized)
tctttggcagaaatgtcacagaaataagcctgtgtcctctttgcattgtatggggaagacacatgtcagtttggcccattacaaatgatgtgaactttgatcacttggttaaggtttttc

SEQ ID NO: 893280 - DNA, 120 bp, Artificial Sequence
  ENSG00000269293_12 (sequence is synthesized)
cactgaaaagtattcttctttctcattgtaattaataagtattttatagggctatgagatgtaagtatcccattcctcattaaacttgccacacttgttttagtgtggcagcccattgat

SEQ ID NO: 893281 - DNA, 120 bp, Artificial Sequence
  ENSG00000269293_13 (sequence is synthesized)
acttccggttgctaacggttcccaaacagcccccgaaaacgctacgtgagctgggccctgggccagaggcagaaaacggacggaagaaaaggtctggccggtgagtgtcagagtgagggc

SEQ ID NO: 893282 - DNA, 120 bp, Artificial Sequence
  ENSG00000269293_14 (sequence is synthesized)
gagattgggtggtgttctctgccggtggataggctcgaccgtccggtttgggattggggttaggtattagggagcggttcaaaattatgctaattgttaagattacgagtattatttaaa

SEQ ID NO: 893283 - DNA, 120 bp, Artificial Sequence
  ENSG00000269293_15 (sequence is synthesized)
aagatacacaacagcaacaatacaatgagcccacgaagatcaaatgccagttaactgatttaagcagctttgataggaagaaaatgctgaatttaatgctaacaaaaagatctaagtgcg

SEQ ID NO: 893284 - DNA, 120 bp, Artificial Sequence
  ENSG00000269293_16 (sequence is synthesized)
ataatactgttttacagatggggaacctgaggcacagagagaaaaatgtattagccaaggtcatataactagtaactggcagaacaaagattcatacccaggcattcttcctttaaattc

SEQ ID NO: 893285 - DNA, 120 bp, Artificial Sequence
  ENSG00000269293_17 (sequence is synthesized)
tgtactctggcctttcattgataacctggttttatcagcttaggaaatttgctatccagatggaagtataagtttctacagagatatgttattgcagcagtgttctgaatctcatcgggt

SEQ ID NO: 893286 - DNA, 120 bp, Artificial Sequence
  ENSG00000269293_18 (sequence is synthesized)
ttgttggcaatttgcctttcaacaaagggtttttttttttttttttgataagggtggcttccacagagatttaaggagaacaataaaaattttcattttaataaataagccccatttcaa

SEQ ID NO: 893287 - DNA, 120 bp, Artificial Sequence
  ENSG00000269293_19 (sequence is synthesized)
agttctctcgcgacctctagccacttccggttgctaacggttcccaaacagcccccgaaaacgctacgtgagctgggccctgggccagaggcagaaaacggacggaagaaaaggtctggc

SEQ ID NO: 893288 - DNA, 120 bp, Artificial Sequence
  ENSG00000269293_20 (sequence is synthesized)
tctgtcacccagactggagtgcagtgagtggtgcgatcatagcttactgcagcctgaaactcctgggctcaagtgatcttctcgcctcagcctcctgagtagctggagctacaggtgtga

SEQ ID NO: 893289 - DNA, 120 bp, Artificial Sequence
  ENSG00000269293_21 (sequence is synthesized)
ggagctacaggtgtgagctacccagcatggctcatttgagatttctgagtagagaagtaacatgattaaacttgggtattgagattattattttggctgctatgttaacagtagacttga

SEQ ID NO: 893290 - DNA, 120 bp, Artificial Sequence
  ENSG00000269293_22 (sequence is synthesized)
atgtgaaggggttgggcaagggcagaagcagggagacaggttggaaagttggagtgggaagggcctttttaagaataacacaaacccctaaagacataaaactgaaaaggccatggagga

SEQ ID NO: 893291 - DNA, 120 bp, Artificial Sequence
  ENSG00000269293_23 (sequence is synthesized)
aaagataaatgaaactggccttgtaaaattgaaatatttgaatgaaaaaagtaaaaataaaatataaactaaaagtaaaatatgccacacatctaaaagacacagctgattttcctgata

SEQ ID NO: 893292 - DNA, 120 bp, Artificial Sequence
  ENSG00000269293_24 (sequence is synthesized)
tacaaagaccttttatcttaccaaaaaataaaaatatgaacaagccaatagaaaaatagacaaagtacttaacctgcatgcatttattgtcaggcctctgacaatatgatactaagccat

SEQ ID NO: 893293 - DNA, 120 bp, Artificial Sequence
  ENSG00000269293_25 (sequence is synthesized)
ccaccccaactaatcaatcgaccttgtgacattccccctgcccccgacagtgagtctcatgatctccccacccagcaccttggcaccttgtgacccccgcccctgcccacaagagataac

SEQ ID NO: 893294 - DNA, 120 bp, Artificial Sequence
  ENSG00000269293_26 (sequence is synthesized)
agcctgttggtggactctcttcacacagactcacttgacatttatagaacacaaaattaagaatagtgaatatgaaaaggttcactaataagaatttaaacaaaacaagaaagattttta

SEQ ID NO: 893295 - DNA, 120 bp, Artificial Sequence
  ENSG00000269293_27 (sequence is synthesized)
acaagaaagatttttaagattgctaaagacaaacgatttataatattcagtgttaggaggtgtgtggatatacaggcatacttagttttacatttttagaaggtaagacttatttagaag

SEQ ID NO: 893296 - DNA, 120 bp, Artificial Sequence
  ENSG00000269293_28 (sequence is synthesized)
gtaagaagttgtccataccccttgattcaacaacttagcttcttggaattatccatatagaaatgcttacataaatgtttgaacgtatgtacaaagaagcactatttatttaaattggga

SEQ ID NO: 893297 - DNA, 120 bp, Artificial Sequence
  ENSG00000269293_29 (sequence is synthesized)
aacttgaatgcctaacatttggaatttaaatttttatatgtctattcattaaaataccacccagtttttagaaactaagagatgctaaaggtatattgagtaaaataaaaagttacaaaa

SEQ ID NO: 893298 - DNA, 120 bp, Artificial Sequence
  ENSG00000269293_30 (sequence is synthesized)
aaaacagcaaaatcctccattccccatcagcggtcgattgggggctctttcgaagcggcagctctgtaggaccgctcttctaccccaagatccctcggcttcggccccctaggtgccagg

SEQ ID NO: 893299 - DNA, 120 bp, Artificial Sequence
  ENSG00000269293_31 (sequence is synthesized)
gtctgcgggaccccacgctcaaagccgccggccggggtcgacaactgcagagagggtcgggataggaaattgcgggtagcggcagatgcgggtccccaggcatcccggaggttcccacag

SEQ ID NO: 893300 - DNA, 120 bp, Artificial Sequence
  ENSG00000269293_32 (sequence is synthesized)
gtctgcagtgggcctactttgcgaaaagggcccggctgcgccgagcctcgttcaaatcagatgccagacagtgtttcttgggatccatccaaataggtcccttatttctctttgtgggag

SEQ ID NO: 893301 - DNA, 120 bp, Artificial Sequence
  ENSG00000269293_33 (sequence is synthesized)
cagtctctggatggtgtgcacgcacccatgcttgcaggtctttaggaagaatgctcaggaactgttctagcaccagcaggtctaaaatctgctccttggtgtggcattctggcctcagcc

SEQ ID NO: 893302 - DNA, 120 bp, Artificial Sequence
  ENSG00000269293_34 (sequence is synthesized)
aaaaaattcactatgagtatcagttgggggtaaacttaaggagaacctgcattttatacattatatatttctggaacatttcaatttcttatgaagatttgctactggtataaatgggaa

SEQ ID NO: 893303 - DNA, 120 bp, Artificial Sequence
  ENSG00000269293_35 (sequence is synthesized)
aagataattgttcttaaaaccctatttattctccacaacctataaaaaaattttcctgtttggagaatttcatcaatatctattttcctcctctgaaattctttgcctgacaagtcaaag

SEQ ID NO: 893304 - DNA, 120 bp, Artificial Sequence
  ENSG00000269293_36 (sequence is synthesized)
ataagtaatgcattcacataaatttattagaaagaataaatgtccccagcatctagtttgacaatatttttttgtgaaatgtatatccttccatagatatatataccttttgtagataca

SEQ ID NO: 893305 - DNA, 120 bp, Artificial Sequence
  ENSG00000269293_37 (sequence is synthesized)
tacctttcatcttaaaggaattatgccttgtaaaagggtataattcctttaatatgaaaatcagattcaacttctgtgtgctttttaagggcaaatataagtgagcaaataaatttgtgt

SEQ ID NO: 893306 - DNA, 120 bp, Artificial Sequence
  ENSG00000269293_38 (sequence is synthesized)
ggattatttagaaagtgtagatataaataattttcaaatatgctttagaacactctcccactctgggaagaaaattttagaaaaaggataacccctgcatttctttccattagaagtaca

SEQ ID NO: 893307 - DNA, 120 bp, Artificial Sequence
  ENSG00000269293_39 (sequence is synthesized)
tgatcaaaagacaaagtccctttttcccttgactgtgacataacatgtccctcataggcaactgaacagataaaaaatccagacgatgcttagtaatttcctgcttcccctttagtgcac

SEQ ID NO: 893308 - DNA, 120 bp, Artificial Sequence
  ENSG00000269293_40 (sequence is synthesized)
agtgtattatcagtatgttttgccctctttatttaatatcttgctgaattaaattatctcatcaggtttttaagcacaagcccagcctgctttctggatgacacctgccacaggtcatcc

SEQ ID NO: 893309 - DNA, 120 bp, Artificial Sequence
  ENSG00000269293_41 (sequence is synthesized)
ttcctgaatttcctaaatagcccagaatattcttcaagcatgcccctggctcatcatccaacttcagagaatcaactggctagcaccttggagcacctgctgtggtaacgtgagtggctg

SEQ ID NO: 893310 - DNA, 120 bp, Artificial Sequence
  ENSG00000269293_42 (sequence is synthesized)
aacaccagacaaaaggaggctcccaatcactgttgcagatcttgttaaaatcctggctctatcctcagcttaggtgtattcttcttgtactaggataaagcctctctgacctcttcatta

SEQ ID NO: 893311 - DNA, 120 bp, Artificial Sequence
  ENSG00000269293_43 (sequence is synthesized)
aggcctaagtatacagtatggtatatgacaagcaggaccttcctctcctccccctgtatcttcccaaactacaaaaacagaaagcccccaaccttctcacccctgcctcacacaaatccc

SEQ ID NO: 893312 - DNA, 120 bp, Artificial Sequence
  ENSG00000269293_44 (sequence is synthesized)
cacagtggactgtttaaaaaataacagtacttggtagatatatattctcacttgctttcattatagaaaaaagaaagaaaataaatgaactaaacatccaactcaaggaattacaaaaag

SEQ ID NO: 893313 - DNA, 120 bp, Artificial Sequence
  ENSG00000269293_45 (sequence is synthesized)
gagaaagcctcctctgcccccaaggaaaaagttggaaaaaaataaaagtaaaagcagaataaaatggattagaaaatagaaaaatagtgacattaataaataaatacaaaaatgtttgtt

SEQ ID NO: 893314 - DNA, 120 bp, Artificial Sequence
  ENSG00000269293_46 (sequence is synthesized)
aacaagcccataaaagcaacaagcctatggtaaatccaattgagagaaaacatttaaacattataaatcacaaatagcagatgaagaggaaagtagcctgctaacatttttgaaaatctc

SEQ ID NO: 893315 - DNA, 120 bp, Artificial Sequence
  ENSG00000269293_47 (sequence is synthesized)
aatgagattagtgattttctgggaaaaaatattagttccaaaattcatttaagaagtagaaaaatctaaataaaccaaccctaccctaaagacaataattgaagaagttatgaaagagta

SEQ ID NO: 893316 - DNA, 120 bp, Artificial Sequence
  ENSG00000269296_0 (sequence is synthesized)
ggggatccggcagatcccgtctgcacccccgggttcctactctgagcgcctccccctaggccacccgcactgtcgggtcagtcaggctggagccccaatccgcagagatctcccgcagcc

SEQ ID NO: 893317 - DNA, 120 bp, Artificial Sequence
  ENSG00000269296_1 (sequence is synthesized)
acagatctcttcctcagacgtgaagaccttaccccgctatgtcgtcgaccccggagaccggaagtggactggcgcggtggccgctgggaaatacagtcccgaacagaaaaagcctcagaa

SEQ ID NO: 893318 - DNA, 120 bp, Artificial Sequence
  ENSG00000269296_2 (sequence is synthesized)
gccttgagctgtgatccgttcaggttgatcccagcatactatgggggctgacccctaagggagccgagcctagtggattcgtgggagttccagcccgcggggtgcacaggttgttgccat

SEQ ID NO: 893319 - DNA, 120 bp, Artificial Sequence
  ENSG00000269296_3 (sequence is synthesized)
gagcaaggatccccatgtgagaagagcgtttccctctcggagcgtcagtataatttactttttctctccatggagaatgcaaatgagcagaacttttaaagaagaaagaagaatttaaag

SEQ ID NO: 893320 - DNA, 120 bp, Artificial Sequence
  ENSG00000269296_4 (sequence is synthesized)
taaaattatgtcaacatgtaggtgctttaactcctttgtctcagaccccagcgataggcttccacttctctgtgctatttgaaggggacttaggataaatttgaaaagcttgaactaaag

SEQ ID NO: 893321 - DNA, 120 bp, Artificial Sequence
  ENSG00000269296_5 (sequence is synthesized)
aattggttggttatatactaggagaggaagtgtggttcacattggagatttcagaatcaaatgtcctggattcttcgagacaatgttcctgttatctggagagaaaaacgtgattcagga

SEQ ID NO: 893322 - DNA, 120 bp, Artificial Sequence
  ENSG00000269296_6 (sequence is synthesized)
cgacatggaaacggataaaaatacacagataattacttgccttatcttgaaggatgaataattaacactttgttaaaatagtataaacaaatgcaaaaaagggcttgcttttcctaggaa

SEQ ID NO: 893323 - DNA, 120 bp, Artificial Sequence
  ENSG00000269296_7 (sequence is synthesized)
gagcctgatttcactgttgtagtctaacaatatttaactttcaaaatcatttttctagtttcctatgctacataaggaggaaacatgtaataataaagagcaaaacgtcttttcattcca

SEQ ID NO: 893324 - DNA, 120 bp, Artificial Sequence
  ENSG00000269296_8 (sequence is synthesized)
gaattgtgacagaaaacaaataagatgattaactcaaccatatcaataatcacattaaatgtaaatggtctaaacaccttaatttaaaaagattgtcagattggattttttaaaaagtca

SEQ ID NO: 893325 - DNA, 120 bp, Artificial Sequence
  ENSG00000269296_9 (sequence is synthesized)
ctagaacttaaagtataataaaaaaagataattaaataaataaataaacaaaaagtcagacccaaatgggtgctacctacaggtaatatgttaaatgaaaagcactaaaaggttaagagt

SEQ ID NO: 893326 - DNA, 120 bp, Artificial Sequence
  ENSG00000269296_10 (sequence is synthesized)
gaaaagcactaaaaggttaagagtaaaaggatggaaaaatatacaccatcctaacactagtcaaaagaaagctggagtggctttattaaaaacaaagtagactccggacatagactatta

SEQ ID NO: 893327 - DNA, 120 bp, Artificial Sequence
  ENSG00000269296_11 (sequence is synthesized)
ccagagataaagaagggcataataatgataaaggagatagctcatcgagtagaaaaaaacaaacataaattttgctcctaaaagcaaagcttctaagtatgggaagaaaaatctattaga

SEQ ID NO: 893328 - DNA, 120 bp, Artificial Sequence
  ENSG00000269296_12 (sequence is synthesized)
tggtaattgatagaacaaacacagaaaagcaacagggtatagcagatttgagctacatatcaacttacttgatctcatttatatttgagaacactctcctcaatgacagtaaaattcatc

SEQ ID NO: 893329 - DNA, 120 bp, Artificial Sequence
  ENSG00000269296_13 (sequence is synthesized)
tatgtggacaggggatacttaccagtataggccatattctgggccataaaacaagtctcaataaatgtaagaggattcgagtcatacaaagcatattctttgacaaaaatggaattaaat

SEQ ID NO: 893330 - DNA, 120 bp, Artificial Sequence
  ENSG00000269296_14 (sequence is synthesized)
aaattagaactcaataatagctgaatatataatatattgtccaaagtagtacaaattcgaaaaggtatgaatactaaggtaattgaaattatgtaatgtttgaaaaattcctgtattaat

SEQ ID NO: 893331 - DNA, 120 bp, Artificial Sequence
  ENSG00000269296_15 (sequence is synthesized)
atattctgttatatcctaaagggtgaaacaataacatatatacgttaaagcaaaataacaattttgtagtaaggaaaaaaatttttaagctatttatgttgactaaacattagaataaag

SEQ ID NO: 893332 - DNA, 120 bp, Artificial Sequence
  ENSG00000269296_16 (sequence is synthesized)
aaagcggagaataattatatttaagtatattctgatactttaatcgatttcctaaccaatatcaccattctttttaagtattttctttcaatgtggtctattatttttaaattttgataa

SEQ ID NO: 893333 - DNA, 120 bp, Artificial Sequence
  ENSG00000269296_17 (sequence is synthesized)
ttatgcaatcttcaatgttggactttatgtttaataaactcaaaattatagctaccttcaaatgactcttctctgaacaccatactttttaaactgagatatatactctgtatatactaa

SEQ ID NO: 893334 - DNA, 120 bp, Artificial Sequence
  ENSG00000269296_18 (sequence is synthesized)
ggtaaccagaagtctcagaatatatccaatgaaatggaagatatcctcacaagtattgtgaatattgaatatggaaaaattagattgcagttcatattcttgtagttaatgtatcttgcc

SEQ ID NO: 893335 - DNA, 120 bp, Artificial Sequence
  ENSG00000269296_19 (sequence is synthesized)
ttcaaggtacatctctttttttgccatctcttttttgtaccctaagaagggtacatttctttgataattatctttacaaggcaaacatattggttctatttatgattcctttgaatgtta

SEQ ID NO: 893336 - DNA, 120 bp, Artificial Sequence
  ENSG00000269296_20 (sequence is synthesized)
agccaaatttagatgctgcagtaacataaggcttctcaactgcgctccattctgacacaaattgcaaattgatccagttaaaaattggagcatcatcaaaagactattcccatagctgaa

SEQ ID NO: 893337 - DNA, 120 bp, Artificial Sequence
  ENSG00000269296_21 (sequence is synthesized)
gaaattcctcagtaaaattgaagaatttcaaaattaaatcctgtatgccatctgatatttcatgacttaattcattcagtttctttcttaatttgtaggactaaatcccattgtcttcat

SEQ ID NO: 893338 - DNA, 120 bp, Artificial Sequence
  ENSG00000269296_22 (sequence is synthesized)
gttggccagttctgataactgaaattcagttgaatttctatgttgaataggagtggtaagagaagacatctttgtcttgtgccaaatcaacacaatcttaaacaaccaaaggattaaaga

SEQ ID NO: 893339 - DNA, 120 bp, Artificial Sequence
  ENSG00000269296_23 (sequence is synthesized)
agaaaatattttagataaatacaaataaaaacacatgttaccaaagtttatgatatgcttattactaagagaaaaatttatagctctacatgcctatataaaagaagaaagatgtcaaat

SEQ ID NO: 893340 - DNA, 120 bp, Artificial Sequence
  ENSG00000269296_24 (sequence is synthesized)
aagaaagatgtcaaatcaacaacctaactgtacaactttaggaattagaacatgaaaaatagcaaaacaataaataaatagaagacaagaaaggaaggaaataataaaaataagagtgga

SEQ ID NO: 893341 - DNA, 120 bp, Artificial Sequence
  ENSG00000269296_25 (sequence is synthesized)
gttaaatagagaatagaaaaataatacagaaaaattacaaaattaaaagtggttctttgaaaagatcaaaagaagtagcaaaatcttagctggattgactgagaaaaaaatagaaaagac

SEQ ID NO: 893342 - DNA, 120 bp, Artificial Sequence
  ENSG00000269296_26 (sequence is synthesized)
tcaaattactaaagtcagaggtgaaagtggagacattactaaccttacagaaatgaaaatgattatagaagaatattataaacaattgtatgccaacaaaataaactaaatggaaaggaa

SEQ ID NO: 893343 - DNA, 120 bp, Artificial Sequence
  ENSG00000267197_0 (sequence is synthesized)
gcgattacaggtgtgagccactgtgccggacctaaaggactctttgagcatcaaagagtgatgctgaatgtgtgatttctcctttctgagatgttatcttgttatctgtgaagtggggga

SEQ ID NO: 893344 - DNA, 120 bp, Artificial Sequence
  ENSG00000267197_1 (sequence is synthesized)
ggaaaatggagttgctgatacctcaatccttggagaacaactgcaagcactagagttcgagtggaggttgcagtgagccatgctctcaccattgcactccatctcaaaaaaaaaaaaaaa

SEQ ID NO: 893345 - DNA, 120 bp, Artificial Sequence
  ENSG00000267196_0 (sequence is synthesized)
gcaagagtggcaaaagtggagtccagagagaacagaaagaatactgggatgagtttctgaatacagccagccacatccgggaagtggaaaagaacgagacattgcctccctctcagcctt

SEQ ID NO: 893346 - DNA, 120 bp, Artificial Sequence
  ENSG00000267196_1 (sequence is synthesized)
gcagagggctttggctatggccagcccattcttgcggaggacagttggcctgggagcaacacaggctgtaacagattcatgtgttctgctgaggaacagctggggagagaatggggtaga

SEQ ID NO: 893347 - DNA, 120 bp, Artificial Sequence
  ENSG00000267196_2 (sequence is synthesized)
aggtggggaagttttgaccccaggaagcaggacataggatttcctgggattttatatcctcatcagtcctctgttactttcttgtggtacttcctaataataaattagcatccaactcta

SEQ ID NO: 893348 - DNA, 120 bp, Artificial Sequence
  ENSG00000267191_0 (sequence is synthesized)
gtagcctatgctcggagggcacatgagcaagagcttgaccatctgtaccgttggttgacttgctctattaagggctatgatttcaggtcgtcctgcgtgtttagaggaggcgagtggaat

SEQ ID NO: 893349 - DNA, 120 bp, Artificial Sequence
  ENSG00000267191_1 (sequence is synthesized)
cttgagtctcggctggagaaggcagagcacgggcatgcagacctcaaagcctcaaacctgcgtgtgagaggagaagttggcgagctccagcgtatggtccacggttggtattctaggaag

SEQ ID NO: 893350 - DNA, 120 bp, Artificial Sequence
  ENSG00000267191_2 (sequence is synthesized)
atacaagacaacagcttctgcgaaccagtaagagtggcctcattagacattggatttgccagtgacttgatcatggacttcccagtctccaggactgtgagttataaaggtctttcacca

SEQ ID NO: 893351 - DNA, 120 bp, Artificial Sequence
  ENSG00000267191_3 (sequence is synthesized)
tatttgctgtccttgggcaagatcagagtcatctttggaaggaaaagcatctctggattttgttaaataccatcttaggaaagtactctctgctcttcaaagtcagcgacgacatgagtc

SEQ ID NO: 893352 - DNA, 120 bp, Artificial Sequence
  ENSG00000267191_4 (sequence is synthesized)
actgttacagaacccacagaatgtgtcccttaaaatactgagaatgaacactattttactgcctgcataattagcactagacaggtgaatttattactacttcattaaatagatgagttt

SEQ ID NO: 893353 - DNA, 120 bp, Artificial Sequence
  ENSG00000267191_5 (sequence is synthesized)
attaactcagtgaagacttgtgggaaccttactaaaagagatgcaattccccagcctcaagatgctcacagtctagtgatgaggaagctggcaattccactatacatggctaaatgccag

SEQ ID NO: 893354 - DNA, 120 bp, Artificial Sequence
  ENSG00000267191_6 (sequence is synthesized)
agtagtgcacagcatcctttagcggcatgaggaatgggctcataagcccacagtggaatgcaggggttctacacaaacgtagcttaatctgagccctggagggtgactgagctctattag

SEQ ID NO: 893355 - DNA, 120 bp, Artificial Sequence
  ENSG00000267191_7 (sequence is synthesized)
gagaacaaatgtcatgatgtgaagacaaataacaggcagaaagagatgggcaggaaggcagaattcaaaccatgatgacgttcaagtcacaaaattatctgcaagtcagcaggagaacac

SEQ ID NO: 893356 - DNA, 120 bp, Artificial Sequence
  ENSG00000267191_8 (sequence is synthesized)
tgaaggacttctggaaaggagagtaaaaagattcctttcatgttagaaacagattaccctctcaaacgggaggaggcttgagggggaggaggctagggccagagagactattaggagagc

SEQ ID NO: 893357 - DNA, 120 bp, Artificial Sequence
  ENSG00000267191_9 (sequence is synthesized)
cacactaagaaactctttcttctttattcaaatgtcaccacctcagagtctctctctagccatcctgtagataatttcggtctcctaactgcaccccaacacttcctatccctcatctct

SEQ ID NO: 893358 - DNA, 120 bp, Artificial Sequence
  ENSG00000267191_10 (sequence is synthesized)
gcttacttcttttctctaagcccttattcctctctaacatccttctaggtatttacttacttatattcattacacttgtctaatgtggagtttcgttacctgctccatccccaacaccta

SEQ ID NO: 893359 - DNA, 120 bp, Artificial Sequence
  ENSG00000267191_11 (sequence is synthesized)
ctaagttgctacaagcatttggaaggaacccaaagatttgcagaatgactactttaatgactcagtgaatagttgatagatacaccatgtggatcagggcctcattatttatcacctgaa

SEQ ID NO: 893360 - DNA, 120 bp, Artificial Sequence
  ENSG00000267191_12 (sequence is synthesized)
ccattcattcaacatatgattgttgaagggtctactctgtgccagccaagggtcctagatgtgaaatatacagcagtgaacaaagaccttgatctcacaaagatgatattataatgggct

SEQ ID NO: 893361 - DNA, 120 bp, Artificial Sequence
  ENSG00000267191_13 (sequence is synthesized)
acgagggcatagcaaacccccaatatatagcgagagacacttttaagaacaatagggcagggtaaagaaataaagagatgaaaggaggggctgtcacagaataagtttttgtcatgaaag

SEQ ID NO: 893362 - DNA, 120 bp, Artificial Sequence
  ENSG00000267191_14 (sequence is synthesized)
atttctcttatatttgaacagagacctcaaatataggaagagaaagccatgtagagatctgatatctgaaggcatgtaattcagccctgaagaacatagaaaatttttttttgttaaaaa

SEQ ID NO: 893363 - DNA, 120 bp, Artificial Sequence
  ENSG00000267193_0 (sequence is synthesized)
tgaagaatgaccttcatataatggccacacagccacttgggccaccggagctcaccgtgagacacactcaccatctcgtcttcatgtctggtgctccctttagttttctggcaagaagct

SEQ ID NO: 893364 - DNA, 120 bp, Artificial Sequence
  ENSG00000267193_1 (sequence is synthesized)
agggagaaggtgacttgagctcctcgtgtgttttgatcactcaacaaagaagacaaaagggcgtttcataacctgacagtgggagagcacattaaaaaggagctgagctgacctttgcac

SEQ ID NO: 893365 - DNA, 120 bp, Artificial Sequence
  ENSG00000267193_2 (sequence is synthesized)
taaaactttttctgaattcatatgcactttttcccaaatagaatgctgacgacaaataattttatcaatcattaaagaagatcccttcagaacctctccagggaaatacttgtagcttag

SEQ ID NO: 893366 - DNA, 120 bp, Artificial Sequence
  ENSG00000267193_3 (sequence is synthesized)
ttctggttagcacgtaatgccacaagaatctggcatcatttagaccagccatttattcagatatcaagagcaagagactgtaactgattccctgacctctgactaaaaacaaatataaac

SEQ ID NO: 893367 - DNA, 120 bp, Artificial Sequence
  ENSG00000267193_4 (sequence is synthesized)
cctagtgtgtgtgaaggggagagactgtgaaggatgaactacaatctctgcagggttacctgggatctgcaatttcctgaataaatggatccagacccacttccatggtcggtgtggaca

SEQ ID NO: 893368 - DNA, 120 bp, Artificial Sequence
  ENSG00000267193_5 (sequence is synthesized)
gagctcctccttgcttcatctttctgaggatagatatcactggtgatgtgtacatttcaggacttgaaggaggccaagtggtggctatttataggaggctgtagaaaagcttggacacat

SEQ ID NO: 893369 - DNA, 120 bp, Artificial Sequence
  ENSG00000267193_6 (sequence is synthesized)
ggcctaggatgttcatatgcatatgcccaggtctcataaaatgtaggatggagccaagcgtgggaagagaggagaggtataggccagaggcctccagctttgctacagaaagctgagaat

SEQ ID NO: 893370 - DNA, 120 bp, Artificial Sequence
  ENSG00000267193_7 (sequence is synthesized)
tctgagaatttgaaattcaaactttgcttttcggttgatgaaaaggtacatttgtcaatgaaggaggaagaaacgtatttgacatttgttatcttgatttataactcttgcatatttacc

SEQ ID NO: 893371 - DNA, 120 bp, Artificial Sequence
  ENSG00000267193_8 (sequence is synthesized)
catatggtatatgtcagcttccatatgtacttgtgccctaggtatgcaaatgttaggagagggtctgtgcaaagggcagaggcagtgtgtgttgttggtctattgtgtcaacctgcagag

SEQ ID NO: 893372 - DNA, 120 bp, Artificial Sequence
  ENSG00000267193_9 (sequence is synthesized)
agctgagtctttctccagccctctcccttgagggtgggacggtttttgtagggtggtactgctttcaactttaactccactcccaaaccacctcagctcaagagtcagcaatggctgctc

SEQ ID NO: 893373 - DNA, 120 bp, Artificial Sequence
  ENSG00000267193_10 (sequence is synthesized)
cagtctataggaagaaccctgaagacctatgggatattctggacctaatctactgtctttaacctacctctcaccactatcctcttctcttccatgaaccttctgtctggtagcacaagc

SEQ ID NO: 893374 - DNA, 120 bp, Artificial Sequence
  ENSG00000267193_11 (sequence is synthesized)
cccttcactacttctccatgctccttctccccataactcccctacattacacacacatgcatacacaagcacacatgcatataggtgcacatacacacatgcacgtgcaggcaagcaggt

SEQ ID NO: 893375 - DNA, 120 bp, Artificial Sequence
  ENSG00000267193_12 (sequence is synthesized)
tccttcctgtcaattgactcatgacactaattctgtctcaaataccattcgctcttctctccatcccatccaaatcctacccatttaaaaagatctagtttaacttcctaaactttgttt

SEQ ID NO: 893376 - DNA, 120 bp, Artificial Sequence
  ENSG00000267193_13 (sequence is synthesized)
attcattaattcatacgatgactagtaattgacactgtactaagccctagcttacagccatgtgaatacatatttttctctaatccagtttgccttgatctctattttctgaacatctat

SEQ ID NO: 893377 - DNA, 120 bp, Artificial Sequence
  ENSG00000267193_14 (sequence is synthesized)
atcatatgtcatttctacttaattttaataaggtttcaacactgttgtctaaattttcccagttgtagattttgtcttaaactagatgatatatttttgatgagcaggaactctgtgctg

SEQ ID NO: 893378 - DNA, 120 bp, Artificial Sequence
  ENSG00000267193_15 (sequence is synthesized)
ggccatgtttacattttactcattggcctacagaatttagtggcataaagttgatatgtagaaaagggccattgattaagtgataggcagattgatggagggatcaattgatttgctgcc

SEQ ID NO: 893379 - DNA, 120 bp, Artificial Sequence
  ENSG00000267193_16 (sequence is synthesized)
aagccacatcccatgtaagggaattttcagagtatgggtggtctggcttccattctttctctgccatttttaatgaattgtttctaatgtattatggatgtataatgcctgaattcattt

SEQ ID NO: 893380 - DNA, 120 bp, Artificial Sequence
  ENSG00000267193_17 (sequence is synthesized)
cagcccctttgaacatattgatattttggcctgaagtcttagtaagaatgatttctgtattatgactttgagtttttatttgtaacttataacaaattactcttgtagaaaatcttttgt

SEQ ID NO: 893381 - DNA, 120 bp, Artificial Sequence
  ENSG00000267193_18 (sequence is synthesized)
tgaaataaattcagttatttattatttcttattatttccatatgacatttggtttgcttttctaacatctctaacatctcttctggtggggctggaatccctgtttctatctctcttctt

SEQ ID NO: 893382 - DNA, 120 bp, Artificial Sequence
  ENSG00000267193_19 (sequence is synthesized)
tcaagaaagaagcttatattgaagcagtatttctcaaaagtatggagcctgggtcagtgccataagcatcatctagaaacctgctagaaatgcagttatcaggacccagtccagacctat

SEQ ID NO: 893383 - DNA, 120 bp, Artificial Sequence
  ENSG00000267193_20 (sequence is synthesized)
caatcatttcaacaagccttctaggtgattctgatgcatgctaaaatttgtgaatcaatctattagttgaaagaacactgagctggcagtgtagaccctgaattttggctctggctatgt

SEQ ID NO: 893384 - DNA, 120 bp, Artificial Sequence
  ENSG00000267193_21 (sequence is synthesized)
tggtcatttggaggtgatgttgggcatggcggatgcaggctgcagcagcgttgtggggaagaaaaggttgtagtggcccgtggctgccaggtacaaagtcacagtgatattgaagggcag

SEQ ID NO: 893385 - DNA, 120 bp, Artificial Sequence
  ENSG00000267192_0 (sequence is synthesized)
cacatttattgtaatcaacagtaactggatgtttctgaggtgttttgattggactcaaaagtattacaatcagtttggagacaaaaacacaatctgcattttagtttaagtatgacactg

SEQ ID NO: 893386 - DNA, 120 bp, Artificial Sequence
  ENSG00000267192_1 (sequence is synthesized)
cattctgttgcccaggctggagtgcagaggcacaatcatattatactacaacctcaaactcctaggctcaggataaaacaagatttattttattctgacctggaaatgagaaaaaatatg

SEQ ID NO: 893387 - DNA, 120 bp, Artificial Sequence
  ENSG00000267192_2 (sequence is synthesized)
tatgccacctactattaatccatatgatataaatgaagaaacaaatggtgaaagggagaaagctcttctttacaggagtatgtgatctaataaataagaataaagtttttttaaaaatca

SEQ ID NO: 893388 - DNA, 120 bp, Artificial Sequence
  ENSG00000267199_0 (sequence is synthesized)
cgcaactagggttgccacacacgccaagtggaggagaagagcctgctgtgtgcgcgcacctgacagtcaccggcttctctttacgtttccaataggaagcgcacactacgctgtgggaac

SEQ ID NO: 893389 - DNA, 120 bp, Artificial Sequence
  ENSG00000267199_1 (sequence is synthesized)
aaaacaccaggtgtctgctatggccaaggcagataaggtctttctctccaacaggatccagagatgagccactggtactaacacccaacggctgatgaatacgtctgctgagggacacgt

SEQ ID NO: 893390 - DNA, 120 bp, Artificial Sequence
  ENSG00000267199_2 (sequence is synthesized)
tctacaaaacaatgaagtttgctgcatcaactgcattttcctttcatgaaaaatttctctgtaccatgcagtggtgtttgacagcatgttacccacagtagaattactttcaaaatctga

SEQ ID NO: 893391 - DNA, 120 bp, Artificial Sequence
  ENSG00000267199_3 (sequence is synthesized)
aactcaactttatataatgtgtaagatatttagaaggtaaaccatgcattcttagttaagataaaaacacaagaactttcctctgctcgtatttcaggaatacgtctgctgagggacacg

SEQ ID NO: 893392 - DNA, 120 bp, Artificial Sequence
  ENSG00000267199_4 (sequence is synthesized)
attgctcattcacaagaaccaatgcctcagcaatttacgttttctcatgagactgcagtaattcagtcacatcctcaggctccatgtctaattctagttcacttgctagttccaccccat

SEQ ID NO: 893393 - DNA, 120 bp, Artificial Sequence
  ENSG00000267199_5 (sequence is synthesized)
ctgcagttacttcctctactgaagtcttggaatgaacttcttccaaactcctgttcatgttgcattttgacctccttccatgaatcaccaatgtttttaatggcatctagaatggtgaat

SEQ ID NO: 893394 - DNA, 120 bp, Artificial Sequence
  ENSG00000267199_6 (sequence is synthesized)
cctttcctgagggttttcaatgtgctttgcccagatccatcagaggaaccactgcctgtgacagctaaagccttatgaagtgtatttcttaagtaaaagtaaaacttactccttgatcca

SEQ ID NO: 893395 - DNA, 67 bp, Artificial Sequence
  ENSG00000267199_7 (sequence is synthesized)
aaaacttactcacagtctccttgtacaactccatcagacctcttgggtgaccaggtgcattgtcaat

SEQ ID NO: 893396 - DNA, 120 bp, Artificial Sequence
  ENSG00000267199_8 (sequence is synthesized)
aaatctttttttccgagcagtaggtctcaacagtaggcttaaaacgttcagtaaaccttgctgtaaacaaatctgctgtcatctgccgaggctttgttagtcattggcagggtataggta

SEQ ID NO: 893397 - DNA, 120 bp, Artificial Sequence
  ENSG00000267199_9 (sequence is synthesized)
gatttagcttcagattcaagggccttaggattttctgaatggtaaatgagcactggcttcaatgtaaggtcaccagctacattagtccctaacaagagcgtcagccttcgaagcctggaa

SEQ ID NO: 893398 - DNA, 120 bp, Artificial Sequence
  ENSG00000267199_10 (sequence is synthesized)
gccaggcattgactgttctctagctatgaaagtcctatatggcatcttctgtttcatctgcattgcaaaagtgtagtgtagccacctttttcaagatcatagctagatcttctggagaac

SEQ ID NO: 893399 - DNA, 86 bp, Artificial Sequence
  ENSG00000267199_11 (sequence is synthesized)
cactcatgaaccaacctctgcaagctttcaaattttcttctgcagcctccttacctctctcagccttcaaagaattgaaatgagtt

SEQ ID NO: 893400 - DNA, 120 bp, Artificial Sequence
  ENSG00000267199_12 (sequence is synthesized)
ctccttacctctctcagccttcaaagaattgaaatgagttaaggccttgctatggattaggtttggcttaaggaaatgtggctggtttgatctttatccagaccactcaaacattctcca

SEQ ID NO: 893401 - DNA, 120 bp, Artificial Sequence
  ENSG00000267199_13 (sequence is synthesized)
aaacattctccatatcaggaaataaggctgttttgctttctttttttttttttaaagaaatggagtctctctctgtcacccagaacagaatccagtggtgtgatcatagctcactgcagc

SEQ ID NO: 893402 - DNA, 120 bp, Artificial Sequence
  ENSG00000267199_14 (sequence is synthesized)
ggctctagcgatcctcctgcatcagcctcctgaggagctaggactacaggcatgcaccacacacagcttgctttcttatcattagtgttcaatggagtaacacttgtaatttccttcaat

SEQ ID NO: 893403 - DNA, 120 bp, Artificial Sequence
  ENSG00000267199_15 (sequence is synthesized)
aactttttctttgcattcacagcttggctgtttggtgcaagaggcctagctttgggcctatctcagcttttgaatgcctgcttcactaagcataatcatttctagcttttgatttaaagc

SEQ ID NO: 893404 - DNA, 120 bp, Artificial Sequence
  ENSG00000267199_16 (sequence is synthesized)
gagagactttcgactttttctttcacttaacacttagaagccactgtactgtagggcttttggcctcatttcaatattgtatctcagggaacggggagcctgaggagaggggaagagaga

SEQ ID NO: 893405 - DNA, 120 bp, Artificial Sequence
  ENSG00000267199_17 (sequence is synthesized)
cgggggaacagtcagaacacacacaacatttatcaattaagtttgccatcttatatgggcacaggtcatggctccccaaaacaattacaacagtaacatcaaagatcacagatcaccata

SEQ ID NO: 893406 - DNA, 120 bp, Artificial Sequence
  ENSG00000267199_18 (sequence is synthesized)
aaagagagagtaataatgaaaaagcttgaaatgttgggagagctaccaaaatgtgatgcagacacacaaagtacgcacaagctgttggaaaaatgctgccgactgacttgcctgctgcag

SEQ ID NO: 893407 - DNA, 120 bp, Artificial Sequence
  ENSG00000267199_19 (sequence is synthesized)
ggctgccacaaactgtaaaaatgcagcgcacctgtgaagcgccacgaagccacacatgatggggtgggacacgtctgtgcatggctggggaaacagtcacccttgtgggtgtacagctct

SEQ ID NO: 893408 - DNA, 120 bp, Artificial Sequence
  ENSG00000267199_20 (sequence is synthesized)
tcagatgttttgcattagaatgcaggcataaagtcccttatgtatttttaatttccaagcaacaataatttaaaaatcagttggagagtgtcagcaggtgcttctaggttctgtgtggtg

SEQ ID NO: 893409 - DNA, 120 bp, Artificial Sequence
  ENSG00000267199_21 (sequence is synthesized)
ttctgctttatcaattacgcctccaggaagctgtgaaagaaagcttcatccatctcccacaggatttgtctccatatttgtgacacataataaaatgttatgtactctttatgtaatttt

SEQ ID NO: 893410 - DNA, 120 bp, Artificial Sequence
  ENSG00000267199_22 (sequence is synthesized)
gttatgtactctttatgtaattttactctcctactcatggctgcttatcacttgtgacaacatgttaatttttccagtgcggtccttgtagactgtttttctttttcttttttttttttt

SEQ ID NO: 893411 - DNA, 62 bp, Artificial Sequence
  ENSG00000267199_23 (sequence is synthesized)
aatctcagctcactgcaatctccacctgccgggttcaagcgattcttgtgccttgcctcccc

SEQ ID NO: 893412 - DNA, 60 bp, Artificial Sequence
  ENSG00000267199_24 (sequence is synthesized)
agactgtatttcttcaaagatcacaggctgcttataaaagtaccctgccttcccaattga

SEQ ID NO: 893413 - DNA, 120 bp, Artificial Sequence
  ENSG00000267199_25 (sequence is synthesized)
tcacaggctgcttataaaagtaccctgccttcccaattgaggtgatttctgacagctaattaccaaaagacatcaccgtcttacgatagcaactcaacacagaaagtctgatggaaagcc

SEQ ID NO: 893414 - DNA, 120 bp, Artificial Sequence
  ENSG00000267199_26 (sequence is synthesized)
attttatttttctctaaattttaaaatagaagactttaatggaaaacatttagtaccatcatgtcaccctgaatgccagcaatacctcgacttttacacacgcaggaagcctagtaaaag

SEQ ID NO: 893415 - DNA, 120 bp, Artificial Sequence
  ENSG00000267199_27 (sequence is synthesized)
ccccgtcagtagtacacatttctctatggtccttcaacagttttgcatatacaaaattttctgctattttgctttagcaaacagcaataaacttttgtgtttcctatatgacacctaata

SEQ ID NO: 893416 - DNA, 120 bp, Artificial Sequence
  ENSG00000267199_28 (sequence is synthesized)
tccagtcctacagtaatatagttagaaaaataaaaggcttaaaaatttcatagtacgagttcatggtgctaataacagaatctctttaaacataagatcattttaagcctcttacataac

SEQ ID NO: 893417 - DNA, 120 bp, Artificial Sequence
  ENSG00000267199_29 (sequence is synthesized)
caccttctggtttcatttgaaatccttaagaattaaaatctagtaagattgttaaatcaacgtacgtcaatcattcattttcacttgccttgggagagttaattcccactgtccactgaa

SEQ ID NO: 893418 - DNA, 120 bp, Artificial Sequence
  ENSG00000267199_30 (sequence is synthesized)
tgaatgcctttcaaatattaataaatatattacagtatttacaagcattcttatacactccgacactgacagggagttaagccatggagagggaagcacaggtttcccaatagtgtgact

SEQ ID NO: 893419 - DNA, 120 bp, Artificial Sequence
  ENSG00000267199_31 (sequence is synthesized)
tcatgacgtatgggacaaaaggaaccggtgctcaggcctggagggagctgagatgagagcagggatgatggttcagatacgcacacatgctctaagacacatcagactctagctgagacc

SEQ ID NO: 893420 - DNA, 120 bp, Artificial Sequence
  ENSG00000267199_32 (sequence is synthesized)
agccagacatttcttttgttgttggattagaagtaaaactgaacaagaaaccaggacacggaaggaagaactggaagctatgcctaaagtcagaccaggctaaggattttaaaaccaagc

SEQ ID NO: 893421 - DNA, 120 bp, Artificial Sequence
  ENSG00000267199_33 (sequence is synthesized)
tccacaagctcttagtgaattaccctgtggaaactatgtagctgacgtgaagtgtggaggggggtggtagaaaggggggttaaatgtaagactttgttttggcaacaaaaaatgatagta

SEQ ID NO: 893422 - DNA, 120 bp, Artificial Sequence
  ENSG00000267199_34 (sequence is synthesized)
atttgatttctacaactttaactgtgccatgtgccctttcttaccccactttctgcagattgtttcatatgaacgtaccctccacgtgacctctttaatgcacttggcaaactccgttaa

SEQ ID NO: 893423 - DNA, 120 bp, Artificial Sequence
  ENSG00000267199_35 (sequence is synthesized)
tgctgttgaagaatgtatgttctgtgctgtggtaagaggtgatcgtaatgcccaaatcatccaatacactatcataaagtgaagtgaaagacatgtactagatgtttgctttgtgaatgt

SEQ ID NO: 893424 - DNA, 120 bp, Artificial Sequence
  ENSG00000267199_36 (sequence is synthesized)
gaatgaaagtcttattttgggggtgtagtttcttatgttttaataaaaacagtagtcattattttaaaaagcacattctcctaggtgcatatttatatacatatacaaataccatttcct

SEQ ID NO: 893425 - DNA, 120 bp, Artificial Sequence
  ENSG00000267199_37 (sequence is synthesized)
tcccccttgtgcccttctgggtagtcattttaaaaactcaagcctggggtcatcaaaaggggtagatttatactcccacctaactgtctggagtatagagttcagatagtctcttaggaa

SEQ ID NO: 893426 - DNA, 120 bp, Artificial Sequence
  ENSG00000267199_38 (sequence is synthesized)
gttttataaatgagattcacccagtacaattctgaaagctcttaaacaggagtctttaaaataatgtaaacacttaagtaatcaataagggttctctggtggcccacttttacatgcaaa

SEQ ID NO: 893427 - DNA, 120 bp, Artificial Sequence
  ENSG00000267199_39 (sequence is synthesized)
tacagaccaactgttaacatgcattattttagtcaactggtaaagtttatttcataagtataagtaattttaagccttttactaaactgtaaatttcaatccattaaaaactactaccgg

SEQ ID NO: 893428 - DNA, 120 bp, Artificial Sequence
  ENSG00000267199_40 (sequence is synthesized)
agatagttttctttatgaaattgtagactgtgatttacaactgtacatcttttcctcaactggagctggtaagaaaaaagttaaatatgtgttacccaaagcttttcctacttatggtat

SEQ ID NO: 893429 - DNA, 120 bp, Artificial Sequence
  ENSG00000267199_41 (sequence is synthesized)
ccaaattctttgtatatctgcaatacaggaagcacgagtcaaagattatgacttggacttagtcactggacatgtggattatgagttggacacatacacacaagtatcttgacatacaca

SEQ ID NO: 893430 - DNA, 120 bp, Artificial Sequence
  ENSG00000267198_0 (sequence is synthesized)
agctatcagcttcccagtttgcacaattcatcaagaaattatgcggggtcactggcacaaatgatgaggcatctcctggaagcttaacttcttatccatcccatctcttggacagatgat

SEQ ID NO: 893431 - DNA, 120 bp, Artificial Sequence
  ENSG00000267198_1 (sequence is synthesized)
gccagttaattactttgaatgctcctccaccaagccaaggccagactcctgcaatcataggatggcaacaccacctctaaagcacagaacttcaggctttgcttcggaagtggcaccatg

SEQ ID NO: 893432 - DNA, 120 bp, Artificial Sequence
  ENSG00000267198_2 (sequence is synthesized)
tcaaggtcagaaaactgaagctgttaggagttttagtgttaagttccttccgaggatgttaattaggcttcaaactgttttgttctgagaaataaaaactaaactccagtcattcaagct

SEQ ID NO: 893433 - DNA, 120 bp, Artificial Sequence
  ENSG00000267198_3 (sequence is synthesized)
aacagttgaggtgttctatggcttcaaaatcaagtaagatttgtaaatgaattgctaggtgcaaccattacttattatatgccacacaaacagtggagaaaattatggacaccaccatcc

SEQ ID NO: 893434 - DNA, 120 bp, Artificial Sequence
  ENSG00000267198_4 (sequence is synthesized)
tgaactggctgctgctgctcactgatggaaagttcatgctccataggagaaactggaggctcaattggggcctcctgttgggttgcagaaggttccacctcctctggaaactgaattggg

SEQ ID NO: 893435 - DNA, 120 bp, Artificial Sequence
  ENSG00000267198_5 (sequence is synthesized)
gtctcctgctgggcttgggaagattctgtctcattggtaggctctgaagttatggtaacctccacatctgcaggtttaactgtaatgttgggcaagtgataataagcttgatcctcacct

SEQ ID NO: 893436 - DNA, 120 bp, Artificial Sequence
  ENSG00000267198_6 (sequence is synthesized)
actcctggagcggggggagactaacccctctcctgtgtccacaactgtagtaatacaatcctcggttctgctctccaaacttcaaataaggggtcagagccaagggttaagactttagga

SEQ ID NO: 893437 - DNA, 120 bp, Artificial Sequence
  ENSG00000267198_7 (sequence is synthesized)
aaagccccggaaataccctgcactcaaaaagcagtttcagagtttcacattttcctgagaattaaacaaattatcctccaaattctgctgcttgttttgaattatggttatactggcaat

SEQ ID NO: 893438 - DNA, 65 bp, Artificial Sequence
  ENSG00000267198_8 (sequence is synthesized)
cctgggttctagtggttttcatgttacctttgagtttttatctccacatacttatattaaaccgt

SEQ ID NO: 893439 - DNA, 120 bp, Artificial Sequence
  ENSG00000267198_9 (sequence is synthesized)
acctttgagtttttatctccacatacttatattaaaccgtgtagttcttcttcccatctgacatctacaatctcttcactgggtctgtactccatagctattttaccactttctgaaata

SEQ ID NO: 893440 - DNA, 120 bp, Artificial Sequence
  ENSG00000267198_10 (sequence is synthesized)
ctcctggaagcttaacttcttatccatcccatctcttggacagatgatgccagttaattactttgaatgctggtctcgaactcctggcttgaagtgatccttctgtcttggcctcccgaa

SEQ ID NO: 893441 - DNA, 120 bp, Artificial Sequence
  ENSG00000267198_11 (sequence is synthesized)
cagctcagtttttaacatatgtatgaaatatcaactgtgtttggttcaaaggactttatgatcttacagataggaactaaggaataataacgtaagaaataaaaaatgtggaaataaaaa

SEQ ID NO: 893442 - DNA, 120 bp, Artificial Sequence
  ENSG00000267198_12 (sequence is synthesized)
ccatcccatctcttggacagatgatgccagttaattactttgaatgcaagtttgaaaaccactgctttaaagaaaatggatactccccttaccaagcagaaagtaggattttggaaactg

SEQ ID NO: 893443 - DNA, 120 bp, Artificial Sequence
  ENSG00000267198_13 (sequence is synthesized)
atgcaagggaagcaaaaagatgcctcaggaggcacgattacaacaggattgatgcaaacggaagctgaagcttaaccaaagacattaatatacgcccacaaaagaaaatgctaaggaagt

SEQ ID NO: 893444 - DNA, 120 bp, Artificial Sequence
  ENSG00000267198_14 (sequence is synthesized)
tggagaaccaaagaacaaaatttgtcaatgaatttccagcacagtctaggttaagggagtgaatttcttgactgaatggcacagactctgtaccacctgattggctgttaccttaatgga

SEQ ID NO: 893445 - DNA, 120 bp, Artificial Sequence
  ENSG00000267198_15 (sequence is synthesized)
ggaattatattacaatgtataggtactttaattagaatgacctggcagttactgaggcaaaattttccgctcctttgtattctgtaatacaagaaggatctacatggatgttctgttctc

SEQ ID NO: 893446 - DNA, 120 bp, Artificial Sequence
  ENSG00000267198_16 (sequence is synthesized)
tgaactgtctggatgaaccggtcaatggcactcatcataccttagtttttaaatctgcattgtggtcataatctgttatttaattaatttctcgtatttttaataaaaacgttgcctata

SEQ ID NO: 893447 - DNA, 120 bp, Artificial Sequence
  ENSG00000263860_0 (sequence is synthesized)
ccagtgcaccccatctgctgcttcctgggagtggtggctacttcctcaaaaggagggtggatctgctctcctgtgcactccccctacccccgagggacttgtggagccctggccacatcc

SEQ ID NO: 893448 - DNA, 120 bp, Artificial Sequence
  ENSG00000263860_1 (sequence is synthesized)
cagttcccagtgaaaactggaggttgccatcacctaaccacacatgcaataaagtcttctgcctgctgcttacagcccccgagaaccttctccgagagaataaaacctttgactgctgct

SEQ ID NO: 893449 - DNA, 120 bp, Artificial Sequence
  ENSG00000263863_0 (sequence is synthesized)
accactagctccagcttgataagggcatggtgacttgactggtgtatcagatgccttaaagatgagggtctaagtttaagtaaactttattcccaggaacactagccaaggagtgcgact

SEQ ID NO: 893450 - DNA, 120 bp, Artificial Sequence
  ENSG00000263863_1 (sequence is synthesized)
atgcatgtattgaaacctggatctaatgcgatcgtgaagatatcgttttactaatcttttatttatgtcccacacttggtagggcacacttcagagaaagcaataaacattatctgttaa

SEQ ID NO: 893451 - DNA, 120 bp, Artificial Sequence
  ENSG00000263862_0 (sequence is synthesized)
ttcattttcaaattccttagtgagcagttggtttcgttgtcttaatttggggcagtaatgatttctgagaagcaggtgattgataacgcgcaaattcaaagccccttgggggctgcattg

SEQ ID NO: 893452 - DNA, 120 bp, Artificial Sequence
  ENSG00000263862_1 (sequence is synthesized)
tagcatggtgtggggatggggagacagagggctggtaggatcccgaattcctagtttttctctccctctcccttgcttcttcattttcttccttcaggctttcttccatttctttcttcc

SEQ ID NO: 893453 - DNA, 120 bp, Artificial Sequence
  ENSG00000263862_2 (sequence is synthesized)
atcaaatatttgtggagctggaactgggcttcactatcatattccaaggccctgtactgggaacagacaaagaagctcctcccagagactggaagaatggtacaaggtgtgaaaaccaag

SEQ ID NO: 893454 - DNA, 120 bp, Artificial Sequence
  ENSG00000263862_3 (sequence is synthesized)
gcttaaagcatgcaagttatttgcccgaggtttttcagccacaaatgaagaagctgggtctgctccacacctgtgaaccaggctatttccaccataacctgaactcagatgagcaccagc

SEQ ID NO: 893455 - DNA, 120 bp, Artificial Sequence
  ENSG00000263862_4 (sequence is synthesized)
ccatggagaatagtccagaaggctgcccatagccttaaaggacagtgtgagcattaatcacagcctgttgcatttgaagaccacctccggaacaatgtcgttttaaatctatgcccaagg

SEQ ID NO: 893456 - DNA, 120 bp, Artificial Sequence
  ENSG00000263862_5 (sequence is synthesized)
ctgaacttggattggaaagatgggagagacagcaggcctgggtgtattcaggattatttcctaataactcactctctcctccctcctccctttcttgaaagtgagtggttagggatgagc

SEQ ID NO: 893457 - DNA, 120 bp, Artificial Sequence
  ENSG00000263862_6 (sequence is synthesized)
taggagatgggcaacatgtcccagagatgattctaacagggaactcttcctggcagagtccagtgaagggaaccaggaaattcgggggcagggcaatcccactctctctgtcaggtgaga

SEQ ID NO: 893458 - DNA, 120 bp, Artificial Sequence
  ENSG00000263862_7 (sequence is synthesized)
tcacctgcgcagtggtttgagttcaggcatcttactttcttttagttagattcataggattaaaaattatctgcttatctagtccaatatttttaaggcatgtcaaaaaatctgcagaat

SEQ ID NO: 893459 - DNA, 120 bp, Artificial Sequence
  ENSG00000263862_8 (sequence is synthesized)
ccccccccccccttttttttcataagaaatatacataaatctgagaaaaagcagagctggaaaaaaagtgggggcatctcggaggatgaactacctggagccccattctggcagctcttg

SEQ ID NO: 893460 - DNA, 120 bp, Artificial Sequence
  ENSG00000263862_9 (sequence is synthesized)
agaattctggaattcctctggaaactactgatttagtttctcatttccatttgagaaaacaaaatataataatagcgatcaaggttatattttatggaagtctcactgtgtatgcgtctt

SEQ ID NO: 893461 - DNA, 120 bp, Artificial Sequence
  ENSG00000263862_10 (sequence is synthesized)
tttattcttacagcagcctcacaaaatgagtgttatattctggattatcagaagagaaatgtgagatgcaggcaggttgagaaaattgctccaagtcacttcgggaatgtgtgcatggac

SEQ ID NO: 893462 - DNA, 120 bp, Artificial Sequence
  ENSG00000263862_11 (sequence is synthesized)
aaggtaggtccacctgggattgttcagctgcaagatcaacacagggccaagtcagaaaacacagatttcccatcaaacctgggttctgtgaaaataagatcttaatggaaactcaatgta

SEQ ID NO: 893463 - DNA, 120 bp, Artificial Sequence
  ENSG00000263862_12 (sequence is synthesized)
tattctggattatcagaagagaaatgtgagatgcaggcaggttgagaaaattgctccaagtcacttcgggaatgtgtgcatggacaaggaagcaggaagatcccaaggaaaaagaagcag

SEQ ID NO: 893464 - DNA, 120 bp, Artificial Sequence
  ENSG00000263862_13 (sequence is synthesized)
catgaaaaatgacaagaagactacaacagaagtttctacgaactttgcacacacagaagagggttcttttagttttagtcaggataggaaaaggacaaaataaaagtgaacatttattga

SEQ ID NO: 893465 - DNA, 120 bp, Artificial Sequence
  ENSG00000286895_0 (sequence is synthesized)
gagcgccatgagggcgaggcctggggtagggccaggataagcctcactggggcaggtcctgggtagagaccaggttggcgggtcttggggcggggccaggatagggcgatcctggaagct

SEQ ID NO: 893466 - DNA, 77 bp, Artificial Sequence
  ENSG00000286895_1 (sequence is synthesized)
ggtcttggggcggggccaggatagggcgatcctggaagctgggcttcggaagcgtccagctgttgttccagcccagt

SEQ ID NO: 893467 - DNA, 120 bp, Artificial Sequence
  ENSG00000286895_2 (sequence is synthesized)
tacagagcttttctgcactgagtcatcaggagcaaatgctagatcagatagggtctctctctctgccacccaggccagagtgcagttgacgcagggcaggggagccccgaagtggagcat

SEQ ID NO: 893468 - DNA, 120 bp, Artificial Sequence
  ENSG00000286895_3 (sequence is synthesized)
caagaatgaagccgcggaccctcgcgaaatgaggcttctccctgggaccagcattccacgaaggcagcccttttctagatggagaaaacagaacctgaagacacccgtttccctaaactg

SEQ ID NO: 893469 - DNA, 120 bp, Artificial Sequence
  ENSG00000286895_4 (sequence is synthesized)
gaacctgaagacacccgtttccctaaactgctcttgctcatgtttctacaaggcctggagctgatacgaaaaacctcccttctttcccaaatgctccccagcttccccgttcactgaagg

SEQ ID NO: 893470 - DNA, 120 bp, Artificial Sequence
  ENSG00000286895_5 (sequence is synthesized)
ccctgcagtcaggaacagtcaggactttgcacccagttgttgtgggtgtttggccgactcttcctcttgtgtgattcatggaccctcagcattgcatcacctaggagcttttggaattga

SEQ ID NO: 893471 - DNA, 120 bp, Artificial Sequence
  ENSG00000286895_6 (sequence is synthesized)
agactctcagggctcacccggaaggacctcctgggccagaatctgcattttaacaagatgctcagtgcctcccgctgaagaatcggagtatatttctccagcccctaatgttgggtttag

SEQ ID NO: 893472 - DNA, 120 bp, Artificial Sequence
  ENSG00000286895_7 (sequence is synthesized)
ctagctttggccactggaatattaatctgcatgaccaaaaacttggaaagtatgcattcatttgtgctcactcactcctgctgtcaccatgagaacaagcccaggccagcctgctgcttc

SEQ ID NO: 893473 - DNA, 120 bp, Artificial Sequence
  ENSG00000286895_8 (sequence is synthesized)
gctgcttccagcagaagataagagacaccaagagcaaagtcgagcttcccagacatgctcatgctagattaaccaatcctcagctgacccatagctccatgaaaataaatgactgttgta

SEQ ID NO: 893474 - DNA, 120 bp, Artificial Sequence
  ENSG00000227308_0 (sequence is synthesized)
acacaatgtgtagtcttttgagtctggatttactcactcagcataacgcatttgaggttcatccatgtggtggaagtgggacagctggatgaccatgacattggacctccagtagtgctc

SEQ ID NO: 893475 - DNA, 120 bp, Artificial Sequence
  ENSG00000227308_1 (sequence is synthesized)
tgaagcgatgcatcttggaaaggaggatctgcctgcgttcctgacatcacccttgggatttctcctctgctctccaggcctctggctctccctgctggttctgtgctgggtcacctgcca

SEQ ID NO: 893476 - DNA, 120 bp, Artificial Sequence
  ENSG00000227308_2 (sequence is synthesized)
ctgctcagcctgcatgccctgcagaagttggctggagccagctggtggtgacttgccagagactctggttaaataggaattttgcaagctggttgttaaaccattggtagcttgaaatca

SEQ ID NO: 893477 - DNA, 120 bp, Artificial Sequence
  ENSG00000227308_3 (sequence is synthesized)
atttcctttttttcctctttgcccaataaattcaatttttctcacccttcaaagtgcctgtgagcctaatctctcctggctatgtgacaaggaccccgtttttagctgaactaaggagaa

SEQ ID NO: 893478 - DNA, 120 bp, Artificial Sequence
  ENSG00000227308_4 (sequence is synthesized)
agtcctacaacataactagatgaggttacggcaggcactaaatctgccccgagtgcttgactcagcctcacttgatccgctgcaacagcctcccctctggactgagatggtgagcatcag

SEQ ID NO: 893479 - DNA, 120 bp, Artificial Sequence
  ENSG00000227308_5 (sequence is synthesized)
ccaaggcaggactcggcacacggtgcagtcagcagcctctccagggacatgccaaggtttccaggaggccagtctttgctggaaatttctcagtgaccacttttccccctttctttcttt

SEQ ID NO: 893480 - DNA, 68 bp, Artificial Sequence
  ENSG00000227308_6 (sequence is synthesized)
cccctttctttacctgccttcctgttggatggatacatggctattttcttactgttagagacacattc

SEQ ID NO: 893481 - DNA, 81 bp, Artificial Sequence
  ENSG00000227308_7 (sequence is synthesized)
atctctcctctccctttgtctctctcattaaagcaaataacatagcaggaggaatgggaaaagtagcaaatcccaggctag

SEQ ID NO: 893482 - DNA, 120 bp, Artificial Sequence
  ENSG00000227308_8 (sequence is synthesized)
atagcaggaggaatgggaaaagtagcaaatcccaggctagtctcatcatttctgggctgaaatggaaccacttgtggtgtgtggaatcgtggcatccggcatgccacattccctgctccc

SEQ ID NO: 893483 - DNA, 120 bp, Artificial Sequence
  ENSG00000227308_9 (sequence is synthesized)
cctcaaccaagacatcaacaacagaaacaaaactgcttcctctgaccagcaggaaatttccaggtgaacacactctggcttaagtaattaggcaaagaatgtggctttgtgcagttgtgg

SEQ ID NO: 893484 - DNA, 120 bp, Artificial Sequence
  ENSG00000227308_10 (sequence is synthesized)
agagactcaacttgctcttagagtctttgtttctgttcagtccctggagtgcccctgctttcactgctgtcctttgccactagaccgggcagaaatccgcctttttcctgcattccttcc

SEQ ID NO: 893485 - DNA, 120 bp, Artificial Sequence
  ENSG00000227308_11 (sequence is synthesized)
actgttgttgattcagctcattttacataccaaggcacctttcctgattccattctttggccaaagactccctcagaactttaagaactttaagccaccaaatgcagcaggcactttttt

SEQ ID NO: 893486 - DNA, 120 bp, Artificial Sequence
  ENSG00000227308_12 (sequence is synthesized)
caggcgtgagccacggcgcctggccagcaggcacctcttatgcttgctttgaaaatatacttatgaggttagtgcccatcttcctgtcttatgattcgaatcctttccttctttcttccc

SEQ ID NO: 893487 - DNA, 120 bp, Artificial Sequence
  ENSG00000227308_13 (sequence is synthesized)
taattcctgttctttttctctcatgacccctggctacccattagcctttggaaaaattctattatgtttgcctgtttgtttttttctttttaatgtatatgttaccagaaaggggtccca

SEQ ID NO: 893488 - DNA, 120 bp, Artificial Sequence
  ENSG00000227308_14 (sequence is synthesized)
gggtcccaatccagaccccaagagaaggatcttggatctcacacaacaaagaatttcaggcgaatccacagagtaaagtgaaagcaagtttgtaagaaagtaaaagaataaaagaatggc

SEQ ID NO: 893489 - DNA, 120 bp, Artificial Sequence
  ENSG00000227308_15 (sequence is synthesized)
taaggagaaagtcctacaacataactagatgaggttacggcaggcactaaatctgccccgagtgcttgactcagcctcacttgatccgctgcaacagcctcccctctggactgagatgga

SEQ ID NO: 893490 - DNA, 120 bp, Artificial Sequence
  ENSG00000227308_16 (sequence is synthesized)
tagtccacagcttacctgctcctcttagtaccaatgaaaacacctacatcacctcgttttaatagcgacaaacttgagaatttttgatacaaatatttactaggaaaaaaagaaaagaaa

SEQ ID NO: 893491 - DNA, 120 bp, Artificial Sequence
  ENSG00000227308_17 (sequence is synthesized)
aggcgtgagccacggcgcctggccagcaggcacctcttatgcttgctttgaaaatatacttatgagccatttgaagtgctgtctgctccttggccttctggcatgattgtaagcttcctg

SEQ ID NO: 893492 - DNA, 120 bp, Artificial Sequence
  ENSG00000227308_18 (sequence is synthesized)
aggcctccctagaggatgagtacatggcagcatcatgcttcctgtacaggccgcagaactgtgagtcaattaaaattcttctttataaactactcagtcccaggtatttatttatttata

SEQ ID NO: 893493 - DNA, 78 bp, Artificial Sequence
  ENSG00000227308_19 (sequence is synthesized)
ggcttgagccactcgtctatgatattttagttatagcaatcaaaatggactaagacaaccactatgcctgtggtggca

SEQ ID NO: 893494 - DNA, 120 bp, Artificial Sequence
  ENSG00000227308_20 (sequence is synthesized)
atcaaaatggactaagacaaccactatgcctgtggtggcactgtgaatagagagagagggaacagggaaatatctagatctgtgtgctgataccactttttttctccacattattctcct

SEQ ID NO: 893495 - DNA, 120 bp, Artificial Sequence
  ENSG00000225670_0 (sequence is synthesized)
gggtacagactatgggaaaaaataggtggtggtaggtctttccagggtcaacgccaaggagaggcctgagaggtgcatagcaaaggctgtggcactgactccatggctcagaggagggaa

SEQ ID NO: 893496 - DNA, 120 bp, Artificial Sequence
  ENSG00000225670_1 (sequence is synthesized)
atccagggaagggctgaatgctctgtgtttaagggagagatagaatggacagctgggcaaacacacacccggggactcctttctccaagaccgatgggcattgggggtggcagaggaaat

SEQ ID NO: 893497 - DNA, 120 bp, Artificial Sequence
  ENSG00000225670_2 (sequence is synthesized)
accagcatggaacaacatcccagggacccgcgtcctccccaggttacagtcctgggtccctgcatggctgcatgttgtctgcaggccacatctcctcaggactcccgcactcatcacttt

SEQ ID NO: 893498 - DNA, 120 bp, Artificial Sequence
  ENSG00000225670_3 (sequence is synthesized)
cccattgctatggaagagaggtgtcaaggtggcacctgcctccctgtccgtagtgctcaggtgtgtggctaccagaggaaaagccactcccaacctttgccgacaaccatcccgtttctg

SEQ ID NO: 893499 - DNA, 120 bp, Artificial Sequence
  ENSG00000225670_4 (sequence is synthesized)
ggttcctggagaagtctgggaagctgctctgttgtagaggctgaaaggagggctggtgagagcccccagctgaaaccagccctgccccttacccttcctcacccctctaccttcactctc

SEQ ID NO: 893500 - DNA, 120 bp, Artificial Sequence
  ENSG00000225670_5 (sequence is synthesized)
ctcctaacactccagggttttgttttttgtttgttttttgcttttctcaccccagggctcctgcctctccagcctggagacagatttgatttgggattgttacaaaaataataataaccc

SEQ ID NO: 893501 - DNA, 120 bp, Artificial Sequence
  ENSG00000225670_6 (sequence is synthesized)
aaatgcagagaagccacggaaagggctgagggcaaccctcccctccccccgccctcctccctccccattccaaaccgagtacaaaaccgcacccaaagcagacattctgtacaggggggt

SEQ ID NO: 893502 - DNA, 120 bp, Artificial Sequence
  ENSG00000225670_7 (sequence is synthesized)
gggtgggctggggagcaagcgggaggggcggccctgcggttgctctgtacaagtccgggttggtgacggccccagcagtccccacagggcccctggggggcgcaggaagtgggcaggcgc

SEQ ID NO: 893503 - DNA, 120 bp, Artificial Sequence
  ENSG00000225670_8 (sequence is synthesized)
ctctagatgaaatattccttcttgtcgtcccctcctgactgcccgccttctgcattgatgatggccgtgtccgcgtctggagcatcgtcggagccttttgcctcatgtgtcagtagtggc

SEQ ID NO: 893504 - DNA, 120 bp, Artificial Sequence
  ENSG00000225670_9 (sequence is synthesized)
caaggaagatgagcatgatgagcagcaggaagacaatgaaagccacgatcccaccgatgatggcgtgtcccgcccacttaaggatattcctggaagaagatgcagtagctccttctacca

SEQ ID NO: 893505 - DNA, 120 bp, Artificial Sequence
  ENSG00000225670_10 (sequence is synthesized)
ccaggcgtcagcactggaaacagacgcagtccaacaggactccctctgcctggctgttgagcacaaagcagaggggagatcagcaagataccaaccacaagggcacaagaactttctctc

SEQ ID NO: 893506 - DNA, 120 bp, Artificial Sequence
  ENSG00000225670_11 (sequence is synthesized)
actgccaatcatcatcagattggtctggagagatctgggggcagagaccggagctcagtgcattgtccttgctcttggcatcctacaatagccttgttgtgctgaggcagctcccacatg

SEQ ID NO: 893507 - DNA, 120 bp, Artificial Sequence
  ENSG00000225670_12 (sequence is synthesized)
ctgaggtctgcccctggagtgggaatcacccatccagacattctgatcccaagaactcagacctcttatcgctgggaggcctggctcttatcccctcaactgttttaatgagtgtctcaa

SEQ ID NO: 893508 - DNA, 120 bp, Artificial Sequence
  ENSG00000225670_13 (sequence is synthesized)
gtaagggagcctctgatgtttccccgacaatgcatttcccctattctgagaaaagataagactttctggcgggacccacagccattgggatcttcaaaaaaatcgcccgtcaactctcca

SEQ ID NO: 893509 - DNA, 120 bp, Artificial Sequence
  ENSG00000225670_14 (sequence is synthesized)
taaaggggcctctgtgtcaccctgtcactactcctgaagctgggttttgtggtcacagctttgagaagaacttcagagaaggagcatcacctggtccttctagaagatatggcatctgag

SEQ ID NO: 893510 - DNA, 120 bp, Artificial Sequence
  ENSG00000225670_15 (sequence is synthesized)
aaaagattctgtctcttggcatagtacaagcttctctctattttctgtccagacccagtacactgtgcttaaggtgggcagaaaaaaaaatgacagcagttgcatgcacccaatacctag

SEQ ID NO: 893511 - DNA, 120 bp, Artificial Sequence
  ENSG00000225670_16 (sequence is synthesized)
tcttaggagaagcaactctgagaagagccagttagagaaggaaatgcacctgcgcctgcacttgagaggctttggggcctctgcacacagaattattgttcttgttgtcagacaagtgca

SEQ ID NO: 893512 - DNA, 120 bp, Artificial Sequence
  ENSG00000225670_17 (sequence is synthesized)
ggggatggaagatggtgtcacccaggccaccactaccaaagaaaggcagatgagagcccacccttctaatgttttttcactaagcggccattacacattctagagtggacctgggaccta

SEQ ID NO: 893513 - DNA, 120 bp, Artificial Sequence
  ENSG00000225670_18 (sequence is synthesized)
agccctcagggaccccagtggtgggctggttttcctttactccactccccgtcacagtttggggatgttatcaggaagcattttaaaaaagggaataagatggacagagaaaggagattc

SEQ ID NO: 893514 - DNA, 120 bp, Artificial Sequence
  ENSG00000225670_19 (sequence is synthesized)
tggaggaagagaactgaggagggcttaccattaacattgagggtgtagtaggccttgtagctgcccatgttgctggtggctgtgcagccgtaggtgccactgtcactcttgttgaggaaa

SEQ ID NO: 893515 - DNA, 120 bp, Artificial Sequence
  ENSG00000225670_20 (sequence is synthesized)
gggaagatcagggcactctcctgggtcatcttcaggggtggcacactgccctccttctcccataggtactgctgggggctgtcgaggcagacaaatcagaagagctcaggagagcatagg

SEQ ID NO: 893516 - DNA, 120 bp, Artificial Sequence
  ENSG00000225670_21 (sequence is synthesized)
ggagctaaaagaaaaaaaaaaataactgggagcagggatgtcaaggactgtttgatgaggctggagaaattatcggggccagagacactggagctgctatacgccaggtggcctcttggg

SEQ ID NO: 893517 - DNA, 120 bp, Artificial Sequence
  ENSG00000225670_22 (sequence is synthesized)
gttcgttctggggaagctgtagatctccagacttgtatcttactttaacttggcctttgtgggaaactcagggactgagttagggagtggccccttcccatttgtgctgctttgcagaag

SEQ ID NO: 893518 - DNA, 120 bp, Artificial Sequence
  ENSG00000225670_23 (sequence is synthesized)
aactaattgcaggcggacattattggacagtcagggaaatgagaggctcaggtcagacaatacagaggagataggaaggagctgttatgtgaagaaggcaatctgagaatgtggagagta

SEQ ID NO: 893519 - DNA, 120 bp, Artificial Sequence
  ENSG00000225670_24 (sequence is synthesized)
aggaggagaccaggaaatggatcttcttacactggattgccgcgaccctcacagtgtagcaacagcttctggccctcacgaggatggggagggtctggcctaatcatcgcagttggtgtg

SEQ ID NO: 893520 - DNA, 120 bp, Artificial Sequence
  ENSG00000225670_25 (sequence is synthesized)
tctgtggagaaggaaatggtatcaatgaatacctccccacacggcttaggagattccctcacttagttgcacactacagcttctacctctaaatgtttccgcagctcaagaagtgcaaca

SEQ ID NO: 893521 - DNA, 120 bp, Artificial Sequence
  ENSG00000225670_26 (sequence is synthesized)
aagaccttccttctcctacttctcatgaacaaggaccattattgctattgaatatgtgagcaacttctcttgcaaccttgtgtgataggattctggaaggtctgtccttggtgggcccta

SEQ ID NO: 893522 - DNA, 120 bp, Artificial Sequence
  ENSG00000225670_27 (sequence is synthesized)
agagatgtcttaacagaaagctgagaagggaaatgagtggtttacctgtgcctagcaaacctcctagcacataggaaagacctaatacatattttttacagaacaaataaagttgaactt

SEQ ID NO: 893523 - DNA, 120 bp, Artificial Sequence
  ENSG00000225670_28 (sequence is synthesized)
gtcacatattgagctcacaacttctcagttctctctgctctgcaagggagcttagaactggaagcaatgcttgaacacaaaacatcattttgaatggtcagtgcaaacacgaagtgagag

SEQ ID NO: 893524 - DNA, 120 bp, Artificial Sequence
  ENSG00000225670_29 (sequence is synthesized)
ctttgaaacagcaagagaccagggtcatattttggctgcaaaaaggcactgacacaatatagaagggctctgtgaaggaagaatggcatctgccattgacgccgaagggctgcttaggag

SEQ ID NO: 893525 - DNA, 120 bp, Artificial Sequence
  ENSG00000225670_30 (sequence is synthesized)
gctaggtccagatggccgctcagaacaatacaaccagatgctggtcgagaacaacagataaagaggctgagcttcccctaaggatagagccaactttaacaaccagttaatgaacgtgtt

SEQ ID NO: 893526 - DNA, 120 bp, Artificial Sequence
  ENSG00000225670_31 (sequence is synthesized)
tcagccaaatcaaatgggacatagagaatcaggccaggtgaaagaataggcgttctgggaccccatggccatagaaacctctagcacagtgcctggagcatagcatttgttgactgactg

SEQ ID NO: 893527 - DNA, 120 bp, Artificial Sequence
  ENSG00000225670_32 (sequence is synthesized)
ctgatcacagttgggctaaaagggtccctggcgagtaactgccagatggtctggtatctaacagaggagtctttggggctcaggcaggggaccaaggctttagctctggccagggaccaa

SEQ ID NO: 893528 - DNA, 120 bp, Artificial Sequence
  ENSG00000225670_33 (sequence is synthesized)
ggggcggggggaaaagctccaggtcagggcctcacactaggaactaataatcagagaagcaccttataggaatatagaactttgacatttacaaagttctttcacatgcattgttttatt

SEQ ID NO: 893529 - DNA, 120 bp, Artificial Sequence
  ENSG00000225670_34 (sequence is synthesized)
tatcctcacaataactcagcaaagtaagcaggagccacagaaagatgaaatgctttggccaaaggagcacagctagtaagcggcagcactgcggctagagtccggattgtcggcctgtgg

SEQ ID NO: 893530 - DNA, 120 bp, Artificial Sequence
  ENSG00000225670_35 (sequence is synthesized)
attgagtctgccaaatgaatagtgatgcaccctaaacctacctcaggttaaagtttgagtaatgggtctaagatatgattaaataacactgaagttaggaaaataattgggcctaggtcg

SEQ ID NO: 893531 - DNA, 120 bp, Artificial Sequence
  ENSG00000225670_36 (sequence is synthesized)
actccacaagaagaggatgaagggctttggttattttgaaaactgcccaacttttaggtaagttaggacaagaaatacaccatttcctaactctaacttctcccattggactttagctga

SEQ ID NO: 893532 - DNA, 120 bp, Artificial Sequence
  ENSG00000225670_37 (sequence is synthesized)
ttcttttccctttggttcctccacccagagaggctgttctttacaaatttctgaatttcctcagatgagaaattcccgtttccaaacttcctcagaagtgtcctaaccatactaaaggca

SEQ ID NO: 893533 - DNA, 120 bp, Artificial Sequence
  ENSG00000225670_38 (sequence is synthesized)
aattccacagagggtgtgagtgtcctgggaagggccaggagtaatgacagtgacagtggccatttcaggtcagaatcccaggaaaatacatggagctggggcaaatagaagagcagtcag

SEQ ID NO: 893534 - DNA, 120 bp, Artificial Sequence
  ENSG00000225670_39 (sequence is synthesized)
taaggaaaagatctgggaataatgatgccagggaaactgtgctttcctaccacccatattttcttgaaatcataaattgttaaaccaagataaaactgtagtgatccccacgctcatctc

SEQ ID NO: 893535 - DNA, 120 bp, Artificial Sequence
  ENSG00000225670_40 (sequence is synthesized)
tttcacttagcaaatatagaatcaagctcagtggggtaaagtaatcttctgaatatcacacagctagtaagtggtggagtgcagactagaaactacttcctgggaatcctgagttaccac

SEQ ID NO: 893536 - DNA, 120 bp, Artificial Sequence
  ENSG00000225670_41 (sequence is synthesized)
agttacgacaacagtttgcagcctggctacattatactggcctagaccacgggttggtatccccttggaccaaatcctgccacctgcattcttttgtaaataaagttttactggaacaca

SEQ ID NO: 893537 - DNA, 120 bp, Artificial Sequence
  ENSG00000225670_42 (sequence is synthesized)
gggagatttagaggccttgtcgtggcacccacccaggaaaattccctaagccttttgcaccctcctgcctaagctattctaactcatctctgcacctctcccgcactcgcctactattcc

SEQ ID NO: 893538 - DNA, 120 bp, Artificial Sequence
  ENSG00000225676_0 (sequence is synthesized)
cattcaccttccaaacctctctgcggattcagcctgggcgggcgggagcacagtgagccacattctctgcattcccgcctcctgacagctcctggtaccacagccgctgagctgggatgt

SEQ ID NO: 893539 - DNA, 120 bp, Artificial Sequence
  ENSG00000225676_1 (sequence is synthesized)
ccaaacattccaactgactcatccgtggggcttattgctgctgcatcagatgggctgcctgaacagttcaggacttcctttcatcggacccagccagtgccttgcacagaacccattccc

SEQ ID NO: 893540 - DNA, 120 bp, Artificial Sequence
  ENSG00000225676_2 (sequence is synthesized)
aagaagatttgcagtgtgaaaatggaccatactgtggaataagagagcagaaagtcatctaatctactccccaggctttaggcagcacggtgtcaaaaccaacctagatttccagaatag

SEQ ID NO: 893541 - DNA, 120 bp, Artificial Sequence
  ENSG00000225676_3 (sequence is synthesized)
atcgttctaccacctcctctggaatttgaatgccatcgaatgcaacctgagtctattttcttttattctatgttgactgaggacaactattttcttgtttaaaaaaaaaccaaaacatta

SEQ ID NO: 893542 - DNA, 120 bp, Artificial Sequence
  ENSG00000225676_4 (sequence is synthesized)
aaatagcattttaaggttaattgacaatgttaataagtggcaaacttaggcctcaaatagaagatgataagtaacttgaaatgtttggaaaaagatgatctatatttaataaaactccat

SEQ ID NO: 893543 - DNA, 120 bp, Artificial Sequence
  ENSG00000225676_5 (sequence is synthesized)
cagtgagtgaaaagtttcattattagcattttcactgttctgtctctcatagtctacagttatattagcaaacttgcatttcactttatggaaacttgtctccattatgatttagttcaa

SEQ ID NO: 893544 - DNA, 120 bp, Artificial Sequence
  ENSG00000225676_6 (sequence is synthesized)
tggtttccttctcatactatttcagctagagagtcatttcattatgctgggaagtttctgaacatgtaatgtaattaattcctttaatagactcctctttatggaagacccattagtaga

SEQ ID NO: 893545 - DNA, 120 bp, Artificial Sequence
  ENSG00000225676_7 (sequence is synthesized)
catcactgtgaattaacatcttagtccaggaaaaaagctctttggaggcaacagtgaaacagctaaatctttgttgagagatgcgaccagaggatttaaccgcattccttgtggtttcag

SEQ ID NO: 893546 - DNA, 120 bp, Artificial Sequence
  ENSG00000225676_8 (sequence is synthesized)
aatgacatgcatattctgggacccacagatagggagagatacttgtcattctcagtaatgccctgaccacaccaattctttaacatacagagatagttctaaatgttataatttcttaga

SEQ ID NO: 893547 - DNA, 120 bp, Artificial Sequence
  ENSG00000225676_9 (sequence is synthesized)
atctgcccactggctaatgcctatgaagtaaggctactggctttcttttaactgacaagttaaaagtacacttgaaggcttctggacaacttccttctatatcaacctactaaggattgg

SEQ ID NO: 893548 - DNA, 120 bp, Artificial Sequence
  ENSG00000225676_10 (sequence is synthesized)
tcttccctctgaatctcgatgaatagcaatgaactctttctgtgtgggtctgaatattttcttatattatttttacatatgatcactggaagccgattgttctgagttcaaaattctgac

SEQ ID NO: 893549 - DNA, 120 bp, Artificial Sequence
  ENSG00000225676_11 (sequence is synthesized)
tttgctatgtactaactgtgtgaccttcatcaagtgatttaacttctctgtatcttagatatcttatcagaaattgagataaaagcagtacctgcttcagttggtgaagaggattaaatg

SEQ ID NO: 893550 - DNA, 120 bp, Artificial Sequence
  ENSG00000225676_12 (sequence is synthesized)
aatgagcacatgtaggtgcttaatggagtgtctggcctggagtaagtgccactgatgttgactggtattgtgattaactctgctgagtggaggtcccaccacgggcatgcaggcctgtaa

SEQ ID NO: 893551 - DNA, 120 bp, Artificial Sequence
  ENSG00000225676_13 (sequence is synthesized)
cacgaaagctgaaaaactctgacaaagcagaggagttggtgcctgggcctggggagggtgggctggcggcaaagggacacaagggaacttctggggtgacagaaatactctatatagtgg

SEQ ID NO: 893552 - DNA, 120 bp, Artificial Sequence
  ENSG00000225676_14 (sequence is synthesized)
ttaccccagtgtaagttaaaaaacattcaaacaattgtttccctgattatcccatttaatatactagtccaggctctaatcgccttacatctgtattaatgcaatagtctcctggttgat

SEQ ID NO: 893553 - DNA, 120 bp, Artificial Sequence
  ENSG00000225676_15 (sequence is synthesized)
ttttctgtccctgagctctttcttttttaattcctccttggcgtacccatgctcactcccatttctggggctacttcaataatcatgcctagaacagtatatgagccatttgtttaaaag

SEQ ID NO: 893554 - DNA, 120 bp, Artificial Sequence
  ENSG00000225676_16 (sequence is synthesized)
ggagggaaagaaataaatgtgcgtaagcaagtatgtttgcttgtttatgcctaaaatagctctggaaagacatatgagaaagcgtttatgttagttccctatggggaaggaaactggatg

SEQ ID NO: 893555 - DNA, 120 bp, Artificial Sequence
  ENSG00000225676_17 (sequence is synthesized)
gctgagggactgggtgggagggaggtttttctttatatatccttttgttccttttgaattttaaatcatgtgaatgtattacctgatcaaaaataaataaataaaaataataaaacccta

SEQ ID NO: 893556 - DNA, 120 bp, Artificial Sequence
  ENSG00000225675_0 (sequence is synthesized)
cactcttctctcagcgggcgctccacggccctgctctgggctcgcctgagtgctgggctctgcagacgcagggatgggccaggcgagcccctcaccacggaggtagcaggtccagaggaa

SEQ ID NO: 893557 - DNA, 120 bp, Artificial Sequence
  ENSG00000225675_1 (sequence is synthesized)
gcagcagaggcttcctggaggaggatttgtacccctaggaggactatgtcttcctcatctttgtcttcagaggataaatacaaggcctgacacataacaagcatgagattaatttacccg

SEQ ID NO: 893558 - DNA, 120 bp, Artificial Sequence
  ENSG00000225675_2 (sequence is synthesized)
aggatgaaatctcgtgctgtccggcttcgtcccacctgggatgtgaatcatccctttgtccagtggatccgcgctatagacactactctcccatcagtcactcagcagctgcttcagttc

SEQ ID NO: 893559 - DNA, 120 bp, Artificial Sequence
  ENSG00000225675_3 (sequence is synthesized)
ccagatcaactgtcgcaggatcgcagtgcttctgttcaagtaatccttattttacttcattatgggctccaaagcacaagaggagtgttgctggtgattccgatatgccaaaggaaagct

SEQ ID NO: 893560 - DNA, 120 bp, Artificial Sequence
  ENSG00000229167_0 (sequence is synthesized)
cccggggaaggcatcagggactccctttgccctcccactgacctccctgcaaacctcccccaaaccaaggggcatcctcagctggccagaccctgggggaagggagagagccgaggatca

SEQ ID NO: 893561 - DNA, 120 bp, Artificial Sequence
  ENSG00000229167_1 (sequence is synthesized)
ccggcacctgtggctgggttacccctgccatggaccactgggtgatcaagaagtcattccaaaatgtgaagcgttctgaagatatgcacatagcgtaagaacctggtgtaatgtgctggt

SEQ ID NO: 893562 - DNA, 120 bp, Artificial Sequence
  ENSG00000229167_2 (sequence is synthesized)
gcaaaagccctgaggcctggcacaagttggtctgcttgagaagcaggagagagccctgagcatccggagtgcagcaagcgagatgagcaagtcaagatgcagaaggactctctggcttgt

SEQ ID NO: 893563 - DNA, 120 bp, Artificial Sequence
  ENSG00000229167_3 (sequence is synthesized)
ccaaggtcacacggctgttaggagcagagcagcgtcctggtgcccaagccctgaggtccccagcacactgcctctgcaatggccacaactgtccaaagactaagctgactctcacacctg

SEQ ID NO: 893564 - DNA, 120 bp, Artificial Sequence
  ENSG00000229167_4 (sequence is synthesized)
tggaaaaggatgatggtgaggctgaaagcaggaaaagatttgacccatctcccaggttgggcccaggccagaggtctctaccagcaaagaggataaaagagactacacctggacaaaccc

SEQ ID NO: 893565 - DNA, 120 bp, Artificial Sequence
  ENSG00000227200_0 (sequence is synthesized)
gtgcctgcattttccccgaattgtttaaccctcatgcttcagaattaggctgaggcttgcggggtgggtcatgttgacctgggtgaacagagatccctttaagaagaacttctccatgtt

SEQ ID NO: 893566 - DNA, 120 bp, Artificial Sequence
  ENSG00000227200_1 (sequence is synthesized)
cttactgcagatggcgacactgaggcccagagagacatcatgaccagcctcaggtcccacatgcagcctgctgctctgtagcctaaatcagatcactgtcccagctttcaggtcaaggct

SEQ ID NO: 893567 - DNA, 120 bp, Artificial Sequence
  ENSG00000227200_2 (sequence is synthesized)
ctggttgtgacacctgggcctggactgcgggtgaaaagttttgatgcaaaaacacagaccgtccattgtcctatgggctaagtggactcccttctgctaaccagagatgcttgtgctggc

SEQ ID NO: 893568 - DNA, 120 bp, Artificial Sequence
  ENSG00000227307_0 (sequence is synthesized)
ttcaagcatttgggaaaacaatgaggaggcagcttattcccagctccaggcaggaggagacctgcagagggtgagattctcaggggaggaactgccagaagcctaagagcctttttccag

SEQ ID NO: 893569 - DNA, 120 bp, Artificial Sequence
  ENSG00000227307_1 (sequence is synthesized)
agctgcctccaggagagaaggtgatctacctggctccggatcaagtcctttctgctcagaacaagctttctgcacttgtagggtgggtgattttagagatttggagagtcaatctttgct

SEQ ID NO: 893570 - DNA, 120 bp, Artificial Sequence
  ENSG00000227307_2 (sequence is synthesized)
tctttccttttttctctctctccttcccagtcccacccactctaatcccagctcctgtttgtccaagcccctcaagcaagactctctttagtgagtgaaagctgacaatgtgagtctcag

SEQ ID NO: 893571 - DNA, 120 bp, Artificial Sequence
  ENSG00000227307_3 (sequence is synthesized)
cgggagaccctattatcaccattttacaagtgaggctcaggtgataacttgtccaaggccaggcagccagattgccgggaagcaggtgttcccagcgccgctgctttcaccctgttccac

SEQ ID NO: 893572 - DNA, 120 bp, Artificial Sequence
  ENSG00000227307_4 (sequence is synthesized)
atctctggtccttgtgtttagaaccattcttgagtgggtttgccaaaggcaaaaagcaaaaccaaggcttggctgacagttactgaggccctctgaaatgtgcattggcaattccagaaa

SEQ ID NO: 893573 - DNA, 120 bp, Artificial Sequence
  ENSG00000227307_5 (sequence is synthesized)
cacaagctcagatcagatccttagcatttaaatgaacttatgtcaggtttgctacaatatgatctgctggaacagctttctaactccttaacgggatgaggtatattttccttggcctat

SEQ ID NO: 893574 - DNA, 120 bp, Artificial Sequence
  ENSG00000227307_6 (sequence is synthesized)
tctaggcaaagatcagcaacttcaaacaaggagctgttcttcaaataaattcctcattgatacacatttttgaagaacactgggaagtaaaaacctggaggactgaattgtgttgttggg

SEQ ID NO: 893575 - DNA, 120 bp, Artificial Sequence
  ENSG00000184566_0 (sequence is synthesized)
gggagtggttaaatgttaaattttacgatgtacgtatttaacccccacacgccccaaacaaatctgacaaaagttaaagaccattccctaggtgtagctctgttcctacatgcaaaattt

SEQ ID NO: 893576 - DNA, 120 bp, Artificial Sequence
  ENSG00000184566_1 (sequence is synthesized)
tacatattgttccagggagctcacggtcttctcaggttcatctgtggaaccattcgacaaccaaatgttatggggaagccagtctcatgagctccaacacattcttcagtgcaatcagtg

SEQ ID NO: 893577 - DNA, 120 bp, Artificial Sequence
  ENSG00000184566_2 (sequence is synthesized)
gcaatccctgcccacttaggacttttcgaatagtgctcatccctgacttctggataaacttctttgcagaagcccatttgactccaaggacagaaaaaaagagtgcaggttgttattatg

SEQ ID NO: 893578 - DNA, 120 bp, Artificial Sequence
  ENSG00000184566_3 (sequence is synthesized)
caaagccacagcattaaggagctcaatattcttctagatatctgccctcctgtctgagaatcccatacttagagtatagcaggtcccatctccatttgggatggtggtggtggaaaaggg

SEQ ID NO: 893579 - DNA, 120 bp, Artificial Sequence
  ENSG00000184566_4 (sequence is synthesized)
tgccgtgggcctgctgactcctctcacgctttcaagctacagtgcttcccatcacattgcagaaggccgccttgggtcatatctcgcaaaggaagagctattaacaaatattccatttgt

SEQ ID NO: 893580 - DNA, 120 bp, Artificial Sequence
  ENSG00000184566_5 (sequence is synthesized)
atttcctgcgtggccctccatctggaaatatcttttatctggcaacttttgcaaaatgaaccaaatcttgaaggaggtcttggcaggtttatgctagcctctctatcactccaacaagtc

SEQ ID NO: 893581 - DNA, 120 bp, Artificial Sequence
  ENSG00000184566_6 (sequence is synthesized)
atttccatcctcgccttcacaagggtcaagcaattgtgacttgggttgggagacggggctggcacggaatggtagcaagtcatctaggctctgaggcatctttttaaccctgaaaacgtc

SEQ ID NO: 893582 - DNA, 120 bp, Artificial Sequence
  ENSG00000184566_7 (sequence is synthesized)
cacttggagggcaagagccaaatctaaaaaattattatacacactgtctctcagctcaaatatgtatgctctcactccaagttcagatcacaatttacaattccgcattttgtaattgtt

SEQ ID NO: 893583 - DNA, 120 bp, Artificial Sequence
  ENSG00000184566_8 (sequence is synthesized)
aagtgcagtctggcttccccaaagacctcaagctcattctgcccaggattaaatccaagagccttcttagcccagtttctggcatgcaggaagcatacaataatggaagaaatgaatgaa

SEQ ID NO: 893584 - DNA, 120 bp, Artificial Sequence
  ENSG00000269834_0 (sequence is synthesized)
gaccagggcgggccgggacaaagcctgggccgggcctgcgcttccgttcgcttgactggctgcgcttgttttcagggttttggtctgaaaacggatcttacctgcgcagagcaaaatcgg

SEQ ID NO: 893585 - DNA, 120 bp, Artificial Sequence
  ENSG00000269834_1 (sequence is synthesized)
ttgtagattatatccacgaaaattccttctattaaaatgaatttcaagtcccacctaccctggaagcagaaagagagagaagagagagagtaaagagaaagagaaaagaaagagaagttg

SEQ ID NO: 893586 - DNA, 120 bp, Artificial Sequence
  ENSG00000269834_2 (sequence is synthesized)
aaaaagagaaagaaaaccaagaaagaaagagaaaaaaaccgaaaataaatggacaagaaagaaaaacggtgaaggtcaaccctgtgctcaattccagagactttcctagggacatcgtgt

SEQ ID NO: 893587 - DNA, 120 bp, Artificial Sequence
  ENSG00000269834_3 (sequence is synthesized)
taccaaagtgctcggattataggcatgaatcaccttgcatgggagataaggacccccacatcaagccctcaggtcactgggatcctggactacggcactgctccaggcaggcctggttat

SEQ ID NO: 893588 - DNA, 120 bp, Artificial Sequence
  ENSG00000269834_4 (sequence is synthesized)
cctgcttgaggcagcaatcctcttgagcctagtgaaatgcaactggctgtacctcaatgatgttgccctgagattctgccagtcgaggtattacttcaatctcctgagaccagcctctac

SEQ ID NO: 893589 - DNA, 120 bp, Artificial Sequence
  ENSG00000269834_5 (sequence is synthesized)
ctccagatccagggaggccaacgtgccatgcatccctggagcatgaaacccaggatgggccgccttccagcctcccacagctgtgatgcaagttgaacacatacagagagactgcatctg

SEQ ID NO: 893590 - DNA, 120 bp, Artificial Sequence
  ENSG00000269834_6 (sequence is synthesized)
cactgggtggttttcctgagccttggggagcagaatgcatgaatcccaggtatctgccgatctgtatgtaacaaattcacttcatgtaacttactgtgtgtccgtgagattatctctcac

SEQ ID NO: 893591 - DNA, 120 bp, Artificial Sequence
  ENSG00000269834_7 (sequence is synthesized)
agaatgcatgaatcccagatggaggaagtggaccatgagtcaaaggatgtaagtggcctctggaacctacaaagggctcataaacagaagagacttgcttgtctcagatgaaactttgga

SEQ ID NO: 893592 - DNA, 87 bp, Artificial Sequence
  ENSG00000269834_8 (sequence is synthesized)
cagctcccatgatccccacatgtgggagggacccggggggaggtaactgaatcatgggggtgggattttcccatgctgttctcatga

SEQ ID NO: 893593 - DNA, 120 bp, Artificial Sequence
  ENSG00000269834_9 (sequence is synthesized)
tggaaagcagtatcatgggaaacttcctcaactcaagatcacctaccaatccttacagaatcagaatcatcatacaaactggtgaaagcatagtttcccctagaggttgggatgagggca

SEQ ID NO: 893594 - DNA, 120 bp, Artificial Sequence
  ENSG00000269834_10 (sequence is synthesized)
agaatgtcccctcttatcactactattccacacaatatgaaaggttccagccagtgaaataaaggaaaaagaaataaaagtgacaggctgggtgtggtgtctgaggcctgtaatcacagt

SEQ ID NO: 893595 - DNA, 120 bp, Artificial Sequence
  ENSG00000269834_11 (sequence is synthesized)
cccaaaggaaggtagctacatccctatgacctgtgttactggatatatcaaaagggagtttgcaaatgtggtctagataaggatctttagatagacatcctgaattatatggtcaaagtg

SEQ ID NO: 893596 - DNA, 120 bp, Artificial Sequence
  ENSG00000269834_12 (sequence is synthesized)
atagaatcacaaggttcaatatcagaagggtgcaggtggatgcgaagggacagagacagtggtgatgtgttgaaaatagagggataaagagattttttttctcacctttaaagatggagg

SEQ ID NO: 893597 - DNA, 120 bp, Artificial Sequence
  ENSG00000269834_13 (sequence is synthesized)
aagtggaccatgagtcaaaggatgtaagtggcctctggaacctacaaagggtaaggaaacaaattctcccctggagattaatgaagaatcacagaactatggacccatattagatatgtg

SEQ ID NO: 893598 - DNA, 120 bp, Artificial Sequence
  ENSG00000269834_14 (sequence is synthesized)
acttacagaattataaaagaataaatttttcttgttttaagccaatcactgtgtatagcaataggaaactgatgaaatgattttatgtagaaaattccaaaaaaatctacaaaaatctct

SEQ ID NO: 893599 - DNA, 120 bp, Artificial Sequence
  ENSG00000269834_15 (sequence is synthesized)
aattccaaaaaaatctacaaaaatctctagaacaagaaaaatgtaaaggtagcaaagtataaggtcaacctacaaaaatatcgtatatttcatcagccaggcatggtggctcgtgcctgt

SEQ ID NO: 893600 - DNA, 90 bp, Artificial Sequence
  ENSG00000269834_16 (sequence is synthesized)
tcaaaaatttaacaggccatggtggcacatgcctgcagtgccagctactggggaagctgaggtgggaggatgacttaagcctgcaggaca

SEQ ID NO: 893601 - DNA, 120 bp, Artificial Sequence
  ENSG00000269834_17 (sequence is synthesized)
gggaagctgaggtgggaggatgacttaagcctgcaggacacaggttgcagtagctgagattgctccactgcactccagccaggatgacagagtaaggccctgtctcaaaataataataat

SEQ ID NO: 893602 - DNA, 120 bp, Artificial Sequence
  ENSG00000269834_18 (sequence is synthesized)
aataatcttgtatatttctatacactagcaatttgcacatgaaacctgatattaaaaataaaatactatgtatgattgctccattaagaaaaaggtcaaagaggccgggtgcagtggctt

SEQ ID NO: 893603 - DNA, 120 bp, Artificial Sequence
  ENSG00000269834_19 (sequence is synthesized)
aaaatagccataaacgacgtagttttttgttgttgttgttgttttgagacagcgtctccctctgtcccccaggcgggagtacagtggcaggcactcagctcactgtaacctccgcctcct

SEQ ID NO: 893604 - DNA, 120 bp, Artificial Sequence
  ENSG00000269834_20 (sequence is synthesized)
agcctccagagtagccaccacgcccggtccaacttagttttttaatactttttaaaattttaagacagggtctctgccaccgaggctgaaatgcagtggcgcaatcatagctcactgcaa

SEQ ID NO: 893605 - DNA, 120 bp, Artificial Sequence
  ENSG00000269834_21 (sequence is synthesized)
ccttgacttcctggggtcctgggcaggtgaccccctgtctcagcctgccgagtagctgtgagtaaaggcctgtgcctctccactgtgctaattttctactgtttgttgctttgtttttaa

SEQ ID NO: 893606 - DNA, 120 bp, Artificial Sequence
  ENSG00000269834_22 (sequence is synthesized)
ttactgtgtgtttctctacctacctctcattctcaccttcttttcctagctttttttttctctttatttttcccctaggattctcctcatttcaagcccttcttccttctcctgctcttc

SEQ ID NO: 893607 - DNA, 120 bp, Artificial Sequence
  ENSG00000269834_23 (sequence is synthesized)
cctctattccttctcttccacttgttctgctcctttctcacttctttcacctcttattcttctttctgcccaatatttgtctccaattttcatatagttctgcctctttcttccccccgt

SEQ ID NO: 893608 - DNA, 120 bp, Artificial Sequence
  ENSG00000269834_24 (sequence is synthesized)
ctctgctgccccctagcttcccctgttaaatcccctcttccctgctatatccacctgtcccctctctggcatccccagatcccagttctccccaggctgtggttctccctgtgctctcct

SEQ ID NO: 893609 - DNA, 120 bp, Artificial Sequence
  ENSG00000269834_25 (sequence is synthesized)
tatcactggctgcccctcttgctctcccagcaccatgctgctctgtctgccctggctccaaatccctccttctctccccaactctccatctgaggagcctccccttttctgcccctctcc

SEQ ID NO: 893610 - DNA, 120 bp, Artificial Sequence
  ENSG00000269834_26 (sequence is synthesized)
ctatcttgctgaactttatctctctagaaacccagtttttctctaaatttctctagttgcttttctccccctgctcctttctcagcatcttcatgcactgtctctgcaaatccctcatcc

SEQ ID NO: 893611 - DNA, 90 bp, Artificial Sequence
  ENSG00000269834_27 (sequence is synthesized)
ctcagcatcttcatgcactgtctctgcaaatccctcatccaccatctactttgccatctgttttgttttggtcgcccaggctggagtgca

SEQ ID NO: 893612 - DNA, 86 bp, Artificial Sequence
  ENSG00000269834_28 (sequence is synthesized)
acccagctgccgtctgtttatgggtctccttcattcttctttcccatttcaccatttttctatttcctctcctccacacattcata

SEQ ID NO: 893613 - DNA, 120 bp, Artificial Sequence
  ENSG00000269834_29 (sequence is synthesized)
tttcaccatttttctatttcctctcctccacacattcatagggaggggactgcagtcagatccccacctcaagagcccatttcctgtgggatggaatttgggacaagagaaaccttaacg

SEQ ID NO: 893614 - DNA, 120 bp, Artificial Sequence
  ENSG00000269834_30 (sequence is synthesized)
tcctgagatagaagtcacgtccccacactcgatatcaggagaaggggaggcctggggagcagaagggcccccgatcaaggaggaaaaaggcaggagaaagtcaggagaggggcagggtct

SEQ ID NO: 893615 - DNA, 120 bp, Artificial Sequence
  ENSG00000269834_31 (sequence is synthesized)
gcaggatcccaggaccaggaagagttcacggcctccctgggactggggctgcgtcgctgcgctccaggagctgacgagggagcggagcagatgggaagctcccagggcgggaatcaacct

SEQ ID NO: 893616 - DNA, 120 bp, Artificial Sequence
  ENSG00000269834_32 (sequence is synthesized)
aaactccgcgataagagctgtctatatggccctgtggcagaagcacgggggacacgaccccatggaactgtgtccattaaacctctttgtcttcataaattacccagtctcgggtatttc

SEQ ID NO: 893617 - DNA, 120 bp, Artificial Sequence
  ENSG00000269834_33 (sequence is synthesized)
acagtaaattggtaatggtatagagtggggtgctgctataaggatacctcaaaatgtggaagcaaattttgaactgggtaacaggcaaaggctggaacagtttggagggctcaaaagaag

SEQ ID NO: 893618 - DNA, 120 bp, Artificial Sequence
  ENSG00000269834_34 (sequence is synthesized)
gagggctcaaaagaagacaggaagacgtgggaaagtttggagcttcctagaaaatggttgttgaatggttctgaccaaaaagtccaggctgaaggtggtctcagatggagatgaggaact

SEQ ID NO: 893619 - DNA, 120 bp, Artificial Sequence
  ENSG00000269834_35 (sequence is synthesized)
agaggtgagctgcaggggcggagccctcatggagaacctctgctagagcagtgcagaagtaaaatgtggggttggagcccccacacagactactcactactcgcctagtgcagccgtgag

SEQ ID NO: 893620 - DNA, 120 bp, Artificial Sequence
  ENSG00000269834_36 (sequence is synthesized)
aaaagggccaccctcctatagaccccagaatggtagattcaccgacagcttgcaccatgtgcctggaaaagtagcagacacaacaccagcctgtgaaagcagccaggagaggagctgtac

SEQ ID NO: 893621 - DNA, 120 bp, Artificial Sequence
  ENSG00000269834_37 (sequence is synthesized)
cctgcaaagtcacaggggcagacatgggttccctgcaagaccactggaaccaacctcttgcataagtgtgacctggatgtgagacacggagtcaaaagagatcattttggagctttgact

SEQ ID NO: 893622 - DNA, 120 bp, Artificial Sequence
  ENSG00000269834_38 (sequence is synthesized)
gccctgctggatttcagactggcatggggcctgtgacctgttttggccaatttctcccatttgcaacgggcgttatttatccaatacctgtgcctccattgtacctaggaaataactaac

SEQ ID NO: 893623 - DNA, 84 bp, Artificial Sequence
  ENSG00000269834_39 (sequence is synthesized)
gagatcttatggttttataaagggcagtttccctgcacgggctctctcttgcccgccaccacgtaagacatgtgtctctctagc

SEQ ID NO: 893624 - DNA, 120 bp, Artificial Sequence
  ENSG00000269836_0 (sequence is synthesized)
ccttattccagacattttatttattttttcttgtaggcgtgtggtcttgctatgttgcccaggagtttgagattagcctgggcaacataatcagaccctgtctttataaaagaaaaaata

SEQ ID NO: 893625 - DNA, 120 bp, Artificial Sequence
  ENSG00000262119_0 (sequence is synthesized)
ggttattttatctttatggctgtcaaaaacgttaattcagtgctgagggaaccaatactgctttaatttttttcttcctggtggaaaagaaaagctgatttgctttcagtgatctaattc

SEQ ID NO: 893626 - DNA, 120 bp, Artificial Sequence
  ENSG00000262119_1 (sequence is synthesized)
agtaagagttctttaatacagcaaagacatctggcatgaatgtaagcagaacatttggaggacttctttttcatagccaatcacttggtattagaaatggaccattatactggataagaa

SEQ ID NO: 893627 - DNA, 120 bp, Artificial Sequence
  ENSG00000262119_2 (sequence is synthesized)
agaaggttttagaatggttgaaactatcatttagttttacaaattaaatgtagtattttttgtaaacattaaacttattaaactaaaaagtaatatattagacacgatgttcctctaaag

SEQ ID NO: 893628 - DNA, 120 bp, Artificial Sequence
  ENSG00000262119_3 (sequence is synthesized)
tttcctatgagtgtagttttgcagatggctttccttgtctctgaaactttccttatgcattaagaaagtttgctaacatattcacattcatatgtttaaaaggtatattatgataaaaaa

SEQ ID NO: 893629 - DNA, 120 bp, Artificial Sequence
  ENSG00000262119_4 (sequence is synthesized)
aatcaatgtggaattgtgaaaacccttagtacaaataaaagcactcaaaagagcttgattgcagaattaataacgtgatagttctaggaaaagagctgcaatggtaaattaaattcactg

SEQ ID NO: 893630 - DNA, 120 bp, Artificial Sequence
  ENSG00000262119_5 (sequence is synthesized)
tcaatagatgaaaatgaaatagcttttttgcattatacatgaggtggtatcagatgtgcagggatgttacagaaaattggtgtttatcaaggatattccaaatagtaaattaaatgcctt

SEQ ID NO: 893631 - DNA, 120 bp, Artificial Sequence
  ENSG00000262119_6 (sequence is synthesized)
ttcatttgaatatagtttattttcagtgggttggaaagggtgcactgagaattagatcttttgtttttagtccacttagttgtacattttttgcttattacattgaaattgattatttta

SEQ ID NO: 893632 - DNA, 120 bp, Artificial Sequence
  ENSG00000262119_7 (sequence is synthesized)
gtgtggtgacgtaacctgatcaaatgtgagttgaaatgttggataaaagaagtctatactttaccggtaacaggtggaaaccaatcacacagtatgggatcaattttaaggataaaataa

SEQ ID NO: 893633 - DNA, 120 bp, Artificial Sequence
  ENSG00000262119_8 (sequence is synthesized)
agcctcgtagtttataagaagcttaaagaattctgaacagtttgtattaaaatacaattttaactggattattacctgtttggacagataatctctttgcttcagatagacattaatttt

SEQ ID NO: 893634 - DNA, 120 bp, Artificial Sequence
  ENSG00000262119_9 (sequence is synthesized)
aatagtctttctcttcgcacttgaccacaagtcttcagaataattttaagatcccggtattcttcaacatagcctctgagcgcttttcagtttctcttactcagatgtacgtaagggaca

SEQ ID NO: 893635 - DNA, 120 bp, Artificial Sequence
  ENSG00000262119_10 (sequence is synthesized)
cttaccttgtacatctcagatgagctaaattataaactgtgatcatatcatcaagttataaagaatttcttagaggattaatgaaatcatttggaagcccgtttttgtgtctttcataca

SEQ ID NO: 893636 - DNA, 120 bp, Artificial Sequence
  ENSG00000262119_11 (sequence is synthesized)
tatatgaagttcttaaagctatatatatgtatatttatgactgtcataatctactggaacaaatatgcctaatgtttatttcatgaagccccttttctgtttctcatttggtaagagcat

SEQ ID NO: 893637 - DNA, 120 bp, Artificial Sequence
  ENSG00000262119_12 (sequence is synthesized)
atttggggaaaagtctactttagttgtataacctaatggattttctcaaattacccaagtttttaagcagaatgtaattgtgtttgtaaggtttagttaaaatactagtgtgttttcgga

SEQ ID NO: 893638 - DNA, 120 bp, Artificial Sequence
  ENSG00000262119_13 (sequence is synthesized)
aactttcttcaggatgtgtaacacagaatacagacacactcgggacattttaatacattttaactcaaacgataggtactttaaagaaattatagccaatataatttccttgtatgctta

SEQ ID NO: 893639 - DNA, 120 bp, Artificial Sequence
  ENSG00000262112_0 (sequence is synthesized)
gaacaaatagcattttgtacccgcactacaatgcaggagaacgccaaacaccgctttattgcattcaaaccttctaagaggaatcgggcactcatgacttcacttcccagagctctgccc

SEQ ID NO: 893640 - DNA, 120 bp, Artificial Sequence
  ENSG00000262112_1 (sequence is synthesized)
agctgcccagcagcctggagatttccagaacaatggggagtaggtcaccctgccctgataggcaccagggggtggaaacgcctcctcgcccacaacacaatcactctcacccctttcctg

SEQ ID NO: 893641 - DNA, 120 bp, Artificial Sequence
  ENSG00000262112_2 (sequence is synthesized)
acctcttggggaattatccaaggagagttctgcctgctgtattttcactagggtcttgggacttctgcaggcagtcagcccaagtgcctacagcctgcctacttgggggagcagatggag

SEQ ID NO: 893642 - DNA, 120 bp, Artificial Sequence
  ENSG00000262112_3 (sequence is synthesized)
agtgtggcaccagcagaaaatacccagaaagccgggtacaaagcctcagtaaagtccaccctgaacttatacatcaggtggaccttgtcggcaacagcgaagaagatgacaaagccgtgg

SEQ ID NO: 893643 - DNA, 120 bp, Artificial Sequence
  ENSG00000262117_0 (sequence is synthesized)
agtgctgggaaacagtgctaagaaggatacagtggctagaagtcgtcctgtcgtcctgcctcacagtaacatcgttaccgaattctcagcaggtgaaccaaatgaaatggtcaactgaaa

SEQ ID NO: 893644 - DNA, 120 bp, Artificial Sequence
  ENSG00000262117_1 (sequence is synthesized)
gccaaccaggagggtgtctggctgttttggggaaactattcctgaccttattttgactaaaaagttgcctgctgtaccagcaaaaaatcaccatgtaccaacctatccaaacttatccat

SEQ ID NO: 893645 - DNA, 120 bp, Artificial Sequence
  ENSG00000262117_2 (sequence is synthesized)
tagggttatcgactgtgattctgggactcattgttgttctacaggacccctctgactctgtggttttctctactggattaacaatgatagccataggtgctttttttgttgtcctcactg

SEQ ID NO: 893646 - DNA, 120 bp, Artificial Sequence
  ENSG00000262117_3 (sequence is synthesized)
gagtgacagccctgtgtacggttacagtcgacgagaacttgcagaaaaccacgaggctaagactaggagtgatacgaaaaagcggaagtctccaaggaactacagagccttccatgactc

SEQ ID NO: 893647 - DNA, 120 bp, Artificial Sequence
  ENSG00000262117_4 (sequence is synthesized)
actcaataatcgctagcacctcgctgtagttgtacattgaaccctggcatcttcgtctttggaactaagtctcctgagcattgtttttaaatagaaataaaatctggcttttaaaaaaac

SEQ ID NO: 893648 - DNA, 120 bp, Artificial Sequence
  ENSG00000262117_5 (sequence is synthesized)
ctaagaaggatacagtggctagaagtcgtcctgtcgtcctgcctcacagtaacatcgttaccgaattctcagcaggtgaaccaaatgaaatggtcaactgaaagccaaccaggggtcttg

SEQ ID NO: 893649 - DNA, 80 bp, Artificial Sequence
  ENSG00000262117_6 (sequence is synthesized)
tctgggactacagcaaaaaatcaccatgtaccaacctatccaaacttatccatggatgaatctatccagaagacgggagt

SEQ ID NO: 893650 - DNA, 120 bp, Artificial Sequence
  ENSG00000262117_7 (sequence is synthesized)
ctaagaaggatacagtggctagaagtcgtcctgtcgtcctgcctcacagtaacatcgttaccgaattctcagcaggtgaaccaaatgaaatggtcaactgaaagccaaccagggtaaaac

SEQ ID NO: 893651 - DNA, 120 bp, Artificial Sequence
  ENSG00000262117_8 (sequence is synthesized)
agatcttttatttcttgttgttgttattattatttttttttatgtggggacattcaagtgaactgctatatgcatttgcccccagtctctccttgtgagaagtgaatttcttcaacgttt

SEQ ID NO: 893652 - DNA, 120 bp, Artificial Sequence
  ENSG00000262117_9 (sequence is synthesized)
atagaactgaggtattacattattggatgaattaagaaaacaatctaacctgatgtgtgaaaatttctgcttgtgagaatccgtgttatttcaattatccaatcaagagcctaattcgta

SEQ ID NO: 893653 - DNA, 120 bp, Artificial Sequence
  ENSG00000262117_10 (sequence is synthesized)
gctgtaccagggcctgtgatgtgttgataaaatgccacacaaccatttctcagtgaaaagcccaaccgggacttgagttatgttggtggctatggagttctgcaatccacaattgatgtt

SEQ ID NO: 893654 - DNA, 120 bp, Artificial Sequence
  ENSG00000262117_11 (sequence is synthesized)
gtttggcaatcactatccccacccaagcttctcccttgggtcttgtcctgtcactctggctggaatacaatggcgtaatcatagctcactgcggcctccatctcctgggttcaagtgatt

SEQ ID NO: 893655 - DNA, 120 bp, Artificial Sequence
  ENSG00000262115_0 (sequence is synthesized)
cagggctccagagggctgaactatccacacatatgggctcgtggaggcagctcggggcagcggctcctgcagtgggagcatcgctgagcactgtccctgggagaggacgaccccaggctc

SEQ ID NO: 893656 - DNA, 120 bp, Artificial Sequence
  ENSG00000262115_1 (sequence is synthesized)
cacagccaagctgccctgaggctaagtgtcccggggcccagggagccccagcagcagccccgcacggtcaggcctgggccacggtgctgctcagtggtccctgcgcggtcagcacctgaa

SEQ ID NO: 893657 - DNA, 120 bp, Artificial Sequence
  ENSG00000262115_2 (sequence is synthesized)
tggctgctcgcctggcttggcgtgccttctcctcccgggccttcctcctggctgcctctttctgctggtgcaggtccaagagggtcccctcgcctgaccgctgccgctgctcctgccaaa

SEQ ID NO: 893658 - DNA, 120 bp, Artificial Sequence
  ENSG00000262115_3 (sequence is synthesized)
tagagttcgtggaatctcagggccagcagggaaagtgaaaccccaccaggaccttgaacctgccatttctctgctctacagaggatgagccctacgtcgcaggtggccaacagttctggc

SEQ ID NO: 893659 - DNA, 120 bp, Artificial Sequence
  ENSG00000262115_4 (sequence is synthesized)
gtgggggagacagctctgcccccacagaacgtcctcctgagactctccagcctgggatggacccagcaggcgtttcctgacacccaggccctgaggaccgccagtgaggaccaccctgac

SEQ ID NO: 893660 - DNA, 120 bp, Artificial Sequence
  ENSG00000262115_5 (sequence is synthesized)
tgtccgcggggacccagggtcaagaaggatgctgcacccagagacggggcccacgagcaatcctaggctttgattccacctgtcccagaaactcaaacccctgggattctgggccagacc

SEQ ID NO: 893661 - DNA, 120 bp, Artificial Sequence
  ENSG00000263244_0 (sequence is synthesized)
attttagcgcatggtaatatttgatgcagttgtctctccttaagtattgtgattttcttcctttattaagagggttgtgggtcattccatgcttctcttaaggtatctttttactctgtt

SEQ ID NO: 893662 - DNA, 120 bp, Artificial Sequence
  ENSG00000263244_1 (sequence is synthesized)
ttactgttatattttagaagatagttttaagaaacataaaaaccatgcttgttatcttaacgtagtagtagtgtacataatagtaaaaagggcaagccagccccctctgccctcgaaaaa

SEQ ID NO: 893663 - DNA, 120 bp, Artificial Sequence
  ENSG00000263244_2 (sequence is synthesized)
ctgtattctccaactcccactacattttctcatattgaatctgttccacctgtgatttattgttttcctgaactttgggagttttaagcaatgatacagttgaagggactgtttataatt

SEQ ID NO: 893664 - DNA, 120 bp, Artificial Sequence
  ENSG00000263244_3 (sequence is synthesized)
ttcacatgtttaagttgtgaggctttaaaacttaaatataaggctttgtctaggaagaaaatgatctttaccttcaataaatttataatgtagcactaatccagtatagattggagactg

SEQ ID NO: 893665 - DNA, 120 bp, Artificial Sequence
  ENSG00000263244_4 (sequence is synthesized)
aatgcattcttactcttagggttcatacctctaattcatgtggttaagacagtgttgtggtgaagtaatagggccccttgaaagaatctacagaaacataaattatactgagttgtgctg

SEQ ID NO: 893666 - DNA, 120 bp, Artificial Sequence
  ENSG00000263244_5 (sequence is synthesized)
tactggtttgtgagaacatcagtgtattaaggagaatggtagtttaatttgaatatttaaagaaagtaatttgaatggttctagtactagggccattattaactagtaacatagattagt

SEQ ID NO: 893667 - DNA, 120 bp, Artificial Sequence
  ENSG00000263244_6 (sequence is synthesized)
gacttcaactgggtgtccttattatctgatttgtctgaagtgaaaactgttaaggtgctcttttaaaatgtatttggaaacaccatagttagggtaaatacaatgtcacaattcactctt

SEQ ID NO: 893668 - DNA, 120 bp, Artificial Sequence
  ENSG00000263244_7 (sequence is synthesized)
gcatattatttgcttagccaaatttatgaattctaagttaggccaaattgaaggttttggagttttacattgtgggtgagtctaaattcatgcgtttggcaagcacaaggacatgggaaa

SEQ ID NO: 893669 - DNA, 120 bp, Artificial Sequence
  ENSG00000263244_8 (sequence is synthesized)
agaatctggtattttgaggcaggcttgagtttataatgaaagcaaactcagttcctcttcatgtcctatgtatttaagagaggacagttttccctcagtttttttccccttccttacccc

SEQ ID NO: 893670 - DNA, 120 bp, Artificial Sequence
  ENSG00000263244_9 (sequence is synthesized)
tacccccatcaaatacagcccaaccaaataactgtgttcttaatttaaaggaaaatggcagacttgacacctgctgaatatttcgtgtagacagagtatgacaatgaatgagatccccag

SEQ ID NO: 893671 - DNA, 120 bp, Artificial Sequence
  ENSG00000263244_10 (sequence is synthesized)
tcattgcccttgtaagcctgggaacccagtttagtgggagagactaatgtaaacagctttaatcaaaagtatatcaattggccgggtgctgtggctcacacctataatgccggcactttg

SEQ ID NO: 893672 - DNA, 90 bp, Artificial Sequence
  ENSG00000263244_11 (sequence is synthesized)
ctccctatttaaagaaaaaaaagtaaggcatatcaatttatggttatcaaataggtttttttttttttttttgagactgagtgtcgctct

SEQ ID NO: 893673 - DNA, 120 bp, Artificial Sequence
  ENSG00000263244_12 (sequence is synthesized)
ataggtttttttttttttttttgagactgagtgtcgctctatagcccaggctggagtgtagtgctcactgcgacttccgcctcctgggttcaaatgattctcgtgcctcagtctcccgag

SEQ ID NO: 893674 - DNA, 63 bp, Artificial Sequence
  ENSG00000263244_13 (sequence is synthesized)
ctcctgggttcaaatgattctcgtgcctcagtctcccgagtagctgggattgttcatgttggc

SEQ ID NO: 893675 - DNA, 120 bp, Artificial Sequence
  ENSG00000263244_14 (sequence is synthesized)
agcctcactgcttgcccctaagtggtgggattgcaggtgtgagccactgtgctggcctcaaatagtttttatcaaagctacttcaattagtggttagcaaggcttaaagactaattcagt

SEQ ID NO: 893676 - DNA, 120 bp, Artificial Sequence
  ENSG00000263244_15 (sequence is synthesized)
gctttattttgacacttgttcgcaacatgttgctttttttcctgtgtcctatgggacctagtcatctgtatgttagattcacagaggaattaaagagataaacatgcatgtgctaaattg

SEQ ID NO: 893677 - DNA, 120 bp, Artificial Sequence
  ENSG00000263244_16 (sequence is synthesized)
atttctgtcttgctttgttatcctataataatgttataaaataacattattataaatttcccaagagttgaattaataccaacaactggtaactcgtttttatgtaaacagcatacttga

SEQ ID NO: 893678 - DNA, 120 bp, Artificial Sequence
  ENSG00000263244_17 (sequence is synthesized)
gaccagaaatcttctggatcactttgtggatctctgcctgccattctcattggtcctctgttcatcccttttctagagcttctccttaccttggcttctcttctgccacattggcctgcc

SEQ ID NO: 893679 - DNA, 120 bp, Artificial Sequence
  ENSG00000263244_18 (sequence is synthesized)
tgacctgtcctcaggccctgtcactgccctagattacgtttcccatgtcttcacttccaaatctggacctctcgtttagaccttctctcctgactgccagatggcatgtcccactgtcct

SEQ ID NO: 893680 - DNA, 120 bp, Artificial Sequence
  ENSG00000263244_19 (sequence is synthesized)
ccggtgtacatctccaaattgtcccacaggcatttatctcagatgaagtttcaggttggactcattcttctgccccaacagcagaatgactcattgagccattgagccattcagcacatt

SEQ ID NO: 893681 - DNA, 120 bp, Artificial Sequence
  ENSG00000263244_20 (sequence is synthesized)
ctctatatggcagattcggtgctgtctctggaaatacataaacatagagcgattcctttttctgttgaggcaaaatatggatttggttaatttctattcacgtcatgaatgtggtatgtg

SEQ ID NO: 893682 - DNA, 120 bp, Artificial Sequence
  ENSG00000263244_21 (sequence is synthesized)
gaaggtcttctgagagcagaaagggatgtttcacagcacagcccggctgtgtggtgctcagggcaggccctctggaggaggtgagcctgggctcttggcctaatgtttcagctctcactt

SEQ ID NO: 893683 - DNA, 120 bp, Artificial Sequence
  ENSG00000263244_22 (sequence is synthesized)
tccagtcctgagctgttgttgccagtccatctttcatgagaccattggagtgatctttctggtcttgtcacttcatggtttaaagtttccctgggcctacacagtgaagtccaaattcag

SEQ ID NO: 893684 - DNA, 120 bp, Artificial Sequence
  ENSG00000263244_23 (sequence is synthesized)
catggtattacaagacccttatgatccagtcttaaccattggttaggtatcctacccatactgtttatctcttgaatacctctatgctctttgacaagtccagcccctacgtgttcatac

SEQ ID NO: 893685 - DNA, 120 bp, Artificial Sequence
  ENSG00000263244_24 (sequence is synthesized)
ctcacttctgtgacacagccttgcttcagggctcccaatctctgtagcctccctgaactgtgcatttgctctgctgcttgatttgtttctgtgactgttccattctcctcgggacacata

SEQ ID NO: 893686 - DNA, 120 bp, Artificial Sequence
  ENSG00000263244_25 (sequence is synthesized)
gcagggaccttgtcttggtccttttttttttggctttaacagaacatagcaaagaacctgacataggtgtagtctgagtttaccactggggttatcacagaggtctgctaagtgaataca

SEQ ID NO: 893687 - DNA, 120 bp, Artificial Sequence
  ENSG00000263244_26 (sequence is synthesized)
acacagtggggacccagaacctctagaaagggttgaggattacaatccccagatagctacaatcagggaataatgtaacctgtttgcctagggtgctacatggtaatcttgaattagaac

SEQ ID NO: 893688 - DNA, 120 bp, Artificial Sequence
  ENSG00000263244_27 (sequence is synthesized)
aactgagacttccatgggaccttagggtgataaccattaaacctactctttcagtgtttactttgtaaaagcatcacactaaggaggttgtcatttaatcctcacacctaccctgggtta

SEQ ID NO: 893689 - DNA, 120 bp, Artificial Sequence
  ENSG00000263244_28 (sequence is synthesized)
ttaacactgttgatgaagaaagccttacttggctaagatatggagcaggttagtaagtggtagaatagatactccagtcctgtctccaaaatgcaaatttttttttaattaaaaaaattt

SEQ ID NO: 893690 - DNA, 120 bp, Artificial Sequence
  ENSG00000263244_29 (sequence is synthesized)
ctaattttcaatatatttatttttgattttttattttctgtagagttggagtttcgccatgttgtccaggctggtctcgaactcatgggtgcaagccataccccaacctcgaccttccga

SEQ ID NO: 893691 - DNA, 120 bp, Artificial Sequence
  ENSG00000263244_30 (sequence is synthesized)
agtgttgggaatactggcatgagccatgatgcctggcctcaaaatgcatacccttaaccactatgctctcacatttttagatgtgggatttctgtctacgacgtcgcccccactaagacc

SEQ ID NO: 893692 - DNA, 120 bp, Artificial Sequence
  ENSG00000263244_31 (sequence is synthesized)
tagggcttaggtgtcgaggtgggaaagatcttgaggcttttcttctcaaaattaatcagaaacgatgtgaattttatatctctttctgaggttttccccataagctaatcgggattagta

SEQ ID NO: 893693 - DNA, 120 bp, Artificial Sequence
  ENSG00000263244_32 (sequence is synthesized)
gacttaaaggtgaatgaccaactgtatccctggttcactggttaggaagagtacatagtctttgtgtataggctattttcctcggtaaccttgggcaacatgcttgacttctccaagcca

SEQ ID NO: 893694 - DNA, 120 bp, Artificial Sequence
  ENSG00000263244_33 (sequence is synthesized)
gtctcctttgtgaaaggtgatatacttacaagacattatattaaatgagaacccaggcaggttacctaccctaccatgacactggaagtattctttgccttaagaaaaggagaattgctg

SEQ ID NO: 893695 - DNA, 120 bp, Artificial Sequence; identical to SEQ ID NO: 649062
  ENSG00000263244_34 (sequence is synthesized)

SEQ ID NO: 893696 - DNA, 120 bp, Artificial Sequence; identical to SEQ ID NO: 649063
  ENSG00000263244_35 (sequence is synthesized)

SEQ ID NO: 893697 - DNA, 120 bp, Artificial Sequence; identical to SEQ ID NO: 649064
  ENSG00000263244_36 (sequence is synthesized)

SEQ ID NO: 893698 - DNA, 120 bp, Artificial Sequence; identical to SEQ ID NO: 649065
  ENSG00000263244_37 (sequence is synthesized)

SEQ ID NO: 893699 - DNA, 120 bp, Artificial Sequence; identical to SEQ ID NO: 649066
  ENSG00000263244_38 (sequence is synthesized)

SEQ ID NO: 893700 - DNA, 120 bp, Artificial Sequence; identical to SEQ ID NO: 649067
  ENSG00000263244_39 (sequence is synthesized)

SEQ ID NO: 893701 - DNA, 120 bp, Artificial Sequence; identical to SEQ ID NO: 649068
  ENSG00000263244_40 (sequence is synthesized)

SEQ ID NO: 893702 - DNA, 120 bp, Artificial Sequence; identical to SEQ ID NO: 649069
  ENSG00000263244_41 (sequence is synthesized)

SEQ ID NO: 893703 - DNA, 120 bp, Artificial Sequence; identical to SEQ ID NO: 649070
  ENSG00000263244_42 (sequence is synthesized)

SEQ ID NO: 893704 - DNA, 120 bp, Artificial Sequence; identical to SEQ ID NO: 649071
  ENSG00000263244_43 (sequence is synthesized)

SEQ ID NO: 893705 - DNA, 120 bp, Artificial Sequence; identical to SEQ ID NO: 649072
  ENSG00000263244_44 (sequence is synthesized)

SEQ ID NO: 893706 - DNA, 120 bp, Artificial Sequence; identical to SEQ ID NO: 649073
  ENSG00000263244_45 (sequence is synthesized)

SEQ ID NO: 893707 - DNA, 120 bp, Artificial Sequence; identical to SEQ ID NO: 649074
  ENSG00000263244_46 (sequence is synthesized)

SEQ ID NO: 893708 - DNA, 120 bp, Artificial Sequence; identical to SEQ ID NO: 649075
  ENSG00000263244_47 (sequence is synthesized)

SEQ ID NO: 893709 - DNA, 120 bp, Artificial Sequence; identical to SEQ ID NO: 649076
  ENSG00000263244_48 (sequence is synthesized)

SEQ ID NO: 893710 - DNA, 120 bp, Artificial Sequence; identical to SEQ ID NO: 649077
  ENSG00000263244_49 (sequence is synthesized)

SEQ ID NO: 893711 - DNA, 120 bp, Artificial Sequence; identical to SEQ ID NO: 649078
  ENSG00000263244_50 (sequence is synthesized)

SEQ ID NO: 893712 - DNA, 120 bp, Artificial Sequence; identical to SEQ ID NO: 649079
  ENSG00000263244_51 (sequence is synthesized)

SEQ ID NO: 893713 - DNA, 120 bp, Artificial Sequence; identical to SEQ ID NO: 649080
  ENSG00000263244_52 (sequence is synthesized)

SEQ ID NO: 893714 - DNA, 120 bp, Artificial Sequence; identical to SEQ ID NO: 649081
  ENSG00000263244_53 (sequence is synthesized)

SEQ ID NO: 893715 - DNA, 120 bp, Artificial Sequence; identical to SEQ ID NO: 649082
  ENSG00000263244_54 (sequence is synthesized)

SEQ ID NO: 893716 - DNA, 120 bp, Artificial Sequence; identical to SEQ ID NO: 649083
  ENSG00000263244_55 (sequence is synthesized)

SEQ ID NO: 893717 - DNA, 120 bp, Artificial Sequence; identical to SEQ ID NO: 649084
  ENSG00000263244_56 (sequence is synthesized)

SEQ ID NO: 893718 - DNA, 120 bp, Artificial Sequence; identical to SEQ ID NO: 649085
  ENSG00000263244_57 (sequence is synthesized)

SEQ ID NO: 893719 - DNA, 120 bp, Artificial Sequence; identical to SEQ ID NO: 649086
  ENSG00000263244_58 (sequence is synthesized)

SEQ ID NO: 893720 - DNA, 120 bp, Artificial Sequence; identical to SEQ ID NO: 649087
  ENSG00000263244_59 (sequence is synthesized)

SEQ ID NO: 893721 - DNA, 120 bp, Artificial Sequence; identical to SEQ ID NO: 649088
  ENSG00000263244_60 (sequence is synthesized)

SEQ ID NO: 893722 - DNA, 120 bp, Artificial Sequence; identical to SEQ ID NO: 649089
  ENSG00000263244_61 (sequence is synthesized)

SEQ ID NO: 893723 - DNA, 120 bp, Artificial Sequence; identical to SEQ ID NO: 649090
  ENSG00000263244_62 (sequence is synthesized)

SEQ ID NO: 893724 - DNA, 120 bp, Artificial Sequence; identical to SEQ ID NO: 649091
  ENSG00000263244_63 (sequence is synthesized)

SEQ ID NO: 893725 - DNA, 120 bp, Artificial Sequence; identical to SEQ ID NO: 649092
  ENSG00000263244_64 (sequence is synthesized)

SEQ ID NO: 893726 - DNA, 120 bp, Artificial Sequence; identical to SEQ ID NO: 649093
  ENSG00000263244_65 (sequence is synthesized)

SEQ ID NO: 893727 - DNA, 120 bp, Artificial Sequence; identical to SEQ ID NO: 649094
  ENSG00000263244_66 (sequence is synthesized)

SEQ ID NO: 893728 - DNA, 120 bp, Artificial Sequence
  ENSG00000259347_0 (sequence is synthesized)
atacaaaccaatccagacacacagggactaacaaggatatgaacaccagcagatgaagatcatcagtaccatcttggaggctggctaccacaacagttaaagaactccctttagcatttc

SEQ ID NO: 893729 - DNA, 120 bp, Artificial Sequence
  ENSG00000259347_1 (sequence is synthesized)
tcgtaggacaggtctggtgttaatgaaatccctcagcttttgtttgtctggaaaagtgtgtctccttcatgtttaaaggatattttagctggatatactactctaagcaacccagtgatt

SEQ ID NO: 893730 - DNA, 120 bp, Artificial Sequence
  ENSG00000259347_2 (sequence is synthesized)
ccatggaaagcagaaagaaggacataaagaaacggatacttggtgacatctttgactcactggatcaaaccttgcctgaagctcacatttctgaaatttccagatacaagaacaaatact

SEQ ID NO: 893731 - DNA, 120 bp, Artificial Sequence
  ENSG00000259347_3 (sequence is synthesized)
tcctctttattgttttactagatttgagacaagctttaagtttctcagactcttcctcttcctaacagatttatcagaagctgaaagctctgatcttgttgggatgcggatcgtgtcagg

SEQ ID NO: 893732 - DNA, 120 bp, Artificial Sequence
  ENSG00000259347_4 (sequence is synthesized)
cttttcttagtctggttgcctaactcaagaacctcggcatggctctgttacttctctactcagacaagcatccctgcagacactcactaggctaactctgtctttatttttagaattaga

SEQ ID NO: 893733 - DNA, 120 bp, Artificial Sequence
  ENSG00000259347_5 (sequence is synthesized)
cctttacgagaagcacagttttgtcttcagtttcctctccccccacccggaatggcctgagccgaagccagctccctccgagaagtcattaccgcctgacttgcgtttgatatttagaca

SEQ ID NO: 893734 - DNA, 120 bp, Artificial Sequence
  ENSG00000259347_6 (sequence is synthesized)
ccttggtcacaacatcttgcattctctcgggatgctgatttctaactgctctttggcctttcctgcattggtcctcctcaggcaggggatccctgctcttctatattaatgctggctccc

SEQ ID NO: 893735 - DNA, 120 bp, Artificial Sequence
  ENSG00000259347_7 (sequence is synthesized)
attaatgctggctccccgtcccctgtccaccatgagtcaaagcaatgtgagtccctcaccagatgcaactgcccagtcttggactttccagtgaccagaatcatgagccaaataaacctc

SEQ ID NO: 893736 - DNA, 120 bp, Artificial Sequence
  ENSG00000259347_8 (sequence is synthesized)
tgctcctccaaagccggagcccaaacctaaaaaggcccctgcaaagaagggagagaaggtaccaaaagggaaaagggaaaagctgaggctggccaggaggggaataaccctgcagaaaat

SEQ ID NO: 893737 - DNA, 120 bp, Artificial Sequence
  ENSG00000259347_9 (sequence is synthesized)
gcacttggagcccagggcagggttcacagagctattttcagttctcttgcaggatctccttcccagccttcagaaattgccggtctgggagttgggggcaaggagaagatcctgcaaccc

SEQ ID NO: 893738 - DNA, 120 bp, Artificial Sequence
  ENSG00000259347_10 (sequence is synthesized)
acactcgggcggctcggttggagttgcgggccggagagggttggactcgcagcaagtaagcgtcgtccggacgcgagtgcaccctggagaggacccgagcccgagagggggcgcgcggaa

SEQ ID NO: 893739 - DNA, 120 bp, Artificial Sequence
  ENSG00000259347_11 (sequence is synthesized)
ggcccgggcccaggaagttggggcccgcacttggcctcgcgcttgctgatccccgtcaaggcccttggccggcgccggcgcccctgggctgtttttattctctagtcggtgagatcacac

SEQ ID NO: 893740 - DNA, 120 bp, Artificial Sequence
  ENSG00000259347_12 (sequence is synthesized)
cggccgagagcctcgggaacgtgtgcggaggaggagggggtgagaagtgggtcctcagaagtggagagctggggacaccagtgacaacctggacaatggctggagccaggggtctcttga

SEQ ID NO: 893741 - DNA, 120 bp, Artificial Sequence
  ENSG00000259347_13 (sequence is synthesized)
gccttgtgaaccgagtgcccggcagaaaatgagcctcaaggacatctgttgagttcttgaaggaatgaatggaggggctttcgaatttatctttgaaagaaatttacataacagggtgtt

SEQ ID NO: 893742 - DNA, 120 bp, Artificial Sequence
  ENSG00000259347_14 (sequence is synthesized)
tgttgctggatctcctgatagagaaggatcggaaatttgataattgccaataaatggaagagagttttgtttccaaagcaatgaactcacaaaaaagtggggcaagacaggagttttcgg

SEQ ID NO: 893743 - DNA, 120 bp, Artificial Sequence
  ENSG00000259347_15 (sequence is synthesized)
agagtttgtgtattcaaaaaaagcaaaacaacaacaaaccaattggcacattggggagctccgcggcttttctccccaccaaaagaattcaggggcgtctgcccgcagggccctcggcgg

SEQ ID NO: 893744 - DNA, 120 bp, Artificial Sequence
  ENSG00000259347_16 (sequence is synthesized)
ttttcaggagctactccaggcccctcggcctttctcttgctgcctcccgcagccgactagccggtgtctaagccctttgtttgtttttaacagcaggaatctcccacccccacccctgct

SEQ ID NO: 893745 - DNA, 120 bp, Artificial Sequence
  ENSG00000259347_17 (sequence is synthesized)
ttgttaaaaaaaaaaagttatctggaaccctcaagtgggtggggagttacaaagccctgtgaggtgtggcggaatccacagtcagcccagaagcggcaggggcccttgccttgctccgga

SEQ ID NO: 893746 - DNA, 120 bp, Artificial Sequence
  ENSG00000259347_18 (sequence is synthesized)
gaaccgcctcccacaagccaatccgcagctgctgctgcagaagtgcgctgtgctcctcaccctcctctcttcctaaatacccgcctgaaaaggagaatacgtgaaagccaactgaggctt

SEQ ID NO: 893747 - DNA, 120 bp, Artificial Sequence
  ENSG00000259347_19 (sequence is synthesized)
gacaacctggcttccgttccttgctggtcctcctgttaacgcgctgccgctgtggtcttaggtttcactctcctcttcccgtccgtcaagagagacaaggatgacacaatccacatttat

SEQ ID NO: 893748 - DNA, 120 bp, Artificial Sequence
  ENSG00000259347_20 (sequence is synthesized)
tgctgccctttgattcagtcttaacagtggttggtgaggtagatgttcctgtgcctcacgtttacggaggcacagagagattacattacttactcagggttccaagtggcagagctggaa

SEQ ID NO: 893749 - DNA, 120 bp, Artificial Sequence
  ENSG00000259347_21 (sequence is synthesized)
tttgaacccaatactttgttgaagcctcagtctccgatcttgagactgcacccagctgcctgggtcacggaaggcaaagatgacatcattgatcgagctctttgcaaaacagttctctac

SEQ ID NO: 893750 - DNA, 120 bp, Artificial Sequence
  ENSG00000259347_22 (sequence is synthesized)
acgggcacactgttgtaacactgcaaggattatttgctcacctgtaaaatggggctagaggtagcttccctcgcgatctcctagggtggctgtgggaagctcatgtgaaaaggtttgcat

SEQ ID NO: 893751 - DNA, 120 bp, Artificial Sequence
  ENSG00000259347_23 (sequence is synthesized)
tgctaatgccatgaaaagtggtggagggaggtcaaataagtttaacacacattgacggagcagctctgagttgcagccctcctattcagttcctgaacttccaaaataaaagactaaggt

SEQ ID NO: 893752 - DNA, 120 bp, Artificial Sequence
  ENSG00000259347_24 (sequence is synthesized)
tttcaaggcgttcacagcctagagaagcatcaaagggtggggatgaggatgatgtgactgagtgggcaaagatgggcaggggccttgcagtcatcatcgtccagtaaagtgttaatctta

SEQ ID NO: 893753 - DNA, 120 bp, Artificial Sequence
  ENSG00000259347_25 (sequence is synthesized)
acctgaacaagtccaaccattgagaggtagccaaagaaagtaagaggggctcaggatccatcagtgactggcctggcttccaatcccggctctttctcttcttccccttgggcagcgtcc

SEQ ID NO: 893754 - DNA, 120 bp, Artificial Sequence
  ENSG00000259347_26 (sequence is synthesized)
gttctctccgctgtaagaatggagcaagcggttctcactgtgcagagtggtggatccagaaagagcattgtaactgtcctcctgtagttcaagtcctttatgttacagagagagcaatgt

SEQ ID NO: 893755 - DNA, 120 bp, Artificial Sequence
  ENSG00000259347_27 (sequence is synthesized)
ctgctgaaggagagtgatttgcactgtagaggaagagcgtcagagagatttgaggattacatgtagtagaaggacctgacagttctcttgcaggatctccttcccagccttcagaaattg

SEQ ID NO: 893756 - DNA, 120 bp, Artificial Sequence
  ENSG00000259347_28 (sequence is synthesized)
ccggtctgggagttgggggcaaggagaagatcctgggactccaccataatttacagtcacagaagccagcagcctggggactccacctttctcacacctcaagcaccatggaatccaccg

SEQ ID NO: 893757 - DNA, 120 bp, Artificial Sequence
  ENSG00000259347_29 (sequence is synthesized)
ccccaacacccagccttcatcttaattcaggcccccatcactgcttgctaccaattgttacaataattttctaattgtctccattctctacttgctgccagagtgagcattctaaagcac

SEQ ID NO: 893758 - DNA, 120 bp, Artificial Sequence
  ENSG00000259347_30 (sequence is synthesized)
attctattggtcatacaaaccaatccagacacacagggactaacaaggatatgaacaccagcagatgaagatcatcagtaccatcttggaggctggctaccacaacacaacccagtgatt

SEQ ID NO: 893759 - DNA, 120 bp, Artificial Sequence
  ENSG00000259341_0 (sequence is synthesized)
cttcacagtttctgcggtaatgctaaggcccgcgcccctcagctgccagcgctgcgtgttttagtagctgcagggaggaagaatcgagatggcttcagcaaagccctccactttgcttgg

SEQ ID NO: 893760 - DNA, 120 bp, Artificial Sequence
  ENSG00000259341_1 (sequence is synthesized)
gagaagggggcgtttgtgggcagggcattgcatgggaaactgcaatgtgcacttgtttgacctggatccctggttcaaatgcatcccctggtccctgcaggtccggggtggggctggagc

SEQ ID NO: 893761 - DNA, 120 bp, Artificial Sequence
  ENSG00000259341_2 (sequence is synthesized)
ttttgtgtgtctcatcagctcccaggtgaggcgtgagggcgcagggacgagcacagaggaggtcgggagccccgggctggtgggggcggcttgcccaggtctcgctgggcagctcggagc

SEQ ID NO: 893762 - DNA, 120 bp, Artificial Sequence
  ENSG00000259341_3 (sequence is synthesized)
aggtcctgccaccaatctaggggtccagtctcaagatgtcccaggttgtggtaaggacccgaaagggaggtgcaccggcttctagcccagggcagaccctgtcaggggggcttctaggag

SEQ ID NO: 893763 - DNA, 120 bp, Artificial Sequence
  ENSG00000259341_4 (sequence is synthesized)
cgacggggatgccagcgtccgcccttccagccctgctgggaaagcgtcaccgtgttctgaagaaagcatcctttttgttcattccagaaacatttatcgagtgcctatggcatgtcaggc

SEQ ID NO: 893764 - DNA, 120 bp, Artificial Sequence
  ENSG00000259341_5 (sequence is synthesized)
acagttcaagttctgaggatacagagtaaacaacaggcaacatcacgcctcctcgagcttctgttctactgggagtcagggtaggaagagacgacaacaaggtaaataagtcaaatccgg

SEQ ID NO: 893765 - DNA, 120 bp, Artificial Sequence
  ENSG00000259341_6 (sequence is synthesized)
actgtgttactgacaatgcaagctaggagaaaaaaggaagcaggagcagagaggagcctgggtgatgatggagatggggagtttacttaaataggtggccatgaggctatccagcctgtc

SEQ ID NO: 893766 - DNA, 120 bp, Artificial Sequence
  ENSG00000259341_7 (sequence is synthesized)
ccaggcggacttttagaagacggattgtttataagagcccaaaagtataagttcttaaaaaaaattaatttctgaatgtgtgatgagaacacaaattcctccacgacagccctgtttttc

SEQ ID NO: 893767 - DNA, 120 bp, Artificial Sequence
  ENSG00000259341_8 (sequence is synthesized)
ctgtgctgcgtagctgagctctgggtcacggctgccgagtgcaggcaacactcgggcagtcccagggctgaccgactgcgcatctggacactggcaatcacagggaaggaggcgagagct

SEQ ID NO: 893768 - DNA, 120 bp, Artificial Sequence
  ENSG00000259341_9 (sequence is synthesized)
ctgccgggtgctttgaggctgtcgcgtcatgtcttcctccccacagcgttctgcggggcctgtccccttggtgttgtggcacctcctggtcctcggctctgctcttggggaagaaagagg

SEQ ID NO: 893769 - DNA, 120 bp, Artificial Sequence
  ENSG00000259341_10 (sequence is synthesized)
acactgtcacaggttcctgtcccctccagccaacaggagcagccacacgtggcatctgccctcgaagctctgtggcatccctgccgtaggagaagttaccaagaaacccccagagcccac

SEQ ID NO: 893770 - DNA, 120 bp, Artificial Sequence
  ENSG00000259341_11 (sequence is synthesized)
aggctggagcccccccaggttctgctcagcggggagaggcagattgagtccaaattttccattttaactggaatcctaggggttaaacctggctgtgacttggcaatggccccttgtccg

SEQ ID NO: 893771 - DNA, 120 bp, Artificial Sequence
  ENSG00000259341_12 (sequence is synthesized)
tgctgttccacagggggtgtcccccttccccaggccctgccccaatgtggctccagggcctctgctcccagcaggtctcacctgggacagaggtgggggtggggcaagaggaaccaagcc

SEQ ID NO: 893772 - DNA, 120 bp, Artificial Sequence
  ENSG00000259341_13 (sequence is synthesized)
aggaagctgcagaaatagctctgggggtgggagggcgtggtgctgccgaaggccgaacacccacgcagggtgttgtctctccaccctcccaggccgaggggatttctcaaacgcaggcct

SEQ ID NO: 893773 - DNA, 120 bp, Artificial Sequence
  ENSG00000259341_14 (sequence is synthesized)
ccttcccaggaggtaggcctgtgtccagtgagggccctgcccatccaggcctctgtttcctgtcactgttctcaaaagctgggcccagctgtggcggggacagctatgtccggctgcccg

SEQ ID NO: 893774 - DNA, 120 bp, Artificial Sequence
  ENSG00000259341_15 (sequence is synthesized)
tggtcccttgagaaccggccaggctgcccctgtgcctggcacatgctcacctggaccctccagccagcatctgggctccatctgaccccaccccacagggctcaagccagctccaagcat

SEQ ID NO: 893775 - DNA, 120 bp, Artificial Sequence
  ENSG00000259341_16 (sequence is synthesized)
gagtgtggccgaggccaggtctgtcttcagggtcccttcctcatctccacggccttttcctgtcccagctcacccacagggggccatttctgccccacacaggactccctgtgaaccaag

SEQ ID NO: 893776 - DNA, 120 bp, Artificial Sequence
  ENSG00000259341_17 (sequence is synthesized)
gctgcacatgcttctgggtgcccctctctgggcagctggagggcagaaggagcacctggcaggtgggtcccaggcccggcagcaggagctgcctgccagacaggaccagaggggatggca

SEQ ID NO: 893777 - DNA, 120 bp, Artificial Sequence
  ENSG00000259341_18 (sequence is synthesized)
gtccgctcgggtgaggggtccacaggcagagggcgtggggggctaggaggtctgggggcctctggggaaagggggccccagaaaccaatgggaattatgggatctcctcaaagaacatgc

SEQ ID NO: 893778 - DNA, 120 bp, Artificial Sequence
  ENSG00000259341_19 (sequence is synthesized)
tggagcaaggctcagctgcccactgctgccccaaaaaggctcagctgcccactgctgccccaacgggagtcactgctcacacagagaccgctccttccccagccactccagccagtgact

SEQ ID NO: 893779 - DNA, 120 bp, Artificial Sequence
  ENSG00000259341_20 (sequence is synthesized)
ggatacggtgcaggcactagtccctagaaccaggccattcctgacccaccaactgccctgtatgcaggcctctctctggggcttctcatcagcctagcagcacggctttctcagggcttc

SEQ ID NO: 893780 - DNA, 120 bp, Artificial Sequence
  ENSG00000259341_21 (sequence is synthesized)
cctgggtacgcacgtcctcctacccaatcccccttccctctctccctgtcccaggttcagacctgcatcctggctcgaggctgtctccccatctgccacaggtgcttcccccaacggatc

SEQ ID NO: 893781 - DNA, 120 bp, Artificial Sequence
  ENSG00000259341_22 (sequence is synthesized)
tcttgcccctctcctcctggcttggggtctgctcactggaggacctggatggacatgacagggctcagacaggacttgggaggagctgtgagctcgccatcagggccagccttgaaggac

SEQ ID NO: 893782 - DNA, 120 bp, Artificial Sequence
  ENSG00000259341_23 (sequence is synthesized)
gggtgtgggcgtgtcccccatcaggatcccgctgtgggtctccttcctgctgtgggggctgatgaaagatgcaggccagacacctgcacatctttaccctgtgctcagcagcaccccctg

SEQ ID NO: 893783 - DNA, 120 bp, Artificial Sequence
  ENSG00000259341_24 (sequence is synthesized)
acagggcaccctccccactacatccccattccattccaaaggaagagaccctgagggtctggaatgaagaaccccttaccccaggtcaaactgatgttgctggaatctttggttgggtct

SEQ ID NO: 893784 - DNA, 120 bp, Artificial Sequence
  ENSG00000259341_25 (sequence is synthesized)
cgacattaccccatatgggcaacagagaaggactgccgagagctgggcaaggccccatgcctgctcctcctgcttgtgctctctagatcagagaccctcccaacctctcccgtaggggcc

SEQ ID NO: 893785 - DNA, 120 bp, Artificial Sequence
  ENSG00000259341_26 (sequence is synthesized)
tgactcctccctggtatgtcacctttgcttgatctaggcctctggaggggcggcagcctgtctccccgcaccagctggggttctggccctggtggttgctcaccacacctccgggggctg

SEQ ID NO: 893786 - DNA, 120 bp, Artificial Sequence
  ENSG00000259341_27 (sequence is synthesized)
ccacgcggggtcatgttggtaccaaggttctctgtggggtgcagggatgaccactggagaaaaggccagccctgccttccgctgctgcctcaggctggtccccgtgcctcgctcaggcgg

SEQ ID NO: 893787 - DNA, 120 bp, Artificial Sequence
  ENSG00000259341_28 (sequence is synthesized)
gccagtgaccctcctcaccagccatggcttctcttgtgacaggcccaacggcaggccaggtcctgaaccccgcagggaggccggcctatcaggtcttcacatggctgggggcacagccag

SEQ ID NO: 893788 - DNA, 120 bp, Artificial Sequence
  ENSG00000259341_29 (sequence is synthesized)
ccaccagcatccttgtgctgtccccatggggaagagaagggaacgatgtgttcatagacgccagggcaagtgggcacgggcagcgcacggaggaaaaagtgactccaatcagaaggggag

SEQ ID NO: 893789 - DNA, 120 bp, Artificial Sequence
  ENSG00000259341_30 (sequence is synthesized)
tgggtcttggcaatacacgtctgggtggtcagtccccagaggtgggcactgggctgagctctctctcatccgacgccacccctgggtgacctccgttacatttcctaacctctttgtgtg

SEQ ID NO: 893790 - DNA, 120 bp, Artificial Sequence
  ENSG00000259341_31 (sequence is synthesized)
ccaatcgcctcgtctggaaaaatgggaatggaggagagttgtacctacccagggtggttctgtgggcatttaaagagcaacttcatgtgagacgtggagtccatgtgtggcccatggtgg

SEQ ID NO: 893791 - DNA, 120 bp, Artificial Sequence
  ENSG00000259341_32 (sequence is synthesized)
gctccaggaaatgttggtgatgacagggatgagggagcaactgagagccggcagtgaggtgacacacccaaggtcacgccaccagcagaggtagctggtcacgctgctgagagccggcag

SEQ ID NO: 893792 - DNA, 120 bp, Artificial Sequence
  ENSG00000259341_33 (sequence is synthesized)
gaaatagatgcggacaaagcagggtcggttttcagcttctctccacggaaaggccggctgaagtttccctcaccacgcagaaatcgataagcaggaggtttttaaaaaccacctccccat

SEQ ID NO: 893793 - DNA, 120 bp, Artificial Sequence
  ENSG00000259341_34 (sequence is synthesized)
tgaacctgccactgccggagctgaaggctgtgcgttttgtggtccgctctgccccagggccacttagggtgcgtccacgctgggtgtgccaggcatgcacgtgggctgcagacgcccagg

SEQ ID NO: 893794 - DNA, 120 bp, Artificial Sequence
  ENSG00000259341_35 (sequence is synthesized)
aggcagagccgagcctgccaaggttatgcgtgcacctctcagctccctgcttaacactgcgttcccgggagagagatttctccctggctgcttcacatccagaggagaacatcagctctc

SEQ ID NO: 893795 - DNA, 120 bp, Artificial Sequence
  ENSG00000259341_36 (sequence is synthesized)
agcagaacataaggcaagtgtgaaaacaactttttatcttttaaaatttttgtttatatttatgtatttattttttgaaatggagtttcgctcctgctgcccaggcgggagtgcaatggc

SEQ ID NO: 893796 - DNA, 120 bp, Artificial Sequence
  ENSG00000259341_37 (sequence is synthesized)
agctttttatgccaactggggctcacttccaggggaggcctttcctggaggcccccattcactgcaattcctcagcctggcttggagtcataccatccctcctatcaagaaacattgcat

SEQ ID NO: 893797 - DNA, 120 bp, Artificial Sequence
  ENSG00000259341_38 (sequence is synthesized)
ctgcagcgatcccccagagtgagtggctggggggctgcgggaggagcaggggaggtgctggaacacgtcaggtcatcagcagtgttgctgaaaagcttggccaggaaacccagatcagcc

SEQ ID NO: 893798 - DNA, 120 bp, Artificial Sequence
  ENSG00000259341_39 (sequence is synthesized)
accaagaacctgagggccagcacatgggaagaagaaaaataaggtggtttttctgggatttttgggaatatttgggcctcgaccctgccaggataggttaggtggtgcaatggtcacaag

SEQ ID NO: 893799 - DNA, 120 bp, Artificial Sequence
  ENSG00000259341_40 (sequence is synthesized)
ccccaagtctttgtggctgatagcaacagaagcttctttcttgcccacagtaagcatccgtcgtggttggcaggagactgatcgtggtcatctatccaggactgggttgacaggaagcca

SEQ ID NO: 893800 - DNA, 120 bp, Artificial Sequence
  ENSG00000259341_41 (sequence is synthesized)
ccatcttagactgtcagcttccatttcagagggaaggagccctgtggacgttctcacaccagcattcagaagctcttgctgggaagtgtcacaagtcacctgtgctccctggctaggagt

SEQ ID NO: 893801 - DNA, 120 bp, Artificial Sequence
  ENSG00000259341_42 (sequence is synthesized)
agtccgttggccacccaaacacctgggggctggccaggaaggcagtcacacaggggcccaccatgggtctgcccagttctcaggcaccagaccacacccaagcaggacccctcctcccct

SEQ ID NO: 893802 - DNA, 120 bp, Artificial Sequence
  ENSG00000259341_43 (sequence is synthesized)
gcttccccctcctgtccccaccaaagccacatggcaggcagatcacatgtcacagagctcagggccaggcctgcccagatcctgaggctgggccacccctgagagcttcctatgtgagat

SEQ ID NO: 893803 - DNA, 120 bp, Artificial Sequence
  ENSG00000259341_44 (sequence is synthesized)
gtccacttttttacatttaaattttacttttaaaattctaaattgataaattacagttgtatgtatttatgggtacaaagtgatgtgatgactgatgaatacaacgtagaaaattaaatc

SEQ ID NO: 893804 - DNA, 120 bp, Artificial Sequence
  ENSG00000259341_45 (sequence is synthesized)
ttaccacactgtgcaatgtatctcaaagaaaagaaaacttatggtgcacacctgtaatcccagccttacaggaggacaagcgcaggaggatcctttgagcccaggagattgagaccagcc

SEQ ID NO: 893805 - DNA, 120 bp, Artificial Sequence
  ENSG00000259341_46 (sequence is synthesized)
cgcgcaacacagcgagaccccatttcctaaaaacaaaaacaaaacatatattgctcctgcctaactgagaccctgtgccctttgactgtcatctcctcactcccctcaccagctctccca

SEQ ID NO: 893806 - DNA, 120 bp, Artificial Sequence
  ENSG00000259341_47 (sequence is synthesized)
ctcaccagctctcccacagcctctggcaccattctgctctctgcctctttaagtttgattgttttccatcccacatacaagtgagaacctgcggtatttgtctttctgtgcctggcttat

SEQ ID NO: 893807 - DNA, 120 bp, Artificial Sequence
  ENSG00000259341_48 (sequence is synthesized)
tcctccaattccatctatcttgtcacaaatgacagaacttctttcttttttacagctgaatagtataccactgtgtgtatacaccatactttatccattcaaccgttgttggatgattag

SEQ ID NO: 893808 - DNA, 120 bp, Artificial Sequence
  ENSG00000259341_49 (sequence is synthesized)
gttgattccgtaactttcgaatagtgctgcagtgagcatgggcatgcagaccacatgtctgcttttgatcttttgaacaaggactcagaccccagtgactcacacattttcttattaaaa

SEQ ID NO: 893809 - DNA, 120 bp, Artificial Sequence
  ENSG00000259341_50 (sequence is synthesized)
aaaaagtatacgtataaattatatatgtgtacatatatgatatatacatatgttatgtgaccatatctatacacacatgtatatacacacatacagcaagggtctccaaagacttcaaac

SEQ ID NO: 893810 - DNA, 120 bp, Artificial Sequence
  ENSG00000259341_51 (sequence is synthesized)
ggtctccaaagacttcaaactatatgtatgtatatatatagatagatgtgcacaccactgcacccggccaacttttgtggtttttttttagtacagagggggtttcgccatgttggccag

SEQ ID NO: 893811 - DNA, 120 bp, Artificial Sequence
  ENSG00000259341_52 (sequence is synthesized)
tgggattacaggcatgcaccaccacgcgcagcctaactatctatctatatatatatatacgtatagatagatggacagatgttccttgcagctttcctttggagatggcttacagctctg

SEQ ID NO: 893812 - DNA, 120 bp, Artificial Sequence
  ENSG00000259341_53 (sequence is synthesized)
cttgcagctttcctttggagatggcttacagctctggagagaacccggggtcccagcacctttgccattataacccatgagacctaagggtcagcgaaggggcaaagaggtcctggaaac

SEQ ID NO: 893813 - DNA, 120 bp, Artificial Sequence
  ENSG00000259341_54 (sequence is synthesized)
catcttgcatcagtatagtccctcatcagaggaataaagtggagcctcaggaggtaaaggacggctggtgtcaccagctagatcagggatgtgttgactcccattccatcggagggatct

SEQ ID NO: 893814 - DNA, 120 bp, Artificial Sequence
  ENSG00000259341_55 (sequence is synthesized)
gggaccctgcaagtgacgctgaggcgtggtcctgcagcattcccgggtccccctggattgctgcaccgtgtctcagcctgaactggaccacctctgctcacactgcatgcatgttactgc

SEQ ID NO: 893815 - DNA, 120 bp, Artificial Sequence
  ENSG00000259341_56 (sequence is synthesized)
ctgtgaccggaagcactctagtcgggttgcccatcccctcacatactcatcagctttatttcttgccacttgcaagaaagtgagagcccgaagagtaatgcccaggcagtaagagaggcg

SEQ ID NO: 893816 - DNA, 120 bp, Artificial Sequence
  ENSG00000259341_57 (sequence is synthesized)
aagcatctgatagagccttcttcccacttttatctaatccgatccattttcagtagcttttctgcataagagagcctcttcacatggacatccatgcatccacccacgcgtccacccacg

SEQ ID NO: 893817 - DNA, 120 bp, Artificial Sequence
  ENSG00000259341_58 (sequence is synthesized)
cgtccacccacgcgtccacccacgcgtctacccatgcgtccacccagtcgttcaaaacacattttcctttccttctagtttactgagcacctactctatgtcaggtgctatattcaccag

SEQ ID NO: 893818 - DNA, 120 bp, Artificial Sequence
  ENSG00000259341_59 (sequence is synthesized)
cttacagtagaatgatgaccaagtgaagatgttggccctaaggaaaataagtggctgctctttgattcttccagggagcagattttgattagagaaaggagtccaaatagtacaaggcag

SEQ ID NO: 893819 - DNA, 120 bp, Artificial Sequence
  ENSG00000259341_60 (sequence is synthesized)
gaaagacgggaggggcacagaacagtgaggttgaggctgcagagagtggggaggtggttgctaaaagactcttcacttacaattcacgcagcaaaactgaccacctgccaaactccatcc

SEQ ID NO: 893820 - DNA, 120 bp, Artificial Sequence
  ENSG00000259341_61 (sequence is synthesized)
ggggagaggtctgggtgcagagacccccaaatagcctaggcagacaggtgtggggccaccctcagtgcaaggcgagggcttgtggggtccttccagaggttgctgaaggtgatgagctgc

SEQ ID NO: 893821 - DNA, 120 bp, Artificial Sequence
  ENSG00000259341_62 (sequence is synthesized)
catgaaagatggtaacgtctttcccgtaggcacaagaggagaaaacagtgcgtggtgcatagagacctttgcagtgcagaaggggttattattattacaagccagatgtgccccacttgt

SEQ ID NO: 893822 - DNA, 120 bp, Artificial Sequence
  ENSG00000259341_63 (sequence is synthesized)
tactgaatcatcgggttgactctaagttttaaaatccaatttccaggccctcttcacctgccagctgggcaacagcagttactctcattggagaccctttcccttcgccacttcccaggc

SEQ ID NO: 893823 - DNA, 120 bp, Artificial Sequence
  ENSG00000259341_64 (sequence is synthesized)
tactccagactgaatgcattcagggagtcacctcccaggtcaaaacctgctgtgataccatcaccctgcagcacagaccacagtcccaagcctcccattcttgactctaacaccagccca

SEQ ID NO: 893824 - DNA, 120 bp, Artificial Sequence
  ENSG00000259341_65 (sequence is synthesized)
gcctgacctgctgcagggtgtggcctgtgaccacatctgtgctccgtccacgctgcttcgtccagcctcccacgccgatccccagagtagctccccgggatgctctctcctcatcactgc

SEQ ID NO: 893825 - DNA, 120 bp, Artificial Sequence
  ENSG00000259341_66 (sequence is synthesized)
atctgccgcccgcccaggccctctgactttaccctcccgcaggcccctcccgtctgaggtgctctggaatgcctgtggtgtgattgtgcatgaacttttacgtgcctgcgtccatgctcg

SEQ ID NO: 893826 - DNA, 120 bp, Artificial Sequence
  ENSG00000259341_67 (sequence is synthesized)
agagcggtcttgcctgaaccaccttgtctcaataatcagcatgaaactcctcaaaagaaacagagaggcccctcagaacatcacggaaaagacgatggctccaaaacagctagattctaa

SEQ ID NO: 893827 - DNA, 120 bp, Artificial Sequence
  ENSG00000259341_68 (sequence is synthesized)
tcccagctctgctgcggggcgcggcctcgggcacacctgtgctccgtgcatgtgacgtgactctcaaaagcatccatttcctcatctggaaaacgggacagttcctggactctgcgcacc

SEQ ID NO: 893828 - DNA, 120 bp, Artificial Sequence
  ENSG00000259341_69 (sequence is synthesized)
tggaagtgaccatgagggtcaaatgtttctcaaactgcaaatgcttttcagatgctggcgccgtgaccaaagacctggctcttacatctgctctgttttcatgggacacagccctgggta

SEQ ID NO: 893829 - DNA, 120 bp, Artificial Sequence
  ENSG00000259341_70 (sequence is synthesized)
tacagtaggtgcttaatgcaggtgaccgtgaggaagggctgtggcccgtggagggcaggcaggtgggattcagctgaggtcctcaaaggctgcactatgggaaaggctgagcggcaggaa

SEQ ID NO: 893830 - DNA, 120 bp, Artificial Sequence
  ENSG00000259341_71 (sequence is synthesized)
agggacagacaggccctcctcctggggcccagggctgggaaccagagcccctcctttggccactctgaggtggaagaacaaggagcacataggaggagtggcccaggctctccacctgag

SEQ ID NO: 893831 - DNA, 120 bp, Artificial Sequence
  ENSG00000259341_72 (sequence is synthesized)
gacattcggaggacctagaagcactggcagagcctgaacgtggcaccgtagcctcctgctggctggagatgtgtctgggcggtgtgtcttggcatggaatccacagccagctagcctgag

SEQ ID NO: 893832 - DNA, 120 bp, Artificial Sequence
  ENSG00000259341_73 (sequence is synthesized)
gcggggatggggccaggacccccggctgtacagacggagagccagaggcggttgcaggttcccaaccgacagcggagctgatgagtggcggggctttcatttgttgacaggagatgcatg

SEQ ID NO: 893833 - DNA, 120 bp, Artificial Sequence
  ENSG00000259341_74 (sequence is synthesized)
tctgaggccagagccaacttcttccagggagcggcttccttcctcctcaaaggacacaggggacacagatgtccaggaggctgtttagagagggcccgagtggtgagctgtgcaggggtc

SEQ ID NO: 893834 - DNA, 120 bp, Artificial Sequence
  ENSG00000259341_75 (sequence is synthesized)
ctcacgccccggccccgtcttggatatggggctggagacttaggaagtgagtgctgggtcctggggttccctcatccgccttcaggaagatgtgaaggggcttcctgcggcctttggcag

SEQ ID NO: 893835 - DNA, 120 bp, Artificial Sequence
  ENSG00000259341_76 (sequence is synthesized)
cattcatcccaaaccccaaagcctccttcccctggctccgtggcaggagcagttgcattctcctgtctgagaggggccacctccttcccaccttgccctctaagttggctcaggctgcgc

SEQ ID NO: 893836 - DNA, 120 bp, Artificial Sequence
  ENSG00000259341_77 (sequence is synthesized)
agggctcaggctgaggtccagaccctcatgccagcttggtgcttggccagagctgcaaaattggagctgggctgccagggggagggcaccgctgaggccttctaggcccagacgggctga

SEQ ID NO: 893837 - DNA, 120 bp, Artificial Sequence
  ENSG00000259341_78 (sequence is synthesized)
gagagcccccgccccccaccccagcctcaccctccacccgaggcccctgtcatgggtgtgggtgactcagaggaagttctggtttctgtcagattttgaggctgaggcaacctgatcctg

SEQ ID NO: 893838 - DNA, 120 bp, Artificial Sequence
  ENSG00000259341_79 (sequence is synthesized)
aaacaatgacaagcctcagaacggtccttcccactccctcagaggagcgtttcaggcctggccaataacacagcagaacggaaaatgactttgggaaggaaaggtcaggcggctaggcct

SEQ ID NO: 893839 - DNA, 120 bp, Artificial Sequence
  ENSG00000259341_80 (sequence is synthesized)
cccatggaaggcagcaggcggttgctcaggtcagagggccaagtggcgcggtctgtgggcaccggcagctggcagtgaccctgcagatcaacctgggcccgggctgcagacaccaagcag

SEQ ID NO: 893840 - DNA, 120 bp, Artificial Sequence
  ENSG00000259341_81 (sequence is synthesized)
gggcacctgcctggcctggctgcctcatgtggcccccacagcctttgtcaggacacctcaggacagtggcctggcctctaggccagtgggccagctcggggtgctaaagcctaatttgcc

SEQ ID NO: 893841 - DNA, 120 bp, Artificial Sequence
  ENSG00000259341_82 (sequence is synthesized)
tggagccccgggccactcatagattcaggaggaagaggtggggtagaggtggcagagggagagcagagcctggcacacagcatttggcaccataactgaggcagctgctttccttaagga

SEQ ID NO: 893842 - DNA, 120 bp, Artificial Sequence
  ENSG00000259341_83 (sequence is synthesized)
gctgccactgacaggatcagcacttacagagcccctgctgtatgccaggaagtacatttattattgcttcttgtcacattggccctgccaggtatgtaccccaaacattagcctcatttc

SEQ ID NO: 893843 - DNA, 120 bp, Artificial Sequence
  ENSG00000259341_84 (sequence is synthesized)
acagataagaaaattgaggcttccgtgattaagcagaggctgtgatgtcccatccagagccccagccacccagctctcctgcaggacaggagatacctactagcctgcttctcgattatt

SEQ ID NO: 893844 - DNA, 120 bp, Artificial Sequence
  ENSG00000259341_85 (sequence is synthesized)
cttttcttccctgccaccttgggaatatccctcccacttgcaagcacaggtcggctatgccaggggagtctgtgccccagggccccttcatccatggggatgggagtctgtagaaatgct

SEQ ID NO: 893845 - DNA, 120 bp, Artificial Sequence
  ENSG00000259341_86 (sequence is synthesized)
cacctccgccctctccagtggggacattggaggcctgtgtcccacagtctccctgagggcccagtgggttgagcccattgcccgcagtggaaacccctcattcatggacctgtctccctc

SEQ ID NO: 893846 - DNA, 120 bp, Artificial Sequence
  ENSG00000259341_87 (sequence is synthesized)
ccctgcctccccctccacctccacccctgccctgcccttcctcggatcacttcatgcacccaagtcctcattgcagtctgcttgagggggatcccacatgtagccatgccccttccaggc

SEQ ID NO: 893847 - DNA, 120 bp, Artificial Sequence
  ENSG00000259341_88 (sequence is synthesized)
agagagaagcagcacaggcccctggctgagtgtgccacggcgggtgcagcaggagtgcaaacgcagagttcaactcggcatccagctggaacccatgttaacttgcgtttgaccagcgta

SEQ ID NO: 893848 - DNA, 120 bp, Artificial Sequence
  ENSG00000259341_89 (sequence is synthesized)
agagagacaagaagatgagtagaactgtagcagtcaaaatgcttcagctgcaggtaataggaagtccagctcaaaccggtttaagcggaggccaggggctgcagggtgggcatctcccat

SEQ ID NO: 893849 - DNA, 120 bp, Artificial Sequence
  ENSG00000259341_90 (sequence is synthesized)
ggcacctgctctggtccctcagtccccctgagtggtgcacacttccctccacaaggtgtgttgccgggtggccacggctgtcctgggctcgcatttgctcatgacagtgtctggagagct

SEQ ID NO: 893850 - DNA, 120 bp, Artificial Sequence
  ENSG00000259341_91 (sequence is synthesized)
ccgcctttgagggctcttcctggggcctctaacgagagaggactggggggaccacgacaaaaaatatctgggttcttgagacagcagaaaaggtggtggaagctgggtgagtagccagac

SEQ ID NO: 893851 - DNA, 120 bp, Artificial Sequence
  ENSG00000259349_0 (sequence is synthesized)
aaaacttaggaagagctggatgcctcccacggagagcgtcccttccaagcggccccggagtggagtggagtggagtggataggggtagacttttcacacggggacaaattattacaggat

SEQ ID NO: 893852 - DNA, 120 bp, Artificial Sequence
  ENSG00000259349_1 (sequence is synthesized)
ttattacaggatatctgcgccccctgttccgagtcactcggggccatcggttacttcagcaggttctctgcatcacggacccttttgaggctcagatggagccttgctctgtcacccagg

SEQ ID NO: 893853 - DNA, 72 bp, Artificial Sequence
  ENSG00000259349_2 (sequence is synthesized)
atctccaaggttcaagtaaccatgcccacctaatttttatttttagtagagaccatgttggccaggcttgtc

SEQ ID NO: 893854 - DNA, 86 bp, Artificial Sequence
  ENSG00000259349_3 (sequence is synthesized)
agtagctgggattacagacgtgcacaaccatgcccacctaatttttatttttagtagagttcagccgccgccgcccgaccgccggg

SEQ ID NO: 893855 - DNA, 120 bp, Artificial Sequence
  ENSG00000259349_4 (sequence is synthesized)
tgtacattgaaaattatgcattgagaaaattcacattactctagaaacccttagactgcagttcctaacccaagttaagaacccgcggtccaggaactaggggtaacgatagaagagaga

SEQ ID NO: 893856 - DNA, 120 bp, Artificial Sequence
  ENSG00000259349_5 (sequence is synthesized)
ccccagaacttcgtaggaaaactagcttgattatggaattacaaataatagtaagagaaaaaaggctaagtggtggccgtgataggacttaatggtatttcaattcccagagttacagtg

SEQ ID NO: 893857 - DNA, 120 bp, Artificial Sequence
  ENSG00000259349_6 (sequence is synthesized)
gcggcttcaagggattgttgaataattgggagtacttgtttcagcttctttccttcctcagcctgaacatctgctgtttatgtaacttaatttcctaagtctgcgatttcaagaatttga

SEQ ID NO: 893858 - DNA, 120 bp, Artificial Sequence
  ENSG00000259349_7 (sequence is synthesized)
tgcaacatctttctgttctaggaatttaccatggaaattattggccataattgttggtgacactatcaaactcatagtcactctataacgatgtaagtccagaaaacagccataataata

SEQ ID NO: 893859 - DNA, 120 bp, Artificial Sequence
  ENSG00000259349_8 (sequence is synthesized)
atgtcctgattgatatttagagctaaaagaagtggaaagagttatttcaatttacccttcacctggtacttcagtgttaagtggttaaataattccacaaaaaataaacactcttaatct

SEQ ID NO: 893860 - DNA, 120 bp, Artificial Sequence
  ENSG00000259349_9 (sequence is synthesized)
aagaagaccctcaccagatatagccttcaaccttggacttcccagcctccagagctgtacaaaatggagccttgctctgtcacccaggctggtgtgcaatggcacaatctcgactcactg

SEQ ID NO: 893861 - DNA, 120 bp, Artificial Sequence
  ENSG00000226323_0 (sequence is synthesized)
gactggttcaggcatgtggctgcttatctaactgtgagtgatggctgtcactattcactgtgggacaggtatcaaatgtcagcaatctcttctactgccaatttgctgtttgtttttctc

SEQ ID NO: 893862 - DNA, 120 bp, Artificial Sequence
  ENSG00000226323_1 (sequence is synthesized)
ggaagttattgaaacaatccttgatcattgcttttagtctctagttgttgttaggcaaaaggatttgcggctcctcatcagaatagcaagtgaataaagagcatggattatggaatcaga

SEQ ID NO: 893863 - DNA, 120 bp, Artificial Sequence
  ENSG00000266743_0 (sequence is synthesized)
ctgatgtatgagctgcacagaaagttcaccaaaccacccaaagccattgccataggcatctgaactgcaagccagcacaagaagtcgatgctttcatacactttccaagatgtcagaaca

SEQ ID NO: 893864 - DNA, 120 bp, Artificial Sequence
  ENSG00000266743_1 (sequence is synthesized)
gtgttgaggggaggtctgaagtccatggaagaagacgcagtggctgctggagctcgtgcagaggaagggaccctcagaaggacaggtgaactgtcggtggcaggaaaaatggtgggcaca

SEQ ID NO: 893865 - DNA, 120 bp, Artificial Sequence
  ENSG00000266743_2 (sequence is synthesized)
tttccagaatgacaaatgggagaagcaatcgtgacatctccaggtgggggaagcataggaggaagaggttgttctctcaggaagttgcctcctagcctccaacgaggcctttcctatcac

SEQ ID NO: 893866 - DNA, 120 bp, Artificial Sequence
  ENSG00000226328_0 (sequence is synthesized)
cttctggtggctgccccagcattcctgagcgtgtggctgcgaaactccagtctctgcccccaccttcacatcatcttctccatgtctccttaccttcctttgcctctgtcttgaaaagac

SEQ ID NO: 893867 - DNA, 120 bp, Artificial Sequence
  ENSG00000226328_1 (sequence is synthesized)
actgtgatggcatttaggacccacccagctaattcagtgtgttctcatctgcagatccttgatcaagtcacatttgcagagacctctttttcaaataagagacgaggtctcactatgttg

SEQ ID NO: 893868 - DNA, 90 bp, Artificial Sequence
  ENSG00000226328_2 (sequence is synthesized)
agtaacagaattgccattgggcccagggagagactacacttcttgtctgctttgttgctagtgcggccttgtggccaagcacagaacgtg

SEQ ID NO: 893869 - DNA, 120 bp, Artificial Sequence
  ENSG00000226328_3 (sequence is synthesized)
tttgttgctagtgcggccttgtggccaagcacagaacgtgtgcagtgatgatggtgcaacttctaggtcgtccccagcatggaaaatgagccctgggcatggaagatgagccctggtcct

SEQ ID NO: 893870 - DNA, 120 bp, Artificial Sequence
  ENSG00000226328_4 (sequence is synthesized)
gcagcggtgctctttcctcttctcacaagctggaatgtgcatgtgctcccacccagctttgaccatggggcgaaaacagtactctgcagtctggcagagcaacaaggtggaaagggcctg

SEQ ID NO: 893871 - DNA, 120 bp, Artificial Sequence
  ENSG00000226328_5 (sequence is synthesized)
tttagagtctctctgttttagctgcctggactttatcctgaataatatggctgttatcatgggtatagtgttactatgagcctcatctaagtaatttctactctgcctttgaccactaaa

SEQ ID NO: 893872 - DNA, 120 bp, Artificial Sequence
  ENSG00000226328_6 (sequence is synthesized)
ctcatgttggacaagagtcacttagcattattttttcctcaatgaagaggttaagatggagggagcaggagaaattgaggcctgtgttttaccagaaggtgaagggctgtctttgccttt

SEQ ID NO: 893873 - DNA, 120 bp, Artificial Sequence
  ENSG00000226328_7 (sequence is synthesized)
cctacatttatgaaggataattctagacaaaaacattaagttcatatcaaaccatctgctttgtgaagccatgggctttgctagaactttctgtgacatgacatttattaacccgagtct

SEQ ID NO: 893874 - DNA, 120 bp, Artificial Sequence
  ENSG00000226328_8 (sequence is synthesized)
acctggaagttagagctgaggaagttttcctagagtggaaaaagtccaatgcacttgtaaaagtcagaccaagctcagctcagatttcagttttattagaagtatgtcaccttcctgagc

SEQ ID NO: 893875 - DNA, 120 bp, Artificial Sequence
  ENSG00000226328_9 (sequence is synthesized)
ccttattatttccccatctgtgaaatgaggacaccgttctctctttctaagcattgctgggaagaccacacaccactgagacagaaggtggggctagcgcagttctgggcattttgtaca

SEQ ID NO: 893876 - DNA, 120 bp, Artificial Sequence
  ENSG00000226328_10 (sequence is synthesized)
tttgtacacccccaacaaatactgatttatttccttctttttccttgctcagaaaaaattggagaaggctttattttaaaattctgcctgaattactttattttatttatttatttattt

SEQ ID NO: 893877 - DNA, 120 bp, Artificial Sequence
  ENSG00000226328_11 (sequence is synthesized)
agtggacatggccgaggcccgcggtgtccgcgtgtgggagctgcagggctgaggagaggccgcccgcaaccctcgggaatcgtgtgaggaacagaattgccattgggcccagggagagac

SEQ ID NO: 893878 - DNA, 120 bp, Artificial Sequence
  ENSG00000226328_12 (sequence is synthesized)
gcagcgagtgttttcttgtacatacatccttgcggaagtgtttgggtatatacctacggtagagttccttggttatgtggtaccagcatcttcacctaccaactctgtccaaatggttac

SEQ ID NO: 893879 - DNA, 120 bp, Artificial Sequence
  ENSG00000226328_13 (sequence is synthesized)
cccaagtgtttgtatgaccctgtcagtatgtgcgagggttttttactccacatttcctcccaaacttttttttttttttttttgacagagtctggctctgtcgcccaggctaaagtgcag

SEQ ID NO: 893880 - DNA, 120 bp, Artificial Sequence
  ENSG00000226328_14 (sequence is synthesized)
cctccctggaaacttcattgtgttcaatttaagtttttcctttctcctaggtataaaagagaacctcatcattttcatttgcatttccttgattaccgatgaggttgattttcttggtct

SEQ ID NO: 893881 - DNA, 120 bp, Artificial Sequence
  ENSG00000226328_15 (sequence is synthesized)
tttgttccttcttctgtcaaatgcttatttaaattttccccaatttttctactggagtttttggcccttattatatagacatatatggattattatatatacatatattatgtattagtt

SEQ ID NO: 893882 - DNA, 120 bp, Artificial Sequence
  ENSG00000226328_16 (sequence is synthesized)
atatatatacatatatgatatatatcatatatatggtatgtatgtatgtataatttttttaaagatttttttttttttttaatagagacgaggtctcactatgttggccaggttggtctc

SEQ ID NO: 893883 - DNA, 120 bp, Artificial Sequence
  ENSG00000226328_17 (sequence is synthesized)
gcagccgcgctttggggcgtcggctcacgtggggccggcaacgcgtcttccaggatgttcgcgcgctagtcgccgctgaggggccggcgatgcgcgaggagttccggcgaggaaggtcgg

SEQ ID NO: 893884 - DNA, 81 bp, Artificial Sequence
  ENSG00000226328_18 (sequence is synthesized)
gaattactttagatcctactttttaagaaaatatttggccgggcatggtggcacacacctgtaatcgcagcactttggggg

SEQ ID NO: 893885 - DNA, 120 bp, Artificial Sequence
  ENSG00000226328_19 (sequence is synthesized)
tcctactttttaagaaaatatttggccgggcatggtggcacacacctgtaatcgcagcactttgggggcctgagttgggtggatcacttgagtctaagagttcgagaccagcctggccaa

SEQ ID NO: 893886 - DNA, 74 bp, Artificial Sequence
  ENSG00000226328_20 (sequence is synthesized)
gccactgtactacgaaaatatttgactttctttttaaaatgtatatggtttacaaataaagtttacaaatgctt

SEQ ID NO: 893887 - DNA, 120 bp, Artificial Sequence
  ENSG00000266744_0 (sequence is synthesized)
atgtaaatgggcaggatcaattcctgccaacaaaaaccctgcttcatggaagaaggccatgctccatggcatagatatgaacttgttatgatatttctgaagaagaagagactgtaagga

SEQ ID NO: 893888 - DNA, 120 bp, Artificial Sequence
  ENSG00000266744_1 (sequence is synthesized)
agacctctcctaacttagcaaccattctccattttccaaaagggtaaaccaaggcacagaaagataggcacaaggtaacttatgcatgcagaaggtaacaaacactcgtgcacacacact

SEQ ID NO: 893889 - DNA, 120 bp, Artificial Sequence
  ENSG00000266744_2 (sequence is synthesized)
gccataattagtacttttgtttagagaagaaaggctgaagcctggagaagttaagcaacatgcttaaatccacacagctagtcagaggcaaagccaagatttgaacgtgggtagtctgaa

SEQ ID NO: 893890 - DNA, 120 bp, Artificial Sequence
  ENSG00000266744_3 (sequence is synthesized)
tccaggatcttggccttcacccctctataacatgacaccctcatccctgaaaaaagaaaaagtcaaccgaaagcattgtgaaaagtgtcctctaataaaatggctaattctggcaacagg

SEQ ID NO: 893891 - DNA, 120 bp, Artificial Sequence
  ENSG00000287448_0 (sequence is synthesized)
gtacagatctggggtcctgaagcgtccaggcgaaggtgctgggagtcagggaggaaagtcctttgaagcctccagaagcaatgtaacaagacccagcactgcaggaagaagtggggcacc

SEQ ID NO: 893892 - DNA, 120 bp, Artificial Sequence
  ENSG00000287448_1 (sequence is synthesized)
cagtggcaaatgcaggcctacgtgcaaggtgctccctgtccctcgcctgctccctggaacctggagccgcacctaggatggggggtctccattccagacccagaataagctcttggctac

SEQ ID NO: 893893 - DNA, 120 bp, Artificial Sequence
  ENSG00000287448_2 (sequence is synthesized)
ctcacccagcacctggtcatgccagacagaatcttggctggggctttctcatggtctgcagtgccttccactttgggccaccgtaataacacttctcccacagggactctgcagtgtccg

SEQ ID NO: 893894 - DNA, 120 bp, Artificial Sequence
  ENSG00000287448_3 (sequence is synthesized)
gctcaccagcctggagtttctcatcacccagtgattccaaaagaaacaatctacaatggcatgaccaagtgccagaaacaaacaaacaaaatatctgaggagctgtcagaatcctgccct

SEQ ID NO: 893895 - DNA, 120 bp, Artificial Sequence
  ENSG00000287448_4 (sequence is synthesized)
tccagatcaaagtccttcaggaaatgcaactacttcagtgacaagagataattatcatcttctgacagaggaggaatttggggtttggtcccagtccatgaagtggcacagtcagaataa

SEQ ID NO: 893896 - DNA, 120 bp, Artificial Sequence
  ENSG00000287448_5 (sequence is synthesized)
aagtcctgaactgacagccacaagtggcacctgaacagggacttgaacaaagaaggtctgctggagcagaaaaagtgaaactgaccagatgaatgagaaaccctgggatgagtctgcctg

SEQ ID NO: 893897 - DNA, 120 bp, Artificial Sequence
  ENSG00000287448_6 (sequence is synthesized)
cagaggatataaggagatggataaaccgtgtgagtgccctcaagttgtgtgcgaccatggaatgggagactggagggatacatggatcccaactacaggcccagctcctccagtatgagc

SEQ ID NO: 893898 - DNA, 120 bp, Artificial Sequence
  ENSG00000287448_7 (sequence is synthesized)
catgagccagttgaatctgaatgtgaagatggaatgaagaccgacgagagtcacactgacgtcaaccctcataacatggggtcagatcaagaaaaccacaccagaagctgagaaactggt

SEQ ID NO: 893899 - DNA, 120 bp, Artificial Sequence
  ENSG00000287448_8 (sequence is synthesized)
gtagtgccagggtcaggcaaaaacccctgactccatgtttatggccatgctagctgtaatatcctgtgcagtatgatttttctgtgcagaagcaaaaacatattgggcatattttcctaa

SEQ ID NO: 893900 - DNA, 120 bp, Artificial Sequence
  ENSG00000250646_0 (sequence is synthesized)
ttcttcacatggcagcagacaagagagagtggggaaggatcttcaaggtaatttgccaaccatattagacagaggagcaggggaacagcacagcaatacatcatgatctatccacaatga

SEQ ID NO: 893901 - DNA, 120 bp, Artificial Sequence
  ENSG00000250646_1 (sequence is synthesized)
cactgtcaccagcttttgaactgtaaactccatgaaggtgaagagctttgcctgattgttcaccacagtatcctcagtgctcagaagactgcctcacacttagtagatgcttgacaagcc

SEQ ID NO: 893902 - DNA, 120 bp, Artificial Sequence
  ENSG00000250646_2 (sequence is synthesized)
tttattatacagcttaatttcatgaactccttaaccactcttactcagcagaaacagagcctccccagtagagctcttctaaaagacgtagaagtggtgaatgaattacaatcccaaaca

SEQ ID NO: 893903 - DNA, 120 bp, Artificial Sequence
  ENSG00000257613_0 (sequence is synthesized)
ctgtcactattttaacattctccatcagctgtggccatgttggatttctggcacctgagcattcacatccatctgtttatagggcattatgcccactcatgaggtttattccagtttcaa

SEQ ID NO: 893904 - DNA, 120 bp, Artificial Sequence
  ENSG00000257613_1 (sequence is synthesized)
aaagtcatgtgtaaaccaagattggaaatatatattccttgagaaatagagacacagacacacaagggagagtgccatatgaaaatggaggcagaatggagtgatgcatctacaagccaa

SEQ ID NO: 893905 - DNA, 120 bp, Artificial Sequence
  ENSG00000257613_2 (sequence is synthesized)
gaagctagaagaggcaagaaaggactttctagagcctttggaaagcatgattctgccacatcttgattttggacttccagcctctagaactgtgagagagtaagtttccattgttttaaa

SEQ ID NO: 893906 - DNA, 120 bp, Artificial Sequence
  ENSG00000257613_3 (sequence is synthesized)
ccacccaatttgtattaatttgttatagaagccctgggaaacaaataaactactttagatcagttaggaaggcttcttgaactatatgacatttaaacagagacataaatgatgagactg

SEQ ID NO: 893907 - DNA, 120 bp, Artificial Sequence
  ENSG00000257613_4 (sequence is synthesized)
tcccagccaagttaaaaatatcactgggaatcaaactcactggtgttattccagctcagtggtaaatgttctactggtattttaaataattctaaaataaagtcattatttttctttgca

SEQ ID NO: 893908 - DNA, 120 bp, Artificial Sequence
  ENSG00000257612_0 (sequence is synthesized)
acatatgttcgggggagggaccccagaaggcggctgacagtattcctttagccagaaatcccttcagggaagagaaaggtgctcccctttgcctgcttttatactacagactgtttccaa

SEQ ID NO: 893909 - DNA, 120 bp, Artificial Sequence
  ENSG00000257612_1 (sequence is synthesized)
ctccagctagaagtgactattgccgattatgctaatcagtggcgacaagctccctttgactgctcacttctccatattttccagaaaatatttcaagcagaatatacttattttccagtt

SEQ ID NO: 893910 - DNA, 120 bp, Artificial Sequence
  ENSG00000257612_2 (sequence is synthesized)
ttgaaaacaactagattgcccatctccatttctctctatcatctactgtattattctatggacaactgccaccctaataaggtcaagaagggaagccagaagtcaaggccacagaagaca

SEQ ID NO: 893911 - DNA, 120 bp, Artificial Sequence
  ENSG00000257612_3 (sequence is synthesized)
gccaagcaaaacagaaaaaggacaagaaatctatcacctagattagttataaataaagaacatatagccagctacattacattcctagatgcctgagtttctatcaatagtgcaattttt

SEQ ID NO: 893912 - DNA, 120 bp, Artificial Sequence
  ENSG00000257612_4 (sequence is synthesized)
tgatgaaacacatagaaaatatcaacatggcaaactctgagatgttacctggcgcccttccaccaaaaaggatttctacctccttttcaagactgattcatctctagttcacaaacaatc

SEQ ID NO: 893913 - DNA, 120 bp, Artificial Sequence
  ENSG00000257612_5 (sequence is synthesized)
tagcactgaaatatttcaggtacccactcctctgaggtcattgtaaaagcgaagaatgagacaacaccatataaaagaaaattgtgtcaccttttcagcaaataaaaagttcagtctcaa

SEQ ID NO: 893914 - DNA, 120 bp, Artificial Sequence
  ENSG00000257612_6 (sequence is synthesized)
gccaccctaataagctcaaaggaaaccatgagagactgtctaactagactttttgcttgatttcctggacccaagagcaggagtgaggagctttctcctggtcaagaagggaagccagaa

SEQ ID NO: 893915 - DNA, 120 bp, Artificial Sequence
  ENSG00000257612_7 (sequence is synthesized)
cctgtgggtatgaatggttctagggaagtctgttgacaattggagggtctcaaaggcgctttatggtacttattttatgaccctgagtctggagtctgatgaattaaagaggaaattctg

SEQ ID NO: 893916 - DNA, 120 bp, Artificial Sequence
  ENSG00000257612_8 (sequence is synthesized)
ctctgggcaacatttaagagatagtatctccaggcagtaactttcgtattaactctcataagattgatgccattctgtcatctaaagtgtggacaaaagtagcattaaagcaaaatgaaa

SEQ ID NO: 893917 - DNA, 120 bp, Artificial Sequence
  ENSG00000257612_9 (sequence is synthesized)
gagagtagactgaagaaaatggatctaacaaattggtcaatggagcaacaaatgaaacccaggcaatggaaatatgtcactaggtcaagaagggaagccagaagtcaaggccacagaaga

SEQ ID NO: 893918 - DNA, 120 bp, Artificial Sequence
  ENSG00000257612_10 (sequence is synthesized)
cttcctccttccaccatgggatggtaacagcaataaggccctcacaagatgtgagtgccttgctcttggacttcccatactctacaactgtcaagaagggaagccagaagtcaaggccac

SEQ ID NO: 893919 - DNA, 120 bp, Artificial Sequence
  ENSG00000257612_11 (sequence is synthesized)
gctttctcctggtaattttgttatagagcaatcaatgagcttgcttcctcatgcacatggaggccaacaccatgacaaaggcttttgagaaaagaaaagctttatggagacctgactggc

SEQ ID NO: 893920 - DNA, 120 bp, Artificial Sequence
  ENSG00000257612_12 (sequence is synthesized)
ttatttgtaaagtcaagagccaagcaaaacagaaaaaggacaagaaatctatcaccttattcattaggtgaattgactacaaaatggactgcactgaaaacacatcacatgatttcatcg

SEQ ID NO: 893921 - DNA, 120 bp, Artificial Sequence
  ENSG00000257612_13 (sequence is synthesized)
agagtccacatatgttcgggggagggaccccagaaggcggctgacagtattcctttagccagaaatcccttcagggaagagaaagtattttccagaaaatatttcaagcagaatatactt

SEQ ID NO: 893922 - DNA, 120 bp, Artificial Sequence
  ENSG00000257612_14 (sequence is synthesized)
ttttatatgcatagggtaatgaggcatgatctgattggataatcgggcaagatctagaacccaatcacataaagccccggtgtcacctgaaagctttaggatccagaatccagtggtgac

SEQ ID NO: 893923 - DNA, 89 bp, Artificial Sequence
  ENSG00000257612_15 (sequence is synthesized)
tgtcacctgaaagctttaggatccagaatccagtggtgacaccagagctttatctgattggattctggatcctgccatacaatgttcac

SEQ ID NO: 893924 - DNA, 62 bp, Artificial Sequence
  ENSG00000257612_16 (sequence is synthesized)
caggcgcgtcaggctggtctcgaattcttgacctgtgatcctcccgccttggcctcccgaag

SEQ ID NO: 893925 - DNA, 120 bp, Artificial Sequence
  ENSG00000257612_17 (sequence is synthesized)
ggctggtacagtgttcacttttaaaatcagtccctgcacctcagtctcagcacctgggttcctccactggttgcatgctttgttcatctggctttagtagtaaataaaacaatgatcagg

SEQ ID NO: 893926 - DNA, 120 bp, Artificial Sequence
  ENSG00000257612_18 (sequence is synthesized)
agctccctttgactgctcacttctccagtgaggcttcaagcttctaggcatcaagattagtaaggctgtcttctgggtgggccagtttgtttctcagtgacacgaaaacattgcctgggg

SEQ ID NO: 893927 - DNA, 120 bp, Artificial Sequence
  ENSG00000257612_19 (sequence is synthesized)
tgtgcactgggtgaggcttgtcagtcaagatatgattttgcacttctgatggattttccaactattcactacaagttaaagatactagaaatatatacttccctatatctcttctcctaa

SEQ ID NO: 893928 - DNA, 120 bp, Artificial Sequence
  ENSG00000257612_20 (sequence is synthesized)
tttgaacagttgcatgcagcatgacagcagtacattagggttggaaatacacttaaatgttcagtcgatacatccatctggtgcttaaattctagccacagttcctgactttcatccagc

SEQ ID NO: 893929 - DNA, 120 bp, Artificial Sequence
  ENSG00000257612_21 (sequence is synthesized)
ctagatttgaatcctttcagaaagaggagactcatgttcttccaaagcaagtaattctgtccagcacacaagcacgtgtacacatattttaacatacacattcatacacacagactgagc

SEQ ID NO: 893930 - DNA, 120 bp, Artificial Sequence
  ENSG00000257612_22 (sequence is synthesized)
ctaaatcacctctgtccttttcttgagtcatgtagttgaagtttggagcatagatgtaggtaggatagggcaattattgattcttggtgaggtccaacaccatcttccataccaagctat

SEQ ID NO: 893931 - DNA, 120 bp, Artificial Sequence
  ENSG00000257612_23 (sequence is synthesized)
tttgtcaccatgtactgtatttttcctgtctggttgggagcagagagcaggtgcttggaaatcctgctctcatccattctccacacatgactggtctatgttcagctgaattatggtgaa

SEQ ID NO: 893932 - DNA, 120 bp, Artificial Sequence
  ENSG00000257612_24 (sequence is synthesized)
tatcacttgagaactgctgtagtaactgcacttcaagacctgcctgtaatcttgccctgctatttgatattcattcagcaaagcacataaatgaaattattaaaactatttaaggactca

SEQ ID NO: 893933 - DNA, 120 bp, Artificial Sequence
  ENSG00000257612_25 (sequence is synthesized)
acatgagaaatcagcgtaattctgaagaagttaagcttgacccagagtttggaacacaattgaaatacctaattgatggtttgttattaaactatcaattaaatgtatttttacatttaa

SEQ ID NO: 893934 - DNA, 120 bp, Artificial Sequence
  ENSG00000257612_26 (sequence is synthesized)
tgggagtccatggcaaccgaagaaggactcactttgttacttaaatgttaagccagattggtttggtgcagttacagtttcctactggatatttgagttctcatgaagaaatattctata

SEQ ID NO: 893935 - DNA, 120 bp, Artificial Sequence
  ENSG00000257612_27 (sequence is synthesized)
ttaattttcttttggcttagaaaagtttcgtataacttttcccaagccttccagacaaagcagccgttttctcatactgttttcaatgatcattttccataattaaattcatgtttttct

SEQ ID NO: 893936 - DNA, 120 bp, Artificial Sequence
  ENSG00000258435_0 (sequence is synthesized)
ttttacagagggagagacgtaaggcagaagaagattacatgtacgagttgacagcataattcactggcagaattccaaaaagatgctatcagtccaaaagaaaatgattctggggagcca

SEQ ID NO: 893937 - DNA, 120 bp, Artificial Sequence
  ENSG00000258435_1 (sequence is synthesized)
tctgttctccagctgcagagatgtttctctaaagtgcaataagtattgttgaaaccatctttactgtagcggaagtcaatcacagtctggattcagatgggagctggtttaagcattcag

SEQ ID NO: 893938 - DNA, 120 bp, Artificial Sequence
  ENSG00000258435_2 (sequence is synthesized)
gagtgaggagccccgaggtcatcaccgagcatgaacgcgggaacgtctgggaaggaaatctgaggccctgctctgacggtcataacaaaggccttcgagccaaccggcgtgttcaaattc

SEQ ID NO: 893939 - DNA, 120 bp, Artificial Sequence
  ENSG00000258435_3 (sequence is synthesized)
accacggcccttcccgcgctcccctccccggaaacttgaccacctagcccagaaagccgcagcagcttcctcagggacgctatctcccatttcaaacacccaaccgagaaagcagcgccg

SEQ ID NO: 893940 - DNA, 120 bp, Artificial Sequence
  ENSG00000258437_0 (sequence is synthesized)
agccagtcaacagggccagacacctcaagctcctcactcttgttttggacctaggagatttcgagctggggaaaggcaacattgctacccaataggatggaagtagatgtccttaccatg

SEQ ID NO: 893941 - DNA, 120 bp, Artificial Sequence
  ENSG00000258437_1 (sequence is synthesized)
gtagaatttgatattttgggcaggaacctaataatgcataaccatagcccaggatgaaccagcttctcctgaaactgtgaaagaggcaagcctccatcctaagcgtttcttagaaactga

SEQ ID NO: 893942 - DNA, 120 bp, Artificial Sequence
  ENSG00000258437_2 (sequence is synthesized)
aacaagcaaaagactctgaaagaagactgtctcctttatatgaaacggtctataccagctaacataacacactgtgcctgaaattgtcaggccactggcgatttcactgtacacattgat

SEQ ID NO: 893943 - DNA, 120 bp, Artificial Sequence
  ENSG00000258437_3 (sequence is synthesized)
actttaaaggaaacctgttctatgaggaaattaatatcacagatgggagattttcagttggtggaaagagaaactgcttgagaaatgtttgccttccctcacacacaaactcacagcctg

SEQ ID NO: 893944 - DNA, 120 bp, Artificial Sequence
  ENSG00000258430_0 (sequence is synthesized)
tttgaaaagcaacttttattgaagaatttggagggaagggggagggctttcctgtcacaaagattaaaaacccccaaaatgcatttgaacaacataatacacaataacaaatttaaacct

SEQ ID NO: 893945 - DNA, 120 bp, Artificial Sequence
  ENSG00000258430_1 (sequence is synthesized)
tgctcctctgtcccactgggtaaaccctggcccatcccccatccctggtcccatcccaggggcccagcctccgatgacgtcctcagagacacggccttagtgctggggggctgctgtgtg

SEQ ID NO: 893946 - DNA, 120 bp, Artificial Sequence
  ENSG00000258430_2 (sequence is synthesized)
aggttgaactgaggcccagggccccagagagatgacagatagctggtgacagacagcccagggcggctggctgacagagtgaggggacacatgggcaggacctgcccggccccccaatgc

SEQ ID NO: 893947 - DNA, 120 bp, Artificial Sequence
  ENSG00000258430_3 (sequence is synthesized)
cacattgcgcatagctgcagaagtccttaacatttccctacgtgaatcggattgttctgagggctgaggccacacccggagaacaaactggatgaaataaattaaaacccgcaggatagt

SEQ ID NO: 893948 - DNA, 120 bp, Artificial Sequence
  ENSG00000258430_4 (sequence is synthesized)
tttcttccctaccccgctgcgggggagggtgctgcccacagcacaaaaacgtctttccatctgggctcgagaggacagcgtggcttctctcaaatgcacccgagaaataaaaaccattaa

SEQ ID NO: 893949 - DNA, 120 bp, Artificial Sequence
  ENSG00000183643_0 (sequence is synthesized)
gctcggttttgtctggtgggtttttttgccactgccgttgtgttagtggcatccaggtctccggattactgcatgcttgcagtgggaggaaaggcctgtctaccatgttctctgcctccc

SEQ ID NO: 893950 - DNA, 120 bp, Artificial Sequence
  ENSG00000183643_1 (sequence is synthesized)
cttcatgttctgtgaggagaggggccttgtctggcatgttcaccgaggcattcctgaccactagaactgtgcttggcacagagtaggcacttaataaactcctgctgcatgaacaaaaga

SEQ ID NO: 893951 - DNA, 120 bp, Artificial Sequence
  ENSG00000183643_2 (sequence is synthesized)
acaagtgtggatgcttcaaaggaagacttgcacccggctgacccccagagtggggaaggggtcccacctaataggaagaacaccaagacttccccaagaggagaaggaacggctccccct

SEQ ID NO: 893952 - DNA, 120 bp, Artificial Sequence
  ENSG00000183643_3 (sequence is synthesized)
ttctcggcgaggccatgtgtctggaccctgtgtgagatgctttctatactagcccttgttggggtgttgcacccattttacagatcaaacaaccaagtttatcagaaattaaagactcat

SEQ ID NO: 893953 - DNA, 120 bp, Artificial Sequence
  ENSG00000183643_4 (sequence is synthesized)
ttaagatgccaaagctcacgagtggatggtttgatgctgaagccaacattgttaacaccatctcagctcaaaagccctgaaggccacttaattctaccaaccttcaaccatcttgtcata

SEQ ID NO: 893954 - DNA, 120 bp, Artificial Sequence
  ENSG00000183643_5 (sequence is synthesized)
tgtacagattgcaaattcaattgcggaagcatagagaggcaccagaagaggcatcttatgagagtcagccaggactggtaatgagcaaaccatcaccttgaatagcctctgagagggaac

SEQ ID NO: 893955 - DNA, 120 bp, Artificial Sequence
  ENSG00000183643_6 (sequence is synthesized)
atttaataagatacagaaaccagatttgcttgagctgaatgctggatcgccatggcaaccttcctttggaggttatccaagtcaggtagtgacagcaaagctgagttaaaggtcacccct

SEQ ID NO: 893956 - DNA, 120 bp, Artificial Sequence
  ENSG00000183643_7 (sequence is synthesized)
gctgagaaagatgggcattgataaaggattttaacaagacccagaggagctggtatttggaagctacctacagaggatcgacgaggccctaggaatgggtggcaaacaacatcaggaaga

SEQ ID NO: 893957 - DNA, 120 bp, Artificial Sequence
  ENSG00000183643_8 (sequence is synthesized)
ggggggcatcctgcaggggctcccaccagagccccgacctcgcccttcagatcgggagctccagccttcaccagaagctgagattggagctgttcgtaattgttcaatggaagggggaac

SEQ ID NO: 893958 - DNA, 120 bp, Artificial Sequence
  ENSG00000183643_9 (sequence is synthesized)
aaccattttaaccaggcatccagatgggaaagaaatacacttatgccactctacacccaagacacgcattcctgaaaagttctgaacaagccaaatgcttgcaaatggaacgggcttgac

SEQ ID NO: 893959 - DNA, 120 bp, Artificial Sequence
  ENSG00000183643_10 (sequence is synthesized)
attggaaccactggaggagctttaaaacctcctgaaacctaggtctggccttcagggaatctgattccttggtctggggtatggcccgggcatctcctgaagctcaccaggtcacacaga

SEQ ID NO: 893960 - DNA, 120 bp, Artificial Sequence
  ENSG00000183643_11 (sequence is synthesized)
ggtgtagccccagctgggaaccactgacccagactcagttcctgaatttctgtgaccgcttccatggcagcccctctcaggcccctggtgtgaggtctttcttttgcttctggcttctga

SEQ ID NO: 893961 - DNA, 120 bp, Artificial Sequence
  ENSG00000183643_12 (sequence is synthesized)
tttttctattggagcatcactttaaaacctcaaagttgagaaggcttttctttgcatgatgctgaagccagaagccttcaaggaaacaacataaatataaatatctctgtggccagtctc

SEQ ID NO: 893962 - DNA, 120 bp, Artificial Sequence
  ENSG00000183643_13 (sequence is synthesized)
tacaaaaatacataaaaatgaattttaagcataataaaatgtgaaaaattgcccaactttcctcacaaatgagtaaaagccaatttaaatgataagaaatgaataaatgcatattaaagc

SEQ ID NO: 893963 - DNA, 73 bp, Artificial Sequence
  ENSG00000250390_0 (sequence is synthesized)
gagatgtggggagcgcctctgcccctgtctgggaggtgaggagcatctctgcccagccgccccgtctgagaag

SEQ ID NO: 893964 - DNA, 60 bp, Artificial Sequence
  ENSG00000250390_1 (sequence is synthesized)
gagaccctcagggaagtgaggagcgtctctgcccggagggaagagtgaatataagtgtgg

SEQ ID NO: 893965 - DNA, 120 bp, Artificial Sequence
  ENSG00000250390_2 (sequence is synthesized)
atcggaaaccctatttacgcgactctgaggagcctcctgagaagccaagctctgtgccgatgggatcagacaccactgaacatgtccacggtgcttgggggcttggacaacagcagtccg

SEQ ID NO: 893966 - DNA, 120 bp, Artificial Sequence
  ENSG00000250390_3 (sequence is synthesized)
acactgagacacctgcaggcacggagttcatcgtcccaggggaagtttgttacagtaaatggatgagcacctgacccaaaggccgccaaccaataaactagccagtgtcgtgtgtgatac

SEQ ID NO: 893967 - DNA, 120 bp, Artificial Sequence
  ENSG00000250392_0 (sequence is synthesized)
attacaactagttaccattctctgtatttaacccagcgaactacatatcggaaactaaaatttattggagagattctcagaaccatactagaaacattaccgaggtctcatctagttttc

SEQ ID NO: 893968 - DNA, 120 bp, Artificial Sequence
  ENSG00000250392_1 (sequence is synthesized)
tctactgccttccaaggtttctactgtacaatttctcattgaaaactgcctcagcattttttaagaagacatcacttcccccttggggaagaaagaactcaatgacttgaagaaactgat

SEQ ID NO: 893969 - DNA, 120 bp, Artificial Sequence
  ENSG00000250392_2 (sequence is synthesized)
cagtcaatggggctgttaggggtcctggcggatgcttaggcagtggctgtcctggattccagggaatgccccaaacccagtgatgcaggacccaggactccatctgctcattcttcataa

SEQ ID NO: 893970 - DNA, 120 bp, Artificial Sequence
  ENSG00000250392_3 (sequence is synthesized)
ggttggctcacaggtcatctgctgagaaggtcatcttctccgtcttcactgggctcactgaatgaggacattccaagatcccagctcatctcatttgagctttccttttcctaatcccat

SEQ ID NO: 893971 - DNA, 120 bp, Artificial Sequence
  ENSG00000250392_4 (sequence is synthesized)
gcatctgtgtttgagaaaatcttcccaagtgatagatcttctattttccgatttcttccatgttgtattactttttttattaataataataaatacacatatttttggtgtgtacatgca

SEQ ID NO: 893972 - DNA, 120 bp, Artificial Sequence
  ENSG00000250397_0 (sequence is synthesized)
agcagcttagggtgataggggaggcttcccaggagaccaggaagaggcttgggggtggcagccagcacagcccggtggagggcggcccggagacgcaccaggggacggatgcatgaacct

SEQ ID NO: 893973 - DNA, 120 bp, Artificial Sequence
  ENSG00000250397_1 (sequence is synthesized)
gagacgtgtgagtcaagttgtgtgtgagcccgggatgcatgggagctggggtgcatgtgagcaggggtacatgggagctggggtgcgtgtgggcccggggtgcatgagtgagggtgtgtg

SEQ ID NO: 893974 - DNA, 120 bp, Artificial Sequence
  ENSG00000250397_2 (sequence is synthesized)
tgagccggagtccgtgggagcctggggtgcgtgggaactgggtgagcagggtgtgtgagcggggtgcgtgtgggccggagtgcgtgtgagccgaagtgcgtgtgagcaggggtgcgtgtg

SEQ ID NO: 893975 - DNA, 120 bp, Artificial Sequence
  ENSG00000250397_3 (sequence is synthesized)
agccgggagtgcatgtgagcctggggtgcatgggaaccggggtgagtgtcagcgggggtgggatccggggtgcatgtgagccagggtgtgtgtgagccagggtggatgtgtctggagtgt

SEQ ID NO: 893976 - DNA, 120 bp, Artificial Sequence
  ENSG00000250397_4 (sequence is synthesized)
gcaggaccagaggccagctccgtggcagaagtgccaggggacatccctaattaagagaatctgtcctcactgggagcactgggcttggggcacagccccagggtgggcaggggtctgcca

SEQ ID NO: 893977 - DNA, 120 bp, Artificial Sequence
  ENSG00000250397_5 (sequence is synthesized)
gctctacaaagatgcccccacttcccgggggacctggccctgctatgggatgcaccagcagctgggggatgggctgtccagggtgctgactgtgaacgcggcgcccccacccaccccttt

SEQ ID NO: 893978 - DNA, 120 bp, Artificial Sequence
  ENSG00000250397_6 (sequence is synthesized)
ggagaggtgtccctcgtaacattctggagcacaggagaggcctggacaggcaatggcccactcaatggtccctccagaccgtcgggcacaaggtcacacacaccatgtacagacaaggcc

SEQ ID NO: 893979 - DNA, 120 bp, Artificial Sequence
  ENSG00000250397_7 (sequence is synthesized)
atgcggaactgaggggcattcccgagcacacaggaaccccagcctgcccctgggctgtccccatatcctcccgcagttcccaggtcttgtggaggggcagacagggcaccagggggaccc

SEQ ID NO: 893980 - DNA, 120 bp, Artificial Sequence
  ENSG00000250397_8 (sequence is synthesized)
ctgccccaagaactgggcagagaagggatatggccctgggtccagatcaccaggtgatgagggcaggaggtcagagggaaacgaggccccaggagaggagatggccatcagcagctcaga

SEQ ID NO: 893981 - DNA, 120 bp, Artificial Sequence
  ENSG00000250397_9 (sequence is synthesized)
gtacatcctggcctcaagcgccaagcaaccccacaagtctcattccagacgaaatgcccaggctgggggtgaaggtccctgaactgaggggaggtgctagcacaacagagaaaactgtca

SEQ ID NO: 893982 - DNA, 79 bp, Artificial Sequence
  ENSG00000250397_10 (sequence is synthesized)
caaactgcctgctccatctgcctctgccttccaaggacgcagacctctcctgtcatcaggaaaatgagctgttccaagc

SEQ ID NO: 893983 - DNA, 120 bp, Artificial Sequence
  ENSG00000250397_11 (sequence is synthesized)
cagacctctcctgtcatcaggaaaatgagctgttccaagctcccctcgccccatggggatgtgtcgaaggacacagggaggacatgtgcagagtgactggtgccatgccaggtgtgggaa

SEQ ID NO: 893984 - DNA, 120 bp, Artificial Sequence
  ENSG00000250397_12 (sequence is synthesized)
accccgttccatgggggctgggcaggaaggaaccctacacctccagccctgggcccctcccacaactgccccagccctggtgggaactgatttccctaattaacactccacgaaacatcc

SEQ ID NO: 893985 - DNA, 120 bp, Artificial Sequence
  ENSG00000250397_13 (sequence is synthesized)
tcacctccaccggagacggcaggaaagagacacccactgtcaccagacgggctcggtcacacacactgtgacagacaacagcccacgttgccacagacgcctcacaccatcacacgtggc

SEQ ID NO: 893986 - DNA, 120 bp, Artificial Sequence
  ENSG00000250397_14 (sequence is synthesized)
cacacgcgcgcgttaccgccctgcaacctggcgtcccccgggccccgaggccccagcgtgctggcagacccacacagataaaatgcgtgcacgtggttaataaaattacctgcaattttg

SEQ ID NO: 893987 - DNA, 120 bp, Artificial Sequence
  ENSG00000223914_0 (sequence is synthesized)
tggtagagtatgctgacgcagtgagcacacagaagacttttttcatgtgacagagccagagtctgagatctgcagttgcagaatatttagcttacctaaagttaacatctgatgacatga

SEQ ID NO: 893988 - DNA, 120 bp, Artificial Sequence
  ENSG00000223914_1 (sequence is synthesized)
tcgcaactccatatcctgagttgatttcaacctatgatgttggaattttccacatggagataaacactgggaagcagctaatcattctctctggatttataaggaacaaatggataagtg

SEQ ID NO: 893989 - DNA, 120 bp, Artificial Sequence
  ENSG00000223914_2 (sequence is synthesized)
gaacagaagataaaaggccaaagttgtaatataagacaaattacggaaatatacacttatacatataaaaccactcctctttttaaaaaatcatgctttttaagaagaatcttctcatat

SEQ ID NO: 893990 - DNA, 120 bp, Artificial Sequence
  ENSG00000223914_3 (sequence is synthesized)
cagtgagaaagaaagttatcttaacaaacaaaaagtattttgaaaaaaagcgttcacatgtataagaaagaaaatgaacaaataaataggaaaaaagatctctggttcaaccatatcaaa

SEQ ID NO: 893991 - DNA, 120 bp, Artificial Sequence
  ENSG00000223914_4 (sequence is synthesized)
ttatagcgaaggactctcgccatgttgcccagactcatctcaaactactggacccagacaatcctcacactttggcctcccaaaatgctgagattacagcttacctaaagttaacatctg

SEQ ID NO: 893992 - DNA, 120 bp, Artificial Sequence
  ENSG00000223914_5 (sequence is synthesized)
ttactctaaaggacacctccctgatcttgaactgataatacagttaaaagaattaacagaaagagagagggatagaaatggtcacgtacagaatgaaaaataaaggaaatttttttctta

SEQ ID NO: 893993 - DNA, 120 bp, Artificial Sequence
  ENSG00000223914_6 (sequence is synthesized)
acagtttagctgatccagtgtactgtaaagtctgtttcactccaccagccaacaaggagcaggcggccgtggttttctcatgttctgggggaagctgtttgtcagtgttaacctggctaa

SEQ ID NO: 893994 - DNA, 120 bp, Artificial Sequence
  ENSG00000223914_7 (sequence is synthesized)
ggcctcacaaagtgctgggattacaggcgaataaactgtactgagccacagcgcccggccaggatctgatgattttataaggggcttccccctgcgcttcgcactcactccgtcctgccg

SEQ ID NO: 893995 - DNA, 120 bp, Artificial Sequence
  ENSG00000223914_8 (sequence is synthesized)
gccacagcgcccggccaggatctgatgattttataaggggcttccccctgcgcttcgcactcactccgtcctgccgccctgtgaagaaagagcctgcttctcctttgccttctgccatga

SEQ ID NO: 893996 - DNA, 120 bp, Artificial Sequence
  ENSG00000223914_9 (sequence is synthesized)
catcactttggtaggccgagatgaaaagactgcaaggagttaatgaccagcctggacaacatagcgagaccccatctcaagaaaatattcccaggtaaatccaaatcgatttcttttaga

SEQ ID NO: 893997 - DNA, 120 bp, Artificial Sequence
  ENSG00000223914_10 (sequence is synthesized)
caactgtggtatagaattgtgactagtgtattattttatgatctcttttgttacatccttagtgtccaataggatttttgttgcgtttgctttatatctgaaattctgcattttaattca

SEQ ID NO: 893998 - DNA, 120 bp, Artificial Sequence
  ENSG00000223914_11 (sequence is synthesized)
gctacacaaataatgcatcttttcaacaaaactcagatacaaataatgttctaatattgttatttatttccatacagcattaatctctagtaagtctaacttcgcaatctcttttctcac

SEQ ID NO: 893999 - DNA, 120 bp, Artificial Sequence
  ENSG00000223914_12 (sequence is synthesized)
atacacctctagcttccaattgttttgcctagagactttaaggcctatgactgccagaatgaaagattgttacctcttttcccttgcttattaaggtaggaggccatgatgacgcacttt

SEQ ID NO: 894000 - DNA, 120 bp, Artificial Sequence
  ENSG00000223914_13 (sequence is synthesized)
tctcaatctcttggctttaaatggatcttaccttgggagagttacagtgaaggcatgagtaattgcgatttaaagttttgcttctgtgtcatacaacaatgctgcatcatgaaatgttga

SEQ ID NO: 894001 - DNA, 120 bp, Artificial Sequence
  ENSG00000223914_14 (sequence is synthesized)
gtcttgtctcttttcctggcagatggccagagggtgtgatggctcctacctgactgatacaattgaaatcaaagacttgccaagttataccagcaactccagcaaaactgtgaacttact

SEQ ID NO: 894002 - DNA, 120 bp, Artificial Sequence
  ENSG00000223914_15 (sequence is synthesized)
ggccttggaggactatggattgaaacacacaaaacatctttggctgtgcatgcccttcacactggctgcctagtcccctcacagaagattgtaccatgtggtagttggcgtaagaaacca

SEQ ID NO: 894003 - DNA, 120 bp, Artificial Sequence
  ENSG00000223914_16 (sequence is synthesized)
ttgtgtatatgaattttgtcatgaggacctagtggtcagcactcttgcacattacagaacaaggaaaatatagtatttataaactcttcagcagtccctattagggagcccaaattcaat

SEQ ID NO: 894004 - DNA, 120 bp, Artificial Sequence
  ENSG00000223914_17 (sequence is synthesized)
taattgcagtgaacaatacaggtttgagctgcacaggttcacttctatgcaaagtttcttccactgctgccacccctgagacagcaagtcctactccacctcttcctccttctcctttgc

SEQ ID NO: 894005 - DNA, 120 bp, Artificial Sequence
  ENSG00000223914_18 (sequence is synthesized)
ctactcaacatggagacactaaggataaagacgtttatgatgatccacttccatgctggaatccagaatgcagtggcactatcctagctcactacagacttgaacgcgtggtctcaagtg

SEQ ID NO: 894006 - DNA, 120 bp, Artificial Sequence
  ENSG00000223914_19 (sequence is synthesized)
atcctcttacctcagcctcctgagtagctaaggctacagagttttgctctttagcccaggctgatgtgcggtggagcgatctccgctcacccgcaatctccgccttctgggttcaaggat

SEQ ID NO: 894007 - DNA, 120 bp, Artificial Sequence
  ENSG00000223914_20 (sequence is synthesized)
atacatagctttaagattactatgtagatggactttatttttttcaattagctttgtgccactcaggaatacaaaaaatgtttcagatatcttttttaatccattgtttgttcccaaata

SEQ ID NO: 894008 - DNA, 120 bp, Artificial Sequence
  ENSG00000223914_21 (sequence is synthesized)
tatataaacttctttcaattttaagctataattctgttgcacactgtgaatataaagtcagctgaatcataatgtcttgttcatccagcttctgtgaacaggtagacattgactggaatc

SEQ ID NO: 894009 - DNA, 120 bp, Artificial Sequence
  ENSG00000223914_22 (sequence is synthesized)
tttccaagcccttggaaatggaaatttttagctattggttaaggcaacactctttgcatctgaagcagtgaatacgatgttaatgcttaagctatcttaattttccaaatgctaatggca

SEQ ID NO: 894010 - DNA, 120 bp, Artificial Sequence
  ENSG00000223914_23 (sequence is synthesized)
tagttgaaagtgttaataatatgactatatcagatcttgactttaggggggcttaatttatcctatccttgagcaaaccatctggcattgctaagcccaaagttgcctgggcctgtgtaa

SEQ ID NO: 894011 - DNA, 120 bp, Artificial Sequence
  ENSG00000223914_24 (sequence is synthesized)
cactgggtgggttttaattcttttgtctagcctagtaaatcattcaatatggttagtttttgaatgccagcttgttttcaaaactgaaatattaagagctgatgatataaaccaaaattg

SEQ ID NO: 894012 - DNA, 120 bp, Artificial Sequence
  ENSG00000223914_25 (sequence is synthesized)
aaactagaagaaatttctccttccttattttacacagaagtgggctggagctgctgcaatcacggggatgtctgatattgcaacaaaggaagcaaaacagagctaaatgaatcctgtgca

SEQ ID NO: 894013 - DNA, 120 bp, Artificial Sequence
  ENSG00000223914_26 (sequence is synthesized)
ataaaaccttctcactgcttactaaatagcacagttctgagatacaaaccagcaaatttacaaatcacaatgcttttcctgctgaatcaatagctgtagcaaatatatatatgtaaaatg

SEQ ID NO: 894014 - DNA, 120 bp, Artificial Sequence
  ENSG00000223914_27 (sequence is synthesized)
caatggaaaaatgaagacctctttagaagcctgcagaaaatttatactagatatgaaagtttgagcaatcacgtaaaagccctagtcccttaacattgcttttaaggtcatcagtgtcct

SEQ ID NO: 894015 - DNA, 120 bp, Artificial Sequence
  ENSG00000223914_28 (sequence is synthesized)
ggacgttggtgacttccctgcacccatttcttcactccccaccttgaacttcatgtttaactcttatttcttccagtacttagtgaacactgtcttctctctaagccttttcctggagga

SEQ ID NO: 894016 - DNA, 120 bp, Artificial Sequence
  ENSG00000223914_29 (sequence is synthesized)
acattctcttgtctgacttcctaagtctgagttaagtggtctcctatgtctcctctaataaacttattttaccctgtcattattcttagtgcacttatttaattccctgtttactagctt

SEQ ID NO: 894017 - DNA, 120 bp, Artificial Sequence
  ENSG00000223914_30 (sequence is synthesized)
atcctgcttctaggttacaagctctggcatatctgttctgttcaccattgtatcctgaatgcctggcacttagaaagccttcaataaatacttgttgaatggcgttcattgcagaagcac

SEQ ID NO: 894018 - DNA, 120 bp, Artificial Sequence
  ENSG00000223914_31 (sequence is synthesized)
taaagaatttttgcatgtttttacattaagaaaaatcttagtagcaggatcagatctcagtcatatagtacactcagttgtgcaaacatgattccggtaatttatattctttaaataaac

SEQ ID NO: 894019 - DNA, 120 bp, Artificial Sequence
  ENSG00000223914_32 (sequence is synthesized)
tgaattttaattccaaactactatttcactaggatgtcaagaaatttcatctcagtcatttaggggccagatccttccctgggatctcacagaaccagggaggtttatatgagatccacg

SEQ ID NO: 894020 - DNA, 120 bp, Artificial Sequence
  ENSG00000223914_33 (sequence is synthesized)
aaatggctgaaagggctccactgtctttctggtactgctcctagtccacgcatgaggaaagaagccctgtcaatctctgctcctaagctacacagggtttcaataatctgagctgcttct

SEQ ID NO: 894021 - DNA, 120 bp, Artificial Sequence
  ENSG00000223914_34 (sequence is synthesized)
gggaagcccctgcccagagccctgtcttcctagttattcctgcaaggaatttgctctgaagcctggtcactgccacgccttctccagttcaccctaccttcatcaattctgacctctttt

SEQ ID NO: 894022 - DNA, 120 bp, Artificial Sequence
  ENSG00000223914_35 (sequence is synthesized)
ttgatcttagaaaaattttacctcctccacttccttctcatttctcccctgaatgtaccctccccctttcattggcacttaacctttcaaaataggacaggccttagaataacaaatgcc

SEQ ID NO: 894023 - DNA, 120 bp, Artificial Sequence
  ENSG00000223914_36 (sequence is synthesized)
aggaaggcatcttgttctcaagccccataaatctcgggcaagaaacataaacgtcatggataatcagttacaaataggaagtggaaggaaatatacagagaacaaatatccaaaataatt

SEQ ID NO: 894024 - DNA, 120 bp, Artificial Sequence
  ENSG00000223914_37 (sequence is synthesized)
tttcaacagagaagacaactacaaaatcctgctacttctcgatttccttatgtaaagatttggccagatggcccaagatgttaataatgttagatacaggattggagatactgcagatgg

SEQ ID NO: 894025 - DNA, 120 bp, Artificial Sequence
  ENSG00000223914_38 (sequence is synthesized)
gcaaagatcacaaccacttccctcaggcacaagctaaaatgggtaccagcttctagaagcatttggaaattaacatctaaaacacactgttttatttaaagtttacttttcctctttttc

SEQ ID NO: 894026 - DNA, 120 bp, Artificial Sequence
  ENSG00000223914_39 (sequence is synthesized)
ttcctctttttctttctcttttgtatttatatatacacacatatatatcaatcatatgtgtatgtgtgatgtttgcatacaataaacttacatatatacatgcatacatatataatacat

SEQ ID NO: 894027 - DNA, 120 bp, Artificial Sequence
  ENSG00000223914_40 (sequence is synthesized)
ttatataatgtgaaaggaaaatatcttgtgcccccaaaatcactaaggtaaggggaaaattcaagctaagaactgcttagggcaaacctgcctcccatgctattcaaagtattccctttg

SEQ ID NO: 894028 - DNA, 88 bp, Artificial Sequence
  ENSG00000223914_41 (sequence is synthesized)
agattgtctctcacccacctgtgacctggaagccccctccctgctccaagttgcttagggaaaaaaaataaaaattaaaaaaaaaatt

SEQ ID NO: 894029 - DNA, 120 bp, Artificial Sequence
  ENSG00000223914_42 (sequence is synthesized)
aaaataaaaattaaaaaaaaaattaaaattcagattattacatctgtgtatctctttgtatgcactttcaaagtacttatgacattgagttacagggctttgactcttgggtccacaaag

SEQ ID NO: 894030 - DNA, 120 bp, Artificial Sequence
  ENSG00000223914_43 (sequence is synthesized)
tcttgggtccacaaagggacaccaagtcctgctaaattttaaacactgacagcaattaaagccccatcttcaggcccagtacaagatgtcaatcaaaataaactgcattcctgaaacata

SEQ ID NO: 894031 - DNA, 77 bp, Artificial Sequence
  ENSG00000223914_44 (sequence is synthesized)
gagcatggaaaaggtgggtgtgtgagaatgtaagagtcaatcctgagttcagtttctctataaattaatcattaatg

SEQ ID NO: 894032 - DNA, 120 bp, Artificial Sequence
  ENSG00000223911_0 (sequence is synthesized)
tctccctaagaaaaagaatgacaaatgttatggcactgtctaaaagcacttaaagaatccagaggaagaatgttccaaaaatccgcagcaagactaaatatttggggtgtgatgtgtgac

SEQ ID NO: 894033 - DNA, 120 bp, Artificial Sequence
  ENSG00000223911_1 (sequence is synthesized)
gcaaccaaaaaaaatacttgatctaccaacaacatatgttgagcaaacctacgtattttccctgtgaacttacgctgtgtgacttccatctccggaaaataagaaaacttttcattacac

SEQ ID NO: 894034 - DNA, 120 bp, Artificial Sequence
  ENSG00000223911_2 (sequence is synthesized)
atattgccctcacagcaacaaaaatatacttcagggctgtcttttttttctacacaatcagtcctataaataagcagagaaaaaataattaaaatcaatattattatactgaccctacaa

SEQ ID NO: 894035 - DNA, 120 bp, Artificial Sequence
  ENSG00000223910_0 (sequence is synthesized)
ggtgaactggacttggtggatggtgtggaagggactttgggagagacctgtgcccatgataaaagggaagatgaagatgttcctttgagtttgcatgtgtggggcctttttggcatggtt

SEQ ID NO: 894036 - DNA, 120 bp, Artificial Sequence
  ENSG00000223910_1 (sequence is synthesized)
gacttgtctgtactccttcctgtgacttgacatcaaaattagccttgcagcttcaggactgctgatcctgattatgctgtgcaaagggtgttcgttccacggtcacactgtctctatgag

SEQ ID NO: 894037 - DNA, 120 bp, Artificial Sequence
  ENSG00000223910_2 (sequence is synthesized)
gcagcaacgtctaggagtgttatccccattgagggggcagataaaccaaggaaggaggagggcaggtgctggcccaagtcacacacagatgaaggcacacatggtcacgcatacctggga

SEQ ID NO: 894038 - DNA, 120 bp, Artificial Sequence
  ENSG00000223910_3 (sequence is synthesized)
aagcttagcagcactcctggctctcctcaggagttcatagaaccctgcgctgtgtggaccaccgagctcagaagggttgctgtgtgatgctcgaatcaggaggctctgatggactcttcc

SEQ ID NO: 894039 - DNA, 120 bp, Artificial Sequence
  ENSG00000223910_4 (sequence is synthesized)
cttctctgtctctccagcatctgactgaggcacgtttatgggactctggcgaggaagactccggtttgcagaacacctccaatggccactgcttaaattgaacaaatgatgcatcacaaa

SEQ ID NO: 894040 - DNA, 120 bp, Artificial Sequence
  ENSG00000223910_5 (sequence is synthesized)
actacaacgggactcttcaaattcacggtcggcgcaatctgtatgtaattgtattgcaacaattgtccagcagatggcagtaaagtgtcatgaaacagagttgcctggtgacctgtgctg

SEQ ID NO: 894041 - DNA, 120 bp, Artificial Sequence
  ENSG00000223910_6 (sequence is synthesized)
cacctttgtgagttagcggtgaccaggcttcacacactggacttactggagtcactactaagccaaggccacagcagaaagagcactgcgttttgcatgacctaggggctccaagtcggc

SEQ ID NO: 894042 - DNA, 120 bp, Artificial Sequence
  ENSG00000223910_7 (sequence is synthesized)
ctggctgcaccagagccctttcaaaacacgcggtttagttcagggctcacattggccattgcctggttttgtttggccagcaaggaaaatgtgcaaagccctggattgctcctttgggac

SEQ ID NO: 894043 - DNA, 120 bp, Artificial Sequence
  ENSG00000223910_8 (sequence is synthesized)
aaaccctcacagtatttttgtgtgtttggaagtaagaagagagcaagcgagggccgagacctaatgggaagacccggcggctgggagaagggctcctggccaggatccgtgagtcggctt

SEQ ID NO: 894044 - DNA, 120 bp, Artificial Sequence
  ENSG00000223910_9 (sequence is synthesized)
cttgaagtgaaagacagaactctctgctcttcaggttctatcagtgcaaagagggcccactaagacccactctgcagggctgttgaggaaagccccatctgacaggcacccgacaaagct

SEQ ID NO: 894045 - DNA, 120 bp, Artificial Sequence
  ENSG00000223910_10 (sequence is synthesized)
cctcacactccgtaaatgccacccatcatgaatgtggctatgattaaattgtgatgaggactgtgacccacaagactggaaaaccagtttggcaccttgatgcagatgttttcaaggact

SEQ ID NO: 894046 - DNA, 120 bp, Artificial Sequence
  ENSG00000223910_11 (sequence is synthesized)
gggttagagaatacataccatcattctacttttagctgttttgtttcattaaaacctttttggttttaatgaaacaaaccataacatgtatgacaaccataacatgtatgacaacatagc

SEQ ID NO: 894047 - DNA, 120 bp, Artificial Sequence
  ENSG00000223910_12 (sequence is synthesized)
atgacaaccataacaagtacaatattttggccaatttcatttaatttggcacatagaatggaagaaatattaagatattattttctacatgactatgtagctgggatgattggaactgaa

SEQ ID NO: 894048 - DNA, 120 bp, Artificial Sequence
  ENSG00000223910_13 (sequence is synthesized)
tcatttattgcacatttgaatggttaattttattatgctcacattgtgtacatattctgtggcttatatataatcagtaaatattctatgacttattcctcttcagaaacatgtggaaag

SEQ ID NO: 894049 - DNA, 120 bp, Artificial Sequence
  ENSG00000223910_14 (sequence is synthesized)
atgaacaaaaaacaaccacagcatgacagggttagggaattctagaaatggaaaagatgttaaaaatgggtttatagtaaaatccaacatctagaggaaggatttaaagtctaagcagaa

SEQ ID NO: 894050 - DNA, 120 bp, Artificial Sequence
  ENSG00000223910_15 (sequence is synthesized)
accctttctggcggtctgcagaagtctcccatcttgctaaagtgtcacatttggcacatattcctggaaaacgttttagtgtttttcaattaaattccttactgctgtccctcttgccaa

SEQ ID NO: 894051 - DNA, 120 bp, Artificial Sequence
  ENSG00000238266_0 (sequence is synthesized)
taagcaaggctggattccagagcttaaattatcctctggttcttgcaaagattgacatcaactactttgggttacttggtccttgcctttagccaaaggagagaaatagcttcctgagta

SEQ ID NO: 894052 - DNA, 120 bp, Artificial Sequence
  ENSG00000238266_1 (sequence is synthesized)
gctctggttggtccagctcggaccttgcctttccttccctgagccagtctctggaaccaaaggaataatgcactctgactggacagtctgcatctgatagagacaaaacaaggccaccta

SEQ ID NO: 894053 - DNA, 120 bp, Artificial Sequence
  ENSG00000238266_2 (sequence is synthesized)
gggaagaggcagttccagactggggaagattctgggaaaaaaaaaagatatctacaatactatgtgtataaactcacccacaaaaatcctagtagcactaacactgtcttaatttctcca

SEQ ID NO: 894054 - DNA, 120 bp, Artificial Sequence
  ENSG00000238266_3 (sequence is synthesized)
ttaggaatcagaaaaacctttaatgaagagtgacggagagaatggcctgtgattggattgtgagcctgtttctgccaccaggcagcccctctgcaggcatctccctcccacctgacccgt

SEQ ID NO: 894055 - DNA, 120 bp, Artificial Sequence
  ENSG00000238266_4 (sequence is synthesized)
ggtctgtgcgagtgcaagttaaaagggtcatttccttgcctcagagctgatctcagccttagatactttccagtttctctgctacctgtcattcagtcttttgaagtacagcattaattt

SEQ ID NO: 894056 - DNA, 120 bp, Artificial Sequence
  ENSG00000238266_5 (sequence is synthesized)
taactgtgatttcattgcaaaaacaaatttgccaatggaatgctattcgtgtcatttatttccccagatcttcctatgagctcatctctctcattcaattgtctctactccaatgtcact

SEQ ID NO: 894057 - DNA, 120 bp, Artificial Sequence
  ENSG00000238266_6 (sequence is synthesized)
tccttggctgaaggaaaaatcagtcctcattccacacactgcaaccttgccttagttgatttacagcacatatcgtatcataacctgaccacaactacctcttgcttaactgtttatttt

SEQ ID NO: 894058 - DNA, 120 bp, Artificial Sequence
  ENSG00000238266_7 (sequence is synthesized)
ttcgctctcctcccagaatatatcctaagacaaagaattgcatattggcatcgtagtttccaatctaagcacatgcgcaagggaactcagtcttcctagaaaatctccataataatatca

SEQ ID NO: 894059 - DNA, 120 bp, Artificial Sequence
  ENSG00000238266_8 (sequence is synthesized)
tcatccctggatacggaaacgaaggctgaaagagagaagaggacgtggtttcctgatagcagagttcagggtggaaactccagatccagctttctgcctgtgacgattctggtggatgtg

SEQ ID NO: 894060 - DNA, 120 bp, Artificial Sequence
  ENSG00000238266_9 (sequence is synthesized)
agccttgggtgctgcctctgacacctgctgtgcacggcagccagagaccgcgtccagaatgcaggcagtttgtctcccacaacgtgacaggtggtgccggcctaagctatgatccgctaa

SEQ ID NO: 894061 - DNA, 120 bp, Artificial Sequence
  ENSG00000238266_10 (sequence is synthesized)
caaaatagggctatgagccctctgcctttcagagcaggcggggaacattcctgcaatgctatgggttgggtgtgtgagttttttcttgaagaacgtaattagaaaggggggttctatgtg

SEQ ID NO: 894062 - DNA, 120 bp, Artificial Sequence
  ENSG00000238266_11 (sequence is synthesized)
tcatgtataaaataccgatgggccagccacagagaacgctgtaggctttgacagacaagacagggtgtctttaccagcaaatggacaccatgccacatcatccttaatgaaatacgtgca

SEQ ID NO: 894063 - DNA, 120 bp, Artificial Sequence
  ENSG00000238266_12 (sequence is synthesized)
agtttctcagcggcagtgaatcaagtcagaaaggtaattcaaccctcactcccaaggtacaagggaaggcaagaaaaactgtttctttagattccattctgtccacagaaccattcatca

SEQ ID NO: 894064 - DNA, 120 bp, Artificial Sequence
  ENSG00000238266_13 (sequence is synthesized)
atttccttcgagagtctgaatcaatcccagcaggaccgcttgccaaaaagaacgctctgtggagacacaagccccagcttgtgtttgctctctgggtctcttccctcctctttcttcctc

SEQ ID NO: 894065 - DNA, 120 bp, Artificial Sequence
  ENSG00000238266_14 (sequence is synthesized)
cgggtggcaggagggcaccgtggcaacacaggaggcatgacctacaacaggcccccgagctcctggggcccctgcatgccctgtcgtaggtttctgagtactcattctcatgggctgctt

SEQ ID NO: 894066 - DNA, 120 bp, Artificial Sequence
  ENSG00000238266_15 (sequence is synthesized)
gcccattagctgatgtcacttaaataactgctttgccagagctggcttgtgtaggactcatctgaggtccttaccaacagaaggaataaggaattcacatggaaagttggcctcaccctg

SEQ ID NO: 894067 - DNA, 120 bp, Artificial Sequence
  ENSG00000238266_16 (sequence is synthesized)
ctcttccctcatcaatggaataatctgaaatgtgcagattaccaatgcttccagaggcaccgaactcaatggtttggcttggctttgtgcttcagtccacacagatggcaggagcaactt

SEQ ID NO: 894068 - DNA, 120 bp, Artificial Sequence
  ENSG00000238266_17 (sequence is synthesized)
agaggtgggagagatacttagagagcagcgactcaaatattttcatttgattgctttaaaaaaatgaggctttgagaggtgaagtattaacctcttgcccaccattataccactgcagag

SEQ ID NO: 894069 - DNA, 120 bp, Artificial Sequence
  ENSG00000238266_18 (sequence is synthesized)
aaaaatcaattcacctgaagtcagggctctgtccaaaagaggacccacagtttctgagtccctcactggtttgagcatgtgtcttttaccacatggagatttttagacattgtgtgcttt

SEQ ID NO: 894070 - DNA, 120 bp, Artificial Sequence
  ENSG00000238266_19 (sequence is synthesized)
gtagggtttactcattttaattaaaaaaaaaaacaaaaaaccctttcatgttgtgcagctcatcgtcgaaatgctaggcaacacgccgaatgttttattacaaaccagcattccctgcag

SEQ ID NO: 894071 - DNA, 120 bp, Artificial Sequence
  ENSG00000238266_20 (sequence is synthesized)
aaaagtcttattttgattaatcttcagcacttacagctcctttctgccaatcaaagtttccatcacgcacagggtgctgttgtagagaccaagttgacatgttgaggcagcccagaacaa

SEQ ID NO: 894072 - DNA, 120 bp, Artificial Sequence
  ENSG00000238266_21 (sequence is synthesized)
ctttagagaggagagggaggacttttcctgtctcttttgataagggaaatagtatgttttaaagacacctttgtggaatccttcttcccttagagtagattgaaagactctcactttaaa

SEQ ID NO: 894073 - DNA, 120 bp, Artificial Sequence
  ENSG00000238266_22 (sequence is synthesized)
atagccaccccagtggagtaaaaaagatgctgagttctcgttctcatgaatatactgctgattagaagaacaagatgttgacaaacccagcccagataggtctataaagcttgaaagaat

SEQ ID NO: 894074 - DNA, 63 bp, Artificial Sequence
  ENSG00000238266_23 (sequence is synthesized)
acaaacccagcccagataggtctataaagcttgaaagaatttactgaataggctgggcgtggg

SEQ ID NO: 894075 - DNA, 88 bp, Artificial Sequence
  ENSG00000238266_24 (sequence is synthesized)
aggcagaggaacgtggaaggactagactgcctgagtcttctgaccttcatctttcccctgtgttggatgcccagcttttggactcttg

SEQ ID NO: 894076 - DNA, 120 bp, Artificial Sequence
  ENSG00000238266_25 (sequence is synthesized)
cttcagcttttggactcttggacctaccccccgagtggtttgccaggggctctcaggccttcggctacagactgagggctgcattatcagctttcctacttttgaggttttgggacttta

SEQ ID NO: 894077 - DNA, 120 bp, Artificial Sequence
  ENSG00000238266_26 (sequence is synthesized)
ctggctttcttgctcctcaacttgcagatggcctgttgtgggacctcaccttgtgatcatgtacatgagggaaatacacacccctcccagggatgatggaaggttaaggtcctaacacct

SEQ ID NO: 894078 - DNA, 120 bp, Artificial Sequence
  ENSG00000238266_27 (sequence is synthesized)
cctgcacatctgagcagctgcacattgaaccagatagtcctggaatgtgggaaaacagaggcagactcaagagtctggaacattattttaggatcacacaaaaaagatacataattttca

SEQ ID NO: 894079 - DNA, 120 bp, Artificial Sequence
  ENSG00000238266_28 (sequence is synthesized)
taggtcttgctctgtctcccaggttatgtagcacagtggtgtgatgttggctcactgcagcctcaacattctggaatcaagcgatcctccctcttccgcctcccgagtagctggaactac

SEQ ID NO: 894080 - DNA, 85 bp, Artificial Sequence
  ENSG00000238266_29 (sequence is synthesized)
ctacaggtgcatacgaccatgcctggcatattgccaaggctgttctcaaacttctggactcaagcaatcctcccacctgggcctc

SEQ ID NO: 894081 - DNA, 120 bp, Artificial Sequence
  ENSG00000238266_30 (sequence is synthesized)
gaaagcatctcaaaaataaaatcacgagtatctgcagatcactatgagactggactggaacattaccttcagacacattgatatgactacatgctggacattttcttgcggaaatccaaa

SEQ ID NO: 894082 - DNA, 120 bp, Artificial Sequence
  ENSG00000238266_31 (sequence is synthesized)
agaaatccccattttcttgcagaaatctaaaataatctcccctatgtgcaagtcagactgagcaccactcccaagaccatgacctcccctgcagccctgctccttcccactcacctctcc

SEQ ID NO: 894083 - DNA, 120 bp, Artificial Sequence
  ENSG00000238266_32 (sequence is synthesized)
tcttgagaaagccacctcccaccacccagtctgcagtgccagaaaactggaaaccagcccctaagctgctttcaccttcggcccatttctcactagccagcctctcccacggcctcccca

SEQ ID NO: 894084 - DNA, 120 bp, Artificial Sequence
  ENSG00000238266_33 (sequence is synthesized)
gtttcttcaaatacaccccctccactattcaccatactgccaccgtgatttatttacaactttttgtccggattacctcagtagccttctaattgtcccctttgcatctaaagtagcccc

SEQ ID NO: 894085 - DNA, 120 bp, Artificial Sequence
  ENSG00000238266_34 (sequence is synthesized)
tctcatcccccaaatcttacgtcactcttctacataattctggctttccatgacccataaaccacatttctcaagtgtgctctatgctggcttgaatatgttaataatcttaattctact

SEQ ID NO: 894086 - DNA, 120 bp, Artificial Sequence
  ENSG00000238266_35 (sequence is synthesized)
tttagtgcaattttcttagagctggcatcactttcatcatgacgtgagaacttactagagataggcaatgatgactcacagtcaagccacatgtcatatgctgcagacatctggactgct

SEQ ID NO: 894087 - DNA, 120 bp, Artificial Sequence
  ENSG00000238266_36 (sequence is synthesized)
gcttatttgcaaatccttttcttcatatttttctcatttgtagcactggatcaattccaattaagagtttaataatgaattaactaatgatttaaacaggtggataagactaacactgaa

SEQ ID NO: 894088 - DNA, 120 bp, Artificial Sequence
  ENSG00000238266_37 (sequence is synthesized)
tagaatgatactgaaagcatctcaaaaataaaatcacgagtatctgcaggtaatgcatcagcatttttattaagccctcttatttgaaagtcactgctttgaactggattggatgaccca

SEQ ID NO: 894089 - DNA, 120 bp, Artificial Sequence
  ENSG00000238266_38 (sequence is synthesized)
ttgatagtaggcaagctggttttctcctgctgtgattttgttacctctgtggagtgcttttgatttttcttatcaactgcagtgactcagatgggttgacaatctctccaaacaaaatgt

SEQ ID NO: 894090 - DNA, 120 bp, Artificial Sequence
  ENSG00000238266_39 (sequence is synthesized)
gtactttttctacccgtgagtttggcctggtcccagaaattcactctagacatgtagaactatatgataagagagttggaaaagagctcatctatctagtccaaaactgtaatgaattcg

SEQ ID NO: 894091 - DNA, 120 bp, Artificial Sequence
  ENSG00000238266_40 (sequence is synthesized)
tgggtcatgaaatctatttaatgggtcgtggccaacatttagaaaatatagattagaccagaaaaatatcagagttttgcaatctttcatttcagctacatgtgtgtatcacagtgtgaa

SEQ ID NO: 894092 - DNA, 120 bp, Artificial Sequence
  ENSG00000238266_41 (sequence is synthesized)
atgtttcttgctaccaaacatttttgcaaaatactaatagttctattcccatatctgacaaatgaaagtaaggagcccagaaaagtactgttaagtattctatttagagacacccaggac

SEQ ID NO: 894093 - DNA, 120 bp, Artificial Sequence
  ENSG00000238266_42 (sequence is synthesized)
ataaattcaaatgtccagacttctggtttagttctttttccattttggagatctggaatgatacaatagaaggaatagtgaaggacataagttcaagtctggtgcttaaaaactgtataa

SEQ ID NO: 894094 - DNA, 120 bp, Artificial Sequence
  ENSG00000238266_43 (sequence is synthesized)
agtgcaagttgcttactccatacccttcattattctcatttctaaaataaggtaaatgaaactgtccatttccttactagattattggaagaactaccaaatacagataaagcaaaaaaa

SEQ ID NO: 894095 - DNA, 120 bp, Artificial Sequence
  ENSG00000238266_44 (sequence is synthesized)
atctgccagatatgggatcaacctcttaagtctaacatagcaaagaatatcccccataccattttactgaagaaaaacaacaaacagcagttccttccgccacactgggtcttagcacat

SEQ ID NO: 894096 - DNA, 120 bp, Artificial Sequence
  ENSG00000238266_45 (sequence is synthesized)
gcagagctgtggagtcctgtctgtgcacagagacaggcattgacaggtggagtcagcttctccaccactgacatctttccaagtcagtgctgtgctatgtctgcaaatgagaaaggggca

SEQ ID NO: 894097 - DNA, 120 bp, Artificial Sequence
  ENSG00000238266_46 (sequence is synthesized)
tggcagtaccaactccatggaaatattcagaggcttcagctgtcattttaaaactgtccttcaggtggtgccatgtcaaagggaagggacctgcacgactgcccaaggttccagatacct

SEQ ID NO: 894098 - DNA, 120 bp, Artificial Sequence
  ENSG00000238266_47 (sequence is synthesized)
taagagttaagcagggattggatgctggggttcccgtgttcatttgcccctttattcaactagtgcttactaagtgcttaatgcatcccaaattatggaaggacctgggaacatatgtaa

SEQ ID NO: 894099 - DNA, 120 bp, Artificial Sequence
  ENSG00000238266_48 (sequence is synthesized)
gacactattcatgctttcaagttgcttgtagtttagtcaaggagccagcttagcatctaaaaccatgcaaccccaatttctaaccaccagtcaactctccagtaagccttcttcatgaca

SEQ ID NO: 894100 - DNA, 120 bp, Artificial Sequence
  ENSG00000238266_49 (sequence is synthesized)
aacctccagagtttgctttgatcctcatactccacctcccaaggaggaataaatttggaagtgtataataaatcaaagataaatttggaagcacatatgaaaaagcttttatgggacttc

SEQ ID NO: 894101 - DNA, 120 bp, Artificial Sequence
  ENSG00000238266_50 (sequence is synthesized)
tagatgaaacagataaaatccaaaaattatctgttttaaaggtaccaaggagctgttgaagcaatgtaggtagagaggctgaaagacagcaaaggggagaatctgcaccagccttttatc

SEQ ID NO: 894102 - DNA, 120 bp, Artificial Sequence
  ENSG00000238266_51 (sequence is synthesized)
ctggggcactgtgggttcactgtgagttctgggtgagaacgagaagcttggcatctaaactctacccaaaccccttctcagcgggcaggatgcagaggtttcagcagagctcagggaagg

SEQ ID NO: 894103 - DNA, 120 bp, Artificial Sequence
  ENSG00000238266_52 (sequence is synthesized)
tagccaggatgtgcaacacaatagggccttcaacacaggaccagcttccccctcaagacatttgctgaattctgaagctgcaagggaaggacataggaaagctaagctgagtacatcaga

SEQ ID NO: 894104 - DNA, 120 bp, Artificial Sequence
  ENSG00000238266_53 (sequence is synthesized)
agagctgggtcgagttttctgcagtgtgacgatgccttggagacccaggttagagttcagttcccaggagaggcagtgttcctgggatgcaccagcctcagtcaaagccctggaagttca

SEQ ID NO: 894105 - DNA, 120 bp, Artificial Sequence
  ENSG00000238266_54 (sequence is synthesized)
tgttgccggaagaggatcagcccagaggaggcttacccaaactgcaaattaaaggcaaaatagtgaaagctttccctcaagtggtggaaagaaataagggtgcctactgtttaccacttc

SEQ ID NO: 894106 - DNA, 120 bp, Artificial Sequence
  ENSG00000238266_55 (sequence is synthesized)
taacctacatggtcctggaagtccaggccagggcaataatgcaagccaacgtataaagggcagaatcattggaaaggaagaaaaaacttactagacacagatgaactgtctctatatgaa

SEQ ID NO: 894107 - DNA, 120 bp, Artificial Sequence
  ENSG00000238266_56 (sequence is synthesized)
ctaaaaataactgtaaagagggttttgttttggttttggttcgttctggtgtgccttacagctttccctaaggcaacacacttactgacctattgctagggcaaataggtggaaaaaaac

SEQ ID NO: 894108 - DNA, 120 bp, Artificial Sequence
  ENSG00000238266_57 (sequence is synthesized)
aagctttcctctctctggagaaaggaagggtcaggtgtaacactgaagtgactcaaaagtaggggagcttgtatcagctctggtctgcacaatgattcccctgctctttacatagaaaaa

SEQ ID NO: 894109 - DNA, 120 bp, Artificial Sequence
  ENSG00000238266_58 (sequence is synthesized)
acaaatagaagagggtttttcgtagctggaatttggtgaagcaggctagggcacccacatctttccttcaattggaatgaaaaaacttgtgtgcattttcgaagatctttgaggttaaaa

SEQ ID NO: 894110 - DNA, 120 bp, Artificial Sequence
  ENSG00000238266_59 (sequence is synthesized)
tgagttgatttcatcttaagaagccaatgtcacccaaaagaaaatgaacagtgtttacggttaaaaccatcagaacaagatcacgtcttgtgcaggaacatggatgaagctggaggccat

SEQ ID NO: 894111 - DNA, 120 bp, Artificial Sequence
  ENSG00000238266_60 (sequence is synthesized)
tatcgttagcaaatgaatgcaagaacagaaagtcaagtgctgcatgttctcacttgtaagtgggagtgaaacgatgagaactcctgaacacaaagagggaaacaaccggcactaagaaac

SEQ ID NO: 894112 - DNA, 120 bp, Artificial Sequence
  ENSG00000238266_61 (sequence is synthesized)
caggcaaagttctttccactctgagagctgtatctgctctcgatgtgactgtgggaaccaggatgaagtgatgaatactgttgcttcatctgccatcgtaggaactgctttattaattca

SEQ ID NO: 894113 - DNA, 120 bp, Artificial Sequence
  ENSG00000238266_62 (sequence is synthesized)
tttccttgggtctttttgcccagacatgacccgatgacacagagcttacctggacctccacaatagtaaatagaacagggccagcaaaccaaaatttgttgagtcctttagaattaagta

SEQ ID NO: 894114 - DNA, 120 bp, Artificial Sequence
  ENSG00000238266_63 (sequence is synthesized)
gcttagataaattttcatcaaaatctttatatagtagggaatagaaaaaagtcaattctgttttatttgaggatgtatgaatatgttaccatttttcagactctgatttaccttccaatt

SEQ ID NO: 894115 - DNA, 120 bp, Artificial Sequence
  ENSG00000238266_64 (sequence is synthesized)
attgtttattggggtcattgtaaattagttatcattttttgaatacacattcactgctgacaaagtggtgaagccagaagttatgtttgaccagggaagattatgaccctcaaaggagaa

SEQ ID NO: 894116 - DNA, 120 bp, Artificial Sequence
  ENSG00000238266_65 (sequence is synthesized)
aaattcacagggggtagttgattattggtggaatggagtgagagtgaattccttaaaagtttaaacgaaagcagaactatattcatatcatggagggaacttagtttctaatatgatgaa

SEQ ID NO: 894117 - DNA, 120 bp, Artificial Sequence
  ENSG00000238266_66 (sequence is synthesized)
ctattgccccaagtcatgacaataccttgctctctggaagagaatgagtgagtttttcatccgccaagatacacactctatatttccaaccatcacatctgccttgcaggctgactgaac

SEQ ID NO: 894118 - DNA, 120 bp, Artificial Sequence
  ENSG00000238266_67 (sequence is synthesized)
ccagagcaaatcaatcacaaaagttaatccaaaagacttcccttcagctgctggaaatcagtcatcacatctgtgaaaagagtgctagttataacaaatgagatcacaaatttgaccatt

SEQ ID NO: 894119 - DNA, 120 bp, Artificial Sequence
  ENSG00000238266_68 (sequence is synthesized)
ttattagacaccctctattagtgttaacagacaaagatgaaggttaagttgaaatcaaattgaaatcttcttccctctgtacagattgcaatatctgataataccctcaactttcttggt

SEQ ID NO: 894120 - DNA, 120 bp, Artificial Sequence
  ENSG00000238266_69 (sequence is synthesized)
gcaaattaattgcctggtactcacagtccagtgttaacaggcaataatggtgtgattccagaggagagtactaggtggcaggaaaataaatgagattagcagtatttgacttggagccat

SEQ ID NO: 894121 - DNA, 120 bp, Artificial Sequence
  ENSG00000238266_70 (sequence is synthesized)
aggcatcaattctgctccagctgtcgaccaggttctaaaaacaagactcggagcagcttttgctcttgctagtgatgcagggccaggagagcccccacactctgcatttgcaggtgtcca

SEQ ID NO: 894122 - DNA, 120 bp, Artificial Sequence
  ENSG00000238266_71 (sequence is synthesized)
tgaggggaagccactcctgcatttatcctgtgagtggagaagctcagaggaatgaggacattccaacagggtatcagaattctcttttgtttatgctaattgacagcaggaacatcacca

SEQ ID NO: 894123 - DNA, 120 bp, Artificial Sequence
  ENSG00000238266_72 (sequence is synthesized)
tcttggacaaacaccaccattttaagttctcttttatttaaaaactgcctaaatccagccccaaaacatcagcctaatggctattgtcagcataatcagaaacattccaaccctaagata

SEQ ID NO: 894124 - DNA, 120 bp, Artificial Sequence
  ENSG00000238266_73 (sequence is synthesized)
aacacccctctggccagaaatatgccgaccccgagacagcctcccctccgaccagagacattccaaacccgcagtaaactttccttcacatggaaacattccaaacctacaaaaagcttc

SEQ ID NO: 894125 - DNA, 120 bp, Artificial Sequence
  ENSG00000238266_74 (sequence is synthesized)
catggaaacattccaaacctacaaaaagcttccctcttcctaaacccttaaatatccttagtctgcaagagagaatgctcctgactgaaatcagccagaagcccctctcaggtttattct

SEQ ID NO: 894126 - DNA, 120 bp, Artificial Sequence
  ENSG00000235939_0 (sequence is synthesized)
ggtgctggctgaggtgtgtcagtgactgccacgggctgcacccctcactgttgcctgaagtcacccaaggtcgcccaaggtcagtgggaaatatccagggatgacggtggatcctgggag

SEQ ID NO: 894127 - DNA, 120 bp, Artificial Sequence
  ENSG00000235939_1 (sequence is synthesized)
cgctctccccatatgggattcaaattgaaaagctacaaggaatgaatgctatggataaactgctgaagatggttcctgtccatttgactctgaagggtgtcttctttcacgttgaagaac

SEQ ID NO: 894128 - DNA, 120 bp, Artificial Sequence
  ENSG00000235939_2 (sequence is synthesized)
aggagacaatcaaaatgtgaaacgtatgctgaagccaaccagaacatcaaaggacagtcaaaagcgctaaccatgaaactatatttctactaatacattcttttaaaaaaaaaataaaaa

SEQ ID NO: 894129 - DNA, 120 bp, Artificial Sequence
  ENSG00000256564_0 (sequence is synthesized)
agaatacgagaagtgctctacaataaaggggaggatggtacatcacttggtaggcttgtgctggaggactggggaagacaaaccagctgaagcaggacttgaatgacatggcatttcaca

SEQ ID NO: 894130 - DNA, 120 bp, Artificial Sequence
  ENSG00000256564_1 (sequence is synthesized)
agtagagaactgcggggagctgaaagaaggtcatcgtgggatgatgttagaggcctgtcaaaaaaacctgtcagctgcaaaggcgataaggggggcagttaaaagaagatactggagcct

SEQ ID NO: 894131 - DNA, 120 bp, Artificial Sequence
  ENSG00000256564_2 (sequence is synthesized)
gcttcttaatgtgccaagaatcaatcccatgaaagcaaacaacttgaaaaagggttatacgtatttaggaaatctctgaggctcccttcctgctctgctcgagctggagcgagtgctcaa

SEQ ID NO: 894132 - DNA, 120 bp, Artificial Sequence
  ENSG00000256564_3 (sequence is synthesized)
gttttctcaccctaatgacccctgaagcagccctgagggattgcaaaacaaggccgttacacaaggcagcttgctaattgagaagttgatcgggggtagagaaatcctgctttaccacgt

SEQ ID NO: 894133 - DNA, 120 bp, Artificial Sequence
  ENSG00000256564_4 (sequence is synthesized)
taagtgtcgaaatcaagcatgactagattgacgtcgccaaatcaccgtctggaggccactccacgccaggagcagcagggcttttcacacctgataggccctcactctatctacatcaag

SEQ ID NO: 894134 - DNA, 120 bp, Artificial Sequence
  ENSG00000256560_0 (sequence is synthesized)
aaattgtgcggttaacggtcaaagcccccctgcctactttgacactcatttaaagatgacagggaacaatagagatttgttctgtgcaaccctttcttgttatgccggcgacatcagctc

SEQ ID NO: 894135 - DNA, 120 bp, Artificial Sequence
  ENSG00000256560_1 (sequence is synthesized)
cgcacatgaaactgcccgatatttcattccacctgccacctccctcccgcctcggtcgactctctcctctgctactttgcttgtccccactttaacacaaagagacagctctgtgttcac

SEQ ID NO: 894136 - DNA, 60 bp, Artificial Sequence
  ENSG00000256560_2 (sequence is synthesized)
tcctggctcactaaacacgaaccagaaattaatgctgcaaagagcagagacaagagattc

SEQ ID NO: 894137 - DNA, 120 bp, Artificial Sequence
  ENSG00000256560_3 (sequence is synthesized)
cttcaggctgggatttttatagcttattatggcaagggaggagacggagagtaaaagaagaaggaagagcatacacagtcaccccttgtgtgacaaatatgcaagaaataaagataaatg

SEQ ID NO: 894138 - DNA, 120 bp, Artificial Sequence
  ENSG00000256560_4 (sequence is synthesized)
tgtacaattcttacaattttacttttctgaattttgctattgcactgaatgatttgtgataagacagatggggatgaaaaatatacttattaaataaacagctattaaaagcccctaaaa

SEQ ID NO: 894139 - DNA, 120 bp, Artificial Sequence
  ENSG00000256568_0 (sequence is synthesized)
acttgatctcttgattcattcagccagttctttctgtgctttccgtggtccagcgtgatttctgaaagataacatctcagaagtggaatacaaggtggctaacaaatttttccagcaaca

SEQ ID NO: 894140 - DNA, 120 bp, Artificial Sequence
  ENSG00000256568_1 (sequence is synthesized)
cagagctgagaggattgggatctcagagaagaaggagccctgcattcttggcttcatctgcctggagtggagtttccatcatgctgagctggaggtgcacggggccagggaatgagcaag

SEQ ID NO: 894141 - DNA, 120 bp, Artificial Sequence
  ENSG00000256568_2 (sequence is synthesized)
taggttttcttgaataaatgtttcttcatctgctgtatgcccttaggacaattcccaggaacatacatctatattgatatcaatataaatataaatagataattatgtatgtataacttt

SEQ ID NO: 894142 - DNA, 120 bp, Artificial Sequence
  ENSG00000256568_3 (sequence is synthesized)
agcagttttacttgttctgctggaaagaaggtctggaaggtttgcagagctgctcatgccaccattccagaagttatccaccagttcattgctttttgcacagtagtattccattgcatg

SEQ ID NO: 894143 - DNA, 120 bp, Artificial Sequence
  ENSG00000256568_4 (sequence is synthesized)
tctatgccacaatttgtttatccattcacctgttgatggacatttgagctgtttcctgtttgaggctattacaaataaagctgctttacaaataaagctgctttgaacatttgtgtataa

SEQ ID NO: 894144 - DNA, 120 bp, Artificial Sequence
  ENSG00000256569_0 (sequence is synthesized)
actgtgaaaatctttcttttattactgtctcatgtggcaaaataacattttatacaaataatagaaactgtcccacctgggcctctgtcaaagagagaagggattgttgttacgcttgac

SEQ ID NO: 894145 - DNA, 120 bp, Artificial Sequence
  ENSG00000256569_1 (sequence is synthesized)
aggaacatgcaaatcccatttgaggagccacaatgagaaacagaaggtgaggagacagtgctaacagccctggcatctttctgccagtgaggaggtgggaacaatggcaatgcagctttc

SEQ ID NO: 894146 - DNA, 120 bp, Artificial Sequence
  ENSG00000256569_2 (sequence is synthesized)
acccactccacaggaggaatggtctctcccctctctcggggctgaatccaaggccagcacacaggggtaagctaggaccttctcagtgagaaagctgccagcatgtggcattgccaagac

SEQ ID NO: 894147 - DNA, 120 bp, Artificial Sequence
  ENSG00000256569_3 (sequence is synthesized)
tctggcctgggacaaagcactgggccaaggttcggggccactcgccctaaagcccacacagggagcagcactggtggtggatggacaggaatttctgtggccacacactgtctcttccat

SEQ ID NO: 894148 - DNA, 120 bp, Artificial Sequence
  ENSG00000229986_0 (sequence is synthesized)
tctctattttcagacttgggcaaactctactcctcaatttgtggaaaaatctcagtattgatctatgcatgaccagtgcaaaggcttttatatggaccaaccccagtcagaaagcaggca

SEQ ID NO: 894149 - DNA, 120 bp, Artificial Sequence
  ENSG00000229986_1 (sequence is synthesized)
cttggaaacctcgtgtctgtgaagaacaaggggtggaacctctgaaatcctcccctttgagatttcccatgcattcacacatccttctgtgtgccttgaaaatgtaagaaacagatgtgg

SEQ ID NO: 894150 - DNA, 120 bp, Artificial Sequence
  ENSG00000229986_2 (sequence is synthesized)
gcagccagaagactccggcacaggccctgcaacctatctgctcacatcctgcttgggagacatgtcagcgataaactccaggagtagtcacgagggctgacaggggttcctgcccggctc

SEQ ID NO: 894151 - DNA, 120 bp, Artificial Sequence
  ENSG00000229986_3 (sequence is synthesized)
tgcatccaacagcctggtggagcctaggctaagtctacaaaaatacggagctcagagctcctacctagatttctttgctttattcaggcagaattgacaaattaaaaggtatgtatttaa

SEQ ID NO: 894152 - DNA, 120 bp, Artificial Sequence
  ENSG00000229980_0 (sequence is synthesized)
tcggatccgtttattccaaatgtcccagcccacgccgtgcccagagtgtggcgacacgaggccaaactgcccacctactgaaaatctgtctgtgtgccgagcacgcgctccccatccctc

SEQ ID NO: 894153 - DNA, 79 bp, Artificial Sequence
  ENSG00000229980_1 (sequence is synthesized)
aaaatctgtctgtgtgccgagcacgcgctccccatccctctaccaaatgcctggctggcgcgtcatccctggctttgat

SEQ ID NO: 894154 - DNA, 120 bp, Artificial Sequence
  ENSG00000229980_2 (sequence is synthesized)
ccaggactctgacacccccaatggcccttgtagccttggggagtcctgtgatccaaggctggaggactgagtcccctccaggtctcatagcagacgaatagcagcttcacccaggcctgt

SEQ ID NO: 894155 - DNA, 120 bp, Artificial Sequence
  ENSG00000229980_3 (sequence is synthesized)
tttgtcgtggccccattcagaggccgccctcctctgtggtttagagcatgccctggaatccctagcacaaccaggggttacctcctgctggctgaccccttcctgtgctgcgggctggaa

SEQ ID NO: 894156 - DNA, 120 bp, Artificial Sequence
  ENSG00000229980_4 (sequence is synthesized)
tatagggtttaaccctgttataacccagaggaacacaaaaggaggaacatcaggctttatggagagactggaaatgaagtggaggttttccttgctcatgaaacctggctcaccctacag

SEQ ID NO: 894157 - DNA, 120 bp, Artificial Sequence
  ENSG00000229980_5 (sequence is synthesized)
gtgggggcagacgtgccaatgagagagaaaggggtggggtagggcggctgacgcccggtttaggcggagagcgccgggcagagggggagggggacgaagctggtggcgaagcggctcagg

SEQ ID NO: 894158 - DNA, 120 bp, Artificial Sequence
  ENSG00000229980_6 (sequence is synthesized)
agaaccggggctggaggagcggcaagagtacccagaaagtgccctctccgcgggggtctgcggccaaggaggatcctgctcgtggaatagctaccaaatcggcctccagcccaccccagg

SEQ ID NO: 894159 - DNA, 120 bp, Artificial Sequence
  ENSG00000229980_7 (sequence is synthesized)
ggcggggtagagaaagggcaaactgtgaccgggacttgtgcacccgattaattgaatattaatcaccccaaggcctaggccaaccgccacccagagagtggcagctgcagaacccaaaga

SEQ ID NO: 894160 - DNA, 120 bp, Artificial Sequence
  ENSG00000229980_8 (sequence is synthesized)
cgtggagccgggctgggggtggggaagggaggccgccacagctcccgccccgccggcagtttaactgcttccgcagcctcaggcctcccggtgcgaccccggctgcgactcggatccgtt

SEQ ID NO: 894161 - DNA, 120 bp, Artificial Sequence
  ENSG00000229980_9 (sequence is synthesized)
tattccaaatgtcccagcccacgccgtgcccagagtgtggcgacacgaggccaaactgcgtagcaacgacgcctgattggctgcgctggtcccttcgcaacgaggcgattggctgcctgg

SEQ ID NO: 894162 - DNA, 120 bp, Artificial Sequence
  ENSG00000229980_10 (sequence is synthesized)
ggaaaaggggaaagtctggggggagcgaaggaggggacggggagaaagaagcaatgaatgaaacgcccatcgcctggccttcccctttcccctttcccctctcctctccattcttggagc

SEQ ID NO: 894163 - DNA, 120 bp, Artificial Sequence
  ENSG00000229980_11 (sequence is synthesized)
acttcctggaaaaacaccagttggggcgccgccttcccctccaaacgttggggcctgcactctcaacctgctataaggaagttaaaccgcagctcaccgaggagtagggtgtctacgggg

SEQ ID NO: 894164 - DNA, 120 bp, Artificial Sequence
  ENSG00000229980_12 (sequence is synthesized)
cgggcccgtgtagaccagctgtgctcctcgggcacaaacccgccgtacatgccaggcctagaagcttttggctttgtggacgcaaaatctggttggagccgccttctccaccctgactct

SEQ ID NO: 894165 - DNA, 120 bp, Artificial Sequence
  ENSG00000229980_13 (sequence is synthesized)
cccgcctctcctttttagaaggaaccgcactgagaaagggtatttctgaaggctcaatgcgtaggagaaggggtgggaagatgggtttgtggaatgggctgagggtggggagtggtcagg

SEQ ID NO: 894166 - DNA, 120 bp, Artificial Sequence
  ENSG00000229980_14 (sequence is synthesized)
tgactgatttcatgtttattgtacagattcctaaaacatagttttactaagtgactccttaaattctgattaatgtgatttttttttttttttgagtgtttgggttttttagttgcaaac

SEQ ID NO: 894167 - DNA, 120 bp, Artificial Sequence
  ENSG00000229980_15 (sequence is synthesized)
aggagtggaattgaaatgtgaaagtatggcaaaactgtgaaagcatttaaattaaaatgtcccttcctctgcattgaaatgtcatcaaagcgtcaaatataaatgatttgttcagttttc

SEQ ID NO: 894168 - DNA, 120 bp, Artificial Sequence
  ENSG00000229980_16 (sequence is synthesized)
cataacctttctttgtcctctgctggtgacggcaaatagggcaggcccagggcaacgtggtaaggtggcagaagtttgttttggacagtgtttgcagcttctctgttccctttccaccag

SEQ ID NO: 894169 - DNA, 120 bp, Artificial Sequence
  ENSG00000229980_17 (sequence is synthesized)
tctctcactgctttccctcccctgatcagagtccctgtgccaaggctcctggatactggggctggaaaacctcctgtcccttccaccactcctgtgccctccagggaaggggtctggggt

SEQ ID NO: 894170 - DNA, 120 bp, Artificial Sequence
  ENSG00000229980_18 (sequence is synthesized)
ctcggggctcacccccacctgtgtgccagtccctgtgctaggcctgcacagacatcagctcgctgatcactacgagaacctcaactcttctccccatttcatgaggacaccgaggctcag

SEQ ID NO: 894171 - DNA, 120 bp, Artificial Sequence
  ENSG00000229980_19 (sequence is synthesized)
aggtgttcgtgatactcaagatcacactgccagagcgtgagttactgggatttgaactttggtccgtgtggctgcaaagccagtggctgctatgattctctttccacttgctgcagccca

SEQ ID NO: 894172 - DNA, 120 bp, Artificial Sequence
  ENSG00000229980_20 (sequence is synthesized)
cgtccctctgggcaagtctgacaccctagctgccctcaactgcctggccccgtggcgtcccagagggcgaggggagcacagggactgggcacagaggccagctggggtcaaggcaagggg

SEQ ID NO: 894173 - DNA, 120 bp, Artificial Sequence
  ENSG00000229980_21 (sequence is synthesized)
gctgcccagcacagtggttctgctccagaggtgcagtcagactgcctgggttggctcatgcctgggtctgtcattgtgggcagcgtgaccagcctaaacctcagttttctcttttgtcac

SEQ ID NO: 894174 - DNA, 120 bp, Artificial Sequence
  ENSG00000229980_22 (sequence is synthesized)
ctatgtgctaaaaatacttatttctggagattcttgtgaggattaaatgagatcttccaagccaagtgctttgcatagtgacgcagggtaggtgctcaagaaattttgttgtctgcctgt

SEQ ID NO: 894175 - DNA, 120 bp, Artificial Sequence
  ENSG00000229980_23 (sequence is synthesized)
ggtctgggtgggggcagggtggggctgcgatggtgaagaaatgacacagaaacccacaggaaacttcatcatctagatggtacatggatggcacattcaagggaagtaacgaaacgagaa

SEQ ID NO: 894176 - DNA, 120 bp, Artificial Sequence
  ENSG00000229980_24 (sequence is synthesized)
gaaaaaacttttacattttggctgagcaaaggcaacaatataattaccatcatttataaaaactgcctcccattaatgtctaattcccacaaagcgcaacaatgattatctcattaacta

SEQ ID NO: 894177 - DNA, 120 bp, Artificial Sequence
  ENSG00000229980_25 (sequence is synthesized)
acgattagccccatttcacagatgaggaaactcaggctcaaaggaaattgattgcttgccctgggtcccactgctggaaggaggcagagttgaaacttgaccccaagtgcggctgattct

SEQ ID NO: 894178 - DNA, 120 bp, Artificial Sequence
  ENSG00000229981_0 (sequence is synthesized)
ggctgaaagcaatgatgttgccattcatcctttcacgtattcattatggtctacagctgagaagggctatttggggtttgctttgcctgatggtagcagaagaaaaccaagaggcctctc

SEQ ID NO: 894179 - DNA, 120 bp, Artificial Sequence
  ENSG00000229981_1 (sequence is synthesized)
tacgaaagcttgcagtaaggagaaagttctggagactgggaagagcaacacaaagatattcagttgcttggtgagagctgctctctgcttccaaggcggcaccttgttgctgcattctcc

SEQ ID NO: 894180 - DNA, 120 bp, Artificial Sequence
  ENSG00000229981_2 (sequence is synthesized)
caacaccaaatctgccagtgccttgatattggacttcccaggctccagaaccgtgagaaacaaatttctctcacttacacattacccttttggaggcattttgttacagctgtacacatg

SEQ ID NO: 894181 - DNA, 120 bp, Artificial Sequence
  ENSG00000229981_3 (sequence is synthesized)
gactaagacagaactacaactacaattaagtatcagacagttccattttcaatgtcttgattttctaaagtatctacaagcatcttgagatacatagatgaggtttgggaattagtaaga

SEQ ID NO: 894182 - DNA, 120 bp, Artificial Sequence
  ENSG00000229981_4 (sequence is synthesized)
aggataggcagagatctgggaacctgatgtgggaagaaatctcatctgtgaccacgattttgtcaggagtcacgggattctatagctgcagcaaacctggagcaaactggtccccaccaa

SEQ ID NO: 894183 - DNA, 120 bp, Artificial Sequence
  ENSG00000229981_5 (sequence is synthesized)
aggaacgctgggtcctcacatgacagaaggtggaaagggtgggtcctaatccactgtaacagctgtccttatatgaaaaagaagaagacagatacctgtgaaaggcagatcctgagaaga

SEQ ID NO: 894184 - DNA, 120 bp, Artificial Sequence
  ENSG00000229981_6 (sequence is synthesized)
cacagggagaaggcagccatccacaagccaaggaaagaaggctctaaagaaattaaccctgccaacaacttagtctctgatgtttagcctccagactagtgacagaataaatttctattg

SEQ ID NO: 894185 - DNA, 120 bp, Artificial Sequence
  ENSG00000229981_7 (sequence is synthesized)
aatgggaaggaacgctgggtcctcacatgacagaaggtggaaagattcctggacctgatagaagactcattgaaaaagaaggtctggagttggggcctaggaagctgctttttgaacaag

SEQ ID NO: 894186 - DNA, 120 bp, Artificial Sequence
  ENSG00000229981_8 (sequence is synthesized)
tgtcaagatgaataagatgaagcaagaattccattgctttatcctgctgcattttggttttgttttctaagttaattattcacaggatgtagcattttgttttgtttctccatggcagag

SEQ ID NO: 894187 - DNA, 120 bp, Artificial Sequence
  ENSG00000229981_9 (sequence is synthesized)
gatgaagacacagtataaatcaatgccctgtgcttatctaggattacacagggagagacctctgaagttgattggagatgtttgggagaaagagagattttttacaaggaaaagtgtaaa

SEQ ID NO: 894188 - DNA, 120 bp, Artificial Sequence
  ENSG00000229981_10 (sequence is synthesized)
ggactgcttagctaatactaaaaaagcttcaatggtgccaaggaatacaaattaagaactcacatggagaaggccaataggatgtccttgtttattgaagagtaataaatatttttaaaa

SEQ ID NO: 894189 - DNA, 120 bp, Artificial Sequence
  ENSG00000229981_11 (sequence is synthesized)
ggaacgctgggtcctcacatgacagaaggtggaaaggggttgtaaaacagaaccacggccaggtgcggtgggtcacgcctgtagtctgagaactttgggaggccgaggcagatggatcac

SEQ ID NO: 894190 - DNA, 120 bp, Artificial Sequence
  ENSG00000229981_12 (sequence is synthesized)
taaaggtggatatagtcgaagggaaatatgcaccagacacaggtaaacagtcggtgaatagacaagaggaccagggtgacaagctgcaaagctggaggaaatttaactgagcacgtgcgg

SEQ ID NO: 894191 - DNA, 120 bp, Artificial Sequence
  ENSG00000229981_13 (sequence is synthesized)
ccattaagacatccttctgtgcgctaatcaaatcattcgtttggattacaacagttccaggtgaagacaatgttggcaaaaggcttccaacccctccaactttctgacctgaagaatgaa

SEQ ID NO: 894192 - DNA, 120 bp, Artificial Sequence
  ENSG00000229981_14 (sequence is synthesized)
attaacaagcagaaaccatttccttaaaaccttgctacctcaagcgggagctatgcgtcagcagattacaacagttccaggtgaagacaatgttggcaaaaggcttccaacccctccaac

SEQ ID NO: 894193 - DNA, 120 bp, Artificial Sequence
  ENSG00000229981_15 (sequence is synthesized)
tttctgacctgaagaatgaaagcattctgtctctgggatcctaagatcagaaatgttggaggagcttcaatgagtgagaaactgtgttacctgcaaaagataaaagcaaaacagaatgca

SEQ ID NO: 894194 - DNA, 120 bp, Artificial Sequence
  ENSG00000229981_16 (sequence is synthesized)
aggtggtagattctgaaggatctggaccaagataggattagtgaatatctcaagaacaatcaagaatgtaagaaaatatcattgtctgttaagaccccatcgcagagaagttaaagagct

SEQ ID NO: 894195 - DNA, 120 bp, Artificial Sequence
  ENSG00000229981_17 (sequence is synthesized)
aatgggaaggaacgctgggtcctcacatgacagaaggtggaaagggttcttttcctactggggctcttagaggatgctgagtaaaactggaatcgagcaggagttttaacagcaagggga

SEQ ID NO: 894196 - DNA, 120 bp, Artificial Sequence
  ENSG00000229981_18 (sequence is synthesized)
tgtattcctcctcaagtctaccaaagaaagacttgattctgagaaatctccccagaaaattgtcagcttcccagactgcttccacatgacctgtgacagatgtaattgggcatgggcgac

SEQ ID NO: 894197 - DNA, 120 bp, Artificial Sequence
  ENSG00000229981_19 (sequence is synthesized)
gcgatgccacagtgtgactttttgcatcttcagaaagatacacataaacaggaagtcctgggaagagaagatgttagctgtgtctttctaccacccagaggcttcacctctatcatgctt

SEQ ID NO: 894198 - DNA, 120 bp, Artificial Sequence
  ENSG00000229981_20 (sequence is synthesized)
ctaaaataaaataccaggttgatgttctgaccatgggccataaaccagggttaaggaagcccaaggagactggtcttcttctcaaggcatcctctcttctttgttaaggacactccacag

SEQ ID NO: 894199 - DNA, 120 bp, Artificial Sequence
  ENSG00000229981_21 (sequence is synthesized)
gtcttatgcccatgtctggaactggagtgggatcggccacattgaaagaacacagcctgagggcagggaagctattgagccccagagagaagttaaagtacttttcatgaaagatcattg

SEQ ID NO: 894200 - DNA, 120 bp, Artificial Sequence
  ENSG00000229981_22 (sequence is synthesized)
atgacagaaggtggaaagggcatgggcgacgcgatgccacagtgtgactttttgcatcttcagaaaggattcccaagattgagggttaagcagtgtcttccttcccaaggcttctgctgg

SEQ ID NO: 894201 - DNA, 120 bp, Artificial Sequence
  ENSG00000229981_23 (sequence is synthesized)
aatgggaaggaacgctgggtcctcacatgacagaaggtggaaagcttcttgccctcgaaagaaacagggaggaagtggtcatgtatgtccatcctgcccacacaaataaaagtacagaag

SEQ ID NO: 894202 - DNA, 120 bp, Artificial Sequence
  ENSG00000229981_24 (sequence is synthesized)
acatccagatacattcacgatatgctctgaacattgatgatcaggccccgtgttactaggaaaaaccctcagccagagaagcagagagacacagagcttagaaactgtcagtattccatg

SEQ ID NO: 894203 - DNA, 120 bp, Artificial Sequence
  ENSG00000229981_25 (sequence is synthesized)
aacttccctattcctgtggagatcttactagtaagcggaaagataaagaagctgagcatggaaatgtgtactacagagggtgtgaaagagatcaccctttattaaatgtctactacagaa

SEQ ID NO: 894204 - DNA, 120 bp, Artificial Sequence
  ENSG00000229981_26 (sequence is synthesized)
gacttgaggctttgcctcctgatctcaccttcaagaatgagtgaataatttgtgtacattttcttgcttttcttttcctttcttcaattaccattgccactagtaccaataaaagccgaa

SEQ ID NO: 894205 - DNA, 120 bp, Artificial Sequence
  ENSG00000229981_27 (sequence is synthesized)
catgttctggagactgggaagagcaacacaaagatattcagttgcttggtgagagctgctctctgcttccaaggcggcaccttgttgctgcattctccaatgggaaggaacgctgggtcc

SEQ ID NO: 894206 - DNA, 120 bp, Artificial Sequence
  ENSG00000229981_28 (sequence is synthesized)
gggcttaagtcttatgcccatgtctggaactggagtgggatcggccacattgaaagaacacagcctgagggcagggaagctattgagccccagagagaagttaaagtacttttcatgaaa

SEQ ID NO: 894207 - DNA, 120 bp, Artificial Sequence
  ENSG00000229981_29 (sequence is synthesized)
ggattggttacttgcactacagcaaatttacaaccagcaaaatagactagaaacaagctacttgttgatgaagagtgacaacatgagaagtgacaaatgaagcaattgatttcaggaaaa

SEQ ID NO: 894208 - DNA, 120 bp, Artificial Sequence
  ENSG00000229981_30 (sequence is synthesized)
aaagaagacacatagatagcaaaaaggcatagatcaaatagcaaaaaggcaccgagtattaaaatgaaattaatactcaccattttaaatgaagcgcccacataaataaggatgagtaga

SEQ ID NO: 894209 - DNA, 120 bp, Artificial Sequence
  ENSG00000229981_31 (sequence is synthesized)
ttagaaggacaatctaggatgtaatgaagttattccgagagttagcacctctgtatgctcaggatctctgtccagtgaatcccttgccattctaatgacagttccattttcaatgtcttg

SEQ ID NO: 894210 - DNA, 120 bp, Artificial Sequence
  ENSG00000229981_32 (sequence is synthesized)
tctaatgcagagatctgggaacctgatgtgggaagaaatctcatctgtgaccacgattttgtcaggagtcacgggattctatagctgcagcaaacctggagcaaactggtccccaccaat

SEQ ID NO: 894211 - DNA, 120 bp, Artificial Sequence
  ENSG00000229981_33 (sequence is synthesized)
ctgggaaagaggctgaatatgtaattgcactcctttggggaagcacattctgaattctgccagcaggaagctcctctcttcaatagatcttgatgaaagattccatcacaaatcccatta

SEQ ID NO: 894212 - DNA, 120 bp, Artificial Sequence
  ENSG00000229981_34 (sequence is synthesized)
cttcaaccaggcaattatctctcaagaaccaaaggaggaatcctctttttttttcccccttttcttggtgtgtgtgagcatgtatgtgatctttttctacaatacatagtatttcaacca

SEQ ID NO: 894213 - DNA, 120 bp, Artificial Sequence
  ENSG00000229981_35 (sequence is synthesized)
aatgggaaggaacgctgggtcctcacatgacagaaggtggaaagcggcagctgcaagcaggcaaatgttggtaatggaagcttcatcttatgaaagaaaagataatattgactctgagaa

SEQ ID NO: 894214 - DNA, 120 bp, Artificial Sequence
  ENSG00000229981_36 (sequence is synthesized)
agcactttgggaggctgagatgacagaaatgaagtctttaatggtgtggagcctacactaggaccatctggactgggatttgcaagtccacctcctactatgagagagtcagaatgtaac

SEQ ID NO: 894215 - DNA, 120 bp, Artificial Sequence
  ENSG00000229981_37 (sequence is synthesized)
tgctgttacagagagttcagagccttgatgaatttggagttagatagacctttgttcaaatctgagctctactaattaatagctgtgcattctcggataagtctgttaacttctttgagg

SEQ ID NO: 894216 - DNA, 120 bp, Artificial Sequence
  ENSG00000229981_38 (sequence is synthesized)
caaggactaagagtgcaaggggaaactttgtggaaggaatagatgtggaagacctaaaatatggaagagagtttaccaagatattgatactctaagcctgcatttgataacatttagatg

SEQ ID NO: 894217 - DNA, 120 bp, Artificial Sequence
  ENSG00000229981_39 (sequence is synthesized)
tcttatgcccatgtctggaactggagtgggatcggccacattgaaagaacacagcctgagggcagggaagctattgagccccagagagaagttaaagtacttttcatgaaagtgaagaac

SEQ ID NO: 894218 - DNA, 120 bp, Artificial Sequence
  ENSG00000229981_40 (sequence is synthesized)
tcactgctatattcagtgccaagtaaaccatcaaaccattcccataaaccatgctcacatggttctgctgcctcagaggcggctagttccaggaatatcaaaagaaactacatcctttaa

SEQ ID NO: 894219 - DNA, 120 bp, Artificial Sequence
  ENSG00000229981_41 (sequence is synthesized)
ccgtttggcgcaagaatgggaggcaactaaaaccaaccagatatactcggagaccaggactttatttctctgaatcttaatttcccattctaagaggaaagaattagacacgactgacct

SEQ ID NO: 894220 - DNA, 120 bp, Artificial Sequence
  ENSG00000229981_42 (sequence is synthesized)
tcacctgcaggatcatcggtcttcatctcctagaccaaccttgcacagaaggcctcagtattcctacgcttgcttgctgaattttatgatgtagcaggttgatagtggaactatttctgc

SEQ ID NO: 894221 - DNA, 120 bp, Artificial Sequence
  ENSG00000229981_43 (sequence is synthesized)
aattgggacagcacatcacgagcccgaaaggctttgttcagaggcaggagagaggcttgaagactagaatgaggaggaaggttggtctgaagctcccttcaagagaacaatccatttata

SEQ ID NO: 894222 - DNA, 120 bp, Artificial Sequence
  ENSG00000229981_44 (sequence is synthesized)
tctctccaactgtgaggctgagagctcccactctgtaagctgaaacaccaggaaagctgatggtataattcattccaagtctaaaggcctgagaattggcagggatactggagccttcaa

SEQ ID NO: 894223 - DNA, 120 bp, Artificial Sequence
  ENSG00000229981_45 (sequence is synthesized)
cttcttcactcagtctatcaattcaaatgttaatctctgccagaaaagccatcacagatacacccagaaatcattgtctgttaagaccccatcgcagagaagttaaagagcttcaatcac

SEQ ID NO: 894224 - DNA, 120 bp, Artificial Sequence
  ENSG00000229981_46 (sequence is synthesized)
tccagccactctagttgggatacattgtattcctcctcaagtctaccaaagaaagtaagtgcttgcttccatgttatccgaatatccataaataaattctgcaataaattcagaattaaa

SEQ ID NO: 894225 - DNA, 120 bp, Artificial Sequence
  ENSG00000229981_47 (sequence is synthesized)
gaagttattccgagagttagcacctctgtatgctcaggatctctgtccagtgaatcccttgccattctaatgattcccaagattgagggttaagcagtgtcttccttcccaaggcttctg

SEQ ID NO: 894226 - DNA, 120 bp, Artificial Sequence
  ENSG00000229981_48 (sequence is synthesized)
ctggatgagcatttggatttgctaattatgaataaaactgctgtgaacatgctggtatatatctttgaatgagcaaatgcaactatttccattagtattttcccattagtgtgattgttg

SEQ ID NO: 894227 - DNA, 120 bp, Artificial Sequence
  ENSG00000229981_49 (sequence is synthesized)
gatcatagaatatgatgtataaaatactatgttaagagacagtgtcaaatggtttttcacataagttaaattgtatgtctaccaccattaagtgagaattaaaactgttctatttcatca

SEQ ID NO: 894228 - DNA, 120 bp, Artificial Sequence
  ENSG00000229981_50 (sequence is synthesized)
aatgggaaggaacgctgggtcctcacatgacagaaggtggaaaggtaagtgcactgaatgctgcgtgaagcctcttttgtaatcccattcttgtgtcctcatgacccaatcaccccttaa

SEQ ID NO: 894229 - DNA, 120 bp, Artificial Sequence
  ENSG00000229981_51 (sequence is synthesized)
ttactagcttggtgcaaaagtaactgtggtttttaccattgaaagtatcacagatgataaattcctcttcaaaaagctttagtttcctgttctttgtttttcaagaccaacttctttgta

SEQ ID NO: 894230 - DNA, 120 bp, Artificial Sequence
  ENSG00000229981_52 (sequence is synthesized)
cttccttgtctcctaactacctgttaaacaacacttctcgcctttgctgtgcccagacaagtccagacatgccttcccgcccagtaacgggcagcctctaccttcccacctaattgaccc

SEQ ID NO: 894231 - DNA, 120 bp, Artificial Sequence
  ENSG00000229981_53 (sequence is synthesized)
tattcaattttaaaccttagccaatcaggttagcttagattgtgcagtccaaccccagtcaatggggaaaagacacagcagtaagaaccaattgcgttacaaataaaaacccctgcccca

SEQ ID NO: 894232 - DNA, 120 bp, Artificial Sequence
  ENSG00000229981_54 (sequence is synthesized)
gaaggtggaaagttggctccaatttggctcctgtccacttctctaccgaagagctctctttaaaattattcatgatctctctgtaactaaatgaaataaatatttttaccctttctctta

SEQ ID NO: 894233 - DNA, 120 bp, Artificial Sequence
  ENSG00000229981_55 (sequence is synthesized)
gacactgtcctgtgtaccattgatgtgtcctctctccctctacattcactggtttaaggtattacaacaaaataaaggtggatatagtcgaagggaaatatgcaccagacacagattaca

SEQ ID NO: 894234 - DNA, 120 bp, Artificial Sequence
  ENSG00000229983_0 (sequence is synthesized)
ggttcatgccattctcctgcctcagtctcacgagtaactgggattacagtcatatgagaaaacggtctgaactttgatcttcattgggattcagatatcagagagtggcgctgaaggagg

SEQ ID NO: 894235 - DNA, 120 bp, Artificial Sequence
  ENSG00000229983_1 (sequence is synthesized)
caaagaaggcctagaaagaggtttattctcaagtgaggagcacctctgcccagccgccccaccatctgggaagtgtggagcgcctctgcctggagcccagctgtctggaaagtgaggagc

SEQ ID NO: 894236 - DNA, 120 bp, Artificial Sequence
  ENSG00000229983_2 (sequence is synthesized)
cctggagcccagctgtctggaaagtgaggagctcctctgcccggtcgccaacctgtctgggaagtgaggagcgactctccttggtcgccacaatgtctgggaagtgaggagtgtctctgc

SEQ ID NO: 894237 - DNA, 120 bp, Artificial Sequence
  ENSG00000229989_0 (sequence is synthesized)
agtacagcttccacaggagcaagggatgtctgagcacaagtggctgagttccgagtgactttatgaagcactttctaccttcctctccggcatgaaaacagggattctgcacctgcatca

SEQ ID NO: 894238 - DNA, 120 bp, Artificial Sequence
  ENSG00000229989_1 (sequence is synthesized)
tggacagtctggcaaaagcctctgctctgcctccggggacaagaaactagagcaaataaccgttttgaaattagatcctggcaaaattaccaacaatcaatgatggaaactgaagggaga

SEQ ID NO: 894239 - DNA, 120 bp, Artificial Sequence
  ENSG00000229989_2 (sequence is synthesized)
ttgatttaaatcttcaatgacagttgtacagaagttgaagaaacacgtcatctttccaaagaagagtgagtagcttggttggtggtaccctaaaattagggcatgattaagttatttatt

SEQ ID NO: 894240 - DNA, 120 bp, Artificial Sequence
  ENSG00000229989_3 (sequence is synthesized)
actcacagttctgtagttttaaccagaacaaagggattacccagaagaaaagaaggtaagctatttcatcagttttggtggaaatcagaagtttttttttctattattagctttgtattc

SEQ ID NO: 894241 - DNA, 120 bp, Artificial Sequence
  ENSG00000229989_4 (sequence is synthesized)
ggaaatgcattatcaataaacagctagatcctattattggagacaatcagttttattctgcagaaaatatagtttgttcttgaagatttaatagatataatattttttaaaccaacatat

SEQ ID NO: 894242 - DNA, 120 bp, Artificial Sequence
  ENSG00000229989_5 (sequence is synthesized)
taaatataccagtaaatatttttgttaaacaaggcttttaaaatttaaattatacccctaaactggctttctagtttttctggagaaataaagaaattttaaaggaaatatccactcaga

SEQ ID NO: 894243 - DNA, 120 bp, Artificial Sequence
  ENSG00000229989_6 (sequence is synthesized)
ttaatactgcaaatatcatacaaaaatgtgtgtggtgatattactgaaaatgaggatttttgaaaactagaagagcaaaaagtcgttgctccaaaaggcttcaagactgccttaggatta

SEQ ID NO: 894244 - DNA, 120 bp, Artificial Sequence
  ENSG00000229989_7 (sequence is synthesized)
acaatgcaagtcttcaatgtatttaggtaatcataatttgattagctttctaaacctaaacatattttgattcaaatgtttaaaatatggtcatctcttcagttaaagatgaacattttg

SEQ ID NO: 894245 - DNA, 120 bp, Artificial Sequence
  ENSG00000229989_8 (sequence is synthesized)
atgaaataacaatacttaaagcgttctccgtctccacaattaagtgctacctgttatttattcagagcatatgtttcagtctcaaaacaccaaggacacatctcagtgaaataaaaataa

SEQ ID NO: 894246 - DNA, 120 bp, Artificial Sequence
  ENSG00000229989_9 (sequence is synthesized)
aaggtacgtcatttcttttagttcaatcaaagtgctttgctgtttccatttcagagaatttcttattctttttttcaatttctctctcttcctcttcttcctctcattagtagatgtctt

SEQ ID NO: 894247 - DNA, 120 bp, Artificial Sequence
  ENSG00000229989_10 (sequence is synthesized)
ttataattgatgtcatttactgtcctttcatcaaatgtatgccacatcacttaggcgaaccagcagacagggcaccaaaatacacattagaggagactggcttccatgagacgcttcgac

SEQ ID NO: 894248 - DNA, 120 bp, Artificial Sequence
  ENSG00000229989_11 (sequence is synthesized)
tgtctcatcggggcacttgtaataagcatcttggtgccactgaatgcaatgctgtattcaaataatagctttcatcttcactctttttaaatataaaagtaaaccttgaagccctttgaa

SEQ ID NO: 894249 - DNA, 120 bp, Artificial Sequence
  ENSG00000229989_12 (sequence is synthesized)
ggacctaaccaaacaacatacctatgaaaatagatcagtaaggctttgagaaacattcttaagtaaaatctgtaaagcatctttgcattttttttcaagaaagacctccaggtaaatgat

SEQ ID NO: 894250 - DNA, 120 bp, Artificial Sequence
  ENSG00000229989_13 (sequence is synthesized)
ggcttttaataagacacatgacaatctcaattacaagaatcattagtgtgtgtcctgtgcgccattttatgttcccagcaggatatatcttttctcgtctagggtttccagggctgtcta

SEQ ID NO: 894251 - DNA, 120 bp, Artificial Sequence
  ENSG00000229989_14 (sequence is synthesized)
ctgttctctatgtgtaaaacgtatttaagtgttcccccaatgctgcactaatgttgaaacaaaacaaaacaaaaacgaagaaacctttgtcaagtggtcagacagactggaactagagga

SEQ ID NO: 894252 - DNA, 120 bp, Artificial Sequence
  ENSG00000229989_15 (sequence is synthesized)
ttgaaagctataatttctatttatgtggtggcaaccaaatcagctgttggagtcaggcaatttaaagatgtggctactggagctcagagtctgggaagaagacacttctgcgtctgacag

SEQ ID NO: 894253 - DNA, 120 bp, Artificial Sequence
  ENSG00000229989_16 (sequence is synthesized)
tgaatcaggctcccagttttgaagatgtgctgtaggtagttctcgctgaatccatttcccagttggtttctattccccgccccattcctgtgtccccacactttccacttgattttacct

SEQ ID NO: 894254 - DNA, 120 bp, Artificial Sequence
  ENSG00000229989_17 (sequence is synthesized)
ctttgacaattctatattttactttccttcctctcattccccttttcccaccccctttttttactgtagttcttggcctctgactactgttccatgctggatgtccccagaaaatagagt

SEQ ID NO: 894255 - DNA, 120 bp, Artificial Sequence
  ENSG00000229989_18 (sequence is synthesized)
atgtttagaaaggagacagtgcatctcagaagggcctccccagtccactagtccattttttaatgtgttgtgctctatgggtgtcaggaatatttgtagatgaagtaatttgtggcatga

SEQ ID NO: 894256 - DNA, 120 bp, Artificial Sequence
  ENSG00000229989_19 (sequence is synthesized)
attttgatagaagcaggatcaccaacaaaatgataaatgtaggtacctgtctaccttgcataatattcactatgatcttgagaatttcaatgtataatttgtctttattcttatttttca

SEQ ID NO: 894257 - DNA, 120 bp, Artificial Sequence
  ENSG00000229989_20 (sequence is synthesized)
ttagaattaacagaatctcagagctggtagaaagtatagaaactgtatatacaactctcatattcagatgaagaaaatgatgcacaaaaaatcaactgtcctaagccattcagcttgtct

SEQ ID NO: 894258 - DNA, 120 bp, Artificial Sequence
  ENSG00000229989_21 (sequence is synthesized)
ataagtgctgttggcttaattatagttttgcatatatttaggcaaagaaaatactttctcagaaactggttaggactgtttgagaagaaatataatcatcaaaatatatacacagtaaaa

SEQ ID NO: 894259 - DNA, 120 bp, Artificial Sequence
  ENSG00000229989_22 (sequence is synthesized)
tgtaaccgtccatcattcaacataggcaagaatatatattgaattgcctgagtgtattattcgtatagcaaaacttacttgaatttctaataaatcttctgacctctgtatatgtataaa

SEQ ID NO: 894260 - DNA, 120 bp, Artificial Sequence
  ENSG00000229989_23 (sequence is synthesized)
cctcggagatactgagggtttggttccagtccacctcaataaagtgagttacacacaactattttggtttcctagtgcacataaaagtcatgtttatactatactgtagtctattaagtg

SEQ ID NO: 894261 - DNA, 120 bp, Artificial Sequence
  ENSG00000229989_24 (sequence is synthesized)
tgcaatagcattatatctaaaaaaagtactaccttaattaaaaatactttattgctgaaaaatgctgacatagagacttgaagtgagcacacattgttggaaaactggcaccaatagatt

SEQ ID NO: 894262 - DNA, 120 bp, Artificial Sequence
  ENSG00000229989_25 (sequence is synthesized)
tgctcgaggcagggttgccacaaactcaaatcttcagtttattaacataaatcagtatctgcaaagcacagtaaagcaacatggaatagagcaagatatacctgtattattatgctgttg

SEQ ID NO: 894263 - DNA, 120 bp, Artificial Sequence
  ENSG00000229989_26 (sequence is synthesized)
tcgatattgctatggatttgcttaatttcagatttgctgtcctaataatattagcactgaatagttgagggaaaaatttcattttctgccttactgcttataaaatatgttaataggtaa

SEQ ID NO: 894264 - DNA, 120 bp, Artificial Sequence
  ENSG00000229989_27 (sequence is synthesized)
tttcacatgggaagctggatttttaggctaatgaatgcaactctatttttgatactatgctgtgtgtttatataaaatagaggagcattttatgccaattagtggcttgcaaaccctata

SEQ ID NO: 894265 - DNA, 120 bp, Artificial Sequence
  ENSG00000229989_28 (sequence is synthesized)
ctttttccagcaaggactaagcttgaaaaacttgagaagttaatacagagaagcgttggcagtggatcatgcggttggcttgactcaaggcaacaaagctttagcataaattagttttta

SEQ ID NO: 894266 - DNA, 120 bp, Artificial Sequence
  ENSG00000229989_29 (sequence is synthesized)
tttgttaaaagaaaaacaaattctgtttgtttttataatacagtttgttggttcttttaatttgggggaaaatttggggaattccagttctcagagaagtgagaagctgagctcagcatg

SEQ ID NO: 894267 - DNA, 120 bp, Artificial Sequence
  ENSG00000229989_30 (sequence is synthesized)
agccaggccccggcttccaggccctgtgtaaacagccacatgcgtcttcctcaatacacctcggtttgaggcagcagggcgggcctgttatgcctggacctcagctgaaccaagagtccc

SEQ ID NO: 894268 - DNA, 120 bp, Artificial Sequence
  ENSG00000229989_31 (sequence is synthesized)
agccagccaatgactgctgtgtgatccacagtagattattcagaccaccaaagggagcctgtggctcttctcccaccaatctttagccctgacttttatgtagtggctgaggaaagcaaa

SEQ ID NO: 894269 - DNA, 120 bp, Artificial Sequence
  ENSG00000229989_32 (sequence is synthesized)
atttatagaatgctattactttgatggagagatgatctcatccttttcattagttttgcagataagaaaagtgaaaattggactcagaatttggcttagtcaaagcagactggtacagta

SEQ ID NO: 894270 - DNA, 120 bp, Artificial Sequence
  ENSG00000229989_33 (sequence is synthesized)
cctgacaaactcaattcccaagtcaaaggtccttgaatataaggtgtacaatcagtagactcctttttcagatgtctatgtgagaactacagtaaatgagaggtgtgtgtgtgtgtgtgt

SEQ ID NO: 894271 - DNA, 120 bp, Artificial Sequence
  ENSG00000229989_34 (sequence is synthesized)
ctaatttttgtattttttgtagagacatggttttgacatattgtccaggctggtcttttactgtcaaattgctatattttattgcttttgtttttgaatatttttgatccatgattgagt

SEQ ID NO: 894272 - DNA, 120 bp, Artificial Sequence
  ENSG00000229989_35 (sequence is synthesized)
tgtttttgaatatttttgatccatgattgagtccatgaacatggaacctgtggacatggaggcccaacaatagtacttaatgtctttctaacacagctaccttatgaactctggaaaaaa

SEQ ID NO: 894273 - DNA, 120 bp, Artificial Sequence
  ENSG00000229989_36 (sequence is synthesized)
ttgtatgccagccaaagcagtggaacaaccatattctactcactggattgtcctcaactgttcaacaatacctcccaaacttgttcctgacttccgcccaacatgcaatgactccattct

SEQ ID NO: 894274 - DNA, 120 bp, Artificial Sequence
  ENSG00000229989_37 (sequence is synthesized)
cattgtgctcttacctgtttcacttagttggattatttctgttcaaaaatatgtttgatttttaaaactcaggctttcacagcttttaaaagttgtataaaccactgtatttgtttgata

SEQ ID NO: 894275 - DNA, 120 bp, Artificial Sequence
  ENSG00000229989_38 (sequence is synthesized)
ggtctgtatgctcccctagaggtttgagcagctgggcaatgaagaggtgagctacaactcccagtgcacaccctgcgagggggacaagggaacttttcctgttttagaaataccaaagca

SEQ ID NO: 894276 - DNA, 120 bp, Artificial Sequence
  ENSG00000229989_39 (sequence is synthesized)
caatcaacccatcaaacgaaaaaaacaacaacagcctaaaagacaaggttgatgtggaggagaaaaaaaaggtctcgctctgccacccaggctaggagtgcagtagagtgactacagttc

SEQ ID NO: 894277 - DNA, 120 bp, Artificial Sequence
  ENSG00000229989_40 (sequence is synthesized)
acataggaaagttaccatttctgcagatggaaaaatgtgtaccttgcttctcatatcattgttttcattttgcaagatatgaatttcttgaatagtggtatcacctacaattacttaaaa

SEQ ID NO: 894278 - DNA, 120 bp, Artificial Sequence
  ENSG00000271969_0 (sequence is synthesized)
gccacgcgatccactgggcttctgggcacagaagtgcctcaacaggcacaggcaggctccccacagccacaaggaaccctgctgccaaggaagcagctcctgttggggtcatcagatttt

SEQ ID NO: 894279 - DNA, 120 bp, Artificial Sequence
  ENSG00000271969_1 (sequence is synthesized)
aagagcacagctgggcctcgagaactcagggccagccttcccagcttgggtcctgtttcggagcccaggccttgcttccccttagccgccccagccagattcttttgcgccccctgctgg

SEQ ID NO: 894280 - DNA, 120 bp, Artificial Sequence
  ENSG00000271969_2 (sequence is synthesized)
cacacacaaagacagacccaggagcgcacatgtgaacgtgcgcatgcttgctgccagttacccagttcatgaacacgtgaagccttgacttcaggttaagtaataaaaatttattgagaa

SEQ ID NO: 894281 - DNA, 120 bp, Artificial Sequence
  ENSG00000237422_0 (sequence is synthesized)
aacgtggaaattcatgctccgagtagtgacaagccagtgactttttctatagaaagggtacaagactccaatttgaaaatctcaagcagctttatattcaagcaagttcaatccaatctc

SEQ ID NO: 894282 - DNA, 120 bp, Artificial Sequence
  ENSG00000237422_1 (sequence is synthesized)
ttcctgactcactgtctcatcaacatgcaaagctctcgaagagaaatcatctcttacttgcctgagggagttctggcagacgttttgaatgtggatgtggaagttctttcctcgtctcca

SEQ ID NO: 894283 - DNA, 120 bp, Artificial Sequence
  ENSG00000237422_2 (sequence is synthesized)
tcctgtcaagagccgtggagcaaacagcaggatgaggaagacatggaagacaaaactgataacgcacgtcacctcgctgcagcgggagacagaataccagccctgtcaacaccttcatct

SEQ ID NO: 894284 - DNA, 120 bp, Artificial Sequence
  ENSG00000237422_3 (sequence is synthesized)
tgtttcacatttgtgaaggtcggggaggcatctggagcttcttgatgtgtcagctcggaatgctgcctgtgggctgggtcggcttcaggcctgcaggtcaaggaagcatcagaaaaaggg

SEQ ID NO: 894285 - DNA, 120 bp, Artificial Sequence
  ENSG00000237422_4 (sequence is synthesized)
cgactgaaacatcgttggtcatcctgtggagtgagagcttgatgccactgcctgctgaagtgcaccctctcttggcgaaggcacactctgaagccaaatgcactctcatctctttgaaga

SEQ ID NO: 894286 - DNA, 120 bp, Artificial Sequence
  ENSG00000237422_5 (sequence is synthesized)
gtccccttctcttcttactaaatgtgagcttgggaggacctctccctcctgcagagtgctggagacaggtttcccagaagagccatcttcttcagcaacattttcttttcctgtgtaatc

SEQ ID NO: 894287 - DNA, 120 bp, Artificial Sequence
  ENSG00000237422_6 (sequence is synthesized)
agagccctgcaggagcttaatgcaaaggagagagaattacactttacagcagtagttcatgcatggtttctgtagctgggggctgtgcaggccgtttgctcccaagctgtagtattctgg

SEQ ID NO: 894288 - DNA, 120 bp, Artificial Sequence
  ENSG00000237422_7 (sequence is synthesized)
ggaaaggtgtcaaagtgaggctcgtgggcttgtgctgtcaaggggctaaattgatcaaatccctccaaatactgatacattgaagaggagaaatcttgcctctctgcaaagctggcccca

SEQ ID NO: 894289 - DNA, 120 bp, Artificial Sequence
  ENSG00000237422_8 (sequence is synthesized)
aatgtcactgtccattgctgtgacaggggacctggtagatgcagggcatccacttagaggaaggtggcacccctgaggtccttcagggggacatttgaatagggtggtcctgaactttgg

SEQ ID NO: 894290 - DNA, 120 bp, Artificial Sequence
  ENSG00000237422_9 (sequence is synthesized)
ggacttaggtgtgagctgaagtgtgctgctgggaggactgtccttgcatctgcaaaggcctgtctactctcagtcgctgcctagccctgtctgcctcctgcaacagcaggaagatgccat

SEQ ID NO: 894291 - DNA, 120 bp, Artificial Sequence
  ENSG00000237422_10 (sequence is synthesized)
gaaagaggcatggtgccttcattcacccacctgagtgagctgggtctcccaagagtctcctctgtaggcacatgactactttgagagggcaaagggaattgtcctggctttagggggatt

SEQ ID NO: 894292 - DNA, 120 bp, Artificial Sequence
  ENSG00000237422_11 (sequence is synthesized)
caggactgagggaggatgatcagagagagcgatgaagacatatggcttctcttgaggcagagctcatgggctgagagcttcagtaagaagagcaagaggccctgtaaagagatgagatta

SEQ ID NO: 894293 - DNA, 120 bp, Artificial Sequence
  ENSG00000237422_12 (sequence is synthesized)
catcacaaaaggacatgatgagaacgaacgcatgaattctgatttccaagacattggcagataaataaaaaagagaatcacctttattgaaactagaatttctggtttgaaagatggaac

SEQ ID NO: 894294 - DNA, 120 bp, Artificial Sequence
  ENSG00000237422_13 (sequence is synthesized)
agtacaagcctctcataaaacagagccaagacagcaagtcagtgggaaattctgagcaagaagatgagagatgccaggaccagaatgccagacaaagatatcaggaatctggtatggaga

SEQ ID NO: 894295 - DNA, 120 bp, Artificial Sequence
  ENSG00000237422_14 (sequence is synthesized)
agggaacagatggacaagcaataattaaggcaccagcacaagaagaccaccccgtgggggagaaagacttgacttctcactctgagaagtctcactgagactagaagactcaacatgaaa

SEQ ID NO: 894296 - DNA, 120 bp, Artificial Sequence
  ENSG00000237422_15 (sequence is synthesized)
aaatgttgattgtccccaaactgatctatagattgaattgtaattccaatcaaaatgctgataggattgtttgtagatatgaacaagcttcttctaaaacgtatgtggaaaaacaaagga

SEQ ID NO: 894297 - DNA, 120 bp, Artificial Sequence
  ENSG00000237422_16 (sequence is synthesized)
accagaatagctaaaactgttttgaaaacaaataaagatggaggaatcacactactcaattttaagatattatttagccctaataattaagacagtggaacattggaaaaggggcagaca

SEQ ID NO: 894298 - DNA, 120 bp, Artificial Sequence
  ENSG00000237422_17 (sequence is synthesized)
taccaatggaacagaagtcagaaagtccagaagacccacaaataagattgattgactttttacctacctcatgtcaggcttagtttgcaaaatgtcccaatagggattcagggcttctat

SEQ ID NO: 894299 - DNA, 120 bp, Artificial Sequence
  ENSG00000237422_18 (sequence is synthesized)
tgtcaccaactggagaggaaagcagcttaaaatcttagacatgcatgtccaacatgtattatatggtaagaaaactaaaaactgtatgatacccctaaatagaagaaatattaaaaatac

SEQ ID NO: 894300 - DNA, 120 bp, Artificial Sequence
  ENSG00000237422_19 (sequence is synthesized)
gagcctgattttcctgaagattcagcaggttggaatgccagagaagtaatgccctacctgcacccagcagtgttccaccagtggctatgggagtggctcacacactccagctaccttcct

SEQ ID NO: 894301 - DNA, 120 bp, Artificial Sequence
  ENSG00000237422_20 (sequence is synthesized)
tcatgggactggaacctggagttcccaagagggattaggctctagttgtccatggggcagctgttttactgtcaccttccctgtcctgtctctcttcctgtctccactccctacagtgct

SEQ ID NO: 894302 - DNA, 120 bp, Artificial Sequence
  ENSG00000237422_21 (sequence is synthesized)
cccagagataacttcccaaatttgctgcctgcccttggatgttattttagggttggcttctgaaggaacataaacgaagacagacagatgtgctgggtagctatgtgtaagatcacactg

SEQ ID NO: 894303 - DNA, 120 bp, Artificial Sequence
  ENSG00000237422_22 (sequence is synthesized)
aaacatagccaagaacaaggcactcagccactcccaggtttaaaatcaagtttcctactttgtctctctggtctgaatctgagtgaaagcccaggctcctgcgtcacctgggccacctaa

SEQ ID NO: 894304 - DNA, 120 bp, Artificial Sequence
  ENSG00000237422_23 (sequence is synthesized)
ggatctccctccagcctctgggtgctgaagctccacctgccctcaccacatcacaggaaaccgcgagcacatcctcctgccttctccagcagtctcttcagtgagcgcctgcagaactgc

SEQ ID NO: 894305 - DNA, 120 bp, Artificial Sequence
  ENSG00000237422_24 (sequence is synthesized)
atctagagcaccgggccaatattgtcaccttccctgtcatggcttccttcctgtctccactccctacagtactcctgagagccgggagcactccctggagcactccctgattcgttttat

SEQ ID NO: 894306 - DNA, 120 bp, Artificial Sequence
  ENSG00000237422_25 (sequence is synthesized)
cttctgcacaactgtttggctggaataggaagcaaatggcatggaatttgcatatgaaaagccattcccacctgtgtccttgtgtctgtaaggataggaggatccaatcttcttatctga

SEQ ID NO: 894307 - DNA, 120 bp, Artificial Sequence
  ENSG00000237422_26 (sequence is synthesized)
gtcaagagagaagcacagacaaaggcaccacagagatgcacagtgacactcaaagaggcagcgagacagagatgaaggcgtcgtgctgtgagagccatcgcccggcagcatcccctctcc

SEQ ID NO: 894308 - DNA, 120 bp, Artificial Sequence
  ENSG00000237422_27 (sequence is synthesized)
gagaacactggtggttctcgttggttgtgtaactctgccaggaatttagaatattgttagaatctttattacatttcagcctgataaggagatgaaatagctaatgaatccactaaaaaa

SEQ ID NO: 894309 - DNA, 120 bp, Artificial Sequence
  ENSG00000237422_28 (sequence is synthesized)
actgccaagtagcaaagctggaaactttggcctttggttgtcgtataataacacaccccaggcacagaaggtttagcacatttttccttactaaaacacaaaacaacaacaccaataacc

SEQ ID NO: 894310 - DNA, 120 bp, Artificial Sequence
  ENSG00000237422_29 (sequence is synthesized)
caatgaggagtcttcaactcctcccaccccatagccctgggctgttcatctgcaagtcattgtgttaatagtttttgtttgtttgttttttagcatttggtcttctagatttgcttagaa

SEQ ID NO: 894311 - DNA, 120 bp, Artificial Sequence
  ENSG00000237422_30 (sequence is synthesized)
atccatggattggggcaagccacggggagcagtgccgtgcctttgcctttgttgtgtggagtgacagtccccgtggctgcaagtcctcacaaaccagaatgggcatgttccggtggaaag

SEQ ID NO: 894312 - DNA, 120 bp, Artificial Sequence
  ENSG00000237422_31 (sequence is synthesized)
ggaagcattgtctgcctggaagaaccagtcacctccagtggctgggaatgtttgtgcttacccacagggcatgggaatgtatgtgcttacctagcccagaagagctagagagaagagcct

SEQ ID NO: 894313 - DNA, 120 bp, Artificial Sequence
  ENSG00000237422_32 (sequence is synthesized)
aggtataagacaaggaggcttgtggcaactccaaagggtcccctctggttctggagtggaacttactagaaatgaaagggaagttaatagctccctcatcagggatctcaatgtgtgttt

SEQ ID NO: 894314 - DNA, 120 bp, Artificial Sequence
  ENSG00000237422_33 (sequence is synthesized)
aggtccagaaaatcaaggttctgggtgctctgatggcaactgtgctgagtgtggctgtctgaacgcaccagggctcatttgctgagcttttgttccaccttccgtgtcagtttggaggtt

SEQ ID NO: 894315 - DNA, 120 bp, Artificial Sequence
  ENSG00000237422_34 (sequence is synthesized)
tgtttcttcatgcaattatgtcaggttcattatttttcttgggcatagaacacacttccaacccacatgttgtggtttgaatatgtcctccaaaaagcatgtgtgggaaacttaggcccc

SEQ ID NO: 894316 - DNA, 120 bp, Artificial Sequence
  ENSG00000237422_35 (sequence is synthesized)
atgcaacagtgttgggaggtggggcctaatgggaagtgctcaggccatgaggactctgctttcatgaatggagtaatgctgctattccaagggagtgagttccttataaaaggacaagtt

SEQ ID NO: 894317 - DNA, 120 bp, Artificial Sequence
  ENSG00000237422_36 (sequence is synthesized)
tggcccccttttcccactttcttgtcctctcttgcccttccaccttctgccatggagtaatgcagcaagaaggcctcgccagatgctggtccctcgatcttggactttccagtctccaga

SEQ ID NO: 894318 - DNA, 120 bp, Artificial Sequence
  ENSG00000237423_0 (sequence is synthesized)
agtaaatcttagtgactcaggttcagaaaaggagtggctctcaaccaggggcagttgtcccctccggggaacacttgctaatgtctggacacagttttggttgtcacgactaggctggtg

SEQ ID NO: 894319 - DNA, 120 bp, Artificial Sequence
  ENSG00000237423_1 (sequence is synthesized)
atgctggagccacaacaaccaccggaaaccccaaggcgaagaccagagaatcccagagatgcagacagagacttcctagagctacagagtaagccaaattggagttgccttttctggacg

SEQ ID NO: 894320 - DNA, 120 bp, Artificial Sequence
  ENSG00000237423_2 (sequence is synthesized)
tcttgttaagtctgatggggttcatcacatctgagccaggactggcttttcttggctgcaagctgaaagttgggtccaggtctgctgtactgagggtctcctatcttccttggacaggga

SEQ ID NO: 894321 - DNA, 120 bp, Artificial Sequence
  ENSG00000237423_3 (sequence is synthesized)
caaccagaggcctatttatctcatgatggaaggcaggagaacaagcaggcaagaccagctgtgctagcacatgccacctctttgcccacgtcacacctgctgacgtcccattggccaatg

SEQ ID NO: 894322 - DNA, 120 bp, Artificial Sequence
  ENSG00000237423_4 (sequence is synthesized)
caagtcacacaaccaaagccaacatcaacaggacaaggaaacagactctgcctctagatgcacaaactacagagtcacggacagaggacacggatccagggaaggaagatggagaatgag

SEQ ID NO: 894323 - DNA, 120 bp, Artificial Sequence
  ENSG00000237423_5 (sequence is synthesized)
aacaatgaccctcaataacacagcctcccacaggtttccaaatccccaacccaggcatatatccaaggaaatggaatcatgggttcaggttttagagcaagcaatttctgctctccctgc

SEQ ID NO: 894324 - DNA, 120 bp, Artificial Sequence
  ENSG00000237423_6 (sequence is synthesized)
ctagtttccacacccttaacacaggggcaatgatgtcacatcaaaacatatcatacaaatttgtgatgatgtttcaacaactaaacaccagaaaaatgcttagggcagggccgggtagga

SEQ ID NO: 894325 - DNA, 120 bp, Artificial Sequence
  ENSG00000237423_7 (sequence is synthesized)
ggggcagaagccaatagtaacttaacatcactgctaacccacaaagttctgggaatttctttgaatgtctaattagagaaccatgtccccaagaattaacatttcttttgcttttttttg

SEQ ID NO: 894326 - DNA, 120 bp, Artificial Sequence
  ENSG00000237423_8 (sequence is synthesized)
agaaaatactaattgtcacagggtagaatatttatctgatgagcatatagaagttaagggctccttgaaatcacagtgctaggtttgggtctcattcctcctcctacctgcctctctgag

SEQ ID NO: 894327 - DNA, 120 bp, Artificial Sequence
  ENSG00000237423_9 (sequence is synthesized)
cctcagtttctcatctgtagaatgggtacaatcccaacctcatgtgtttgtggcagtcagggttaattgggctaatgattctaaagtgctctgcgcaggcctggcaggtactgagcaacc

SEQ ID NO: 894328 - DNA, 120 bp, Artificial Sequence
  ENSG00000237423_10 (sequence is synthesized)
ttgggccatagagagagcactgacttgggagtcaggagctgggacctcaggtcctattccctggggatccgggaaaagtcccttggcttccctgagcttcatctgccccacgtgctagtg

SEQ ID NO: 894329 - DNA, 120 bp, Artificial Sequence
  ENSG00000237423_11 (sequence is synthesized)
aggtggctagaccagtcaggccaaggacgtccctgcagctatctaacttctccttactccctgttcagcaaagggcaggagctgggcctggccaggctcccacaaagcccaggcgtggcc

SEQ ID NO: 894330 - DNA, 120 bp, Artificial Sequence
  ENSG00000237423_12 (sequence is synthesized)
gtgctcagctcacgacgggtgtgggggatgcgtttctgccctcaaaggactgagctccagtttctttcttcactgagtcctttactctctgcctgcgggtggttatttaagacatctcct

SEQ ID NO: 894331 - DNA, 120 bp, Artificial Sequence
  ENSG00000237423_13 (sequence is synthesized)
gcctgcaggggcctcttagagaacaaacagatcgttccttcagctgcagtgcaggctttactgggcttgttcctgcatcaagtagacagatccttcctgaatggagtcgccccacaggcc

SEQ ID NO: 894332 - DNA, 120 bp, Artificial Sequence
  ENSG00000237423_14 (sequence is synthesized)
ccacactcggagaggggcagccaggagcctccgaggctctgcccagcccgtcctgaatgtgctccctgccctgagtggagcgctcacagctccccgcatcaaggtttctgtctccccaag

SEQ ID NO: 894333 - DNA, 120 bp, Artificial Sequence
  ENSG00000237423_15 (sequence is synthesized)
gatcttcctcataaaaacccttcttctcccagatcccacaaaccgacattataaaaaacacaaacacccaataagcaccatgtaaattgatcacatacaaataatatccaaaaataagaa

SEQ ID NO: 894334 - DNA, 120 bp, Artificial Sequence
  ENSG00000214915_0 (sequence is synthesized)
ctgatgtggtgaagatggccagtaaagcacaagcctccaacccagttgtcgagggacaaccacccacaacaccaaagaggcgaagaagaggaaggccccctctcaaccaagattcagaag

SEQ ID NO: 894335 - DNA, 120 bp, Artificial Sequence
  ENSG00000214915_1 (sequence is synthesized)
ccctctgaagattcccaagacaacccggaagggaaaagagagtctttgagggagttccaggaaaaaagccactcccgaaagaccgccgcttcaagaaaacctgaggaagggagagggcca

SEQ ID NO: 894336 - DNA, 120 bp, Artificial Sequence
  ENSG00000214915_2 (sequence is synthesized)
gctatccagccactctgaccagctgaacgaggaactcaatcaaaaggagccacagcaggaccaggaaagtgaggagacttccaccatctccagcgtctccctggacagccagtaatttca

SEQ ID NO: 894337 - DNA, 120 bp, Artificial Sequence
  ENSG00000214915_3 (sequence is synthesized)
gggcaagttcaaaggactagatctatctgagaggtctccataggtctaaccccagagaaatagccaaaagggtctatggtacattttacacacaacagggtacccctcatggtgatgaaa

SEQ ID NO: 894338 - DNA, 120 bp, Artificial Sequence
  ENSG00000277007_0 (sequence is synthesized)
ttttttgatgttgttgttaaaaaggaaattcactgaggactctgttgccttactatctgcctaaataatttatttctatctcctgtatcactatgacagggggaaacaaacaagaaaaga

SEQ ID NO: 894339 - DNA, 120 bp, Artificial Sequence
  ENSG00000277007_1 (sequence is synthesized)
aacaagaaaagaagggctgatcctgccttctacatatgtggtgatgctgtttgttcatttatgggtcacttttttgtatctgagacggagcttggctcttgttgcccaggctggagtgca

SEQ ID NO: 894340 - DNA, 120 bp, Artificial Sequence
  ENSG00000277007_2 (sequence is synthesized)
tgttaagtgacatttttgtgaagattctgtgggacatggagaaacttcctcttgggagctagcttgtgctaatccccacagcacaagtgggaattaatgtgtgctcactgattcatgctg

SEQ ID NO: 894341 - DNA, 120 bp, Artificial Sequence
  ENSG00000277007_3 (sequence is synthesized)
gttgaagtgtttttttttttttttctgaaggcttttttcctttgacattttctatttttctaactaaaagaccggctccgtgagtttaaaggattataatcttttgcatttgtatttttc

SEQ ID NO: 894342 - DNA, 120 bp, Artificial Sequence
  ENSG00000277007_4 (sequence is synthesized)
tgcatgcattgaagagcatttaagaatattgccaattaaaagaatatgcatttaatttagaaatatgaatttgattagctaatgttcatctttaacattttctaaggctgaaatgctaat

SEQ ID NO: 894343 - DNA, 120 bp, Artificial Sequence
  ENSG00000277007_5 (sequence is synthesized)
ctctttgctttcttatcagactaatgttcagatcacactggcttgatagctgactcattttctcagtgcagtgaagggtggccacctgccaataaatgatgcctaataccacagttaaat

SEQ ID NO: 894344 - DNA, 120 bp, Artificial Sequence
  ENSG00000277007_6 (sequence is synthesized)
gaaaggtaaacttttttttaactttacaaaaggcatgattctagtatcttgaatgaggtagaactttggctatgaagaaatgaagagatcagcaatcattttcccctaaacaactataaa

SEQ ID NO: 894345 - DNA, 120 bp, Artificial Sequence
  ENSG00000277007_7 (sequence is synthesized)
gctggacaaatttgatgaaaacaattatcccagcaacctggaaatcttccaaggcagtctgtgaaaaccagcagctttgctttgcaggagactgactttatttggagtgaaagaaggaag

SEQ ID NO: 894346 - DNA, 120 bp, Artificial Sequence
  ENSG00000277007_8 (sequence is synthesized)
tcagggagatcctggaaacgagatagtcattgagggccttaataagcattgcatacatccttggctttctggaagcttctacacttatgcagcagagacctgagagggcccagcagaaag

SEQ ID NO: 894347 - DNA, 120 bp, Artificial Sequence
  ENSG00000277007_9 (sequence is synthesized)
aaagaattggggctggcttccaaactgcccagacttagaatgcaaccccctaaaccaaacacagatccacagagagtagaagccttatcaactagaggtgttggagcatagcctgtgacc

SEQ ID NO: 894348 - DNA, 120 bp, Artificial Sequence
  ENSG00000277007_10 (sequence is synthesized)
agtcattggctgaccactaagctacacagacacagagatgacccctaagaagcaggctgaaaagtgaaagtaagaatttttttcaaaaatctgagctgagacgtcagagtagccatacac

SEQ ID NO: 894349 - DNA, 120 bp, Artificial Sequence
  ENSG00000277007_11 (sequence is synthesized)
tgagacgtcagagtagccatacaccacagggatgacaggttctgctgctttagtctaggttagttcatttaacaaaagagaaatgatctgggcctggtggctcacgcctgtaatcccaac

SEQ ID NO: 894350 - DNA, 86 bp, Artificial Sequence
  ENSG00000277007_12 (sequence is synthesized)
tggtgaaaccccatctttactaaaaacaaaacaaaaaaaattaactgagtgctcatcaaattgcttaaactcggaactcgggaggc

SEQ ID NO: 894351 - DNA, 120 bp, Artificial Sequence
  ENSG00000277007_13 (sequence is synthesized)
ccagctacttggaaagctgaggcaggcaaattgcttaaactcggaactcgggaggcagaggttgcggtgaggcgagatggcaccattcatttcactccagcctgggcaacggagcaagac

SEQ ID NO: 894352 - DNA, 120 bp, Artificial Sequence
  ENSG00000277007_14 (sequence is synthesized)
aggaggagtaaacaaaaaatgcagcagtaatagaaaccctcagcagaaaaaaaaaagaaaattagaatcggaattgctgtattatcaaaaacatccagttttccataaaaaattataaga

SEQ ID NO: 894353 - DNA, 120 bp, Artificial Sequence
  ENSG00000277007_15 (sequence is synthesized)
cacgctaagaagcagaaaagtgtgaaccatactcaagggagaaaaaaagaagtcaatggaaataaactctgagaggccctataaattagatttagcagacagccactgtattaaagaacc

SEQ ID NO: 894354 - DNA, 120 bp, Artificial Sequence
  ENSG00000277007_16 (sequence is synthesized)
aaccaacagagaatatgacaatgactcaatatatagagaatatccataaagaaatcaaatctgtttaaaagcaccagataaaaatttttatatttaataccatatgttaagattatttac

SEQ ID NO: 894355 - DNA, 120 bp, Artificial Sequence
  ENSG00000277007_17 (sequence is synthesized)
ttttgctctccacatgagctcactttctggataattgcaaagttaagtaattgcctggaaaaggtaaacatttttaaagttcttaaaaggaggcttaacttacttgacacaactgcaata

SEQ ID NO: 894356 - DNA, 120 bp, Artificial Sequence
  ENSG00000277007_18 (sequence is synthesized)
aaatagcagtttgaatcaacatacaatctttcttgtatctatcagatgatgtcatgcagaattgctaacacacactttttgatgtaagactttctcaataaacttcattcataatcagaa

SEQ ID NO: 894357 - DNA, 120 bp, Artificial Sequence
  ENSG00000237390_0 (sequence is synthesized)
gttagaagctgctcctctgacctctggaggacccggcactccgaaccccgcgcagcctgggaaaggcctgagattccccgctattgggattcacatcacgacgcggcggccccaactcgg

SEQ ID NO: 894358 - DNA, 120 bp, Artificial Sequence
  ENSG00000237390_1 (sequence is synthesized)
ggaggaattagacacggcggcactgctggtccaacctggaatccctgcacagcattctgacctggggctgcacagcctcatggaaactcctccagagaccccaaaagccacctctgaaag

SEQ ID NO: 894359 - DNA, 120 bp, Artificial Sequence
  ENSG00000237390_2 (sequence is synthesized)
aaggtgatccagcatccccacccctctcctctgcccacccgagccccagagcacacgcgtcccttccattgccctccatctccaaggcattagcagatggtcacccttgctttaggcagg

SEQ ID NO: 894360 - DNA, 120 bp, Artificial Sequence
  ENSG00000237390_3 (sequence is synthesized)
ccccagagctccctgcctcaaagtgtccctttcccttttgcctggatttccagggatctctgggctggtctgtggggccccaggcaggcaccaagtaggcccatcttggctctgaggctg

SEQ ID NO: 894361 - DNA, 120 bp, Artificial Sequence
  ENSG00000237390_4 (sequence is synthesized)
agagaggaagtgggctttgttgtgcctgggcatcgtctggattttcccaccctgctcttcttggcaggagagccctcagctggagaagctgcctccgccccacaccagcgtcccctcctt

SEQ ID NO: 894362 - DNA, 120 bp, Artificial Sequence
  ENSG00000237390_5 (sequence is synthesized)
cccagctcagcaccatccatctccgtctccctagagcaaggaatgtgctccaggacactgtggggcttgttcccaatccccttctagctcatttcactcgggcttttatagatttgcctc

SEQ ID NO: 894363 - DNA, 120 bp, Artificial Sequence
  ENSG00000237390_6 (sequence is synthesized)
catcccatgggctgctgtctgggttctggctctgaagacacagacagaggtttccccctcctccctgcaattcctcacacttcattttgtcccaacagcatctgaggaggctgcactgtg

SEQ ID NO: 894364 - DNA, 120 bp, Artificial Sequence
  ENSG00000237390_7 (sequence is synthesized)
gggagtcaaggcaccctggtgtgggaggcgatgggggttgggtggtggagggtgggtccccttccccatctttccagcccctggccctgctggcctcagctctggcactgcccacagcgg

SEQ ID NO: 894365 - DNA, 120 bp, Artificial Sequence
  ENSG00000237390_8 (sequence is synthesized)
ctgcattattccccgtgctgcagccatccatcccctcacccgcccttcctgtccacgccccacaagcctcgattattggtgaaattagcaccgggcttcttgttggcggttgctaattaa

SEQ ID NO: 894366 - DNA, 120 bp, Artificial Sequence
  ENSG00000237390_9 (sequence is synthesized)
gaccattaataaacgtgattattaatgctgtagcaggcagcagcccaggcatctaatcaccacaccgctggcaagcgctgggctgccggcttccacccggctccatcttgggaaggacct

SEQ ID NO: 894367 - DNA, 120 bp, Artificial Sequence
  ENSG00000237390_10 (sequence is synthesized)
gctccctttccccggccagctcacctcaggccctgccaggggagggtgggtggagacaaaggcaccacggggggttcactgagccttgcagagaaaaggagggacaacctgcactccagg

SEQ ID NO: 894368 - DNA, 120 bp, Artificial Sequence
  ENSG00000237390_11 (sequence is synthesized)
gagcccccaaactgggcaggccgaggccaggatgtgtgcctgtaagaggcctatgaacccacctgatgccggtacgcagggtggaccgggtggtgagtgcgaaggctctggagagagcgt

SEQ ID NO: 894369 - DNA, 120 bp, Artificial Sequence
  ENSG00000237390_12 (sequence is synthesized)
gggtgggcgcctgcaccagcagccctgctctctggcagcccacagctcacgtgccctcctgagtccccctttgcccgccgccctgcaaaccaggctgtggagtgtggcccctcctgcggg

SEQ ID NO: 894370 - DNA, 120 bp, Artificial Sequence
  ENSG00000237390_13 (sequence is synthesized)
ggtttcacagtggttaggggccatctcagcgagacagtgaggtgctctctgtgagaaagtagaagacacctctgaccagaatgtttccctcagttactgggtgcccaccatgcgtcaggc

SEQ ID NO: 894371 - DNA, 120 bp, Artificial Sequence
  ENSG00000237390_14 (sequence is synthesized)
cagagggtactgtcataaacaaaaggcagtctcctcctgggaactgccccatcacattagactacatgaggtctgtccctgaatgtctccctcaccccttccctcacccctttacatggc

SEQ ID NO: 894372 - DNA, 120 bp, Artificial Sequence
  ENSG00000237390_15 (sequence is synthesized)
gtcccacctcacactgcctgtaatgagctgtctgtttatctgttcacaccaacggggctgtgctgtgcgcgatgacaggggctgtgtgtccctgaggacagtggaagcccactctggctt

SEQ ID NO: 894373 - DNA, 120 bp, Artificial Sequence
  ENSG00000237390_16 (sequence is synthesized)
tggtgatgaagcctttcctgcccctgtctccaggccaccctccttccacgcccttccctgcttcgctgtcccctgcctgacctccagcctcgggctaccagagcaggaggggttgcaagg

SEQ ID NO: 894374 - DNA, 120 bp, Artificial Sequence
  ENSG00000237390_17 (sequence is synthesized)
agccctctggtccagtttgccccacttggaccccgtcagggcaggagagcctgcctgctctcagctgggactcgaggaggtaggatgtggcctgccaggcagggcgggccctgggggcct

SEQ ID NO: 894375 - DNA, 120 bp, Artificial Sequence
  ENSG00000237390_18 (sequence is synthesized)
ttccaggagctgtctgctgcccaggcttcccctctagtccagcctggcctctgcacccccttctgccatccacttacaccccaagaagtgatccacggcagctgaggagagcttgggaag

SEQ ID NO: 894376 - DNA, 120 bp, Artificial Sequence
  ENSG00000237390_19 (sequence is synthesized)
gaacctcccccacacacctgcttccccccatttttctccaccccaacttcaatgtcttgactttttcctacagcttttgaaggaagaatccaccaagactttagtctctcccaacccagg

SEQ ID NO: 894377 - DNA, 120 bp, Artificial Sequence
  ENSG00000237390_20 (sequence is synthesized)
gaataagaagagaaaaaaagtcctgaaaacaaaaacccgacaacaaccttaaagtaggagagattggttggaaggcttttaatcccttaatccctctcagatgggccttgagacgctaat

SEQ ID NO: 894378 - DNA, 120 bp, Artificial Sequence
  ENSG00000237390_21 (sequence is synthesized)
gattttcctaattattccctccgattttcccatcgctctgtaaggaccttcgagaagagcgaaattccgagtgagcgggtgtgggatgaatggcaggcccacctcccccacatcggaccc

SEQ ID NO: 894379 - DNA, 120 bp, Artificial Sequence
  ENSG00000237390_22 (sequence is synthesized)
agagtccaggcggctggagaggtgggggaagggccaggagtgccccagctgggggcttgggcttctccgccactgacaccagtgtgcagggcgggcctgggacaatggggcggttggggg

SEQ ID NO: 894380 - DNA, 120 bp, Artificial Sequence
  ENSG00000237390_23 (sequence is synthesized)
aggatgggagttgagggtctctttgtgtcccccaggaaaggcctctctggcgataatcaccctgagagggcggtggaggtggtgaggaggatctttaaagggggccaaacctccccagag

SEQ ID NO: 894381 - DNA, 120 bp, Artificial Sequence
  ENSG00000237390_24 (sequence is synthesized)
aacagttggccattcaggcctccagcccctctcttgtctccagcagcctgggattcagtggcccatctatggggggtggggcgagggctaggccaacacacatggccaagcttgggctta

SEQ ID NO: 894382 - DNA, 120 bp, Artificial Sequence
  ENSG00000237390_25 (sequence is synthesized)
ggccccctccccatcagtgtggcctgccagactgagcccaggggtggcttctccaggaaaccaccccagcctccctctcaacccccacctaatgttgggtgccctggggctttgtctcat

SEQ ID NO: 894383 - DNA, 120 bp, Artificial Sequence
  ENSG00000237390_26 (sequence is synthesized)
ttcccctgagacactgagtttctctgggggccagatctgcctgggagcagacattgacctttgaccctgccatgtcctcttttatgaaacatggggattctcattccactcctacaaatt

SEQ ID NO: 894384 - DNA, 120 bp, Artificial Sequence
  ENSG00000237390_27 (sequence is synthesized)
ccctatgggatgagggcattagccccatttcacagatgacaaactgagcacttagcagacttgtctaaggttacacatcaagttaggggcaaattagattagagctggatccttcttttt

SEQ ID NO: 894385 - DNA, 120 bp, Artificial Sequence
  ENSG00000237390_28 (sequence is synthesized)
ttgtttgtttgtttgttttttgaaagccctgatactgtaccaggtacaaggcttttgtacaggctgtccctctgaccgaaatgctcacctcccaaacaacccgagggctgattctgcgcc

SEQ ID NO: 894386 - DNA, 120 bp, Artificial Sequence
  ENSG00000237390_29 (sequence is synthesized)
tcccttggtctttgcttgaatcacatccttcatggaaggagatgtctgggatttgcttcaaaataacacgggaagtgggggaaaaggaggtgggagtgcagatgaaacaagattggcaga

SEQ ID NO: 894387 - DNA, 120 bp, Artificial Sequence
  ENSG00000237390_30 (sequence is synthesized)
tgttgaagctagacgagggataggtggggtctcattatactattctgtttattttatatctatttttaaatttccacaagaaaaagtggaacaaaacctggttttccctaagcaccttat

SEQ ID NO: 894388 - DNA, 68 bp, Artificial Sequence
  ENSG00000237390_31 (sequence is synthesized)
aaaaagtggaacaaaacctggttttccctaagcaccttattttatttttgaggcagagtctcgctgtt

SEQ ID NO: 894389 - DNA, 120 bp, Artificial Sequence
  ENSG00000237390_32 (sequence is synthesized)
acgcccagctaatttttgtatttttacaaaaaattttcatcgtgttttaccatgttagcgaggctggaggcaccttattttaaattgcaattcaccatccccagcccagccttgcctcgt

SEQ ID NO: 894390 - DNA, 120 bp, Artificial Sequence
  ENSG00000237390_33 (sequence is synthesized)
atccccagcccagccttgcctcgtaccctttccttgtttttctccagatcacttattatggtgtgaaactcttaagtattttacccatttgttttgattcttgccaatgggctacactag

SEQ ID NO: 894391 - DNA, 120 bp, Artificial Sequence
  ENSG00000237390_34 (sequence is synthesized)
gttaaaggtcatggggtcagaggtcttggggttcatttgtgcaggccggttggccagtgccccagcaagaagagcagcgcctggcaccgggatgcctttgatcctgtgagtcaaggtctg

SEQ ID NO: 894392 - DNA, 120 bp, Artificial Sequence
  ENSG00000237390_35 (sequence is synthesized)
ggtgacgcggtgtccagaggctcttggcccagttgccaaggaaagggacggcctgtcagttgtgttttgggcctgtcgggtccttcagcacctggagccacagccggagggttccttccc

SEQ ID NO: 894393 - DNA, 120 bp, Artificial Sequence
  ENSG00000237390_36 (sequence is synthesized)
agcactcccagcctgggataagcccctaagtgtcccattatgtaccattcactcttactttgtcggccccatccacagccgctgcgtccttttgtcagaggggcctgggagggcgagggg

SEQ ID NO: 894394 - DNA, 120 bp, Artificial Sequence
  ENSG00000237390_37 (sequence is synthesized)
ctattaccacaaggcctcattattcccagccagagtagtaatgaggagtcccttccccagactagtacattttgcagggcccctcccatttaataactataataaaggccaccatttatg

SEQ ID NO: 894395 - DNA, 120 bp, Artificial Sequence
  ENSG00000237390_38 (sequence is synthesized)
agtcctctcctacaccaaacactttacatacattatctcatttaattcccccgacagctctgggaaatagctactatttgtatccccatttttcagatgagaaagctaagacagagacta

SEQ ID NO: 894396 - DNA, 120 bp, Artificial Sequence
  ENSG00000237390_39 (sequence is synthesized)
caatttctttctcctcggctcagctgtacaggcaagggtagggcagggacacaacaatgtcccagtagggacaactgaggttcggagaggggacgtggcctggggaagagcacactgcag

SEQ ID NO: 894397 - DNA, 120 bp, Artificial Sequence
  ENSG00000237390_40 (sequence is synthesized)
attaacaacagggcagcgagatccccttcactgtgtgcggggaagggcaagtggaagctctcagttctccaggtgacgtctcactcctatcccccagctgcagtaggggagtggccatca

SEQ ID NO: 894398 - DNA, 120 bp, Artificial Sequence
  ENSG00000237390_41 (sequence is synthesized)
ctgtctcacccctcacgggcaggtgcttcagtgacttactcatgtgtacacaactagtgagaatccaggtgctctgtccacgataccaactgggggacggcaggtgagaagggaatcatc

SEQ ID NO: 894399 - DNA, 120 bp, Artificial Sequence
  ENSG00000237390_42 (sequence is synthesized)
ctgagaggctcctgaaggatgaggctgagtgtgggccaccatgagtgggcccagctggcccagcaggaggcaggggtagagtgatggaaggggaaggcaaagagaagggactgaaatgcc

SEQ ID NO: 894400 - DNA, 77 bp, Artificial Sequence
  ENSG00000237390_43 (sequence is synthesized)
aagggactgaaatgccactggttcgccaggctagagtgcagtggcgctgtctcggctcactgcaacttccacctccc

SEQ ID NO: 894401 - DNA, 73 bp, Artificial Sequence
  ENSG00000237390_44 (sequence is synthesized)
ttaggtgatttgtgcccagccagaggttctcttatgctctggcctttggggtcaaacactgtccttccagcct

SEQ ID NO: 894402 - DNA, 120 bp, Artificial Sequence
  ENSG00000237396_0 (sequence is synthesized)
atgaagaaacagagggatatactgccgtcttaaaccaacccaaatgcctctgccgcagtcgcagttatttagggtggagaagcgggctctggcaactagagaaggtggccgcagcatggg

SEQ ID NO: 894403 - DNA, 120 bp, Artificial Sequence
  ENSG00000237396_1 (sequence is synthesized)
gacacccgaattgaggagctgtttgggcaataagctgatttagagaattaagacctccacagatgggagtggaatccgcaactgctcaatccatccactgagaagtcccataaaagatgg

SEQ ID NO: 894404 - DNA, 120 bp, Artificial Sequence
  ENSG00000237396_2 (sequence is synthesized)
aagagatctgtgtgccagatccatcttaaaggcaccccacccagaggacagagtctgtctccttcccctaaacaatatgcagaaaccaccctggtatttcatgggttctcacttaggaaa

SEQ ID NO: 894405 - DNA, 120 bp, Artificial Sequence
  ENSG00000237396_3 (sequence is synthesized)
attgagttctgttcaatgatgccccttctgcactggttggtttcatgtgacaaagagagctctagggaggacttttgctaggggaacgcagattgttccagcaagatgaaggcctaggag

SEQ ID NO: 894406 - DNA, 120 bp, Artificial Sequence
  ENSG00000237396_4 (sequence is synthesized)
acctggatggcctgggtgttttcttcccagggagagcagaggaggcctggatttgaactcgagtcttatgactttgccattgaggcaacatccaaaataaaaatagcatgctaaccccaa

SEQ ID NO: 894407 - DNA, 120 bp, Artificial Sequence
  ENSG00000280721_0 (sequence is synthesized)
tcctgattctcctgtcctgagtgagtgcaaggggctcccctgtcgccgatgtgttctttgaagcagatgctgtgcctgatacctgctggagagtcccaccgccttgataaagctaagctt

SEQ ID NO: 894408 - DNA, 120 bp, Artificial Sequence
  ENSG00000280721_1 (sequence is synthesized)
catcggaatactaacagcctgagaaatacctatcaagatcaagtcaggcctcaaagactgagtggccccctcctcagtcctccccagtcccccacccccagcgctggcccccagcatttt

SEQ ID NO: 894409 - DNA, 120 bp, Artificial Sequence
  ENSG00000280721_2 (sequence is synthesized)
tacgttcttcctgattttactacagtttgtgactttcaacgttaaggaaaaggaaaggacgtaaaatacgctcctgcaatcattcatatgcttttagagaaggcagccaaagttctgcct

SEQ ID NO: 894410 - DNA, 120 bp, Artificial Sequence
  ENSG00000280721_3 (sequence is synthesized)
agcggaagctcacccaacctcagcaaccctgggttagcacaagtatacccacttccatctctgagcttcactttggcttctcagaggagtcccgagcagcttattttccagccaagcact

SEQ ID NO: 894411 - DNA, 120 bp, Artificial Sequence
  ENSG00000280721_4 (sequence is synthesized)
gcagtctcttccaagacaacagaaggtgcaaccggcatctacattcttacaacgaaggactgagaaacacctcctgacagtcacactaaaggacagtaaccatggggctggtgacagagg

SEQ ID NO: 894412 - DNA, 120 bp, Artificial Sequence
  ENSG00000280721_5 (sequence is synthesized)
cagccacttttctaaaacgacagatcttcaaagtctgaaagaaacgcagtgtcctcaccaggacgcagcagcctttcccacagcccagactccaaggcaaactgcagaagcaaccctaaa

SEQ ID NO: 894413 - DNA, 120 bp, Artificial Sequence
  ENSG00000280721_6 (sequence is synthesized)
aatgacagaaacatactcaccaaggagaggctggtggctccaccttcccaggaactgtgctgtgaagatctgaagacaggcacgggctcaggcaccgcttgtctggaatgtcaatttgaa

SEQ ID NO: 894414 - DNA, 120 bp, Artificial Sequence
  ENSG00000280721_7 (sequence is synthesized)
gagccagtcagcagcattccaggacaagagagcagctgtcgccaagaccccaagacacaaaggaacaagcttctgggtcgagaaaggccaagttgcacactactgagagactgccatgca

SEQ ID NO: 894415 - DNA, 120 bp, Artificial Sequence
  ENSG00000280721_8 (sequence is synthesized)
gaagccaaccgtcctcggtttcctggcctgtggcatcagtctggttggattacacacaaagccctgcagatctgctgcttttcctgattctcctgtcctgagtgagtgcaaggggctccc

SEQ ID NO: 894416 - DNA, 120 bp, Artificial Sequence
  ENSG00000280721_9 (sequence is synthesized)
ctgtcgccgatgtgttctttgaagcagatgctgtgcctgatacctgctggagagtcccaccgccttgagcttctgggtcgagaaaggccaagttgcacactactgagagactgccatgca

SEQ ID NO: 894417 - DNA, 120 bp, Artificial Sequence
  ENSG00000280721_10 (sequence is synthesized)
gttctcccccttccctgataatcaagcccctgattttcagctgggcacaaaataattcttcctagaacaactccacgtgtgttatcgcccttgcagctgggggtggccaccactggggag

SEQ ID NO: 894418 - DNA, 120 bp, Artificial Sequence
  ENSG00000280721_11 (sequence is synthesized)
aggcagggtgaagaggtcgaaggagcctgagttagcagggatgagcagtggccaggtaaccccagacccattatcctctggatttcttttatgtgaaacaataaaatgtcttgtattcga

SEQ ID NO: 894419 - DNA, 120 bp, Artificial Sequence
  ENSG00000237399_0 (sequence is synthesized)
gcggggcagacaatgatgggagggtctgcagcacagacacaggctccttgaagacgcccgtggtgagatcagccccaggtcgccgcttccacagacaggccttttcctaaagtggatgaa

SEQ ID NO: 894420 - DNA, 120 bp, Artificial Sequence
  ENSG00000237399_1 (sequence is synthesized)
gggagtcaaataggccagcttcgtgtcttgatctgcctttgctgtcattcacgcatctgtcctcatgaaggcttaacctaccatgtttatcagaaatctcagcctaaattcattcgattt

SEQ ID NO: 894421 - DNA, 120 bp, Artificial Sequence
  ENSG00000237399_2 (sequence is synthesized)
atcagcaccaggctgagtcgcggaaaggatctgtcagaccgctccactggcatcgactcagctcgggagctacgttcaaagaagggacccaaggattgagaagaacaatggattttttga

SEQ ID NO: 894422 - DNA, 120 bp, Artificial Sequence
  ENSG00000237399_3 (sequence is synthesized)
tgtgtggtgcaacaaacgcatagctgagggctgtaaatcgggatggatcagtcggtctgcccaccagccgtgagggaagtggggagaagctgtcaccccaacttgagttcaagaagactc

SEQ ID NO: 894423 - DNA, 120 bp, Artificial Sequence
  ENSG00000237399_4 (sequence is synthesized)
gaaagggttgcaggcagaggggcctggagcagcaggaggccacctcccaaaggctccactcccaggggccaacagagagaccacatccagaattgaaccagggatacgcagacaccaacg

SEQ ID NO: 894424 - DNA, 120 bp, Artificial Sequence
  ENSG00000237399_5 (sequence is synthesized)
gagaagacatgagcgtcaacctcctccacggagcagcacggcttctctactgacatccatgaactagactacaactctctaagttaatcaaatttactaagttagttatcaccgacatca

SEQ ID NO: 894425 - DNA, 120 bp, Artificial Sequence
  ENSG00000237399_6 (sequence is synthesized)
ctgttccatgtcaaatccatggattcatgagtcaaagaaacagcagtgaacagccttcaggctacggtttgggccattcctctgccagcgtattccagccaaagtctgttttcctatcag

SEQ ID NO: 894426 - DNA, 120 bp, Artificial Sequence
  ENSG00000237399_7 (sequence is synthesized)
actactcactgcaaggcacagaagtgagcgcgggatctaaggccacaccgcagggtctgaactcacttaactggcccaacactgcacaagatacttaatcctcctgaacctcagtttctt

SEQ ID NO: 894427 - DNA, 120 bp, Artificial Sequence
  ENSG00000237399_8 (sequence is synthesized)
catctgcgtacgggggatatgaacccccacatgctggactgctctgagaattgagttaatgcgtgtaaaacatgagagctgctctggcacccaccaggcgctcaccgggcgccagcacca

SEQ ID NO: 894428 - DNA, 120 bp, Artificial Sequence
  ENSG00000237399_9 (sequence is synthesized)
ccagtgcatacctcgaccgtgtgtgggcgcacaggcctccgttcctttttactccgaccgatgcttctaaggaagtcttcgaccgctttttctgtctgaggcatctgctgaggagtcgca

SEQ ID NO: 894429 - DNA, 120 bp, Artificial Sequence
  ENSG00000237399_10 (sequence is synthesized)
ttcactgaacacctgtttgaaaaattatgtatacataaaaccactgttagaaaaaacagttttagtaattcatcacattttgtataactcaataatgttgtttttatagaaaatactgtt

SEQ ID NO: 894430 - DNA, 120 bp, Artificial Sequence
  ENSG00000237399_11 (sequence is synthesized)
cagagtgttaaacagcagccaaatgtggaaatgccacggccgcctccctgctcttcagtgcttcaggttatcaagagatttccgcacagttcaatgtggcagctaatgaagccgtccata

SEQ ID NO: 894431 - DNA, 120 bp, Artificial Sequence
  ENSG00000237399_12 (sequence is synthesized)
cgcggagcctgtgactctaaactctagttcttctgaagagcaaagaaaatacagagactattaagatctgctaaccgtgccttcggaattacactatcaaaacactgacaacttttaaaa

SEQ ID NO: 894432 - DNA, 120 bp, Artificial Sequence
  ENSG00000237399_13 (sequence is synthesized)
ttactgtccagaagtcatcaatttgaaaatgtgaactggttgttaaagcagaacattataaactgcaaaaaaataccatgctctcaaagttacatgaaaatagaactcttccaaattcca

SEQ ID NO: 894433 - DNA, 120 bp, Artificial Sequence
  ENSG00000237399_14 (sequence is synthesized)
cagaattgcaaatactactatcatataaaagctacttgaactctacagtatattgacagagtgtatattttttcctttcagctgtaaatcctgaacttattctagttaaagtaacagcag

SEQ ID NO: 894434 - DNA, 120 bp, Artificial Sequence
  ENSG00000237399_15 (sequence is synthesized)
gtaccattatattaatactaactatatcccaggcatgtatgctgccttgcagatattctttcttttattccttacgataaacctgcaaaggaaggttttatggaggaggaagcagaagac

SEQ ID NO: 894435 - DNA, 120 bp, Artificial Sequence
  ENSG00000237399_16 (sequence is synthesized)
gcaagtgggtcagctgcccaggaccgcctgggagcgagtgtgagtgctgacccggcggcaccagaagccaggcctgcctgagcccaatgccaagagaccctgatcgccaggcttcacctc

SEQ ID NO: 894436 - DNA, 120 bp, Artificial Sequence
  ENSG00000237399_17 (sequence is synthesized)
ttctcaggacatgactggggaaaggcatcaggactctgtgtgaagaaggacaagtgacttcagcaaacattttcttgttaagtactgatgaatacatcaatgtcactgacaataagatgc

SEQ ID NO: 894437 - DNA, 120 bp, Artificial Sequence
  ENSG00000237399_18 (sequence is synthesized)
tgaaaataaacaatcatttttaaactttattcatgctcacacatctgagggcataaggccaactgaaggtataggactgagctgccagatgtttcctcaaagcatcacataattttataa

SEQ ID NO: 894438 - DNA, 120 bp, Artificial Sequence
  ENSG00000237399_19 (sequence is synthesized)
gaaactgcacttttactctggtcttcagcaagctcacctttacagatacctcagttacggaccatgtgcttttggaagcaatataactacttgccctcaatctatttgcacttctagcac

SEQ ID NO: 894439 - DNA, 120 bp, Artificial Sequence
  ENSG00000237399_20 (sequence is synthesized)
aaaattagcctgctttcttccccatctcctacaacttttaataggcttaaaatattttcttagtttgttagaacacttgacatttacaataaattctataacctttaccaagcactctat

SEQ ID NO: 894440 - DNA, 120 bp, Artificial Sequence
  ENSG00000237399_21 (sequence is synthesized)
cttgaagtttctacaagtaagaaatacctaaaaactatacttaatagaatgaatcataaaatatttagaaacaaatcacacatgcacctcatattatcaccatttaacaagtgtttcttg

SEQ ID NO: 894441 - DNA, 120 bp, Artificial Sequence
  ENSG00000237399_22 (sequence is synthesized)
atacgcgggagcttcctcaggatgggtttgatatctgtcatttctgcaatcctcttcatcagccgcacctaagccagaggaaactcgctcagagagaggcagaggctacaacagacccgc

SEQ ID NO: 894442 - DNA, 120 bp, Artificial Sequence
  ENSG00000237399_23 (sequence is synthesized)
tgagtctgaaccaagcacctgtgacatcagaaccctgcttgggcaggggttatgtgtgcgagtgcacggcttgggcagggctggaactgggatgcagggtggtacaaagaggaagatgag

SEQ ID NO: 894443 - DNA, 120 bp, Artificial Sequence
  ENSG00000237399_24 (sequence is synthesized)
tcaaaaccaaccaaccaattcttccccatatttagtcagttagaaagttagcatttctgggacataaattaatgtattcccaaagaaattagtaactctggaatatgtggctaaaccgga

SEQ ID NO: 894444 - DNA, 120 bp, Artificial Sequence
  ENSG00000237399_25 (sequence is synthesized)
gtaatagaggttccttccaagcttcccacctgatccatcccgctgaaggtctcctgcaggtcccctgcgggcgtgagggtccggcctgccctgatggatgcgtacaggtgcccagagtca

SEQ ID NO: 894445 - DNA, 120 bp, Artificial Sequence
  ENSG00000237399_26 (sequence is synthesized)
ggaattccattggcgagctcctgggcggtcatcttcaccagcaccttgaagtgctcctcttcttcaaagcacgggctatggaaaaaggagaagaaaaaattcctggagacccattcctca

SEQ ID NO: 894446 - DNA, 120 bp, Artificial Sequence
  ENSG00000237399_27 (sequence is synthesized)
cgtcccttcagtatcatggaaagttgattaagttttcagagtactttaacaaccaaagaaattttataagtccatatgaactacaagtaaaagtcagacttggaaaacaacaacacacac

SEQ ID NO: 894447 - DNA, 120 bp, Artificial Sequence
  ENSG00000237399_28 (sequence is synthesized)
gagtaaaactgtctcctttaaagtacttcaaacaaagatctctagtacaccccaagaatggacaactcttgcaaataaagttacttgttaaatatttcactccatagctgcatcatgtct

SEQ ID NO: 894448 - DNA, 120 bp, Artificial Sequence
  ENSG00000237399_29 (sequence is synthesized)
ggcaggtttcgatccaggcagagagaggagaaaagcacaccctgaaccaaagaaaacacagaagaaaggaattagggccgaatcgaacagtgacagacactggagaaaagcttcccaccg

SEQ ID NO: 894449 - DNA, 120 bp, Artificial Sequence
  ENSG00000237399_30 (sequence is synthesized)
cagcagtcgtctgacggtaccaggctacctgctcgtaggtgtccatgtgtgagtcgtcggggagcacgtggggagaagcactcatccctccggtcttcaattctatctgctgagcctgct

SEQ ID NO: 894450 - DNA, 120 bp, Artificial Sequence
  ENSG00000237399_31 (sequence is synthesized)
cccggtagtcaagaaggccgcagcccagcctgacacagcagagaagcatcgccccgattacaagtcagtctttactgaatcatttttaaaatcgtgcatcttgagttacaagttgcttcc

SEQ ID NO: 894451 - DNA, 120 bp, Artificial Sequence
  ENSG00000237399_32 (sequence is synthesized)
attaattcaataactgcggctttgccaacctctctacacttcgaaggtcataagcaggtgcactctggccttcgccctcgagagttcatgtgcccccttccccagggagaccccagtttc

SEQ ID NO: 894452 - DNA, 120 bp, Artificial Sequence
  ENSG00000237399_33 (sequence is synthesized)
tcccgcctaggaagttagcgtccagaggcacaagacacttgggcagccagtgtctgcacttaaaacaccattctaaaataggcatttccagttgtaagctcttcaataaatgttttatga

SEQ ID NO: 894453 - DNA, 120 bp, Artificial Sequence
  ENSG00000237399_34 (sequence is synthesized)
agaagcacaaagctgtggcttccagaacagctggaggggccgggaggatagaaatgcccacaagacagacgaaagactccccactcctggggcggcgtggaaggtcatctcctactttag

SEQ ID NO: 894454 - DNA, 120 bp, Artificial Sequence
  ENSG00000280725_0 (sequence is synthesized)
ggatatgggaggctctgcaacagcatattctacaaagaaaaagataaatgaacagaattcactctaagattcaccatggatgtttactagtcaacttgatgtcccaaaccatctgcctat

SEQ ID NO: 894455 - DNA, 120 bp, Artificial Sequence
  ENSG00000280725_1 (sequence is synthesized)
ctaacacagctgatcttaagttcatgcttcacagctattggatgccccttaaccaaggacttagggctcaaatatttgaagaacactggagtcaggagaccaggatttcagatctgactg

SEQ ID NO: 894456 - DNA, 120 bp, Artificial Sequence
  ENSG00000280725_2 (sequence is synthesized)
acactaactaggctcacctgggagaaaccagatgctctgtaggaaatgcaacggtcctgcaaacaccatgctatgggaagcccaagccatgtgcagaggccctggaggaagagattcatt

SEQ ID NO: 894457 - DNA, 120 bp, Artificial Sequence
  ENSG00000280725_3 (sequence is synthesized)
gtgtcgagcaagagaccacatgcatgaggaagccatcttagaaatggatccttcatcccacccatttcagtgttccatggaaagcccaaggctctcaggaactgaagcccaaagtgctta

SEQ ID NO: 894458 - DNA, 120 bp, Artificial Sequence
  ENSG00000280725_4 (sequence is synthesized)
aacagtaaacactagaagtttaggagctgaaaccccattgattggcagactgctctgtcaagactgtggaatcaatggtagtttctcaacatgtgctttggagaagaagggaagacaact

SEQ ID NO: 894459 - DNA, 120 bp, Artificial Sequence
  ENSG00000280725_5 (sequence is synthesized)
tatctgaggttctctatattccaggaggcctgaacctctgggattggatccccaggtgagcagctgactcagttctcacacctgctgccctgccctcattctggagtgactgtcagaagg

SEQ ID NO: 894460 - DNA, 120 bp, Artificial Sequence
  ENSG00000280725_6 (sequence is synthesized)
ggattgagcctcagccacctggcctagggctagtcctcctctccaacaacccagatcctggagttgtgtgcctagttttggactctcctttccatcaaatgactttccctctagaaagtc

SEQ ID NO: 894461 - DNA, 120 bp, Artificial Sequence
  ENSG00000280725_7 (sequence is synthesized)
ctttcgtctctcctgcaggcagcatctgttggattcaccctagtccaggattaatctatggccagagggccacatccggaccactacctgttttggtaaataaaattttatcagaacgta

SEQ ID NO: 894462 - DNA, 120 bp, Artificial Sequence
  ENSG00000280725_8 (sequence is synthesized)
agaatcagggatctaaagtgatacaaacccttaatatggtagctcccaaacttgctccattataaatatcaccaaaggagtttttgaaaaacagagatgctgatgttctacttcaaacct

SEQ ID NO: 894463 - DNA, 120 bp, Artificial Sequence
  ENSG00000280725_9 (sequence is synthesized)
ccttaatcaatctccctaatgtttatttaaacagagctgaagctatttcctggtatcaaagaccaaattcctagaactaagggactgctgattttgcttttttcagcaattaccaaggtt

SEQ ID NO: 894464 - DNA, 120 bp, Artificial Sequence
  ENSG00000280725_10 (sequence is synthesized)
agggctgtggttctcaaagtgtgatgtccaaaccatcaacatcaacgtcacaagagaacctgttagaaatgcaaattcatcggtcccatccaagacttatagaatcagaaactccaggtg

SEQ ID NO: 894465 - DNA, 120 bp, Artificial Sequence
  ENSG00000280725_11 (sequence is synthesized)
ggctcagaaagccctccaggtgattatgatgcccgaaagcagagactggcaaactgcagccaatggaccaaaaccactgggtggctcgattttgtacaacaatgagctaagaatgggttt

SEQ ID NO: 894466 - DNA, 120 bp, Artificial Sequence
  ENSG00000280725_12 (sequence is synthesized)
tacatttgcgaacagttgcaacaaaaagtaacaaagccaaagaagaatatgtaattgagacttatgtggctggtaaagactaaaatttcaccttatggccttttacagaaagtttgccaa

SEQ ID NO: 894467 - DNA, 120 bp, Artificial Sequence
  ENSG00000280725_13 (sequence is synthesized)
cctccgcattcaagttgagaactattgccataaaggcttgctcagtaaaaggaacttagatccctgaataacttagtggagcagaagtgctctgtcagtttggcctgctcactccaaaac

SEQ ID NO: 894468 - DNA, 120 bp, Artificial Sequence
  ENSG00000280725_14 (sequence is synthesized)
tgctagagagaaaaataaactcctaggccgtgtaagcctccatacacggggcctctgttacggcagctgagcccaaatcctgaccaatgtaagaggttaagaaggagctgctatactaca

SEQ ID NO: 894469 - DNA, 120 bp, Artificial Sequence
  ENSG00000163364_0 (sequence is synthesized)
gcccatcgtggaggctccgcctggaaaagaagtccgacttcctctccaagctgctccgaggggaatggggaatcggcaggaaatgacccgaactgccagcctgcgcctttgcagccggcc

SEQ ID NO: 894470 - DNA, 120 bp, Artificial Sequence
  ENSG00000163364_1 (sequence is synthesized)
ggccctcgctttgctgaagacgagcagctcccaccaaagtcttgcctccccttaccccgaaagccccgctcaggtcaaagagcctaaaagaaaagcccgggccgggcgcggtggctcacg

SEQ ID NO: 894471 - DNA, 120 bp, Artificial Sequence
  ENSG00000163364_2 (sequence is synthesized)
aaaaaaaaaaaaaaagaaaagaaaagcccggagccatacactcacctggttgaagccataaagagttcaatatttcaagtgaaaatctgcctgttcgaaaagaaaatattcacaaatgag

SEQ ID NO: 894472 - DNA, 120 bp, Artificial Sequence
  ENSG00000163364_3 (sequence is synthesized)
agaaaatattcacaaatgagcagtgtattagaagacaactgaattgcttctaagaatgggtctcactctgccatcacccaggctggagtgtggtggcaccatcatggctcactgcagcct

SEQ ID NO: 894473 - DNA, 120 bp, Artificial Sequence
  ENSG00000163364_4 (sequence is synthesized)
tgagccaccatgcctggctgatttgtctttttaaattttttatagagaccgagtctcaactatattgtccaggctggaaaagaacttctttccctccaagtgataaccttttccagacaa

SEQ ID NO: 894474 - DNA, 120 bp, Artificial Sequence
  ENSG00000163364_5 (sequence is synthesized)
gtcagcttaaaaactgacccaaaggccctgaagtacacagttttcttggagaaagaaaaaaataagtgaaaaggacttgctgacttgctaattcattttggggcctgtgggtaacatcag

SEQ ID NO: 894475 - DNA, 120 bp, Artificial Sequence
  ENSG00000163364_6 (sequence is synthesized)
aatggcaaagcacttggggcttttttctaatttgtatttttttaatcttctgagaaatgacttttatatgccaagattcattccatgattagtttttatgaccaagttatgaacgctttt

SEQ ID NO: 894476 - DNA, 120 bp, Artificial Sequence
  ENSG00000163364_7 (sequence is synthesized)
gaatatggggacctagaatagaaatgctaacctacctgcaaggagagctctgtgattggcatccccatcatgctgtaactgacacaaaataaacttagggtaattgccgcatagtgtaac

SEQ ID NO: 894477 - DNA, 120 bp, Artificial Sequence
  ENSG00000163364_8 (sequence is synthesized)
tttaatgtgtgagcatactgtaacatctgacaagcttcttgatctagatcagcaatgtgtaacccattcattgttgtcactctcaacaaggccttatggtcaaacatcatcactctcact

SEQ ID NO: 894478 - DNA, 120 bp, Artificial Sequence
  ENSG00000163364_9 (sequence is synthesized)
aaagagatagtttactgaaatatactgagattttgaaactggagtcaagaggtagcacactgttttatgttgatccatttaatggtccttgacagccaataaaaagacactggaagaata

SEQ ID NO: 894479 - DNA, 120 bp, Artificial Sequence
  ENSG00000163364_10 (sequence is synthesized)
gcgagccacgggcctcgctgcgggttcaagtgcgtccgggtttggacgtcgcggctccaggagtgtgctctctctcctgcccatcccctccccggagttcagcgcatccggggccccggg

SEQ ID NO: 894480 - DNA, 120 bp, Artificial Sequence
  ENSG00000163364_11 (sequence is synthesized)
gacccctcttcccggccctcctggccgcgctggcccgcccgcatggggccgaggttcctggccgacgcgcgagggcgcgggcgggtaccgggttcccgtttttcccaggccccgatcccc

SEQ ID NO: 894481 - DNA, 120 bp, Artificial Sequence
  ENSG00000163364_12 (sequence is synthesized)
agccccgctcaggtttgtaaagaggggtgcgagatctgaaaagtatttgtcttctagggagagagatgttggtaaggggcccagagaaagacgggtcctttttagctcatcaacgcgcca

SEQ ID NO: 894482 - DNA, 120 bp, Artificial Sequence
  ENSG00000163364_13 (sequence is synthesized)
cgtcttgctttgcagctccaaaatgatgccagcgctgctgtccgaagggtcaatattaatgcgttaagtgaaatgggaaataaatggacagtggcacatttcgtggcatcatttttacaa

SEQ ID NO: 894483 - DNA, 120 bp, Artificial Sequence
  ENSG00000163364_14 (sequence is synthesized)
ggggatgtcgaaagttttaagctgcatttaagaattagccacatcttgcctgaaagttaatattttttgataaactcgttaataaagcctagaagagttcaatatttcaagtgaaaatct

SEQ ID NO: 894484 - DNA, 120 bp, Artificial Sequence
  ENSG00000255139_0 (sequence is synthesized)
ggacttctttggccaagagggggcccgggctgtcaccattcccggcaagcccgcgaccaagcaggcagcggaggcggcgcaggccgagagctcccgcccctctgacagtgagagaagggt

SEQ ID NO: 894485 - DNA, 120 bp, Artificial Sequence
  ENSG00000255139_1 (sequence is synthesized)
cgcagcgcccacggctgcctagaacccgaaagaagaggagcggggtgcggggacacagggttgctcaagaaagtgagctatgcgcagtgctccggaagagcttgtctcaaaccaggtccc

SEQ ID NO: 894486 - DNA, 120 bp, Artificial Sequence
  ENSG00000255139_2 (sequence is synthesized)
aagtgagggcagaggcgtaacttcgtactgggcagtttaaaaggtgttccaatatcgcagttatctccgcgtggacactccattaaaccgaccccgcgtgtgaacacacttgatgatgtt

SEQ ID NO: 894487 - DNA, 120 bp, Artificial Sequence
  ENSG00000255139_3 (sequence is synthesized)
aatgcctccattgctaaaatcagtcatcttcctgcgaaggcatgaggaggaaaagagaggaagtaactgagcgataatatgctgtatgagcctcctgctctgctgcccattacctgcgtc

SEQ ID NO: 894488 - DNA, 120 bp, Artificial Sequence
  ENSG00000255139_4 (sequence is synthesized)
acctccacaagctactgaacctcaaggaacccatctcctcatcaggaaaaaaaataagctttatgtagcagggtctgaactctgtaggtcttcaccacggctcaggaggatgaggagcag

SEQ ID NO: 894489 - DNA, 120 bp, Artificial Sequence
  ENSG00000255139_5 (sequence is synthesized)
tgacaggccaaactacgagaaaagacagagggaatcaaactcaacactgtgtctaaacctcctccaccactgttgaagggatcctggcatcagatggggaacagctctaaatcaaaataa

SEQ ID NO: 894490 - DNA, 120 bp, Artificial Sequence
  ENSG00000255139_6 (sequence is synthesized)
gttctgagaattggctgtgaaagcggcattgctgaccagtgagagagacctaatgaggagcaggccggggcaaccaatgaaatcggagaagagcgcttgggggcgtgtccgcctgctttc

SEQ ID NO: 894491 - DNA, 120 bp, Artificial Sequence
  ENSG00000255139_7 (sequence is synthesized)
agcctttggcaagttggtgggagctaaaatcagtcatcttcctgcgaaggcatgaggaggaaaagagaggaagtaactgaggtgggtacataaggcatggagagtgaagaccccaaaggg

SEQ ID NO: 894492 - DNA, 120 bp, Artificial Sequence
  ENSG00000255139_8 (sequence is synthesized)
ctgtaagacctcataaggagtccaagttttattctcattgcaacaggaagcaatcaaagggattagagcaagtgaccccagttcattcattctttctttgtttctttctgtatctctctt

SEQ ID NO: 894493 - DNA, 120 bp, Artificial Sequence
  ENSG00000255139_9 (sequence is synthesized)
ctttctttctctctgtcttttttcttgacagggccttgctctgtcatctaggctagagtacaatgatgtaattaattatggttcgctgcaaccttgaactcctgggcttaagcaatcctc

SEQ ID NO: 894494 - DNA, 120 bp, Artificial Sequence
  ENSG00000255139_10 (sequence is synthesized)
ctgcctcagcctcccaaatagctagggctacaggcatgcaccactatgcctagatactttttattttttgtagagacagggtcttgctgtggtctcaaactcctggcctcaagttatcct

SEQ ID NO: 894495 - DNA, 120 bp, Artificial Sequence
  ENSG00000255139_11 (sequence is synthesized)
cccgcctcagcctcgcaaaatgttgggagtggagccaccgtgcctggcctcaattcttgtttaaaattatcactggctgatgtgtggagtcacaagagtggagagggacagcaattagga

SEQ ID NO: 894496 - DNA, 120 bp, Artificial Sequence
  ENSG00000255139_12 (sequence is synthesized)
gtgcttttctgtaaaaccaggtaaagatcagacaagcatgagttgaaaggctatgtctctctccaggctttattctgccatagcagtgaccaggcgcagccaacagaaacggaaagtcat

SEQ ID NO: 894497 - DNA, 120 bp, Artificial Sequence
  ENSG00000255139_13 (sequence is synthesized)
ggtgtccaacacgcctctctgttccccatgctgaggttaaaagatggtttttccttgccatggataatgtagaatttgacttttctcctatttatgagaacagaaataggctaaaaaaga

SEQ ID NO: 894498 - DNA, 120 bp, Artificial Sequence
  ENSG00000255139_14 (sequence is synthesized)
aagtaaatgaagaccaattttggtacagaaattaaaaatcaggaaaaaataagaaaaaagcattacagtaagatattttgaattaagaaacaaggtgtaaactgtaggaaaatatacaaa

SEQ ID NO: 894499 - DNA, 80 bp, Artificial Sequence
  ENSG00000255136_0 (sequence is synthesized)
gcagcagcagcttggggccgccgaagcagtagcactggaaggggcagggtgccgcgggctggctcagcgccgccgccacg

SEQ ID NO: 894500 - DNA, 120 bp, Artificial Sequence
  ENSG00000255136_1 (sequence is synthesized)
ccatcgcggccgcccccgcatccagcgcccgggccgccgcgctcaccaatcataaaaggcacatggaatcaaagcttttggtcaactgccaacaaggtacagaggcccaacagcaatcat

SEQ ID NO: 894501 - DNA, 120 bp, Artificial Sequence
  ENSG00000255136_2 (sequence is synthesized)
gtggatcctctcaccccagttgagccttctgatgactgcagccctggctgatgcttgactacaacttcatcagaaatcctcatgaagatccagcaccttccagttagcccatctatgaga

SEQ ID NO: 894502 - DNA, 120 bp, Artificial Sequence
  ENSG00000255136_3 (sequence is synthesized)
aaaccaatgctccgatgagtgcagtgacttcccatgcctgtggagagtctatgcctttgattggatccccagaggtggttttcacttgccccccattgcctataccatgttgccttcctg

SEQ ID NO: 894503 - DNA, 120 bp, Artificial Sequence
  ENSG00000255136_4 (sequence is synthesized)
attcaagagttgccttactagatggccttgggcaagtcacaaaacctttctgggattctctgagtgtggggttgattttctgtctctatcaggtgatcctttccccataatcttaattat

SEQ ID NO: 894504 - DNA, 120 bp, Artificial Sequence
  ENSG00000255136_5 (sequence is synthesized)
ttatgccatgctttctgttctcttcagagagattagcatttacacatatgttaaatgttattttctaaatgctaacaccaattaatgcaatcctatctgtttttaacttccttagcctcc

SEQ ID NO: 894505 - DNA, 120 bp, Artificial Sequence
  ENSG00000255136_6 (sequence is synthesized)
gtgaagactcttgtttaataaacagtagccagcaggtagagagtaatgtacctctttggtaggctgggagacagcagagtgtggatgggatcggaattggggaggagggttggttggaat

SEQ ID NO: 894506 - DNA, 120 bp, Artificial Sequence
  ENSG00000255136_7 (sequence is synthesized)
ggagagcctgaggctgggggtgggaggatgttggtggaatgacagggtgggcagaaggaaaagcccaatgtgtgtccaggccactgaaccacagcatttggagcaactcccttgtatttc

SEQ ID NO: 894507 - DNA, 120 bp, Artificial Sequence
  ENSG00000255136_8 (sequence is synthesized)
tggagttgatgagagacactttattgacttgaattgttaaagctaaagactattaaattataaaataagaggcttctcagcttctagagccacacaattatggaaagttctagtattaaa

SEQ ID NO: 894508 - DNA, 120 bp, Artificial Sequence
  ENSG00000255136_9 (sequence is synthesized)
atcatagcaccttagcagggaagaattacagaaattatagaatggtaaaatattagagccagagagccaaaactccatattagacaattttaaaatccaagaatctcagtgttaaaaagg

SEQ ID NO: 894509 - DNA, 120 bp, Artificial Sequence
  ENSG00000255136_10 (sequence is synthesized)
aaaaaaagaacccaataatttattgatcctgtctatttgcactggtcatgatgttaggagtaatctcatatgttatcccatttaatttctaccacaagtcttatgccattcagtcccata

SEQ ID NO: 894510 - DNA, 120 bp, Artificial Sequence
  ENSG00000255136_11 (sequence is synthesized)
cctgctcaaacctttgtcagtaatactgcgttatcaaacacaagcttgcataacctttatgacgtgggagtcatcacatctgggcatagctctgccgcctgccaaattgtgctagaaaat

SEQ ID NO: 894511 - DNA, 120 bp, Artificial Sequence
  ENSG00000255136_12 (sequence is synthesized)
tctcccttatataagttgcactctatctccctatcatgctcccacactggtccagttcatgtcctctgagctaccccgagtaagtctaatctcctgctcacgtgacagcttttcagatgt

SEQ ID NO: 894512 - DNA, 120 bp, Artificial Sequence
  ENSG00000255136_13 (sequence is synthesized)
ctaaagacagcccttatttcttttttctctaggctaagctggcttgttgatcatgtagctagaaatgggacagcaaatgaaagaatatttgagcttaagaggcccttagaggtcaccttg

SEQ ID NO: 894513 - DNA, 120 bp, Artificial Sequence
  ENSG00000255136_14 (sequence is synthesized)
tctggatacttccttttactgctaggcaatatggctttatagtcaggatcctggacctcaagtttctgggcctcagtctccttatccctaaaataaagataatagtgatactgacataac

SEQ ID NO: 894514 - DNA, 120 bp, Artificial Sequence
  ENSG00000255136_15 (sequence is synthesized)
agaggtgttgtgaagattgaatgagatgatgcaagggaagctcttagaagagcactgggcacacagtaaacagccaataaatattagctgtaatcattggaggcccaggggagaagggac

SEQ ID NO: 894515 - DNA, 120 bp, Artificial Sequence
  ENSG00000255136_16 (sequence is synthesized)
ttgctcaagatcacacagcaactcagaggcagagctggggttagaccaaggacgcctgcctcccagcctgggccctttcccattccactcttccctctgtcttcctcagaaaaagaaaat

SEQ ID NO: 894516 - DNA, 120 bp, Artificial Sequence
  ENSG00000255136_17 (sequence is synthesized)
agtcccagagggaaccaggatacttttctcactgaatcatttaggatgcaaggaagaggtcacctgctttagagtggcttaaactttttattttttaatgaggccagaagaagttggaat

SEQ ID NO: 894517 - DNA, 120 bp, Artificial Sequence
  ENSG00000255136_18 (sequence is synthesized)
gaggattggtctgctgattcaacaatgtctttgatgacccaggcatttcccattctgagcctcgagggtgactacccctgtgattgcaagatgactgagtgccatcaggaaccatgtcct

SEQ ID NO: 894518 - DNA, 120 bp, Artificial Sequence
  ENSG00000255136_19 (sequence is synthesized)
cccaagcagggagaaagggcatggtagcaaaaagggtattctcccttcacatcattctcttatccaggagagaagctttcccagcagactatccccaaacatgtcattgactaagacgag

SEQ ID NO: 894519 - DNA, 120 bp, Artificial Sequence
  ENSG00000255136_20 (sequence is synthesized)
gtcacatgtctactcttggaccactttctggcaaaggggaaggcatttccattgctgccttggatcatccctgtggctgagcaccttgctaccagaatgaagaagagagcatttgccatg

SEQ ID NO: 894520 - DNA, 120 bp, Artificial Sequence
  ENSG00000255136_21 (sequence is synthesized)
ggaaggcaaccaatacaacctgccatactcatcttctgttttctctctggattgccctcctacctcctctccatctccgccaggaagtcttccctggttgccagggccttgtccggcaca

SEQ ID NO: 894521 - DNA, 120 bp, Artificial Sequence
  ENSG00000255136_22 (sequence is synthesized)
ccctcttctaatgtaattgaacattgtttaattcaagttacatttcactttgccaaagatttctcaccttatcatgtccagatcttatcttctcaaccaggctgtgataggtcattgcaa

SEQ ID NO: 894522 - DNA, 120 bp, Artificial Sequence
  ENSG00000255136_23 (sequence is synthesized)
gagttatagcagcgactaatgaataagtacctactgtgtgtcaggcactggtctgagtgcttgttgtagccagcttccaaatggctcccaatgatccataccccctggtattcatgcctt

SEQ ID NO: 894523 - DNA, 120 bp, Artificial Sequence
  ENSG00000255136_24 (sequence is synthesized)
tgggaaaatttattttttggttttggggggttttttgaggcagggccttgctctgttacccagactggaatgcagtagtacaatcactgctcactgcaatcttgacttcctgggctcaag

SEQ ID NO: 894524 - DNA, 120 bp, Artificial Sequence
  ENSG00000255136_25 (sequence is synthesized)
caatcctcccacctaaaccttacaagtagctgaaactacaggtgtgggtgctaccacccttggctaagtttctttttattattattattattttttggagagatggggcctcactgtgtt

SEQ ID NO: 894525 - DNA, 120 bp, Artificial Sequence
  ENSG00000255136_26 (sequence is synthesized)
tgatcctcctgcctcagtctcccaaatggctgggatcacaggtttgagccactgtgtcagccagaaaatttattactcagtagtagattactatattgctactttatcacattaaatcct

SEQ ID NO: 894526 - DNA, 120 bp, Artificial Sequence
  ENSG00000255136_27 (sequence is synthesized)
ggactttatgaagtggggatggagagacaagctgtgcgatggggatgaagaagataacccaggtcagagggaacagcataagcaaagatcttggctcaaccaagaggcggactcaccgtg

SEQ ID NO: 894527 - DNA, 120 bp, Artificial Sequence
  ENSG00000255136_28 (sequence is synthesized)
atgtgaatgcagcttgagcatccaggactctccccagatccagggagggcctcagcgatgtgttcacgttgtcatatttttataaaatttgcaaaggtaagatactttaaccacaatcaa

SEQ ID NO: 894528 - DNA, 120 bp, Artificial Sequence
  ENSG00000255136_29 (sequence is synthesized)
aattactattttcttcccactccaacttcccttgtgtttcaattttcctttatgtgggataattggagtggccatgggcacttctgggatctgaccaaggggaagctgagtgggggactg

SEQ ID NO: 894529 - DNA, 120 bp, Artificial Sequence
  ENSG00000255136_30 (sequence is synthesized)
atttgagttgggttcactgggatatgtttatgtggttttctgaaacagaggatatattaatatttatgtggttctctgtgtatagataaatcattgctagtaatctctgtgtagagaata

SEQ ID NO: 894530 - DNA, 120 bp, Artificial Sequence
  ENSG00000255136_31 (sequence is synthesized)
gcttctaggaattctacccactgcccagctcacttggcatggtgatattaagttgccatatgcagaggtcatatcgtgatatgaatgtgtgtcatggcacccagcccaggaagtatatgg

SEQ ID NO: 894531 - DNA, 120 bp, Artificial Sequence
  ENSG00000255136_32 (sequence is synthesized)
gcagtagacaagaaacaggagaaaccaggtttgaaatgtacagagccagaagctagtctgtggaaaattcttctaatcatcagggggagaaaatgtgtctcagaggttaagcagggcagt

SEQ ID NO: 894532 - DNA, 120 bp, Artificial Sequence
  ENSG00000255136_33 (sequence is synthesized)
taataaaagtattacgcattttggggggattgtgtgatgtatctgttttgatttcttttctcattataggtaaatataggtaccttgtacctaattttatattcataattttgtatattt

SEQ ID NO: 894533 - DNA, 120 bp, Artificial Sequence
  ENSG00000255136_34 (sequence is synthesized)
ttcttaaagagggctcctcaaattataaaaccttcagttcccacaaggtctacacatccaaccttggctccatcatttattttctgtgtgatcttggggaagtcacttgtgctttctgag

SEQ ID NO: 894534 - DNA, 120 bp, Artificial Sequence
  ENSG00000255136_35 (sequence is synthesized)
ccagtttcctcttctataaaatgtgaatgacaatttggacaggtgaggattcagaaatcctcatgaccttattccatttttgaaaccattagtagacgaagacactcaaacaaaaattag

SEQ ID NO: 894535 - DNA, 120 bp, Artificial Sequence
  ENSG00000255136_36 (sequence is synthesized)
accagaatataaagattggaaaagatgtaatatacaagcaataatggtgagcaatgaatccagtaaaacctaaatctaagttaatggaaatgatgtggttgttgcaaacctctaatgcag

SEQ ID NO: 894536 - DNA, 120 bp, Artificial Sequence
  ENSG00000255136_37 (sequence is synthesized)
tttatgaagaaagaatttttgtaatagaagagacattatgcaagaacaaatttaataataagctgtatctataattccagactttttttccctgcaaaacctgggaaacaagagggatga

SEQ ID NO: 894537 - DNA, 120 bp, Artificial Sequence
  ENSG00000255136_38 (sequence is synthesized)
aggaatataaacatcctaaaagcctcatattgttgaaggagactttgaaattcttggcgttgatagatacatgctcagatatttattaaacatttacagataccaaccagcaaaataaaa

SEQ ID NO: 894538 - DNA, 120 bp, Artificial Sequence
  ENSG00000255136_39 (sequence is synthesized)
cggccgcccccgcatccagcgcccgggccgccgcgctcaccagggcaccaccaacacttaagcctccatcttcaggcaagaaagtctgtgatatgaatgaagggatcataaaaggcacat

SEQ ID NO: 894539 - DNA, 120 bp, Artificial Sequence
  ENSG00000255136_40 (sequence is synthesized)
agtcatgacccctggatgccagctcctgatgggtcatctgcctaccctagaacttcccagcatctagcatcccagaccttcccagagtctacaagaaaagaaacctaggcatcaggatgt

SEQ ID NO: 894540 - DNA, 120 bp, Artificial Sequence
  ENSG00000255136_41 (sequence is synthesized)
cagttctggtctgagtcctgtcctctgctgactttacaccagcacaatctagcagggagacttaatgtcttctcctcccagcttcctggtacagtgtaagaaagtaagcttgcagatgca

SEQ ID NO: 894541 - DNA, 120 bp, Artificial Sequence
  ENSG00000255136_42 (sequence is synthesized)
aatgcttgtggctcttcattgaccagaggctatattaggggagaggacttccctgggacccccacagggcctggaaaacccctctggccctgacttgctccaccccttggctcttgaccc

SEQ ID NO: 894542 - DNA, 120 bp, Artificial Sequence
  ENSG00000255135_0 (sequence is synthesized)
gcggccaagatggcgctagcggttggagcaggggctctgctgcgacctttacggtagtgaggttagggacgatgggagagcagctttgttcctgaagtgccgtcgaggattaggatcgag

SEQ ID NO: 894543 - DNA, 120 bp, Artificial Sequence
  ENSG00000255135_1 (sequence is synthesized)
tttcttcgatcgtgagggcaattattagtggcctctagccccccagatggcatcttgaggagagagaatccacgctacgagaactaacatagtggacatcgcagttgtccgtagccgatt

SEQ ID NO: 894544 - DNA, 120 bp, Artificial Sequence
  ENSG00000255135_2 (sequence is synthesized)
tccacgtgtgaagtgggaatggtagtgatatctcgtgctatctctgtcaagggcaagaaggagaaggaatttatttgaggccctacgacgtgaactgccgggcacagtggctcactcctg

SEQ ID NO: 894545 - DNA, 83 bp, Artificial Sequence
  ENSG00000255135_3 (sequence is synthesized)
gccgggcacagtggctcactcctgtaatcacaacactttgagatgccgagtcgggaggatcacgaaaccccgcctctactaaa

SEQ ID NO: 894546 - DNA, 77 bp, Artificial Sequence
  ENSG00000255135_4 (sequence is synthesized)
ccccgcctctactaaaaatacaaaaaaacagccaggcgtggtggcgggcacctgtgacgcgaggcggagcttgcagt

SEQ ID NO: 894547 - DNA, 120 bp, Artificial Sequence
  ENSG00000255135_5 (sequence is synthesized)
tttatttgaggccctacgacgtggtaggttcaccctcagcctttgttcttatttcatcttatttgtggagaaggtcttttcgttcctattttacaggtgcggtggctcacgcctgtaatc

SEQ ID NO: 894548 - DNA, 120 bp, Artificial Sequence
  ENSG00000255132_0 (sequence is synthesized)
acttgaaagataggttgtgaagactgcagataataaatgcaaagtacttaacaagagtgctgggtccatggtcagccattgactactggctattattatggtgattttctttcttattat

SEQ ID NO: 894549 - DNA, 120 bp, Artificial Sequence
  ENSG00000255132_1 (sequence is synthesized)
attactaccattgacattgctgctgccactgaagttgttttgttctttttactctttgattggcaccagtcaaagagaactgtgacttctcattcacataaatgttttgcacaagaggaa

SEQ ID NO: 894550 - DNA, 120 bp, Artificial Sequence
  ENSG00000255132_2 (sequence is synthesized)
tatagcttttgatgcctcatgttcccttgggacttctcaggctgcttccatgatctggcatcctggactccgactgagaacagttattacctccttgctgatttctggagctgaccacac

SEQ ID NO: 894551 - DNA, 120 bp, Artificial Sequence
  ENSG00000255132_3 (sequence is synthesized)
ctggaattccttctgccagctcagttctgtgctgaaacatcaccatgcaaatggtccccaaagtagtcttatattttaggaccacagcagcaaactgacagcaatgtatagcttgtgctc

SEQ ID NO: 894552 - DNA, 120 bp, Artificial Sequence
  ENSG00000255133_0 (sequence is synthesized)
gggtgacagttggcagttggaatgggggaactgtgaggaatctgagaaggttggaagtcagccctgaccagaggggatgggatgtgagagacggatgtcaggtggcatgaggcaagggaa

SEQ ID NO: 894553 - DNA, 120 bp, Artificial Sequence
  ENSG00000255133_1 (sequence is synthesized)
gaatttcagaggcaggaagaaagtacacataatagctccctgagcagaaacagaaatgggaagggaatatgatctgagagagagtttcatctgcctttacaatgccggaggcagagattg

SEQ ID NO: 894554 - DNA, 120 bp, Artificial Sequence
  ENSG00000255133_2 (sequence is synthesized)
gcacacaaggacagggtcttgtcttctggtagcttgtctaatacaggacacaggcaagctcacaagaaactgcctcgtagggctgagtgaaatttgctgatagagctgcagaatcacatt

SEQ ID NO: 894555 - DNA, 120 bp, Artificial Sequence
  ENSG00000255133_3 (sequence is synthesized)
cctcaaagacaggaaggagcttaacggagaggcctgatgggatttggagagctgcctgtttcctctgcactgcaggatgggattgagcgtgcccctggctgaggaaggagggcacaagga

SEQ ID NO: 894556 - DNA, 120 bp, Artificial Sequence
  ENSG00000255133_4 (sequence is synthesized)
cgctgcggccgacaggccagtttccataggcaagccgtggctcagctggctcttccgctccaagtctcacaaggctgcaatcaaggtgtcagcctgggctacagtgtgatctgagactca

SEQ ID NO: 894557 - DNA, 120 bp, Artificial Sequence
  ENSG00000255133_5 (sequence is synthesized)
ggtcttcttccaagcacaggtggttgtctgcagaattcatttctctgccgctatagaactcatggtggctcgtttccaggccaacaggagagcttctcttctgcttcaagagcttaaaat

SEQ ID NO: 894558 - DNA, 120 bp, Artificial Sequence
  ENSG00000255133_6 (sequence is synthesized)
tgtcttcttactgagttggatgagtactttataaattctaggtacaagccctatgcagatgtacatattgcaaatattttctcccaggccataacttgccatttcattttcttaatggag

SEQ ID NO: 894559 - DNA, 120 bp, Artificial Sequence
  ENSG00000255133_7 (sequence is synthesized)
tgttgggagaagagaaatgtttgatttaaatgaagtctaacttctcaactttttttttgtatggttcatgcttcttattcttatacaagaaacatttgcctatccaaaggctacaatatt

SEQ ID NO: 894560 - DNA, 120 bp, Artificial Sequence
  ENSG00000255133_8 (sequence is synthesized)
ttctcctatattttcttctagaagtttgataaccttagccttatatttagttctatgacccattttaagtcaacttttctgtatgacgtgagataagagttgagattcaattttcccccc

SEQ ID NO: 894561 - DNA, 120 bp, Artificial Sequence
  ENSG00000255133_9 (sequence is synthesized)
aaattgatatcccatttttaccacactatcggttgaaaacaccatttcccctgttggcaccttaactgaaaaaaataaattgaccatacataagtggatctaattctagatgctttattg

SEQ ID NO: 894562 - DNA, 120 bp, Artificial Sequence
  ENSG00000255133_10 (sequence is synthesized)
ttgtattagtttacatttctctacttatatctacaataattatgtgattgctccatgtttatattaagtctttcaataaattatatccttcagctttttgttcttttccaaaattgtttg

SEQ ID NO: 894563 - DNA, 120 bp, Artificial Sequence
  ENSG00000255133_11 (sequence is synthesized)
agctattctatggcacaaaggtcatattttatataaatttcagcttgccaacttctaaaagaaaacaagcctgctaggtttgcacagaatacataactcaattggggaagaaatgccatt

SEQ ID NO: 894564 - DNA, 120 bp, Artificial Sequence
  ENSG00000255133_12 (sequence is synthesized)
taatgatattgaattttccgattcataaatccagtatatatctccattttccttcaacattatgttatagtttttggtgtacatgtttgcacatatttcattaaaatttcactgaatata

SEQ ID NO: 894565 - DNA, 120 bp, Artificial Sequence
  ENSG00000255130_0 (sequence is synthesized)
acgacagagtggcatgggctctcagaggagggcgcggtcacggctgattggtgggacctgggaactcgcgctggaggagtttagactgtggattaaaacataagccctcaggagacacag

SEQ ID NO: 894566 - DNA, 120 bp, Artificial Sequence
  ENSG00000255130_1 (sequence is synthesized)
actgtcgtttcctctgcaagacactgcctggcacagctactttgaagattcttaaccatccttggggataagaaatgacagtcaggatgtgataattgctactctcctggtattgggtca

SEQ ID NO: 894567 - DNA, 120 bp, Artificial Sequence
  ENSG00000255130_2 (sequence is synthesized)
tccgataacttaatgaggaagagaatagatttggctaagaagacactaagatgctttcagtcttttacttaattccttaggaagatagaaggtaatgaaaaaaattgtcaattttgtgac

SEQ ID NO: 894568 - DNA, 120 bp, Artificial Sequence
  ENSG00000255130_3 (sequence is synthesized)
aggatgtgtctacatgagagactttcccacgaatagcataacttacctaatataataccttgtattatattctgatttacaaagtactgatcatcttattaaatgttagagaaatacaaa

SEQ ID NO: 894569 - DNA, 120 bp, Artificial Sequence
  ENSG00000276754_0 (sequence is synthesized)
acaatttctttcccaactcctgcacagggatgacggcatatcactcaaacatccatttctccttgatatggtttggctgtgtccccacgaaaatctcaccttgaattgtactcccataat

SEQ ID NO: 894570 - DNA, 120 bp, Artificial Sequence
  ENSG00000276754_1 (sequence is synthesized)
tggtgggagataagtgaatcatgggggccgtttccccagtactgttctcgtggtagtgagtaagtctcatgagatctgacagttttttggggtttctgcttttgtgtcttgctcattctc

SEQ ID NO: 894571 - DNA, 120 bp, Artificial Sequence
  ENSG00000276754_2 (sequence is synthesized)
tctttgcctgctgtcatccatgtaagacgggacttgttcctccttgccttccaccatgactgtgagacttccccagccacatggaggtgtaagtccaattaaagctccttctttggtaaa

SEQ ID NO: 894572 - DNA, 120 bp, Artificial Sequence
  ENSG00000276759_0 (sequence is synthesized)
ttgcagtttcactggcattgctctatgtggaagacataaggcattctcatgctgtgaaatcagaagaacacagagactctccagattggcagagaatttgagagaccactcatgcatgaa

SEQ ID NO: 894573 - DNA, 120 bp, Artificial Sequence
  ENSG00000276759_1 (sequence is synthesized)
cacactccaaataaaggggtattggacctgagatatccaaaggatattttttccagttatttcactagttattcacagaacatctcttgatgttggtcattctggggcaatattctcagt

SEQ ID NO: 894574 - DNA, 120 bp, Artificial Sequence
  ENSG00000276759_2 (sequence is synthesized)
tccatttggcttttcattatattcatatttaatttggaggatattgattatatttataactactgttttaaaattattgcctgggctggaatcagtggctcatgcctgtaatcccagcac

SEQ ID NO: 894575 - DNA, 120 bp, Artificial Sequence
  ENSG00000276759_3 (sequence is synthesized)
ttggggaggccaagggagaagtgctgccaccaggagacacgacgacgataattccattaaactggatgttaaaatcaccacctggacactttgggctcctcctcctattaagtcaacagg

SEQ ID NO: 894576 - DNA, 86 bp, Artificial Sequence
  ENSG00000276759_4 (sequence is synthesized)
cctggacactttgggctcctcctcctattaagtcaacaggccaagaatggagttatggtgttggctggggtaactgacccagagaa

SEQ ID NO: 894577 - DNA, 120 bp, Artificial Sequence
  ENSG00000276759_5 (sequence is synthesized)
gtcttccaggaagagctgagagtcttgaacaccaagtgcaaagccatctcaacatgattgcccagagtcaaaggacattccagaagaaagatgctggaaaagccattattctcagcaaac

SEQ ID NO: 894578 - DNA, 120 bp, Artificial Sequence
  ENSG00000276759_6 (sequence is synthesized)
agaaaaccaaacactgcatgttctcacttcactgaagacagaatttctgtttgctttcttcaaaaaaatttgggaaagagtcatttattttcagaatttcatacctaccaaggaactaat

SEQ ID NO: 894579 - DNA, 120 bp, Artificial Sequence
  ENSG00000276759_7 (sequence is synthesized)
caaggaactaatactacagagaaacatagggaaaagggtatttgtactttatatagactaaataaatatctggcagaagcaggattctctccatatgtgtaacagtaaaagcttttcttt

SEQ ID NO: 894580 - DNA, 120 bp, Artificial Sequence
  ENSG00000276759_8 (sequence is synthesized)
ggcttgagtcaggaacaaaagaagaaagaaaattctatggatcctgagagtagagaaaacctatcccctggttttcagagacaaaggcaacagaactggagaaggggcacctaagagatg

SEQ ID NO: 894581 - DNA, 120 bp, Artificial Sequence
  ENSG00000276759_9 (sequence is synthesized)
tgcaaagaagagaaaattagagatctttgggatctgaaggggccatgcacaccgatgtagtgaatatctcaggggccatcagtattgacttatgacttcagatcagatttgtttctcccc

SEQ ID NO: 894582 - DNA, 120 bp, Artificial Sequence
  ENSG00000276759_10 (sequence is synthesized)
aaccaagacctgacggccaaaatcttagcactgtataatatcctcaagtagtagatactgctccccaaagagagtgggtataaaatttcaggtacaaattatattgagtttttatatttt

SEQ ID NO: 894583 - DNA, 120 bp, Artificial Sequence
  ENSG00000276759_11 (sequence is synthesized)
atccctaccagcctaatagaagatttcagtcagaaattacaatgagttaaagaaaatgaagaaagcttgtttgcttcgatccctggatacatctggattcatacccaatacatatttgat

SEQ ID NO: 894584 - DNA, 120 bp, Artificial Sequence
  ENSG00000276759_12 (sequence is synthesized)
gcctcaattaattcctacaacagaactacaaaaaaagaaattcctctaccccttattacagatagaaaacctagaaagaaaaatttaagtagtttcttaagatagcacagctagtttatg

SEQ ID NO: 894585 - DNA, 120 bp, Artificial Sequence
  ENSG00000276759_13 (sequence is synthesized)
atggtgctgggagtcaaccctaagtcttttcaaatctaaaatcatcatatctgttatcctgtagtacccatatcacaaggttgagtaggctgggaaaaatctgctattggccaatctgac

SEQ ID NO: 894586 - DNA, 120 bp, Artificial Sequence
  ENSG00000276759_14 (sequence is synthesized)
tctttttaagttactatgaatctgggatgcactcttgcctcttcatgtgagtagagagacaaagcagatctttggtgttcggtctcaaaagtaaactctactaaataatatatttcataa

SEQ ID NO: 894587 - DNA, 120 bp, Artificial Sequence
  ENSG00000276759_15 (sequence is synthesized)
acacaacaaaacaccaaattggactcctcataagcattttatagcctaatttcttcgcatagttctgctttgtagtgattctgaaaggacaaatcccatgaggaataaagatctatctgt

SEQ ID NO: 894588 - DNA, 120 bp, Artificial Sequence
  ENSG00000276759_16 (sequence is synthesized)
agtaattgagaaattttctgaagattagagacttagctgctttgaagaaaactttggcaagccccaggagtcaagaaatcagctgggaatagttcaggggcactcactggcgctccacat

SEQ ID NO: 894589 - DNA, 120 bp, Artificial Sequence
  ENSG00000276759_17 (sequence is synthesized)
gcattggaaggaggctggcaccaaatggttgcccaaagagctgccagtcgagattggcacttgtgcaccaagactaagggggaagcaagttgcaagacagtggtgccagctggaaaaata

SEQ ID NO: 894590 - DNA, 120 bp, Artificial Sequence
  ENSG00000276759_18 (sequence is synthesized)
ctgcctgtgaaaagaaggagatgagcttctatggaggtaccaaacaataatttctgaagtgtatacaaggatggctgaagtgtggacatgagactggaaacagaggcagggcaatgatgc

SEQ ID NO: 894591 - DNA, 120 bp, Artificial Sequence
  ENSG00000282386_0 (sequence is synthesized)
accgtttcctcaacctggattcttgtggcccacaactctgtgccttgagaatcctcttctagcctcaagggacggtaagacaaaagaaaatttaaaaagggggctcagctgttcttttat

SEQ ID NO: 894592 - DNA, 120 bp, Artificial Sequence
  ENSG00000282386_1 (sequence is synthesized)
gcaaaggtgaaaaaagcttcattgcctaaagaagggacagatgggatcttgcttcctacaggaaaattaattttaaaaaagaaaaaaaaaaggggggacagtgtaatgcttctcacaagg

SEQ ID NO: 894593 - DNA, 72 bp, Artificial Sequence
  ENSG00000282386_2 (sequence is synthesized)
cggaacagcgaaacttcgtctcaaaaaaaaaaattattcgtaattggtaacattaacaaggaattatgactg

SEQ ID NO: 894594 - DNA, 120 bp, Artificial Sequence
  ENSG00000282386_3 (sequence is synthesized)
attattcgtaattggtaacattaacaaggaattatgactgggggggtcaggaaacctggattctggtccaagttctacctttatagttgtcaaatatatatatttgtttatttatacaca

SEQ ID NO: 894595 - DNA, 120 bp, Artificial Sequence
  ENSG00000286899_0 (sequence is synthesized)
cacttgccttggcctcccaaagtgctaggtttacaggcacgagtcactgcacccagcctgaagcattattttcaacagtcaaaaactggaaacaatccaaatatgtgtattaacagaatg

SEQ ID NO: 894596 - DNA, 120 bp, Artificial Sequence
  ENSG00000286899_1 (sequence is synthesized)
gaaacaatccaaatatgtgtattaacagaatggatagatggaaatggtgttatattcatatgatggaaaaactataacaaaccacaactttatgttgcatgaaagaagtcagaaacaaaa

SEQ ID NO: 894597 - DNA, 120 bp, Artificial Sequence
  ENSG00000286899_2 (sequence is synthesized)
aaagtatatactatatgattctatttatataaagtttaaatataggcaaaactaacttatggtattagaagccagaatagtggttaccactggtaggaggttgtagtgactggggctgtg

SEQ ID NO: 894598 - DNA, 120 bp, Artificial Sequence
  ENSG00000286899_3 (sequence is synthesized)
gtaaggttctgctgctgaactgggtgctggttacgctgtgacactttatgaaatatcactgagctaaacatgtaagatttctatatatacaatttaataaaaagtttacattaaaaaaac

SEQ ID NO: 894599 - DNA, 120 bp, Artificial Sequence
  ENSG00000286899_4 (sequence is synthesized)
aataatatcagtttagtggagaggaagcaattaaatatactaaagacaagataggtatagtacctgatcagaacagggcaaatgtgacactgtccttctacgctctcagggcaaccaaaa

SEQ ID NO: 894600 - DNA, 120 bp, Artificial Sequence
  ENSG00000286899_5 (sequence is synthesized)
gccaatgggaccttgctttgaccatcactaggaggatgccattttacccagcctcccaggagggatggtgaagggtctttagaagaatctgactggtggtataatcaaggaaccgcatgt

SEQ ID NO: 894601 - DNA, 120 bp, Artificial Sequence
  ENSG00000286899_6 (sequence is synthesized)
aaatgaaagaaactcgaagtcccaataaaatatttgaggctagagagaagtgtaacataattgagcccaggaaagggaaaattctgagtaagtactgcctttccgaagcatgctgtacca

SEQ ID NO: 894602 - DNA, 120 bp, Artificial Sequence
  ENSG00000286899_7 (sequence is synthesized)
cccaagccaaaacattggattttccctttaatggagggaaatcagaaacatgaatacttattcaaggaagttctcctaaaaagcatccttatccatacaagggtccaagaaagacaagga

SEQ ID NO: 894603 - DNA, 120 bp, Artificial Sequence
  ENSG00000286899_8 (sequence is synthesized)
ctgaagatcaaacaacttctctccataagttaattactgagtattgtatcagtgaaaggcattaccttaggtgtgtatatagagaggaaagatttcagagcagaatcagatccactccac

SEQ ID NO: 894604 - DNA, 120 bp, Artificial Sequence
  ENSG00000286899_9 (sequence is synthesized)
aacaaagtatcaagtaaggtagtaactgatcagtggcctgataaactagaggaatccagaaaaagacaagttcactctccaggtgaaatgtcaagaataaaaaataagtagtatttaaac

SEQ ID NO: 894605 - DNA, 120 bp, Artificial Sequence
  ENSG00000286899_10 (sequence is synthesized)
tgggtattaaaggatggagagaattttaagtgcaaggtgggggacaagaagaagaggatgcagatactccgggcaaaggcaaatgatgtgtacaacaccagagactgaaaaccacagaca

SEQ ID NO: 894606 - DNA, 120 bp, Artificial Sequence
  ENSG00000286899_11 (sequence is synthesized)
agaaatgagcactcagagtgtcagctacatgccaggcactgtgctagattctgctttttatataattaattcatgatgcttagaaaggttagatatgtgtccaagccagttgactggtat

SEQ ID NO: 894607 - DNA, 120 bp, Artificial Sequence
  ENSG00000286899_12 (sequence is synthesized)
agccaggattaaattcaaattcagctctcttcaacaattccagaaccagcaatcattccagtatgagtggcaagtgaacagtgcaagataaagctgaaaacattaaactaaaatcaggtc

SEQ ID NO: 894608 - DNA, 120 bp, Artificial Sequence
  ENSG00000286899_13 (sequence is synthesized)
catgaaaacccttcatgcagtgaataataggaatcaatgaaggtttttttgatattagagtcacaagaagtctttcttggaacccattcaagaaagtcttaaggcagggcacagtggctc

SEQ ID NO: 894609 - DNA, 120 bp, Artificial Sequence
  ENSG00000286898_0 (sequence is synthesized)
ggcacactggggacaggtgggacctcctggagctgcctggggggcctggtgatgccagcctacggcagtcatactgcccacactgccaagagcccacatgggcaagggccaaagacctcc

SEQ ID NO: 894610 - DNA, 120 bp, Artificial Sequence
  ENSG00000286898_1 (sequence is synthesized)
caccccaacttcagggcgtgcctccatttttccagctgtcaagaaagcccttaccaagaggcccaggctctgtgggctccagctctgcatttcctggttctggtgtggagacagagcatg

SEQ ID NO: 894611 - DNA, 120 bp, Artificial Sequence
  ENSG00000286898_2 (sequence is synthesized)
atgaggagcaacgatgtgtctgcctggttcatcgctgaatccccagggcctagcccagcacttggcacgtggtagggactcaacacatcgctgctgaatgaatgaatgttggccctgcta

SEQ ID NO: 894612 - DNA, 120 bp, Artificial Sequence
  ENSG00000227809_0 (sequence is synthesized)
agtattcataagtgatacaggattcagaaagaaaatttaattgaaatttatacaacgaatttggaattttcctaaagatttggcaaaacacttctctacttcaagttttatcacggacca

SEQ ID NO: 894613 - DNA, 120 bp, Artificial Sequence
  ENSG00000227809_1 (sequence is synthesized)
ggactgatcaactaaatgcgaatagatgtgttctatatcagcttccctagaacacaaagcctgaatcaaggatgaaaggaagatgctttttggcaaggcataaattcagaggatccagga

SEQ ID NO: 894614 - DNA, 120 bp, Artificial Sequence
  ENSG00000227809_2 (sequence is synthesized)
tgaggacaaaggcaagtgagctatgcaagatgtaaaatgatgtttcaacaacacaaagctgattgtttggcagttgcatctatttcatgcatagaacttctccagatggactaccaagaa

SEQ ID NO: 894615 - DNA, 120 bp, Artificial Sequence
  ENSG00000227809_3 (sequence is synthesized)
acactgtgcttcaaagaatttgataaggactatgaaaggacaaggttgctgggtttcctgggctacatggctgaaaatagccaatgacaagagcacctgggtttatattccatgagtttc

SEQ ID NO: 894616 - DNA, 120 bp, Artificial Sequence
  ENSG00000227809_4 (sequence is synthesized)
ccaagttggatcaggtatctacacctagtaaaattagtggaatcagaggctttgggtatggagtagatagcatgtgtcatgtgatgagcagaattaccaaaagtgatcctgagagctcct

SEQ ID NO: 894617 - DNA, 120 bp, Artificial Sequence
  ENSG00000227809_5 (sequence is synthesized)
ttataattgcctgaacaatgaaccggctaggcccagagttgggggagggcaggacaatggggagaaaggtgaaaggaagattccccctttcttctctcagtaggggctgctgcactccct

SEQ ID NO: 894618 - DNA, 120 bp, Artificial Sequence
  ENSG00000227809_6 (sequence is synthesized)
tctctctataggaggtaactcccattatctctcaagttcccaagtgttggatagttggaattactaaattcctgatgtgaagggctggcgctcaaatccacattgtctagtaccaaagta

SEQ ID NO: 894619 - DNA, 120 bp, Artificial Sequence
  ENSG00000227809_7 (sequence is synthesized)
cactggttatcctccactgatggttgccctcatgatttctctataagaggaacacgcccaggagcatgaagttcccctaatgggacacagataactccacattgcctgtccagtagggta

SEQ ID NO: 894620 - DNA, 120 bp, Artificial Sequence
  ENSG00000227809_8 (sequence is synthesized)
tcctggccctgggaagtctctctgtgggaaaaagagtggaaaaagtctagaccgtctcagctaatcctgtccttgtaactttcttttttgctttataaagcctattccttaaaccagtga

SEQ ID NO: 894621 - DNA, 120 bp, Artificial Sequence
  ENSG00000227809_9 (sequence is synthesized)
agttgtgtctccctctgccttttctcaaccctcttctccttatgagtttctcaggctcaaaaaggcaggtgctcacactcccagcctctcttgcaggtttgaatggccatgatgacccag

SEQ ID NO: 894622 - DNA, 120 bp, Artificial Sequence
  ENSG00000227809_10 (sequence is synthesized)
ttctggccagtgtgacataaacagaagttgatgtaggggaattccaggaaagaccttccgcaatcccatgaaagccattagagcagaaattctctcctgccctgtacttccttccccact

SEQ ID NO: 894623 - DNA, 120 bp, Artificial Sequence
  ENSG00000227809_11 (sequence is synthesized)
tcctacctttgatagttggaatactggcaggcatctcaccaccaagagaagacaaactaaaggatcaaaagcaacgtactgaagataggagagcaaaagatgaaaataacttggatcgtt

SEQ ID NO: 894624 - DNA, 120 bp, Artificial Sequence
  ENSG00000227809_12 (sequence is synthesized)
acactgtgcttcaaagaatttgataaggactatgaaagggtacgtatgataaagaagagagaaaccgggtttcctccattcttctatgttggtccaaacttaccccctggagaattacct

SEQ ID NO: 894625 - DNA, 120 bp, Artificial Sequence
  ENSG00000227809_13 (sequence is synthesized)
gcacacctagattgtatttgacccattggcaggcactcagagccccaacaccatgtgctctggcattcacctaagttcagataggatgacacagccaaacaatttaggtatgaagcctgg

SEQ ID NO: 894626 - DNA, 120 bp, Artificial Sequence
  ENSG00000227809_14 (sequence is synthesized)
ctgatcagtagaggccaagtagagagctttctgagggcaaaaggctgaatctgccctaggtgtccaactgccagacctaacagacaggcaaagtgaatcaaatagctggaggtcacagaa

SEQ ID NO: 894627 - DNA, 120 bp, Artificial Sequence
  ENSG00000227809_15 (sequence is synthesized)
gggtccaacacccagggactccgaggagctacagaagagagatgtataatgtctcagccacttccttaaggggaagctgctcgctccccacaccgtaatttgatcttcctacagactaaa

SEQ ID NO: 894628 - DNA, 120 bp, Artificial Sequence
  ENSG00000227809_16 (sequence is synthesized)
atttaaacatggtgtggtgctgatcaaagcaaaaagaaagaacaatggcctcactgagcagagctgaccctagactacccacctatctctgaacgattacattagagataaataattttc

SEQ ID NO: 894629 - DNA, 120 bp, Artificial Sequence
  ENSG00000227809_17 (sequence is synthesized)
acactgtgcttcaaagaatttgataaggactatgaaaggaattaacaatggggatatcagcaagaaatcagagatgagtagaaaacaacattacaggattttttctgctgggatcccctg

SEQ ID NO: 894630 - DNA, 120 bp, Artificial Sequence
  ENSG00000227809_18 (sequence is synthesized)
cctcaacctggctgtgtctctccaatgaaggtcactgctcctctcaagacagccctctcaagaaaatttgctccttctgggtcctagtaatcactctctctctcctcattcccctgggcc

SEQ ID NO: 894631 - DNA, 120 bp, Artificial Sequence
  ENSG00000227809_19 (sequence is synthesized)
tagaggtggtaccagctccatggttactaatccagtgttactgtactatttcttgtggtttctatcaagcccacacttctgtaattggttcttatgtaaatacattttcttggaatattc

SEQ ID NO: 894632 - DNA, 120 bp, Artificial Sequence
  ENSG00000227809_20 (sequence is synthesized)
gactatgaaaggataacagagctgtgatggaactcgagatctaagtgattctaagtgaccccccaacacacaatgaagcctctgcaaagaaaagcttaaattaaaatagaacacaaactc

SEQ ID NO: 894633 - DNA, 120 bp, Artificial Sequence
  ENSG00000286891_0 (sequence is synthesized)
ttccttcagcttttccaagtcctgagtcagacacgtgtgcaactctggggtgaaagacaccagcttcttctgcagattacctgtatcatttgggtttgaagcatattctgatgtgtcttt

SEQ ID NO: 894634 - DNA, 90 bp, Artificial Sequence
  ENSG00000286891_1 (sequence is synthesized)
tcagagcttttcttcctgatggcttatctaccgatcaaagcaacttctacctcaccagcagatacagaggcaacttcttccatagatttc

SEQ ID NO: 894635 - DNA, 120 bp, Artificial Sequence
  ENSG00000286891_2 (sequence is synthesized)
ctcaccagcagatacagaggcaacttcttccatagatttcttcaccagttttccttagctgtctccttggaaagcagataccatgtcatggaaatgccataggaaaaaatgtgaggtctc

SEQ ID NO: 894636 - DNA, 120 bp, Artificial Sequence
  ENSG00000286891_3 (sequence is synthesized)
cagtcaaccgaccacatggaattgaaacctgtcaacaaacaagtagtgagtttggaagcagatcctccaaccccatttgagcctcatgagagaccctgagactaaaacacaagctaagcc

SEQ ID NO: 894637 - DNA, 120 bp, Artificial Sequence
  ENSG00000286891_4 (sequence is synthesized)
acttctggattcctgacaaacagaaactaagaggagtcccatcaaattttagtcacaaaattaaaggggaaaaggaaaaaggaaggagcagaatgatgcagtagaagagtccactgatca

SEQ ID NO: 894638 - DNA, 120 bp, Artificial Sequence
  ENSG00000286891_5 (sequence is synthesized)
ctgtccccccaccgacaaggacaccaatttaacaactatctacacagaagaaagacagaaagaaagaaaaaaaaaaaaacaccttcatgagaaccagaaccaaaaatcagatgagcactc

SEQ ID NO: 894639 - DNA, 120 bp, Artificial Sequence
  ENSG00000286891_6 (sequence is synthesized)
atagtagctggttctaacttcacaatgttgaaagaagcactgaagagagagaaaaaacactgaaatgcctatgccaccctgcccccacccccacccttctgcagtggcagcatgggacag

SEQ ID NO: 894640 - DNA, 120 bp, Artificial Sequence
  ENSG00000286891_7 (sequence is synthesized)
agagcatctctgggccctggagaagagagaacacagtaattgtgaggcaatgaactcagtgctgtcctggtagatcagaaaggaaatctggaccaaactcagctaatgcccatccacaga

SEQ ID NO: 894641 - DNA, 120 bp, Artificial Sequence
  ENSG00000286891_8 (sequence is synthesized)
gggaggatttaaatcagccctaaccagagggaaattacttatcccagctacctgaacttgagttcctgaaaacctcccctccaaaggctacagtgctctgtgtctccaagtaaacttgaa

SEQ ID NO: 894642 - DNA, 120 bp, Artificial Sequence
  ENSG00000286891_9 (sequence is synthesized)
aggcagtctaagccataagaactgcaacccttaggtgagtcctagtgctgaactaggcccagagacagtggactaggggacacgtcacatactgagatataagctggggccaccaaggga

SEQ ID NO: 894643 - DNA, 120 bp, Artificial Sequence
  ENSG00000286891_10 (sequence is synthesized)
atgctggcattatcccttccctaaccccaggctgcacagcttgtggctctaaaagagacccctttcttcctctagagaagaggacagggaagaactttgtcttgcatattggataccagc

SEQ ID NO: 894644 - DNA, 120 bp, Artificial Sequence
  ENSG00000286891_11 (sequence is synthesized)
tcaaccacagcaggataggacaccagtcggggtcatgaggaagcagttccaggccctagctcccaggtgccatttctagacacatgtgctgccttaaaggaaaggagtcagtcttgacag

SEQ ID NO: 894645 - DNA, 120 bp, Artificial Sequence
  ENSG00000286891_12 (sequence is synthesized)
cattcaacagctgctaactgaagaacccttggaccccgaacaacgagcctggatacccagatactatgtcaagtgtcttgggtaagcctctgagacttgctggctttaggtacagcatgg

SEQ ID NO: 894646 - DNA, 120 bp, Artificial Sequence
  ENSG00000286891_13 (sequence is synthesized)
tcacaggagtgtagagcacaaaagtagcctgatggtattcctgattccaggacctgacccttggatggcatttctgaaacctgccctgaagcagaggggaacccagtaccctgaaagaac

SEQ ID NO: 894647 - DNA, 120 bp, Artificial Sequence
  ENSG00000286891_14 (sequence is synthesized)
ttttgggaacttatttgcaaagaagtccccgccataaagatctataatcttttcaacaacctatttgggaaaatgcatgatagggccgtgaaaaacattatgttctaagacaaaggccta

SEQ ID NO: 894648 - DNA, 120 bp, Artificial Sequence
  ENSG00000286891_15 (sequence is synthesized)
atattatcatgagcagcctagagtgatggagagaacactaaatgctgactgggtgctgttttcaatgtgatcatcaagtggccatgtgaccttcaatggatgccagctttccatgaggct

SEQ ID NO: 894649 - DNA, 120 bp, Artificial Sequence
  ENSG00000286891_16 (sequence is synthesized)
tcaactcctcattaacgaatgagcaaaataatacttacctcaacttctttctagggctatagagaaaaaaatgtttagaaagaatgtaatattttaagagagcatattgttctttattgc

SEQ ID NO: 894650 - DNA, 120 bp, Artificial Sequence
  ENSG00000286891_17 (sequence is synthesized)
cataataaaagtaatcataatctacattatgaggatcaccttggtatagtattaagcatgacactgagaaacaggcgatgagagtttcagttatgccttctgagtttattattggttgac

SEQ ID NO: 894651 - DNA, 120 bp, Artificial Sequence
  ENSG00000286891_18 (sequence is synthesized)
cttggaaaagctccttaacttctctgcatctcttttgctgcttttgtaaaaagaaaatgaaaagacaatacattaatcatggcaggaaactggaaattacaatctttccaggttaaaacc

SEQ ID NO: 894652 - DNA, 120 bp, Artificial Sequence
  ENSG00000286891_19 (sequence is synthesized)
gaaattacaatctttccaggttaaaaccacatgttttgaagtaaaatcttttagtctaagatttttttaagataatggataatgaattttcaataataataatagcatattctcaataat

SEQ ID NO: 894653 - DNA, 120 bp, Artificial Sequence
  ENSG00000286891_20 (sequence is synthesized)
tcaccactaaggaatctgaatttcaaaggttaagtaaccttatcaaactcatagagagactagcaataagtttgagatttaaatacagtatgattctaaagcacaggttttgaaccatca

SEQ ID NO: 894654 - DNA, 120 bp, Artificial Sequence
  ENSG00000286891_21 (sequence is synthesized)
tgttccaatattctcaatataatataatagctctgggtatgaataaacagtttcagtttgagtctgtaaaagatcagtggtaattcaagaacaaaaacaatttagtctttaaaagacaca

SEQ ID NO: 894655 - DNA, 120 bp, Artificial Sequence
  ENSG00000286891_22 (sequence is synthesized)
acagttgtgccctacatgatattttacccctctttatactttatttacactgtgcccagcatataggagctggatgttttatacttgaaacagggttaatagcacttggttatatgattt

SEQ ID NO: 894656 - DNA, 120 bp, Artificial Sequence
  ENSG00000286891_23 (sequence is synthesized)
gacagtcagcttatatgtccattcacctcacttgagacttctagaccacactgccaaaatatccattttagttatgagaaaaaatatattagagaactgtggagagagggaaccaaagtt

SEQ ID NO: 894657 - DNA, 120 bp, Artificial Sequence
  ENSG00000286891_24 (sequence is synthesized)
agtttaggcatgaaattgttctgagctgagaattttgcccctaggaattttaagcaaatatggatccactcctccatgaattagaaacatttgtagtttcctacatagtgcagacctgag

SEQ ID NO: 894658 - DNA, 120 bp, Artificial Sequence
  ENSG00000286891_25 (sequence is synthesized)
gatttcttttattcttttgttctttattctttaattagaagaattaaattgaatggttcctgcgagacttatggcagattgtactttccaatatagctacaacaatatttcccaacactt

SEQ ID NO: 894659 - DNA, 120 bp, Artificial Sequence
  ENSG00000286891_26 (sequence is synthesized)
atgctcaactgcaatgtaatcttgtcttttggaaactgcagaggattggaaaattggcagaaaaacagttgtatatattacatgtcacatgttacatgttacatgattcagtcattgggt

SEQ ID NO: 894660 - DNA, 120 bp, Artificial Sequence
  ENSG00000286891_27 (sequence is synthesized)
gaggtgacagcagatcacaatttattttttccttagcactttgagacctgactctacctctaaaaacatttattcatagaacaagcaaagcaaccgtagagaactgactacagccaagag

SEQ ID NO: 894661 - DNA, 120 bp, Artificial Sequence
  ENSG00000286891_28 (sequence is synthesized)
ttgttctaagaagggtattaaaaagtcttcacctcctacattcagctggagcaagaacaaggacattttctactttggaaataggagcaagagttctgagggaagagcaactggtgccat

SEQ ID NO: 894662 - DNA, 120 bp, Artificial Sequence
  ENSG00000286891_29 (sequence is synthesized)
tggtctctggcttgtccactagctcaaattgtagatttttctcctttttacatttaatgtctatgggttgaaaaataaacaatttagttcagctatgtggatcggctaaaaaaaataatg

SEQ ID NO: 894663 - DNA, 120 bp, Artificial Sequence
  ENSG00000286891_30 (sequence is synthesized)
aaagagcataattaaaaatgtactgaagttactttagaaaacattcagcagcagttgcctagattttactttttgctgcacctatttttttctcagatagaagtgtatactcacatctaa

SEQ ID NO: 894664 - DNA, 120 bp, Artificial Sequence
  ENSG00000286891_31 (sequence is synthesized)
caaatagctttttgacatttttgttaaccagtcactgtactagatggcaatgagtgaatcaggaagatcttctctaccctcatgtggctgacattctagtagaaaacataaacaacatta

SEQ ID NO: 894665 - DNA, 120 bp, Artificial Sequence
  ENSG00000286891_32 (sequence is synthesized)
aattacattgcaagaagtatttggaagtaagcactgagttctctaagagtataaaacagggagccataacctaaaattgagtttggagggccattttttttaatgacagtgatatgtaat

SEQ ID NO: 894666 - DNA, 120 bp, Artificial Sequence
  ENSG00000286891_33 (sequence is synthesized)
cagagacaaagaagatgagtaaccattgacagggtcaggttgagaggaggtccacaataatttctgtcagtgggaagaacaagtaaaaagttcttgcagtggtggggagcatgacacatt

SEQ ID NO: 894667 - DNA, 120 bp, Artificial Sequence
  ENSG00000286891_34 (sequence is synthesized)
cgagctaatgaaaattattcaatggttctatgaggcagaaagccagaggaaatgatcagaaatgaatgtagagagggagggaggatcatatgcagggatgtttaggctttgttaagagtt

SEQ ID NO: 894668 - DNA, 120 bp, Artificial Sequence
  ENSG00000286891_35 (sequence is synthesized)
ctgcactttatccaaaatacatggagaacccattaaagagttttaaactgaagaagagtaaaacgggatttggtgtgtgtttgtttgctttgttttgaaagaccattgcagctatgttgt

SEQ ID NO: 894669 - DNA, 120 bp, Artificial Sequence
  ENSG00000286891_36 (sequence is synthesized)
ggataatggactgggggaggtaagagaaaatgctcctaaaccacgatgttagttaggaggtttggtagaacagttaagcaaacaggtaatggtggctttgattaggatagagaaaagata

SEQ ID NO: 894670 - DNA, 120 bp, Artificial Sequence
  ENSG00000286891_37 (sequence is synthesized)
atagatgctaaagtatatttaggaagtagaataaaaacgacttaacaatgaattgaatgaggagtgagagttattttggcagcaaagataaatccagattattggcatgaaggttgatgt

SEQ ID NO: 894671 - DNA, 120 bp, Artificial Sequence
  ENSG00000286891_38 (sequence is synthesized)
cttttcaaaatatcaagaaatgttttgtgttatttggtttgaaataactaaagacatctaagtagagattgtaagaaatcagtagataggggccagcggtatattttacaccagaggaaa

SEQ ID NO: 894672 - DNA, 120 bp, Artificial Sequence
  ENSG00000286891_39 (sequence is synthesized)
agttgggcatgaaaaataaaatctgaagagggcttgaaacaaaagcttatggatgcacatataaatgtatatgtgtatatgttcgcacatatgtacttcccagatgattgttgtaataaa

SEQ ID NO: 894673 - DNA, 120 bp, Artificial Sequence
  ENSG00000286891_40 (sequence is synthesized)
tcaccaaaagctgaatgaagagcctttgggatttaagggaacattggcagcagtctggcagtacgccccatggtgaggggtggcaatagctatggggtaaggctcttctgcctttgtaaa

SEQ ID NO: 894674 - DNA, 120 bp, Artificial Sequence
  ENSG00000286891_41 (sequence is synthesized)
gggaagggaacagtagaaaggactgtgtcttgtcatttgagtgccagctcagaacagtaaaaaagaacaccagataaactcctaaggttgtttgactgtaatccctgactcctggatggc

SEQ ID NO: 894675 - DNA, 120 bp, Artificial Sequence
  ENSG00000286891_42 (sequence is synthesized)
acatctggacccacctggggcctgggaaacattgctgccctgaagggaaggacacaggcctggctagtttttccatctgatgattgttgtcccagggcattaagcaaacataggcagtag

SEQ ID NO: 894676 - DNA, 120 bp, Artificial Sequence
  ENSG00000286891_43 (sequence is synthesized)
ctagtgagtggttacaagaggtcttgggtgagacccagtgctgtgctggcttcaggtcggacccagcacagtcccagtggtggtggccacagggatgcttgtgtcacttcaaccccagct

SEQ ID NO: 894677 - DNA, 120 bp, Artificial Sequence
  ENSG00000286891_44 (sequence is synthesized)
ttaggtggctcaaaacagagagaaagactgtggttgtttgggagaatctaagggaagattacaaaagtctctgcctggtaatccagataattctccccgatcttatccgagatcatcaag

SEQ ID NO: 894678 - DNA, 120 bp, Artificial Sequence
  ENSG00000286891_45 (sequence is synthesized)
gtggtacctctaatagtctgcaagaaccacagcattactggggcttggggtgccctctaaaacagatatagcttagatcacaatatccaaatcctttaaaatatctggaaagccttctca

SEQ ID NO: 894679 - DNA, 120 bp, Artificial Sequence
  ENSG00000286891_46 (sequence is synthesized)
aaaagaatggctacaaataacccagacagtgaagactacaataaatatctaaatatttaatgaccagactttaaagaacatcgactagtatcaacaccattcaggaaaaaatgacctcac

SEQ ID NO: 894680 - DNA, 120 bp, Artificial Sequence
  ENSG00000286891_47 (sequence is synthesized)
caaataaactaaataattcaccagagaccaattgtggagaagcaggaatgtgtgaaatttcagaaagataattcaaaattcttcaaactgtattgaggaagctcagagaaatttaagata

SEQ ID NO: 894681 - DNA, 120 bp, Artificial Sequence
  ENSG00000286891_48 (sequence is synthesized)
acaaagagaattcagaattctattagatacatttaacaaagaaattgaaataattaaaaggaatcaagtagaaattctggagctgaaatatacacttggcctactgaggaatgcatcagg

SEQ ID NO: 894682 - DNA, 120 bp, Artificial Sequence
  ENSG00000286891_49 (sequence is synthesized)
agacacgtgtgcaactctggggtgaaagacaccagcttcttctgcagattacctgaacatttgaaatcctctggttctttggcacccaaatatgaaggtcatttcatcaaaggcctaaaa

SEQ ID NO: 894683 - DNA, 120 bp, Artificial Sequence
  ENSG00000286891_50 (sequence is synthesized)
ttttcatagagaggatttgagaaaggtgatctcaataaaatacaaaaaaaaaaaggaagaaaagctacagtaaaagaaatattgctacttatatatgcaaacgaagactgaggacaacta

SEQ ID NO: 894684 - DNA, 120 bp, Artificial Sequence
  ENSG00000286891_51 (sequence is synthesized)
ttatcagctttctactcttaagaattatttaagttgctactcctacttctacatttggacattggtttaccatgccatttttccttatatatatttaaaaaatctcttaaaaattaaaat

SEQ ID NO: 894685 - DNA, 120 bp, Artificial Sequence
  ENSG00000286891_52 (sequence is synthesized)
ggtagtatgcatgttttcaggccaaatatatatttccaaactgttctaaatttgttactactgtgtttttactcctgagtaatcaataacattgagtaataaagacagaattatttatgt

SEQ ID NO: 894686 - DNA, 120 bp, Artificial Sequence
  ENSG00000286891_53 (sequence is synthesized)
ataaataaaaattctcatgagaatttttgtctatttttccttttctgagttgaaaagcagccattttcaacatagctaattgttgctacagtatcattttaaattaatgtggtacagtgt

SEQ ID NO: 894687 - DNA, 120 bp, Artificial Sequence
  ENSG00000286891_54 (sequence is synthesized)
atgctgaaatagcagtggaaaaatatttaagttttaacaatgctctactcaggtaaatatccctgcaggaatcaaaattaataaatattatcttcagtatacataatacaatataatatc

SEQ ID NO: 894688 - DNA, 120 bp, Artificial Sequence
  ENSG00000286891_55 (sequence is synthesized)
tttaataggagttgccattttactgaatatcttccatttgatgtttgtgaaaagtttgttcattgacatagctcaataatattccattttacaaatataccacaattaattaacctatcc

SEQ ID NO: 894689 - DNA, 120 bp, Artificial Sequence
  ENSG00000286891_56 (sequence is synthesized)
ttctgtagatagacatatgggtttctttccttattatacatcatattaaacttttatattatgaacagttcattgaatctattgatccatttgtggagaatttatatctttatgatattg

SEQ ID NO: 894690 - DNA, 120 bp, Artificial Sequence
  ENSG00000286891_57 (sequence is synthesized)
ttagatacatttaattaatgtgtgtgtatctgtatgtaagcttactgcaatgctaaacaggtaaatattcagaacactctgtaaaaaaaaaaaaaagttgaacttccaccttaattactg

SEQ ID NO: 894691 - DNA, 120 bp, Artificial Sequence
  ENSG00000286891_58 (sequence is synthesized)
acttttttttaattaattgtaagcagaaatgggatactgttttctctgccacatttctgtcacctgtggtcataatccctcgagctgtataagggaagttgtctgttcaaatcatgcagt

SEQ ID NO: 894692 - DNA, 120 bp, Artificial Sequence
  ENSG00000286891_59 (sequence is synthesized)
gttcttatgtcacaaaccaaaacctgagtctattatgctgagctaatctgctttgacctgggtaatttccatcctgggttgatctgatctgccaggaggtttggccgtcagattttggtg

SEQ ID NO: 894693 - DNA, 120 bp, Artificial Sequence
  ENSG00000286891_60 (sequence is synthesized)
acttctgctcctcagagaattctcagaatcccaaattgcaccccatctcactaagagtgtggagaggaaaagacagaaggatagaaaaagagaaggaggaggaaaaggaagtatctatct

SEQ ID NO: 894694 - DNA, 120 bp, Artificial Sequence
  ENSG00000286891_61 (sequence is synthesized)
acatgtttatatctatacctttatttatactcacagtaaaggacatttgtcagaatagcccccaaacactattgccgcaccaacatctattaaaatataaaccatctttaataaatactg

SEQ ID NO: 894695 - DNA, 120 bp, Artificial Sequence
  ENSG00000286891_62 (sequence is synthesized)
agctgtgtaaatatttatttgcatgcaaaagaaaagctctttagtattcttaagccagactgagcagtcaacagatgattttgataaatgtctgttcattacctgaacatttccattgca

SEQ ID NO: 894696 - DNA, 120 bp, Artificial Sequence
  ENSG00000286891_63 (sequence is synthesized)
atataaaacaaagatttcatctacattttatttttgctccatgaatggttccacactttctaatcagtgttatttttaagattaaatttggatagtaatgtaaatatgggaggggaatgg

SEQ ID NO: 894697 - DNA, 120 bp, Artificial Sequence
  ENSG00000286891_64 (sequence is synthesized)
gtgtctaagaggattttctggttcatagtcattataatagtcacaatatacaagataatttgtaagtctaggcccccttttgctcaggcagtctaattctttatgtccaagaattttgtc

SEQ ID NO: 894698 - DNA, 120 bp, Artificial Sequence
  ENSG00000286891_65 (sequence is synthesized)
ggagatactatctagattaggtggtaacactgaggtgaagggactctccaggcagaggagggaatacacataaatagaatgtggtggttttttactataagattttagccaagcaggcac

SEQ ID NO: 894699 - DNA, 120 bp, Artificial Sequence
  ENSG00000286891_66 (sequence is synthesized)
ggaattttctagaactactttccctgtataattaggatttggcacaaagagctttaagtgagatttggaaggtacaagaggaacagcagtcattacagaagattagtacaagcctccatg

SEQ ID NO: 894700 - DNA, 120 bp, Artificial Sequence
  ENSG00000286891_67 (sequence is synthesized)
tccaatgagaggcaccagtagaaaatagccccattcattttcctgctttctttactgcttggatattgatcttcaataaacagaaaatggaaaccctaaaacagtaccattatccactta

SEQ ID NO: 894701 - DNA, 120 bp, Artificial Sequence
  ENSG00000286891_68 (sequence is synthesized)
gaatacagcaggctgaaaccagcaacaaaatgaagatatatatttccagcctatattttgagcatcgtggaactttctggatgcagcacaaaccaggggggagttaccattctgtaggaa

SEQ ID NO: 894702 - DNA, 120 bp, Artificial Sequence
  ENSG00000286891_69 (sequence is synthesized)
ttgtggccaatgtggataaagaactaccactgaaaagatggaagcctacagaacagaccaaaagataaatgttctctgagtttctaaaatgcttagatgggtttcatgacttttgcacct

SEQ ID NO: 894703 - DNA, 120 bp, Artificial Sequence
  ENSG00000286891_70 (sequence is synthesized)
aagttggctaacaataatgaagtggaatggagacacttagggactctattatagatggcatgacaggaatagatagcataaataattggtatctttaaactcctgaggccgactctaaac

SEQ ID NO: 894704 - DNA, 120 bp, Artificial Sequence
  ENSG00000286891_71 (sequence is synthesized)
aatatctttcatatctatgttctccttcttttaaatccatgtatttcataagtcctgataacttaaatgattgaattccacaaaggtgtcctgactcagctcaccctctcctggaggtgt

SEQ ID NO: 894705 - DNA, 120 bp, Artificial Sequence
  ENSG00000286891_72 (sequence is synthesized)
taatgaacagtgaaacagtgacgaaaacagtagcagagtgaataaaggagctgatgggaacaaaagattgtgttttgtttatttgatctttaaaatatagagtattgatattgtcataat

SEQ ID NO: 894706 - DNA, 120 bp, Artificial Sequence
  ENSG00000286891_73 (sequence is synthesized)
aaaagctaaggcatagaatgcatttaatcctatacattttccacttggctttcagtgatgcataagacttactaagattggcatactatataaaggcctcaaaaggaggtatgtactgtg

SEQ ID NO: 894707 - DNA, 120 bp, Artificial Sequence
  ENSG00000286891_74 (sequence is synthesized)
ttaagttctttgcatgcattatctctagtcggtccttaaatggtgaagctgtacagtgtaggaaagatacagtataaggtaatgattaaaaacttaccctagaggcagatacctggatta

SEQ ID NO: 894708 - DNA, 120 bp, Artificial Sequence
  ENSG00000286891_75 (sequence is synthesized)
gaatcctagttcttccacgtatttgctgtatgattttgagcaagctacttaaattatattctcttcagcatttttttttgtaaagtagaggtaataatgtttatcattctgggcatttgt

SEQ ID NO: 894709 - DNA, 120 bp, Artificial Sequence
  ENSG00000286891_76 (sequence is synthesized)
ttgtaaacttaaatatatttttaaataaagaatgcttaaaacatgcttactacaaaatgaacccttagtaaattatgtacaaatgtaataagttggatacacttaaaagggttaattata

SEQ ID NO: 894710 - DNA, 120 bp, Artificial Sequence
  ENSG00000286891_77 (sequence is synthesized)
ttaagttctcacagttttagtggtgaaaatgggccaaaaaccaagatctgatttaaaagtgaaagttcacgttgaatgcatatcctatatactgtcactttcctttcatctaattaagta

SEQ ID NO: 894711 - DNA, 120 bp, Artificial Sequence
  ENSG00000286891_78 (sequence is synthesized)
tttagaacaaatgattatatttgcagaatacatctgtagagtaatgttttaaaagaaacaaatgcctctgccatgctagttgacaaatgatattttagcaaggtgatgcctagaaaagat

SEQ ID NO: 894712 - DNA, 120 bp, Artificial Sequence
  ENSG00000286891_79 (sequence is synthesized)
gctctaatatttgcaataatcccaaggcagcttttaactcataaatgaaaatggctttcctctgtagaaaacttgtcaagtaactgattattattatcttgtaaaggccagttgatgtct

SEQ ID NO: 894713 - DNA, 120 bp, Artificial Sequence
  ENSG00000286891_80 (sequence is synthesized)
tcctcattcatagcccaacaatgttccaaggaggaagaggtcatttagagagaaacctgagacactaatcaagttgactacaagtgacttttttcctcaacatctctttcttcatgtatt

SEQ ID NO: 894714 - DNA, 120 bp, Artificial Sequence
  ENSG00000286891_81 (sequence is synthesized)
tttttaaaaaaggttttaactagattatcactaaaatctgttacaggtgtttttccaactgcataccattactatcaggggagaaaggaggggagatgatgaaaaagcatctagctgttc

SEQ ID NO: 894715 - DNA, 120 bp, Artificial Sequence
  ENSG00000286891_82 (sequence is synthesized)
tggcaaaattacccagatcacatacctaacccaacttgtgtattattacttaatgtttaacaagagggagcaaagatgtgtcaaattaattgtctaataataatcttacataagacataa

SEQ ID NO: 894716 - DNA, 120 bp, Artificial Sequence
  ENSG00000286891_83 (sequence is synthesized)
gatgacataagacaaagactacattcataaaggaaataatgaaccctcatatttataaaaagctttagtttaaagtactatgtaatatgcaaagacacacagagcggtatattagacact

SEQ ID NO: 894717 - DNA, 120 bp, Artificial Sequence
  ENSG00000286891_84 (sequence is synthesized)
gagactcagaagaggggagcatgggagcagttggagggatcaaaagctatttattgggtacaatgtacactgctcgggtggcagttgtactaaaatttcagactttactgctatataatt

SEQ ID NO: 894718 - DNA, 120 bp, Artificial Sequence
  ENSG00000286891_85 (sequence is synthesized)
catccatgtaaccaaaaccacttgtatccctaaaactactgaaataaaaaattaaaataaaaaataaaatcaagtgttacatattgaacattgaatttacaaaaaccttacaaagtagct

SEQ ID NO: 894719 - DNA, 120 bp, Artificial Sequence
  ENSG00000286891_86 (sequence is synthesized)
aagtagctgttattactgtctttacagcaaaggaaaagagcactttcagcaattttaaggtgtctaatgaaagaaatcattttaagaatttaaggccaggcgcggcggctcacgcctgta

SEQ ID NO: 894720 - DNA, 120 bp, Artificial Sequence
  ENSG00000286890_0 (sequence is synthesized)
gggatggatagaggatcatcaggaatgagaatattggaactccacatgtggatgggtgtggctcaaaaaatgagacatgaactgaggctttctcagccagggctactgctggggcactgg

SEQ ID NO: 894721 - DNA, 120 bp, Artificial Sequence
  ENSG00000286890_1 (sequence is synthesized)
agaaaagcagccccttaggtcagcctgcagagtgaggtggacctcagaccacattcacattgatcggctgcaaattgctggtgggaaagggaattagaacaagccctatggaaggcaatt

SEQ ID NO: 894722 - DNA, 120 bp, Artificial Sequence
  ENSG00000286890_2 (sequence is synthesized)
tgatatcatctatcaaaattgcaagtacacagaccatttgacccagcaatcccacctccaggaatttatcctccagttttgttttaggctgcaaagtttaacatccttgaaatatcaact

SEQ ID NO: 894723 - DNA, 120 bp, Artificial Sequence
  ENSG00000286890_3 (sequence is synthesized)
caaactcttggatcaactgaagtaaagttttcagagccaactaactttataagaataaggacagtcttacaaaagaagctatccagatgcctcattggtgactgcttgaatgaatatttg

SEQ ID NO: 894724 - DNA, 120 bp, Artificial Sequence
  ENSG00000286890_4 (sequence is synthesized)
agtacatgaaaatgtgaagctgttatggacatctatactcagatcaccacaaccactctgaatctaatcagaaatggatatgtttgtctaaatggattgaagccacagcatttccaaatt

SEQ ID NO: 894725 - DNA, 120 bp, Artificial Sequence
  ENSG00000286890_5 (sequence is synthesized)
ccaaatggcaacccaccctgaaggggcaagagtgtcagcaaatcaaagtgagaactgacaagtgtcatttttgccgcaaaaaccaaacactatgattgcacctcgtgatatgaaaaatta

SEQ ID NO: 894726 - DNA, 120 bp, Artificial Sequence
  ENSG00000286890_6 (sequence is synthesized)
tatgcattaatatgtctaagacatttcctttttattaaaagtaacattttcagtctaaatttcttaaattagtggtaacaatttaaaaacaaaaagctctgtaaaccaaaaaattttcca

SEQ ID NO: 894727 - DNA, 120 bp, Artificial Sequence
  ENSG00000286890_7 (sequence is synthesized)
agctgcatttcaaggaaatggaaagttggtaaaagaaattaaggccaacattataatcttctctaaggcagttcatttactgagtggcttaattgtttttcaaatatctggggaggggaa

SEQ ID NO: 894728 - DNA, 120 bp, Artificial Sequence
  ENSG00000286890_8 (sequence is synthesized)
gttggctaaaggcttcatatttgctatcgtccttttttaacaatccctcactagcacagaaatatatggaagagcaatatcaacaacaaagtgtgtgattatagaaagaggcttctaagg

SEQ ID NO: 894729 - DNA, 84 bp, Artificial Sequence
  ENSG00000286890_9 (sequence is synthesized)
caacaacaaagtgtgtgattatagaaagaggcttctaaggtatatgatctcatgaaataaagccacatatatatattctgattt

SEQ ID NO: 894730 - DNA, 86 bp, Artificial Sequence
  ENSG00000286890_10 (sequence is synthesized)
atggaatcaacctagtggtatatgtacaccatggaataccatgcagccataataaagaacgagatcatgtcctttgcagggacatg

SEQ ID NO: 894731 - DNA, 88 bp, Artificial Sequence
  ENSG00000286890_11 (sequence is synthesized)
aagaaaaagtggtatatgtacaccatggaataccatgcagccataataaagaacgagatcatgtcctttgcagggacatggaaggagc

SEQ ID NO: 894732 - DNA, 78 bp, Artificial Sequence
  ENSG00000286890_12 (sequence is synthesized)
aacacatggacacatagaggggaacaatagacactggggcctatcagaggatggatgatgggaggagggagaggatca

SEQ ID NO: 894733 - DNA, 80 bp, Artificial Sequence
  ENSG00000286890_13 (sequence is synthesized)
tatgacataagtttacctatataacaaacctgcacacgtactccctgaacttaaaagttaaatttaaaaaattacaaata

SEQ ID NO: 894734 - DNA, 120 bp, Artificial Sequence
  ENSG00000286893_0 (sequence is synthesized)
ggtgtgggttccattgaaacgcttttccctgtcgtcccctctctcactctgagaccctagaagatatcctgctgatcttctaaaggaggaggggaggcagtgagtgacctagatttcaaa

SEQ ID NO: 894735 - DNA, 120 bp, Artificial Sequence
  ENSG00000286893_1 (sequence is synthesized)
tcagaaagacaggtagagccagctcgcctgtcttcaaaaggctgcccgtgcactgggttctggggttttggaaggagccagaaggaagatgttccccgggctcctacccagatgctcctg

SEQ ID NO: 894736 - DNA, 120 bp, Artificial Sequence
  ENSG00000286893_2 (sequence is synthesized)
cttatagggagaaacaagactcagagaagtccaaagaaactaagccgagaagcagacagcagaacaaaatttcaagccccacgttctgcgccttcgggcaacggccatgaaacaagaggt

SEQ ID NO: 894737 - DNA, 120 bp, Artificial Sequence
  ENSG00000286893_3 (sequence is synthesized)
cacagccgcggaatggcttgagccccagctctcatcacagatttcgttatgctccaatggtagaaacaaagggaaggttttgtgtctcctgtttttaaggttgagagagagccatagaag

SEQ ID NO: 894738 - DNA, 120 bp, Artificial Sequence
  ENSG00000286893_4 (sequence is synthesized)
gggacagagcttaaacaaggccccctcctgcctttctcctgcgtaggcaatgctggcccagtggccccatccactgggtgtccctgtgccctgggctcctggaggaaccctgctgaccag

SEQ ID NO: 894739 - DNA, 120 bp, Artificial Sequence
  ENSG00000286893_5 (sequence is synthesized)
aggagctccccgaaaagcccacactcagcacttttcacccccttcccttcccctttcacttcctgacactatttggggctgtgtctgcctcctccaagggcacagcgttcctcactcatc

SEQ ID NO: 894740 - DNA, 120 bp, Artificial Sequence
  ENSG00000286893_6 (sequence is synthesized)
gctcactctggtcactcacctttgtatccacagggaaatggggaagctctgcaaacccgggccagggcacagcttggacaatctgtcaccagtgtgcagagtcagctgagaaacacaatc

SEQ ID NO: 894741 - DNA, 120 bp, Artificial Sequence
  ENSG00000286893_7 (sequence is synthesized)
ctgcccaggctttctgtggctgcggccaagagggtagggctgctgggctgaaggctgtcaagtgactgggcaaaaaaagccagcctcagcctgcatggccgcagcagtccatcctgcaac

SEQ ID NO: 894742 - DNA, 120 bp, Artificial Sequence
  ENSG00000286893_8 (sequence is synthesized)
agaataattcctcttagtgggaacaggcctcccacgcttatcacaaagcgcgggctgcctttccaatgcggctggaggagatttacaaaaagaaaaggaagtcgcccttacatcttgggg

SEQ ID NO: 894743 - DNA, 120 bp, Artificial Sequence
  ENSG00000286893_9 (sequence is synthesized)
aagtttaaagacacctggagaatgaaatcttggattttactttcctgaaaggctgaggctaggcataattctctgcctttgttcccctcctttgtcttggttaaatgttcctggccatac

SEQ ID NO: 894744 - DNA, 120 bp, Artificial Sequence
  ENSG00000286893_10 (sequence is synthesized)
tgtacctgtggttttattgtcgtcctttttgggaacaagcaggatataaatcagtcagtgaaattttagaatgtagctctttggtctagcatctaagtagataaagaagaaacgggcact

SEQ ID NO: 894745 - DNA, 120 bp, Artificial Sequence
  ENSG00000286893_11 (sequence is synthesized)
taataagtgcctctggaggcttgtgatttgcatggggctcccaatgaaaggtaaagtctttgcttagaggttacacacaccgaatgcagggtggtcctcaggcctctggtcacagcatgc

SEQ ID NO: 894746 - DNA, 120 bp, Artificial Sequence
  ENSG00000286893_12 (sequence is synthesized)
acagtgctggtgcctcgatctgcaaacctggtgcgcgcagccgctggggaccatctgccccaaggccaccccaggacttatcagaaaggagaagagttggccgggcgcggtggcctggtg

SEQ ID NO: 894747 - DNA, 120 bp, Artificial Sequence
  ENSG00000286892_0 (sequence is synthesized)
cttaggcctgccctgtggagcatccctgtgggggactccagccagcttgagtgacgcggatcctgagagtgctcccgggtaggcaattgccccggtggaaggcttcgccggagcagtgaa

SEQ ID NO: 894748 - DNA, 120 bp, Artificial Sequence
  ENSG00000286892_1 (sequence is synthesized)
cggagcagtgaatggcaggcccccgtggaggatcaacacagtgactgaacaccaggaaggaacaggcacttggagtccagacatctgaaacttggtgatcacgtgtggatcaaggactgg

SEQ ID NO: 894749 - DNA, 120 bp, Artificial Sequence
  ENSG00000286892_2 (sequence is synthesized)
aacttggtgatcacgtgtggatcaaggactggaacagagcccctttgcggccatggtggaaaggacctcagaccgttatctggaccacccccacggctgtaaaggtagaaggaatcccag

SEQ ID NO: 894750 - DNA, 120 bp, Artificial Sequence
  ENSG00000286892_3 (sequence is synthesized)
cctggatccaccacagccatgtgaaacctgcagccgctgaaacctgggaggcaaaaccaagcctggacaatccctgcaaagtgactctgaggaggacgacaagccctgctccagtcacac

SEQ ID NO: 894751 - DNA, 120 bp, Artificial Sequence
  ENSG00000286892_4 (sequence is synthesized)
aggagaatcatcatgggactcatttttcttataatttggacttgtatagtaaaaacttccactgatattccccgcagggaggactgctctcagtgtatacatcaggttactcgaggtaag

SEQ ID NO: 894752 - DNA, 120 bp, Artificial Sequence
  ENSG00000286892_5 (sequence is synthesized)
ttctgttctatagttactatgaatgcttaggatctttaaaaggaacatgtttatataatgacactcagtacaaagtatgtagcccgggaaacgacagaccagatgtgtgttatgacccct

SEQ ID NO: 894753 - DNA, 120 bp, Artificial Sequence
  ENSG00000286892_6 (sequence is synthesized)
agatgtgtgttatgacccctctgactctcccatgttcacagtttttgaaataagattaaagactgaagactagtggggactcctaaatgatacaagtaaagtgttagccggaacagaagg

SEQ ID NO: 894754 - DNA, 120 bp, Artificial Sequence
  ENSG00000286892_7 (sequence is synthesized)
aaaaggggtgcctaaatgcataatattgaaatttgatgcctgtgctgtcattaatagcaataagttagaaaggggatgtgggtcttttagttgggaaaaaggctatatgaccgaaaatag

SEQ ID NO: 894755 - DNA, 120 bp, Artificial Sequence
  ENSG00000286892_8 (sequence is synthesized)
actgtgtggaaatgaatgtggataccggtcttgtgtcatttgggccacttggataaaaaatgaaaaggatccagtccactttcagaaagggaaaaatggcccttcctgtactaagggaca

SEQ ID NO: 894756 - DNA, 120 bp, Artificial Sequence
  ENSG00000286892_9 (sequence is synthesized)
aagggacaatgtaaccccttagagctggtaataaccaatcccttgatcctcgctggaaaaaaggggagcgtgtgaccttaggaatcgacgaggctggactggatccttgagtaaatatct

SEQ ID NO: 894757 - DNA, 75 bp, Artificial Sequence
  ENSG00000286892_10 (sequence is synthesized)
taatgggagatcaatggccatggccggctcaaaagaatcaccctcataatttctgggtcctaaaattcccaatta

SEQ ID NO: 894758 - DNA, 120 bp, Artificial Sequence
  ENSG00000286892_11 (sequence is synthesized)
aatcaccctcataatttctgggtcctaaaattcccaattattggacaatattgcatagctagagaaggaaataattcactcaccctgtaagacgacttagttgtctgggacagaaactgt

SEQ ID NO: 894759 - DNA, 87 bp, Artificial Sequence
  ENSG00000286892_12 (sequence is synthesized)
ctgggacagaaactgtataatggtaccaaaaaaacagtcacttgttggagttcaaatcacacagagagggtatggacccacctggag

SEQ ID NO: 894760 - DNA, 77 bp, Artificial Sequence
  ENSG00000286892_13 (sequence is synthesized)
tggacagcccccactggattatactgggtaagtgggcatagagtttatgccagattacctgaccagtgggcacccat

SEQ ID NO: 894761 - DNA, 120 bp, Artificial Sequence
  ENSG00000286892_14 (sequence is synthesized)
acaggtgaactcctgggcttccctgtctatgcgtcccacaaaaagggaagcatagctatagaaaattggaaagatgatgaatggccccctgagagactcatacaatattatggggctgct

SEQ ID NO: 894762 - DNA, 120 bp, Artificial Sequence
  ENSG00000286892_15 (sequence is synthesized)
ccccctgagagactcatacaatattatggggctgctacttgggcacaagatggctcatggggatactggacccccatttacaagatcaaccaaatcatacggttacaagctgtcttagaa

SEQ ID NO: 894763 - DNA, 79 bp, Artificial Sequence
  ENSG00000286892_16 (sequence is synthesized)
gaaactcagatgagaaatgctatctaccaaaatagattggctcttgaatacttgctagcagctgaaggaggggtctgct

SEQ ID NO: 894764 - DNA, 120 bp, Artificial Sequence
  ENSG00000286892_17 (sequence is synthesized)
tcactaccttagttcaacaaaatgcttcagcacaggtgtactatatgaatcattatcgacctgccttgcaagaagacatgggtagtgagaaagaaagtgagaactcccactattgagtga

SEQ ID NO: 894765 - DNA, 120 bp, Artificial Sequence
  ENSG00000227803_0 (sequence is synthesized)
acgcgatcgctggggagctggggtcgctgcgctcccggcctgcagttacctggtccagcgggatgcccaggagctcgctgagcgggtgcaggtgccccagctttgtccctgaatatgtgc

SEQ ID NO: 894766 - DNA, 120 bp, Artificial Sequence
  ENSG00000227803_1 (sequence is synthesized)
ccagaagcaccatctccctgtctgcattctgatcacccacctcacttccagagcatgagagaaccacgatgaagaaagtcatgtgctaagaaaggcagagaagaaaagctgaagaaatct

SEQ ID NO: 894767 - DNA, 120 bp, Artificial Sequence
  ENSG00000227803_2 (sequence is synthesized)
gggtgattgacagaaaccatgattaatgacatcacggagctactagaccagcccgggcctgcctgtctccatgcttcttggaacgtgagaaaaataaactgtatttgattatgttccttt

SEQ ID NO: 894768 - DNA, 120 bp, Artificial Sequence
  ENSG00000286894_0 (sequence is synthesized)
ctttttcttcccctgtcagatgtctggacttaaaggatccagcagaggatttggaggctccagggtatggctgagcccaagatgtcaaagtctgggtcagtgaatcacagtatgggaggc

SEQ ID NO: 894769 - DNA, 120 bp, Artificial Sequence
  ENSG00000286894_1 (sequence is synthesized)
cagttgctgaatgtctatactaattgttacttcagcaagcaatcaacgacagttctaggagttaacacttcctgagccagaacagaccgagagagactcctggggagctttgaaaaaaag

SEQ ID NO: 894770 - DNA, 120 bp, Artificial Sequence
  ENSG00000286894_2 (sequence is synthesized)
aaatttatttctcatggttctggaagctgggaagtccaagatcaaggaagcagcaaattcaatgtctggccagagtcccgcctcctcatagattcatggatattcttcttgctgttttct

SEQ ID NO: 894771 - DNA, 120 bp, Artificial Sequence
  ENSG00000286894_3 (sequence is synthesized)
cacatggtggaagaagcaaggcagcttctggggtcacttttataagggcactcatgcaattatgcaggctctgtcttcatgtccaaatcatctcccaaaagaccccatctcctaacaaat

SEQ ID NO: 894772 - DNA, 120 bp, Artificial Sequence
  ENSG00000286894_4 (sequence is synthesized)
ggtgacacagacattctgaccacagcaggatttgaatctagcctgctgtaacccaaagcctgtgttactaagaactttgctatatggcatgggtctttctgagccctacctgccctacat

SEQ ID NO: 894773 - DNA, 120 bp, Artificial Sequence
  ENSG00000286894_5 (sequence is synthesized)
cctcttctatatcaaaaatttcacttttttttttcaaatattttattttttgtagagatgaggaggtcttgaactcctgccctcaaatgattctcctgcctcggcctcccaacgtgctgg

SEQ ID NO: 894774 - DNA, 120 bp, Artificial Sequence
  ENSG00000286894_6 (sequence is synthesized)
gattacagacgtgagccaccttgcccagccaaaaattttcattgtttctaacctggattcctcttcaaacccttctaggcaatgtttatcccactgcaaggatgagttgcatttgcaaca

SEQ ID NO: 894775 - DNA, 120 bp, Artificial Sequence
  ENSG00000286894_7 (sequence is synthesized)
tttctgaatgtaattataagttatttccataatggctgaatagtctgaaaaaaagttttttttgctgtgtgctatgtaggcacattgaataatatttaaacaataaaggttacctcttat

SEQ ID NO: 894776 - DNA, 120 bp, Artificial Sequence
  ENSG00000286897_0 (sequence is synthesized)
aggggcgcgcgcatgcgcgcgggggacggttcccgtgctgctaggcctgccgccgcttcctgtccgccggcggagagctgggattgggcttgggaggcggggtttgtcctggtcccgccc

SEQ ID NO: 894777 - DNA, 120 bp, Artificial Sequence
  ENSG00000286897_1 (sequence is synthesized)
cggggcgggagcgctcctacgcggagatagtgctccgctacgtgttagagctgctgaggaccttcccttgggctaaaatggtccgtggaagatgaaccattcagactgcatcctttgcct

SEQ ID NO: 894778 - DNA, 120 bp, Artificial Sequence
  ENSG00000286897_2 (sequence is synthesized)
cttactctcccaaaggaagagaagaacaatcatcaatggcaaatggcagttgcagtgaagcaacaccaggacccggcttcacgctcaggagagaacgctgcgcctcctccttgtggtttc

SEQ ID NO: 894779 - DNA, 120 bp, Artificial Sequence
  ENSG00000286897_3 (sequence is synthesized)
aacgaactatacaaatgatccctgaaagtatagtcttcctttttttttttcttttacaaaatgtgaaaactgaagagaggttaatttacgaatttaattttacccaagcttgtaaaatta

SEQ ID NO: 894780 - DNA, 120 bp, Artificial Sequence
  ENSG00000286897_4 (sequence is synthesized)
gtcagtggcaggaccaggttcttgtggtctccattcatcacactttcggttacattgggttgcctccatgtgaccatgcttcatattctcttttgtgccccaaagcaccacatctagata

SEQ ID NO: 894781 - DNA, 120 bp, Artificial Sequence
  ENSG00000286897_5 (sequence is synthesized)
gtcagtgaaaattatggaggttcattattgtgattataaaccaaatgggtcagaattcttactgtatgcatattaacaattgacaactatacttctcaacaatgcaagtagtttttgact

SEQ ID NO: 894782 - DNA, 120 bp, Artificial Sequence
  ENSG00000286896_0 (sequence is synthesized)
ggggaaaagcagcttccaacaaagaagaaagaagcagcaagggtcaggggtgtggaagattcagagagcggagtggaagcccagctgtcatggccaggccacagtcctgcatctgacagg

SEQ ID NO: 894783 - DNA, 120 bp, Artificial Sequence
  ENSG00000286896_1 (sequence is synthesized)
gctgtggacgaaagccgagtctgtcctggagcagctgggcctgggcaggtctgagcccgtgtgaggaacattcctgcagatgcacagcatgcagagggcaggcggggctgacgcacacac

SEQ ID NO: 894784 - DNA, 120 bp, Artificial Sequence
  ENSG00000286896_2 (sequence is synthesized)
ttctccccagtgaattctggaggctggagtcaacctatagaaagtcttccatgaggccgaaattggagtgtgtgatgggggtggctcctgggtctcatggagttcctcagagagcttctg

SEQ ID NO: 894785 - DNA, 120 bp, Artificial Sequence
  ENSG00000286896_3 (sequence is synthesized)
cctgagttatctattggtattctgcagcagctgcctcacagagcctggagagctccagcaaggatgggccggaactccagctgctgtggaaccagctcttggatttctttatccatatga

SEQ ID NO: 894786 - DNA, 120 bp, Artificial Sequence
  ENSG00000286896_4 (sequence is synthesized)
agacctgcaaagggcctgatattttttttttctcctacgtgccggctaacaagttagtctgccagtggtctcctaggtgagagatttgtgccagttccctaaccccagttccacctaaca

SEQ ID NO: 894787 - DNA, 120 bp, Artificial Sequence
  ENSG00000286896_5 (sequence is synthesized)
tcatgaaagtctcataatgtctgcacacagagtgggttacaggagaggaatctaagtcctaaatttagggaaccggaatcttttataaggacagtaagctgggcgcttggctctgggtaa

SEQ ID NO: 894788 - DNA, 120 bp, Artificial Sequence
  ENSG00000286896_6 (sequence is synthesized)
agaccctctctttgtcttgcaaagctgtttgctatacaaacgtccctgaagagatggtccacaagaaaggcagccagtgcctctgcctctgcccctgtcctgaggtattcacaaaccaag

SEQ ID NO: 894789 - DNA, 120 bp, Artificial Sequence
  ENSG00000286896_7 (sequence is synthesized)
caagagattttggagaactgtctcccaacaatcaatcaatcaatcaatcccactgattttgtctttctttcttcctttctttcatgccctttcttttctttttctttctttctttctttc

SEQ ID NO: 894790 - DNA, 85 bp, Artificial Sequence
  ENSG00000286896_8 (sequence is synthesized)
tttctttcctcttttttctttctctctttctccttccttcgtttctctttcttttcttttctttctttctttctctttctttctc

SEQ ID NO: 894791 - DNA, 120 bp, Artificial Sequence
  ENSG00000286896_9 (sequence is synthesized)
ctttctttcttttctttctttctttcttcctttcaggatctcattctgttgctcagcctgagtgtggtgcgaccctagctcactgcagccttgaacttctgggcttcagtaatactccta

SEQ ID NO: 894792 - DNA, 120 bp, Artificial Sequence
  ENSG00000286896_10 (sequence is synthesized)
cctgagtgtggtgcgaccctagctcactgcagccttgaacttctgggcttcagtaatactcctacctcagcctcctgagtagctagggctatgggtgcatgccaccatgcctggctaatt

SEQ ID NO: 894793 - DNA, 120 bp, Artificial Sequence
  ENSG00000286896_11 (sequence is synthesized)
ctcaccatgttgcctaggctggtcttgaacgttgttttcaaactaattatattctttcatttttagttccttccttctattttccttatattttaaaaaatattctttttctatttttct

SEQ ID NO: 894794 - DNA, 120 bp, Artificial Sequence
  ENSG00000286896_12 (sequence is synthesized)
tgagttggataattacttccttcaccttcactgttcttaagctaaaatgattttaagattgtgactttttctttgaccaaatattgactacatctcataagctttaataaatagtgtttt

SEQ ID NO: 894795 - DNA, 120 bp, Artificial Sequence
  ENSG00000286896_13 (sequence is synthesized)
ccttattatttgctaaattatctagtttttccctgttatttatggaagtcaaaggtttcatttatttatttatttattcgagacagagtcactcactgtcacccaggctggagtgcagtg

SEQ ID NO: 894796 - DNA, 74 bp, Artificial Sequence
  ENSG00000286896_14 (sequence is synthesized)
tgaactcctgacctcaaaagccaccgagcctggccagcagtcaaaggttttaaactaaattaatcaatcatctt

SEQ ID NO: 894797 - DNA, 120 bp, Artificial Sequence
  ENSG00000286896_15 (sequence is synthesized)
cagcagtcaaaggttttaaactaaattaatcaatcatctttaggttcccttgctctcttggtttgctctggaagctactttcttttcctcagacgtttttagattaaagctataaagccc

SEQ ID NO: 894798 - DNA, 120 bp, Artificial Sequence
  ENSG00000286896_16 (sequence is synthesized)
ttttaataggatctctgtgacttgtgtgttaaattgcacttcattgcaatttaggaggaaatggaatttggaagataaaagttcaagtcctgactctgccactttgtactggtcaccaaa

SEQ ID NO: 894799 - DNA, 120 bp, Artificial Sequence
  ENSG00000225539_0 (sequence is synthesized)
agaagaaatcttcctttgagggcagtgatacacttatgtgagattttgaaaagtgaaaaatcaaaggtggaattgaccagtagatgtaaaagtacaacaaataaacaaaaatggcaatgt

SEQ ID NO: 894800 - DNA, 120 bp, Artificial Sequence
  ENSG00000225539_1 (sequence is synthesized)
tgaaagtgaaactgaaattcaacagaaataaaagaaatagcagactggggggatattgactttgacaccatgatgccagaggaacttagtgatggcaaacttatcaatataaaatgagga

SEQ ID NO: 894801 - DNA, 120 bp, Artificial Sequence
  ENSG00000225539_2 (sequence is synthesized)
tattggttgtcaactaggttgtgtggtggtccttgatcttgtccatcaagtcctttttcccaaaggataactgaagaagatcacatacattccaacttattgagtctgataggtattcat

SEQ ID NO: 894802 - DNA, 120 bp, Artificial Sequence
  ENSG00000225539_3 (sequence is synthesized)
aatgatctacactagaaaaataaaaatgtagttactgacaaaaaagcaggcagatttataaaggaagctgctggaaggaattcattccctttttgctgttctgccttccaccttccactg

SEQ ID NO: 894803 - DNA, 120 bp, Artificial Sequence
  ENSG00000225539_4 (sequence is synthesized)
tgtgaggacactgcaagaaagccctcatcagacaccaactgccagcacctagatcttggaattctcagcctccagaactgtgagaaacacgtttctgtttttctataaaataataataat

SEQ ID NO: 894804 - DNA, 120 bp, Artificial Sequence
  ENSG00000225539_5 (sequence is synthesized)
aaaaaacttccatgcaggaaaaaaaatcaagttcaaaggtcctgtggtgagggcataccagctttgtttgagaagcagtaatcatgcctgtgtgactgtaatgaaagaataaaagagaaa

SEQ ID NO: 894805 - DNA, 120 bp, Artificial Sequence
  ENSG00000225539_6 (sequence is synthesized)
catctgcaatgatctacactagaaaaataaaaatgtagttactgacaaaaaagcaggaactactgctctaaggaaaaaaggacagctacatgaggaccacacaactcctggaagaggttt

SEQ ID NO: 894806 - DNA, 120 bp, Artificial Sequence
  ENSG00000225539_7 (sequence is synthesized)
ccctggcaacacaacttttccattcatctggttgcagtgttttcatccagtagcctgtcacctcactcaaaagcagggcaatggagagaaagaaacttaccaagttttttcttttaacta

SEQ ID NO: 894807 - DNA, 120 bp, Artificial Sequence
  ENSG00000225539_8 (sequence is synthesized)
agcaagaaatttggcttcaattctaaatgtgataagaaaaaaacagaaggttccaaactgagaagtgacataatatgaaatgttttaacagaatcaccttgttaccatattgcaaataaa

SEQ ID NO: 894808 - DNA, 120 bp, Artificial Sequence
  ENSG00000225539_9 (sequence is synthesized)
atgaaagtgcatcaagggcagaagtaggaaggcaagttatgaggtcattttgataatccagaggagctgggatgatgacttacagcagtatagtagcaagggttgggtgagaacgtggaa

SEQ ID NO: 894809 - DNA, 120 bp, Artificial Sequence
  ENSG00000225539_10 (sequence is synthesized)
tcctgggtatatattaaagtttcagcaaaaaggatttatagatgaaacagatatgggttatgagaaagagtcaagttaaagattatatcaaaattttttatctgaacaactggtagtatt

SEQ ID NO: 894810 - DNA, 120 bp, Artificial Sequence
  ENSG00000225539_11 (sequence is synthesized)
gtggtgaatccttaccccatcaatttacgtgaccgataactgagtgggaacattaaggaagggatggtttgagtgagaatcaggatctcagtttggaaatattaagttgaatatgcctat

SEQ ID NO: 894811 - DNA, 120 bp, Artificial Sequence
  ENSG00000225539_12 (sequence is synthesized)
caaatgaaaaatagtatttttgtaattttcagtatttatttggcaagagattaaataatctatagcattgttactactttctctttttcataaaagttattttggtataaaatcaacctg

SEQ ID NO: 894812 - DNA, 120 bp, Artificial Sequence
  ENSG00000225539_13 (sequence is synthesized)
tcaacctgactgggaactatccaaatatataagcctttagctttgacctattacttatatttttttgccattaataatatgaacatccactaaacaagaacttgagactataactcttct

SEQ ID NO: 894813 - DNA, 120 bp, Artificial Sequence
  ENSG00000225539_14 (sequence is synthesized)
gaattctcagcctccagaactgaagcactaaatatggaaagaaaaactggtaccagccacaaaaacataccaaattttaaagaccatcaacagtatgaagaaactgaatcaactaatgca

SEQ ID NO: 894814 - DNA, 120 bp, Artificial Sequence
  ENSG00000225539_15 (sequence is synthesized)
gtatgaagaaactgaatcaactaatgcaaaataaccaactagcatcataatgacaggatcacattcacacataacaataataacctgaaatataaacgggctaaatgccccaattaaaag

SEQ ID NO: 894815 - DNA, 120 bp, Artificial Sequence
  ENSG00000225539_16 (sequence is synthesized)
caactcccaccagtgtgctgtgttcagaagacccatctaatgtgcaaagacacacattggctcaaaataaagggatggagaaatattggccaagcaaatggaaagaaaaaaaaaaaaagc

SEQ ID NO: 894816 - DNA, 81 bp, Artificial Sequence
  ENSG00000225539_17 (sequence is synthesized)
atggtaaaggaatcaatgcaacaagatgagcctactatcataaatatatatgcgcccaatacaggagcacccagatttata

SEQ ID NO: 894817 - DNA, 120 bp, Artificial Sequence
  ENSG00000225539_18 (sequence is synthesized)
agatcttggaattctcagcctccagaactacgtgacttgctctgccttgccttccatcatgattgtgaggactctccagccacatgcaactgtctttgcctatttatttataaggattcc

SEQ ID NO: 894818 - DNA, 120 bp, Artificial Sequence
  ENSG00000225539_19 (sequence is synthesized)
atctacgaaatgtctctccagaatcactgacaattcggttcacatcatatggcaattagataattttctgatgacttttaacttacctcctctcttttgacttctccctacaccatatca

SEQ ID NO: 894819 - DNA, 120 bp, Artificial Sequence
  ENSG00000225539_20 (sequence is synthesized)
gtgtccaaagtgttgccaaaaccacttcgaaaatgcacatctgtttctgtctctcccttatattatgccttcaaatcatgacttcttaaaatgatataaggaatttttacagttgggtaa

SEQ ID NO: 894820 - DNA, 120 bp, Artificial Sequence
  ENSG00000225539_21 (sequence is synthesized)
aaaattaagttggagcctcctttataattgttcctgtacatttgccatccctccagacttaaagaataaattgaagaactttgtacagaatattgactttcctgttgatgtgccatcatt

SEQ ID NO: 894821 - DNA, 120 bp, Artificial Sequence
  ENSG00000225539_22 (sequence is synthesized)
tagtacaggagaaacaactcagtgtatacctatctgcaaacttttctaatgataatttgtgcctatagtcctatactgatgtgaagtgtgaaaaaatatataccaggagaaacaaaggag

SEQ ID NO: 894822 - DNA, 120 bp, Artificial Sequence
  ENSG00000225539_23 (sequence is synthesized)
aatggcaccatataattggtagattttcatcccatagtttattttcgtatttgcctgcaaggtcttttttcatacactaaatcaagccctgcctgttttgaaatcatcatcgacacccct

SEQ ID NO: 894823 - DNA, 120 bp, Artificial Sequence
  ENSG00000225539_24 (sequence is synthesized)
tcaaagcacagttaagtacaccttctctggtttcacatgacaatctgattgcactggattacagtcaaaacttttgtgtctgtctgtgcaatttctgatgtccttaagggcagggacaat

SEQ ID NO: 894824 - DNA, 120 bp, Artificial Sequence
  ENSG00000225539_25 (sequence is synthesized)
gtttttcccaattttgtattgccagtgcctagcacaatccctgactttttgtagatagaacttttttccaccaattgtataatttaatgaatcacacatatagactctaatgattacatg

SEQ ID NO: 894825 - DNA, 120 bp, Artificial Sequence
  ENSG00000225539_26 (sequence is synthesized)
tccatcatgattgtgaggactctccagccacatgcaactgtctttgcctatttatttataagccacagaagattaagaatgaaggaggggagtatgtgcaaagaaccatcatacttaatt

SEQ ID NO: 894826 - DNA, 120 bp, Artificial Sequence
  ENSG00000225539_27 (sequence is synthesized)
cccacctcttcaaactgctagagccacagacaatcctggaataccccaaaagagaggaggtatatacaaaccagaagtatttatgatttatggtctttgggaccacagttgatctttgag

SEQ ID NO: 894827 - DNA, 120 bp, Artificial Sequence
  ENSG00000225539_28 (sequence is synthesized)
gattgaagccaatggataaaaagcctctacgttttgccctctggggtagaaaattctaagattcattataatatttttcataatgccctaagaaaatcagcatccattgccctcagtttg

SEQ ID NO: 894828 - DNA, 120 bp, Artificial Sequence
  ENSG00000225539_29 (sequence is synthesized)
tgcaacttaatactactttcttgtattatcaattccttcattgttttcctcccccttaatcctgtgtcctgctgttatatttctaagactttgtttcagactttgttttccaggggtccc

SEQ ID NO: 894829 - DNA, 120 bp, Artificial Sequence
  ENSG00000225539_30 (sequence is synthesized)
tgacaaaaaagcagaccccagactcagctgtcagagaggagaagcagctggatgctcgggactaaggctggacactggagagaaacggcttgacttccgagggacagcttgatggtgtaa

SEQ ID NO: 894830 - DNA, 120 bp, Artificial Sequence
  ENSG00000225539_31 (sequence is synthesized)
cttcagataataatctaatctaaaggggaagattcttcaggggaagattacctgcctaccccatacctttttcagctcccctacctgctgagagctacttttttcagcaataaaatccca

SEQ ID NO: 894831 - DNA, 120 bp, Artificial Sequence
  ENSG00000225539_32 (sequence is synthesized)
cacatttactatccttcaatttgttcatttgacctcattttttctggacatcagacaagagctcaggagccacaagtggggatacaaaaggctctcacactggccctttgcactcatggg

SEQ ID NO: 894832 - DNA, 120 bp, Artificial Sequence
  ENSG00000225539_33 (sequence is synthesized)
ttgagggcaggttttttgggaaagatatatagcttttggcagaagaaaatcagtgacaatgacttagaagaatcttaatctcatgaaagaaataaatgcttgtcagtcaagaagttgtaa

SEQ ID NO: 894833 - DNA, 120 bp, Artificial Sequence
  ENSG00000225539_34 (sequence is synthesized)
agaactgtgaagtgagaagtccagaaggtgtagagtagaagacagagatggctaccagccacggtagtccagccggtacattttcaaaatgaaatggaaaactttagattgcttatgtaa

SEQ ID NO: 894834 - DNA, 120 bp, Artificial Sequence
  ENSG00000225539_35 (sequence is synthesized)
aatggaaaactttagattgcttatgtaattacatattaacagagcttctgtatattcaatatatgaagacacagtctatttagttaggctgttatatattatctataaggattataatta

SEQ ID NO: 894835 - DNA, 120 bp, Artificial Sequence
  ENSG00000225539_36 (sequence is synthesized)
tgccataaatcttaatgtgtattcattatatatgatattttattcatttacttcctcttcttgtttaggatactactttaaagtagtttgggaaattatgaataaagacaaattcttaac

SEQ ID NO: 894836 - DNA, 79 bp, Artificial Sequence
  ENSG00000225539_37 (sequence is synthesized)
aatgatgtgatgtttcatctgcaatgatctacactagaaaaataaaaatgtagttactgacaaaaaagcaggatgctcc

SEQ ID NO: 894837 - DNA, 120 bp, Artificial Sequence
  ENSG00000225539_38 (sequence is synthesized)
gttatcaagagaaaaacagtcttagatgcaacataaaaatttcagagacagaagaaatcttcctttgagggcaggattgaaatgctgtttttcttccctggtacaatgttaaagctttaa

SEQ ID NO: 894838 - DNA, 70 bp, Artificial Sequence
  ENSG00000225539_39 (sequence is synthesized)
gttatcaagagaaaaacagtcttagatgcaacataaaaatttcagagacagaagaaatcttcctttgagg

SEQ ID NO: 894839 - DNA, 81 bp, Artificial Sequence
  ENSG00000225532_0 (sequence is synthesized)
acagaggctgtagaatgtgcacgggggcttggtctctcttgctgccctagagaccagctgccccacgaaggaaccagagcc

SEQ ID NO: 894840 - DNA, 69 bp, Artificial Sequence
  ENSG00000225532_1 (sequence is synthesized)
gaatattttgagccaaatgtgaggaccacaacctgtgagaacggaaaataaatcctgggaccccagact

SEQ ID NO: 894841 - DNA, 120 bp, Artificial Sequence
  ENSG00000225535_0 (sequence is synthesized)
ggtgatacgaagccttctgaagatttgaatcaaggaaatgaggagccattgaagaatactgttgtcctatcccagaaggagcaagcggacaacactgatatcctgaccactaaccatcca

SEQ ID NO: 894842 - DNA, 120 bp, Artificial Sequence
  ENSG00000225535_1 (sequence is synthesized)
gcaccacttaaagttttaaaaagaataacagaaagaaagaagtggctgaaacctaaatgccatatggagaagacagctaattgccacactctcctctttggtctttcctggtacgcagca

SEQ ID NO: 894843 - DNA, 120 bp, Artificial Sequence
  ENSG00000225535_2 (sequence is synthesized)
aagttaccttcattaaatgtcagcttaaatgtgtgcctactttttgccctacctagaattgcaagcacctctcaccactgtgctcccattctccttaacttaagccacttttattctcat

SEQ ID NO: 894844 - DNA, 120 bp, Artificial Sequence
  ENSG00000225535_3 (sequence is synthesized)
aataaagccacatattttttcttattatatcataatcgtactgtataatttatattttattacttttgtttgtatacttattgtatgtttctgttcacaaggatgtaaaccccatgaaca

SEQ ID NO: 894845 - DNA, 120 bp, Artificial Sequence
  ENSG00000225535_4 (sequence is synthesized)
cagagatctttgattgttttattcactgatttatgccaaatgtttggaacaatgcctggcacatagtagatgtttgataattttttttttttctgaatgaataaatacattttagccaaa

SEQ ID NO: 894846 - DNA, 120 bp, Artificial Sequence
  ENSG00000225535_5 (sequence is synthesized)
attttttttttgttagtatgttttcatcttagaattttctttgctgtaactcttttcttatccagaaatgttcttagtctctgattatcccatgaacgactggtgttctttcctgccatt

SEQ ID NO: 894847 - DNA, 120 bp, Artificial Sequence
  ENSG00000225535_6 (sequence is synthesized)
cagatcttaccttaaattgtcacttctaccaagaagctttcctgacaacacaatctaaagaatctgtttcggacttcctccataacatctctaattttcagcatgggatccatctgacat

SEQ ID NO: 894848 - DNA, 120 bp, Artificial Sequence
  ENSG00000225535_7 (sequence is synthesized)
ttcttccctctttccattctttcttcacttcctcctttctgcccacctttcctgatagatttcaagttccatgagagttagaaccttgactgtctgatgtcctatggtagcttcagcaca

SEQ ID NO: 894849 - DNA, 120 bp, Artificial Sequence
  ENSG00000225535_8 (sequence is synthesized)
tatttgctgcattaacaattacttcttaaatgtgcttgttttgttgccgagcttttaactttttttttgtttgtttgttttttgcactgtatcaaagaggagccattgaagaatactgtt

SEQ ID NO: 894850 - DNA, 120 bp, Artificial Sequence
  ENSG00000225535_9 (sequence is synthesized)
aagtgtcctgttattaaagggagtttgaccctctcttgctggcttgctctcatgctttcttgtccttctgccttctgccatgggatgacacagcaagaagccccttgccagatgtgggcc

SEQ ID NO: 894851 - DNA, 120 bp, Artificial Sequence
  ENSG00000225535_10 (sequence is synthesized)
tggttatatttatgtgtgtgtgaatgtatgtgcagaaaaagaagaaattagttaataccaaatctataaaatgggaaaaataatgcttaccttatagtgttgttatgaaactcaactaat

SEQ ID NO: 894852 - DNA, 120 bp, Artificial Sequence
  ENSG00000225535_11 (sequence is synthesized)
ataagatatgtgaagggtctagcataaaatgtggagcataataagcattcaataaatggcattctgttttattaaccatctggttgcctattgttgaaggtcggctctttaatgtgcaaa

SEQ ID NO: 894853 - DNA, 120 bp, Artificial Sequence
  ENSG00000225535_12 (sequence is synthesized)
ttaaggtgttttatttccttcatatatcaattatagtctgtttatttacttctagataaaatcctttgatggacatttaagctgtgccaactatttactaataaaaatatttacattctg

SEQ ID NO: 894854 - DNA, 120 bp, Artificial Sequence
  ENSG00000225535_13 (sequence is synthesized)
cacacactctccctccccaccatgtgaggatacagggagaaagcacttatctgcaagccaggaagtgaacccttgccaaagcccaaccatgcaggcaccctgatctcaaactttcagact

SEQ ID NO: 894855 - DNA, 120 bp, Artificial Sequence
  ENSG00000225535_14 (sequence is synthesized)
tcccagaaggagcaagcggacaacactgatatcctgaccactaaccatccagcaccacttaaagccacactctcctctttggtctttcctggtacgcagcatacaagcccacagattgag

SEQ ID NO: 894856 - DNA, 120 bp, Artificial Sequence
  ENSG00000225537_0 (sequence is synthesized)
ggaagatgttattagctcctgaaatttggtaacaagaaaggcctttaaagtctccaggactttagctccttaacggtgggactatgctttagatagaagctgattagtaaatattgattg

SEQ ID NO: 894857 - DNA, 120 bp, Artificial Sequence
  ENSG00000225537_1 (sequence is synthesized)
aatgaatacatccagacagagtgtttggaatcttggctcaccctgctcacctccccagctcccagtctggtctgtcttcatcatgggaaatgcttgctgtactggccagaatgagcatca

SEQ ID NO: 894858 - DNA, 120 bp, Artificial Sequence
  ENSG00000225537_2 (sequence is synthesized)
acacctttggttcatcttcggttctggccttaacggaaaagcattcactgtttcatagtggagaaactaaggcccatctcacgatggaactcaccaagggccacatgtcaataactggta

SEQ ID NO: 894859 - DNA, 120 bp, Artificial Sequence
  ENSG00000225537_3 (sequence is synthesized)
aataacctggaaagcgggttcaactaggagcccccaaaatcatgctccttcctgctccaggaagcaccaggaacccccttcttcatttgtgctgacaacataaccttagagatgaggagt

SEQ ID NO: 894860 - DNA, 120 bp, Artificial Sequence
  ENSG00000286763_0 (sequence is synthesized)
aacaaaaacaagcgcctgagtggcaaggctgccagcgcccagcccagccgagcaggcataaaggagcccgcgtcgcggatgtttgtgacctgtcattagagacagctccctcagcttcca

SEQ ID NO: 894861 - DNA, 120 bp, Artificial Sequence
  ENSG00000286763_1 (sequence is synthesized)
aacgatcacatggagacaatgtggcaaattatatttgtaccagcaaagatccttgtcgagccgcgaagggaagccagctgccatgtcatcagccgccctgtggagtggccctgctggcaa

SEQ ID NO: 894862 - DNA, 120 bp, Artificial Sequence
  ENSG00000286763_2 (sequence is synthesized)
ggaactgatgtctttagccaacagccagcaaggatctgaggccctcagaccaaaaaccatcaaagaactaaatgctgccaacaaccacgggagggagctgagaagtggattctccaccag

SEQ ID NO: 894863 - DNA, 120 bp, Artificial Sequence
  ENSG00000286763_3 (sequence is synthesized)
tcccagcctagagatgactgcagccctggctgacaccttgattgcagctttgtgaaccagagacacccaggtgagagaagaagtttaagttctgcttacaaatgaggtaatttatcttgc

SEQ ID NO: 894864 - DNA, 120 bp, Artificial Sequence
  ENSG00000286763_4 (sequence is synthesized)
ctggcaggtgcctgaagattttcttcaagttcaatactgtacatagggtaaactttgatattaactgaattggaatgttcctggaacatggttcaattttatctgcagtttcagtgatat

SEQ ID NO: 894865 - DNA, 120 bp, Artificial Sequence
  ENSG00000286763_5 (sequence is synthesized)
cttaaaattcagataattctcttatatctttgaatatatcttctattttgtggtttttcaattcagatacatcaattcttcttatattggattatgtttatctaccacatatattgtctc

SEQ ID NO: 894866 - DNA, 120 bp, Artificial Sequence
  ENSG00000286763_6 (sequence is synthesized)
tttgcgatattgtcagtaatttaatattcaccagtttttattgttttaattttatattagctctataatgttgtattttataagaaattctttttaaaatctcattttcttgttgcctta

SEQ ID NO: 894867 - DNA, 120 bp, Artificial Sequence
  ENSG00000286763_7 (sequence is synthesized)
ttttcttgttgccttactgatttgatatttttattccaatttactctagcaagaaatgagtgtgattaatatgcttctattggcttaagttaaatttttaggggcgggtgtgttggctca

SEQ ID NO: 894868 - DNA, 62 bp, Artificial Sequence
  ENSG00000286763_8 (sequence is synthesized)
ggctgaggaaggagaatcgctttgacgggagtaagactccacctcaaaaaaaaaaaaaaaag

SEQ ID NO: 894869 - DNA, 120 bp, Artificial Sequence
  ENSG00000286763_9 (sequence is synthesized)
tgacgggagtaagactccacctcaaaaaaaaaaaaaaaagtgttagctaggttaggctttgtgtcttctgcatactataatccctttttttttttattttcttctgctcagtggtttttt

SEQ ID NO: 894870 - DNA, 120 bp, Artificial Sequence
  ENSG00000286763_10 (sequence is synthesized)
gtaaaaagtaatacagagaaattctgtgtatcctttgtcaatttccctcaatgataacatcttgtaaaactgtaatacgacattaagactagcatattgacattgatacaaatcttactc

SEQ ID NO: 894871 - DNA, 120 bp, Artificial Sequence
  ENSG00000286763_11 (sequence is synthesized)
agattttctccattttacttgggcttatgtgtgtgtctatgtctgtgcatgtgtgtgtttgtatttagcactatgcaatttttattgcctgtgtaggctggcatatttaccaccaaagtc

SEQ ID NO: 894872 - DNA, 120 bp, Artificial Sequence
  ENSG00000286763_12 (sequence is synthesized)
aaaatacagaatggcttcaccaccatgaggatacagtaggttgtcctttgtaaccataattgactattttggacattttatataaatggaataatgtaatatatggtcctttgtgactgg

SEQ ID NO: 894873 - DNA, 120 bp, Artificial Sequence
  ENSG00000286763_13 (sequence is synthesized)
cctcttccatttagcataatgttccagggttcatctctattgtagcactttccactgcttcattcctttttattgctgaataacatttcactttattgatataccatattttgtttattt

SEQ ID NO: 894874 - DNA, 120 bp, Artificial Sequence
  ENSG00000286763_14 (sequence is synthesized)
attcattagttaatggacatttgagttgtttccactttttggctattatgagtaatactaatgcgaacattcatgtacaagttttggtgtggtcctatgttttcatttcttttgggttga

SEQ ID NO: 894875 - DNA, 120 bp, Artificial Sequence
  ENSG00000286763_15 (sequence is synthesized)
tacctacgagtagtgccgctgggtgatacggtaactctatgtttaactctttgaggaactgacagagtgtgttctaaagtggctgcaccacctcacatcctcactcgcagtgtatgaagc

SEQ ID NO: 894876 - DNA, 78 bp, Artificial Sequence
  ENSG00000286763_16 (sequence is synthesized)
ggctgcaccacctcacatcctcactcgcagtgtatgaagcttccaatttctccacattatctgtttgttgttcttttt

SEQ ID NO: 894877 - DNA, 70 bp, Artificial Sequence
  ENSG00000286763_17 (sequence is synthesized)
acaggtagcatgttggtcagactggtctttaattcctggcctcaagtgatcctcctgcctgggcctcaca

SEQ ID NO: 894878 - DNA, 88 bp, Artificial Sequence
  ENSG00000286763_18 (sequence is synthesized)
gtagagacggggttttagcatgttggtcagactggtctttaattcctggcctcaagtgatcctcctgcctgggcctcacaaagtgtca

SEQ ID NO: 894879 - DNA, 120 bp, Artificial Sequence
  ENSG00000286763_19 (sequence is synthesized)
ggtagctggcatagttgttgttgttgtttttaatgtagagtctttctctgctatatctcatgtagttttgatttgcatttccctggctaatgatgttgaggaccttttcgtgtgttcatt

SEQ ID NO: 894880 - DNA, 120 bp, Artificial Sequence
  ENSG00000286763_20 (sequence is synthesized)
agccatttttatatcttctttgtccaaatgtgtgtttgattttttactcattttaaactgggttacttccttattattgagttgtaagagttctttatattgtctttccataagtccctt

SEQ ID NO: 894881 - DNA, 120 bp, Artificial Sequence
  ENSG00000286761_0 (sequence is synthesized)
aaatatcttctaagaaatcctgcttttcctccattgccatccaccctgtagataatccgggtagcgctctcatcctcattctcacaaaatagctgccagagctccagctatctcatccaa

SEQ ID NO: 894882 - DNA, 120 bp, Artificial Sequence
  ENSG00000286761_1 (sequence is synthesized)
gttacaagaaataaggaaataaggaagagcgaaaagagctaaaggaggaaagaatattgtccatcacaggaaaacaaaccttctgagatatccccagcaggcctcccctcattgacctat

SEQ ID NO: 894883 - DNA, 120 bp, Artificial Sequence
  ENSG00000286761_2 (sequence is synthesized)
tttacttgaacaacctgagctgcaactaggcaatgcgatttttagccaggcattttagccagcaacgttttctccaatagaattggacttctcttcataaagtagaaggtgagagtggct

SEQ ID NO: 894884 - DNA, 120 bp, Artificial Sequence
  ENSG00000286761_3 (sequence is synthesized)
gttcagtacctaacacaccacctttgccatatggttccttgcaagattcagccacattttccagtgaaccaccagcacgtgacctcacagtacgctgctggccgtgcctcttgcaaaatt

SEQ ID NO: 894885 - DNA, 120 bp, Artificial Sequence
  ENSG00000286761_4 (sequence is synthesized)
gtaaccatcaagttcatccaccctctaccacccccacctccagaatctactggtgtgtgtggtgtgtgcaggatctaccttcagtcctcctcggacaccagaaaccgcagagcatgccct

SEQ ID NO: 894886 - DNA, 120 bp, Artificial Sequence
  ENSG00000286761_5 (sequence is synthesized)
tgtcccttgtctgcctggccatcctgctattccagccctctctcgcctgcctcttcctccaagtgccccctacagtgccaggcaccctacccttctggaggtcggcagtttgcaaacaac

SEQ ID NO: 894887 - DNA, 120 bp, Artificial Sequence
  ENSG00000286761_6 (sequence is synthesized)
ttaatgaagggggataattggggcagcccaatctttatgaggggcccattcaggaatcactctcctctcagcagcactgcacttccccatcaagacacctgccttcaacccaagttctca

SEQ ID NO: 894888 - DNA, 120 bp, Artificial Sequence
  ENSG00000286761_7 (sequence is synthesized)
agagggctggatagtagtactgtgactataaccagtcacattcgagggtggtttcctgaacttagtttgtcatcaatttagagccttttattctgagtcttaggctttagatgaaactct

SEQ ID NO: 894889 - DNA, 120 bp, Artificial Sequence
  ENSG00000286761_8 (sequence is synthesized)
ggagtgaccagaaaattccccttgtctcccaaacatgccctattatactttgtgtggactttttcacacccatctgctccccacaaaagatgctccctcacctccctgatggtgcagttc

SEQ ID NO: 894890 - DNA, 120 bp, Artificial Sequence
  ENSG00000286761_9 (sequence is synthesized)
tagggttaatggactattctgaccttcaagccccattatttttttcacaagtatttataactacagatgcatcagccataaatgtacatcccaaccacctcaaatcagagggaagctgtg

SEQ ID NO: 894891 - DNA, 120 bp, Artificial Sequence
  ENSG00000286761_10 (sequence is synthesized)
tggcaaagctcaagtccagttaatgggtttgaaacagttgttgggcttcgagcctcattgcttctatccttttaaaaagctttagggtagtaagtcataccagaggagatgctgtaatcc

SEQ ID NO: 894892 - DNA, 120 bp, Artificial Sequence
  ENSG00000286761_11 (sequence is synthesized)
atgtcacagataaaatgcctagtttattttttcttatgttctgaactttatttaatgcataggggctttgggagcttcgagagggaaccggggtgtatgtgtaagtgctgggtgaagcta

SEQ ID NO: 894893 - DNA, 120 bp, Artificial Sequence
  ENSG00000286761_12 (sequence is synthesized)
agagaaaagaaagaagaatctcaagtagtcttttcatcatcaaaactcctgcctctgcaggctccctctttcatcctattggctgttaccttcccccaacttcctccagggacagatcat

SEQ ID NO: 894894 - DNA, 120 bp, Artificial Sequence
  ENSG00000286761_13 (sequence is synthesized)
tcccttaagctcagactttcattcttcaactaccatagcaatttgggttgtttttatcgtgagttccacaagtgagcaacatttgcagccttgcctaggagacctaggtagtaccaggag

SEQ ID NO: 894895 - DNA, 120 bp, Artificial Sequence
  ENSG00000286760_0 (sequence is synthesized)
atgctcaccagcctttctctcggacccggtagtggtccgtgaagtccgcggagtgggcgctgatggtggggctatcccttcccactgtccgcgaggttcaagtttgaggcattaagaagg

SEQ ID NO: 894896 - DNA, 120 bp, Artificial Sequence
  ENSG00000286760_1 (sequence is synthesized)
ataagacatcaatttgaaaagagcccctgtcagagcaacatgacttgaaagcaagaagaaaaaacaaaaaatgaagcaagaacaaacatcaaatttatgctgagtttggctgcaagaatg

SEQ ID NO: 894897 - DNA, 120 bp, Artificial Sequence
  ENSG00000286760_2 (sequence is synthesized)
gtgaaatcattgatactttacaagacactaatcaggacagtgccccaaaggaatcagcagtttacaaatggatataacctgttttcagaagagacaagattaatttgaagatgaagcagt

SEQ ID NO: 894898 - DNA, 120 bp, Artificial Sequence
  ENSG00000286760_3 (sequence is synthesized)
ggcggaccatccatgtcaatttatgagaaaaaaattcattctgttcatgccctaactgaagaggactgacaacagcacaaacaatagccaacatcatagacatctcaactggttcagctt

SEQ ID NO: 894899 - DNA, 120 bp, Artificial Sequence
  ENSG00000286760_4 (sequence is synthesized)
actcaattctgactgaaagttaaagttgagcaaactttccactcaatgagtgtcgaaaccctcatgcccagatcagctgcagacaagagcagaggtttcaatggaaattttaaacaagtg

SEQ ID NO: 894900 - DNA, 120 bp, Artificial Sequence
  ENSG00000286760_5 (sequence is synthesized)
agattaagatcctgaagcatttcttgaaagaattgtaacaggagataaaccatggcttcaccagtacaatactgaagactaagcacaatcaaagcaatggctaccaagaggccgaagtgg

SEQ ID NO: 894901 - DNA, 120 bp, Artificial Sequence
  ENSG00000286760_6 (sequence is synthesized)
tcccattaaggcgaaagtggaccagtcaagagcaaaggtcatggcaacagtgttttgggatgccaagacattttgctcgttgactttctggagggccaaagtgcagtaatgtctgtttat

SEQ ID NO: 894902 - DNA, 120 bp, Artificial Sequence
  ENSG00000286760_7 (sequence is synthesized)
tatgttttgagaaagttggccaaacctttagtagaaaaatgcccaggagaacttcactagagtgaccttcgttcaatttcagatcaccacaataaagcaaaaaattgcaattataaattt

SEQ ID NO: 894903 - DNA, 120 bp, Artificial Sequence
  ENSG00000286760_8 (sequence is synthesized)
tttggtttcccagtacatgtaaaagttataattacactatactatagtctattaagggtgcaatagcattatgtctgaaaaaaacaatggtcatgccttaatttaaaaatactttattac

SEQ ID NO: 894904 - DNA, 120 bp, Artificial Sequence
  ENSG00000286760_9 (sequence is synthesized)
taaaaaatgctagcaatcatctgaaccttcagtgagtcataatatttttgctagtggagggccttgcctggatgttgatggctgctgactgatcaggatggtggttgctgaaggttaggg

SEQ ID NO: 894905 - DNA, 120 bp, Artificial Sequence
  ENSG00000286760_10 (sequence is synthesized)
tggctgcagcaatttcttaacataagacaacagtgaagtttcctgcattgattgactcttcctttcatgaaatatttctctatagcatgtaatgctgtttgatagcattttacccacagt

SEQ ID NO: 894906 - DNA, 120 bp, Artificial Sequence
  ENSG00000286760_11 (sequence is synthesized)
gtttgatagcattttacccacagtagaatttatttcagaattgaagtcagtcctcttaaaccctgtcacttctttattaactaagttcacgcaatattctaaatcctttgttgtcatttc

SEQ ID NO: 894907 - DNA, 120 bp, Artificial Sequence
  ENSG00000286760_12 (sequence is synthesized)
agggatagattctgtctcaagaaaccactttctttgttcattcgtaagaagcaacccctcatctgttcaagttttctcatgagattggagcaattcagtcacattttcaggctgcatttt

SEQ ID NO: 894908 - DNA, 90 bp, Artificial Sequence
  ENSG00000286760_13 (sequence is synthesized)
gctatttctaccacatctgcagttacttccttcactgaaggcttgaacccctcaaagtcacttcctgttaatgttgatgttttgacctcc

SEQ ID NO: 894909 - DNA, 120 bp, Artificial Sequence
  ENSG00000286760_14 (sequence is synthesized)
cagaggaatcactgtctatggcaactgtaggcttataaaaggtatttcttaaataatatgtcttgaaagtctaaatgactccttgatccataagctgcagaatgggtgttgtgttagcaa

SEQ ID NO: 894910 - DNA, 120 bp, Artificial Sequence
  ENSG00000286760_15 (sequence is synthesized)
agctgcagaatgggtgttgtgttagcaagcatgaaaacaacattcatcttgtgcctctccatctgagctcttctatgaccaggtgccttgttgatgagcagtaatattttgaaagaaatc

SEQ ID NO: 894911 - DNA, 120 bp, Artificial Sequence
  ENSG00000286760_16 (sequence is synthesized)
tgggcttaaaatgttcattaagccatgctgtaaacagatgtgctatcatccaggctttgatgttccttatacagagtacaggcacaggcagagtagatttagtataattcttaagggccc

SEQ ID NO: 894912 - DNA, 82 bp, Artificial Sequence
  ENSG00000286760_17 (sequence is synthesized)
ggcacaggcagagtagatttagtataattcttaagggcccttggattttcagaatggtaagtgaacattggtgtgaacttaa

SEQ ID NO: 894913 - DNA, 120 bp, Artificial Sequence
  ENSG00000286760_18 (sequence is synthesized)
tagctatgaaagtcctagatgacatcttctgatttaaggctgttttgtctacattgaaagtctattatttagtgtagccaccttcatcaattatcttagtaaggtcttctggataacttg

SEQ ID NO: 894914 - DNA, 120 bp, Artificial Sequence
  ENSG00000286760_19 (sequence is synthesized)
ctgcagcttctacatcagcatttactgcttcacctcgcacttttatgttatggagatggcttcattccttaaacctcatgaaccaacgagcttcaaacctttcttctgcagcttcctcac

SEQ ID NO: 894915 - DNA, 120 bp, Artificial Sequence
  ENSG00000286760_20 (sequence is synthesized)
ctccctcaggcttcatagaatttaatagagttagggctttgctatggattaggtttttgcttatgggaggattgtggctggtttaatcttctatccagactactacaactttccccatat

SEQ ID NO: 894916 - DNA, 120 bp, Artificial Sequence
  ENSG00000286760_21 (sequence is synthesized)
caaaaataaggcactttcattttttgatcatttgttcactggagtgacacttacttttaatttcctgaaaattttcctttgcatttacaatgtagctaactattcagtggaagagggcta

SEQ ID NO: 894917 - DNA, 120 bp, Artificial Sequence
  ENSG00000286760_22 (sequence is synthesized)
gtttttgacatgccttcctcaatatgcttaataatttctagtttttgatttaaagtgagacacatgtgactcttcctttcacttgaatgccgagaggccatgcagggttattaattagcc

SEQ ID NO: 894918 - DNA, 120 bp, Artificial Sequence
  ENSG00000286760_23 (sequence is synthesized)
taatttcaatattgttatttaagttatggggaggcttgaggagagggagagagagacaggagaatggccggtcagtggagcagtcagaatacacacaacatatattgattaactttccta

SEQ ID NO: 894919 - DNA, 86 bp, Artificial Sequence
  ENSG00000286760_24 (sequence is synthesized)
cagtcagaatacacacaacatatattgattaactttcctatcttatatgagcacagttcttggcactccaaaacaattacagtact

SEQ ID NO: 894920 - DNA, 120 bp, Artificial Sequence
  ENSG00000286760_25 (sequence is synthesized)
attaccaaaatgtgacagatacaacatgaacaaatgctgttggaagaatggcactgatagatttgcccaatgcagggttgccacaaactttcaacttgtaaaaagagcagtatctgtgaa

SEQ ID NO: 894921 - DNA, 120 bp, Artificial Sequence
  ENSG00000286760_26 (sequence is synthesized)
agacggtaaagcagaaagcaataaaatgaagtgtgcccatgtatactaataagacatagttcattttattaataaagcacctgtcaatttcagttgagtaatttttatcaggaatgggtt

SEQ ID NO: 894922 - DNA, 120 bp, Artificial Sequence
  ENSG00000286760_27 (sequence is synthesized)
ttgaattttgttcaaggcttttacagcatctgtgggataactatgtattgtttccctggatctataaatacatacaggatactaatgacttttcaaatattgaaccaactttgcattctt

SEQ ID NO: 894923 - DNA, 120 bp, Artificial Sequence
  ENSG00000286760_28 (sequence is synthesized)
ggtccgtgaagtccgcggagtgggcgctgatggtggggctatcccttcccactgtccgcgaggtgcgccgtggtaacgcgcggggacacagcgcgggtgtggaccccctgcccacagctg

SEQ ID NO: 894924 - DNA, 120 bp, Artificial Sequence
  ENSG00000286760_29 (sequence is synthesized)
gcgcacagccattgagtgtagacccgactggggcacgaccactgaaccctgcacttggcgtcctccgggccccgcgaggggccttgctgggcgggtccgcggcaccccgggttcccagaa

SEQ ID NO: 894925 - DNA, 120 bp, Artificial Sequence
  ENSG00000286760_30 (sequence is synthesized)
gtcgaggccccgaatgcgcctcccctcgcctggaatcggagagcggagggctcctgcgggcaggtggccgtgctccgaagagcgccctgccacccatgaggtggccctgggggcgtcgct

SEQ ID NO: 894926 - DNA, 120 bp, Artificial Sequence
  ENSG00000286760_31 (sequence is synthesized)
agccttcccagctgggtgtcctcatccggagacacaaacacctgcctcaggattaaagcgaggagctgtatttcagaccgtctcaggagaaatagcaagaggctgcctcactcctttgcc

SEQ ID NO: 894927 - DNA, 120 bp, Artificial Sequence
  ENSG00000286767_0 (sequence is synthesized)
gggtgggtcttgctgtggctgctgtagaggatggagccagtttagcctggaatatttcagccagctcagcctaagaatataaatcttaatctctaatgacctctcagctgaaaccctaca

SEQ ID NO: 894928 - DNA, 120 bp, Artificial Sequence
  ENSG00000286767_1 (sequence is synthesized)
agccagaagagattgaaagcctatattcaacattttaaagaaaaaaatcttcaaccaagaatttcctatcctgccaaactaaggttcctaaactaaggagaaataagatccttttcagat

SEQ ID NO: 894929 - DNA, 120 bp, Artificial Sequence
  ENSG00000286767_2 (sequence is synthesized)
aagcaaatgttgagagttcactaccaccagacctgccttacaaaagttcttaagtatgggattacataaagaggccaaatctacgaatcattgtaatccctgaaagggatggggagaaag

SEQ ID NO: 894930 - DNA, 120 bp, Artificial Sequence
  ENSG00000286767_3 (sequence is synthesized)
aaaacacattttctataaaaacttcctcaacctggctagagaggccaacaatcaaattcaggaaatacagagaactgcaagattttacaaggaagattatcctcaagataaaaaaatcat

SEQ ID NO: 894931 - DNA, 120 bp, Artificial Sequence
  ENSG00000286767_4 (sequence is synthesized)
cagatcttccaaggttgaaatgaagaatgataaaggcagctagagagaaaaggcaggccacctacaagaaggaggagaagtgatgtggtcatttgggggacatacaacgctctggccatt

SEQ ID NO: 894932 - DNA, 120 bp, Artificial Sequence
  ENSG00000286767_5 (sequence is synthesized)
tgaattactcaagctcatgcattggctcttttccatctctgcctgtgggtgttcgttttactgcaatgtagactgaggacagtcaataaacttctattctcaatgatttcaccaggccaa

SEQ ID NO: 894933 - DNA, 120 bp, Artificial Sequence
  ENSG00000286766_0 (sequence is synthesized)
agaagaaaaagcactgttaaaaccagagtatctctccaaagtgattcaggccttttccagcacacgcgtgcgcgcgcacacgcacacacgcacacacgcacacacacagtgacaggtaac

SEQ ID NO: 894934 - DNA, 120 bp, Artificial Sequence
  ENSG00000286766_1 (sequence is synthesized)
ctatgcacagccacaaagatgaagtgcactggcaaaatgcaggttgtctaagaacactttccaataatgcttgatttgaaaattatccatggaaagaagagagtccaaacccgacaccta

SEQ ID NO: 894935 - DNA, 120 bp, Artificial Sequence
  ENSG00000286766_2 (sequence is synthesized)
gaagtgttttgcgaagaactaaatacagcagaaaattggcagaagactaatggatgagtgaagtcttgattcctagatgagagcagaatgcaaaggcctctctgtctcaacttttccaac

SEQ ID NO: 894936 - DNA, 120 bp, Artificial Sequence
  ENSG00000286766_3 (sequence is synthesized)
ttcagaaagcacatgtattttacatgttctaagaaactctcaaaaaagaacaagtaatttcaagaaatgcctggaattaccatttcatgggttatggtaacccagtgggacttggatagt

SEQ ID NO: 894937 - DNA, 120 bp, Artificial Sequence
  ENSG00000286766_4 (sequence is synthesized)
tcttgtaaccagttcttgtagccaaagtaccctccgctgagagtaactcaatgatgtaggactttctgttcagaggaaaaactatgttgtggtcacagagttgttacaacctccactcat

SEQ ID NO: 894938 - DNA, 120 bp, Artificial Sequence
  ENSG00000286766_5 (sequence is synthesized)
gagttaaaaaaagaatcattcacaagcattgtaaactcagattttaaaaaatacgagggaaataagatccttaatgttttctaaaattgcttgtttttcctcttttagtcttatttttat

SEQ ID NO: 894939 - DNA, 120 bp, Artificial Sequence
  ENSG00000286766_6 (sequence is synthesized)
actctctcttaatctaatcttacttctgatgtaatactgtcttatctctctttcctcctgccagattggatgaactgtttcatagtggttaaggtgggaggatacagactgctttgtttt

SEQ ID NO: 894940 - DNA, 120 bp, Artificial Sequence
  ENSG00000286766_7 (sequence is synthesized)
tgttttgtttcttaatttcttgtctatgctagtccatgttagatgatattagacaagacatttaattttcctaagctcagcttccttatctgtaaaatgaagacagtaataacagtacca

SEQ ID NO: 894941 - DNA, 120 bp, Artificial Sequence
  ENSG00000286766_8 (sequence is synthesized)
attttataagaacgttgtgaagattaaataagatagtggatataaagtactgagcacagtgtccagaccatatccaagtgctctcaatgttagttcttctttctaaatgtgagttctttt

SEQ ID NO: 894942 - DNA, 120 bp, Artificial Sequence
  ENSG00000286766_9 (sequence is synthesized)
ttctgtgctcagaaattgtgctactttttgccttgtttagttgaattttataagtacatttacctaatttcattccctatcattttgccctcctaaatgtttaaaattatttctgaacat

SEQ ID NO: 894943 - DNA, 120 bp, Artificial Sequence
  ENSG00000286766_10 (sequence is synthesized)
aggatgctcatgttcacaatgatacacatgtaaatagctctggtttcttgagggcaatgttgttccttactgctgcatccccctagcacctgaaacagtgaatgcctgtcacataatcgg

SEQ ID NO: 894944 - DNA, 120 bp, Artificial Sequence
  ENSG00000286766_11 (sequence is synthesized)
tgctggataggtatttgttgaatgaatgaaatgagttggggacaatttagtaacaatgtaatactctggctactgaaaccagagaaacatcaagtagggcaaacagacatgtaaaccaat

SEQ ID NO: 894945 - DNA, 120 bp, Artificial Sequence
  ENSG00000286766_12 (sequence is synthesized)
cacatttgatagtgaaaattttatgccctgggagctatgggggcaatgtggataccatttatggcttcatcaccatgccttgttatccaactcatttctggccaattcaactggatgacc

SEQ ID NO: 894946 - DNA, 120 bp, Artificial Sequence
  ENSG00000286766_13 (sequence is synthesized)
ttattttcaagaacttcttttatgactagacttgtggcatatatcattccattctgtttcctcagagataatgtgtttgcctctgatacactgaaaatgaactggaacactctattatta

SEQ ID NO: 894947 - DNA, 120 bp, Artificial Sequence
  ENSG00000286766_14 (sequence is synthesized)
atcttacatgaaatatgcagtttggtgtgaactgtgcataaggaaaagatcttattttatctatatattttttccaaacaaaatttcactccccttcaggctataattcagattagaaat

SEQ ID NO: 894948 - DNA, 120 bp, Artificial Sequence
  ENSG00000286766_15 (sequence is synthesized)
ttggcaattaaattagaaaataaattctggtggtacataaaacacttaaaaaatatgattgcttaaaccaggttcttagttcataaactgacccataaagactagtcctttaatgataac

SEQ ID NO: 894949 - DNA, 120 bp, Artificial Sequence
  ENSG00000286766_16 (sequence is synthesized)
cataaacaaagaacctatttggtctctgaaaagtttatactttcttttccattgattactcgtctttgttctttcctcttgatctttctcttctaaatagcacaaatctttaaagggagg

SEQ ID NO: 894950 - DNA, 120 bp, Artificial Sequence
  ENSG00000286766_17 (sequence is synthesized)
attgtggcaattaaagaaaggctagaatagaagaatagaagacaaccatgactcaaacacgggaaaggattgtcatagccacgttgttactcatagttaaatattccttccacttgtgat

SEQ ID NO: 894951 - DNA, 120 bp, Artificial Sequence
  ENSG00000286766_18 (sequence is synthesized)
atgtataaatggatcacttttagctccagaaacactgaacaggctgaatattttgcaaaatgtttcccaaatttctgttacgtttataccaccttcatggtatttgccatgccctgtgta

SEQ ID NO: 894952 - DNA, 120 bp, Artificial Sequence
  ENSG00000286766_19 (sequence is synthesized)
ctactatgtacctagatagtttccttaactcaattttaaactgtctacatatcttaggtttaacctaaacaatagtattgggaagaacaagcacttgtttttatatattatattatatgt

SEQ ID NO: 894953 - DNA, 120 bp, Artificial Sequence
  ENSG00000286766_20 (sequence is synthesized)
tataatttatattaaaataagtacacaatatgaaaatgagtatctgtccatgtgctaccacccaaatatttcacttcccaggggaacatgtaccatactttaggaaatattacttagtgc

SEQ ID NO: 894954 - DNA, 89 bp, Artificial Sequence
  ENSG00000286765_0 (sequence is synthesized)
gggactacaggcgtgtgccaccatacccggctaattttatttatttatttttgtggagacaggggtcttgctatgctaagatcctgccc

SEQ ID NO: 894955 - DNA, 120 bp, Artificial Sequence
  ENSG00000286765_1 (sequence is synthesized)
tcctgccccagcttcccgagtggatttctgttttttaatggctatttccttttccccctgacatttacaaaatgcttacatatgccaggcactatgtttagtgcttacttggattctctc

SEQ ID NO: 894956 - DNA, 120 bp, Artificial Sequence
  ENSG00000286765_2 (sequence is synthesized)
atttaaccctcaagtaattctctaaggaaagtactatcatgtcacccccatctgagaggactgaggctcagtgaggtcccgtgaggtcacagaaacagcttttaaactgtgtcaagatag

SEQ ID NO: 894957 - DNA, 120 bp, Artificial Sequence
  ENSG00000286765_3 (sequence is synthesized)
ccagagctggaacagcagagctacgctgattgcccactggacacggaaaagcggcttctctcacacgaaggtgtgttcagcaggtttccctaggttaaaggagaaaggctggatgcagga

SEQ ID NO: 894958 - DNA, 120 bp, Artificial Sequence
  ENSG00000286765_4 (sequence is synthesized)
tcccttgggaattggtccttgctctgatttttgccaccaaagtactgctgtcaaacagattcaaacgggtttcacaattaatgtgaagaggctccggttacaccgcaaatgagtgtgatt

SEQ ID NO: 894959 - DNA, 120 bp, Artificial Sequence
  ENSG00000286765_5 (sequence is synthesized)
gctcctcaggattaaggatgtttttctgtggctgaactgaagcatctgtcctcagggctggaggctgggtatcaccacagctgacctcctctccatggctcttgctgctgctaatcctcc

SEQ ID NO: 894960 - DNA, 120 bp, Artificial Sequence
  ENSG00000286765_6 (sequence is synthesized)
aagatgaatctgaaagagaaaacaactgcttagttgctacaaatcataggaagactctggtgagaaaatctccataaaagacttcggaaaagatatgtgtcttaaggcagaacttgagga

SEQ ID NO: 894961 - DNA, 120 bp, Artificial Sequence
  ENSG00000286765_7 (sequence is synthesized)
aaagcaggagacttggcacagaagccgcagaaggctttttccatgtgtaggaacttgcaaggatggcaggaggctacagagagcagacttgaaaccctgtgaaaagaagaaataagcaaa

SEQ ID NO: 894962 - DNA, 120 bp, Artificial Sequence
  ENSG00000286764_0 (sequence is synthesized)
acaggaatggccccggcacaggagcagagcagcgaccctgcaggacatgttcagggcgcccggcctcccatctccctgcctcgtgggcctggatgtgcaggaaggctcgaaccccccctg

SEQ ID NO: 894963 - DNA, 120 bp, Artificial Sequence
  ENSG00000286764_1 (sequence is synthesized)
tctgcagcacccagtccgattgttccgttggggagtttcaggtggatcacgccttcctcaagaccctcccaatcctgcctgccccaccctgcaccagccgaggacccagactctcccctg

SEQ ID NO: 894964 - DNA, 120 bp, Artificial Sequence
  ENSG00000286764_2 (sequence is synthesized)
gcccagcagtgacaagtgccttgcccggcgccaacagtgtgtgtgctcgcgaagccggtgtggttccctggacatcagtgagggccccacatcacccggcgcggggctgggtgctgagga

SEQ ID NO: 894965 - DNA, 120 bp, Artificial Sequence
  ENSG00000286764_3 (sequence is synthesized)
gctgcctcccgaggactgggtgctgccgctgcggagcccaggtccaggttccttcccccaccctgctgccccagctcatgtggcctgctgggcttgtttatgttgctattgtttttgttg

SEQ ID NO: 894966 - DNA, 120 bp, Artificial Sequence
  ENSG00000286764_4 (sequence is synthesized)
cttgtttatgttgctattgtttttgttgctgttttggggggtttttttgagacagggcctcgctcagtcacccaggctgaaatgcagtggcaagatcatggctcactgcagcctcgacct

SEQ ID NO: 894967 - DNA, 120 bp, Artificial Sequence
  ENSG00000286764_5 (sequence is synthesized)
gcctcccgagtagctaagatgacaggtgcacgtcaccacacccagctgattttttaatttatttttattttttgtagagatggagtcttgctatattggtggtctcaaactcctggccct

SEQ ID NO: 894968 - DNA, 120 bp, Artificial Sequence
  ENSG00000286764_6 (sequence is synthesized)
aagcgatcctcttgcctcaacctcccaaagcgccgggatgacaggcgtgagccagtgcacctggcctgaccttgatttcagtggtggtttcacaacatccacttacgtcaaaacatattg

SEQ ID NO: 894969 - DNA, 120 bp, Artificial Sequence
  ENSG00000286764_7 (sequence is synthesized)
gattatattctttaagtatgggcagcttgttgttgacaatttcaactcaataaagctgttttacaaaaatatatatatatatattaaaaagacagaaatgtgatattgaaatgagacggt

SEQ ID NO: 894970 - DNA, 120 bp, Artificial Sequence
  ENSG00000286764_8 (sequence is synthesized)
agtcataggaaaaaaggttaatgtggattactttcttacactttacaccagaaatatatgtgaattatcagagatctaatgtgaatggatcagagatagaatcataaaatgacataaaac

SEQ ID NO: 894971 - DNA, 120 bp, Artificial Sequence
  ENSG00000286764_9 (sequence is synthesized)
acgaggggtcgtctgtgctggaggacagctccgtgtctggattccgtggtgaaaaagggcgcagaactgcgcagtcatccccgtgacaatttcccggctgtgactcagcttctagttccc

SEQ ID NO: 894972 - DNA, 120 bp, Artificial Sequence
  ENSG00000286764_10 (sequence is synthesized)
aagatgccaccattgggggaggagggacctcctgtgccattttcacaacttcctggggatctctaaccatttccaaataaaaagcatttgaaattgatgagcaaagcctgaaggcctgga

SEQ ID NO: 894973 - DNA, 120 bp, Artificial Sequence
  ENSG00000286764_11 (sequence is synthesized)
attgatgagcaaagcctgaaggcctggaaggaaacacgaatgggctttgctatattctctatatttaaaaaacaacttttgctgggcgcagaggctcacactggtaatcccagcactttg

SEQ ID NO: 894974 - DNA, 120 bp, Artificial Sequence
  ENSG00000286764_12 (sequence is synthesized)
tgagccgagatggcgccactgcactccggcctgggcgaaagagcgagacccatctcaaaattaattaattaattaaataaaattaaaaacaacttttgcttttacaaaaaagataagaaa

SEQ ID NO: 894975 - DNA, 120 bp, Artificial Sequence
  ENSG00000286764_13 (sequence is synthesized)
aaaaacaacttttgcttttacaaaaaagataagaaattaaacagatgaatgacaaaatgggaaaacattttcaagtcgtatcatgggcaaacttgggtttgggttaatagctctgacgta

SEQ ID NO: 894976 - DNA, 120 bp, Artificial Sequence
  ENSG00000286764_14 (sequence is synthesized)
ttaatagcttctacaaataaagaaaaaggcaaacattattttttaaaatggcccaaagaaatgaataaataacagaaaaggaaaattccagtgtcctttaattatatgaaaacattctaa

SEQ ID NO: 894977 - DNA, 120 bp, Artificial Sequence
  ENSG00000286764_15 (sequence is synthesized)
cacaaaaaaatagcaagtagaaaaattttaaactgaagcagttttaccaatggaagtgtgaatattaatttttttatgttggtatgctaatcagttagtaaattttttaagtatagttca

SEQ ID NO: 894978 - DNA, 120 bp, Artificial Sequence
  ENSG00000286764_16 (sequence is synthesized)
ggcaactcagctaagtgatccacttgtcaactataagttttatgaaatcttaatgtaggcagagtatttctgatgagaatgtcgtgtgcatattcagatgttctgtaagtgtgaaataca

SEQ ID NO: 894979 - DNA, 120 bp, Artificial Sequence
  ENSG00000286764_17 (sequence is synthesized)
aacaaattttgaaaactttgtattaaaaaagaatgacaatatctcattactagattttttattgattacatgttgaaatgataacattctggctatattgggtttgataaataaatacat

SEQ ID NO: 894980 - DNA, 81 bp, Artificial Sequence
  ENSG00000286769_0 (sequence is synthesized)
gagcacaggtgtcttttcaagattctgatttcatttcctttggatgtatacccagcagtgggatttgtgttcataagataa

SEQ ID NO: 894981 - DNA, 120 bp, Artificial Sequence
  ENSG00000286769_1 (sequence is synthesized)
cagaaggatgttcaccataaagattaagaaaattgattttgtaaaatgtgatactatttttataaaaactacaaatctgtcatcactaagcaagttcttcccactcatggattctagagg

SEQ ID NO: 894982 - DNA, 120 bp, Artificial Sequence
  ENSG00000286769_2 (sequence is synthesized)
agttcacccatgtccagagaaagtttgcaattaaggtcattcctcgctcattgggaacactgagtcaaagaaaataagtttgcaagaagacaaggaatgacctgtaggcatactaagcct

SEQ ID NO: 894983 - DNA, 120 bp, Artificial Sequence
  ENSG00000286769_3 (sequence is synthesized)
gcatttgagactgacaaggagtgagagatactgttttgagtgtgtgtgaaaatgaagagaatgaatcatcttttactgattataatctataacttgagtttgcaagtcaaagaacttctg

SEQ ID NO: 894984 - DNA, 120 bp, Artificial Sequence
  ENSG00000286769_4 (sequence is synthesized)
aaacaggggtaagggtctcttatttattggtttgtcaaaagctatgaataatagtaaaacaattttaatagaaacttggatatcaggtaaatgtttaataaatgattaagatcttttgtc

SEQ ID NO: 894985 - DNA, 120 bp, Artificial Sequence
  ENSG00000285590_0 (sequence is synthesized)
gattgaatatgttgaatgctaaacagaagaaagtcagattttaagtggccaaagtttccatgtgaaccaccagaagagcctcttcttatgatccaattgtggattcagtttttcctacgg

SEQ ID NO: 894986 - DNA, 120 bp, Artificial Sequence
  ENSG00000285590_1 (sequence is synthesized)
tggtgagcaagctgatgagtgggccttcctgaggacggacagaggcccagccacatgctacggggagcatccctatgcctggctcataatttcactgcgcatctacagacaaacgcccaa

SEQ ID NO: 894987 - DNA, 120 bp, Artificial Sequence
  ENSG00000285590_2 (sequence is synthesized)
gcctgggatcatcaatcaatctccagttcatcccaaacctactcaagacgcagcaatcatgtgaaggaaaggattcctgactctaacaatgtgccttcagaagcctgatcacacaatcaa

SEQ ID NO: 894988 - DNA, 120 bp, Artificial Sequence
  ENSG00000285590_3 (sequence is synthesized)
gtggctctaattccccagggcaaacatacctgttctgtttatctaaatgagcagaagtgttgaaaaagatacaaacaagagaaaaaacactgtgctcagaatattttgtatttgtcaatg

SEQ ID NO: 894989 - DNA, 120 bp, Artificial Sequence
  ENSG00000277235_0 (sequence is synthesized)
gcacagcagcagagtccccgctacggggtcggcattttctcatcctcttgctcaggcgggcatgattagggggctgggaaggactcacagaaggcgacgcagcaagaagtgacagagacc

SEQ ID NO: 894990 - DNA, 120 bp, Artificial Sequence
  ENSG00000277235_1 (sequence is synthesized)
ggccgtatccagaagagagaacagccatgcagtgatgtgcttagggaaatctggcgcaacaatgtcaaggcgagcactcaccttgtgcccagccctgtaataaaaggtttatatacagta

SEQ ID NO: 894991 - DNA, 120 bp, Artificial Sequence
  ENSG00000268218_0 (sequence is synthesized)
tttaaaaatgtactccgttctccaactcctgaaatgcctctgcagttgctggagaaaagggcccgaaggtcgccgttttcaaacagaagctgccgtgtgtgcgcgcccggcatggtctcc

SEQ ID NO: 894992 - DNA, 120 bp, Artificial Sequence
  ENSG00000268218_1 (sequence is synthesized)
tcatcccgccggggccagtgaggctctgggggctttgcccccgccgcggcagctggtagagaagagacgtgtttcacctccccgacgtctggaccagtctggaagggatggaggcgctgt

SEQ ID NO: 894993 - DNA, 120 bp, Artificial Sequence
  ENSG00000268218_2 (sequence is synthesized)
ggccaagtgcagtctctctcggggtctctccccgcccgggtggacagggcgctccctcctccgcccctggggctcagcagcagtcctgggcagccgtgcggccctcgcctgcgtcctgcg

SEQ ID NO: 894994 - DNA, 120 bp, Artificial Sequence
  ENSG00000268218_3 (sequence is synthesized)
gccgtcccgcggtgtcatgccggcaacaatacaaagtcgtcgttgacgtcgaccatgggcacgtagaaggagggcacctcgttcacgcacagggacttgtgcccggcggggtccagttcc

SEQ ID NO: 894995 - DNA, 120 bp, Artificial Sequence
  ENSG00000268218_4 (sequence is synthesized)
tgcaccttcagctgccactccatcctctgcacggcgttcagggccgcggcctcgtgctgctgccgcatgaggaggaaagtcttccatgtgtctttatgaagctttcagttttttctcacg

SEQ ID NO: 894996 - DNA, 120 bp, Artificial Sequence
  ENSG00000268218_5 (sequence is synthesized)
gctctggttaggaagggcctagtggcctggggagggtgtggtgtgagtgacttcctgcaccatcatcttagggctggccagaaatgcacactcagctacgcctcagacctgagttcctca

SEQ ID NO: 894997 - DNA, 120 bp, Artificial Sequence
  ENSG00000268218_6 (sequence is synthesized)
gcacaagcccccaggggccacgctccccaaatacccacagctcccaccgggtagggctggtggttctcatctgtgcccacatcagcacctttctgagagctgcagtatgacacacgggtg

SEQ ID NO: 894998 - DNA, 120 bp, Artificial Sequence
  ENSG00000268218_7 (sequence is synthesized)
cttggttcagggacctgggtggtgctgagcctgatactgcaggtagccggggccgcctgctcccaggcctggctggtgactgtacagggtgacgctgactgtaaagttctgtaacttttg

SEQ ID NO: 894999 - DNA, 120 bp, Artificial Sequence
  ENSG00000268218_8 (sequence is synthesized)
gcaagtttccgccttccgttgcctcctggtggatcctccagggtgtcccggtgagcagccctcgcgaccgggataagggtgtgctgcccttcccggcacctcccccgcccctgcccaccg

SEQ ID NO: 895000 - DNA, 120 bp, Artificial Sequence
  ENSG00000268218_9 (sequence is synthesized)
ccctggccagcacttccagagcagtggagggtgaatgctgggaccttagagggggctcacagggcagtcccaggagttctgaccatcaagcctagggtcctgttgagctggcgacaggag

SEQ ID NO: 895001 - DNA, 120 bp, Artificial Sequence
  ENSG00000268218_10 (sequence is synthesized)
ccgctccctgcacaccgggacagaagggaagactgaggaggccacacgcagggacaggacctcacctccccgaaagcatcggccagattaagagaatctgaaattgtcaccgcccatcac

SEQ ID NO: 895002 - DNA, 120 bp, Artificial Sequence
  ENSG00000268218_11 (sequence is synthesized)
agaactgggcagcggcctccccccaggcagcgcaaagggggttgtcaccacccatcacagaactgggcagcagcctcccccaggcagaactgaggggacgcgcaacaccgaccttcatgc

SEQ ID NO: 895003 - DNA, 120 bp, Artificial Sequence
  ENSG00000268218_12 (sequence is synthesized)
ggtcatacttgtcatccacgtcctggagccaggagatgaactggcgggcgttgaaacggtcgcgcactgacttgttctcgtcaccctgtggaaaccaaacacgggagtttcatcaggagc

SEQ ID NO: 895004 - DNA, 120 bp, Artificial Sequence
  ENSG00000268218_13 (sequence is synthesized)
cccagagaccgctacgggaaggcatgccagcctgggcgatgctgcagtgaccgttctcaagggacaaccacagggggagcctcattccaccgcgcacacactgaatcatgttcaaggcat

SEQ ID NO: 895005 - DNA, 120 bp, Artificial Sequence
  ENSG00000268218_14 (sequence is synthesized)
ggcaggcgcaccctgcccatctccctaaacagcctccctaaaatgcgcgtggaggcagctgggcctttgtctcctgggcaccgggtgcccgcaggccccacctgtgagccggtccccagc

SEQ ID NO: 895006 - DNA, 76 bp, Artificial Sequence
  ENSG00000268218_15 (sequence is synthesized)
agagctcagcccactgccaactcctgggagagacttttttttttttttttaagagacagagtttccgcagcctcca

SEQ ID NO: 895007 - DNA, 89 bp, Artificial Sequence
  ENSG00000268218_16 (sequence is synthesized)
gggcgagactttctagatatgtcaccgtcctgtgtcctgaagggtggacacggataagatgtccaggctcctcccctttttcacgggtt

SEQ ID NO: 895008 - DNA, 120 bp, Artificial Sequence
  ENSG00000268218_17 (sequence is synthesized)
acggataagatgtccaggctcctcccctttttcacgggttcatggtgaagctgacaatgccgtctgtttctcagaacatgtggagcaccgacagaaacccacacacctgcagggaactca

SEQ ID NO: 895009 - DNA, 120 bp, Artificial Sequence
  ENSG00000268218_18 (sequence is synthesized)
ctttccacaaaggtgccaagaacagaataacgatcacagggaaaggacagtctcttccgtaaacggtgctgggaaaactggctacgcatcgcagaagagtgaaacgagaccctagctctc

SEQ ID NO: 895010 - DNA, 120 bp, Artificial Sequence
  ENSG00000268218_19 (sequence is synthesized)
gccacatacaaacatcaaaccaaaatggatcaaagtctggaatccaagaccttaaacgatgaaaccactacaagaaaacactggggaaaatctccaggacattggcctgggcaaacattt

SEQ ID NO: 895011 - DNA, 120 bp, Artificial Sequence
  ENSG00000268218_20 (sequence is synthesized)
aaaatggacaaatgggatcacatcaagttcaaaagcttctgtccagcaaaggacacagtcaacagggtgaaaagacacgcacagaatgggaggaaacgcctgcaaaccgctcctgtcaca

SEQ ID NO: 895012 - DNA, 120 bp, Artificial Sequence
  ENSG00000268218_21 (sequence is synthesized)
aatgggaggaaacgcctgcaaaccgctcctgtcacacagattctcaagcagaacatagaaggcatgcaattaactcgatatgaaaaaatctaataatcccatcaaaaaaacgggcaaaag

SEQ ID NO: 895013 - DNA, 120 bp, Artificial Sequence
  ENSG00000268218_22 (sequence is synthesized)
atctgaatagacgtttctcaaaggagacacacaaatggccaacaggcatctgaagaggagctcaacatcattgatcgtcagagaaatgcaattcaaaactaccgtgagacatcacttcac

SEQ ID NO: 895014 - DNA, 120 bp, Artificial Sequence
  ENSG00000268218_23 (sequence is synthesized)
cccggttaaaatagcctttatccaaaagacagacaatcacaattgctcgcgaggatgtggggaaaagggaaccctcgtaccccgttggtgggaatgtaaattaaaacagccgccgtggag

SEQ ID NO: 895015 - DNA, 120 bp, Artificial Sequence
  ENSG00000268218_24 (sequence is synthesized)
aacagtttggcgtttcctcaaaaaactaaaaattgagctaccataggatccagcaatcccactgccgggtatagacccaaaagaaagaaactgggggccaggcacggtggctcacgcctg

SEQ ID NO: 895016 - DNA, 69 bp, Artificial Sequence
  ENSG00000268218_25 (sequence is synthesized)
gaagactcagaatcacaaaaaggaaaaggaatcagtatattgaaacggtgtccacactcccatatttaa

SEQ ID NO: 895017 - DNA, 120 bp, Artificial Sequence
  ENSG00000268218_26 (sequence is synthesized)
ctcagaatcacaaaaaggaaaaggaatcagtatattgaaacggtgtccacactcccatatttaacgcaaccccatttactatagctaaggcttgtgtccatcaacagatgaatggataaa

SEQ ID NO: 895018 - DNA, 120 bp, Artificial Sequence
  ENSG00000268218_27 (sequence is synthesized)
agtactattcagccacaaaaaagaatgagatcctgtcatttgcaaacacgtggatggaactggggtcatgatgttaagtgaaataagcatacaaagacaaacatcacatgttctctctca

SEQ ID NO: 895019 - DNA, 120 bp, Artificial Sequence
  ENSG00000268218_28 (sequence is synthesized)
cttgtgggatctaaaaatcagaacaattgagctcatggacacagagtagaacgacggttaccagaggctgggaagggttgtggggggctggcagggaggtagaagtggttaatgggtacc

SEQ ID NO: 895020 - DNA, 85 bp, Artificial Sequence
  ENSG00000285598_0 (sequence is synthesized)
aagcaaatagtggcaccatcatagctcgctgcagcttcaaactcttgggctcaagtgagtcttccacctcaacatttccagtagt

SEQ ID NO: 895021 - DNA, 120 bp, Artificial Sequence
  ENSG00000285598_1 (sequence is synthesized)
tgggctcaagtgagtcttccacctcaacatttccagtagttgggactacaggcgcttgccactgcacttggtctacctgagagacttttatctgcataataaggtagtcttaacttatca

SEQ ID NO: 895022 - DNA, 120 bp, Artificial Sequence
  ENSG00000285598_2 (sequence is synthesized)
tatatttcctctcctcacactctcataatgtgtctctactacccaccagaagccccaaactcctattcctttctgtagctcagaatggtgtatagccttcaatcatctggccatttcttt

SEQ ID NO: 895023 - DNA, 120 bp, Artificial Sequence
  ENSG00000285598_3 (sequence is synthesized)
gagtctcatttttctgtgtgtgagattcccatctgtaagtatgtaactaacataatacttgttatgtgtgagttaacgtactacaagttacatacttatatgtacatactggtaaattgt

SEQ ID NO: 895024 - DNA, 120 bp, Artificial Sequence
  ENSG00000285598_4 (sequence is synthesized)
tattctcctgttaatctgttttatgtccatttaatttgtagactagccaaaggatctaggaaggtaaagggaagcaatttttcccttctatacatcaccctacttacaggaagagataat

SEQ ID NO: 895025 - DNA, 120 bp, Artificial Sequence
  ENSG00000285598_5 (sequence is synthesized)
gggacagcaccagccctgccttcctgatatcaataatctgataaggaagacagtcatggatattaacagtatagagttaagcgcttaggcagaggtaaacacagactcctgtgggaccat

SEQ ID NO: 895026 - DNA, 120 bp, Artificial Sequence
  ENSG00000285598_6 (sequence is synthesized)
ttagaatgggtacctagtccatgtttccgaattcagataaagccctcttgagaagagatattaatatacgaatgacatgttagtaactgaatttctgaaccctcaagaataaggactagg

SEQ ID NO: 895027 - DNA, 120 bp, Artificial Sequence
  ENSG00000285598_7 (sequence is synthesized)
cctttgactgtggcaaagttactattataaaagtcaccttacgagacttcttggctgcccaccatcagcctgtcacagttgtgacacaacctttgcctggtggcagtgtggtatgaaagg

SEQ ID NO: 895028 - DNA, 120 bp, Artificial Sequence
  ENSG00000285598_8 (sequence is synthesized)
gatgaagtcagagtaagggaaaagaggcaaagcaaaagctattaatctctcaggtgagtttgaggatgagcttctgttatgccttcaactgtgttcatggagttatgtgtggattaaata

SEQ ID NO: 895029 - DNA, 120 bp, Artificial Sequence
  ENSG00000285598_9 (sequence is synthesized)
aagtatgtatcaagatccttataaatccccaagtggttcatttattatttgctatttttattttctcagggatgttatgactttgttcattaaggcttattcataatatgtttatttcaa

SEQ ID NO: 895030 - DNA, 120 bp, Artificial Sequence
  ENSG00000285598_10 (sequence is synthesized)
ttgactaaaaaatttaataagcatttcctgaggtgcctaacactgctagccagtaggatgctgcaatgaaaaagcctctgcccaaagagacgcaaatccagatacagatggaagacgtaa

SEQ ID NO: 895031 - DNA, 120 bp, Artificial Sequence
  ENSG00000285598_11 (sequence is synthesized)
agaaacatgtgcagtttgtggtgtgccaaggtgagacggaagagaaacttctcctaggggcctgcgggccccctcaagcatggaaaaaaagaaaactttttgttccttcaaggaagattc

SEQ ID NO: 895032 - DNA, 120 bp, Artificial Sequence
  ENSG00000285598_12 (sequence is synthesized)
caggcacctagttagccctgagaaataaataaatgacttgataagttaaaacaatagccaaggaagttagaatcacaggatgttcccctacagaaactaaagatgatatcttaacatatg

SEQ ID NO: 895033 - DNA, 120 bp, Artificial Sequence
  ENSG00000285598_13 (sequence is synthesized)
tctttaagttgcttttcagaaacctggatgtccgccaaatggatttgctgtcacgtagacctccgaaaaggggaaactgaggattgaactctgaccactgttctttgttctaaatctctt

SEQ ID NO: 895034 - DNA, 120 bp, Artificial Sequence
  ENSG00000285598_14 (sequence is synthesized)
cctgagggacctggaaaaggtcacacccatgagccagagctaacgttcttttctgctgaccccaaatttttagacaaagcttccccttcttaaccaattgcaaatcagaaaacatttgaa

SEQ ID NO: 895035 - DNA, 120 bp, Artificial Sequence
  ENSG00000285598_15 (sequence is synthesized)
tctacctatgacctgtaagccacccacttcaagatatcctgcccttttaggtcaaaccaatgtgtaatccctatatattgatttatggttttgcttataacttctgctttcctgaaattt

SEQ ID NO: 895036 - DNA, 120 bp, Artificial Sequence
  ENSG00000285598_16 (sequence is synthesized)
cttttaaaaacccttacatgcaagccgtcagggcatttgggatttaaactagagctgcccgattctccttgcttggcaccctgcaaacaaatgctctcctttcttctgctgcaaacctca

SEQ ID NO: 895037 - DNA, 120 bp, Artificial Sequence
  ENSG00000285598_17 (sequence is synthesized)
gtgtggctgttttggccttactgtgcctggcgagcatatcccagttcagtttgataacaaagggtggcttagagggctttaataagccctagtgcaaaatctccagcagcatctctaaac

SEQ ID NO: 895038 - DNA, 120 bp, Artificial Sequence
  ENSG00000285598_18 (sequence is synthesized)
cacccaaacgatcacccagtttagataagttaggtaagtccatgtatttgccaagcaactacaacctaaatgtaattatcctagtttcaaatacccacttcaagcaaactgtctgccaga

SEQ ID NO: 895039 - DNA, 120 bp, Artificial Sequence
  ENSG00000285598_19 (sequence is synthesized)
tgcctcctctccctccgtcacagggtgataggtgcaatgatagatttaaaagagggaaaggagtctgagaaagatcccagttgggaatcatgtctgaattggatttgaggatccaaggat

SEQ ID NO: 895040 - DNA, 120 bp, Artificial Sequence
  ENSG00000285598_20 (sequence is synthesized)
ggaagcgaatactaggtagaaagaacagtctatgcctcagtataaaacagagatagcaagagcctttggtagcaatgagactaggagacagttgtcatccagagagacagaaaaataaaa

SEQ ID NO: 895041 - DNA, 120 bp, Artificial Sequence
  ENSG00000285598_21 (sequence is synthesized)
gtaataagggtatcaggtagaatgctaaaaagcttgaacttcatctgtacagaggaggaaaatatctaggcgttttcattgactcaaatctaagaaagaacattttggttatttggagac

SEQ ID NO: 895042 - DNA, 120 bp, Artificial Sequence
  ENSG00000285598_22 (sequence is synthesized)
tgtactggccgggaaggcattaaaggaagggggattaatcaagtcaagcaagtaagagacatgtttactttgctcatattgagtttcttagttctctaattcacactaccttaaaacctt

SEQ ID NO: 895043 - DNA, 120 bp, Artificial Sequence
  ENSG00000285598_23 (sequence is synthesized)
caaggcatatcaaaagctaaggcacatgatacagaccatttcaccttgccaggttcttcttctcatactagctagcttagtactgtttgtgtctcagcaaaagtagtcgttggtggtgtt

SEQ ID NO: 895044 - DNA, 120 bp, Artificial Sequence
  ENSG00000285598_24 (sequence is synthesized)
tcatcttaaagctattttgcagaaatcctaaaaatttttagtcatcatcaatttggcataaacaagttttgaggccatcttgctggatttgtttttaaatcagtgtggttttcataacag

SEQ ID NO: 895045 - DNA, 120 bp, Artificial Sequence
  ENSG00000285598_25 (sequence is synthesized)
gaagtaattcttgtgctttttttatgatgcatcataaaaacaactactcatttaataagataatgcaacaagagccttggatgcttcattgggtaatgaatatcacaggattctttccaa

SEQ ID NO: 895046 - DNA, 120 bp, Artificial Sequence
  ENSG00000285598_26 (sequence is synthesized)
atcagcaactctgagcaagagaaaaacagcagtgtttaaacagtgaagaacttgaataaggaattaatggggtggagaattgctgcttttaagctgaagggatcccataaccactcctgc

SEQ ID NO: 895047 - DNA, 120 bp, Artificial Sequence
  ENSG00000285598_27 (sequence is synthesized)
aatcaaacaatttctattcagaatgatttttctgattgaaggaagtgagacattcttgcatgtaactagcctatccacatttaactaagtgtaccccccaccccccgtacacacacacat

SEQ ID NO: 895048 - DNA, 120 bp, Artificial Sequence
  ENSG00000285598_28 (sequence is synthesized)
acacacacacacaggagtctcacggaagccaatttccagagaatgaagatatagtgtgctttctggaattattgaccacagtgaaacacctcaagcaatttcttgcatttaatattcatt

SEQ ID NO: 895049 - DNA, 120 bp, Artificial Sequence
  ENSG00000285598_29 (sequence is synthesized)
tctcaagcattggccctagacacaaagcaatatttcctccttatgcagtttatttctttcaaaaccttgaagaatgttgtaaacaagccccccagccctgtggtttttgctaagtcagaa

SEQ ID NO: 895050 - DNA, 120 bp, Artificial Sequence
  ENSG00000285598_30 (sequence is synthesized)
cattaaacatttcatcaatgattgttcttaataaatgtgtgtacattggagacttttgtttcctaattgtccataattatagctctttcacacactctgagaactcaaaagacaaagtga

SEQ ID NO: 895051 - DNA, 120 bp, Artificial Sequence
  ENSG00000285598_31 (sequence is synthesized)
aaagacagcagtagtttaaacctagactgtgtataaatcaaatacaagaaaataaaataaatggcaaggcttcttaaaaacaggtgtatgaaagctttagttatttaaacaactcatgct

SEQ ID NO: 895052 - DNA, 120 bp, Artificial Sequence
  ENSG00000287382_0 (sequence is synthesized)
gaagataagcccgttcctctctctggtatattctttgcttaataaatcttgtggggtggttatttgtgtgtctcatccaattctttgttcataacaccaagaacctggaactcccaactt

SEQ ID NO: 895053 - DNA, 120 bp, Artificial Sequence
  ENSG00000287382_1 (sequence is synthesized)
ccaatctggtaacatattttggtgagccagccaggagggtcaagcctgcaatacctaaagctccagacctggaacccaaagctcccatcagtcgctaccctgtgaacctgtggaggatct

SEQ ID NO: 895054 - DNA, 120 bp, Artificial Sequence
  ENSG00000287382_2 (sequence is synthesized)
gaagtacctgtttaaaaggcatccaaaagatagaatctatcaagctacaaatggctatgttgcctgaagccccagacatcatcctacaagaaataagtccagacttcttaatttccccct

SEQ ID NO: 895055 - DNA, 120 bp, Artificial Sequence
  ENSG00000287382_3 (sequence is synthesized)
ggatagagcagggtaagagttctgtggtcccctgttaggtggggccagcagtcccactcagctggaagcaagtatagaagaaagaacttcaaccctcagcaacctattatgatttatggg

SEQ ID NO: 895056 - DNA, 120 bp, Artificial Sequence
  ENSG00000287382_4 (sequence is synthesized)
gcaatgaaccaatgctttctgcagtaaacaaatctggtataaccttttattataataagttacttaaagcccatacatatggaatgcatatcatacatacacttaaaattatggaatggc

SEQ ID NO: 895057 - DNA, 120 bp, Artificial Sequence
  ENSG00000287382_5 (sequence is synthesized)
aagcacatgcaggcgcactgagagagaaaaccaacaagaaaactgatatgtcaattataggcaacctcctccctaaaagttaagtaagagtagtaaggtggtataaaagaacaaaggcta

SEQ ID NO: 895058 - DNA, 120 bp, Artificial Sequence
  ENSG00000287382_6 (sequence is synthesized)
tgttaacccagggctgataccactcgcggatcagcccattcttctctctggaacattctttgcttaatacatcttgtggggtcattatttgtgtgtctcctccaattctttgtttgcaac

SEQ ID NO: 895059 - DNA, 120 bp, Artificial Sequence
  ENSG00000287382_7 (sequence is synthesized)
accaagaacctggaaatccaacttccaatctggtaacacttctactctaaaaatgtgcttactctttgtatagcatgtaactgctctattggttgtacccattcatatattaatgtttcc

SEQ ID NO: 895060 - DNA, 120 bp, Artificial Sequence
  ENSG00000287383_0 (sequence is synthesized)
aggattgtaaatgatgccacttttcaacaagcagcgatccagtaaggggattagaggcatgaattttaactgacaaaaaaatgaatttgaagaatacagtgattttgtttcttgaaggtg

SEQ ID NO: 895061 - DNA, 120 bp, Artificial Sequence
  ENSG00000287383_1 (sequence is synthesized)
atgacaggggagtttaaggagcacacaaaagattagcattatctcctcagcagaatgtgacaaaacattactgggttatgtgaaacatttccaagatgaattgaagaccaagctgaacgt

SEQ ID NO: 895062 - DNA, 120 bp, Artificial Sequence
  ENSG00000287383_2 (sequence is synthesized)
ccatcctccttttctacttcttatgataagaataagaagcctttgcctgggtgctggtgctcagtcttacctactgtctcagaattctatttaatgattttcctgaagttcttcagaata

SEQ ID NO: 895063 - DNA, 120 bp, Artificial Sequence
  ENSG00000287383_3 (sequence is synthesized)
tgtgatatcacttgtataaagtcaggtacaacagcaatatagaggtatagtatataatttaatttgatcatttcaatttttgaatttcctaaaattcacaaaatctttaacaagattatg

SEQ ID NO: 895064 - DNA, 120 bp, Artificial Sequence
  ENSG00000287383_4 (sequence is synthesized)
tagtggaaataatggttggtcatacagtttgtctgtgtctgcacccaaatctcaacttgaattgtatttcccagaattcccacacaatgtgggagggacccagtggagataactgaatat

SEQ ID NO: 895065 - DNA, 71 bp, Artificial Sequence
  ENSG00000287383_5 (sequence is synthesized)
cacacaatgtgggagggacccagtggagataactgaatatgggtgccagtctttctcgtgctattttatta

SEQ ID NO: 895066 - DNA, 90 bp, Artificial Sequence
  ENSG00000287383_6 (sequence is synthesized)
ggtttatcaggggtttccacttttgtttcttccttattctctcttgccacaaccatgtaagaaatgccttttgccctttggaactgtaag

SEQ ID NO: 895067 - DNA, 120 bp, Artificial Sequence
  ENSG00000287383_7 (sequence is synthesized)
ggtatgtctttatcagcagcgtgaaaatgaattaatacagtttgcttggctgttgttgcttcctcagttaaataacttaatttaaaatttgaaattttaataccagtagtagtatggaga

SEQ ID NO: 895068 - DNA, 85 bp, Artificial Sequence
  ENSG00000287383_8 (sequence is synthesized)
taatatcacctgggcttgattgcaatggcatgatctcagctcactccaacctctgctttccaggttcaagcgattctcctgcctc

SEQ ID NO: 895069 - DNA, 71 bp, Artificial Sequence
  ENSG00000287383_9 (sequence is synthesized)
cataaacaaaatctctgcagcactgtgataggttcataatggccctaactggcctgcccaaggcggaaaac

SEQ ID NO: 895070 - DNA, 120 bp, Artificial Sequence
  ENSG00000287383_10 (sequence is synthesized)
tgtgtgtgtgtctttaattcctctagcgcagctgggttagggtctccctgaccaagctggtctcagcagagccattgcacccgacaagttggttaataatatctattcaattcacaaata

SEQ ID NO: 895071 - DNA, 120 bp, Artificial Sequence
  ENSG00000287383_11 (sequence is synthesized)
ccgacaagttggttaataatatctattcaattcacaaatatgtatgaaccttatttaaacaattccagtgtaaaaatgtgtctatacatatatgtataaaactgtgccagttagtttttt

SEQ ID NO: 895072 - DNA, 120 bp, Artificial Sequence
  ENSG00000287383_12 (sequence is synthesized)
cctgggaaaaaaatcattttgtatatgttgatttatacagagttataagatcattttgacatgataaaagaaaggtgatgtaggatatgaatagtatgaaatcatacatacaaattaaat

SEQ ID NO: 895073 - DNA, 120 bp, Artificial Sequence
  ENSG00000287383_13 (sequence is synthesized)
atatttatatactggtctatgcatacaaatagtagagaaatgtacataccaaactggtaatgggtatcacataacgccagtggaggtggaggtgtttggaggagacataaagtttaattt

SEQ ID NO: 895074 - DNA, 120 bp, Artificial Sequence
  ENSG00000287383_14 (sequence is synthesized)
ttaaattattctgtactttttgtgttttctttacagcatatattcatcatattatttcaaaataaattttgaaataaagatgaattaagtcacaggatttagtatgactttgacttcttg

SEQ ID NO: 895075 - DNA, 120 bp, Artificial Sequence
  ENSG00000287381_0 (sequence is synthesized)
ggggaatccactgtaagctctcagatgagacaaagaacaagagcctcaacgggaaccccagtctccccagcagcacctgcgttccttgctggtttgatttcatgctgaaaaaggtgacca

SEQ ID NO: 895076 - DNA, 120 bp, Artificial Sequence
  ENSG00000287381_1 (sequence is synthesized)
tccagccttcaggcattagtcagttcatactaattacagcaggaacccaggcaactgaaatccagaaagaggaaaggactcttccaaggtcactcctgtttttggagcaggcccaaccca

SEQ ID NO: 895077 - DNA, 120 bp, Artificial Sequence
  ENSG00000287381_2 (sequence is synthesized)
ttttggcatttcttgggcctggggctaaccttacagggcatcctacgtcaggtgaggaaggggaacctgatccagccagcaaaggcccgtgcatggccaggattggccaactgcaaagaa

SEQ ID NO: 895078 - DNA, 120 bp, Artificial Sequence
  ENSG00000287381_3 (sequence is synthesized)
acagctcctcctcctcaaataattaagtaataactttctatcaggaaagaaagagtcacatatcgaccatgtggcagcagctaccagcattccaaatcagaatcctctcccttcactaca

SEQ ID NO: 895079 - DNA, 120 bp, Artificial Sequence
  ENSG00000287381_4 (sequence is synthesized)
acagagctggagccaggctgccctcaggaagcgatggcaggaggggactgagaattagccctgtcctggtgaggaagtgcagggctggtgcctagtacagcacttggcctccactggggc

SEQ ID NO: 895080 - DNA, 120 bp, Artificial Sequence
  ENSG00000287381_5 (sequence is synthesized)
ccagccagtgtttgctgggtgaggaaaacatcaattcattctagtgtgagattggagagccaagcccccttaaggccagccacaaaagatgcctctgttcaggtgtaaccaagacagtga

SEQ ID NO: 895081 - DNA, 120 bp, Artificial Sequence
  ENSG00000287381_6 (sequence is synthesized)
ataaatcacaggaaagtggacagtctcatgcccacatgcatcggtgggaaacaaaacactcaggatcctgatgatatgagccagggtgcaggcccaggctaggggagcagggacaaacag

SEQ ID NO: 895082 - DNA, 120 bp, Artificial Sequence
  ENSG00000287381_7 (sequence is synthesized)
gccccagaggcagctgcctgccttctttttgagttgctttgccgtgattagcactcaggacacagagacggagtattctcactgcctgggagccttggacatacacttgatatagtcctc

SEQ ID NO: 895083 - DNA, 120 bp, Artificial Sequence
  ENSG00000287381_8 (sequence is synthesized)
aatgcagaaaatactgcaaccttgacaacagcagcagcacattagcttgacaaatgcaatcctgccagtagccaagatctctacagttcttccaggcactgggagtccaggacaggaact

SEQ ID NO: 895084 - DNA, 120 bp, Artificial Sequence
  ENSG00000287381_9 (sequence is synthesized)
ggatttaacctgcacagtgtagttatttcactgggaacccagatcagggctggggccccagccaacacacttggatatttggcctgcagcgggctggatggtgacgcactaaagcattcc

SEQ ID NO: 895085 - DNA, 120 bp, Artificial Sequence
  ENSG00000287381_10 (sequence is synthesized)
tttgcctctacacactccagataaatgaacctcagggtttcatgagttctcaagaaccagcagaaaccaggctctgtcttcttgctatgacccggggtccttatgtgctgggaacaagag

SEQ ID NO: 895086 - DNA, 120 bp, Artificial Sequence
  ENSG00000287381_11 (sequence is synthesized)
gaagtcaatgggtttgggcaggggctgcctggggaagatctcagccaccccgcaggcttatatagagtcctacttccaagctaccctttgggaggaagagtacttgatagatattgcctt

SEQ ID NO: 895087 - DNA, 120 bp, Artificial Sequence
  ENSG00000287381_12 (sequence is synthesized)
taacccaatgcatgggccagagcaacttggggctcagaaaagtacttaaggtggtcaacttatacgcatcatgcacagagcttccttacggaacacacacgaagaggctttcagatcatc

SEQ ID NO: 895088 - DNA, 120 bp, Artificial Sequence
  ENSG00000287381_13 (sequence is synthesized)
gcactgacaaactcaagatgctgaatctgggttgtttaccaaaactgagtacaagttatatcctcaggctcgcttctcaacttccctccctcaggagcagccacaccacaagacactgtg

SEQ ID NO: 895089 - DNA, 120 bp, Artificial Sequence
  ENSG00000287386_0 (sequence is synthesized)
gctcctttaaatgctgggctgcctctgattgaaggggtcagatgggggcaaggtggttgtgctggagtcccaggtctggtggtcctgccctgtgagaagaagtgaagaccagcctgtgtg

SEQ ID NO: 895090 - DNA, 120 bp, Artificial Sequence
  ENSG00000287386_1 (sequence is synthesized)
gagaacagtccagccactttttcacaagccaacagatagaatcacgacccgaaaatttcctagttactacactgtgaacaaccagactattggaaagggagccaaaactaaagccctctg

SEQ ID NO: 895091 - DNA, 120 bp, Artificial Sequence
  ENSG00000287386_2 (sequence is synthesized)
gagaaagaatggaagggacggggagggagaacatgttccgcaaggtgcctttggaagctgggctattgacagtgcaccaccagggggcagcataaagcagagaagcaggagattggattt

SEQ ID NO: 895092 - DNA, 120 bp, Artificial Sequence
  ENSG00000287386_3 (sequence is synthesized)
ggtcctgctcagctctctccttgattgtcatctaaactctctgagcctcagtttatcacagtgactccaggattttgatataattattgttattgttgttttgagaatgttttgttgtaa

SEQ ID NO: 895093 - DNA, 120 bp, Artificial Sequence
  ENSG00000287387_0 (sequence is synthesized)
ggcacagaactggaattgccctggacggccacagctctgcatatcccccaggagtgtggacaagaaaaaataaacacaattagagttcacgacaatgggcccctgatggaaggtaagccc

SEQ ID NO: 895094 - DNA, 120 bp, Artificial Sequence
  ENSG00000287387_1 (sequence is synthesized)
ggctagcctctaagggctgtgccggctcccacgaacttccaaggccgaggacggtgccgagacccaacttccggtctcaagaaaacttggcgctgcaggaagacaatgacagtaccctcc

SEQ ID NO: 895095 - DNA, 120 bp, Artificial Sequence
  ENSG00000287387_2 (sequence is synthesized)
actgatctggggcaagaggaaatttctgaatgatccccccgtagctttccacgctccactgggtctgcgatacaaaacttcagatcctaacagttgggcttttcaaacaaaccagttttt

SEQ ID NO: 895096 - DNA, 120 bp, Artificial Sequence
  ENSG00000287387_3 (sequence is synthesized)
aaaaatgaatgtggcttacccccaacattccagctgatcaaaagtacttgtttagaaaaataagtttaggaatgaagtggaaacaaggcctttgaaatgcagcttaacctaaatagcaca

SEQ ID NO: 895097 - DNA, 120 bp, Artificial Sequence
  ENSG00000287387_4 (sequence is synthesized)
ttttagacttttcctccccactgcacattctttatggtgtaggggccagggagcctgcagtcttcacccctcctgagccctccttggcctcgggcttcctctcccctgctgctgaggcct

SEQ ID NO: 895098 - DNA, 120 bp, Artificial Sequence
  ENSG00000287387_5 (sequence is synthesized)
tcagtcaggggctggcatctgggagaaccttgaaactgtttcccatcccctttggcagcaagcaacaagcaccaaaacgctccagttaacaccagtgcaatcatcgttaacgtgaaacag

SEQ ID NO: 895099 - DNA, 120 bp, Artificial Sequence
  ENSG00000287387_6 (sequence is synthesized)
ctgcccgaggcctggcgtatccaccagaccgccccctcccctccatgctcagctgtgagtcaccagagaccccggctaaggcagggcccgggagggagcggggatgcgaggattgttgat

SEQ ID NO: 895100 - DNA, 120 bp, Artificial Sequence
  ENSG00000287387_7 (sequence is synthesized)
ggagcccagctgttgtatatgagaaagcaaactattgctaaatctcttacctaccttggaaaaagtgtctgaactgtgtgcatgagggacggcggtggaggagaagaaacatgaattgat

SEQ ID NO: 895101 - DNA, 120 bp, Artificial Sequence
  ENSG00000287387_8 (sequence is synthesized)
ttatgaacccgatttaagttcctaaagtgattgttttaaagttagaaacagccagagtcactatagtaagattttgttcaaccgtttgcgaaatcagcaggcaaatcaatgtcttttttt

SEQ ID NO: 895102 - DNA, 120 bp, Artificial Sequence
  ENSG00000287387_9 (sequence is synthesized)
ccttcctttttctagagacctgggttgaatttgctttctggtcacttacagtcctctaaagcacagacaagaaatcttttttgcataaataacttgtatgtgttcattcccagaggaagt

SEQ ID NO: 895103 - DNA, 120 bp, Artificial Sequence
  ENSG00000287387_10 (sequence is synthesized)
tccgacccagaaaaagcctggcctcactctccacctccagctcagcactcaggcctggcaggccaccggctgcagaaagatcctcctccccttccccacccaagcagttgtgtttcccag

SEQ ID NO: 895104 - DNA, 120 bp, Artificial Sequence
  ENSG00000287387_11 (sequence is synthesized)
caaaaaatcggaccctcagctgctaccgcagccacatgatccactcagtgactcacaggcaggccacaccccttcaggcctcccggccaggctctgctcccagccagctaactctgggat

SEQ ID NO: 895105 - DNA, 120 bp, Artificial Sequence
  ENSG00000287387_12 (sequence is synthesized)
gcatcttattaccaaagggaacaactagctaactaatgcccttgacagtccaaataattactttctttcattagaagaacttgcttataaaatatatacgggctgagaggacgcaggctc

SEQ ID NO: 895106 - DNA, 120 bp, Artificial Sequence
  ENSG00000287387_13 (sequence is synthesized)
ttctgaactctggctctgccagctctccaagtcctcccccaccatgccaagacctggggaatggcagacatggttagctgggaagctagaaagctaagacattcctgtttaaaaagaaag

SEQ ID NO: 895107 - DNA, 120 bp, Artificial Sequence
  ENSG00000287387_14 (sequence is synthesized)
ctcttacatgttaatacctttttttcccaaaaattttattgggggaaaactacaaaacatttacagtacaatgtttacagtcacaatttgtagtgagctgattccccaaaatatattaca

SEQ ID NO: 895108 - DNA, 120 bp, Artificial Sequence
  ENSG00000287387_15 (sequence is synthesized)
actcaagttgacttatcttgttacattcaaaaacctacttctgtccaaagtagtccagagagtacatatagtgctccaactgtacctacgtacaaactaaagctaccgctcattcatctg

SEQ ID NO: 895109 - DNA, 120 bp, Artificial Sequence
  ENSG00000287387_16 (sequence is synthesized)
ctgtccaggaaagcttaggagacattcctgcctttctacatggaaaaaaaaatagtacaagttttggaattttctgtaattaaacaaggcatattcatgtactacatatttcagcactaa

SEQ ID NO: 895110 - DNA, 120 bp, Artificial Sequence
  ENSG00000287387_17 (sequence is synthesized)
ggcggttgcttcactttatatctatataaaaaaagtggtaaaaatcttttccttttgtgcagttgaacccatcctacattcagattctctcaagcactaataaaatacttatttggttga

SEQ ID NO: 895111 - DNA, 120 bp, Artificial Sequence
  ENSG00000287387_18 (sequence is synthesized)
ggaagatttaaggcaagttcgggcccttccaaaggcactgtgagactccccccccactccccgttattgctacatgtctttatactcgagtatgtcacagtagaactggtggaataagca

SEQ ID NO: 895112 - DNA, 120 bp, Artificial Sequence
  ENSG00000287387_19 (sequence is synthesized)
aacacttttttgctagtttataaagttggaattagaaaagcatgccacatttcagcctgattgcaaagtatgtggtcatttttttctttgaagttggatgggctacaacctttatacatt

SEQ ID NO: 895113 - DNA, 120 bp, Artificial Sequence
  ENSG00000287387_20 (sequence is synthesized)
ctaagaaaactcataggatgttcctcaaactacttccacagcatcaagatcgatttctgtcaagaaatcatgcaatctttcaaaatttacgtaaacaaggaaagaaattaatgaaataaa

SEQ ID NO: 895114 - DNA, 120 bp, Artificial Sequence
  ENSG00000287384_0 (sequence is synthesized)
ggggcggagcctcaagctgtcaaggggcgaaaaaccaagggcgtggagtagaggttcccgctttttcgccggttgtcctagagcctgaccctggggcctctgccagctctggaatccaga

SEQ ID NO: 895115 - DNA, 120 bp, Artificial Sequence
  ENSG00000287384_1 (sequence is synthesized)
tttgcattctgtaatcttagaggagtgttctctagagggccaggcctagggtgaagtgactcatcgggcagacagaagcgagcatgggcctgctgcccttcagtcgcctttgaggaaaga

SEQ ID NO: 895116 - DNA, 120 bp, Artificial Sequence
  ENSG00000287384_2 (sequence is synthesized)
cacatggttacccagatcaccgggccccagtgatgcggcagacactactaggaaaccgcagcaaacagatcccttgcaggacttggcctccgcagagaaggctccaagcctgagcgcgcc

SEQ ID NO: 895117 - DNA, 120 bp, Artificial Sequence
  ENSG00000287384_3 (sequence is synthesized)
agaacagtaggcactagccacgtgtggctctcgagtcctgagccagtgcaaacggagatgcgctataagacttaggacaaaaaaggctgttaaactatctcaatttttaggaaaaaaaaa

SEQ ID NO: 895118 - DNA, 120 bp, Artificial Sequence
  ENSG00000287385_0 (sequence is synthesized)
tatgtaaacctttctcaagtgaaaaagcttagctttttccaaattcccatttgagactgcctgtgcgactgcacagtgtgcacactcatgcagataggtggagtcctattcaacttctac

SEQ ID NO: 895119 - DNA, 120 bp, Artificial Sequence
  ENSG00000287385_1 (sequence is synthesized)
aaaacacactaatttgttgatttgttttatttctatatggtacctttcctcctaggagctgcaaggcttaataagcttcagcaatccttttacaatagagatgctgcaaggagggcagaa

SEQ ID NO: 895120 - DNA, 120 bp, Artificial Sequence
  ENSG00000287385_2 (sequence is synthesized)
gctctaatcactctgcagaagacccagctggaggaaatgagatctcacgtggggatcaagggttgtaggagtgggaggaagatgtagagaagaagaactttttcactggagacattgtaa

SEQ ID NO: 895121 - DNA, 120 bp, Artificial Sequence
  ENSG00000287385_3 (sequence is synthesized)
aaccatgacatcctttgctgaaagggacaaggaagcaacttccctggaggttcagaaagtagaattatagttgctgtcggatgttaaatgtagatctggaagtcgtggtgaaaaactagg

SEQ ID NO: 895122 - DNA, 120 bp, Artificial Sequence
  ENSG00000287385_4 (sequence is synthesized)
ctgggttacactggatgctcatccaaagtctctgttctgattccagttgcccagtttgtaggaggaagagcagaagagaggacagttgagtgcatctgtggagggcacatggagacactg

SEQ ID NO: 895123 - DNA, 120 bp, Artificial Sequence
  ENSG00000287385_5 (sequence is synthesized)
ggtaacagcctgggattccttgtttttctgagcaccacatcaggtatcaggaaggtagggctgggatgtgagtctgctgctgaccagcattctgacctggggctgactctggccacagtt

SEQ ID NO: 895124 - DNA, 120 bp, Artificial Sequence
  ENSG00000287385_6 (sequence is synthesized)
ctaacaactgtgaaatgagagaataagatcagatttaaatgcaacaaacttttattaaagatgtgtaggaaacaacattgaataataactgttcatggcctgcagggttacacaactagg

SEQ ID NO: 895125 - DNA, 120 bp, Artificial Sequence
  ENSG00000287385_7 (sequence is synthesized)
acacacacacacacacacacatatacattcagatgtggttataatagggaatgaacagtattttaagggaaaatgaggcaggagagaaattggtttcacctttggaggaggtaggccttg

SEQ ID NO: 895126 - DNA, 120 bp, Artificial Sequence
  ENSG00000287385_8 (sequence is synthesized)
gtttcacctttggaggaggtaggccttgagtacgattgaataaggtgctgatgggtggaaatggatgtaaagaacaggaggtgtctctggaagataaaacaggcgaacaaaaagagggac

SEQ ID NO: 895127 - DNA, 120 bp, Artificial Sequence
  ENSG00000287385_9 (sequence is synthesized)
cagaagactgggtaggtgcagagggtcagttctgggagtgagcagcaggtggctatggtgtgagcacaggtacatatcacatggcagggactcaggcaacatctgctgagtgacaagtgg

SEQ ID NO: 895128 - DNA, 120 bp, Artificial Sequence
  ENSG00000287385_10 (sequence is synthesized)
cggcagtgaggttgtacgggaggacagggaggcctgttcctggcaggggagccacatgcatgtggagctcatatgggtttctgaaagggagacaggccactctgatgggctctgtgtcca

SEQ ID NO: 895129 - DNA, 120 bp, Artificial Sequence
  ENSG00000287385_11 (sequence is synthesized)
aggacagggagaccacgggaagcgaggcccaaaggctgagaggtaaggtccagggaggagaaggaaagggtttgaattcagatagcaacaccggagtgggagggatctgaaaaatagagc

SEQ ID NO: 895130 - DNA, 120 bp, Artificial Sequence
  ENSG00000287385_12 (sequence is synthesized)
atccggaggctgaccagacatgcagggagacagagaagaaagagatgaagagaatgctgggttttgagcctgggcagtggggagggtagaaatacagaaagagacaaacagcctcaagga

SEQ ID NO: 895131 - DNA, 120 bp, Artificial Sequence
  ENSG00000287385_13 (sequence is synthesized)
gaggtttggggaggagaagatcagttcaatttcgtgagaagttctgcagggtgtctaagcagagacggccagcagagtaggccggtagaaatgtggggatctggggagctggaaatcggg

SEQ ID NO: 895132 - DNA, 120 bp, Artificial Sequence
  ENSG00000287385_14 (sequence is synthesized)
ggctcatggaagcactggctgaagatgtggacgcggaggagagagacagaagcgatgtgctgggagaggaggcccggccagcagaggagcaggacaaggaagaggacgccatgcttgtgg

SEQ ID NO: 895133 - DNA, 120 bp, Artificial Sequence
  ENSG00000287385_15 (sequence is synthesized)
ctgtgcactggaagcactggagatcctgctgccacacagcttccggtccaggctgaggacggcggccacttggtgtggaagacacaggagctgttgcatttgcacccaggttgtaaaaca

SEQ ID NO: 895134 - DNA, 120 bp, Artificial Sequence
  ENSG00000287385_16 (sequence is synthesized)
agatggtgatattgtagaagaagatgcaaaaattccaattttaaaagcaaaaccagaaaacttcaaggacacgtggtgcttgctgccatctgtttccggttctgcagagtatgtgtttgc

SEQ ID NO: 895135 - DNA, 120 bp, Artificial Sequence
  ENSG00000287385_17 (sequence is synthesized)
tccctcctgcctcctgggagcttggtgggagagtttgggaagtgttgccagggaacccaccctaagaagcctggcttggctcttcctaatgggtattcgagcctcactaggcagtgagct

SEQ ID NO: 895136 - DNA, 120 bp, Artificial Sequence
  ENSG00000287385_18 (sequence is synthesized)
gctcatattcctggtgaaggtgagatggagctgttttcacagcatcttacacagttgttccggtcctaggctgcaccttagaatcacctgatgaactttcaaacaatactcatgccagag

SEQ ID NO: 895137 - DNA, 120 bp, Artificial Sequence
  ENSG00000287385_19 (sequence is synthesized)
tcccacccggcccaagtgcaccagagttcctgggagtgtggttagggcacactgtgttttaaaagctcccgggtgattctcaagtgcagcttccgctggggacgctgactgacagtttag

SEQ ID NO: 895138 - DNA, 120 bp, Artificial Sequence
  ENSG00000287385_20 (sequence is synthesized)
acttcagagttcagggatcctgagagtgtctatgtccctggcgggaaacggtggcacagacagcgtgtcccctaccctctacctaccaaccacacttagactagtgggcgaatgagactg

SEQ ID NO: 895139 - DNA, 120 bp, Artificial Sequence
  ENSG00000287385_21 (sequence is synthesized)
cattccagaagcccacccccagctaaagaaagggtgcagaggttaggggcgggtggagagcaagacgaaactttgcaggggggcaggaaggctgtactgtgttggatagtgtccccccaa

SEQ ID NO: 895140 - DNA, 120 bp, Artificial Sequence
  ENSG00000287385_22 (sequence is synthesized)
attcatgtcctttccagagcctcagaacgtgaccttatttggaaatagggtcgctgtagatgtaattagttaagacacaggagtggggtaggcccttcgtccaatctgactactgtcctt

SEQ ID NO: 895141 - DNA, 120 bp, Artificial Sequence
  ENSG00000287385_23 (sequence is synthesized)
atgagaagagagagagagcacatgtgcagatggaggtgcacgcccaagcacaccaggggctagaggaggcctgggacaggctgtagaaagtaaaagttcctctccaaagtttcccttctt

SEQ ID NO: 895142 - DNA, 120 bp, Artificial Sequence
  ENSG00000287385_24 (sequence is synthesized)
gttaaactgttagccagtcgggttttagtttagattgtcatgtctggctccagccaatggagacaagacacagtagcagggacaaactgtgtaaggaataaaaattgattccctcctttg

SEQ ID NO: 895143 - DNA, 120 bp, Artificial Sequence
  ENSG00000233894_0 (sequence is synthesized)
tcttggcagtgagagcagagagaacaaagctaaaggtgctgaagtaaggtgacagcgctttaaagaagaagaaaaaaaaaaaggaaaaagaaagatagctaccaagaaaaaaagtgacct

SEQ ID NO: 895144 - DNA, 120 bp, Artificial Sequence
  ENSG00000233894_1 (sequence is synthesized)
ggtctacaaagatgaagaaactgtcgattagggtggaataaacttatcatgcaagaagttggcatagatactcgtctcaccttaaaggtgctttaaaaataaagtggggtcaggcaaggc

SEQ ID NO: 895145 - DNA, 120 bp, Artificial Sequence
  ENSG00000233894_2 (sequence is synthesized)
gttaagctcaagcagagataatgaacagaaataccagaggaattaggattaaaagcaataaagtcttgaatattggcgagaaaagatgaagaagagagtgtataaggaggagttctcact

SEQ ID NO: 895146 - DNA, 120 bp, Artificial Sequence
  ENSG00000233894_3 (sequence is synthesized)
ccaaacaacagtggcatgcgaaacccaagagatcagaccttgaaagctatgcactaataggttatttagttttcaaaatcttaaattaataacaattggcaataaagctcattaaaattc

SEQ ID NO: 895147 - DNA, 120 bp, Artificial Sequence
  ENSG00000233894_4 (sequence is synthesized)
agtcttgaatattggcgagaaaagatgaagaagagaggatccattgtgtcgatcttcaagccctgttcttctaaaatgattgaagctgagatctccacctagtggatatataggattttg

SEQ ID NO: 895148 - DNA, 120 bp, Artificial Sequence
  ENSG00000233894_5 (sequence is synthesized)
ttaaatctgggatgattgtcaacaggacaattgcaaatgtatgaaacataccaatatgcatatcagttacactacagttaacaaagctgaatttttattttcatactataattaggaaaa

SEQ ID NO: 895149 - DNA, 120 bp, Artificial Sequence
  ENSG00000233894_6 (sequence is synthesized)
cagatcaaacacaaatatgaatatataattatccatgtagaaagcaatattgtaataccactaattgagatatgtataataatttacatgaaataaacatcaaatgtaaatctgctcaaa

SEQ ID NO: 895150 - DNA, 120 bp, Artificial Sequence
  ENSG00000287388_0 (sequence is synthesized)
gtgcgcaggggaagcctggttaccccaccctaatcttattatggaaatagactttctagttgatcaacaccatcttgtctgctccttacagtacacgtggctgacaaagggaagggaaga

SEQ ID NO: 895151 - DNA, 120 bp, Artificial Sequence
  ENSG00000287388_1 (sequence is synthesized)
tggagcctccaatttgaacatgtgtactccgaagttcctccctgcgttcactcgtgcaagctcccagcttgcttgtctgtgtctgcagctcggctttacagaatgctctttgttagaaaa

SEQ ID NO: 895152 - DNA, 120 bp, Artificial Sequence
  ENSG00000287388_2 (sequence is synthesized)
gccttactgaggattcccatactcctactatctgcctaagtgatttcttctaaactcctgtatcagtgaagtgcaaagctagtgaaagccttttgttctgcagtgacttcacttgagggc

SEQ ID NO: 895153 - DNA, 120 bp, Artificial Sequence
  ENSG00000287388_3 (sequence is synthesized)
cactaattcattctgcaacagagctgggaaatcttggcattcttaccacttgcagtatttctggaagccagcctggatctggagtagatcctgagagaccaccgcagagtcctcaagcct

SEQ ID NO: 895154 - DNA, 120 bp, Artificial Sequence
  ENSG00000233896_0 (sequence is synthesized)
tttcaagctgtgtgttctgcgggggcagggagagctgcaagggctcatctttcaggacgtgctgcaaaggccctttgaagtcatccgccctgctcttggcaccttgcgcctggagctgag

SEQ ID NO: 895155 - DNA, 120 bp, Artificial Sequence
  ENSG00000233896_1 (sequence is synthesized)
ctcttccaaaaatgacccctgcgcattccgtggtgcggccgcccagcccaggcagtcgcggtccagagcaggggaagctgcagcgcggccgacagctgggagagccgaggccctgaggga

SEQ ID NO: 895156 - DNA, 120 bp, Artificial Sequence
  ENSG00000233896_2 (sequence is synthesized)
ggaccctgcctcaagccaagcaaccaggccctgcggccctctccccacccctgtgcggccctggcgcagggaaccgggacggggctttcaggccttgaagggcagacttactccaccaaa

SEQ ID NO: 895157 - DNA, 120 bp, Artificial Sequence
  ENSG00000233896_3 (sequence is synthesized)
cattcccatcgtcggctgatggagggcctcgagctgggcgctgtggatgcccttctagagagacctgccagactgagccgcttccgtcagccagacatgaggataagagcgtttagtgag

SEQ ID NO: 895158 - DNA, 120 bp, Artificial Sequence
  ENSG00000233896_4 (sequence is synthesized)
gaaattgcctaatcatttgcaggctaagaggaaagaccgcactgcagaacaacttattttaataggaagcaccaagacttcttatcttaatgctgacgaccgcccgtttatattagatga

SEQ ID NO: 895159 - DNA, 120 bp, Artificial Sequence
  ENSG00000233896_5 (sequence is synthesized)
tcccctgagcgtctctccttttgtctccttgagtttgaacccttaagaccacgtggacggtggggaaatcctccctcaacgtgcatggctcatctcgccacgagggggcgctcccagatc

SEQ ID NO: 895160 - DNA, 120 bp, Artificial Sequence
  ENSG00000233896_6 (sequence is synthesized)
agagacacgcggctgccgcccacccacctcgcggccgccacctcctgtgcgtgcatcatcttcgcgcacctgcccagagggcggggccggggggtctcctgccccattaagactccctga

SEQ ID NO: 895161 - DNA, 120 bp, Artificial Sequence
  ENSG00000233896_7 (sequence is synthesized)
tccaggtgcagccctgaaggctagagcaaggtcactaccgaggaacaagatgtcctgtgagacgtcccgggatctctgtgaaaactctggacctctgggaagtcaatggggactgcactg

SEQ ID NO: 895162 - DNA, 120 bp, Artificial Sequence
  ENSG00000233896_8 (sequence is synthesized)
agggcctactgtgtgccagggctttatgtaacccaagttattcactccacaaacactgagggcctgcagaggtggctgtccaagaagggaaggaagctgagggtgaaggagggagcctga

SEQ ID NO: 895163 - DNA, 120 bp, Artificial Sequence
  ENSG00000233896_9 (sequence is synthesized)
ccctcagaccagtttccctggcagccagcagagcattctgcagcatgctgccaagcaagaaagtggtctcagctgtgcactagcttcagcctgctcctaggggagctctggagtgggagc

SEQ ID NO: 895164 - DNA, 120 bp, Artificial Sequence
  ENSG00000233896_10 (sequence is synthesized)
tgcactaccacgagggcgtcaaatgagaagcgtattgatatcccagcagacctcaatatcctttttcatcttcccgctataaccagaatatgtgcgcaagcagtgcaggagctcttcttt

SEQ ID NO: 895165 - DNA, 120 bp, Artificial Sequence
  ENSG00000233896_11 (sequence is synthesized)
ttagagtgcaaaaaatgaacttcaacccctctcgagaagtgagtaaagaggcagccctaggacacagagacagtgcagtgaggctgccgtgacttatcgcccaggaacccactgattgag

SEQ ID NO: 895166 - DNA, 120 bp, Artificial Sequence
  ENSG00000233896_12 (sequence is synthesized)
taactttggacaaagcctcgagcaaagataactgtttaagtggctgcggcagcggaaaaatcagtttggctgattgatgtcctgggtttcttgttagtgggtggcttccagccatggctc

SEQ ID NO: 895167 - DNA, 120 bp, Artificial Sequence
  ENSG00000233896_13 (sequence is synthesized)
tgcctcagctcccagaattactccaataagtgatttgctcatccctaactcttctgagggggtggggagagggagctgaatcagccttctcacaaccctgactgggatttaataggggac

SEQ ID NO: 895168 - DNA, 120 bp, Artificial Sequence
  ENSG00000233896_14 (sequence is synthesized)
tagtgggcattggtgcactgggggcaatgtggggagaggagcagatttgtcaggcttggcaaaaatatctggctcctgcctgtgggtgtggaggggaaaataaagtcagaaaagaagcga

SEQ ID NO: 895169 - DNA, 120 bp, Artificial Sequence
  ENSG00000233896_15 (sequence is synthesized)
cacactcttctgaatggagccagaagacatagagccctggtgccagtgattacaatttggtggccacaaagggagatcctgttgctcactgaggattagccccctccccaccgagggagc

SEQ ID NO: 895170 - DNA, 120 bp, Artificial Sequence
  ENSG00000233896_16 (sequence is synthesized)
agaggagagaaatacctaaagggagacatcatggtcacattgctgatggattcatcttcatttgaagctggccctacctctcagctttttaattatgtgagtcaataaattccttttctt

SEQ ID NO: 895171 - DNA, 120 bp, Artificial Sequence
  ENSG00000233896_17 (sequence is synthesized)
ggataagccactttaagtggcatttttgctttcactttcaaatataagcatgctagctcatgtacaacacgctgccaaattgtttttcaaaagagttgtcaacatttgcaattaggcaga

SEQ ID NO: 895172 - DNA, 120 bp, Artificial Sequence
  ENSG00000233896_18 (sequence is synthesized)
gtttggaccttcaatgagctatggaatgggaagtggagcaatgtctgtcaccctcacccccactacctaaaggaccaagtaaatcttaccagatggtgctgtgaaatttttttatgtctg

SEQ ID NO: 895173 - DNA, 120 bp, Artificial Sequence
  ENSG00000233896_19 (sequence is synthesized)
aaaactttaagagtaatttttgctagttttaaaaatatgaaacaactcttgttcattacagaaaaataaaaataaatctatgtttcaactatctatttttgtgtaacaaaccattccaaa

SEQ ID NO: 895174 - DNA, 120 bp, Artificial Sequence
  ENSG00000233896_20 (sequence is synthesized)
atttggcagcagcttaaaataacaattttattatgctcccacattctgtgagtcaagaatttggaaagggaacgaggggggtgggcaatggcatgtatttgttccaccagggaacttcag

SEQ ID NO: 895175 - DNA, 120 bp, Artificial Sequence
  ENSG00000233896_21 (sequence is synthesized)
ctaagatgaccaaaggctggggttgacttgattgctgggggcaggatcatctggagatgtcctcactcacatgtctggcagtcattcaggacctcagcctgggccattggctggaatacc

SEQ ID NO: 895176 - DNA, 120 bp, Artificial Sequence
  ENSG00000233896_22 (sequence is synthesized)
tacatatgacctgtccatgtggcctgggcttgctcatagcatgactaccttggactccttgcaaggaagctcaagactccaaggcttgtacatcaaaataactagctaaagcctcctggc

SEQ ID NO: 895177 - DNA, 120 bp, Artificial Sequence
  ENSG00000233896_23 (sequence is synthesized)
ctttgatgtcctagcattcaaagtcacatagcatcacttttccagcactccagtggacatttagtcactaaggtcactgcagattcagtgggagaagacggagaccctattttttgctga

SEQ ID NO: 895178 - DNA, 120 bp, Artificial Sequence
  ENSG00000233896_24 (sequence is synthesized)
aaggagcatcaaagatcaacttgcgggcctatttttaaataccccaggattccagcaaaaagaggacaataagcaacaatgcaaccctgcccacccagagatcatcacaatcaacatctt

SEQ ID NO: 895179 - DNA, 120 bp, Artificial Sequence
  ENSG00000233896_25 (sequence is synthesized)
catgtaaacttttctggatactgctttgtcgttgatttttataaagctgaaatagttttagtggagactcttttacttgaaagtgagagaaacccaattcaaactaatgtaagcaataaa

SEQ ID NO: 895180 - DNA, 120 bp, Artificial Sequence
  ENSG00000233891_0 (sequence is synthesized)
tgactggctattcaaccaaaccatacaaatgaccaattcggtaagaaagcatgaacttcagtgttgaaccaaatcaaccaacctcctcaatccaaatggagatgcctgtgaaagaggatg

SEQ ID NO: 895181 - DNA, 120 bp, Artificial Sequence
  ENSG00000233891_1 (sequence is synthesized)
ttcacacttctgcaaagaagagagggctagaatgcccagtaggagtgcagactggaggatcggctgttttttgaactggagacatcacaggaaactggggaggctccaaattgctaacct

SEQ ID NO: 895182 - DNA, 120 bp, Artificial Sequence
  ENSG00000233891_2 (sequence is synthesized)
gaggccggagcaaaaactttttttttgtcgaagggactgctttttttatttccccttcaacggatggcatcccaagtcctgctggattgcatctgtctttgttcctgcagccaagcctta

SEQ ID NO: 895183 - DNA, 120 bp, Artificial Sequence
  ENSG00000233891_3 (sequence is synthesized)
gaaggcagcagagggcattgcttacaggggtcacagacattcagatcatggcagaactgtcacagatgttactttgtgaaaacacaaagaataatgtgtttggagagatcagtcttcaat

SEQ ID NO: 895184 - DNA, 120 bp, Artificial Sequence
  ENSG00000233891_4 (sequence is synthesized)
tagctatattttctaggagcctacctttacttagcctcacaacatgggccttagctttagcacttaatctgcacaaatacctggcttaagtgttatgactgactggctattcaaccaaac

SEQ ID NO: 895185 - DNA, 120 bp, Artificial Sequence
  ENSG00000233891_5 (sequence is synthesized)
catacaaatgaccaattcggtaagaaagcatgaacttcagtgttgaaccaaatcaaccaacctcctcaatccaaatgaacaatgctattctaggagtctgtgctagaataaaatcctaat

SEQ ID NO: 895186 - DNA, 120 bp, Artificial Sequence
  ENSG00000233891_6 (sequence is synthesized)
gcaaaggctgtcttaaaatgctgaacccagaagaatttggcataaataagacatggagttagctgacatgagatattacatttattccactgttgacgaggacaaaactgggccgctatt

SEQ ID NO: 895187 - DNA, 120 bp, Artificial Sequence
  ENSG00000233891_7 (sequence is synthesized)
caccacttctcaagcacctgattattctttctcagtatttagaagcaaaaattatccttaagaaaaacaaccgcaaacgcaacacaggctacacagatgagaaaatggggcttgcagagc

SEQ ID NO: 895188 - DNA, 120 bp, Artificial Sequence
  ENSG00000233891_8 (sequence is synthesized)
tcaaaccattacaccattcagaagctggctttggtattacttcaagttattcaaaacagtcaccacttgctgagcctctgatgtctcatctgttgaatgggtacattttcttcctgatcc

SEQ ID NO: 895189 - DNA, 120 bp, Artificial Sequence
  ENSG00000233891_9 (sequence is synthesized)
ttccacctctaaacttgtctatttccaaggatctatggcatccaggcatatgatttcaagagagaaggctgaaaaggaaggtgactggaatattaagaactgtgagatattctgaggaaa

SEQ ID NO: 895190 - DNA, 120 bp, Artificial Sequence
  ENSG00000233891_10 (sequence is synthesized)
ctctaatttgtaaattggtagaaatgccagtaatttgttgggaattgaagaccctctgtattcaagagcgaagcttggcagctgtgcactgttgttttataaatcaatattacatctgaa

SEQ ID NO: 895191 - DNA, 120 bp, Artificial Sequence
  ENSG00000233891_11 (sequence is synthesized)
ttccaaagtctgctctgttgcttgttagataaggggctgccttagtctgaataacctgaacaagatttatacacatcactgaaattgactcctgtttaccgcccatccttgctcactacg

SEQ ID NO: 895192 - DNA, 120 bp, Artificial Sequence
  ENSG00000233891_12 (sequence is synthesized)
attaacagtgcaagggcagcatgagagacatcaagtgaggaaacctcaaacaaccttcagagaagtgctaggaggctgcttaggagaaaacagcctttatgagtctactcttttacttgt

SEQ ID NO: 895193 - DNA, 120 bp, Artificial Sequence
  ENSG00000233891_13 (sequence is synthesized)
ggcaggtagcaacctctctcctgcacccagaatagaccccaagttgttcttatggcctgggcaggaacttacgttagttggaggaactttccatttaaaaatggttaaaatacattaagt

SEQ ID NO: 895194 - DNA, 120 bp, Artificial Sequence
  ENSG00000233891_14 (sequence is synthesized)
agatgctttacacaaacacacacacacatacatgcacacacaaatcacagaatcaaatgatgctccttagtgtggaattttttaatacaccattgtgccacaatcacggggaaagaatgc

SEQ ID NO: 895195 - DNA, 120 bp, Artificial Sequence
  ENSG00000233891_15 (sequence is synthesized)
ctttatggaaagctggaatttatacttgcttagtgtatgcttttactgcatggggatcctctcttgtacactctcacttggggacaattcagctcatgcctgtgctcctagtgactgaga

SEQ ID NO: 895196 - DNA, 120 bp, Artificial Sequence
  ENSG00000233891_16 (sequence is synthesized)
gatttaagtccgtttatgatctatgcagaaattatctcttcttccaaaccatcaaatgtagtgcgtgggtgcaatggctgccttccagtgagctgaaaagctctcatgacttggcataca

SEQ ID NO: 895197 - DNA, 120 bp, Artificial Sequence
  ENSG00000233891_17 (sequence is synthesized)
gtctttcccttggcccttcagtaatggcatttcacttaatacaatatgcccctaactgagttttagtgatttcaaatgaatttagtctccttatcaatatcctctatttggtggtgtgtt

SEQ ID NO: 895198 - DNA, 120 bp, Artificial Sequence
  ENSG00000233891_18 (sequence is synthesized)
tgctcttcagtgtgctgtgccaataaatctagcacaagtgctgcctccttccctctcaattgtctggcctctccctgtgaaagcaaacaccaggcagcagaaaaagaggctctcaaaaaa

SEQ ID NO: 895199 - DNA, 120 bp, Artificial Sequence
  ENSG00000233891_19 (sequence is synthesized)
cttgtctgtatcataaatgtaaatatcaataaactcaggaggttgataagggtatgctctaatggatttggccgtgttgttagctgttttacaagcaagatgctggaatactaggaagcc

SEQ ID NO: 895200 - DNA, 120 bp, Artificial Sequence
  ENSG00000233891_20 (sequence is synthesized)
caagcagcttgcttggagtgctaaaagaacaagtcaaaattttaatccagaaaaattgttagtgtgttcagaaacagaactcaatgagtcccatcatgaggcaagacagcacaaccctag

SEQ ID NO: 895201 - DNA, 120 bp, Artificial Sequence
  ENSG00000233891_21 (sequence is synthesized)
aaggaaagacgatacatcttgcagagtctatctgtagattctccatgatctgtatagagaaatcaggtggcaagtgattaaaaaaattattattttccaagctggaagattctaagaaaa

SEQ ID NO: 895202 - DNA, 120 bp, Artificial Sequence
  ENSG00000233891_22 (sequence is synthesized)
gcaagtcccagagagccctggggacagcctgtgctcctagcccgcctacctgcccaccccaggctacagcccggtgaacggaactgtgatgcatgaaatgaggggggaaagaccggtgag

SEQ ID NO: 895203 - DNA, 120 bp, Artificial Sequence
  ENSG00000233891_23 (sequence is synthesized)
gtcatgctggccttgttaactgttggcaaaaaagcaggcaacagaaaggggaatgtcagatttcacctgtgaattaatttacttcgtgcagtgcttggattaagctggcagaacatgaga

SEQ ID NO: 895204 - DNA, 120 bp, Artificial Sequence
  ENSG00000233891_24 (sequence is synthesized)
ttcacgagggtgcaagcgatgaggagctcactgcaaaaaggagcccagactgctttacacaaggagacaatatgaggcctggagtggtgcggcttctagcccttgttgccgtctgcatta

SEQ ID NO: 895205 - DNA, 120 bp, Artificial Sequence
  ENSG00000233891_25 (sequence is synthesized)
acagcccggtgaacggaactgtgatgcatgaaatgaggggggaaagaccggtgaggtcatgctggccttgttaactgttggcaaaaaagcaggcaacagaaaggggaatgtcagcttcat

SEQ ID NO: 895206 - DNA, 120 bp, Artificial Sequence
  ENSG00000233891_26 (sequence is synthesized)
aaggatctattggcattgaaataaggaagtattacacgtaatccaggacaattggctggcttacttgggtgtatcagacattcccatatcctgtacaaataaggatttgtgaggctccaa

SEQ ID NO: 895207 - DNA, 120 bp, Artificial Sequence
  ENSG00000233891_27 (sequence is synthesized)
gtcagatgatgttatgattacaaggaagtattgatatacttccctaattgtttcttaggactttggattctatttgtgatgtcattacaaagctatgcattatctgcataatcgccaagg

SEQ ID NO: 895208 - DNA, 120 bp, Artificial Sequence
  ENSG00000233891_28 (sequence is synthesized)
aaaagactctctcatgaagggaaatgcgtcccactgagataatgccgcaagctactgctatacatccaacggcatatgtatggtgttgaaataataagacagcatggaataatgatgaat

SEQ ID NO: 895209 - DNA, 120 bp, Artificial Sequence
  ENSG00000233891_29 (sequence is synthesized)
ttccctgtcagtgggctcctcatttcccgagccctcgtctgattattagtgtactgacggaataaaaataacctcatattcctacatgaatcataaataaaatccttttatttcatcaaa

SEQ ID NO: 895210 - DNA, 120 bp, Artificial Sequence
  ENSG00000233891_30 (sequence is synthesized)
tttccaggtgaacataaagatttttcagtcaatagcatacactgaacattgcttctatataaagagcagtgtttctcaaagtgtggtccttggaacagcagcatcagtagcatcggcttg

SEQ ID NO: 895211 - DNA, 120 bp, Artificial Sequence
  ENSG00000233891_31 (sequence is synthesized)
gaaggagtttaggactctggactacctatagtccactgccagccttgagcttgaactatgtgtgatccatgcttatccacccatgttctgaccaatcacagtgctggcttcaggctacag

SEQ ID NO: 895212 - DNA, 120 bp, Artificial Sequence
  ENSG00000233891_32 (sequence is synthesized)
cacctgagggagtggaggtaaccccagacatcacttactcatgggaccgttactgttggcatccagaacagtcatcctattccttctgcaggctctgtaccatatttagacaatctacca

SEQ ID NO: 895213 - DNA, 120 bp, Artificial Sequence
  ENSG00000233891_33 (sequence is synthesized)
ggtggctgcaactatctcccctgaggcttccaagaccactgctccacacagtaagggggccttcccattaatgttctttattgcctccaattgatgtggtcacatcatgaaattctggat

SEQ ID NO: 895214 - DNA, 120 bp, Artificial Sequence
  ENSG00000233891_34 (sequence is synthesized)
agatttaggccatgctggtcaaaggacagacttttttgtacaaataggaccatttttctcacttagtgccttcctccttttctacccttctagctagtggaagtgagtggaaggtacgga

SEQ ID NO: 895215 - DNA, 120 bp, Artificial Sequence
  ENSG00000233891_35 (sequence is synthesized)
tgcagacaacattgaaagagatcacattctaggaatgcaatgttacagcccaattagttcatgagaaagcatggttggaagatatattgtttctatttgtatgctatagaattctgaacg

SEQ ID NO: 895216 - DNA, 120 bp, Artificial Sequence
  ENSG00000233891_36 (sequence is synthesized)
ctctgggtaagacttacaatcgtggtcatcatcaatgaagcacaaaaacagcctttgagagaattactggaaaccaatatctacaaacagtgcaatggatgatgaagtgacacaagtcct

SEQ ID NO: 895217 - DNA, 120 bp, Artificial Sequence
  ENSG00000233891_37 (sequence is synthesized)
attataactagacttttacaaaatggtactagggaagctcagaagcaagatcatcaatattatatcaatatatacaagttctgaagagtcatggcagagagaggataacaaaggaagctg

SEQ ID NO: 895218 - DNA, 120 bp, Artificial Sequence
  ENSG00000233893_0 (sequence is synthesized)
aagaaccctgttccccaggaactgccccaacacctcgagcaggtgcctcccctctccaatgaagcctctcccgtccgcccggcccagaaactgggcaacttactggtttcggcattttcg

SEQ ID NO: 895219 - DNA, 120 bp, Artificial Sequence
  ENSG00000233893_1 (sequence is synthesized)
ttctgggacacactgctgtttgggcaaccctttgtcagggcctgttatctcccacttgcagatccagggcatttcagaggtcagagagaggagggaggcctcttctgagattttgacctc

SEQ ID NO: 895220 - DNA, 120 bp, Artificial Sequence
  ENSG00000233893_2 (sequence is synthesized)
tattcaggttctacattcatggaatcagccaaccttggatggaaaagatttggaaaataataaaaataatactacaattaaaataccaataaaaatccaatacagaatatagtataacaa

SEQ ID NO: 895221 - DNA, 120 bp, Artificial Sequence
  ENSG00000270344_0 (sequence is synthesized)
acgcaggggaagggcggcggaacccacagctcgagctcaggtgattctgacgcaggcgctccacggaaaccctccgagaattctgggggccgtggggccgcccagctcagtccggagctc

SEQ ID NO: 895222 - DNA, 120 bp, Artificial Sequence
  ENSG00000270344_1 (sequence is synthesized)
cggaactcggggaagagcgtccgggagccgggtctgggttccgcactccgtccgccccgatggcagagagtgagatacggacgccccgggacgaggggctcaggacccggctacggacac

SEQ ID NO: 895223 - DNA, 120 bp, Artificial Sequence
  ENSG00000270344_2 (sequence is synthesized)
ctgcctccatctccctccagataacacaagtgtgaagagaggggagagcagcaaaggctgagctgcgtgtgcctggtcccttccagactttccagataactttgccccacggaggacaag

SEQ ID NO: 895224 - DNA, 120 bp, Artificial Sequence
  ENSG00000270344_3 (sequence is synthesized)
gaaagccaaaagagagaagccaggattgttagtcttggaaaatgcctccatatagaaacatgagccggagaataaatcacttgcctctctaaccagttggatttggtccgtgagttccta

SEQ ID NO: 895225 - DNA, 120 bp, Artificial Sequence
  ENSG00000270344_4 (sequence is synthesized)
gttttgttcacctgacttagtccctgacttttaaagtcaagtgcatcaacatgctgccagtactttgatgaacatctatacaggatccatctctacagcagtgaattccacctggggtaa

SEQ ID NO: 895226 - DNA, 120 bp, Artificial Sequence
  ENSG00000270344_5 (sequence is synthesized)
agtatgcatgtaggttaggatgctacagtgggactctgtctgctttttctgtctgtttctgctaaggcctccacacattagatggtcagtactctttgttctatgggaagggctagaata

SEQ ID NO: 895227 - DNA, 120 bp, Artificial Sequence
  ENSG00000270344_6 (sequence is synthesized)
cctaaacaggactttcacggagggagcaacaaaccagttttgtggctctcagcaaacatccatctcaaaggtgagtttggaaataatggagagtatgtcagtgtgtttgtgtctcaggcc

SEQ ID NO: 895228 - DNA, 120 bp, Artificial Sequence
  ENSG00000270344_7 (sequence is synthesized)
tacttcccacgcctatgggggaagggtgggacttatctctctcttccctcaagcctgctaagaggagattagactatatttgagataaatacctccagcacagtgacagccatgcagctc

SEQ ID NO: 895229 - DNA, 120 bp, Artificial Sequence
  ENSG00000270344_8 (sequence is synthesized)
atgcctgtgaaatcaaaaggcaagaggatgcggctggctggctgctctgagggcagagagaaaagaccagacagctcttggaacagactgttcttccagtgacgatggggacaaagatgc

SEQ ID NO: 895230 - DNA, 120 bp, Artificial Sequence
  ENSG00000270344_9 (sequence is synthesized)
atgagtgtatctccaggactggatgtgagctgcatgggagaaaaagagtgcaggcctgcagcccgggaaaacccaaaaggatgccataaacccaacaggaagatgggttgtcagggcccc

SEQ ID NO: 895231 - DNA, 120 bp, Artificial Sequence
  ENSG00000270344_10 (sequence is synthesized)
aggagctgagaaaggaataaaaatgacagagagagaaaagtacattgtccacatcataaataacacagctgaatgtgcccaatgaggtcctcagagaacccacagaagtgcccatgggaa

SEQ ID NO: 895232 - DNA, 120 bp, Artificial Sequence
  ENSG00000270344_11 (sequence is synthesized)
cagttctctctgggactcaaacccagggagaggtgcttttaaacatgcaaagagagggaaccatcatcatattacattgcagtgtccacatgaataagaccctaacttacctcatatttc

SEQ ID NO: 895233 - DNA, 120 bp, Artificial Sequence
  ENSG00000270344_12 (sequence is synthesized)
tcctccttcctctgctttaatccaggaggagccagagacctctcagtaagtgaagaagaggggaaataggtaaaaagccactattccccatgttagatgaggaaataggaacattctcct

SEQ ID NO: 895234 - DNA, 120 bp, Artificial Sequence
  ENSG00000270344_13 (sequence is synthesized)
cctctacccaacacccactgtagcttttagtggctggagtcaggagagaaaagttttcatgttaaatgaatttcagaggtttgactatgacatagaaatggatattttaattactgaaat

SEQ ID NO: 895235 - DNA, 120 bp, Artificial Sequence
  ENSG00000270344_14 (sequence is synthesized)
aaaactgttttgtaattagaggtgactggaagacattttatcctcagcagaagaatagataaggataggaccttccctcccccttggaccccaccaaggttttatccagaggcagaggaa

SEQ ID NO: 895236 - DNA, 120 bp, Artificial Sequence
  ENSG00000270344_15 (sequence is synthesized)
gaagtaaccctttatgtgagtttgaatgggcagaagaagaaaaggatgaagttgtcttctaattgcactctatgaatgttgcttttttgttaacataaatgtcacatatatttttagctg

SEQ ID NO: 895237 - DNA, 120 bp, Artificial Sequence
  ENSG00000270344_16 (sequence is synthesized)
gtgtaacaaaaaaaaaaacatctcaagccggcttgcataataacagctttgggcacagtctgatcaaggccccggttctgtttgctagtgatcctcctgattctgccctctctccatgct

SEQ ID NO: 895238 - DNA, 120 bp, Artificial Sequence
  ENSG00000270344_17 (sequence is synthesized)
agtttcttcctcagattgacattcctcttggtcaccagatgcctacaatcagcgggtgcaactctctgctccctgctcacttctgaaggggagagcatggataccaaccacagaacaaag

SEQ ID NO: 895239 - DNA, 120 bp, Artificial Sequence
  ENSG00000270344_18 (sequence is synthesized)
ccctgcagtctcccgctgagtagaacacccacgaagaagtgttggccatttccctattgccagggaaatatcatgtattggttggattaggcctgtattaatccagttaatggaacatag

SEQ ID NO: 895240 - DNA, 120 bp, Artificial Sequence
  ENSG00000270344_19 (sequence is synthesized)
ttaaactatcccagaccctccatagacactagagaaaaggtgaatccaacccaaatgtaagactgctactcaataggacagaaaaggcatggatgtcagtgaaatgggaaaaaaaatgtg

SEQ ID NO: 895241 - DNA, 120 bp, Artificial Sequence
  ENSG00000270344_20 (sequence is synthesized)
tgccaaaggagatcaggaaggactgaatagaagacatggcctttgaattgaagcctttaatgaggaaaggggattgacattgtatgagggccagggtggagagcgggttgtgaagaggat

SEQ ID NO: 895242 - DNA, 120 bp, Artificial Sequence
  ENSG00000270344_21 (sequence is synthesized)
agggaaaatgcaaggacactgcggatataagaattaatgggagaatcatgggccacaaagcagcaggattatattacagagattgtaagtagtgtttattgaagcacagggtactgggga

SEQ ID NO: 895243 - DNA, 120 bp, Artificial Sequence
  ENSG00000270344_22 (sequence is synthesized)
ggtggaggaaagatgaaactgttaaggaatttagacacagcatgtagtggttggcaggaaacagatgacactctcaaacagggtagttgaggagagctaataaagggaccatttaccaag

SEQ ID NO: 895244 - DNA, 120 bp, Artificial Sequence
  ENSG00000270344_23 (sequence is synthesized)
gtgtagttaggattaagagaaagcaaactgggatggtgctgtgctatgggctagcaacagcaggaagtcatttctgtccctaggtctgaagagggaagcaggggagccaacaccaaggaa

SEQ ID NO: 895245 - DNA, 120 bp, Artificial Sequence
  ENSG00000270344_24 (sequence is synthesized)
ccagagatcttagagtctgaaagtctgcatgatagaagccatggcctttagtagagggatcttgcctactcttagcagcctggcttggaggggcctggggaaataataccccaacctctc

SEQ ID NO: 895246 - DNA, 120 bp, Artificial Sequence
  ENSG00000270344_25 (sequence is synthesized)
tcctcttcttcaatattgatgacttccattggttaatatcaaactggaagttggagagaaagggagtctatctatacaagtcagcaccctgtagcccagaagagagtaaaaagggggtaa

SEQ ID NO: 895247 - DNA, 120 bp, Artificial Sequence
  ENSG00000270344_26 (sequence is synthesized)
aaagcaatttccgagggacaaacagaaaacacccagcacagaaggaggaacaaacatttggaggaacaaacagaaaatatcagaaaacattttaatcctgggtcctgggacgtcatggaa

SEQ ID NO: 895248 - DNA, 120 bp, Artificial Sequence
  ENSG00000270344_27 (sequence is synthesized)
ggttttgaagttaggagcaccgccatcctctagggggagctcaagcatttctctccactcatcccaaaggcggtgcatcaaaagatcagggtgaaactgacttcaaggaaagagccctcg

SEQ ID NO: 895249 - DNA, 120 bp, Artificial Sequence
  ENSG00000270344_28 (sequence is synthesized)
gctagaggaagaagcctggagaagtaaagggattgctcctggaattggaaatctaccctttgcacttctatttactgcatttggattgatttgcaagaataaccattaaaataatcaaag

SEQ ID NO: 895250 - DNA, 120 bp, Artificial Sequence
  ENSG00000270344_29 (sequence is synthesized)
ctaaaagtaagtatgtactgtgtgccaagttcttgactcatttggcacaactcttcggaggtaagcaccattgaaattctcaccttctagattaagaggctgatagaacctggatttgag

SEQ ID NO: 895251 - DNA, 120 bp, Artificial Sequence
  ENSG00000270344_30 (sequence is synthesized)
cccattgacaaaggaccactctctgctctgttctgttctcatgctgctggtttagtcagctgagtcaaaggttgcctttgcttagaaggcctaacaaaaccagagcagggtccatggaaa

SEQ ID NO: 895252 - DNA, 120 bp, Artificial Sequence
  ENSG00000270344_31 (sequence is synthesized)
aggagacatgaaaagggacatatttcctggtaagatttgtattcatttaacaattttaagcacatatttaataaccaggcactcactacctgacaagctctgagccaggtgcagggtatc

SEQ ID NO: 895253 - DNA, 120 bp, Artificial Sequence
  ENSG00000270344_32 (sequence is synthesized)
cgagggaactaggagagaggcactaagtgctgtactaagaacctgaatgagtgcatttgagtcctgggtctgctacatgtgtgacctaggaaaagtcacttaaatcatttaactgtctcc

SEQ ID NO: 895254 - DNA, 120 bp, Artificial Sequence
  ENSG00000270344_33 (sequence is synthesized)
tcttacagtagatggaaagatggagatgagtaggatctaattattggccaagtgcaaaggagctaaaaaggccacccacgctgctacttacttcagcaatacccaaggaaacaagggcaa

SEQ ID NO: 895255 - DNA, 120 bp, Artificial Sequence
  ENSG00000270344_34 (sequence is synthesized)
aaaaagagctctagaggctcttcttggtctagccctgcttttgagtttggggccaaagctctaattcactctaattcaggggtgttagcaaggttcttgtctggcattctagctctgaac

SEQ ID NO: 895256 - DNA, 120 bp, Artificial Sequence
  ENSG00000270344_35 (sequence is synthesized)
agttgataccagcttcctgaaccatgtgttaagagagatctcagactgcatgtagagaacgtatgccttgagagataagtgatgtctgccattgattgagggtggagaggaggagccaag

SEQ ID NO: 895257 - DNA, 120 bp, Artificial Sequence
  ENSG00000270344_36 (sequence is synthesized)
tggttctagaacagtgtccttttgcctagaatgtccctacagcaggagcagctgggcaagactcagaagtcctgattataatcacagattaaggtgaccaactatcccagtttgcctagg

SEQ ID NO: 895258 - DNA, 120 bp, Artificial Sequence
  ENSG00000270344_37 (sequence is synthesized)
actgttccagttttagaactgaaattcctgcaacccagaaaacctctcaatcttgggcacatcccaatcagctttgcaggctttctctatctgacaataccaaaaaaaaacaacaactat

SEQ ID NO: 895259 - DNA, 120 bp, Artificial Sequence
  ENSG00000270344_38 (sequence is synthesized)
gagctctgactagaagagattactctttttgtcttggccaatttcagcctgtgaaaatgcatcttattctggcctgtatgtgccagccatatgccctcaaatgttcccccacttcacaat

SEQ ID NO: 895260 - DNA, 120 bp, Artificial Sequence
  ENSG00000270344_39 (sequence is synthesized)
agctgacctccatacctctctcctttctcagctatttttcctgctgtatccactgacgccttagtaggaaacagatggcaccatcaaagggtttagctgaagagaatttcatacagggat

SEQ ID NO: 895261 - DNA, 120 bp, Artificial Sequence
  ENSG00000270344_40 (sequence is synthesized)
tatttacagaggcgtgggcagggttaatggaaccaacaagagctggggagacagtcagggattagctcttaccacaggaggtctgcagggacaaagggaggggatgctgttaccagcctg

SEQ ID NO: 895262 - DNA, 120 bp, Artificial Sequence
  ENSG00000270344_41 (sequence is synthesized)
gtaagagctgaaactgtgcaggagaggtcactgggcctgggagctggagcctctgtctcatctgcggtgtggcagagaggaaagaggaggagggcataaaaatccctggcccggctctcc

SEQ ID NO: 895263 - DNA, 120 bp, Artificial Sequence
  ENSG00000270344_42 (sequence is synthesized)
tcctgccctctggcctcttgccagtagtttcttgccagagtgcaaggaaaagcaaatgaaacaacaggtctagtagagggcagcctcccaggccgcagagcgtgacaggaaaaggcagag

SEQ ID NO: 895264 - DNA, 120 bp, Artificial Sequence
  ENSG00000270344_43 (sequence is synthesized)
aacagatctaagaataaccatcccaggccaccctattgtcactcagcttccattctaacactttacttagccaaagaaactcaggtcctcaacacagggaaaacatagtctcatcagcta

SEQ ID NO: 895265 - DNA, 120 bp, Artificial Sequence
  ENSG00000270344_44 (sequence is synthesized)
ctgtatcactgagtgatgatgtatttcagtcatattacttcctggaccctaaactgtaactttagtcaccaccaggatgcaaggcagcaaagaaaggtaaaaaaataaataactatcata

SEQ ID NO: 895266 - DNA, 120 bp, Artificial Sequence
  ENSG00000270344_45 (sequence is synthesized)
ctacagctccacatctaagcatttctaatctaataatcctgacttcctcctcccagcactcgttccataattctttaccctcacctagcatcttgacagttaaggtgtcttacttgatgg

SEQ ID NO: 895267 - DNA, 120 bp, Artificial Sequence
  ENSG00000270344_46 (sequence is synthesized)
ggtgagccaaaccttccttgccacaggatccgggtggttccatctttgttgagttgctgccgtttctcattggccattactactggacatgggagtgcaatgaatcccatgggctctaga

SEQ ID NO: 895268 - DNA, 120 bp, Artificial Sequence
  ENSG00000270344_47 (sequence is synthesized)
tacagtgttgtttccatgtgatagcaaaaatcccaatttctccttgataatcaaaattaatcataccagtccatacaaacagccaatgctctgcctttgatcagtgttgtgaacaacctg

SEQ ID NO: 895269 - DNA, 120 bp, Artificial Sequence
  ENSG00000270344_48 (sequence is synthesized)
aaatgttgaaggggcattctcagtgtttcctagtagaaatatatctcccccttgggcacaagaacctcacgcccattagatgcaatgttttagggacaagaagacagtattattgaagtg

SEQ ID NO: 895270 - DNA, 120 bp, Artificial Sequence
  ENSG00000270344_49 (sequence is synthesized)
ggttattactcatcctgagttcccagagccatgtattcaacaccatgtatcaaccactgatctgaccacttataggacagcaccccaacttcacaagatgttgtctcccagcaggctcca

SEQ ID NO: 895271 - DNA, 120 bp, Artificial Sequence
  ENSG00000270344_50 (sequence is synthesized)
taaatgagccttcgataggacatttcatcattccatcaatctagctgcttccaggtaagaacaatgaattctacgatgtgagcgtaataccacagctgtttcactgtaaatgagttcctt

SEQ ID NO: 895272 - DNA, 120 bp, Artificial Sequence
  ENSG00000270344_51 (sequence is synthesized)
gatcagtgacaatgctgtgtgtgacaccatggggatgaataaggcagcctatcaaccacatatggtagtgctggcggaagcaacatgcacaggaaagggaagttactctccagtatatgt

SEQ ID NO: 895273 - DNA, 120 bp, Artificial Sequence
  ENSG00000270344_52 (sequence is synthesized)
aattattcccatgaagacaaattcctgccccttccataatgtagtggtctgatattatcaacctgggtggctgatacttccaagaaatagtgccaaataagggttcagtgttgccttccg

SEQ ID NO: 895274 - DNA, 120 bp, Artificial Sequence
  ENSG00000270344_53 (sequence is synthesized)
ttttagaaatctgggcactcagcagtgacagtggcagatcagctgtgatgtgaggaagtccatgtttatttatttcattgcctctgttcctattcccatggccactttgtacatgagaca

SEQ ID NO: 895275 - DNA, 120 bp, Artificial Sequence
  ENSG00000270344_54 (sequence is synthesized)
tttacccaagcacaaacatggccagtgtcttagcatgctcaactgctttaacaaaacgccgtaaactgggttgtttataaacagcagaaatttatttctcacaattttggaggctgggaa

SEQ ID NO: 895276 - DNA, 120 bp, Artificial Sequence
  ENSG00000270344_55 (sequence is synthesized)
gttcaagatcaaggttctagcagactctgcgtctggtgagagcctatttcctggttcacagagggccaccttctgtgtcttcatatggtggaaagggctatgcagctctctgggatttct

SEQ ID NO: 895277 - DNA, 120 bp, Artificial Sequence
  ENSG00000270344_56 (sequence is synthesized)
tttataagggcactaatcccattcataagggcacttaacttccctggggacttaacctcccagtggcctcacttcctaataccattcacattggtgattaggtttccacatatgagtttt

SEQ ID NO: 895278 - DNA, 120 bp, Artificial Sequence
  ENSG00000270344_57 (sequence is synthesized)
gaagggacacaaatatttagaccatagcagccagggaaggaggctcactacaaccaagggataggtcatcttggccacctcctcatttagctttctgtgaggtagatgtcctctggggga

SEQ ID NO: 895279 - DNA, 120 bp, Artificial Sequence
  ENSG00000270344_58 (sequence is synthesized)
acatttatatgctattcaaatagcctcaaagactagccatttttagaggtccattatataacttccctttaggtgatcttggcaccaaccttccaggtccctgataatttgaccaaccca

SEQ ID NO: 895280 - DNA, 120 bp, Artificial Sequence
  ENSG00000270344_59 (sequence is synthesized)
ttagcccctgcctgtgtatttcaggaaacctcagcttatcccttctttcatgtcagtggccaaccagatgtacttcctgaagttctgtctatgggaagattttcctatggcttgcagagc

SEQ ID NO: 895281 - DNA, 120 bp, Artificial Sequence
  ENSG00000270344_60 (sequence is synthesized)
caccccagacagataattcttaaaccagaccaggccactgtcaccctcttttctcatcaaagggtcatagggaatacccggggagaccagaggtacggtttgagggaaaggcgggaagca

SEQ ID NO: 895282 - DNA, 120 bp, Artificial Sequence
  ENSG00000270344_61 (sequence is synthesized)
gtaagaagtctgactcatcagcttttgcagagaagagaagtgctgagaatagatctgagggtgtgaggggataaagaataacagctcacccacgtctgtgcagttctttaccctaaagtt

SEQ ID NO: 895283 - DNA, 120 bp, Artificial Sequence
  ENSG00000270344_62 (sequence is synthesized)
taagtgaaatgattcttcatcaagcttcttctcacttgatttaagaaaatccttagagatataacagcatcaatattgcaaaccaataaggaaacaaagcaatagcttagcccttgacat

SEQ ID NO: 895284 - DNA, 120 bp, Artificial Sequence
  ENSG00000270344_63 (sequence is synthesized)
atatttctgataagtaatgtatttcatggtctttcctaaatgtacatgaggtagaagtagatatatccaatgtctatacttaattgatttttgccagaaagtctatcttgaaatgtgagc

SEQ ID NO: 895285 - DNA, 120 bp, Artificial Sequence
  ENSG00000270344_64 (sequence is synthesized)
ttctgataaattccttctatttgtgcttttttagaacaagttccatttttatgttgtctttgtcagtgacggaggaaatcagatcaattttttaaagtcagttttttatataagcattac

SEQ ID NO: 895286 - DNA, 120 bp, Artificial Sequence
  ENSG00000270344_65 (sequence is synthesized)
tgaaactattgaaatctgaatatggtgtttttaaaataaactgtgttaaactaatttgtaatatcagaagtcaggaagggaagcatgagggggcatctaggggctggtaatgttgtgttt

SEQ ID NO: 895287 - DNA, 120 bp, Artificial Sequence
  ENSG00000270344_66 (sequence is synthesized)
cctcctgtgggtattggttacctgagttaatttttttttgtgaaattacaacaagctgtgcacttatgaaagttgtacttttctatacatgtattcttattcaataaaaagaaaaaaatg

SEQ ID NO: 895288 - DNA, 120 bp, Artificial Sequence
  ENSG00000287380_0 (sequence is synthesized)
gactctggttgcaaacaatactgtgcgaaggagctaggccaagagcaaacccatcagcattaaagactttgtatgagaaagacagggagggggattaagatgatgaatacgaagcgagac

SEQ ID NO: 895289 - DNA, 120 bp, Artificial Sequence
  ENSG00000287380_1 (sequence is synthesized)
acgaagcgagactagcttgcagctcccactcagatggacggagcagtatggagactcacatcgtgaacttttgctccaagaactaccacagaaacataccaggaaagccaagagaatcca

SEQ ID NO: 895290 - DNA, 120 bp, Artificial Sequence
  ENSG00000287380_2 (sequence is synthesized)
agaactggatcacccctgcaagctccctgagatgccaaaaaactgtgagtctgcttgctttctcaatggggaggctcatggtctagggcaagttctcggccctggtcaccagctgcctgg

SEQ ID NO: 895291 - DNA, 120 bp, Artificial Sequence
  ENSG00000287380_3 (sequence is synthesized)
aaatagactcgatgctgttgttggggagcacagtgggagtgagaccagccgttaggactgtgggttgcttgggagtggggtgaggcttttgagtactggcttttcccccacttccctggt

SEQ ID NO: 895292 - DNA, 120 bp, Artificial Sequence
  ENSG00000287380_4 (sequence is synthesized)
gacctgtatgactcagcagaggcagccataatacccctgggagtataactccgctggacagggaatcacacccatcccccaccacagccacagcaagccccatccaaggagaggctgagc

SEQ ID NO: 895293 - DNA, 120 bp, Artificial Sequence
  ENSG00000287380_5 (sequence is synthesized)
tcagatacgcatatccctgcccccacctggtgatttttctctacttgccctggtagccaaagacaaaggctataatttcttgggagccctatgcctctgcccactacctgagaaacttga

SEQ ID NO: 895294 - DNA, 120 bp, Artificial Sequence
  ENSG00000287380_6 (sequence is synthesized)
ctgatgcactcttgaaagctccaccttctggctggaggccaacaaacacagaaccagggcactaaacaaaaacacaaccaagaactctcacagggtccacttcactcccctgctacctcc

SEQ ID NO: 895295 - DNA, 120 bp, Artificial Sequence
  ENSG00000287380_7 (sequence is synthesized)
gtatccatggctacaagacctgaagacagatcacatcacaggactctgtgcaggcactcaccactaccagcccagaacccttagctctgctgggtggctagacccagaagagcaaaaaca

SEQ ID NO: 895296 - DNA, 120 bp, Artificial Sequence
  ENSG00000287380_8 (sequence is synthesized)
caattctcaggaagcccctttcctagaggaagggagagaacaccacatcaagaaaggacccaagaaagatagaccatatgatagactacaaaaaagtctcagtaaatttaagaaaatcaa

SEQ ID NO: 895297 - DNA, 120 bp, Artificial Sequence
  ENSG00000287380_9 (sequence is synthesized)
agtggaataaaactggaaatcaactccagaagaacccctcacaaccaagcagatacatggaaattaaataacctgctcctgaatgattgctgggttaacaatgaaatcaagatggaaatt

SEQ ID NO: 895298 - DNA, 120 bp, Artificial Sequence
  ENSG00000278595_0 (sequence is synthesized)
tcttgaattctgtccctccaaggagagggcaatgcctgagcccacggaagttgggtcaggggcagcattggaagtcagagcctgcaatgctcacgtaaatgcaaaagatggttccttcag

SEQ ID NO: 895299 - DNA, 120 bp, Artificial Sequence
  ENSG00000278595_1 (sequence is synthesized)
gcagcaagcaagacagagaggtgcctgctttctggggagacaacaaacagataaataagcacaacactgtcctgccaagctaagtgacatcaatgaaacaaggcaaggtaataagaagag

SEQ ID NO: 895300 - DNA, 120 bp, Artificial Sequence
  ENSG00000278595_2 (sequence is synthesized)
gctgggaaaaggcttagctgtgattttgctttctgcagtttgagttgcctatgttcaacagaggttcaaaaatattaaatggaacatttcagaaataaacaatcctaagtttaaattgca

SEQ ID NO: 895301 - DNA, 120 bp, Artificial Sequence
  ENSG00000272853_0 (sequence is synthesized)
aagcgcgaggagcggggcggggcgagcgcgcgtgctcccggatcctcggcagtgtccggcgcccccttcccttcgccaggcccgtttggcgccttcactcgggaagacgtcggccaggac

SEQ ID NO: 895302 - DNA, 120 bp, Artificial Sequence
  ENSG00000272853_1 (sequence is synthesized)
tttgcgctttggagacgtcttacttcggcagcactcgcacactgcgagatccgacacgggcagcggggacctagggagccggggacgctgcctgtcgggtacggttccgcagctaccgca

SEQ ID NO: 895303 - DNA, 120 bp, Artificial Sequence
  ENSG00000272853_2 (sequence is synthesized)
gccccgtgggccatggttagtctccccccgacaccgctccctctagagctccgggcttcggaagcggctgcacgtgggcatggctggagaggttccgctggcttggggcagtcgccggga

SEQ ID NO: 895304 - DNA, 120 bp, Artificial Sequence
  ENSG00000272853_3 (sequence is synthesized)
ttccgactggttggtgtggggtgtggcctgtgctatccagctcccagctgatcctaatgtgcggcacagcggaaaccaccggtccacatcagtgcttctcacttaaaggggcttacgaat

SEQ ID NO: 895305 - DNA, 120 bp, Artificial Sequence
  ENSG00000272853_4 (sequence is synthesized)
cccaggctggagtgcagtggcgcgattacggctcactgcagactagacctcctgggctcaactttaatgtaaattgggattgggtaggtctgtaaggggacccgagctcccctcccatgt

SEQ ID NO: 895306 - DNA, 120 bp, Artificial Sequence
  ENSG00000272853_5 (sequence is synthesized)
cccgagctcccctcccatgttgttgccaagctcctgagctcggcctggtggcgggtgggggccgggaggagaaggacacgttagtaaggaagctgcaggacgactccaggggcctcccac

SEQ ID NO: 895307 - DNA, 120 bp, Artificial Sequence
  ENSG00000272853_6 (sequence is synthesized)
ctggtctccacccccctcccccacccattcttgacgctgcatccatgattgttctaaacaacctaaagcagaaatcttagagcaaataacgaaaactggcagaaggccatttgatatctc

SEQ ID NO: 895308 - DNA, 120 bp, Artificial Sequence
  ENSG00000272853_7 (sequence is synthesized)
cttaaaaaattcatgtaaaaaattacataaacgtttcaaagcagtatgtataaatttgaaatactggaaatgaacgcagaccattaaaggaatagttaattatttgattccattatgaaa

SEQ ID NO: 895309 - DNA, 120 bp, Artificial Sequence
  ENSG00000272856_0 (sequence is synthesized)
aagtgcttatttagtaccttttaccatttcaaatacttagactatctgaggccaagtgggagagattaagctctatgctgtaaacagttaaggattcaatttatcagcatttaacagttc

SEQ ID NO: 895310 - DNA, 120 bp, Artificial Sequence
  ENSG00000272856_1 (sequence is synthesized)
cacattattttccacctccaacatacatgattataccaatattaacacatcagcaataaaataaccataaaatgggaggcatgggtgaagaaggaattgtggtgaaaatatcttcatata

SEQ ID NO: 895311 - DNA, 120 bp, Artificial Sequence
  ENSG00000272856_2 (sequence is synthesized)
taatctgtattatctattttgacagaaataattctcccactactatgccagaagttacgtatgatggtgctggatatttacagttatcagaagagtatctacttctatcttaactatagt

SEQ ID NO: 895312 - DNA, 120 bp, Artificial Sequence
  ENSG00000272856_3 (sequence is synthesized)
tgatggtagttttataattttgcatactttgtgcatgttccagtgaaaactccaaaaaaccataaagaatgtatctagaccatgggctttagtcatactttaaataaacctttaatataa

SEQ ID NO: 895313 - DNA, 120 bp, Artificial Sequence
  ENSG00000272854_0 (sequence is synthesized)
gtcggagcgcaacttcttcaggaggacagactttccactgctaagtgcggccccggcgggagggtgccggggtccaggtctaaggagcggcgccgggcggcggggctggattgggtggtg

SEQ ID NO: 895314 - DNA, 120 bp, Artificial Sequence
  ENSG00000272854_1 (sequence is synthesized)
caaattcagcgaacgcgcttaagacgcactcctttccggtcacctactctctcttcatggtgggaactgtttgtgtccagaattaagctatatttaataaagggccaggatgaggtggtc

SEQ ID NO: 895315 - DNA, 120 bp, Artificial Sequence
  ENSG00000272854_2 (sequence is synthesized)
aacctaggatcaactgtatgtcacaacatattccgtaggcgttcccgttcccgtccatgggctgggaagagacagtaaactttaccgtgatgtttggggactggtacgaaaggtgggtat

SEQ ID NO: 895316 - DNA, 120 bp, Artificial Sequence
  ENSG00000272854_3 (sequence is synthesized)
ggggatattctttcactattttccagcttttcaaactgtgcgtgtacatttaagttgttgagttttttcaatattgacaacgtatcaggaatttaataaaagtactatcctggtaacaat

SEQ ID NO: 895317 - DNA, 120 bp, Artificial Sequence
  ENSG00000272855_0 (sequence is synthesized)
ccttctttcagaataatgtgaaatttcttttaaggacaagaaactttagtgtctagttggtaaatgacataggtttgaatctctttctaagagttgtaattgatgataagaatattctgt

SEQ ID NO: 895318 - DNA, 120 bp, Artificial Sequence
  ENSG00000272855_1 (sequence is synthesized)
accagccaccttacaccatgcattgttgagagttcttgctctatatttgataacacttttcaaatatgccattttccgtgattataaaattgcttaaatatctatataatctttcaaaat

SEQ ID NO: 895319 - DNA, 120 bp, Artificial Sequence
  ENSG00000272855_2 (sequence is synthesized)
aattttcctacaaatgtctaaatttctctagaagtacaacatatacaatcagatttacttggaatggtcttccttagtcagtcatgttttcctgcaaattaaaatggtttggacaacaca

SEQ ID NO: 895320 - DNA, 120 bp, Artificial Sequence
  ENSG00000272858_0 (sequence is synthesized)
ttctcttctcatctcccctccattcaccaaaacagagttgggtctatattttacccggctggctcttggaactgcataaatcctggctgttttcatttttaaaaaattatgagattaact

SEQ ID NO: 895321 - DNA, 120 bp, Artificial Sequence
  ENSG00000272858_1 (sequence is synthesized)
accaaacttgagatgtaagttgtgggttagctctcgattctgctagataacctggaacaaagcattaacttctttgagagcttccttttttttccttcattgctgttgtgtgtttctacc

SEQ ID NO: 895322 - DNA, 120 bp, Artificial Sequence
  ENSG00000272858_2 (sequence is synthesized)
agaaaatgtgggaatgtgcgtgaagacgacctagcagagtgcctggcacacaggaaggagcttgttgaatgtatagttccgggctccaaaacaaaggcagcccatcttagcctgagccac

SEQ ID NO: 895323 - DNA, 120 bp, Artificial Sequence
  ENSG00000272858_3 (sequence is synthesized)
gatatctaaaggaaagtgatagcaactgcaaccaactgtttctgaggtctgcctgcccaccaatggccccctcagcacatgggaacacgtgtggaggtgcctggaacagacactgactca

SEQ ID NO: 895324 - DNA, 120 bp, Artificial Sequence
  ENSG00000272858_4 (sequence is synthesized)
gcggggttctgtacagaggcagtgcgggtgaagaaatgaatgcagattccccaacaatccagaggtatatgcaagaggaggggcaggggttctttcaagtcaccttccaggtgaccaggt

SEQ ID NO: 895325 - DNA, 120 bp, Artificial Sequence
  ENSG00000272858_5 (sequence is synthesized)
gcctttacaactctaaggctctgtgagtatgtttttttcttaccttatggaataaagggaaaaagaagacagctgccctgggtatggctttgggtcggaataaacatttctcaaattgaa

SEQ ID NO: 895326 - DNA, 120 bp, Artificial Sequence
  ENSG00000288008_0 (sequence is synthesized)
agagaacgctttttatcacaaagatcaagacaacaattgtgtgcctacaagaaaagaacaactaaaaccatccaacaagcattaaaagaacaattctagagatagttgcctttgaactcc

SEQ ID NO: 895327 - DNA, 120 bp, Artificial Sequence
  ENSG00000288008_1 (sequence is synthesized)
aataatgggtaacattcagtcccgagatttgaattccaagttaaaagaattcattatcagttgccttatcttatagttataagagctgctggcagcaagtattttcagcagcattatttt

SEQ ID NO: 895328 - DNA, 120 bp, Artificial Sequence
  ENSG00000288008_2 (sequence is synthesized)
tgtccaatgtaatattttacagtgatgtcaaatctcatacaataaccatattgtaaattgactttatagacttcgttttgtttattatagagttcatctatgaaacagaagaaatctaaa

SEQ ID NO: 895329 - DNA, 120 bp, Artificial Sequence
  ENSG00000288008_3 (sequence is synthesized)
tgccttggcttcaccccaaactacaaaaagtactgttttacaagagcttattctgaaatatcacttcctgaacgtagaagtatgctatttgcacagatacattccatagacatacacaat

SEQ ID NO: 895330 - DNA, 120 bp, Artificial Sequence
  ENSG00000288008_4 (sequence is synthesized)
gtccagctgagaaaataaaggatagtccatctggatgtttctttctttctcctaactgtgacctcctgctccagagaggacaccagcatcttttgctactgaggtatcaaacaaccattc

SEQ ID NO: 895331 - DNA, 120 bp, Artificial Sequence
  ENSG00000288008_5 (sequence is synthesized)
ctgctggggaacctcagggagggagaaccagatgtatattcttctccctcccaagaagcagccactgttgagccacttcaggaacagagctgtcacctctctcaaccccaccaggcccag

SEQ ID NO: 895332 - DNA, 120 bp, Artificial Sequence
  ENSG00000288008_6 (sequence is synthesized)
gtaatatacacttctcaaaagaggacaaagaaatgaccaacaggcatatgaaaaaaatgctcaacatcactaatcattcagcaaatgcaaattaaaacaacaataaatttgacctcataa

SEQ ID NO: 895333 - DNA, 120 bp, Artificial Sequence
  ENSG00000288009_0 (sequence is synthesized)
acctccttggctgctctggcctttgagttatgctctaagattatcgattacttttccgttgttgcttatttcccacagcagcagaatgagaacggttattagttaatagccatcagagac

SEQ ID NO: 895334 - DNA, 120 bp, Artificial Sequence
  ENSG00000288009_1 (sequence is synthesized)
agaccaagtggaacacagtcctcggaaaaacgccactctgtagcattagtaattaaaacctcacaaggtttgtatttcctgaaggaggccgtcagtgtcaatgctgtactaacgacggta

SEQ ID NO: 895335 - DNA, 120 bp, Artificial Sequence
  ENSG00000288009_2 (sequence is synthesized)
ctgtacacttctcagtcctttatgtggagctgggggcaggaagaattgcttctggaagctgatggagttggacatgtggctttctagaatctgtgcccagcttgtcaagaagttgaatcg

SEQ ID NO: 895336 - DNA, 120 bp, Artificial Sequence
  ENSG00000288009_3 (sequence is synthesized)
gtgcaaccagcgtttgtgaaagcagcatttcccatttcacataaagtcagcttctggccaactggacaagtctgaacaaatatgaaacccactaaaaggccagtgacaggtgcacacact

SEQ ID NO: 895337 - DNA, 120 bp, Artificial Sequence
  ENSG00000288009_4 (sequence is synthesized)
actgactctggctagaggctgtggcaggaattggactcatgtcatccagcgacagttccaccagcatctcttgtggcttcccaaggaccagcctgaggcaaactcctcagtggtgtgaag

SEQ ID NO: 895338 - DNA, 120 bp, Artificial Sequence
  ENSG00000288009_5 (sequence is synthesized)
cattagcaacctaagtaggccaccagtagagctggtcaagagaaaggataggttcaattaattattttttaattaaaaaaaaatagagacagggtcttgttatgttgccgaggctggtct

SEQ ID NO: 895339 - DNA, 87 bp, Artificial Sequence
  ENSG00000288009_6 (sequence is synthesized)
actcagccagatagattcaatttttaaaactttattgccattactgttcagtaaccccttgatatggttgaatatttgtcccctcca

SEQ ID NO: 895340 - DNA, 120 bp, Artificial Sequence
  ENSG00000288009_7 (sequence is synthesized)
tcagtaaccccttgatatggttgaatatttgtcccctccaaaacttatgctgatatctaatccccaatgtgacactattgagagctggggcttttaagatgtgattaggtcatgagggct

SEQ ID NO: 895341 - DNA, 120 bp, Artificial Sequence
  ENSG00000288009_8 (sequence is synthesized)
ccaccttctgaatggattaatccattcatggattaatgagttcatgggttaatagattaatttatcttgggagtgggattagtggttttataagaagagtgagacctcagctagcatatt

SEQ ID NO: 895342 - DNA, 120 bp, Artificial Sequence
  ENSG00000288009_9 (sequence is synthesized)
agcactcagctcccttggcatgtgataccaccttgggactctgcagagagttccaccagcaaggcctgtaccagatgcagccccttgaccttgaacttttcagcttccagaactgtaaga

SEQ ID NO: 895343 - DNA, 120 bp, Artificial Sequence
  ENSG00000288009_10 (sequence is synthesized)
aataggccaggcatagtggtttacacctgtcatcccaccactctgagaggccaaggccagtggattgcttgagcccaggagtttgaggcttcagtgagctatgatcatgccattgcactc

SEQ ID NO: 895344 - DNA, 120 bp, Artificial Sequence
  ENSG00000288009_11 (sequence is synthesized)
acagtcctcggaaaaacgccactctgtagcattagtaattaaaacctcacaagacttctcagtcctttatgtggagctgggggcaggaagaattgcttctggaagctgatggagttggac

SEQ ID NO: 895345 - DNA, 120 bp, Artificial Sequence
  ENSG00000288009_12 (sequence is synthesized)
atgtggctttctagaatctggatgtgatggtgcaggaaaaactcctgcccattgagagggctccgtaagtgcttcccaaaagagaatgagaaggaaaaggagatctccacaggaactgcc

SEQ ID NO: 895346 - DNA, 120 bp, Artificial Sequence
  ENSG00000253269_0 (sequence is synthesized)
taagtcactgaagtgtaccctttaagccagggagggacagggccacactttcagtgctaacaattggtttctctctgagaatgaagtctgcaatctgtcacatcagaacaggaagagagg

SEQ ID NO: 895347 - DNA, 120 bp, Artificial Sequence
  ENSG00000253269_1 (sequence is synthesized)
gacgttttggtgctggctatggctttgtgacactgcagttgaaacgggcaaagtgggctcctcacttgaagaactttgatgcctctaaatgctctgatgagaaaaaacttgtcctcaaaa

SEQ ID NO: 895348 - DNA, 120 bp, Artificial Sequence
  ENSG00000288001_0 (sequence is synthesized)
ttacacttccccaaaagactcaagctgtctgacagggctctggatggcacctcctcctaggaggctgcttgaagtcaggagaaggaatgactactactgcagatgagtgctccatgcttc

SEQ ID NO: 895349 - DNA, 120 bp, Artificial Sequence
  ENSG00000288001_1 (sequence is synthesized)
aatgtcaacttcagaattttggatttccctgaatcagttgagggagggcaaatagcccctttacttatttagctggtagcttgtttatttacttaacaaatacagtacagcattactaca

SEQ ID NO: 895350 - DNA, 120 bp, Artificial Sequence
  ENSG00000288001_2 (sequence is synthesized)
tatagatactttcaagtgctttatgaatatgaactcatttaattctcgaaattgtatgaggcagtgctatttttatatccaattcttagatgagtaaagtgaggcacagacaggcagaat

SEQ ID NO: 895351 - DNA, 120 bp, Artificial Sequence
  ENSG00000288001_3 (sequence is synthesized)
actatgccaaaagttaggctcctgggaggtgatagagacagtattcaatcccaggcagtttgtccagatttcacgctttcaaccattagcaattgatttatttattatcctctgttggga

SEQ ID NO: 895352 - DNA, 120 bp, Artificial Sequence
  ENSG00000288001_4 (sequence is synthesized)
aaataacagcagtgtcagaaattatcccccattctgcagcgaatttcataccagctacatttcacttaatccttacaacaattctgtgtgatgggggattctcatcttcaatttatagat

SEQ ID NO: 895353 - DNA, 120 bp, Artificial Sequence
  ENSG00000288001_5 (sequence is synthesized)
gaggaaataagctcaacggctcatccaaggttatataggcagaggggcagagccagtcaaacacaggttgtctaatgccagtcaagggttctttataccacattgtcagttagtagaaag

SEQ ID NO: 895354 - DNA, 120 bp, Artificial Sequence
  ENSG00000288001_6 (sequence is synthesized)
gtctaggggaagtaagtgaggagattgcaaaatcatcttaaaaaaaaaaaaaaagaaaaatcatgattcagacctgcctgacttgctgactacacatcagctttcataacatatcacaat

SEQ ID NO: 895355 - DNA, 120 bp, Artificial Sequence
  ENSG00000288001_7 (sequence is synthesized)
cagcctcacagtggaaaatgagtcaatttctatatactgtggctttctcaaaaacctctcaagggaactgtaagaatttgctgaattcatattgcaattcagcccattataagaactgta

SEQ ID NO: 895356 - DNA, 120 bp, Artificial Sequence
  ENSG00000288001_8 (sequence is synthesized)
aagcaattagactcagaacctgaaactgcatatagctcatcagcttgggaagcagagatgggtacattatctagttaagtacctccagttactcatcactgtgttatctgtaacttcaga

SEQ ID NO: 895357 - DNA, 120 bp, Artificial Sequence
  ENSG00000288001_9 (sequence is synthesized)
acatcagtgaaacaaaaactgcacaatttcatagttttccattgtatacagaaatttgctaagaaagactaattgtgatgagaacagatcaagaatagttcaactatttgaaataagttt

SEQ ID NO: 895358 - DNA, 120 bp, Artificial Sequence
  ENSG00000288001_10 (sequence is synthesized)
gatggaattaaaatcatttcttacattaatcagatttcttataaaactattatcttgatagcattgaaaaacaagtttatagtattaaagtgtaagcatttccatatccttttcttattt

SEQ ID NO: 895359 - DNA, 120 bp, Artificial Sequence
  ENSG00000288001_11 (sequence is synthesized)
tatcttgttcctgttccctttgcagtctccaaatttgttttcaatgccaaaagaagtacttggtggaatgggtaaacgtggtcatattttacattagctaaataattatgaatttaaaaa

SEQ ID NO: 895360 - DNA, 120 bp, Artificial Sequence
  ENSG00000288001_12 (sequence is synthesized)
tcattaaattgtatctataacctgtgtaaagaacaatattcctactttgggaactgtattataaagataataaagaacataccattatgaatgatacttaaaggtgttctaactgaaggc

SEQ ID NO: 895361 - DNA, 120 bp, Artificial Sequence
  ENSG00000288001_13 (sequence is synthesized)
taaaaatagatacctagaggtttctcaacaaaatacgaagaaaaattgggtacttgggattggcagaaacactgagaaaaccagcttcggcaaaaatataaactatactgaaaagacaat

SEQ ID NO: 895362 - DNA, 120 bp, Artificial Sequence
  ENSG00000288001_14 (sequence is synthesized)
aatgagctcatgaaaacagaaaaaaaggatgcagctgggactcaaaacaaactgatgctagactcaaacacctggattcaccccccttgctctgtctctctctgtgcatattctccatta

SEQ ID NO: 895363 - DNA, 120 bp, Artificial Sequence
  ENSG00000288001_15 (sequence is synthesized)
acctctccacagcagaatgatgtgctccacttcccaaaggtcgtgatggaaaattgccactacaaactgcccccaagtgtatatgtgatatagtttggctgtgtccccacataaatctca

SEQ ID NO: 895364 - DNA, 120 bp, Artificial Sequence
  ENSG00000288001_16 (sequence is synthesized)
gctcccataattcccacatgttgtgggatggacctggtgggaggtaattgaatgatggcagcagtttcccccatcttcccccattcactaccactcttggtagtgaataagtcatacagg

SEQ ID NO: 895365 - DNA, 120 bp, Artificial Sequence
  ENSG00000288001_17 (sequence is synthesized)
ttggtagtgaataagtcatacaggacctgatggttttacaaggggttccccctttcgcttggctctggttcttgttctttcttgtctgccactgtgtaagatgtgccttttgccttccac

SEQ ID NO: 895366 - DNA, 64 bp, Artificial Sequence
  ENSG00000288001_18 (sequence is synthesized)
ttctttgatatgttctctgtttacaagagtagtcacactagggtgaaatctttgatcccagagc

SEQ ID NO: 895367 - DNA, 120 bp, Artificial Sequence
  ENSG00000288001_19 (sequence is synthesized)
aagagtagtcacactagggtgaaatctttgatcccagagctatagccacctggaccccaacgtagcagcttccttgaatcaatggggattgaggaagagctgtttccaagatggcaacac

SEQ ID NO: 895368 - DNA, 120 bp, Artificial Sequence
  ENSG00000288001_20 (sequence is synthesized)
aaaaggtaacgtgacaacctgaagggcaaggaaatatacattccctcgagaacaaccagaatgggattcttgaatgccaccaggactttttctccagctttttcagttctggaggccaga

SEQ ID NO: 895369 - DNA, 120 bp, Artificial Sequence
  ENSG00000288001_21 (sequence is synthesized)
agtctgagatcaatgtgttggcagggccatgctccctctgaaggcactggggaaggatctatttctggcctgtctctctgagcttctgatagttccttggcttgttgcaacataaataac

SEQ ID NO: 895370 - DNA, 120 bp, Artificial Sequence
  ENSG00000288001_22 (sequence is synthesized)
tccattcctcacatggtaaggcattttctgtgtccaaatttcccctttatattaaaaaaatttttttcactgaaacttcaggctttgttgaattccgttgttttttcccgtagttttatt

SEQ ID NO: 895371 - DNA, 120 bp, Artificial Sequence
  ENSG00000253267_0 (sequence is synthesized)
agatccatctaaacatgcttgaaaatacacaacgtaaaccatctcccttgttaccttggaaagcagtaaggattctatgcaggttgtgctaaggagatatttaagaaaatttttttccat

SEQ ID NO: 895372 - DNA, 120 bp, Artificial Sequence
  ENSG00000253267_1 (sequence is synthesized)
actaaatgtgttcatttgaaatacagagatcatcttctcatttctataaatgggatctgacaggagaagctcccaaatataagaagtgtttcttccactgcattcaatggaaaatggagc

SEQ ID NO: 895373 - DNA, 120 bp, Artificial Sequence
  ENSG00000253267_2 (sequence is synthesized)
acgctaaacagtgctagtgaaacagacattcgtgtgcacacgcgtgcgtgtgctgtgcgtgcacatgtgtgtattattccacctgcaaaatggaaattcttagaacacctttcagtatac

SEQ ID NO: 895374 - DNA, 120 bp, Artificial Sequence
  ENSG00000253267_3 (sequence is synthesized)
atttcaaataatatcacaattaatgactggatttcagaaaatggcttctttccagatcatttccacattcagggtaaaaagtgttcttgagctttctgtgcccttgcaggagatgaaggc

SEQ ID NO: 895375 - DNA, 120 bp, Artificial Sequence
  ENSG00000253267_4 (sequence is synthesized)
atgcttgttccctaacagcacatttttgagggaaatccacatttgcatctcactgttggcacccacatctgggatgcccccacagctgccccgacaacccatctctgggctcttgactgc

SEQ ID NO: 895376 - DNA, 120 bp, Artificial Sequence
  ENSG00000253267_5 (sequence is synthesized)
agaggctcggaaacgccatacccttgaccgcagaggctcggaaacgccatacccttgaccgcagaggctcggaaatgcgatacccttgaccgcagaggctcggaaatgccatacccttgc

SEQ ID NO: 895377 - DNA, 120 bp, Artificial Sequence
  ENSG00000253267_6 (sequence is synthesized)
ttggctgccctcctggtgctgacggtgcctccgagatgtgaccccgctccagctggtgagtctatggagcacctgctcagtggcttctgagcagagtccggccttctccatactgatgac

SEQ ID NO: 895378 - DNA, 120 bp, Artificial Sequence
  ENSG00000253267_7 (sequence is synthesized)
ggagcccgtggcaggtggggctgcaatggctgacccacggccagctgagagtgagagccagcatgctcagatgcatgacgctggcttgggtcccaacggggctgaccccaacccggtgtg

SEQ ID NO: 895379 - DNA, 120 bp, Artificial Sequence
  ENSG00000253267_8 (sequence is synthesized)
gacaacctcttctggctctcctctgccctggtcccagtgcagctaacagtgacccagccatgacaacctcctttgccctggtcctcgtgtagctgaccccaacccagtgtggacaacctc

SEQ ID NO: 895380 - DNA, 120 bp, Artificial Sequence
  ENSG00000253267_9 (sequence is synthesized)
ctctggctctcctctgccctggtcccagtgcagctgaccctgacccagccggaccaaccacctccggctctcgtccacttggctctacccgtcctttgctataaccaggactgggcaggt

SEQ ID NO: 895381 - DNA, 120 bp, Artificial Sequence
  ENSG00000253267_10 (sequence is synthesized)
ttgaaggatgtgccaccaaaggcttcccaaacagaacacgaggagaaggcatcttaataaggcacctcccacggcacttccaagaagtctgtgaaagaacagagcaagtgtgacgggcag

SEQ ID NO: 895382 - DNA, 120 bp, Artificial Sequence
  ENSG00000253267_11 (sequence is synthesized)
ggctgtgaacctctgagtgcttcagatgtaaaagtgtggaagacgtcgggctgtgagtgtcacgcagcagaaaggtggaggaggcctctcaggtcggaagtaacatggtgcgcagaaggc

SEQ ID NO: 895383 - DNA, 120 bp, Artificial Sequence
  ENSG00000253267_12 (sequence is synthesized)
agtttgtatgcacagtggagcacatgtgttgatgcctgaaagcccacattgagatcctggctcaacctctcgccaacggtgtcatttggacaaatctcttaatctatgcaacgtacaatg

SEQ ID NO: 895384 - DNA, 120 bp, Artificial Sequence
  ENSG00000253267_13 (sequence is synthesized)
aggacagtagtcacaggacataacttatggagttctgtgaatataaggctggtgtcggagcaacaagaagacattcattggatggttttgcaaatcccaatctggatcacagtctcctgc

SEQ ID NO: 895385 - DNA, 120 bp, Artificial Sequence
  ENSG00000253267_14 (sequence is synthesized)
gtgcttgcatgtaatgtagattcctggatcacggtcttccgcatgctagtatgtaatatagattccaggatcacggtctcctgtgtgcttgcatgtaatatagattcctgtatcacgatc

SEQ ID NO: 895386 - DNA, 120 bp, Artificial Sequence
  ENSG00000253267_15 (sequence is synthesized)
tgaatataagggaatctcctcatctttgccaccggtggggtaccctccccactcatcctgaggtacctgggagcagacagacatgaaacacgcatcaactttgtcactgagaacggcagc

SEQ ID NO: 895387 - DNA, 120 bp, Artificial Sequence
  ENSG00000253267_16 (sequence is synthesized)
atcagctcctttttggaaacaaatcctctacaattccataaagatacacctctttacagtcatttatcagttaaagtcagatgtataaaaatgcatatcctaaaaggaaatgaatataaa

SEQ ID NO: 895388 - DNA, 120 bp, Artificial Sequence
  ENSG00000253260_0 (sequence is synthesized)
agaaagtacttctttgaactgaattctccaaaagttatatttgtctgtcctagttctaccctctgtggttaaactagcaagctataatcatttttccatatggaagtactttttctattt

SEQ ID NO: 895389 - DNA, 120 bp, Artificial Sequence
  ENSG00000253260_1 (sequence is synthesized)
gaagagttttcaaatctctttggataatcttatcccagatccttcaactatttctcttgattttgagaacttcaccgtcttgatcactttctgtggaaaagctctgcttactgaacaact

SEQ ID NO: 895390 - DNA, 120 bp, Artificial Sequence
  ENSG00000253260_2 (sequence is synthesized)
ctgaatgagggaaacttaatcgccagcaacactactcttgtactttgggacttttattagataaagtaactgttccttgaacacaagcactgccataccagaaagtcgatgtgatcgcag

SEQ ID NO: 895391 - DNA, 120 bp, Artificial Sequence
  ENSG00000253260_3 (sequence is synthesized)
gcggctaagtgactcacaggtgaaaagctgttacagcgtggatctgctggacaaagggaagattcatgtcctgagagggacggaacctgacggcccaagatttcatcacactactcagaa

SEQ ID NO: 895392 - DNA, 120 bp, Artificial Sequence
  ENSG00000253260_4 (sequence is synthesized)
ctgcagttgctgctgtaaatggattccaaaaccacttttaattgacccaccctacattgcctcagttcatctctcattctgcaccagctgcctgttgtcccaaagtttcaatgctaattc

SEQ ID NO: 895393 - DNA, 120 bp, Artificial Sequence
  ENSG00000253260_5 (sequence is synthesized)
cactacagcatgctcctggaaacttatgataaggaatctggaaccatctggttttagttgactttttaaaaatacgttttagtgtcacagttgtattattaaacataattatgcctggta

SEQ ID NO: 895394 - DNA, 120 bp, Artificial Sequence
  ENSG00000253260_6 (sequence is synthesized)
gagtccttgctgacgctatgcggcgcctcttcctggagcccccagaaaattgccccagatatggctttttaaacagagtctctgttattctggcttgtagttatttctgctttgtctccc

SEQ ID NO: 895395 - DNA, 120 bp, Artificial Sequence
  ENSG00000253260_7 (sequence is synthesized)
ttgtcaccacacacatctgctttttgtctgccagaattgtattaatagccttagttcactgttggcccttactcctattatcttgctattatgggtttattcacttttgtatacatttat

SEQ ID NO: 895396 - DNA, 120 bp, Artificial Sequence
  ENSG00000288006_0 (sequence is synthesized)
acacaccgggaaatactaacgcataggcttccattccagcagtatgggcaacaagagaaatatcctcaatctaatagaagcacacatcaatctgggaccacagagagtattcatcagtcc

SEQ ID NO: 895397 - DNA, 120 bp, Artificial Sequence
  ENSG00000288006_1 (sequence is synthesized)
ccagtgactagtaaaataaatctagtgggttatgaaaagtctaaattttgagaatcaaggagtacttgcacctctgaaataaagcatgcagacatctcagtttgcaagtcatgccatatt

SEQ ID NO: 895398 - DNA, 120 bp, Artificial Sequence
  ENSG00000288006_2 (sequence is synthesized)
ggacacccaggaaataagatccgggacacgcaccctctttccatctaagactcccagcgacagacaaggagacaggagggggcaggactgcagagtaagtacagaaagctaactgcatcc

SEQ ID NO: 895399 - DNA, 120 bp, Artificial Sequence
  ENSG00000288006_3 (sequence is synthesized)
acgtgttgacatggggcagagtgggccagtgcagaggatgcgggtgggtaacttcctggaacagcaggagagaagagaaaaggaacagggggaagggctggagacacatcatctcccatg

SEQ ID NO: 895400 - DNA, 120 bp, Artificial Sequence
  ENSG00000288006_4 (sequence is synthesized)
tcatcagtttgggaagctctttggaaaagcccacgtttactttctgaaacctcatcaaacctttcttctactacctttaaaagaataccccacctactggctgtgggagccacagccagg

SEQ ID NO: 895401 - DNA, 120 bp, Artificial Sequence
  ENSG00000288006_5 (sequence is synthesized)
cagctttaactcttgagacactcaagattctgcggtctggggcacagatcccccgattccaaagcctgtccctcccagacaggtgtggtacctgggccagacttctcccacttccatgct

SEQ ID NO: 895402 - DNA, 120 bp, Artificial Sequence
  ENSG00000288006_6 (sequence is synthesized)
agggagctccttttttgcagcagctctgcttgcaacttccaccccatgtaagggtgatgatgagattggatttcaactgagagagaagcaagttataaatacatcctggtgtactattaa

SEQ ID NO: 895403 - DNA, 120 bp, Artificial Sequence
  ENSG00000288006_7 (sequence is synthesized)
gaggacgatgctttgcctttctggctgtctcttgagcaggggaagccatggtgtttggctgcagttctgccagcgcctgctcacacacccccaggtcctgatgcctttaagtaactgagc

SEQ ID NO: 895404 - DNA, 120 bp, Artificial Sequence
  ENSG00000288006_8 (sequence is synthesized)
aaagcagccatctccattcgtagcaacaactgtgccacatgtgaaagaaggagagagtttgagcactataggctactcacaggcgatacgtctgcaaacccagagccaagacagtagagt

SEQ ID NO: 895405 - DNA, 120 bp, Artificial Sequence
  ENSG00000288006_9 (sequence is synthesized)
ccggctttgcagactcgccttcctgaagtccttggaatgctggcattccctctagcacttctccctgctttgtaattatccatttacacgtctatcattccactcaattctgaattctct

SEQ ID NO: 895406 - DNA, 120 bp, Artificial Sequence
  ENSG00000288006_10 (sequence is synthesized)
gaggacacggaccaggaatccctactgcccaggacggtgtgcagtgcagaacaaggctcagcaaatgttgagttgtgaaatctgggaggctctctcctggctgtttgggaagtcaggtcc

SEQ ID NO: 895407 - DNA, 120 bp, Artificial Sequence
  ENSG00000288006_11 (sequence is synthesized)
tttagaggctaagaatacaggcctggagtcagctgggcatggaattaaaggccttttctcccacttattggctgtccaattttgggtaagttacttcgtatggtttggctgtgtgtccac

SEQ ID NO: 895408 - DNA, 120 bp, Artificial Sequence
  ENSG00000288006_12 (sequence is synthesized)
ataatccccacgtgtcatgggagggatccggtggaaagtaattaaatcatgggggcagttacctctatgctgttcttgtgatggtgagtgagttctcatgagagcttattgttttataag

SEQ ID NO: 895409 - DNA, 120 bp, Artificial Sequence
  ENSG00000288006_13 (sequence is synthesized)
ttctcatgagagcttattgttttataagagcctttccccctgctttgctctgcacttctccttgctgccatcatgtgaagaaggacgtgtttgtttccccttccaccatgattgtaagtt

SEQ ID NO: 895410 - DNA, 120 bp, Artificial Sequence
  ENSG00000288007_0 (sequence is synthesized)
atctcagttgccctctgagcctgaaccaagtgtcaggaagagttttctatggcccttgactccttaactctttgcttatagcgtctctgctctctgatgcctctgctgtcagagaaaggc

SEQ ID NO: 895411 - DNA, 120 bp, Artificial Sequence
  ENSG00000288007_1 (sequence is synthesized)
tgtggtttaaatatttatttatgaatccatcagcttgggccaactaggtccatttatcaccgttttgactgtgtctaaactgtcattagtggtgtgactagaaaccagttaatttcgctg

SEQ ID NO: 895412 - DNA, 120 bp, Artificial Sequence
  ENSG00000288007_2 (sequence is synthesized)
ggtggtaaattcgtggactgatctccaaaccctcctactgtgctaatgttgccaatggaagtttccagaggccaggatccctggccaacacgtgatcgtaaacaacatcagggcctcaca

SEQ ID NO: 895413 - DNA, 120 bp, Artificial Sequence
  ENSG00000288007_3 (sequence is synthesized)
gggaactcacaatttactgaggtttgctctgtgccaggtgttttcatgatcctccatccccttgtcgtttagtcctcttctctgagtcctccccattttactgatgaggacggaaatcga

SEQ ID NO: 895414 - DNA, 120 bp, Artificial Sequence
  ENSG00000288007_4 (sequence is synthesized)
ggcacacgattaagcgtttccctgggtcacacagctaatgaatggcgagctggaagtcagtcccaggtcatcagactccgaagtccatggttttggtgatgaaggtgggctgtgaaatgt

SEQ ID NO: 895415 - DNA, 120 bp, Artificial Sequence
  ENSG00000288007_5 (sequence is synthesized)
gtgtcttattctatgcatgtgagtccgctggaaccaacttttccacttggaacacaatctcagtgcctttcagcaggtaaccggcgccagaccagatctccagagatggaggtggtcggc

SEQ ID NO: 895416 - DNA, 120 bp, Artificial Sequence
  ENSG00000288007_6 (sequence is synthesized)
gccatgagaaggtgtatgaggaggcatcgcatcaggcgcccaccctgtgcttgcagggcctgaccatgagcgccgccttcagttttacaccttaggcaccccacttggctccccttcgtc

SEQ ID NO: 895417 - DNA, 120 bp, Artificial Sequence
  ENSG00000288007_7 (sequence is synthesized)
ccagccctgccagacccacccttgactctgtgtttcctttctggaaactcgagaggccatttctacttaaagagtcctcacctggcctaccagcgaccagatctgcccaagtgcagaaga

SEQ ID NO: 895418 - DNA, 120 bp, Artificial Sequence
  ENSG00000288007_8 (sequence is synthesized)
aacacttggttatctcctctttcatcgtccccgctcgagcataaaacaacagaaagtttcctatcggaacagcatgcttgtgccaaaaacaaattagaaacaacaacaacttctcaaaat

SEQ ID NO: 895419 - DNA, 120 bp, Artificial Sequence
  ENSG00000288007_9 (sequence is synthesized)
tttgagcaaaatgatggtgaccgtgttctggaaatggagcaaagtgagtgagccactgtcactgttacatctgacaatcactactggtacttggctaaatattgcagccacctcttcagg

SEQ ID NO: 895420 - DNA, 120 bp, Artificial Sequence
  ENSG00000288007_10 (sequence is synthesized)
ctacacatgtcaggtgtaccagaagcaccttccgcctccagctcacttctgggagatatttagagctgactcctctcccctccccagtctccagccaccagcaagctctctccttggtgt

SEQ ID NO: 895421 - DNA, 120 bp, Artificial Sequence
  ENSG00000288007_11 (sequence is synthesized)
ccccagctcctgcccctcatgctgatagaagcattgcccgctgttcttcctgttcttacaggtttcctagtgcctgtgaccaaacaccttgtgtgtgctccccaggagagaaaaccgcta

SEQ ID NO: 895422 - DNA, 120 bp, Artificial Sequence
  ENSG00000288007_12 (sequence is synthesized)
gcagcctcagacaggtgaggagttgttcctcctcagacccaggaatcatttcccagtggaatgacacggtgaagtggatcgccatttttaaaccttcaataataaagatcttgtgtgtca

SEQ ID NO: 895423 - DNA, 120 bp, Artificial Sequence
  ENSG00000232271_0 (sequence is synthesized)
atctgtctactcccaagaaactaaaggacaggcactggactgctactgcagaaacacccacaattccacaggcttgcttgcgttttaatgtccaccaacagtggagttggcttcccggct

SEQ ID NO: 895424 - DNA, 120 bp, Artificial Sequence
  ENSG00000232271_1 (sequence is synthesized)
gaacaaaaacaaatgaacaaatcaatgacaacaacagcaacatctgtgcatactatagaagcagatgtgtaattattttgtacattggcttaatactgagaaagagactgaataattatt

SEQ ID NO: 895425 - DNA, 120 bp, Artificial Sequence
  ENSG00000232271_2 (sequence is synthesized)
gcacttctggcaagtctatatatactgtctcctgacgaaggaccctccagcaacttcgggctgaaatgaagcagattcactcaatccgcacaaactctcagaaaagtgcatctggaaaaa

SEQ ID NO: 895426 - DNA, 120 bp, Artificial Sequence
  ENSG00000287966_0 (sequence is synthesized)
ggtcgtcacagcaccggttcctcgggcgcgcgcccttagtcctggggccgcttctcccccggacgcgtgcgaaggcggactgggttccgctgcggtctccacgggagccaccggtcctga

SEQ ID NO: 895427 - DNA, 120 bp, Artificial Sequence
  ENSG00000287966_1 (sequence is synthesized)
aagcgcggagcatgctttgtttgcggaaacgaaagcgaatacttctttccaaggagacttaggaaagggcagacgctcccactgcctcaggtgttccctggaggaccttcaagtggccgc

SEQ ID NO: 895428 - DNA, 120 bp, Artificial Sequence
  ENSG00000287966_2 (sequence is synthesized)
cgtgtgggcgggctagcgtcccgctgctgcgctggttccggagcccttcccttgcctctcccagggtccttctcccagcgtcggaggaaggcccgcagtctgcgagtggagtgcgggtgg

SEQ ID NO: 895429 - DNA, 120 bp, Artificial Sequence
  ENSG00000287966_3 (sequence is synthesized)
tgggaatccctgggaggattacgaaatccttaaagtgggatttaccaaacgcattcctttccgctcacttccgttcccgcttaacaaacgtgttggaaacgtgttgctactgaaaggaag

SEQ ID NO: 895430 - DNA, 120 bp, Artificial Sequence
  ENSG00000287966_4 (sequence is synthesized)
tggcgctgggctgcattttctgtggctagtctgcgagaaacagccctggaatagggcctctatttcttccttggagcatccctccccgggacctgggagttgaaactctaggctaaagca

SEQ ID NO: 895431 - DNA, 120 bp, Artificial Sequence
  ENSG00000287966_5 (sequence is synthesized)
ctgaaattcatggtgtctctacgctgagttaaactaagtttttcagaaaatgtctaactaggctaaagaccttgtgcttcagagtgttttgagaggagagtttggggaaaagggctctct

SEQ ID NO: 895432 - DNA, 120 bp, Artificial Sequence
  ENSG00000287966_6 (sequence is synthesized)
ctagaaggtaaatttgtatgggagatggggagtgtgtgtttacacggagtatcgggcgtctttcttatgggtggacattgtggataagaatgagatattaaggcagaattagctgggctt

SEQ ID NO: 895433 - DNA, 120 bp, Artificial Sequence
  ENSG00000287966_7 (sequence is synthesized)
ttaatcccaaacagtgttttaaaaataaaaactatatatttaaggtgtacaacatgatgttttgatacatgtacacagtgaaatgatttctacagtcaagctaattaacataatacatct

SEQ ID NO: 895434 - DNA, 120 bp, Artificial Sequence
  ENSG00000287966_8 (sequence is synthesized)
cttcacagttactattttgtgtaagtggtgagagcgcatgaaatgtactctccgcaagtttccaatgcacaatgcagtattaactatagttatgctatgcattacatctctagacttatt

SEQ ID NO: 895435 - DNA, 120 bp, Artificial Sequence
  ENSG00000287966_9 (sequence is synthesized)
catcctatagaactgcaactttgtatcctttgaccaacatcttaaccatttccatacgtctccacccctggtaaccactgttctactctgcttctatgtatttgacttttttagaatcca

SEQ ID NO: 895436 - DNA, 120 bp, Artificial Sequence
  ENSG00000287966_10 (sequence is synthesized)
cataagagatcatgcagtatttttcttgctgtgtctggcttgtttcacttagcataatgacatcgaggttcatccatgttgcaaacagcaggatcttctttattaaggatgaataatatt

SEQ ID NO: 895437 - DNA, 120 bp, Artificial Sequence
  ENSG00000287967_0 (sequence is synthesized)
acagttaagtgacaaggaccagtgttcctatccaaggctttctgatttcatagcccccactctcaaccattaataccaactgtctacgtgggaagccttggggaccagaagcgccgtctg

SEQ ID NO: 895438 - DNA, 120 bp, Artificial Sequence
  ENSG00000287967_1 (sequence is synthesized)
aaacttcagccacggcgtctaaggtgtctaacgtccttttcacgaccgtcgcctgctcaaatctgcccttgaaactctgagagacaggggtcccgtttctggccctgacttgcccctggc

SEQ ID NO: 895439 - DNA, 120 bp, Artificial Sequence
  ENSG00000287967_2 (sequence is synthesized)
ttcctgtgcagctaaattcacatcaagccaaggggacagacggcggactcgagacagaagacgccgacggtttaccccttacccccttcctggtaaaagtatactgagtcccatcccacc

SEQ ID NO: 895440 - DNA, 120 bp, Artificial Sequence
  ENSG00000287967_3 (sequence is synthesized)
ccccctcgttgatgtggtcgtagatagcgtccgcgccttgatcgaaggcgcgctcgaagaacatgacgcccacgatgatggtgagggcgaaggtggaggtcctgcggaacagcagggagt

SEQ ID NO: 895441 - DNA, 120 bp, Artificial Sequence
  ENSG00000287967_4 (sequence is synthesized)
acaatttcgaagtcaacgtcgcggccgccatgtttcttcacagtccaactcgcgccaccgcgcctgcgctggggccgacctcgttccccaaaggccctagacgtgcaacactttatggga

SEQ ID NO: 895442 - DNA, 120 bp, Artificial Sequence
  ENSG00000287967_5 (sequence is synthesized)
tttgtagttcctctgaatctcagccttcgtgttttgaaccacagagaattcctggctgttagaatatgtcaaactacaactcccagaagccctcgcgcgccatcaccttctccccgccct

SEQ ID NO: 895443 - DNA, 120 bp, Artificial Sequence
  ENSG00000287964_0 (sequence is synthesized)
aggctggagagcggggcgcgggcagtaggtacctgaagcgaggctcggccggaggcttcgggcagagatgtgctgctgtcagtcgggcaggccagctttagcggctcagccctgcaggtc

SEQ ID NO: 895444 - DNA, 120 bp, Artificial Sequence
  ENSG00000287964_1 (sequence is synthesized)
acttccagttatgggacttccgcccactttacagggctttgactcttgggtctgaagaaggcaccagcccctgctaaattctgagcattgacaccagtggaagcctcatcctcagacttg

SEQ ID NO: 895445 - DNA, 120 bp, Artificial Sequence
  ENSG00000287964_2 (sequence is synthesized)
gaagaagaactacgcacaaaaaaaaccattaggaagtatccaaatgccaagttttcacaaaacaattaacgaagtctatcccctgggtgtgatcatgctctaaaaggaagaaaaatgatc

SEQ ID NO: 895446 - DNA, 120 bp, Artificial Sequence
  ENSG00000287964_3 (sequence is synthesized)
gtccaagagacaggagaaaagcacgcttccggtgggaggacgtctgtttacagctcggggaagctatgacagcacaatgtggtgtggacacatgcgggaacgtggctggctgcccccacg

SEQ ID NO: 895447 - DNA, 120 bp, Artificial Sequence
  ENSG00000287964_4 (sequence is synthesized)
ggctgccagagctattttccagatatggcagcatccccaccaagccctgcccatctcagcacagccaaaagcccagacggggagcctgcatgtctggcctcgagccctgaccagcctccg

SEQ ID NO: 895448 - DNA, 120 bp, Artificial Sequence
  ENSG00000287964_5 (sequence is synthesized)
gcctccaagcgcctcctgaggcatctgcccttcacccccaggccacgccccaccctgtgtccactacattcttgtcccaccagcccctttgaagtctgcatctctgacagcaggttccaa

SEQ ID NO: 895449 - DNA, 120 bp, Artificial Sequence
  ENSG00000287964_6 (sequence is synthesized)
gactcttgggtctgaagaaggcaccagcccctgctaaattctgagcattgacaccagtggaagcctcatcctcagacttggaagaagaaggaaatggacttcgggtgagcctgctcctcc

SEQ ID NO: 895450 - DNA, 120 bp, Artificial Sequence
  ENSG00000287964_7 (sequence is synthesized)
tccacctcgccctgcgcccagcagtgagaggacaccagagccccgtccagcactgctgacagaagagcagaaggcagtgattgccatggcaacgcattaagagatgcggagccacctcca

SEQ ID NO: 895451 - DNA, 120 bp, Artificial Sequence
  ENSG00000287964_8 (sequence is synthesized)
gttttagcatctggaaaggggtcaagtctttggggcatagagtgggaagggaaattcactcccccagagtcttcatagctaacaaagccatggcacagtgcatgttacaaagccctttca

SEQ ID NO: 895452 - DNA, 120 bp, Artificial Sequence
  ENSG00000287964_9 (sequence is synthesized)
cacaagaaaactaggaagtggtatccccattttacagatcagaaaactagggtgggaatctcctgccaagccagtcagtggcagagctagtgtttgaatccagccttcctgatttcaaag

SEQ ID NO: 895453 - DNA, 120 bp, Artificial Sequence
  ENSG00000287964_10 (sequence is synthesized)
tcgatactcttgcttctctaatagttgcctgtcttgggtaaatgacagacaaggacccagagaccccagagtcctgctggtgtgagggtttgggagcacatgtgttggcccactctactt

SEQ ID NO: 895454 - DNA, 120 bp, Artificial Sequence
  ENSG00000287964_11 (sequence is synthesized)
gacacaatccatggcccactacacttggcacctatctggcaaggctcacacctgcacagatacacaagcagaaaagcttccaaaattgttcatgcatgcatgcatgttggacatgtagac

SEQ ID NO: 895455 - DNA, 120 bp, Artificial Sequence
  ENSG00000287964_12 (sequence is synthesized)
catccaaaggaagtgtacacacaaacagcctcacatgcacacacggatgcctgaacacacatattcaccaatatagacacatatgtctgcaaacacatacgcaggcacacactggtatat

SEQ ID NO: 895456 - DNA, 120 bp, Artificial Sequence
  ENSG00000287964_13 (sequence is synthesized)
acatggaagcagatgtaaaattaattgtcttcctggtcctgagtcatcacccctccacatacccacttcttttgacatatgactttgcaattcctctcttctgagagggaagatctattt

SEQ ID NO: 895457 - DNA, 120 bp, Artificial Sequence
  ENSG00000287964_14 (sequence is synthesized)
ccccatccactgaatccaggcttggcagtgtaacttgctctaaccaatgcagtattagcaaatatgatgcaagcagaaccttgaaaaagtgcttgtgtggttctgcttctgtctcttggt

SEQ ID NO: 895458 - DNA, 120 bp, Artificial Sequence
  ENSG00000287964_15 (sequence is synthesized)
ccttgccatcactgtgagaacatacttgggatgtaaaggaggagacacctggtgcagaggcaaggcacctcatttgccccagctgaggccatcctagatcagacagcccatggccaacca

SEQ ID NO: 895459 - DNA, 70 bp, Artificial Sequence
  ENSG00000287964_16 (sequence is synthesized)
agctgaggccatcctagatcagacagcccatggccaaccaccagaagtgggacccgaggtgggcggatca

SEQ ID NO: 895460 - DNA, 120 bp, Artificial Sequence
  ENSG00000287965_0 (sequence is synthesized)
ctgtcaaacttcatgccgaaaggagagtccgaggctcaggcttcaacacaggtctgggagatccctactgagactgcagagtaatatttttctagcctggcacagacctctcccaaaacc

SEQ ID NO: 895461 - DNA, 120 bp, Artificial Sequence
  ENSG00000287965_1 (sequence is synthesized)
agccgcagcatgtagccaactggcatttttaagtctggcaggttctaaacacctcagggtctgcaggacatcacatgaggggatccagtaacagtaatccagaggcaacggcagcactgg

SEQ ID NO: 895462 - DNA, 120 bp, Artificial Sequence
  ENSG00000287965_2 (sequence is synthesized)
aaaacagcttcagagaactgaagtcaccagtacattagcccactcatctgggtacaaagctgtctgtgcagtggatgaaagcaggtcttcagactcagaactattcagagaagttgtcct

SEQ ID NO: 895463 - DNA, 120 bp, Artificial Sequence
  ENSG00000287965_3 (sequence is synthesized)
taagggctctatttcaggaaaaaagaggcattatctagaaaggtcagtggttgaagacacatgagctgagctgcataacaatcacagtagcacacatgcgggtgaccagggaaatataca

SEQ ID NO: 895464 - DNA, 120 bp, Artificial Sequence
  ENSG00000287962_0 (sequence is synthesized)
cattccgttttctgtttatttaggattccttgctataaatgaattgtatgtatacagattgaggaaatgcttaagtattttcaaatttagtccagaaataaaaatgagtgccagtcaatt

SEQ ID NO: 895465 - DNA, 120 bp, Artificial Sequence
  ENSG00000287962_1 (sequence is synthesized)
cgttattttgggagaatttcagctttaaaatacatacatggggtttctatctggcaaatgaagaatgaaaattgagtgggaaacctagttaccagagtgaccatcctttacaagatgggt

SEQ ID NO: 895466 - DNA, 120 bp, Artificial Sequence
  ENSG00000287962_2 (sequence is synthesized)
tcttccagtgtggcaattgacttgaccactaacaacagcagagtttccagttgtttcactttctccggccaagagctattactttttctgaattcaaaaaaaatcccaggttgatgtata

SEQ ID NO: 895467 - DNA, 120 bp, Artificial Sequence
  ENSG00000287962_3 (sequence is synthesized)
tggtcacaaaagtgaacatgaaaaagatcacccattgaaagaaactggcgattcttagaaccagtatgcaatactcacttgagccctttgagctctctgctttcacgactcaccttttct

SEQ ID NO: 895468 - DNA, 120 bp, Artificial Sequence
  ENSG00000287962_4 (sequence is synthesized)
gttctgaaggatagaattgaaaacagtggttacattaccaaggctttgactgaagtatcgtatttgaggatgtgcatgaaacaactggcttcaatggttcctagcatcacagtgaatgat

SEQ ID NO: 895469 - DNA, 120 bp, Artificial Sequence
  ENSG00000287962_5 (sequence is synthesized)
tagaaactgtcacttcctggcaggcccggaaaactgtcacttcctagcaggcccggaaaactaaagaatgtgatgtagcctatacctttggcctcctgaacactgccctgaagttgccat

SEQ ID NO: 895470 - DNA, 120 bp, Artificial Sequence
  ENSG00000287962_6 (sequence is synthesized)
gttggaaaatcagccaagaacaaaaatctacctaggaggagaactgcagccattctagcagtacctgctaagtccattcccacgctgacctcctcagttgaatgcaacacacacgtgagc

SEQ ID NO: 895471 - DNA, 120 bp, Artificial Sequence
  ENSG00000287962_7 (sequence is synthesized)
tcaggtgaacataagaattacccaatcgatccacagaattataagatataataaacaactcattgttgcttaaggttttggtttataatattacacagctaaaagatattgatacctaga

SEQ ID NO: 895472 - DNA, 120 bp, Artificial Sequence
  ENSG00000287962_8 (sequence is synthesized)
agtgggatataataggtaatggacacagtctgatagatcttttgattgaataattacattatttgaaataatatattaaaatattcattgccaagggacactgaaaccttccatgtttcg

SEQ ID NO: 895473 - DNA, 120 bp, Artificial Sequence
  ENSG00000287962_9 (sequence is synthesized)
aaacattatggacactttgctatgtgcattctcatattttttcctttgaacaccaatctataaaacaattcttattttcttcatttcttgtatatttgagtttttcttctagcttttgtg

SEQ ID NO: 895474 - DNA, 120 bp, Artificial Sequence
  ENSG00000287962_10 (sequence is synthesized)
tttcaaataaatttcctttccttgtctgtgccagcttatcatatgtgcccatattgcctttcaaagttttctatggtttcttaaaagcaaggatgatttctgatgtgccttagcccccaa

SEQ ID NO: 895475 - DNA, 120 bp, Artificial Sequence
  ENSG00000287962_11 (sequence is synthesized)
tattctttccatccttcaccagtttaatgtttagaagcaaatgagccatttagataataatccctgttcttacttttttgccctgaggctcgttagtttgtatttcttttcacagaatct

SEQ ID NO: 895476 - DNA, 120 bp, Artificial Sequence
  ENSG00000287962_12 (sequence is synthesized)
agtcattgctttcatcaagtcaagttattgaaacagttttaaatttttttcccctttcttatgctcaccattctaacttcattttcactgaccctctgcttgggtctcattgccagacat

SEQ ID NO: 895477 - DNA, 120 bp, Artificial Sequence
  ENSG00000287962_13 (sequence is synthesized)
aattacatttctactttaggatagctgagtttaaaatccctggctctggaatcagaaccagcccctaccccttactagctatgggatcttggttaaataattaaccttctaaatttataa

SEQ ID NO: 895478 - DNA, 120 bp, Artificial Sequence
  ENSG00000287962_14 (sequence is synthesized)
cagaatattaataacaaaaaataacaatcattaagcaccgaccatgtgtttggtacttctgtatacaaatccatcaaattttctagtaaccctgtgaattgagtactgttaccattctca

SEQ ID NO: 895479 - DNA, 120 bp, Artificial Sequence
  ENSG00000287962_15 (sequence is synthesized)
ttttataaatgaggatcataggatgagagacagggatttacttatattggagttgttggaagtactgtggaaactagtttccagcgtcccatgtggcacatagagatcataaattatatt

SEQ ID NO: 895480 - DNA, 120 bp, Artificial Sequence
  ENSG00000287962_16 (sequence is synthesized)
tgcttaaaccagtcaaaaccatgatagtgaactctgaaattaagcagtattattcagtggttacagaacaagctgcccctggaacaaagaaactagaataatggaatgtttagtacatgc

SEQ ID NO: 895481 - DNA, 120 bp, Artificial Sequence
  ENSG00000287962_17 (sequence is synthesized)
atctggccacaaatatccaagggtttcctagtatattcttccaggcctgagtctggtaggtggtgtgacatgaagctaccaccattgcaaggatatatttgcttttgaagtataaacagt

SEQ ID NO: 895482 - DNA, 120 bp, Artificial Sequence
  ENSG00000287962_18 (sequence is synthesized)
aggaagaaacccttaacacacaattcactttcttctttctctagaaaaatatttgtgaactgttggcccctgcaagtcattattttcaagaaggcatagtttatattcaagagatgtctc

SEQ ID NO: 895483 - DNA, 120 bp, Artificial Sequence
  ENSG00000287962_19 (sequence is synthesized)
attacagaatatagcatggagccagatcgttagtaggccctcaatacatacttatcgaatgaaagaacaaataagttttagaccagtggtcagacaatttgaatgtgcattctgctttgt

SEQ ID NO: 895484 - DNA, 120 bp, Artificial Sequence
  ENSG00000287962_20 (sequence is synthesized)
ttttctactaaagatagaacttattaaaggttgttgggtttatttcaaataaaagggaagaataatccctgtcctatcctaataataggcatagcatgaaaattaaatgaaataatggat

SEQ ID NO: 895485 - DNA, 120 bp, Artificial Sequence
  ENSG00000287963_0 (sequence is synthesized)
tactgggatgttgtggtgaacaggataaacaagatccctgctcttacagatggtacaggcaagttggagagagaatgtatactgaagccaaaacaggataactccagctggcaagaagtg

SEQ ID NO: 895486 - DNA, 120 bp, Artificial Sequence
  ENSG00000287963_1 (sequence is synthesized)
ccaggaacagagtggacgaagcagggttacctggtggagagcgactggggctctttaaggtatatcgctttcagctcagaggcttacgttgaaagaggaagtttggagataaatgctctt

SEQ ID NO: 895487 - DNA, 120 bp, Artificial Sequence
  ENSG00000287963_2 (sequence is synthesized)
tttctcttcatgtcagtctggtgagatgccccttcaactctgtgaagccccttcaactctggcttgccctggctattgtactggcagagggactgccagggagatcttgtgacttatgtt

SEQ ID NO: 895488 - DNA, 120 bp, Artificial Sequence
  ENSG00000287963_3 (sequence is synthesized)
gagtatttattctctctggcaaaccagatggtcataacgaggagcctggcttctggatttgccagttaccttacaatgtagtggtcacatctcattacatctcaactcttacaccatgga

SEQ ID NO: 895489 - DNA, 120 bp, Artificial Sequence
  ENSG00000287963_4 (sequence is synthesized)
attccaggaagttctgaagccccaggagccttcaacatctgaaagcatttggatttaccattctgtttctcatccccttgtttggaggcctcctataccttgctgtgattgtgtgcttgt

SEQ ID NO: 895490 - DNA, 120 bp, Artificial Sequence
  ENSG00000287963_5 (sequence is synthesized)
gtgtgtgtgcgtgcgtaggaatgtgtgtgtgtgcatgcatgctttgctggtatgatggttctcagcacagtctactgccttacatccaagttctcccatttaagctggccctcttagtat

SEQ ID NO: 895491 - DNA, 120 bp, Artificial Sequence
  ENSG00000287963_6 (sequence is synthesized)
tttatcactgacattatttggaatttctggtgcatgctgataatacaatcagactgactcttattgtttttaaattctccaaaggccatgcccatgcacccctttattgcctgtacatag

SEQ ID NO: 895492 - DNA, 120 bp, Artificial Sequence
  ENSG00000287963_7 (sequence is synthesized)
gccttagggtcaaagtctctgcttggcggcatcctattcacccttcatgacccatcctgggctaggtttgatgctcctcctaccctgctttctctatcctatcacttatctgatatgttt

SEQ ID NO: 895493 - DNA, 120 bp, Artificial Sequence
  ENSG00000287963_8 (sequence is synthesized)
gtttaaccatctgttttccccctctctattttaagggatgtggaagcagagaatgtgtctgttttgctcaccatcacatctgcggagcctagcccaatgcctggcatggagtcaggatgc

SEQ ID NO: 895494 - DNA, 120 bp, Artificial Sequence
  ENSG00000287963_9 (sequence is synthesized)
aatcataatttgccacatggaggaataaatggttggcttgtcccgtgactggccactctctgtcttacttcctcatctgtaaaatcgagcactttctttacttacatcataagatttcca

SEQ ID NO: 895495 - DNA, 78 bp, Artificial Sequence
  ENSG00000287963_10 (sequence is synthesized)
aaaatcgagcactttctttacttacatcataagatttccatgaaggtgaaataaactgatgagcattttttgtaagtg

SEQ ID NO: 895496 - DNA, 87 bp, Artificial Sequence
  ENSG00000287963_11 (sequence is synthesized)
gctgggattacaggcgtgtgctaccacgcccggctaatttttatatttttttaagtagagatggggtttcgccggggtagtccgcgt

SEQ ID NO: 895497 - DNA, 120 bp, Artificial Sequence
  ENSG00000287963_12 (sequence is synthesized)
cggcctcccaaagtgctgggattactgatgagcattttttaaaagagtgcaaaaagaactgtataaaactgtgaggtggtaattgttacgtgtgctgttgagtggaaaggtgatgcctga

SEQ ID NO: 895498 - DNA, 120 bp, Artificial Sequence
  ENSG00000287963_13 (sequence is synthesized)
aattgttacgtgtgctgttgagtggaaaggtgatgcctgacgcatccctttggtttgttgttctttcctgctcttcagacacaaatatgtgtcagcatttaatcaatactgtctttccag

SEQ ID NO: 895499 - DNA, 120 bp, Artificial Sequence
  ENSG00000287963_14 (sequence is synthesized)
agggaagattgacagagacaagacttcctctctgctcctgtcagggtaatgggtgcctgttgagatgcttgtcttaatttacctaatagagggcagttgcctcttgcaaacttgttgttt

SEQ ID NO: 895500 - DNA, 120 bp, Artificial Sequence
  ENSG00000287963_15 (sequence is synthesized)
tggaatcctgggaaagtcatcaatctttgggcaactcacatttctatttttgttccagttatccagcagataataaataagtttttagttctgctaagtgctaatttgagaggcatctct

SEQ ID NO: 895501 - DNA, 120 bp, Artificial Sequence
  ENSG00000287963_16 (sequence is synthesized)
ttttatttattgggagaaaatacgaaagatgcagcctaagaaataatctgttggtgttgccgactcaccttttcaggtatatcgctttcagctcagaggcttacgttgaaagaggaagtt

SEQ ID NO: 895502 - DNA, 120 bp, Artificial Sequence
  ENSG00000287963_17 (sequence is synthesized)
acaattaaataggaaaatgctcagtgatctcaaggggtagacccaccccggtgccccatctgctcagtttaggcagagccattagacagtgctggggaaaatgtttatctctagtttaca

SEQ ID NO: 895503 - DNA, 120 bp, Artificial Sequence
  ENSG00000287963_18 (sequence is synthesized)
aagaaataatctgttggtgttgccgactcaccttttcaggcatcttcagaaagaagtattaaaactttcctagcgtgttaaattctgctacctcaccaacgacaacttggaccttgacct

SEQ ID NO: 895504 - DNA, 120 bp, Artificial Sequence
  ENSG00000287963_19 (sequence is synthesized)
aagcagggttacctggtggagagcgactggggctctttaagccatcttggactatgaggtaactttgaagatggaaaccaagtgcttgtatgatggagcagaaagagagaagcagcaaga

SEQ ID NO: 895505 - DNA, 120 bp, Artificial Sequence
  ENSG00000287963_20 (sequence is synthesized)
ggccctgatattcatgtgaagctggaccttccctggactgtgtacctcatatctcttttacctgggatagaaacaaatttctatcttttaaaacttccattatttgaggtttttagttaa

SEQ ID NO: 895506 - DNA, 120 bp, Artificial Sequence
  ENSG00000287963_21 (sequence is synthesized)
agcagccaagctgaatactgttgatccaagatgaaatatcaatttataaagcttttgatgtaagtaactaaacaaaacttatggaagcttcaacataggtacgtatttttcccacatgaa

SEQ ID NO: 895507 - DNA, 120 bp, Artificial Sequence
  ENSG00000287963_22 (sequence is synthesized)
acagtgcagaagtatgtggctgtttaatgatgtcatccagagcccaagttctctcaaccttctgttctttgacccttagaatattggccttaatcctaatgcttgacaactcatggctgc

SEQ ID NO: 895508 - DNA, 120 bp, Artificial Sequence
  ENSG00000287963_23 (sequence is synthesized)
aagatggctgctacagctctaggcattatgtccacagagcaagcaagaaggatgaggaagcaccaaagttctgctcctcacaggctttgtctttttatgtgggaagagaattcctcctga

SEQ ID NO: 895509 - DNA, 120 bp, Artificial Sequence
  ENSG00000287963_24 (sequence is synthesized)
gcctagttcccttaatatctcatacagaactgcatctcctatgtctgtggtgggatccaccttcttgaaatcaatgggtctctgttaaccactgaaatacactgggattctgttactagg

SEQ ID NO: 895510 - DNA, 120 bp, Artificial Sequence
  ENSG00000287963_25 (sequence is synthesized)
aaagaaggaagtggggagaggctgtggataggccacagacagtgaggaaagcaaggcttacaaatgctgcgacatgccaatattacatagccagtttgtggaaaactagattttgaatga

SEQ ID NO: 895511 - DNA, 120 bp, Artificial Sequence
  ENSG00000287963_26 (sequence is synthesized)
agcttgaacttccaaacctggggtcttaattgctatgacaaactctcaggaagttttcagacacctttactttcctttcttcaaattttgtttttagaatctctgtcagagattttctat

SEQ ID NO: 895512 - DNA, 120 bp, Artificial Sequence
  ENSG00000287963_27 (sequence is synthesized)
gggaagtcctaggtttcacagcatgtggaattgagagacaagaaagatcccttccaacttaagcttctagagcagctctgtctaatagaacttttgaaatggaaatgttctatgctgtgc

SEQ ID NO: 895513 - DNA, 120 bp, Artificial Sequence
  ENSG00000287963_28 (sequence is synthesized)
taatacagtaaccactacccacatgtggcgatttaggacctgaaatatggcaattgtgactgaggaatggaatttttaatttcatctaattttaatttaaatagccacatgtggctagta

SEQ ID NO: 895514 - DNA, 120 bp, Artificial Sequence
  ENSG00000287963_29 (sequence is synthesized)
gccactgtattgaacagcacagttccaaagcttcaaattatttgttctcaaaattctaagattcaacctaaatgctaagaatcaacaaaattccaccgccaaaacagaactttttgtttt

SEQ ID NO: 895515 - DNA, 120 bp, Artificial Sequence
  ENSG00000287963_30 (sequence is synthesized)
caagaagtaatggcccactgctgctttgtatgagatggtgttaaaggccagcagacataatagttttatgaaggaagttcagtgtggatataatcatgttataaataaatattggtacat

SEQ ID NO: 895516 - DNA, 120 bp, Artificial Sequence
  ENSG00000287963_31 (sequence is synthesized)
agaatctgcctgctaaaaatactgatttatggaacttcaagtttgcttacagcaaatcaagcttgtatttctgaagtgtcaggaggacagctctttggcccaagaagaaaaaacctacag

SEQ ID NO: 895517 - DNA, 120 bp, Artificial Sequence
  ENSG00000287963_32 (sequence is synthesized)
caagcagagctagagagtgggggcatgggttagcaggggaaagcagtgagtctcctattagttctgaggcagagctggtggtattattattgctacaaaagcctataatgactttcccct

SEQ ID NO: 895518 - DNA, 120 bp, Artificial Sequence
  ENSG00000287963_33 (sequence is synthesized)
gagccaatagtaagttcagatcttgttttctaggacccagttagtttaaatgctgtattgtgtgtgtgtgtatacacatacacacacacacacactttttttgatttattattttttaat

SEQ ID NO: 895519 - DNA, 120 bp, Artificial Sequence
  ENSG00000287963_34 (sequence is synthesized)
tctgtatattatgatgttttgagatctgtatgattatatcccccaaaaattcatattttggaatcctaaccccattagttattgagggtggagccctcataaatggcattagtgtacgat

SEQ ID NO: 895520 - DNA, 120 bp, Artificial Sequence
  ENSG00000287963_35 (sequence is synthesized)
tccctgcccaaatctcttgttgatttgtaatccccagagctagaggtggggcctggtgggaggtgtttgagtcatgggggcgaatccctcaaggcttggtgctgtcttcatgatagtgag

SEQ ID NO: 895521 - DNA, 120 bp, Artificial Sequence
  ENSG00000287963_36 (sequence is synthesized)
tttctgcaagatctggtcttttaaaagtgtgtggcacctcccttcaattctctttcttgctcctgattttgccatgtgacatgcctgctcccacttcaccttctgtcatgagtaaaagct

SEQ ID NO: 895522 - DNA, 120 bp, Artificial Sequence
  ENSG00000287963_37 (sequence is synthesized)
ctgctcccacttcaccttctgtcatgagtaaaagcttcccagagccctccccagaatcagatgctggtgccatgcttcctgtacagcccgcagagctgtgagccaattaaacctcttttc

SEQ ID NO: 895523 - DNA, 120 bp, Artificial Sequence
  ENSG00000287963_38 (sequence is synthesized)
aatgcaagaatggcctaagacagtgtccttataaaagaggcccaagagagaccatttgccccttccaccatgtgaggttatggtgagaaaaccagctttctgtgaagcagaagatgagcc

SEQ ID NO: 895524 - DNA, 120 bp, Artificial Sequence
  ENSG00000287963_39 (sequence is synthesized)
ttcccagcctccagaactgtgagaaataagtttctgttgtttataagtgttttggtttatggtatgttatagcagactgaatggactaagacagcatcttagaaaaacttttctggctca

SEQ ID NO: 895525 - DNA, 120 bp, Artificial Sequence
  ENSG00000287963_40 (sequence is synthesized)
atggactaagacagcatcttagaaaaacttttctggctcaggagtgactaaaccctccagggacttctcagagatagcaagtgttcagccaggagcgtgcctttgataggcaaactaacc

SEQ ID NO: 895526 - DNA, 120 bp, Artificial Sequence
  ENSG00000287963_41 (sequence is synthesized)
aatccagagccacccctcctgtctctggcctgtacacccaggagacaatactcctctgccgtaatcatcccagaaacaagtaccagccaactaggaccccatctccactatcatttagaa

SEQ ID NO: 895527 - DNA, 120 bp, Artificial Sequence
  ENSG00000287963_42 (sequence is synthesized)
cctgctaaaattattcagactcaccaaatgctaaactatttgccttgtcttgtctttcccatggaaaccccgacaaaagctctggtctagtgcctttcccttgatcctgtctcctgcctc

SEQ ID NO: 895528 - DNA, 120 bp, Artificial Sequence
  ENSG00000287963_43 (sequence is synthesized)
ctgaccctcctgatgtctttccattgtggtcctgggtgacatgccatgcttcctatctccaggacctatgaatataacaaattttgttttcctgagcctctcctctgtctcctcttgtgg

SEQ ID NO: 895529 - DNA, 120 bp, Artificial Sequence
  ENSG00000287963_44 (sequence is synthesized)
ctcctcttgtggccacatccaagttaccatatcacaaaagaaaatgaaacaaatgctttgccctaatattgtgtctaggccaggtgtggtggcattttgggaggccgaggcgggcagatc

SEQ ID NO: 895530 - DNA, 72 bp, Artificial Sequence
  ENSG00000287963_45 (sequence is synthesized)
taaaagaaaaaaaaaatatattgtgtctaaagagatgaggctattttaacatgagtccatcttatagcaact

SEQ ID NO: 895531 - DNA, 120 bp, Artificial Sequence
  ENSG00000287963_46 (sequence is synthesized)
agatgaggctattttaacatgagtccatcttatagcaactgaagtgaactgtaccttggaaaagcaagcaattttgtcttttgcatctgttaatttggttcaggaggaaaaaacacttct

SEQ ID NO: 895532 - DNA, 120 bp, Artificial Sequence
  ENSG00000287963_47 (sequence is synthesized)
gggtaatttagtttttttttttttttaatgttagattgctgaccagtgaacctacatcagagaaataaaacaaacctgttttagcttattagtattttctgtttcacaaatccattccct

SEQ ID NO: 895533 - DNA, 120 bp, Artificial Sequence
  ENSG00000287963_48 (sequence is synthesized)
tctattgacaacactaaaagcaaaatgaatgattgtaatggtgttgggatagtatgtactctgttattctctgctaggggaagggaagtttgagagtccatcctgggtagcctgactgtt

SEQ ID NO: 895534 - DNA, 120 bp, Artificial Sequence
  ENSG00000287963_49 (sequence is synthesized)
agacttggcatttggaaaaccccaaatggcatctaactaactaacttgtattgttttgggttttgactgatttccctgaagtttgtagcatgggtatttttataggatttttgtttattt

SEQ ID NO: 895535 - DNA, 120 bp, Artificial Sequence
  ENSG00000287963_50 (sequence is synthesized)
tgttttgctgtgccaggtttcccactcctaaaaaacaaaagggcatgattggcagcaggaactccgagcttcgcggtgcaccagggttgatagggtttggatgtttgtcccctccaaatc

SEQ ID NO: 895536 - DNA, 120 bp, Artificial Sequence
  ENSG00000287963_51 (sequence is synthesized)
tcgtgttgaaatgagattctcaatgctgggggtagggcctgctgggaggtgtttgggtcagggggtggattccttgtgaatggcttggtgctgtccctgctattatataatgagttcacg

SEQ ID NO: 895537 - DNA, 120 bp, Artificial Sequence
  ENSG00000287963_52 (sequence is synthesized)
tgagatctggttgtttaaaagcttgtagcacttcacccctcccacctcactccctctctcgtcatgtgatgcgcctactcccacttcaccttctaccatgactgaaagcttcctgaggcc

SEQ ID NO: 895538 - DNA, 120 bp, Artificial Sequence
  ENSG00000287961_0 (sequence is synthesized)
agggcacccagtggccgctgccaggctgagctatggagccagagcagctggaaacggcctcccgtgggccgagttaggcgagagagcctggtggtgaaaccgacctggggcccagcccta

SEQ ID NO: 895539 - DNA, 120 bp, Artificial Sequence
  ENSG00000287961_1 (sequence is synthesized)
tggagctcacagtctggtggggaagtctatgaaacaagtgtacagtcaccaattgtgataagctcaaaagagagaggtaaggtcgtggttacttggaaagaggtcaaacaaactttctga

SEQ ID NO: 895540 - DNA, 120 bp, Artificial Sequence
  ENSG00000287961_2 (sequence is synthesized)
gagtgtgcctgtttattgcctggaatgttatgaaaaccagcctcactgaaccttgacccaacataccgtgtttcatttctgcaaagttagtaatcagtaatgcaactggtggcccttgat

SEQ ID NO: 895541 - DNA, 120 bp, Artificial Sequence
  ENSG00000287961_3 (sequence is synthesized)
taatccattgagtcatatttaatttgcttttatgaactcttgggctttggagaaatgcctgcattctgttccagttagccatcatagtaccctggggatcccaaccctgcaataccagag

SEQ ID NO: 895542 - DNA, 120 bp, Artificial Sequence
  ENSG00000287961_4 (sequence is synthesized)
tgatttacccaggatgcctgcctctcacatcttttattttctgtcttatctccgttttggcgtttggaaagatgatttttgcaactcggtaattatatagtgttttgcttaggaaagaaa

SEQ ID NO: 895543 - DNA, 120 bp, Artificial Sequence
  ENSG00000260896_0 (sequence is synthesized)
agccgtctgtgaagcaaagtgcaagatttcatcagacactgaatctgctggggacttaatcttggagtttccagtctccagaattataagaaataaatttctattatttataaattaacc

SEQ ID NO: 895544 - DNA, 120 bp, Artificial Sequence
  ENSG00000260896_1 (sequence is synthesized)
aatctaaggttttcaggtgctggttccatggctcttcctgagccgaaaataaggaaactccatagaccttgtccactggaactcgttcccatctaccctccactctatccagccccatga

SEQ ID NO: 895545 - DNA, 120 bp, Artificial Sequence
  ENSG00000260896_2 (sequence is synthesized)
ggacaaggaacatgattggttttgctcactgccgtatcttccgtacctagtacgtaacaggacatcaataaatattagttgaatggaagattaaatcaacaaaatgggtgatggatctct

SEQ ID NO: 895546 - DNA, 120 bp, Artificial Sequence
  ENSG00000260896_3 (sequence is synthesized)
gcagtaagtggaagagttcttcatggcccccaaggttatatccatctagaacttcagcacgtaatttcatctggaaatagtgcctttgcggatataagttaggtaaaactgaagatgaga

SEQ ID NO: 895547 - DNA, 120 bp, Artificial Sequence
  ENSG00000260896_4 (sequence is synthesized)
tcatactggattaggatgggatctaaatccaatgaaaatgtcttcataaaaaacaggaaagaacccatagaaacacaaggaagaaggtcatgtgaagatggaggcagagattggagggat

SEQ ID NO: 895548 - DNA, 120 bp, Artificial Sequence
  ENSG00000260896_5 (sequence is synthesized)
gcagccaccggcccaggaatgccagcagccacccagaagctggaaggaaatgagggattctctcctagaacctttagagagaacatggtcctgtgaacagcttgattttggacttgccca

SEQ ID NO: 895549 - DNA, 120 bp, Artificial Sequence
  ENSG00000260896_6 (sequence is synthesized)
tagcttgtatactcttactttggatacaattttatccaaacttggctaaacagtttctcagcctatggaaaatttaaaatggagaagattcaactcgattcttacagattcaaagcaaga

SEQ ID NO: 895550 - DNA, 120 bp, Artificial Sequence
  ENSG00000260896_7 (sequence is synthesized)
aaatgatgggaacataggaggagaccaagaaagcctataaaaagcaaaaatatgaagtgaacattgtggtagctttaagatgtttagtgtagctgcaggcaccctatacacatgaaaacc

SEQ ID NO: 895551 - DNA, 120 bp, Artificial Sequence
  ENSG00000260896_8 (sequence is synthesized)
cccaaggggaatccccatatcacagtgtagtgtgatatttgacattcgtgatcatctagagatgtacagaaaaggtgaatctgtgttctgtatattctgcctaaggcaaagaaatgttta

SEQ ID NO: 895552 - DNA, 120 bp, Artificial Sequence
  ENSG00000260896_9 (sequence is synthesized)
taaatatttggataaatatgttatcttcttacttggacatttcatgtgtttagggattgtcttctaaattcttcctaattcatatagctgctaacacttcccgcagagctaaaccattac

SEQ ID NO: 895553 - DNA, 120 bp, Artificial Sequence
  ENSG00000260896_10 (sequence is synthesized)
agatatgaaataaagacctattgatttgacttacttttacttgtaaaaccttctgagtgttataacctcatttaatctttcagcatttacagtttcaagagtttgtgtcacaattagaag

SEQ ID NO: 895554 - DNA, 120 bp, Artificial Sequence
  ENSG00000260896_11 (sequence is synthesized)
aattcagctgcacctccaagtgacagcagttgctctggttggtgggtgatctcaggaggcttgagaattgctttgtctgtgagggaagtaagacattttcagagccccactttagaaggt

SEQ ID NO: 895555 - DNA, 120 bp, Artificial Sequence
  ENSG00000260896_12 (sequence is synthesized)
gtgaactggctagataatgaaccccagggctaacgctgctatagcagtgggaaggaggtgatgggttttcagtttggacctcaaacatcaataccctcctggtacggggaggaacagagt

SEQ ID NO: 895556 - DNA, 120 bp, Artificial Sequence
  ENSG00000260896_13 (sequence is synthesized)
ccctcctttacttctccattagaaagaatgagatggcaagacaatgaaacaggcaaagtgaacagagatgcaagacaaaattcaggtgagagagccagagcatcactcagccattcctga

SEQ ID NO: 895557 - DNA, 120 bp, Artificial Sequence
  ENSG00000260896_14 (sequence is synthesized)
catgtaaaacaggcaactagaaatttgcagaaaggaagcgaagtctccataaagatgtttttaaagtgagcttgaagtatttggagacaattcagtgttacataaaatctgcaaatctct

SEQ ID NO: 895558 - DNA, 120 bp, Artificial Sequence
  ENSG00000260896_15 (sequence is synthesized)
ggataaagaagcagagatcccagcatgggacaaatggagcctcaaaagtgggaagaagacagagaagaccagggcagaatgcatctcttcctttctcttggctttcctggataaggactg

SEQ ID NO: 895559 - DNA, 120 bp, Artificial Sequence
  ENSG00000260896_16 (sequence is synthesized)
catcattcctgtggaaggacaggccatcagctccgaaacactgtatgtattttccagtatatactgctagctgtgtgatgttgggaaaatttgttaccctgtctaacccccacttccctc

SEQ ID NO: 895560 - DNA, 120 bp, Artificial Sequence
  ENSG00000260896_17 (sequence is synthesized)
atctgtaaaatggaaataatgatagtacctacctatctcataggtggcaactacaaggggcagcacactcagggaattaaggaagtttcagtgaacatcaactttatgaacacagtgttc

SEQ ID NO: 895561 - DNA, 120 bp, Artificial Sequence
  ENSG00000260896_18 (sequence is synthesized)
ataaaggcaggtcagtgcagtggtttgggagccaggagaagcacgtgggccggagtgtgcctgcaggagacaaggtcagagatgttgctaataatggagaataaaggatgcattctcatt

SEQ ID NO: 895562 - DNA, 120 bp, Artificial Sequence
  ENSG00000260896_19 (sequence is synthesized)
tttttttttttttttttttttagtccattcagccactgtatgtcttttgattggagcatttaattcatttacactcaattaatgataggttttcaggtgctggttccatggctcttcctg

SEQ ID NO: 895563 - DNA, 120 bp, Artificial Sequence
  ENSG00000260896_20 (sequence is synthesized)
tcaaaaaaaaaaaaaaaaaaaaaggtgcatatcactacctgtattggcttgtttaatggcttacttagtgtcttagtccgttgtgttgctataaaggaacacctgaggttgggtaattta

SEQ ID NO: 895564 - DNA, 88 bp, Artificial Sequence
  ENSG00000260896_21 (sequence is synthesized)
gaaaagaagtgaagcatggccagcatttgcttctgggtgatggatctctgcagtaagtggaagagttcttcatggcccccaaggttat

SEQ ID NO: 895565 - DNA, 120 bp, Artificial Sequence
  ENSG00000260896_22 (sequence is synthesized)
actgttcagctcccagttatccatgagaacagggaatcttaccaggacatgcccaagtctcctggatccagccccaagtctcatctttcctcttatttgtccaccattttgcttgatcca

SEQ ID NO: 895566 - DNA, 120 bp, Artificial Sequence
  ENSG00000260896_23 (sequence is synthesized)
gtctccagaattataagaaataaatttctattatttataaattaaccaatctaaggtattctgtttagcagcccgaataatggactaagacagacgcctaacatatgatctatcctagat

SEQ ID NO: 895567 - DNA, 120 bp, Artificial Sequence
  ENSG00000260896_24 (sequence is synthesized)
aatgctctcttcgcattcaggaagaatgtatattctgcttctgaatggaaaaaaacaaaatcaggatcaggcacggtggcgcataaggccaggagtttgagacgtctaggcaacacagca

SEQ ID NO: 895568 - DNA, 120 bp, Artificial Sequence
  ENSG00000260896_25 (sequence is synthesized)
agatccatttggtccaaagtgagattccagtgtttcctccagaaaggcacattattcctccaccatggtcttctttttcctgtgtaccttgaccctgtaggagatgagacttctaaagtg

SEQ ID NO: 895569 - DNA, 120 bp, Artificial Sequence
  ENSG00000260896_26 (sequence is synthesized)
gggtctttcctgagccgtttctcgtgagagtgaatagttctcacgagatctgatggttttaaaaacgggagttgcgttgtacaagctttctttttgtttgctgccttccgtagaagatgt

SEQ ID NO: 895570 - DNA, 120 bp, Artificial Sequence
  ENSG00000260896_27 (sequence is synthesized)
tgggtcatttcatgaatgtcacacaaatgggatcatgcagtatgtggccatctgagattgactctcttcccacagcataatgcccttgacatccatccaagttactctcactctcgggct

SEQ ID NO: 895571 - DNA, 61 bp, Artificial Sequence
  ENSG00000260896_28 (sequence is synthesized)
tgcccttgacatccatccaagttactctcactctctaattctcatgcctcagcctcccaag

SEQ ID NO: 895572 - DNA, 120 bp, Artificial Sequence
  ENSG00000260896_29 (sequence is synthesized)
ttaagattatttttttcacaaaactttgaagacatatcttcttatcttctggcttctgttgttgttcatttacagtaaggattattgaaggccagtttacatgcagtaaaattcagctca

SEQ ID NO: 895573 - DNA, 120 bp, Artificial Sequence
  ENSG00000260896_30 (sequence is synthesized)
tattattgtattgctgcctatttctctctttgtgtctgttaatatttgccttacatattttggttctctggtgttgggcacatatatatttacaattgttagtcctcttgatgaattaac

SEQ ID NO: 895574 - DNA, 120 bp, Artificial Sequence
  ENSG00000260896_31 (sequence is synthesized)
tcctttatcattatataatgatctactttgtctgtttgtcaatttttgacttagtctattttgtgtgatataaatatggctaccttgctctcttttgttttctttttgcatggaatatct

SEQ ID NO: 895575 - DNA, 120 bp, Artificial Sequence
  ENSG00000260896_32 (sequence is synthesized)
ttttcactttcagtttacatgtgtccttaaagctgaagtgagtctcttgtaggtagcatatagttgaggggaggggggtcttcttttttttgttgttgctgtttgtttgatagggtctta

SEQ ID NO: 895576 - DNA, 120 bp, Artificial Sequence
  ENSG00000260896_33 (sequence is synthesized)
atctgtcacccaggttggagtgcagtggtatgatcacagcttactgtaaccttgaactcctggactcaagcaattctcttgcctcagcctcccgggtagctagaggtacaggcatacacc

SEQ ID NO: 895577 - DNA, 88 bp, Artificial Sequence
  ENSG00000260896_34 (sequence is synthesized)
gagctaattattagagaaagggtctcattgtgttgcctagactggtctcaaactcctggcttcaagccatcctcctgccttggcctcc

SEQ ID NO: 895578 - DNA, 67 bp, Artificial Sequence
  ENSG00000260896_35 (sequence is synthesized)
gctgccattttgttaaacctcgttttcttcccagtctcagggtgatggatctctgcagtaagtggaa

SEQ ID NO: 895579 - DNA, 120 bp, Artificial Sequence
  ENSG00000260896_36 (sequence is synthesized)
agaggaggaccttcacttcttctgggtagttgtacctttggataactgagaggccagaacactcagattgaggatgcgctgaacatgtatgatagaataggtacaaactgaacactcagt

SEQ ID NO: 895580 - DNA, 120 bp, Artificial Sequence
  ENSG00000260896_37 (sequence is synthesized)
ggagtttgagacgtctaggcaacacagcaagatccatttggtccaaagttggagtgcagtggtatgatcacagcttactgtaaccttgaactcctggactcaagcaattctcttgcctca

SEQ ID NO: 895581 - DNA, 120 bp, Artificial Sequence
  ENSG00000260896_38 (sequence is synthesized)
aggaaccaggcaggagtcagaggggaagatgggcactgaaggtatcaaaatacccaaaagatgcaaattgctaaaggaaacaataatcagattaggtgtggtgaaagacctggaaaaaaa

SEQ ID NO: 895582 - DNA, 120 bp, Artificial Sequence
  ENSG00000260896_39 (sequence is synthesized)
ctattccagttgtgcctcattctgtgacctagaccgaagaggaagcctctactctgagctcctggaagagagacaaagagcaacagtgggagcgtgcaatggcatatagaacttctacta

SEQ ID NO: 895583 - DNA, 120 bp, Artificial Sequence
  ENSG00000260896_40 (sequence is synthesized)
tactggggtatttgtcacttctgttcacatttcattggccaaattaagtcacatggctaagcctgatgtcaatgaggcatggaattgtaatctcattgaaaaggcagctcataattcaga

SEQ ID NO: 895584 - DNA, 120 bp, Artificial Sequence
  ENSG00000260896_41 (sequence is synthesized)
actaagtacaatctaccttatttttagagtagggcctaactttatattttcccaaatacttagctaattgcttcaatactatttgttaataacctgattttttacactactctgtgatac

SEQ ID NO: 895585 - DNA, 120 bp, Artificial Sequence
  ENSG00000260896_42 (sequence is synthesized)
cacttttatcccatatcacattctaataggtccttcttcctgttcctaaactttgtgttgggtttcactgagcaccaggacagttagtgctttttaaggcagatagggtaaggcccactt

SEQ ID NO: 895586 - DNA, 67 bp, Artificial Sequence
  ENSG00000260896_43 (sequence is synthesized)
cagttagtgctttttaaggcagatagggtaaggcccactttatttcccttcatttaaaaagagtctt

SEQ ID NO: 895587 - DNA, 120 bp, Artificial Sequence
  ENSG00000260896_44 (sequence is synthesized)
ccccgtctctactaaaaattagctgggcatgttgttgcccggctgaggcacgggaatcacttgagcctgagaggtgtaggttgcattgagctgagatcgtgccacttgcactccagcctg

SEQ ID NO: 895588 - DNA, 82 bp, Artificial Sequence
  ENSG00000260896_45 (sequence is synthesized)
gccacttaaataaataaatagtcttgggtattctctatttactattctagttgaatttttgaaaacctgtattcattccaaa

SEQ ID NO: 895589 - DNA, 120 bp, Artificial Sequence
  ENSG00000260896_46 (sequence is synthesized)
ggcggaaggcgaaggagagctgcatcacatggcgacaggaaagaacagagaggaggaggtgctaggctttttcttagtacccagatcttgcctgaactaatagagtaagaactcactcat

SEQ ID NO: 895590 - DNA, 120 bp, Artificial Sequence
  ENSG00000260896_47 (sequence is synthesized)
actgttcagctcccagttatccatgagaacagggtgagattccagtgtttcctccagaaaggcacattattcctccaccatggtcttctttttcctctgccagataaagtgcagaacaac

SEQ ID NO: 895591 - DNA, 120 bp, Artificial Sequence
  ENSG00000260896_48 (sequence is synthesized)
gttcagctcccagttatccatgagaacagggaatcttaccaggacatgcccaaattggtatcattgctcatggtaggtctcctggatccagccccaagtctcatctttcctcttatttgt

SEQ ID NO: 895592 - DNA, 120 bp, Artificial Sequence
  ENSG00000260896_49 (sequence is synthesized)
ttttttttttttttttttagtccattcagccactgtatgtcttttgattggagcatttaattcatttacactcaattaatgataggtctcctggatccagccccaagtctcatctttcct

SEQ ID NO: 895593 - DNA, 120 bp, Artificial Sequence
  ENSG00000260896_50 (sequence is synthesized)
actggagggtaaatggctcattacccacctccatgattctggaggcgaaggcacttgtagctccaccgttagccagctggataacaggcccatgtctgtcctggccaagcctgttttgct

SEQ ID NO: 895594 - DNA, 120 bp, Artificial Sequence
  ENSG00000260896_51 (sequence is synthesized)
gtctggttgcttcggccaagaagccttcccagaaccgtgccctccttcctcatgcctgtgctttctgtgttgtatttctttgtattttctttttgcttataattttctccccccactgta

SEQ ID NO: 895595 - DNA, 75 bp, Artificial Sequence
  ENSG00000260896_52 (sequence is synthesized)
tcttcctcattttctcttgctgctgccattttctgtacgtgaagcatggccagcatttgcttctggtgagggcct

SEQ ID NO: 895596 - DNA, 120 bp, Artificial Sequence
  ENSG00000287968_0 (sequence is synthesized)
ctaaatgatctcagagaagtgtcagaagaactgacagccaccatatgtgagttgccctatggagaatgccacatggcgagaaactgaaggggacctctgatccatagcccttaaggaact

SEQ ID NO: 895597 - DNA, 120 bp, Artificial Sequence
  ENSG00000287968_1 (sequence is synthesized)
tccatagcccttaaggaactgagaacttcggtccaacagtccacaaaaagttgaaatcctgtcaacaaccaagctcagaggcagaagaaggaacttgccttgtctcagatgagattttgg

SEQ ID NO: 895598 - DNA, 73 bp, Artificial Sequence
  ENSG00000287968_2 (sequence is synthesized)
agaggaatgatatggtttggttgtgtccccacccaaatttcaacttgaattgtagctcccagaattcccatgt

SEQ ID NO: 895599 - DNA, 79 bp, Artificial Sequence
  ENSG00000287968_3 (sequence is synthesized)
aatgatatggtttggttgtgtccccacccaaatttcaacttgaattgtagctcccagaattcccatgtgttgtggaagt

SEQ ID NO: 895600 - DNA, 120 bp, Artificial Sequence
  ENSG00000287968_4 (sequence is synthesized)
ggtttccgcttttgcttcttcctcattctctcttgctgccgccatgtaagaagtgccttttgccttctgccatgattgaccttctccagccatgtggaactgtaaacctctttctattgt

SEQ ID NO: 895601 - DNA, 90 bp, Artificial Sequence
  ENSG00000287968_5 (sequence is synthesized)
cattgctcgtacagtttcatgtaaagatttagtatactgtataattgctttggtcatttaaatttgcagcctaataggttcaaggaccaa

SEQ ID NO: 895602 - DNA, 120 bp, Artificial Sequence
  ENSG00000287968_6 (sequence is synthesized)
tggtcatttaaatttgcagcctaataggttcaaggaccaaaaataatattcttaaatgtatagattaactggccactaactcatataactatatgtaatagaattatttccttgatttac

SEQ ID NO: 895603 - DNA, 69 bp, Artificial Sequence
  ENSG00000287969_0 (sequence is synthesized)
aactagcttccttgatcctcagcttgcagacggactattgtgggacttcaccttgtgatcatctgctaa

SEQ ID NO: 895604 - DNA, 120 bp, Artificial Sequence
  ENSG00000287969_1 (sequence is synthesized)
acggactattgtgggacttcaccttgtgatcatctgctaaaatgctggtttcaacctgtaaagatttctgggccccaccagtcagcacgtctcacggtcttcacagccccagattccggg

SEQ ID NO: 895605 - DNA, 120 bp, Artificial Sequence
  ENSG00000287969_2 (sequence is synthesized)
agacaatgcatctaaaacgaacagcggctgggaacggtggaggataccttcacgatagttgcttccagagaaaggcatgcaagtctaattttaatggaaaaagaataggctctaaagcag

SEQ ID NO: 895606 - DNA, 120 bp, Artificial Sequence
  ENSG00000287969_3 (sequence is synthesized)
ggctggctgcatcacacctgatctgtctagagcgctcttatttcagtcccagagaggaagcgcccagccccggactacagagctgtgaatgaacccacgcagggcgagtggagaatttat

SEQ ID NO: 895607 - DNA, 120 bp, Artificial Sequence
  ENSG00000287969_4 (sequence is synthesized)
tccaggggttagctggtgattaggacaccgtgcaaggggtggggcttgctatgcctagagcagcccgcttgagctcagctccctagctagcacctttacaaaggatggagagacggaatc

SEQ ID NO: 895608 - DNA, 120 bp, Artificial Sequence
  ENSG00000287969_5 (sequence is synthesized)
aggcagccttgttagggaaaggaaagactgtcagtccccccactggcttctttcccttggggatatttgttctgccctctttgtattgttcatttctcctgccatgttgacctggatatg

SEQ ID NO: 895609 - DNA, 120 bp, Artificial Sequence
  ENSG00000287969_6 (sequence is synthesized)
ggatgtagcatctattaaagattcttatttgaatttgaattattttatttgaattttgaaataagattcccatccccctttttaatctttctactcccagaagcagctaggatagtggtt

SEQ ID NO: 895610 - DNA, 120 bp, Artificial Sequence
  ENSG00000287969_7 (sequence is synthesized)
tttagtccaaacctatgtaagttaatgagttaacataacaacaaaaaactcataatttttctaattgggcaattaaaaactttaccaaaacttggaaataatggggaagagcatgacctt

SEQ ID NO: 895611 - DNA, 120 bp, Artificial Sequence
  ENSG00000287969_8 (sequence is synthesized)
tcaatgtcaaactgagacatcggttaacaagtccacccaggggccagttaattctccagttgtgtttggctttgctcttcactattgattagattccagccacagtgaagttctgtggtc

SEQ ID NO: 895612 - DNA, 120 bp, Artificial Sequence
  ENSG00000287969_9 (sequence is synthesized)
acttgcacattttattcagcctgttcagagaaaaagataatcgcagcgtttatgattttattgcaatataggaagataaccaattttgcatctaaccaaataatcattttgcatctaacc

SEQ ID NO: 895613 - DNA, 120 bp, Artificial Sequence
  ENSG00000287969_10 (sequence is synthesized)
aaactttctttctaaatacctgtaaatccacagatcctcaaaatgcttttggaaccagcttcatcatcttacagttttccccattaataagtgaatagatctctgctgcctgcctatgtt

SEQ ID NO: 895614 - DNA, 120 bp, Artificial Sequence
  ENSG00000226143_0 (sequence is synthesized)
atcagttgttcaagtttatttatgttgttttgatacactgacagatcacaccacattttgtttgtaactttttctccttcaagagtcaccttagcttaagccagaagattctcttaaaga

SEQ ID NO: 895615 - DNA, 120 bp, Artificial Sequence
  ENSG00000226143_1 (sequence is synthesized)
acacatacacacatgtgcacacacaagaggcaagtacaaaaatgtaaccccaccaaagtgcatgtgaatgaaagtgcaaaaaaggcttcatttgcaaactctgagatcattctctctgct

SEQ ID NO: 895616 - DNA, 120 bp, Artificial Sequence
  ENSG00000226143_2 (sequence is synthesized)
tgggctgatcaggggctgggcgaggctgccaggggccaaaatataagtggcatctgttgctaggagggcaggtttggcagtgactcagtggaagctgggttcctatgtggactgagaagt

SEQ ID NO: 895617 - DNA, 120 bp, Artificial Sequence
  ENSG00000226143_3 (sequence is synthesized)
ggaagtcccagagccccagcagggacccagctggcagtgcaagacagatggagagcggcaaggagggcttcagggacccggagaattcagatagaaaagttcaccttcctaactcccaac

SEQ ID NO: 895618 - DNA, 120 bp, Artificial Sequence
  ENSG00000266389_0 (sequence is synthesized)
cggctctgacccgccagccctcggaagaagcagaccctggccggtccatggcagtggcccgaggggcaccagcgcggagcaccagcgacccccaaggaacgacgttgcagatgatgctct

SEQ ID NO: 895619 - DNA, 120 bp, Artificial Sequence
  ENSG00000266389_1 (sequence is synthesized)
tgcgcttcctatgcctcctttccctcgtttaaaaaatggggataagaaggttggctactgctccgacagccctcacaatggaagagtagcacttcatttgtgggttaacaaagggcaacg

SEQ ID NO: 895620 - DNA, 120 bp, Artificial Sequence
  ENSG00000266389_2 (sequence is synthesized)
ctgaaatctccacttccactattgaatggaactgtgtcataatatctgttagaggcgtgcaaactcggccacaaggtcatggtcatacgttattgttggtcaaaagccgcagccctacct

SEQ ID NO: 895621 - DNA, 63 bp, Artificial Sequence
  ENSG00000261765_0 (sequence is synthesized)
tgcctcaacctcctgagtagctgagattacagacatgcatcaccacgcccagctagtttttgt

SEQ ID NO: 895622 - DNA, 65 bp, Artificial Sequence
  ENSG00000261765_1 (sequence is synthesized)
tggccatatttttaaaaatattaatagagcctgcatttcattacctttccacttggtgattccac

SEQ ID NO: 895623 - DNA, 120 bp, Artificial Sequence
  ENSG00000261765_2 (sequence is synthesized)
agagcctgcatttcattacctttccacttggtgattccacacacatataggaaatccaaagtgtgatattcattcactgcttccgtgaataaaacaactacttgattagaaaaaaatgac

SEQ ID NO: 895624 - DNA, 120 bp, Artificial Sequence
  ENSG00000232855_0 (sequence is synthesized)
ttgacctgggacttcccagtttccagaactgtgagaaataaattttttatgatttacccagtctaagatattttgtgacagcagcaggaatggactaacatactgggtctagcaaagagt

SEQ ID NO: 895625 - DNA, 120 bp, Artificial Sequence
  ENSG00000232855_1 (sequence is synthesized)
ccctcaaaaggcaaagatgaagtacaggagaaatacatggatcacaggcaagatccaaagctggctgcagtctctgaggcctgagcctcccgtgaaggctcttgcccctccttgttccat

SEQ ID NO: 895626 - DNA, 120 bp, Artificial Sequence
  ENSG00000232855_2 (sequence is synthesized)
acatctttcttcttcatagcaagacactcccattaagcccaaaagcccagagtgcaactcagatatacaatatattacctgttgcatcactttctttgatatagtttgactctgtgtccc

SEQ ID NO: 895627 - DNA, 120 bp, Artificial Sequence
  ENSG00000232855_3 (sequence is synthesized)
ccaaagcattgggattacagggagaaaagaatgggaactgtgaggaaaagaatgacatgaacaatgggaagaccaaggtcccagcacaagtagtagatgctgaggaaagaagaagtatgt

SEQ ID NO: 895628 - DNA, 120 bp, Artificial Sequence
  ENSG00000232855_4 (sequence is synthesized)
tgtggagtacacgaatcacctggagaggctggtgaaaagtagctctgagtcactagatctggcctctaccccaccgtgttcccagcgggtgcagatgctgctggtgccaggaccacactg

SEQ ID NO: 895629 - DNA, 120 bp, Artificial Sequence
  ENSG00000232855_5 (sequence is synthesized)
ctcatcaagaagtcagcatcctgcaagaatcagccacccatgccacactttctatagtaacttctgttctgcatcagactacatcactctggctttctgagggcactattccaggccagt

SEQ ID NO: 895630 - DNA, 120 bp, Artificial Sequence
  ENSG00000232855_6 (sequence is synthesized)
gctctgggaggaattacccagaatccctgtagaagccactactgatgtcagctacaagaggaagggaacccaagtggacttcagccagaacaaagctctgtcacatgttggaattttact

SEQ ID NO: 895631 - DNA, 120 bp, Artificial Sequence
  ENSG00000232855_7 (sequence is synthesized)
gaacttgaacaaattattcttcagaaaaagtattttaaagtcaaaagactcctagatgatttctaggtcttttgcagcattaacttcctttgaatcaatgccttcaatgattatttaaaa

SEQ ID NO: 895632 - DNA, 71 bp, Artificial Sequence
  ENSG00000232855_8 (sequence is synthesized)
aaaaataattagttgctcactgcctaaccaataaatgttagtgtactgggcagggaagggaaagagaagaa

SEQ ID NO: 895633 - DNA, 120 bp, Artificial Sequence
  ENSG00000232855_9 (sequence is synthesized)
taaatgttagtgtactgggcagggaagggaaagagaagaattaggttgatgtaattcatttattatctggaagctcaatagggaatgtgacatgaatgaatttaagcaagtctgggcata

SEQ ID NO: 895634 - DNA, 120 bp, Artificial Sequence
  ENSG00000232855_10 (sequence is synthesized)
ttgggaggcaattctccatgtatgtcttgcaaataaaggcattggtgatgatcactctgtcttttcgaggatgttggtagagcaaacagcttttgaagatagagatgatttctctctctg

SEQ ID NO: 895635 - DNA, 120 bp, Artificial Sequence
  ENSG00000232855_11 (sequence is synthesized)
aaggaaaaggtgtttgtctactttgcagtctaataaatacaatgtcttcatctggggcaaacgttgggtttcttttctgcacctctattaaaaactggggttttgccagcaaggggttgc

SEQ ID NO: 895636 - DNA, 120 bp, Artificial Sequence
  ENSG00000232855_12 (sequence is synthesized)
tcatctatgatgcaaacccattgtgtgtgctgtatccacctgggaaaatatgaagataaggatgctcattgtgccttcagtaataaagtcttttctctttgatctaggagtccagtgtct

SEQ ID NO: 895637 - DNA, 120 bp, Artificial Sequence
  ENSG00000232855_13 (sequence is synthesized)
tcagcccatcacgttgaagctgtgggggctaatatgttagcttgcaagtggcttaatatctcatagtcttcattcttgataaagcttccctagtttctcatgggagaagggcctactggg

SEQ ID NO: 895638 - DNA, 120 bp, Artificial Sequence
  ENSG00000232855_14 (sequence is synthesized)
attatggagtcagagaaagtgatgcacagagttagtcattggaagctgcacacattctaaatccagcaatcactgtcctgagtgaacatgaagttctgcaattactcagtgatcacaaag

SEQ ID NO: 895639 - DNA, 120 bp, Artificial Sequence
  ENSG00000232855_15 (sequence is synthesized)
gtcctcaaagctaacactactcacgaagatggtgtgagttacattggctgacaagctccagccatggacgcaattccttctagaagcaaaatttatctctagactcctcctgtattttaa

SEQ ID NO: 895640 - DNA, 120 bp, Artificial Sequence
  ENSG00000232855_16 (sequence is synthesized)
tttagccacttttttagggcctacaattttagatctccacagggctcttgaaacttcttgaacctcatcagtaacatgtccattagtggcatgacccaagagttctagaacatctattca

SEQ ID NO: 895641 - DNA, 120 bp, Artificial Sequence
  ENSG00000232855_17 (sequence is synthesized)
gcaagtgtgtatctgaaaactgatcacctctgatgaattagaacggaatgaccaagctttgggagaggcaaaagaatttcggtgttaaagactcagagtttaagaagcaacaaaaagatt

SEQ ID NO: 895642 - DNA, 120 bp, Artificial Sequence
  ENSG00000232855_18 (sequence is synthesized)
tgctctgctcaggaccatcactctgcctgcctggggcggaactggattttttcccctggattcttttcttgttgggagtgagtgcaaagccttccatctatccctggctacaagctgaaa

SEQ ID NO: 895643 - DNA, 120 bp, Artificial Sequence
  ENSG00000232855_19 (sequence is synthesized)
ggctgggcacagttaaaagtttctactttgcttcagggtgtaaatctgggtccatacaggtgctctccgctgtatggtaggctacttgaggggccatgagctttcttctccattttctca

SEQ ID NO: 895644 - DNA, 120 bp, Artificial Sequence
  ENSG00000232855_20 (sequence is synthesized)
tccattttctcaactttggccagaaacacagccagctgagacacatttcctcctggatatccttgttgcgggaagtcagggatccaaaacagagggaccagctgaagccatggcagaaga

SEQ ID NO: 895645 - DNA, 70 bp, Artificial Sequence
  ENSG00000232855_21 (sequence is synthesized)
atacccctgagggtaggtctctgaaatagcccccttgggtgtggccgtcttctatggtcgaaactgtagg

SEQ ID NO: 895646 - DNA, 85 bp, Artificial Sequence
  ENSG00000232855_22 (sequence is synthesized)
gaaagagaatgtacccctgagggtaggtctctgaaatagcccccttgggtgtggccgtcttctatggtccaggtctcccaggctt

SEQ ID NO: 895647 - DNA, 120 bp, Artificial Sequence
  ENSG00000232855_23 (sequence is synthesized)
gtggggcatcatggaaactaccgacatgtgatgtctccccccggatgcccagctttagaatttctctcttttgtactcagtccctttatttctcaaaccagccaacgcttagggaaaata

SEQ ID NO: 895648 - DNA, 120 bp, Artificial Sequence
  ENSG00000232855_24 (sequence is synthesized)
gggaggcaaagagaacaaactggcttaataataatggtgcactgcacagtataatgaaggggaggtggtgatgttccaggctgctctgaagagtccatttagagtgggatgtctacttta

SEQ ID NO: 895649 - DNA, 120 bp, Artificial Sequence
  ENSG00000232855_25 (sequence is synthesized)
agatttatgtgatttttttcttatcttgatgtataataataagaattagctgcaaaaagctacaagaaaggttgcataagtgcatacattcttttcgagttctgcttcctgtggtagttc

SEQ ID NO: 895650 - DNA, 120 bp, Artificial Sequence
  ENSG00000232855_26 (sequence is synthesized)
ttcacttttaatgatgagttgctgaagcaggcactcattcttttattgcatcatttattcttgttatctggggaagtaacaatgacaagctttcctaagtaacagcccaactcttatttg

SEQ ID NO: 895651 - DNA, 120 bp, Artificial Sequence
  ENSG00000232855_27 (sequence is synthesized)
tggccccttttcctatgtcaatattaggatcattctatcaacgaagaggtcctattacctaggaaaccatgaaaggtaagacctatgatcacaggtgcttacatgcatgcaaatgtaaaa

SEQ ID NO: 895652 - DNA, 120 bp, Artificial Sequence
  ENSG00000232855_28 (sequence is synthesized)
tttttgtaagaaaaaaagtagaggaaatgggagataatttagtgtgctggaaagttatagaatttgatatcttgttttgcatagatgatgcattgtaggagtgacattattgtgaaactt

SEQ ID NO: 895653 - DNA, 120 bp, Artificial Sequence
  ENSG00000232855_29 (sequence is synthesized)
tgttcagtcggttttccttcaagcgattttggtgcagtttttccaatccagtgttaagggcatgacgatgtatttttcacaagcttgtctaagaggaaactctgacagattatgatgagg

SEQ ID NO: 895654 - DNA, 120 bp, Artificial Sequence
  ENSG00000232855_30 (sequence is synthesized)
aaaactaaatccactcatgtcatgtaaacacatagaagacttctcagtggggtctctgccttgtacctcagatgccaagggggagtttgagatttgtcaagttgttgacaactgccttag

SEQ ID NO: 895655 - DNA, 120 bp, Artificial Sequence
  ENSG00000232855_31 (sequence is synthesized)
tccattttgtgctgccataacagaatgacacggatgtggtaatttataatgaacagaaatttacttcttgaggctgggaaatccaaggttgaggtgccagcatctggcaagggctttctt

SEQ ID NO: 895656 - DNA, 120 bp, Artificial Sequence
  ENSG00000232855_32 (sequence is synthesized)
attgtgtcatcatatggtggaaggcagaatgtcaagagagaaggaggaaaccaattttacccttttataaaggcacccattccacatgtaagggtgaagccctcatggcctgccaccttt

SEQ ID NO: 895657 - DNA, 120 bp, Artificial Sequence
  ENSG00000232855_33 (sequence is synthesized)
taaagactccacctcttgatactgtcacaatagcaactgcatttcagcatgagttctggaagggacagtttccaaaccagaggagcaattgcctatcagaggttgcaagaaagaggtatt

SEQ ID NO: 895658 - DNA, 120 bp, Artificial Sequence
  ENSG00000232855_34 (sequence is synthesized)
ttactattatttgagctaccatttttagctttatccatacttttagaaataggtgttttattgaactccaattatccagtttgagaatgtcataattttctattaggagtctggctgatc

SEQ ID NO: 895659 - DNA, 120 bp, Artificial Sequence
  ENSG00000232855_35 (sequence is synthesized)
ggctgatctagtcattaaaaaagacacataataaatgtataagcatgtttttaaatggacagtttataagttagttaataatattagtgttaattactgttaccactaaataaataaacc

SEQ ID NO: 895660 - DNA, 120 bp, Artificial Sequence
  ENSG00000232855_36 (sequence is synthesized)
ttatgttctttcaacaatctgaaaaaaatattttgtaaaaaattactgtaatgcaaaatttggcttagttagcaacagagagggtaaatatctgctttaaagatcacaatgtctgatggc

SEQ ID NO: 895661 - DNA, 120 bp, Artificial Sequence
  ENSG00000232855_37 (sequence is synthesized)
tatgaaacagatgagaagttttgagaagatgacatcaatatggtgttgattggtttcatgtggctttgagcttttctgccactgggaagatcactactgtacatagtttacatatgattc

SEQ ID NO: 895662 - DNA, 120 bp, Artificial Sequence
  ENSG00000232855_38 (sequence is synthesized)
atgtgtgatgccagattgcagcttccttcttgctgtatcttaagtgtacttggtattctgattcaagagtgagatcttgaagctttggcaaatagaattgcctaattttcatttgtccac

SEQ ID NO: 895663 - DNA, 120 bp, Artificial Sequence
  ENSG00000232855_39 (sequence is synthesized)
taagcaatgcatgcagttaaaaaaatgaaaacaataccaaacctccttcttttgcagtgaaggagcccaaaacaagttactctctttccgtctctctctttaacttagaatattggttat

SEQ ID NO: 895664 - DNA, 120 bp, Artificial Sequence
  ENSG00000232855_40 (sequence is synthesized)
tttgtattctcacacatgtaaaattcctttcctttaatgcatatgttctcaataaaaaagaattttccactgaatttccaggaagactcaacataatttaaagatggcaccttacaaaaa

SEQ ID NO: 895665 - DNA, 120 bp, Artificial Sequence
  ENSG00000232855_41 (sequence is synthesized)
tcaaactctttggtttcactttgacaaacttgcttcttgcaattctcctaaggttgtgtgtatacaaccacgtgggatgtggtgaatttagtcggccacaatgtaatagtctcttctcta

SEQ ID NO: 895666 - DNA, 120 bp, Artificial Sequence
  ENSG00000232855_42 (sequence is synthesized)
tacataaaattagattactaaaatccctatgtaagaaacttacaatcccgccagggaaaattaggattggggaaatgagataattagttaatctctcaaaaatctgatgaacatagttta

SEQ ID NO: 895667 - DNA, 120 bp, Artificial Sequence
  ENSG00000232855_43 (sequence is synthesized)
tgttttctaaaatagagccatgaaaacagcccaccaaataatgagaatgtcaatatctcacacgttccttcatttggtaattaatagcatggaatggatatatattaatttatcattctt

SEQ ID NO: 895668 - DNA, 120 bp, Artificial Sequence
  ENSG00000232855_44 (sequence is synthesized)
tgatctccagtgacttttcagtatctctgttctcctttttccatatattaaatacagaacttatacatttgttttgtttgatggtgttaatctacagtgcagaagagtccctgtgtttgt

SEQ ID NO: 895669 - DNA, 120 bp, Artificial Sequence
  ENSG00000232855_45 (sequence is synthesized)
ccactgtctaattttcaaagcctctctgattttatgattttaatttaccttttatcagtgtggtttcaccgcatttctgcagacattcatgtggatgcctgagctgaaaaactaacctca

SEQ ID NO: 895670 - DNA, 120 bp, Artificial Sequence
  ENSG00000232855_46 (sequence is synthesized)
cgtagtctttatttctcaacttgcattccccagtgcagggcccagtggtgccaattctgaacatagtaaatttacaagaaagcccttcctcacctataacttcagggatgttttcaccca

SEQ ID NO: 895671 - DNA, 120 bp, Artificial Sequence
  ENSG00000232855_47 (sequence is synthesized)
taaaccaaaacactcaattgcaaggtttggggataatcttctcccagctctctttctctctcctacagtttcattgcattgcctcatctctcttttatcttttcccttatgagttatttc

SEQ ID NO: 895672 - DNA, 120 bp, Artificial Sequence
  ENSG00000232855_48 (sequence is synthesized)
agcttccttttcttaacttctagtttcctatttctctaataatctaagtcagggagaagtgtaaattcatgtgcatggaaactaaaatttccccgaggatataatgtacagagtaaatcc

SEQ ID NO: 895673 - DNA, 120 bp, Artificial Sequence
  ENSG00000232855_49 (sequence is synthesized)
atcttcactagaattttagaacttgagatcgggcatgtgtgattattctacacatttttaatgggtctctgtgctttcacatgtgattttgcctcttccaaaaacagtctttgtgttctt

SEQ ID NO: 895674 - DNA, 120 bp, Artificial Sequence
  ENSG00000232855_50 (sequence is synthesized)
caccatctgggaaatgtgttttcatccatgtaaacccaaatcaaatgccatttcctttatggaaaattatccagcttcatcaggcagaataattagctcctctgtaggcaaatagctcct

SEQ ID NO: 895675 - DNA, 120 bp, Artificial Sequence
  ENSG00000232855_51 (sequence is synthesized)
tggtctatttttgccaaagcaagaacatcttattttccatacctactatgtgcttggcattgtatcagtacacatttctattagtgcattctagcactacatattttcaggcctatctta

SEQ ID NO: 895676 - DNA, 120 bp, Artificial Sequence
  ENSG00000232855_52 (sequence is synthesized)
tgtgattggctttgagcatttccagagcaagtatatttttgcttcttatacctacctcaggatttaacatagtggtgtctggcataactagacatggtaagaataaatgtttgttgaatg

SEQ ID NO: 895677 - DNA, 120 bp, Artificial Sequence
  ENSG00000232855_53 (sequence is synthesized)
aatgatgtgtgaatatttgaatgagcatattatatgagttggtaagactattcagttgctggatgtcaaaactaattaactgaatgtatttttatctttggctttttattagcttggttg

SEQ ID NO: 895678 - DNA, 120 bp, Artificial Sequence
  ENSG00000232855_54 (sequence is synthesized)
caaattctgtgacaacagaatctgtgtctttcattctcatctttacacccccagttccaggtacctggtgcccaacaggcattactggatatctgtagaacttatgattaaagaataaaa

SEQ ID NO: 895679 - DNA, 120 bp, Artificial Sequence
  ENSG00000232855_55 (sequence is synthesized)
ggataacagtgtgggatgaaaataattcaatctttgacctttttttttgagtagagacaagcacattaaatttgatttttgtttagccctaagcagcatcgtagttctgtatcactttta

SEQ ID NO: 895680 - DNA, 120 bp, Artificial Sequence
  ENSG00000232855_56 (sequence is synthesized)
taagcagctagacatggaaaaggtaaaagtaaggacagaggatggaggcataacctattcagagtcaatcatatgacttttgtctgaaaaattcgtacataaaaaaatgaatggtttgaa

SEQ ID NO: 895681 - DNA, 120 bp, Artificial Sequence
  ENSG00000232855_57 (sequence is synthesized)
acaaaagcgaactattggatggaagtaatttgcacatttaaaacctgtctcgcaaccaagtgcatcagttgattctctggcaaactattgctttgccttttcttatccaatatttgtttg

SEQ ID NO: 895682 - DNA, 120 bp, Artificial Sequence
  ENSG00000232855_58 (sequence is synthesized)
tttttgaaggaaaaaaggtatgtgactgagaggtaaaatatatgtattttttcaccatgaatacttgtctttatgcattttgttaaaattgtagtaattgataatatgtaagcctgtttc

SEQ ID NO: 895683 - DNA, 120 bp, Artificial Sequence
  ENSG00000232855_59 (sequence is synthesized)
gtaatggtgatttttttggtatgatatctacagatacaaatagtgcatgtgttaaggaaactcatgcacaaacaaaacagcacatgctgtactcacagccagttacacagaatgctcatg

SEQ ID NO: 895684 - DNA, 120 bp, Artificial Sequence
  ENSG00000232855_60 (sequence is synthesized)
catgcatctgttgcttattaattttcttcctgctgtttgtatcattcttttgaagaatctccagcaagctttgtgctttgcccaattgtttataatgtctataaatcaggggcttggacc

SEQ ID NO: 895685 - DNA, 120 bp, Artificial Sequence
  ENSG00000232855_61 (sequence is synthesized)
aaatgaaatgtcttagtagtgtttgcaaaatatttggatattctgattgcgttttattttcccagctttagaaaacatatagattagcctctgttgggaacttatattctcgttactcct

SEQ ID NO: 895686 - DNA, 120 bp, Artificial Sequence
  ENSG00000232855_62 (sequence is synthesized)
tgtctcttttcttttttcaggaattggtcactctttcagccaactcgtaggttcaaacaatgtttacatgtagtgctcagtttgttttaacttcctgctgtagacattgacagttttttc

SEQ ID NO: 895687 - DNA, 120 bp, Artificial Sequence
  ENSG00000232855_63 (sequence is synthesized)
ttcctaagagtcttatgaataggcaacaaaacaaaaacaaaaacaggcaaagtcccaatctattaactacgtacttacaaatcaggtgaaagtgcttggtgaacagtctatgttttagca

SEQ ID NO: 895688 - DNA, 120 bp, Artificial Sequence
  ENSG00000232855_64 (sequence is synthesized)
actgttttttaacgtttggttgtgacattttttaacaacagccattgttcaattgttaaactatgtttggatttgaggtctgaatgagctgaattcaaaatatgggactttttattagaa

SEQ ID NO: 895689 - DNA, 120 bp, Artificial Sequence
  ENSG00000232855_65 (sequence is synthesized)
accctggtaaagtggacactggggaaaaagcccaagatttcatgtgtttgatttattgactatgtgcgtcaacagcctgcttttaattctcagagtaaaataaaaatactcagaatctaa

SEQ ID NO: 895690 - DNA, 120 bp, Artificial Sequence
  ENSG00000232855_66 (sequence is synthesized)
acatcactctggctttctgaaaactgatcacctctgatgaattagaacggaatgaccaagctttgggagaggcaaaagaatttcggtgttaaagactcagagtttaagaagcaacaaaaa

SEQ ID NO: 895691 - DNA, 120 bp, Artificial Sequence
  ENSG00000232850_0 (sequence is synthesized)
tgctgctccgccgcgtcccactcttctcgctccgctttcgccccgcatcttccaccttccttccagtccttgcggcgaccgagcccgcagtgtcagtccccagcggggacctgagtatgc

SEQ ID NO: 895692 - DNA, 120 bp, Artificial Sequence
  ENSG00000232850_1 (sequence is synthesized)
cggtgaagacgagagcggaaggcgaggacgacggcttcggggaagcgggtgacccgaggagactgctggagcgaccttggcgtttccgggggtgccttcccgggaaggggaatcgggatg

SEQ ID NO: 895693 - DNA, 120 bp, Artificial Sequence
  ENSG00000232850_2 (sequence is synthesized)
ttggcttcgaagggaccgaagggcccacctcgacccgccccgagtgggtttggagttgtaggtgctgtctcggatgcagggcgagcacccgcgagcgggtaaccagtcccgtgagagctg

SEQ ID NO: 895694 - DNA, 120 bp, Artificial Sequence
  ENSG00000232850_3 (sequence is synthesized)
caggtccccagccccgttttacagatagggaaactgaggcagctgctgggacactcgcccatatgggttttgctccacccacttccttcagccactttacagaccaggagttgagggact

SEQ ID NO: 895695 - DNA, 120 bp, Artificial Sequence
  ENSG00000232850_4 (sequence is synthesized)
gctcgagcttagagtgtttaggggtggttgagggtgacccccatgttctgtgctctactctatccctatccaggccttctcccagcgccactctcacgctcctgcttgctagctcctgct

SEQ ID NO: 895696 - DNA, 120 bp, Artificial Sequence
  ENSG00000232850_5 (sequence is synthesized)
tgctagctcctgctcctcccagcttcatcctcctcctgtttacattaattgctcctgatcttccacactcttgattttccggattctaactccatcaaaatgtaacttgatgtgttcagg

SEQ ID NO: 895697 - DNA, 120 bp, Artificial Sequence
  ENSG00000232850_6 (sequence is synthesized)
ccccggggacacctaggcacttgaggggggcgggtccgtgtttggcctgctgggcttagtaggagggtctggcccggggcggggagcgcgatgctctgctgggtcagcatctccagccac

SEQ ID NO: 895698 - DNA, 120 bp, Artificial Sequence
  ENSG00000232850_7 (sequence is synthesized)
ctggctttgctggtgtggcctcgcagccttgccaaatgtgagcagcttacagagcaaccagttgcacgtgcttaagctgccgaggtgacacagggcgctgtagggtccagccccacaggg

SEQ ID NO: 895699 - DNA, 120 bp, Artificial Sequence
  ENSG00000232850_8 (sequence is synthesized)
aagggagacccccaccctccctttcccggtctgctaagtagcaggtgttgttccttgacaccttttgctactgctggaccatgatccgcctggtaacgggcgtcttcccagatgctggcg

SEQ ID NO: 895700 - DNA, 72 bp, Artificial Sequence
  ENSG00000232850_9 (sequence is synthesized)
acaaaaaagataaatgtttgaggtgatgaagatcttaatttccttgatttgatcattacatgtttcatacag

SEQ ID NO: 895701 - DNA, 120 bp, Artificial Sequence
  ENSG00000232850_10 (sequence is synthesized)
tcttaatttccttgatttgatcattacatgtttcatacaggtatcaaagtatcacatgtacccccaaagtatgtacaactatgatatatcataaataaatgaataaataaataataaaag

SEQ ID NO: 895702 - DNA, 120 bp, Artificial Sequence
  ENSG00000269570_0 (sequence is synthesized)
ctctttactactatacagattacacagaatttgtattagaagtaaccaagaattagcaaatatttgacagaattaaaaagtaacacaaataaactaatgaccccccaaaggtaaagtatt

SEQ ID NO: 895703 - DNA, 120 bp, Artificial Sequence
  ENSG00000269570_1 (sequence is synthesized)
aagattgttagaaatttcaagctcttacaatgaaaataagatcataacacctgtgcatctaggacattagtgaagttgcttttgtgaaatttttaaatagccattcctgcaggattatca

SEQ ID NO: 895704 - DNA, 120 bp, Artificial Sequence
  ENSG00000269570_2 (sequence is synthesized)
tgaagtctaaatttgtgagtaaagtgcctggtactggaataaggtgtaaaacagtaggggtaaaaattcctcacctccttttgggtaaacgtggacttttgtcatcttttcgtcttcttc

SEQ ID NO: 895705 - DNA, 120 bp, Artificial Sequence
  ENSG00000269570_3 (sequence is synthesized)
ctctcctgtaattgaagacagggtaacagtagacatattctgaatcaaaactacacagtgaaggctggctgaagacacacacacacacacacggccaaagaacaagtggcaaaggataac

SEQ ID NO: 895706 - DNA, 120 bp, Artificial Sequence
  ENSG00000269570_4 (sequence is synthesized)
caagaatacataaagtcaaagatatatctggcaaatcaagcaagtaattttaccctgaagtaatttcactttcaaatcagtctgtaagacagattaaatatataccttccataaactatg

SEQ ID NO: 895707 - DNA, 120 bp, Artificial Sequence
  ENSG00000269570_5 (sequence is synthesized)
caatactatgaaagacttagaagaatctcaatgtattacttttagagttgctaccatgtatcatctaaaaacactaagattaaaaaataccttctccttgcaatagaactgaaaaaccta

SEQ ID NO: 895708 - DNA, 120 bp, Artificial Sequence
  ENSG00000269570_6 (sequence is synthesized)
aagcatgtatacgtcaacatccttcctcacactcccactcttttttccactagtcgttcaaaatctgttagattttcatttttaataattgcctactcacttccttggaggttcctcatc

SEQ ID NO: 895709 - DNA, 120 bp, Artificial Sequence
  ENSG00000269570_7 (sequence is synthesized)
ctctctaatttcattctcctcttctttcacctccacctctacttccactttaatttccttcttctccttctcttcttttaccttccctgattttctccgtggctttggggtttccctgaa

SEQ ID NO: 895710 - DNA, 120 bp, Artificial Sequence
  ENSG00000269570_8 (sequence is synthesized)
aacacaaatgcatttcaatactagacaaaagatcttttcaaggaagactatgacaacaaattaaagcttagagttatcactgatttgttataaaactaccttcctcagttcatgaaatgt

SEQ ID NO: 895711 - DNA, 120 bp, Artificial Sequence
  ENSG00000269570_9 (sequence is synthesized)
gatttcctaccaatcatcctcacatgcatagtaatgatccaaatatatgtatatgttgctcatggaatgaaccctccccagactaaagatgcctgtaaatcaaatttcactataattgta

SEQ ID NO: 895712 - DNA, 120 bp, Artificial Sequence
  ENSG00000269570_10 (sequence is synthesized)
aagagaaacgagacaattagttaaaaaattctaagtattcaggcaattcatgataccttgttgaaataaaacatgcagactcataaaaacttgtatataatcaaaataaagttctacaaa

SEQ ID NO: 895713 - DNA, 120 bp, Artificial Sequence
  ENSG00000269570_11 (sequence is synthesized)
tgggaaagaggattattatcagggtatattaaggtgttagacttacaaaagaagtgcataattaattactcatttaaaattaattctatacccattagcttggcaacagataaaataaaa

SEQ ID NO: 895714 - DNA, 120 bp, Artificial Sequence
  ENSG00000273068_0 (sequence is synthesized)
caacactctgtggcattcccattttacatttgggaatctttgtatcatccccatttcacagatggtaaaacctaaggctgaaagatgtgaggaaaccgaaactctgagaggtcgcctaag

SEQ ID NO: 895715 - DNA, 120 bp, Artificial Sequence
  ENSG00000273068_1 (sequence is synthesized)
ggggatgaaaaccagcgctctgaccacatcctggccttcgtcaccatgggattccgagggacaagcccaggggagttgcagcatcctctgtctaccctatgtacgtgacccccctttgcg

SEQ ID NO: 895716 - DNA, 120 bp, Artificial Sequence
  ENSG00000273068_2 (sequence is synthesized)
gtttttaaaccccactgcttgctgacagatttgtcacctgttataagggcagaatccattattattatcaatagtagtgatggatacttaaataataaatgcactaatctcattaagcca

SEQ ID NO: 895717 - DNA, 120 bp, Artificial Sequence
  ENSG00000273069_0 (sequence is synthesized)
tccagcctgggcaacacagcgagaccctatgtcttaaagaaagggcagaagtggggacccctctcccacccccttcccctgctccaagccaaagcgtttgaagcaagaggttgcctcctg

SEQ ID NO: 895718 - DNA, 120 bp, Artificial Sequence
  ENSG00000273069_1 (sequence is synthesized)
gggctttgggaggtgtgtccaggcagaggacagaggtcttgtgcaaagggccgcttttcccttcgcccaccctgcgcccgcccagccccttatccgatgggaaagccttactgactcttt

SEQ ID NO: 895719 - DNA, 120 bp, Artificial Sequence
  ENSG00000273069_2 (sequence is synthesized)
tcctcgcagaagcgcccagatgctgtttatgcaacctctccagaatctcagtgtactgtactttttaaaaagtgatttgattcaaagcactcattctttaattaaacttcatttagctgc

SEQ ID NO: 895720 - DNA, 120 bp, Artificial Sequence
  ENSG00000273061_0 (sequence is synthesized)
gcgtgtagtgggtggatctgcaattgtattcctgtttcaagccccgttttcttgcagctcttcggcactgcaaacctaaccgctaatggcgctgtgggtggagaaacgtttgttaggcaa

SEQ ID NO: 895721 - DNA, 120 bp, Artificial Sequence
  ENSG00000273061_1 (sequence is synthesized)
gaacgcataagaagggcttcctgtatgcctgcgtatcttgtttaagcctaaagatatgtactctctttatcctctttttttgagacgaggaagtagacccagcatgcccgagatcacaca

SEQ ID NO: 895722 - DNA, 120 bp, Artificial Sequence
  ENSG00000273061_2 (sequence is synthesized)
ttttacaaggaagaagtaggatccagacccagggagtttaacttcaaaacttgaacgtttaacaatcaggtcttgctgccctactcataaagagacccaaataaaaacaacatgacgcca

SEQ ID NO: 895723 - DNA, 120 bp, Artificial Sequence
  ENSG00000273061_3 (sequence is synthesized)
ctacagctctggacatcacatcaaaatatggcagaagctaaagcaggaagacagagaaggaggcaaaacagctttattcacttgtggctctcatatgaagaataaagatatttctcgaaa

SEQ ID NO: 895724 - DNA, 120 bp, Artificial Sequence
  ENSG00000273063_0 (sequence is synthesized)
acctgctgggtcctgcacatgcgcagtccgctggcgctcggacgccgcggagcggaaaccccagccttggcgggaagatcctggaggattccgcgggcggaaatgaaggtgaagcgcagg

SEQ ID NO: 895725 - DNA, 120 bp, Artificial Sequence
  ENSG00000273063_1 (sequence is synthesized)
atcattctagcctcaattgtcccaggagccctttcgatgattctgttttactttattgaaagactgttacaactttggtgttgcatttcctccagaataaaatgacttttacagcctgga

SEQ ID NO: 895726 - DNA, 120 bp, Artificial Sequence
  ENSG00000273064_0 (sequence is synthesized)
ccggcgggaggaagcgcgaggggtgcgcgagtgctagcgaaagggggacaggggccctggagtggaagccttgcgggagaggaggagcagaggagcagtcttagggtgtcagaaccaccc

SEQ ID NO: 895727 - DNA, 120 bp, Artificial Sequence
  ENSG00000273064_1 (sequence is synthesized)
ggatgccgcaccaaaaaacaggaaaaatccaagtcctgcgagaggcagtcaaaggtatctgtgcatccgtgtaccgacttggatccactacagaattgcacggcccatcaggactgctgt

SEQ ID NO: 895728 - DNA, 120 bp, Artificial Sequence
  ENSG00000273064_2 (sequence is synthesized)
caccccggtgcagcacccgcaggcccatctgtaatatgaattggcagagtcaggaaccaggttgcaaagacagagaagcgagccaaagctggccgcagcccgaggcgtggggagaacctg

SEQ ID NO: 895729 - DNA, 120 bp, Artificial Sequence
  ENSG00000273064_3 (sequence is synthesized)
ggcaaacgaggagaagggatacttcccactcgcagaaagactttccacccagctctgcattcccataaaccgtccagactcccctttggcggagtccatcagtttttgtttaaaaaaaga

SEQ ID NO: 895730 - DNA, 120 bp, Artificial Sequence
  ENSG00000273064_4 (sequence is synthesized)
tgcccgcttatccttttagtagagctatatccactcctgtggcaattatcttcccagaaaattcagattacaataggaaattacatccagaaaagcataaggaggaaatttatgttcgag

SEQ ID NO: 895731 - DNA, 120 bp, Artificial Sequence
  ENSG00000273064_5 (sequence is synthesized)
agaagaaataaagctgtcaggagaggtgtgatgaggataacgaagaaaacattttgcaactattttaaccagttattcctttacaagccttgataatcgcccgcactcgtgtgtgtttga

SEQ ID NO: 895732 - DNA, 120 bp, Artificial Sequence
  ENSG00000273064_6 (sequence is synthesized)
gtgtgtgtgtgtgagagagagagagaggatgttttctgagtgatcggaaactccttattgataaagcctttgagtcattttataaaaagccattgtgttgtttttttttaaaaaagtctt

SEQ ID NO: 895733 - DNA, 120 bp, Artificial Sequence
  ENSG00000273064_7 (sequence is synthesized)
tttttaaaaaagtcttaatgatccttacatgagaactttattctttttatgtgctaattatttttccatatgatgagcatgcatttttttctaataaacgctcagcgatttgccctagga

SEQ ID NO: 895734 - DNA, 120 bp, Artificial Sequence
  ENSG00000285520_0 (sequence is synthesized)
gaccacacacaccaagtaatatcctctccatttacaatagggtgccttctgaataaatgactctgtaactttacttcattcttggttacagccaagtaaccaatgggaagcctctaaagt

SEQ ID NO: 895735 - DNA, 120 bp, Artificial Sequence
  ENSG00000285520_1 (sequence is synthesized)
gttgaaactccaacaagttctgtaaccgggggtcttgagcccctatacttgggccactcccactcagtggaatgtactttcgttctcaataaatccttgtgcattttgtccaattctttg

SEQ ID NO: 895736 - DNA, 80 bp, Artificial Sequence
  ENSG00000285520_2 (sequence is synthesized)
cgttctcaataaatccttgtgcattttgtccaattctttgttagagatgccgagtacctggacaccttctgccggttaca

SEQ ID NO: 895737 - DNA, 120 bp, Artificial Sequence
  ENSG00000285520_3 (sequence is synthesized)
attcaatcccatctgtcatgtggaaatttacatcaatctaacattactcaagctggaaaggatcttatcgagtcttctacttcaacccattcatttcaagatgtggaaactaaggctcaa

SEQ ID NO: 895738 - DNA, 120 bp, Artificial Sequence
  ENSG00000285520_4 (sequence is synthesized)
agagataaagtgacttgtccaagatcccagctccaggtggcggcccttcttacgcgcctgccgcaaggacctcttgaccttcttcactcgctcccggagctgccggttgcgcttctccag

SEQ ID NO: 895739 - DNA, 120 bp, Artificial Sequence
  ENSG00000285520_5 (sequence is synthesized)
ggtggccactttctgctgcagtttcttgacgtggtcctcctcctcaaacaaggccttctgcaccgaggagcacatgagctggaggcagagacagcgtgcaaggagaggagggctgcactt

SEQ ID NO: 895740 - DNA, 120 bp, Artificial Sequence
  ENSG00000285520_6 (sequence is synthesized)
agcctccagagttgtctcttcaacaagacaggtctgatcatctcagtaaccttcttctgggactcctgttagacgtgtatatttaataccattggctaagtcgtaacaatcatccaagtc

SEQ ID NO: 895741 - DNA, 120 bp, Artificial Sequence
  ENSG00000285520_7 (sequence is synthesized)
aaccgacctcccagcctgcccacattgcctccctgtaggaagtgattttgcacacagaagcccctggtggggtagggtggagtgtgaagtatctgttcttggaccacagttccatccctg

SEQ ID NO: 895742 - DNA, 120 bp, Artificial Sequence
  ENSG00000285520_8 (sequence is synthesized)
cctgttccagcatctctccaaagacgctcaggtctccgtcacaggatcaccattgaaaaaggtgtctgtccctctgacacatacccaggggaggaaagagcaagctttggaggcacctgg

SEQ ID NO: 895743 - DNA, 120 bp, Artificial Sequence
  ENSG00000285520_9 (sequence is synthesized)
ttgacttcacctggagatcttgttgggtctgtagtttatgcctggaagtgctgcagcctttttgcatccatgaaggaatctagcctgagaacaacagtaccacgaagagagaatgccgag

SEQ ID NO: 895744 - DNA, 120 bp, Artificial Sequence
  ENSG00000285520_10 (sequence is synthesized)
ccaaaagaatcaccaagaggggacccagatccctgattaacccgtgcctggagctaccactacctttgctttcttgcctcatgtgataatacatttcctcactgtttgaaattcattgag

SEQ ID NO: 895745 - DNA, 120 bp, Artificial Sequence
  ENSG00000285520_11 (sequence is synthesized)
tccagttttctcttacttgtagccaaaggcatccttaacaatgtaattgactccactttgcagatgaacaaagagacaaagagggcaagtgacacctacagtcacaccactggtaaatgt

SEQ ID NO: 895746 - DNA, 120 bp, Artificial Sequence
  ENSG00000285520_12 (sequence is synthesized)
attaagaacatgcaggcattagggagtaaagtttatacataatttaaagtagtatgtaggagtttaggacaggccaccccaaaatatgctgctttggcataaagactactttgagctgga

SEQ ID NO: 895747 - DNA, 120 bp, Artificial Sequence
  ENSG00000285520_13 (sequence is synthesized)
ggaacttgaaaaacagtacatgcagacagtggctttctctgaattccctttatctgcctaaagacaaaacctccaaaaggagctcagttgtcgtcagtacccccacccctgggagtttca

SEQ ID NO: 895748 - DNA, 120 bp, Artificial Sequence
  ENSG00000285520_14 (sequence is synthesized)
tcaaccagggaaaattaactcttatcacaggagaggagaatggaggtgacatcacacccaaggtttgtcacaagctatcacttattctgagggtctattcatctttccccaaaatcattt

SEQ ID NO: 895749 - DNA, 120 bp, Artificial Sequence
  ENSG00000285520_15 (sequence is synthesized)
tctctctcctaaattgcctacatcccccctccctgctttccccaaaaagagggtatataaccttctaaatctcactgttttaaggggtatgactttttttcctatgatgtccctgtgcac

SEQ ID NO: 895750 - DNA, 120 bp, Artificial Sequence
  ENSG00000285521_0 (sequence is synthesized)
agtatattcgttattttgttttaagcaaacctacaccaagtttcaaggcttcaaactccctcgacagtttggaatcttattttgaaacaattctaggaatagaggaagagaaccagcggg

SEQ ID NO: 895751 - DNA, 120 bp, Artificial Sequence
  ENSG00000285521_1 (sequence is synthesized)
gccatgggaaaacagcccaggaccagacactaggaaatctaggtctcttgatagagaggctatcacttatgttttgtggcgaaagaacatcagcatggttcacaatatattttgcccaga

SEQ ID NO: 895752 - DNA, 120 bp, Artificial Sequence
  ENSG00000285521_2 (sequence is synthesized)
atgttcgttacccaggtacaggagagtccatgccagttgtcttacaggaagtcgcatatcctggattgtctgtttattgcctcaagatttgatttaagaaacattttgggcaagagcccc

SEQ ID NO: 895753 - DNA, 120 bp, Artificial Sequence
  ENSG00000285521_3 (sequence is synthesized)
acacagaggatgtggtgtgcatcttagtatgttgctgatgtcaggtagctattagtgatgcctacactatgaattcaatgaacacttgttgaagaaatgatctggtgccaggcaatctcc

SEQ ID NO: 895754 - DNA, 120 bp, Artificial Sequence
  ENSG00000285521_4 (sequence is synthesized)
ggagcagagtggaaaaatgctttgtaacatgaagggaagactgaagtgacatagcaaatggcccagcagcagcacagaggagagggacagacccagagaagggtgaggtcaagaggctac

SEQ ID NO: 895755 - DNA, 120 bp, Artificial Sequence
  ENSG00000285521_5 (sequence is synthesized)
agctgttcctcagccccaacccccagactcacttcgatgatcataactttttggctgttgctttggggaggggcaggcagcttggtgaaatgcctgtgacccagctaagcattcagctgg

SEQ ID NO: 895756 - DNA, 120 bp, Artificial Sequence
  ENSG00000285521_6 (sequence is synthesized)
aagacttcgcagcaaggtgcccaaggaaaccctcaggacagagaggctggcaagttcaaagggcagcctgccagtcattcctctgctggcccgtgccaagggtctaggccagatttgggc

SEQ ID NO: 895757 - DNA, 120 bp, Artificial Sequence
  ENSG00000285521_7 (sequence is synthesized)
ctgggagtatctagggaaaacatcaaactatagttttcactgccttggttgtcacatttgcctccttctgtggctaccctccttccaccccaaataaaggccagggaaagaagacaggaa

SEQ ID NO: 895758 - DNA, 120 bp, Artificial Sequence
  ENSG00000285521_8 (sequence is synthesized)
aaaagtgaaaactaaagagaaaattttgcttcaaagaactggttgtgtggttcccaactgtccatatggcacaggaaagtctcatctgtgaaacaaaataaagttcccttccaacacaga

SEQ ID NO: 895759 - DNA, 120 bp, Artificial Sequence
  ENSG00000285523_0 (sequence is synthesized)
caggcggctgggaagtctggacggcgcccataccaaagggaggacgtctgcctggaagcatgtgtgtatgatccaatacaagatacaacactgcatttagtcttcacgtctccttagtct

SEQ ID NO: 895760 - DNA, 120 bp, Artificial Sequence
  ENSG00000285523_1 (sequence is synthesized)
cctggtttctcagctattccttgtattctgtgaccttgagaattttggagagcacaggtcaaatattttgcggagtgcccctcaatttgactttcttgatgttttctcatgattaggctg

SEQ ID NO: 895761 - DNA, 120 bp, Artificial Sequence
  ENSG00000285523_2 (sequence is synthesized)
gggttgtgggttaatgggaggaccacggaggtgaagtaccccctcactgcaccacagcagagagtgtcacgtcaacgtcaacaggacctaccacgtggttatgactggtttctccactgt

SEQ ID NO: 895762 - DNA, 120 bp, Artificial Sequence
  ENSG00000285523_3 (sequence is synthesized)
ggagttactgtgtccccatcctacatgctattctttggcagtgtgtcacaggccagcctacactcaaggggagggggattaagttccaaaccttctggggtgggtggggggagtatctac

SEQ ID NO: 895763 - DNA, 120 bp, Artificial Sequence
  ENSG00000285523_4 (sequence is synthesized)
atatattatctggaatttttcagagagaaatatttgtcctttgtctctcatttatgtgttcaatcatttatttatatcactatggagccgtggatatgcattttattttgcagggttata

SEQ ID NO: 895764 - DNA, 120 bp, Artificial Sequence
  ENSG00000285523_5 (sequence is synthesized)
attattcatgttgtcactcaggttgtcccagtttgggaatgagggtctctttcagcttggctccagtgttcttcagcttccccaccccacctcctttttgtttttggtgagcactttctt

SEQ ID NO: 895765 - DNA, 120 bp, Artificial Sequence
  ENSG00000285523_6 (sequence is synthesized)
tctttcttttttttttttttttcattctggctctataaggttcctcttatatttttcctgctctgccttacaatcagccttttctcctaggagtcctgatttctttccttggagaattgt

SEQ ID NO: 895766 - DNA, 120 bp, Artificial Sequence
  ENSG00000285523_7 (sequence is synthesized)
atttaaaaaccaatcactgggccctggggatgctcattgctactggggtgtcagtcactgcttccagaccttctcagcagacagagctaggaaatatctgtatgtacatgtgcatagaca

SEQ ID NO: 895767 - DNA, 120 bp, Artificial Sequence
  ENSG00000285523_8 (sequence is synthesized)
catagctataatcacttctgtatttctacttatcagtataagtaaatacgagttcttaaaataaacaagaattcacgtggttacactaatctctaatccacgattatagggttcattcta

SEQ ID NO: 895768 - DNA, 120 bp, Artificial Sequence
  ENSG00000285523_9 (sequence is synthesized)
gtcttcttccttcactaatttgtaatttctttctctgacagtgaaaatcttggctttcactattgacgactcatttacttacttattcagtcctaaaatatatgtagcagtttcagaact

SEQ ID NO: 895769 - DNA, 120 bp, Artificial Sequence
  ENSG00000285523_10 (sequence is synthesized)
gagttttgtatactgattttttctttcttcttgtttttaatgttaactttctagaagcataaaatacattcataaaagtgcacaactcaaaagtgtaaggcttgcattttcaaaaagtga

SEQ ID NO: 895770 - DNA, 120 bp, Artificial Sequence
  ENSG00000285523_11 (sequence is synthesized)
gcacattctgttaacctgcacccagaagatcaagaaacaaaacgttatcaaaatttcagaagccccgtgactcttggcagtcatgtctcccctatacacagaaagccctaatttgacttc

SEQ ID NO: 895771 - DNA, 120 bp, Artificial Sequence
  ENSG00000285523_12 (sequence is synthesized)
ttgaactttatggaaaggaaccagactgaattgtatctgcttcttttgcttggcataatgctttgaggtccacccctgttgttgcaggtagttatagcttattcattcccatgtgtcctg

SEQ ID NO: 895772 - DNA, 120 bp, Artificial Sequence
  ENSG00000285523_13 (sequence is synthesized)
ctttcttaagattgtatcatgagttcttttccacagtcttaagtgtgtttctccagtgcgattttaatggctatataatattccacagtttgataataccataaactatttacttatccc

SEQ ID NO: 895773 - DNA, 120 bp, Artificial Sequence
  ENSG00000285523_14 (sequence is synthesized)
atcttgtctgtcatttgatgggcctctaattcctgcattatgataacactagtcaatgttaccttaagaagattgatgtaataatcctaatgcctcagagttagtctcatcacatctgga

SEQ ID NO: 895774 - DNA, 120 bp, Artificial Sequence
  ENSG00000285523_15 (sequence is synthesized)
ggtttgcattctattccagccttagtcctcacagcacatccagagggggcctaagagggtgctgaggattctggaagctgtggcttaggaagctcagcttggggaactggactattaggc

SEQ ID NO: 895775 - DNA, 120 bp, Artificial Sequence
  ENSG00000285523_16 (sequence is synthesized)
atgggggtagacaagatagctgttttcaaatatttgaagcactatttgaaagagtgttttatgaagttttattctgttttatgaagttttagtcctcatgtttagctaggaagagacagg

SEQ ID NO: 895776 - DNA, 120 bp, Artificial Sequence
  ENSG00000285523_17 (sequence is synthesized)
ttttttgtttgttctgttttgttttgaacctataatagtataaggaaggtgatgaataagacaggtactagaaataactacacctgaatgacacccatgaactgggactgccctgcgcaa

SEQ ID NO: 895777 - DNA, 120 bp, Artificial Sequence
  ENSG00000285523_18 (sequence is synthesized)
accaggccatccatcatcaccccaggcacaagaaactctttctaatgagtacagacttgactgagaaatgaaaaggctgatgtacagtgctgatctttctgttatttgagatgtgttata

SEQ ID NO: 895778 - DNA, 120 bp, Artificial Sequence
  ENSG00000285523_19 (sequence is synthesized)
gtgttaggcaggattgtgcaaaggtttcctacattgggagggaggctacactagatgacgtccaagtggctggatgatcattggatggcagtctagttctgaaagtccataattcagcct

SEQ ID NO: 895779 - DNA, 120 bp, Artificial Sequence
  ENSG00000285523_20 (sequence is synthesized)
ggaaaatgatcagcagtattgccaaagtgagtaaataagatttacatttctctcttcctggtccttatagaagcatgatttccatctggtcctcatacttgccttttttaaacagcttta

SEQ ID NO: 895780 - DNA, 120 bp, Artificial Sequence
  ENSG00000285523_21 (sequence is synthesized)
ttggtgtctggttgccgagagttaatagagtgttgtgcacttagaaatttgctgaaagagaagatctcatgataaatgttcaaaattggcttttgcaaggctagaagagaggacagggat

SEQ ID NO: 895781 - DNA, 120 bp, Artificial Sequence
  ENSG00000285523_22 (sequence is synthesized)
gatgctttgtaacttgtcagatgctgggcctgaagttcaatgttctgtggtgattgagggtcgattctctctgaagttttgagaatttaaacgacttattcagggtgcacgagtcagaat

SEQ ID NO: 895782 - DNA, 120 bp, Artificial Sequence
  ENSG00000285523_23 (sequence is synthesized)
gttttggttgtaagaaacaaaagtcactggcactaacataagcctgaggctcaaatacatctatgatcttgaattatatgagtgacccctctatcttgataacatattaccacttaaaaa

SEQ ID NO: 895783 - DNA, 120 bp, Artificial Sequence
  ENSG00000285524_0 (sequence is synthesized)
tgaatgacatgctttcggatacaaacagactcctttaagaaatcaatgttaacttagagagccaataaaatccccttgggaaaagtggacccacatcttgtctacacaatccctgtgcag

SEQ ID NO: 895784 - DNA, 120 bp, Artificial Sequence
  ENSG00000285524_1 (sequence is synthesized)
gctttctcacctgtgtgatccatggctgaggctcagaagaaacaagagggatgggccatcaatcaccagatgatcctcagtgagggataatatcctctcaatatttgagtcacacttcta

SEQ ID NO: 895785 - DNA, 120 bp, Artificial Sequence
  ENSG00000285524_2 (sequence is synthesized)
cagaggacccctcaactgcccatctgtgggacacgacagaggcaaaatcctgcccctgtctctctcggacctggctggatactgctttcactaacccacgaagcaaccatgccctaacag

SEQ ID NO: 895786 - DNA, 120 bp, Artificial Sequence
  ENSG00000285524_3 (sequence is synthesized)
ctagcaagagaataagacccacagaacaaccaccaccacctctctgtcagcaggaagcagttacaaaagactgacctttcccaacaaattgggtcttgaactcttgaggggggaaatgtt

SEQ ID NO: 895787 - DNA, 120 bp, Artificial Sequence
  ENSG00000285524_4 (sequence is synthesized)
ggagaggtccctgcccaacccaggaatgtcaggtgactatcaggttatggtcaggtggttgttatctgtcttgctaaaataataattggctgcagctggtgccagggaacagtatctccc

SEQ ID NO: 895788 - DNA, 82 bp, Artificial Sequence
  ENSG00000285524_5 (sequence is synthesized)
aataattggctgcagctggtgccagggaacagtatctcccaatagatgaaaaacaactgaagttgatgaccagcagcttccc

SEQ ID NO: 895789 - DNA, 120 bp, Artificial Sequence
  ENSG00000285524_6 (sequence is synthesized)
ccttcttctaggaacgcctgactggtatgagaaaaatgcctcaactaagcctgtgtacaacttcagcaaacacactgtgcttgcagcccctcccaagtgctggcaggccactgagcatgc

SEQ ID NO: 895790 - DNA, 120 bp, Artificial Sequence
  ENSG00000285524_7 (sequence is synthesized)
agacagcctaccccaaaagaagtaacggggagaagtaacacaaccccagaagcatctcaatacataaaacttcaagttaaagatcaaacagcacacttgaatctctcaagtcacctgctt

SEQ ID NO: 895791 - DNA, 120 bp, Artificial Sequence
  ENSG00000285525_0 (sequence is synthesized)
agagttgtcagacgatgttaccaaagcaaaggcacttgaacttaggccaaggctatttaaggtcactctacttgcctcttctggagagactcgtacatgcgttgctgatccctgggctga

SEQ ID NO: 895792 - DNA, 120 bp, Artificial Sequence
  ENSG00000285525_1 (sequence is synthesized)
gttctcccagccctagtgaactcggaagtacaggtccagaaggttctgcttgatggttcccatcagggtaaaactgaaaataggaagccgttggttgctgattttttgcagggtaaatga

SEQ ID NO: 895793 - DNA, 120 bp, Artificial Sequence
  ENSG00000285525_2 (sequence is synthesized)
actcatctgggcagtcctcatttggggtctctcgtgctgttgtggtcatatagctgctgaggctggagccatgtgaagtctcaacagggctgagtatccgcaatggcttcttcatcacat

SEQ ID NO: 895794 - DNA, 120 bp, Artificial Sequence
  ENSG00000285525_3 (sequence is synthesized)
ctgacaacacgcttcttcacatggtctttcttccaagaaaaggagcctggacttctgacattgcagcaggaacttcctatactcacaaacgcaaggcctggaactgacacaatgcaacat

SEQ ID NO: 895795 - DNA, 120 bp, Artificial Sequence
  ENSG00000285525_4 (sequence is synthesized)
tcaccatattctattggttgaagtggtcagaggtcagcctagattcacagttggtgaggaataaaatccatctccagatgggggtgtggcatgcatatagaaggagggaaggaattaatc

SEQ ID NO: 895796 - DNA, 120 bp, Artificial Sequence
  ENSG00000285525_5 (sequence is synthesized)
aaacatgaatcctctgatcactttttaggatggttattgtcaaaaagaaagaaagaaacaacagaaaataacaactgttcacgaggacgtggagtaattggaacctttgttgtgcatggt

SEQ ID NO: 895797 - DNA, 120 bp, Artificial Sequence
  ENSG00000285525_6 (sequence is synthesized)
tggtgggaacgttcaacagacagtcactgtgggaaacactacagtggctctcaaaaaaattaaaaattgccatatgattcaacaattctactactgagtatatgcccaaaagaattgaat

SEQ ID NO: 895798 - DNA, 120 bp, Artificial Sequence
  ENSG00000285525_7 (sequence is synthesized)
gcagagtttcaaagagatatttgtatacctgtgttcatagcagcattactcaattatgcataattgttaaaacgtgaaagcaactcaagtgtccattgatggatgaataatatgcaaaat

SEQ ID NO: 895799 - DNA, 120 bp, Artificial Sequence
  ENSG00000285525_8 (sequence is synthesized)
gtggtatataaatatggaatattattcagccctaaaaaggaagaagaatctaacaagtgttataacatggatgagctgtgaagatattatgctaagtgaaataagcaaggcacaaaaaga

SEQ ID NO: 895800 - DNA, 90 bp, Artificial Sequence
  ENSG00000285525_9 (sequence is synthesized)
gcaattgccaggggtttggtggatgaatggggagttactgtttagcaggtatagagttttacttggggaagatgaaaagagttatgaata

SEQ ID NO: 895801 - DNA, 120 bp, Artificial Sequence
  ENSG00000285525_10 (sequence is synthesized)
atagagttttacttggggaagatgaaaagagttatgaatatggatcttggtgatggttgtactcactatgaatgtatttaacaactgaactggacacttaaaaatggttaagatggtgaa

SEQ ID NO: 895802 - DNA, 120 bp, Artificial Sequence
  ENSG00000285527_0 (sequence is synthesized)
aggacctggaggcagcacatggggtggaagaaggggagagttagagagcaaatcagaaacactgccagagggagagggagagaggaaccggagccagagaacaagacagagcgcaaagga

SEQ ID NO: 895803 - DNA, 120 bp, Artificial Sequence
  ENSG00000285527_1 (sequence is synthesized)
aagagaaccagctccacggcgatttaaaagaaaaagacccgcgctgaaggcagggagctcaggccttcctagaggtaggtgggtagtgccatccaagtggtatgcctcaagtcagggtgg

SEQ ID NO: 895804 - DNA, 120 bp, Artificial Sequence
  ENSG00000285527_2 (sequence is synthesized)
gaaccatgtaagcctcagttctcacttctccccagtcttcacctctactttttgcaagaggttgttgaccacgtgccctgggcagcttcaagactggtggctcacgcctgtcatcccagc

SEQ ID NO: 895805 - DNA, 120 bp, Artificial Sequence
  ENSG00000285527_3 (sequence is synthesized)
ccacctcaaaagaaaaaaataaaaaagacttgcacatatggagtcaccctgaatagtccagtgcccaggcctggcaccactgaccagggcagcatacagattctcctctgcttacaatgg

SEQ ID NO: 895806 - DNA, 120 bp, Artificial Sequence
  ENSG00000285527_4 (sequence is synthesized)
ggtcacatcccgatacacccatcatacataaaaactatcataagtcggtttagaatattttcaatttacaacagtttcatccagatataaccctatcgtgagtgcagaagcatgcaggat

SEQ ID NO: 895807 - DNA, 120 bp, Artificial Sequence
  ENSG00000285527_5 (sequence is synthesized)
gcctgttgcccctcactccatcgtgggatggggactgtctgtgtcttgtttgaggtctcatgagattgggtctccagagtccaaatgactttagagtcattcagattgttcataaagaca

SEQ ID NO: 895808 - DNA, 120 bp, Artificial Sequence
  ENSG00000285527_6 (sequence is synthesized)
ggagcctggcaaaaaacacctgcctggagccccctgtgccctgggggcagcccatcatctttattgttaaatgctaatacttataaccaataacaaatagtctcagtctatcctgaactt

SEQ ID NO: 895809 - DNA, 120 bp, Artificial Sequence
  ENSG00000285527_7 (sequence is synthesized)
aatagcagtaaagccacccccacctccaaaaggtgagaggtttgaaaccaactctgtgtagccaagcaggggtggccccatcaatgtcccgcagggtcccctcctgaggaggtggagacg

SEQ ID NO: 895810 - DNA, 120 bp, Artificial Sequence
  ENSG00000285527_8 (sequence is synthesized)
cgagcattgtcctcttggcctcccttccgcccaacctgtcgtcctgaacgcttctcaaaaagatgcgccgttgctactaaatctttctctctccctctctctccctgtctctctctagtt

SEQ ID NO: 895811 - DNA, 120 bp, Artificial Sequence
  ENSG00000285527_9 (sequence is synthesized)
ctctctctgtgtctttttctctctctgtgtgtctccctctctctccgtctctctctagttctctctctgtgtctttttctctctgtgtgtgtctccctctctctccctctctctctctag

SEQ ID NO: 895812 - DNA, 120 bp, Artificial Sequence
  ENSG00000285527_10 (sequence is synthesized)
ctctctctccctctctctctctagttctctctctgtgtctttttctctctctgtgtgtctctctcactctctctctccatctctgttgaaaacacccacctggagcttccaagcctggca

SEQ ID NO: 895813 - DNA, 120 bp, Artificial Sequence
  ENSG00000285527_11 (sequence is synthesized)
aataccacagaaggtctacactgggagcacccgtggtgacaggctagcttgcagcctgccaggcactgagggctctacacattcactctgagagttagggagctgactgtgcccagttca

SEQ ID NO: 895814 - DNA, 120 bp, Artificial Sequence
  ENSG00000285527_12 (sequence is synthesized)
cagatgaagaaactgaggcacagagggcccacagatggcacacggcaaacgcaggctccatccgaggtcaggctgcagaggctgtacttggagccagtgcgctgtgcagagagctgcaga

SEQ ID NO: 895815 - DNA, 120 bp, Artificial Sequence
  ENSG00000285527_13 (sequence is synthesized)
gagaggaggcaagaagacagtgaagcaggaggtgcagggagcaggtgagcaaacaaatcgtgtggaaattgtgagaacccgtgaactcgggagaaaacagcccagatcatcccttcacac

SEQ ID NO: 895816 - DNA, 120 bp, Artificial Sequence
  ENSG00000285527_14 (sequence is synthesized)
tcactttgcattagagccatccagaaggttattaagggtcatcctccacatgcagccctgcaggtcctgcctgagcaagccaggcgggggctggataactcctgggggacccagccttgc

SEQ ID NO: 895817 - DNA, 120 bp, Artificial Sequence
  ENSG00000285527_15 (sequence is synthesized)
agtcggggctaggaactactggactaaattgtctccacatttgtcccctccccagcattctagctcctgaggagacggtgcccttgctgtctccttaatgaagtgcaagcacagcttctc

SEQ ID NO: 895818 - DNA, 120 bp, Artificial Sequence
  ENSG00000285527_16 (sequence is synthesized)
gtgcccatttgtatattctacacaggaagccgagatgcagagggaagagtgacaaggccaaggtcacaccgtgaccttcactggtgaagccaggaacaggtgcaggctcctgccttgctc

SEQ ID NO: 895819 - DNA, 120 bp, Artificial Sequence
  ENSG00000285527_17 (sequence is synthesized)
tctttcctccgacctccagctccagcctgacccacctgggtttttcccctctgcatgcagagacagcagcctcctttacagatacagatgtcaagacagatgaacaggtaagagggaaaa

SEQ ID NO: 895820 - DNA, 120 bp, Artificial Sequence
  ENSG00000285527_18 (sequence is synthesized)
ggctccacgctgggggctgcttgtgtccccctgggtcagtccagcctgacaaggggccttatcattaaagccatgtcagtctacaccagccccagcagccggctacatttcttggacacc

SEQ ID NO: 895821 - DNA, 120 bp, Artificial Sequence
  ENSG00000285527_19 (sequence is synthesized)
tttccaggaagacttgccagcggtgcccgtgcagggcccacctgggacacactggccccgtccagcaatctgtttctaattccctgatgcagggcgatttctcctcctccctcgctgccg

SEQ ID NO: 895822 - DNA, 120 bp, Artificial Sequence
  ENSG00000285527_20 (sequence is synthesized)
cgggcttcacatgcctcaaggattacacgctgagtgaactctgtccgcgaagccaaggcagcagggagtgaggacaacgcgttccattgttccccacccgccttcccaatgccctgattg

SEQ ID NO: 895823 - DNA, 120 bp, Artificial Sequence
  ENSG00000285527_21 (sequence is synthesized)
gcaagaaaatgtctctgagagacggatggaaagaaaacattcccgggctgaggcctcccatcgggctgatcagccaccatcactgggagccgctggacagatcttctgttaccaaacaaa

SEQ ID NO: 895824 - DNA, 120 bp, Artificial Sequence
  ENSG00000285527_22 (sequence is synthesized)
gctcccttctccctccttggtcccagctcccagggaaattaacctcaaaattgggggtgagccttaggggactgttcaccctgacttccggggcaggctacactgcaaatactccctctg

SEQ ID NO: 895825 - DNA, 120 bp, Artificial Sequence
  ENSG00000241911_0 (sequence is synthesized)
aagctgctgggacactcatctgtgtgtggcctgtggctcacaggggcaggctcatgaatgtcaaagtaacacagaccctgagatgaggcaggaaagttgtatcggaatgttttcagacta

SEQ ID NO: 895826 - DNA, 120 bp, Artificial Sequence
  ENSG00000241911_1 (sequence is synthesized)
aaatttaatctattaattattcttctgaagttggcagctttgaaaaagatgccctgagtcagcatagtcattccaaccaaaaagaaaaaagggaaaaaataatcatctttcccaaccctt

SEQ ID NO: 895827 - DNA, 120 bp, Artificial Sequence
  ENSG00000241911_2 (sequence is synthesized)
aaatcgtccagcactaaccagactctgagaccctctgcagcagcagcctatcagtgcagccacatcctctctgagcggatatgacaaaccccaggggtgaagcgacctaacctatgagcc

SEQ ID NO: 895828 - DNA, 120 bp, Artificial Sequence
  ENSG00000285529_0 (sequence is synthesized)
ggtatccctgaaggtgtcaagcctcagtgcaaatccctctcgtttctacgaaaagcgttctgtaaacatgtgaaatacatgtattattatagggacaagcaaatcagtaaacatgttgta

SEQ ID NO: 895829 - DNA, 120 bp, Artificial Sequence
  ENSG00000285529_1 (sequence is synthesized)
atgttgtaggagatggcagcagaaggagctacgattatggaaagaagagaggatgagaggaaccctgtgatactggatagcaattggagagatcagaattggaaaaaactactttaaact

SEQ ID NO: 895830 - DNA, 62 bp, Artificial Sequence
  ENSG00000285529_2 (sequence is synthesized)
gttatgaaaatcaactaaagatggatcaaagacttacacataagacctaggaccataaaaat

SEQ ID NO: 895831 - DNA, 120 bp, Artificial Sequence
  ENSG00000285529_3 (sequence is synthesized)
cctgggcaataccattcaggacatagacatgggcaaatatttcatatctaaaacaccaaaagcaatggctacaaaagccaaagttgacaaatgggatctaattaaaccaaagagtttctg

SEQ ID NO: 895832 - DNA, 79 bp, Artificial Sequence
  ENSG00000285529_4 (sequence is synthesized)
tatctaaaacaccaaaagcaatggctacaaaagccaaagttgacaaatgggatctaattaaactacaggcaacctacag

SEQ ID NO: 895833 - DNA, 120 bp, Artificial Sequence
  ENSG00000241912_0 (sequence is synthesized)
tgcctcagaggaagggtgaccgaaggagagctcgagaaacggaaagagaatgagaacagagagagataaagaaaagcatacaaaatatttattgctgcatttccgtgccttctccacaat

SEQ ID NO: 895834 - DNA, 120 bp, Artificial Sequence
  ENSG00000241912_1 (sequence is synthesized)
tctccacaatattgaggcctgaattaggtaggtagttgaaatctctctaaaagtgagtcagatattgtgtccggaattggtgggttcttgatcgcactgacttcaagaatgaagccgtgg

SEQ ID NO: 895835 - DNA, 120 bp, Artificial Sequence
  ENSG00000272851_0 (sequence is synthesized)
aaattatcagaaaatgagaagcaccatttatagttcacaagaaatgcaacatggactccaatagaagtagatatcaataactgatacttcctctgtttatgaccccaaacatgctaaaat

SEQ ID NO: 895836 - DNA, 120 bp, Artificial Sequence
  ENSG00000272851_1 (sequence is synthesized)
gctaaagtaatgcttgcaaagaatatgaatgacaaatgttatccagcagctttttggtttaaaatgattgccaatgactagcagcttcaatggtaacagtagggaggaagaacccttcag

SEQ ID NO: 895837 - DNA, 120 bp, Artificial Sequence
  ENSG00000272851_2 (sequence is synthesized)
catatgcagcaaaatgcggggggagggagagaaactggaagaaacataaaagttatatggttagtgtctttaaagtctaaaaatttaaactattgtttaaaaaaccttacatagttcaca

SEQ ID NO: 895838 - DNA, 120 bp, Artificial Sequence
  ENSG00000272851_3 (sequence is synthesized)
gctatcggcccacacagtaagcaaatatctgtgtgtaggatgggagccttcactttggagtggtttttgtaactctgtttacattaaaaaggacagaagagtgttttgttgcattgacaa

SEQ ID NO: 895839 - DNA, 120 bp, Artificial Sequence
  ENSG00000215159_0 (sequence is synthesized)
atcaggcagtggcggaaaaggggcggagaaccggagaaaagggcggagaaccggagaaaagggcggagaaccggagaaaagggcggagaaccgggaaaagggcggagaaccgggaaaagg

SEQ ID NO: 895840 - DNA, 73 bp, Artificial Sequence
  ENSG00000215159_1 (sequence is synthesized)
gggcggagaaccgggaaaagggcggagaaccgggaaaaggtcaagacctggaccacagcttcaacctcctggg

SEQ ID NO: 895841 - DNA, 120 bp, Artificial Sequence
  ENSG00000215159_2 (sequence is synthesized)
gagtttctttacctgtaattcctgatggagattccctaaatgagaatagtgctgaagactaacagttaatcacatctcttcttagggggaagagataaaaagggctgggaagccaattaa

SEQ ID NO: 895842 - DNA, 120 bp, Artificial Sequence
  ENSG00000215159_3 (sequence is synthesized)
aaaaataggtccaatttcagtgtttactcctctgaaagtcctgctcattgcaaagtttggcatacgaaggaggacttggaactcgttgaatgccagggacaacagggaaaaagacctcaa

SEQ ID NO: 895843 - DNA, 120 bp, Artificial Sequence
  ENSG00000228043_0 (sequence is synthesized)
aagccgccaccgccgccgctgctgcatggcactaggctcccggcggggcaggttccgcagccggcaccgctctggctaggcgcacggaggcgccttgcttagtctgacccttatttggcc

SEQ ID NO: 895844 - DNA, 120 bp, Artificial Sequence
  ENSG00000228043_1 (sequence is synthesized)
aggcgtaaaacttgtcctgcctaaaagcctactgagacctcctaactggtctaatccgcgggagacgccaaaggcggcggccgtttgtgcgcacaggatttttcttggagctgtagcagt

SEQ ID NO: 895845 - DNA, 120 bp, Artificial Sequence
  ENSG00000228043_2 (sequence is synthesized)
ctaggaagccagggtggaacttttgctaagctcccgttgtaagcccagagctgtaataactgctgagacacaaccagcagtatacaggctccagttggaaatcgagaactttccagggct

SEQ ID NO: 895846 - DNA, 120 bp, Artificial Sequence
  ENSG00000228043_3 (sequence is synthesized)
catcacagctcactgcagcctcgacctcctaggctaaagtgatcctcccaactcagcctcccgtagctgggactacaggaatgtgccacgcccaggtctatccagctgaagtcaaaaatg

SEQ ID NO: 895847 - DNA, 120 bp, Artificial Sequence
  ENSG00000228043_4 (sequence is synthesized)
cccctctcaggctgcccccagtgactccagtttcctagcagagcctaaccaggttaagaaatttgtccatgggtgcctgaaccgaaagtcatatttctttttaccacaatgtgctgcctt

SEQ ID NO: 895848 - DNA, 120 bp, Artificial Sequence
  ENSG00000228043_5 (sequence is synthesized)
agaggaacaattgcatacaatgggatcaagtgcattgtaggctctatttataacatgcatatgagaaagagagcccattgagatctgcctcaagctgaagatgaaaagggggcctctgga

SEQ ID NO: 895849 - DNA, 120 bp, Artificial Sequence
  ENSG00000228043_6 (sequence is synthesized)
gtcgcttgatcgagcagagtctgatagagttatcaggcttttgcagatagaatgcctaccaccgtaggatacattgtcataatcagtgtttaggcaaaacacctggacttctgcaaggac

SEQ ID NO: 895850 - DNA, 120 bp, Artificial Sequence
  ENSG00000228043_7 (sequence is synthesized)
agtacttagcagctgtgttgaagaaaacacaataaaacaaagaataacaacgaaacagctgaatgatttaagtcaccaaatggctcctcctggaagcagggcaatctatgattatgatgt

SEQ ID NO: 895851 - DNA, 120 bp, Artificial Sequence
  ENSG00000228043_8 (sequence is synthesized)
ttgtcatctcaggtgatttggctgatttgcctaggcagctcttctggcaggtgtgaagtggtatctcactatggctaataggcattatttctctggtgactatggatgtcatgcacattt

SEQ ID NO: 895852 - DNA, 120 bp, Artificial Sequence
  ENSG00000228043_9 (sequence is synthesized)
tcataagtttaatggccatctagatatccctttctgtgaaggacctgctcaagtctttgtgcatttttctattagaatgtgtccttttttaaataaaaaattgatttgtacatttttaaa

SEQ ID NO: 895853 - DNA, 120 bp, Artificial Sequence
  ENSG00000215483_0 (sequence is synthesized)
gctgacgccccccatgtctgcgtgttgacagcagacttactggggacacgctgtagagctccgatgatggctgttggccgaatggatgaatggcttcattaacttcactgcaacacgcag

SEQ ID NO: 895854 - DNA, 120 bp, Artificial Sequence
  ENSG00000215483_1 (sequence is synthesized)
gagtccttgatctccccccttgaaagatcctagtccactgcctggaacatggaagatgctccataattgtttgctgaaggaacgagtgataaccagagaagccagctcctgcttcctgat

SEQ ID NO: 895855 - DNA, 120 bp, Artificial Sequence
  ENSG00000215483_2 (sequence is synthesized)
taaggcatgcagtcaggccagtggggaaatgggcctcatggtggagcttgcctctgctggaagactgacggagccagggctctgcctgccacaattcatgagctggccagaggtctttgg

SEQ ID NO: 895856 - DNA, 120 bp, Artificial Sequence
  ENSG00000215483_3 (sequence is synthesized)
attcctcccagtcattgctgagatgagtgaggattgtttcagaaaatcaggcctcctcctggggaatgtgcctcagcttctggtcattcaagaatgaggttggaagagatcattctcctg

SEQ ID NO: 895857 - DNA, 120 bp, Artificial Sequence
  ENSG00000215483_4 (sequence is synthesized)
tgagaaacaagtataggtgtgaagagacctgtccacagccattcaacaaatgaaaagtccaatcgaagatgggacctgatttcttacaccccagaataccatcggagctcctctggaaca

SEQ ID NO: 895858 - DNA, 120 bp, Artificial Sequence
  ENSG00000215483_5 (sequence is synthesized)
tgtccttgtcttctcagagtgtgaagtgtgtgtgtgacagtgcttttctgaggactcaggtgacctggaggctggagaacagcatggagcaaggaaaacaaagacgatgtgctggagtgt

SEQ ID NO: 895859 - DNA, 120 bp, Artificial Sequence
  ENSG00000215483_6 (sequence is synthesized)
atgttgctttcataattatgtgaaagaaaatgtagagaaatttgaaaggagaactggttatcagtagtgccatcctgctcaaatatcttcaaatacacaccaccatccatgtgtgggttg

SEQ ID NO: 895860 - DNA, 120 bp, Artificial Sequence
  ENSG00000215483_7 (sequence is synthesized)
attaaggagctgacgttcattagatctgcagtctcctgacctgatgtgcatcagaatcactgggagaacaaacaaacaaaaatgaatccaaaacaagcaacgaacagacagattctcaag

SEQ ID NO: 895861 - DNA, 120 bp, Artificial Sequence
  ENSG00000215483_8 (sequence is synthesized)
tcttgccaagtccaaagattgatttggtggagaaattgtactttgaaagctgcccaggtaataattctggcatatagccaggtttgtaaaatcttgaatgaactgtcttgggcaaacaaa

SEQ ID NO: 895862 - DNA, 76 bp, Artificial Sequence
  ENSG00000215483_9 (sequence is synthesized)
cttcctctcagagatcatgacaactggctgttcctatgtggatgctaatcttgctctgtcacccgggctggaatta

SEQ ID NO: 895863 - DNA, 120 bp, Artificial Sequence
  ENSG00000215483_10 (sequence is synthesized)
ctgggattacaggcatgcaccacaatgatcggctccaaacaggagcatcttggtatgatttttgtagacctgtgcaagcatcctgcctcattccatttggctgaagctcctgctccactt

SEQ ID NO: 895864 - DNA, 120 bp, Artificial Sequence
  ENSG00000215483_11 (sequence is synthesized)
cattccatttggctgaagctcctgctccacttcttgctgggctgtgaccattcaggatcccccactgtccaccagagtcagcacctaaaaggagagaaaatctttttctgtctggtgttt

SEQ ID NO: 895865 - DNA, 120 bp, Artificial Sequence
  ENSG00000215483_12 (sequence is synthesized)
ttcaaaattttgatgatggactcacatcaaggatgaagagctttgatgtcatttgaacaccaccaccatcaccaccaccagcatcaacaaacaaacaagcaaacaagcgtgaactcagga

SEQ ID NO: 895866 - DNA, 120 bp, Artificial Sequence
  ENSG00000215483_13 (sequence is synthesized)
gccctgtggcccagcctccagtccatttcctcactgtgatctggctaagtcacctcccctccacctcagttcagtcacctacacaacaggaatggtggctcctggcgtgaaaagttctta

SEQ ID NO: 895867 - DNA, 120 bp, Artificial Sequence
  ENSG00000215483_14 (sequence is synthesized)
ggagcattcagcatgatgctgtgtggagcacttggaaactgcgtgtgcatcacctcatatttctggccacaggtcattcagacatctgccctttgccctggaggagaaccactagggact

SEQ ID NO: 895868 - DNA, 120 bp, Artificial Sequence
  ENSG00000215483_15 (sequence is synthesized)
tgtgcccataagcaccaattctggcttttaccctacccatcctttgccatcccaaactatgccatcaacaaattctagaaatcaagttagaaatgctgttcccacgagggtctctgtggt

SEQ ID NO: 895869 - DNA, 120 bp, Artificial Sequence
  ENSG00000215483_16 (sequence is synthesized)
ctctcagaacaacaatcagctggccctgctgggcagatgttgcccaatcctaacccacacttagctatcaacttaatcattctcaactaaaaacacctacctgaacacttttaggggtta

SEQ ID NO: 895870 - DNA, 120 bp, Artificial Sequence
  ENSG00000215483_17 (sequence is synthesized)
aaaaacacctacctgaacacttttaggggttaagaatagtataatctcacttagccatttgcattttttcttctttttacaaaaagaaatttatctttttttttttttgagacggagtct

SEQ ID NO: 895871 - DNA, 62 bp, Artificial Sequence
  ENSG00000215483_18 (sequence is synthesized)
cggggtttcaccgtgttagtcaggatcgtcttgatctcctgacatcgttgccaagaatagta

SEQ ID NO: 895872 - DNA, 120 bp, Artificial Sequence
  ENSG00000215483_19 (sequence is synthesized)
gaatagtataatctcacttagccatttgtattttttcttctttttacaaaaagaaatttatctcattattatgtttaatcagtttcttgaggtataacttaagtgtgctaaaatttgctc

SEQ ID NO: 895873 - DNA, 120 bp, Artificial Sequence
  ENSG00000215483_20 (sequence is synthesized)
tttttagtgtacaggtctaggatttttgagaaacacatattcatatgtgaccacccccatgatcaacatatggaacagtcatttgccacccaaaattaccttgtgcccttttgttgtcag

SEQ ID NO: 895874 - DNA, 120 bp, Artificial Sequence
  ENSG00000215483_21 (sequence is synthesized)
actcttctttctccagaccctggcaaccactgatggattttctgtccctatagttttgccttttccagaatgttctgcaaatgtaatcatttagtatgtagccttttaagtctgatttct

SEQ ID NO: 895875 - DNA, 120 bp, Artificial Sequence
  ENSG00000215483_22 (sequence is synthesized)
ctttttattgcggagtaatattcccttgcatggatgtaccacagtttgggtaaccattcaacagtcaaatgagattgaatttgtttccattttttggtgattataaatacagctataaac

SEQ ID NO: 895876 - DNA, 120 bp, Artificial Sequence
  ENSG00000215483_23 (sequence is synthesized)
atttgtgaaagtgttttgtatgtacatacatttttcttagacatttggttttaagagatgtatttaggtttagttccagatgaacaatgagagactgaaagacttaagggacccctgaga

SEQ ID NO: 895877 - DNA, 120 bp, Artificial Sequence
  ENSG00000215483_24 (sequence is synthesized)
agagcagagggaatattccctgaggcagccatcagtcagacctggccctgtcatttaaatgtgggctagtggtagcaagatgctgttattattttcaccaaggacattttttgagtagca

SEQ ID NO: 895878 - DNA, 120 bp, Artificial Sequence
  ENSG00000215483_25 (sequence is synthesized)
attaaaatgaagtctatttctctgagcccctggagaagaacataagcacatgatggtaaccatcaatttagtgggcctaacgttatctaggtggttaatgtttccatggcttctggcaat

SEQ ID NO: 895879 - DNA, 120 bp, Artificial Sequence
  ENSG00000215483_26 (sequence is synthesized)
tcccagtgtaagtcacctgtgtatactgggtggatgcttctttaaattaaagataagctgttcagcttaataacagctaagggagaatatagagcccgtgggtgaactgtttactaacaa

SEQ ID NO: 895880 - DNA, 120 bp, Artificial Sequence
  ENSG00000215483_27 (sequence is synthesized)
gcttcttcagggtcattcaacttgaatgaactctcttttaggctaacttggtttgtggagggaatgcatgtttcttagttaaaatagttacattggaatcccaactgtgcacaggacttc

SEQ ID NO: 895881 - DNA, 120 bp, Artificial Sequence
  ENSG00000215483_28 (sequence is synthesized)
aagggtaattatgaacccccactgcagatttcaggcttagcaccaattctccttgctttctacttgtatccatcaaaaacagaagttacgatggagttacagctatacttgtaagggtct

SEQ ID NO: 895882 - DNA, 120 bp, Artificial Sequence
  ENSG00000215483_29 (sequence is synthesized)
cagtgaacctctcccactattctgccttatcacctttgggttcctgtgttctctaccccctccccactgcatgttttcattcagccaggaaacatttactgcctgcctggtatcaagccc

SEQ ID NO: 895883 - DNA, 120 bp, Artificial Sequence
  ENSG00000215483_30 (sequence is synthesized)
ttgcatgagggtgggagctcataaagatgactacactagagaatcatttgacctttctcatgtagacctcaacatgaatgagtttcaatgctgatagggcaatcattaccttcagacaaa

SEQ ID NO: 895884 - DNA, 120 bp, Artificial Sequence
  ENSG00000215483_31 (sequence is synthesized)
ttttcaggaacagccaagactagagaatgtatggctaaaacacagcactatgcatttataatagtcatgggttctcctgttttaattgtacatggagaatatttcagctttatttgtatg

SEQ ID NO: 895885 - DNA, 120 bp, Artificial Sequence
  ENSG00000215483_32 (sequence is synthesized)
ggctgctcttatgtaaaacattatttcaatgaggaaatgtgtttggggttctaaatgactaacttacaaacacaactttgaataaagtccatgaataatttgaggatttatgtctatcaa

SEQ ID NO: 895886 - DNA, 120 bp, Artificial Sequence
  ENSG00000215483_33 (sequence is synthesized)
tggctgatttaccagattgttggctttgggtttattggtatccatgttgagaggcatcagatcatccaaggtttaagtttcgtcctgaccactgactagcattgagaccttaatgggatt

SEQ ID NO: 895887 - DNA, 120 bp, Artificial Sequence
  ENSG00000215483_34 (sequence is synthesized)
aataacaatgataatgatagtgacaagagctagcttttcatgagcacagtggctaagagagttagcatcagttctagctgctttcattgacatagatgtaaatggggagggaaaccatga

SEQ ID NO: 895888 - DNA, 120 bp, Artificial Sequence
  ENSG00000215483_35 (sequence is synthesized)
ctagactcaaatctctgctctaacgtctgatacctgaatatcactttgcaagccacgtcatctctctaagttgtagctctttgtctgaaaaatgtggatagttaatacattataaataaa

SEQ ID NO: 895889 - DNA, 120 bp, Artificial Sequence
  ENSG00000215483_36 (sequence is synthesized)
ttattattacattaatacacagaaattcataatgctattgtggggattacatgagatgatggaagtatttaatctagtgtcttgtatatggcaaataaaaaataaatattcactgctgtt

SEQ ID NO: 895890 - DNA, 78 bp, Artificial Sequence
  ENSG00000215483_37 (sequence is synthesized)
aacaatggactattgactaagctttcagagctgtgggtgttctcagagggaggccagccagaacaccagcatctccgg

SEQ ID NO: 895891 - DNA, 120 bp, Artificial Sequence
  ENSG00000215483_38 (sequence is synthesized)
gttctcagagggaggccagccagaacaccagcatctccggcttttcttccaactcccaagttggagctccatctatcagaaatatgaaaccctggaatcttcctcctcctcacttctctg

SEQ ID NO: 895892 - DNA, 120 bp, Artificial Sequence
  ENSG00000215483_39 (sequence is synthesized)
gctttccacccctctccttcaggaccatcctggatgcagctgcaactctgctcttggctgtcctatggctggcaatagctttcttgctctctggcaggcaaaaagcagggtgtgtgtgtg

SEQ ID NO: 895893 - DNA, 120 bp, Artificial Sequence
  ENSG00000215483_40 (sequence is synthesized)
tgtgtgtgcatgcgtgcacgtgctcatgtgtgcatgcactggaaagctaaggctgaggcatcgaatgacaagatccctgaagtaaaaggctccacagctgcttacccaacccctaatttg

SEQ ID NO: 895894 - DNA, 120 bp, Artificial Sequence
  ENSG00000215483_41 (sequence is synthesized)
ggagactggctgtatatgtctcgtgtcccctgggcgactgtcccagtgagcaaggacaccaccaaccttcttcccccctacaccctccataggacagtgagatcctgcattggattatgc

SEQ ID NO: 895895 - DNA, 120 bp, Artificial Sequence
  ENSG00000215483_42 (sequence is synthesized)
atgaggtgtatacactctgcttgtacgtatgtatggaagaaaggattttggcttgaaacattttttttattggcagagacagcacttctcttaaaggaaatggcggaatttgccaaacta

SEQ ID NO: 895896 - DNA, 120 bp, Artificial Sequence
  ENSG00000215483_43 (sequence is synthesized)
agcctccagaagaaaatataacggagagtgtaaaagaaatccatgttcaaacattggcaagtgtgaaacattcaagatttttgtgtgaacatcacattgtgggagcaaaattaaattaag

SEQ ID NO: 895897 - DNA, 120 bp, Artificial Sequence
  ENSG00000215483_44 (sequence is synthesized)
ctggtctctggcaagcattggaatgaaagcagaactggagcaagcggatggtgcttgggcattttttgcaagaagccaaacagagcataatcagatgacaaccagggatcccaagggctg

SEQ ID NO: 895898 - DNA, 120 bp, Artificial Sequence
  ENSG00000215483_45 (sequence is synthesized)
ggttcttttcttcatctcattaacacacaagaacttaactgctttgggtccggagggtcccaaggaagtgccaaaagaacctgaactttcttcacctccacaactcaatgacaggcagag

SEQ ID NO: 895899 - DNA, 120 bp, Artificial Sequence
  ENSG00000215483_46 (sequence is synthesized)
aaggaatgaatttcattcaaaaaatatttattgagcatcctcagaatatttattgtgcaaactactgttccaggcaccaaaggaggggatggtcccagctcctttatggagtctgcagtc

SEQ ID NO: 895900 - DNA, 120 bp, Artificial Sequence
  ENSG00000215483_47 (sequence is synthesized)
cacagacttgaactcaactaactagaaggaaaggcagctcagagcaagtgccctgctggagattgaagcaaagtgccagagaacgtgggggtcattcaagaatgaggttggaagagatca

SEQ ID NO: 895901 - DNA, 120 bp, Artificial Sequence
  ENSG00000215483_48 (sequence is synthesized)
atcatcttgggtaagaccacagggaccaccaagacacccagaagagacacttgattgtttcctggatgttccagttttggggcccatagatatatgccatttactttacatgctttctaa

SEQ ID NO: 895902 - DNA, 120 bp, Artificial Sequence
  ENSG00000215483_49 (sequence is synthesized)
caaggagaggtggtgccagaagtggtagactgcctggaagtctaagatccagggctgaagcttgtcaggaacacagagaaggcgtgggagcaggaaaggccttggaggaggggccggtgg

SEQ ID NO: 895903 - DNA, 120 bp, Artificial Sequence
  ENSG00000215483_50 (sequence is synthesized)
agcaaaacaacactgtattctggttggaaccttggaacattcagaccttggagagaacaagcaaaacattttcataattatgatgtcatgtgggttgaaagcagagtcttgatttgggtt

SEQ ID NO: 895904 - DNA, 120 bp, Artificial Sequence
  ENSG00000215483_51 (sequence is synthesized)
ccgctgctgcccataaacagctgggtgggaatttgggtcaatcccttcacttctctatagctccctttcctcatccccaaaatgagatgcttgtttgatttcagagtttcctgctaggtc

SEQ ID NO: 895905 - DNA, 120 bp, Artificial Sequence
  ENSG00000215483_52 (sequence is synthesized)
tacaattctgtgattagcatctctgctctctggaatattcttttatgtccggtgacttaaatcagattatcaaatatttattgaacacctgctatgtgtccagaaactgaaattatttga

SEQ ID NO: 895906 - DNA, 120 bp, Artificial Sequence
  ENSG00000215483_53 (sequence is synthesized)
aaaattggatctgtgggggaaagaaggggctgagaagggacaaatactagtaaagagaaatggatggagctcaacaactaagaatttttgaactctaataaatgtttctactttctcgct

SEQ ID NO: 895907 - DNA, 120 bp, Artificial Sequence
  ENSG00000215483_54 (sequence is synthesized)
acagttccaccccctcttatgccgcttagcactcaccattgcccaacataggagctgttttatgtcttcctcttgattctcactgtttcctgctttggagcataagctggacagagaata

SEQ ID NO: 895908 - DNA, 120 bp, Artificial Sequence
  ENSG00000215483_55 (sequence is synthesized)
cttgccaagtccaaagattgatttggtggagaaattgtactttgaaagctgcccagtttactgccttcagagagttttcaggatgtgacataggaaggaagaacccaggaggggactggt

SEQ ID NO: 895909 - DNA, 120 bp, Artificial Sequence
  ENSG00000215483_56 (sequence is synthesized)
gggtttcctgagttgagaagacagactgctgaaatgtttccaggcagaccatggcagctagagttcagagggcagagcacaagagacgagattgctgcatagaaagagaactccagagat

SEQ ID NO: 895910 - DNA, 120 bp, Artificial Sequence
  ENSG00000215483_57 (sequence is synthesized)
ctgcagagggtcctgcttgaggattcagaagtgaaaaactggagagagaaaaaacatgtttcagaaaaactatagtacaccagattccggccttggccattggttttgagtctctgctga

SEQ ID NO: 895911 - DNA, 120 bp, Artificial Sequence
  ENSG00000215483_58 (sequence is synthesized)
tgacccaatacctgattgattcttggcatcattcacctggatccctcaaggcttcagactttgcatttctgattacttggctgactccacccagacctgtgactcatgactcagctggtc

SEQ ID NO: 895912 - DNA, 120 bp, Artificial Sequence
  ENSG00000215483_59 (sequence is synthesized)
ctgcggcccccacccagaggtggactaagcacgcaataaccattttccacatcttccacatttcccccatgatggcatccccaaccaatcagcagcacccattccctagtcccctgccca

SEQ ID NO: 895913 - DNA, 120 bp, Artificial Sequence
  ENSG00000215483_60 (sequence is synthesized)
ccaaactatccttgaaaaaccctaacctccaagggttcagggagaccaatttgagtaataacttcatcttctgcatggtgtggctggcctcatgtcaattaaactctttctttactgcaa

SEQ ID NO: 895914 - DNA, 120 bp, Artificial Sequence
  ENSG00000215483_61 (sequence is synthesized)
acactggagttgtgacatcagcactattctgcctctgctatacaacaggccctggaacatactcgaaccatgtaggtgatttgtgtccctgtctcatctttcttaccagaataccatcgg

SEQ ID NO: 895915 - DNA, 120 bp, Artificial Sequence
  ENSG00000215483_62 (sequence is synthesized)
gagaaattgtactttgaaagctgcccagtgtatatccatgccaaatagacacaaagctggaaggggcgtgatttgaaatgctctgggttggttacaggttcaagtgattctcctgcctca

SEQ ID NO: 895916 - DNA, 61 bp, Artificial Sequence
  ENSG00000215483_63 (sequence is synthesized)
ggtgcgtgccaccacgcccggctcccaacctcaggtgatccgactgcctcagcctcccaaa

SEQ ID NO: 895917 - DNA, 80 bp, Artificial Sequence
  ENSG00000215483_64 (sequence is synthesized)
ggaagaggatgacttctaacgatctgtcatggaagagtgaggtttggtgttgccacgatgaggtatatcatgcagaaaaa

SEQ ID NO: 895918 - DNA, 120 bp, Artificial Sequence
  ENSG00000215483_65 (sequence is synthesized)
aggattcctcattttctaaaccagatactatgtttctttctcttttgctttctgctctctacttccttccagttgagactgtggctgtcttttttccccctcccattagagagttcagtg

SEQ ID NO: 895919 - DNA, 120 bp, Artificial Sequence
  ENSG00000215483_66 (sequence is synthesized)
ggcttttccccactggaatcagatagagactctgggatggagctgggggatttgctgatagtctggtgaacctgagaggaaaacgaagctcaggtcacacagcaagtaacagagtggcca

SEQ ID NO: 895920 - DNA, 120 bp, Artificial Sequence
  ENSG00000215483_67 (sequence is synthesized)
gtccaggactcaaaactcaggcctcctgactcctggcccagtgctcttttcaaagcgtccttccataaacgatgaggattttagtaatccatccatctccctgcagcctccctgaatgtt

SEQ ID NO: 895921 - DNA, 120 bp, Artificial Sequence
  ENSG00000215483_68 (sequence is synthesized)
acaaatattaatatactcatctgatacaccttgcacacctcctgtgaggcagatcctttctaggcactggggacttatcagcaaaacagaaataaatccctgctcttaaggggcttatgg

SEQ ID NO: 895922 - DNA, 120 bp, Artificial Sequence
  ENSG00000215483_69 (sequence is synthesized)
ttgagtgatgggagacagataataaccacaataaacaaataaatgatagattttccacaatgtctctccagggaacattttctcaacagaatggttcttgattttttaaagcccaaactc

SEQ ID NO: 895923 - DNA, 120 bp, Artificial Sequence
  ENSG00000215483_70 (sequence is synthesized)
aatttgaaaggcaggaatctgctttctgcaggcaggatggagctcctggaacactatatgctacttctgagatttcttctttgtttttgaacgtcaccaccatgtctctagtgtgatgta

SEQ ID NO: 895924 - DNA, 120 bp, Artificial Sequence
  ENSG00000215483_71 (sequence is synthesized)
aaacagttgctgtggggattgaatgactagtgcatgtgaagctgccagtgtggtgcctgcctcggggttcatcaaaaacaggaagtcaaaggtctgaatactcttcctgtgaatcaacag

SEQ ID NO: 895925 - DNA, 120 bp, Artificial Sequence
  ENSG00000215483_72 (sequence is synthesized)
agaaagctttctcatctgagcccatgaatacgcagcctagggccactgacttgtaagaatggagagttgcaagctggaccctggggtatcagacaggcagaatcccttgcagctagagtc

SEQ ID NO: 895926 - DNA, 120 bp, Artificial Sequence
  ENSG00000215483_73 (sequence is synthesized)
atggaagcgaagaagtttccacaattagatgtgcctatgcaagatttgaaaagaggaaatgtgacaaaagggcagagttctgcagctttgactacttttgctggcatgcaaggtcttgaa

SEQ ID NO: 895927 - DNA, 120 bp, Artificial Sequence
  ENSG00000215483_74 (sequence is synthesized)
gatgctgtgctttcctgcagccaaattctactgtatagccacaagcttcatgaaaacctttggagtcattttctttggagcgggagttgggatggtttgctgcagacacccagatgtttg

SEQ ID NO: 895928 - DNA, 120 bp, Artificial Sequence
  ENSG00000215483_75 (sequence is synthesized)
atgctatgtccttttatcttcacctgcatgaggccgcttgatattgatctcactgcagtcctcactacatagctcattggagtccacaccatggcttcgtacgagtgtgcacatgcagtc

SEQ ID NO: 895929 - DNA, 120 bp, Artificial Sequence
  ENSG00000215483_76 (sequence is synthesized)
aaaggcacccttaatgcctgctgctctgcgtccttcgatgtctcctgctcagcagtccagctattacaagaggcacagagctgagcatattgcttcagacccagaagaatctcctccatc

SEQ ID NO: 895930 - DNA, 120 bp, Artificial Sequence
  ENSG00000215483_77 (sequence is synthesized)
ccaattgggtacaattgtgaaggaaatgtgttggaggaagtcaccttctgtgagctgcttatccatcaagttgcactctgtgtgggtgtgtatccttcctatcttggctgtcttaggtct

SEQ ID NO: 895931 - DNA, 120 bp, Artificial Sequence
  ENSG00000215483_78 (sequence is synthesized)
ccatatcctaggcagtagccgggtcagtattccttaccatgcacatttgggcaatagaggtactggacaatataggtaaattcacaaccaattctttccctgcattttctccaaatctgt

SEQ ID NO: 895932 - DNA, 120 bp, Artificial Sequence
  ENSG00000215483_79 (sequence is synthesized)
ggaccaaatcctacttacccatggccctacaaagttgtctttcctatcaacactaacacaccacaccttgtttctcctaaccttcccagaattccttgaaggctttctgatatttgaggc

SEQ ID NO: 895933 - DNA, 120 bp, Artificial Sequence
  ENSG00000215483_80 (sequence is synthesized)
ttgacaaaatttattcatgcattgattaagcagctaggatttattaaccactgtgaaacagaaattttgccaggcaatgaagatatttagttgagtaagacagtgcttctgtattcaaga

SEQ ID NO: 895934 - DNA, 120 bp, Artificial Sequence
  ENSG00000215483_81 (sequence is synthesized)
ttccctgaatttggggcattcgaatggtatgtactaaatgtcttattggatggttcatcctggaggagcggctaatggaggctggagtcaagctaggtgtctgggctcatgtctaccttc

SEQ ID NO: 895935 - DNA, 120 bp, Artificial Sequence
  ENSG00000215483_82 (sequence is synthesized)
ttctgagtatcagagggcagactctgatgttctcagagatagatgttctcatagtcttcggctggaggaaatgcccttgttcatgccatctgttgacctgtagctaccatgtagacctct

SEQ ID NO: 895936 - DNA, 120 bp, Artificial Sequence
  ENSG00000215483_83 (sequence is synthesized)
ctgagggcctgtggctcatcaggagatccgatggacacctgaatctcagaaaaactgacctatggcactgttgtgatgcacaggtataggcacatctcaaaacatacccgtaaatgtccc

SEQ ID NO: 895937 - DNA, 120 bp, Artificial Sequence
  ENSG00000215483_84 (sequence is synthesized)
aagtttgaatattttcaaaattataagcttgtatatagcttatatatttgcattgtaatccatttgtacagtacctaattcaatgcgagcaattactaatttggaaattgtactgatata

SEQ ID NO: 895938 - DNA, 120 bp, Artificial Sequence
  ENSG00000215483_85 (sequence is synthesized)
aataattcctctctttattgcatgtaacactgtgtcagtgatataaaagctatgtgtgtatatatatacatatatataatatacagatgtattgaaataacttttctatttgtaaacata

SEQ ID NO: 895939 - DNA, 120 bp, Artificial Sequence
  ENSG00000215483_86 (sequence is synthesized)
atggaattactgtagaatatcaccctcaagggaaggaagaaatacatgtgagcactttcagggtagtttgcctgcatctgagcagttgtagatactttggtggtataactggtgatgaag

SEQ ID NO: 895940 - DNA, 120 bp, Artificial Sequence
  ENSG00000215483_87 (sequence is synthesized)
aagaaggagggaagttgcagaggaaagaagcttggagatgtttgggatagcttttttaattttcactggagtcgattgtgctagggcttggttttgaggatctgtgggtaaatgctgaga

SEQ ID NO: 895941 - DNA, 120 bp, Artificial Sequence
  ENSG00000215483_88 (sequence is synthesized)
ggggtgggtgcagttgcctaggcacaaatatctgaatagagcagatatggatgagtggttcaggggaggaaatattatctgccttcttttcattctgcttcatgctaggcagggcaatga

SEQ ID NO: 895942 - DNA, 120 bp, Artificial Sequence
  ENSG00000215483_89 (sequence is synthesized)
tgattggttttcattcagcttgtgctccaagagtacctcagaaaatggggagccatttttccccagttttggtttttagaggtttatatccccaactggctatggttggctggcagcctt

SEQ ID NO: 895943 - DNA, 120 bp, Artificial Sequence
  ENSG00000215483_90 (sequence is synthesized)
tagcttcagtgtagccacacatgatttcacgtcgtctgtacattcttcggcaggaacctgctccttttacttccagtggacacagagcacttcagctatgggcatccataactacttcct

SEQ ID NO: 895944 - DNA, 120 bp, Artificial Sequence
  ENSG00000215483_91 (sequence is synthesized)
cctggatctgaggctttcttggctctgagagcttcctgggtttgctgacctcacccctgtgaggaggaggattggcccggctgctgaaaacatacgtgtaattgaaggaattctattaag

SEQ ID NO: 895945 - DNA, 120 bp, Artificial Sequence
  ENSG00000215483_92 (sequence is synthesized)
gaggcgctggagaggagcagtaaggaaggttggcatctgggtggacccgatgtcaggcctggcccgcgcacccaccagttatgtaaccttgggcaaatgtcctccctgagctgagccttt

SEQ ID NO: 895946 - DNA, 120 bp, Artificial Sequence
  ENSG00000215483_93 (sequence is synthesized)
gcaaatgtcctccctgagctgagcctttctttcctcatggactaaacagggctggagcacagtggcatgatctcggctaactgcaacctctgcctgcctcccaggttcaagcaattctcc

SEQ ID NO: 895947 - DNA, 120 bp, Artificial Sequence
  ENSG00000215483_94 (sequence is synthesized)
cttctgttgccgtggcatgttgtgaactacacttgtccagacatctaaccacctacaaggcaatgaagagaccctttactcccacgtcagtagctaccgcagctgcgaagcgaatcctga

SEQ ID NO: 895948 - DNA, 120 bp, Artificial Sequence
  ENSG00000215483_95 (sequence is synthesized)
tgggcaagtctggttgctgtggcagtattgagtcagccacagtgagtcaagagaaagtcacctttggcgctaccaccattgccagcaagaggtccttctttctcagagaaaagatggcta

SEQ ID NO: 895949 - DNA, 120 bp, Artificial Sequence
  ENSG00000215483_96 (sequence is synthesized)
tcccgcccaatgtttggccccctcctgcaaaggccaaaacattcgttgggtttttcctttactgtctaaataaagaagaatttgtgcacagtctgagtgggtcaggatttcatcccatgg

SEQ ID NO: 895950 - DNA, 120 bp, Artificial Sequence
  ENSG00000215483_97 (sequence is synthesized)
tgacggacctggaggtgagttctggtggccacttatttttctttggaactgatggccatccctggtgctgcccctgaccatggggcactgtcaacccataatgcttaggactaattgcat

SEQ ID NO: 895951 - DNA, 120 bp, Artificial Sequence
  ENSG00000215483_98 (sequence is synthesized)
aagcttcatgtgagtagagaagcaattgtagcagcatgttggtagtttctgtatctcacagctccaggttgtgttctggaagtcaaccattcctgtggcaccccaccttctaactggggt

SEQ ID NO: 895952 - DNA, 120 bp, Artificial Sequence
  ENSG00000215483_99 (sequence is synthesized)
agagggagcagctgccttgaaggctggttcacagtgtcgtactggaaggcattcctggatccaacctttagcctacccttccagcccgtccaatagttgtatgaacactgaatttcctgt

SEQ ID NO: 895953 - DNA, 120 bp, Artificial Sequence
  ENSG00000215483_100 (sequence is synthesized)
actaaatccctttcagtttaaaatagctaaaatcatttctgttttccaccactgagttctgacagatagatttatcaaaggcagcataaaaaaggtgatttcaactcttttttacctcaa

SEQ ID NO: 895954 - DNA, 120 bp, Artificial Sequence
  ENSG00000215483_101 (sequence is synthesized)
ttaaaaagtgttttgtgactgttgctaataacttcatctcaagagcactgtaaggacttgagttctagtcctgtctctgctgcccatatgtttgtgtgtgtgaccttgaataagtcactt

SEQ ID NO: 895955 - DNA, 120 bp, Artificial Sequence
  ENSG00000215483_102 (sequence is synthesized)
cagccttcaaagttcttttccttatctatcaaactgggcacataatgcctgctttgtatgtgtgcccataagtggagagaatgtgaatgaaagtgggctttgggcaataaaatgtgactg

SEQ ID NO: 895956 - DNA, 120 bp, Artificial Sequence
  ENSG00000215483_103 (sequence is synthesized)
ctgtctttttgccttaatataatatagtctccctatgaaatcctatctcttcctcaaggaaagtactagttagaaaatgtctattcatcacaaagtgagaaataaataaaataacctgtc

SEQ ID NO: 895957 - DNA, 120 bp, Artificial Sequence
  ENSG00000215483_104 (sequence is synthesized)
gctggtgaagatggaagatagtaactgcctgctctcttagcattttggactaagttcttctactctcttatcttcttaatttcacagcaaacaatggactattgactaagctttcagagc

SEQ ID NO: 895958 - DNA, 120 bp, Artificial Sequence
  ENSG00000215483_105 (sequence is synthesized)
aaattgtactttgaaagctgcccaggccttcatgaatgccacagtggatctactctgccctcctcttgccatcatcaccctccccaggagctggaaatcatgagctttatttcaagatcc

SEQ ID NO: 895959 - DNA, 120 bp, Artificial Sequence
  ENSG00000215483_106 (sequence is synthesized)
ttttacagaactgtctggttcaaacaaaacaacgtgtgtaaaaggtcttatttaattacttatcaaaggttagtgcactatagaaatgtgagaggcttcagttagacccagcagtttctt

SEQ ID NO: 895960 - DNA, 120 bp, Artificial Sequence
  ENSG00000215483_107 (sequence is synthesized)
agaagttcaaagagttacataattaaaagttggttaataaatgattaatttggcaaaatatttgaggtagtgttttactttcccaaagtgatcacattgattatttctgttttctcctca

SEQ ID NO: 895961 - DNA, 120 bp, Artificial Sequence
  ENSG00000215483_108 (sequence is synthesized)
taataacaggattggccatgcagtaaggtggtacaggcataatattcattttctttttttgtttttaactagctagtaaaaggtaagaaaacatttattggagcatgtgcacctggtgtc

SEQ ID NO: 895962 - DNA, 120 bp, Artificial Sequence
  ENSG00000215483_109 (sequence is synthesized)
aattttttctcccaacattatattatgaagttttcaaataagtagaaaagttgaatgaaagactctctaccaagatcacctacaaacccaacccaccatctaaatcctaccgttagcatt

SEQ ID NO: 895963 - DNA, 120 bp, Artificial Sequence
  ENSG00000215483_110 (sequence is synthesized)
ttactacttgatttattgccaatctgcccatatatctatccttccatccattcattaatccttcttacttttgggatacatttcaaggttacttgcaggcatcagtaaactttcccttaa

SEQ ID NO: 895964 - DNA, 120 bp, Artificial Sequence
  ENSG00000215483_111 (sequence is synthesized)
ctggtgaaacagcatggatatcattaactggaatttgacatcttcttagagtacttttttttcttgtttatgtaaatggggtctaatttaatgttataaaaattatggcagagtttgcta

SEQ ID NO: 895965 - DNA, 120 bp, Artificial Sequence
  ENSG00000215483_112 (sequence is synthesized)
ctgctgtgagtctggggccttggaaccattttagaccaaggcaggaaaaataaacagatgggcgagagggagaaactgagtttcaacaaagaaattgcaccgaacccagaactaaacagg

SEQ ID NO: 895966 - DNA, 120 bp, Artificial Sequence
  ENSG00000215483_113 (sequence is synthesized)
aagaaaagtctcctgtgttgcacggctgtgtttggtgtacaaataacacctggggtctgtggtgatgggtccttaggaatagagagaaagagaaatggccttggaatttagtggcctgaa

SEQ ID NO: 895967 - DNA, 120 bp, Artificial Sequence
  ENSG00000215483_114 (sequence is synthesized)
gacatagtttaaaaattcatttccggacctcaacctacggcctttgacagaaagatgggtttgttgtctgctgtgaaataaaagccatctgaggcttgtgggagcatgatgagcaccaga

SEQ ID NO: 895968 - DNA, 120 bp, Artificial Sequence
  ENSG00000215483_115 (sequence is synthesized)
gtccggcttagaaatcacgctgatggcccagaaaactcagccaaccacagataccattgctgcttctagaagcccaggacactggcactgtgaggcaatgctggagattcgtcctatccc

SEQ ID NO: 895969 - DNA, 120 bp, Artificial Sequence
  ENSG00000215483_116 (sequence is synthesized)
tggtctcttgcaaacattttaaattgaaacctttaatagtcagcatgagagcactcggattcaattatattcatctctgaagatgtcctgatatcgcctacttgtttataaaaattaatc

SEQ ID NO: 895970 - DNA, 120 bp, Artificial Sequence
  ENSG00000215483_117 (sequence is synthesized)
agaaaatgtagagaaatttgaaaggtaagatctgaccgctttgacccctctcctcacaccagcctatgccccactttcttgaagacccactccccagcttagcagccaggtacccatcac

SEQ ID NO: 895971 - DNA, 120 bp, Artificial Sequence
  ENSG00000215483_118 (sequence is synthesized)
agcctggcttcaagaagggagcccagtccgccaggtttgttctctctccttcggtctgtctctgttggccagtctgtccaggagtcactctgtccatgggtcagtctctccttctttctg

SEQ ID NO: 895972 - DNA, 120 bp, Artificial Sequence
  ENSG00000215483_119 (sequence is synthesized)
actgtcttcctatcattctttctcagttgttccctctcaccttaagggctgcctaatttctctctcatcatgtctttacttctctcctagcctcatttccagctttggcttcctcataac

SEQ ID NO: 895973 - DNA, 120 bp, Artificial Sequence
  ENSG00000215483_120 (sequence is synthesized)
taaagtgtgctgtggccccaacatggcatcctgacttcttttcagagtctgcctccaagcttctggctggtcttgccacatactccaattcatatcccttcacattacatcaagctggct

SEQ ID NO: 895974 - DNA, 120 bp, Artificial Sequence
  ENSG00000215483_121 (sequence is synthesized)
cagtctgtctcttctcctctggccagacaatggcagatcaccttggtcaagcatgtcctctggaccaattgccccagaccaggattatttaaatacaactcgtccatctgcagttgtcct

SEQ ID NO: 895975 - DNA, 120 bp, Artificial Sequence
  ENSG00000215483_122 (sequence is synthesized)
taaaatctgatttatagaaggtctgtgtgggcttggcatttctggtgtccactcattctgtctagtgaattgtccttcttccatgacgccagtggtgatagatctcaccctcctctgatc

SEQ ID NO: 895976 - DNA, 120 bp, Artificial Sequence
  ENSG00000215483_123 (sequence is synthesized)
cctgggcctgttggttgtggagtttatgggccacttctgcaacttgatggccttgggccatggaaaggcctgtcaccccttttctggcactagaatggaagcttcagtagggcaggaacc

SEQ ID NO: 895977 - DNA, 120 bp, Artificial Sequence
  ENSG00000215483_124 (sequence is synthesized)
ctatttaggcatttcagttaggcttggcacactgtcttgcatggagaaagctcagaataagacagagatcctaaagtatcttcaacagaactaatctgacaaatttccaaggctcctttg

SEQ ID NO: 895978 - DNA, 120 bp, Artificial Sequence
  ENSG00000215483_125 (sequence is synthesized)
ggagataaaatctacttgggggaatgggaaaaggatgtctacatagatttagaataacgaccaccaccaccatcatcatccttgacagaacctttatgccaggtgctgttctaaagcact

SEQ ID NO: 895979 - DNA, 120 bp, Artificial Sequence
  ENSG00000215483_126 (sequence is synthesized)
ttacatactttatctcatttaatcctaacaacagccctgtaagataactgttactatgccctttttacctttaatgaagaaacagcctcagggagattaagaaattcacccaaggtcaca

SEQ ID NO: 895980 - DNA, 120 bp, Artificial Sequence
  ENSG00000215483_127 (sequence is synthesized)
gagctagaaggtgaaagagctggatttccaacccaagtgtgcctgatgtcaactctgatctaagatgtggacgcacatgggcagaatgatgacgtgctcttcccaacctctcatttagcc

SEQ ID NO: 895981 - DNA, 120 bp, Artificial Sequence
  ENSG00000215483_128 (sequence is synthesized)
gcatgtgagagggcaaggtgtcttcagcaaccatttcatttgtaaacatacgtgtttttatccttggtctacgcaatagtattaccacacaggtaataccagtgggtgctgggtgttttt

SEQ ID NO: 895982 - DNA, 120 bp, Artificial Sequence
  ENSG00000215483_129 (sequence is synthesized)
ttttttttcctcttctacatattccctccaaaataaattattaattgcccctcttctaaatcttatgtcacagtctttaatgcctgcatctgaattgctgttaaaacatctcttggagtc

SEQ ID NO: 895983 - DNA, 120 bp, Artificial Sequence
  ENSG00000215483_130 (sequence is synthesized)
gttccctgtgatattacagtccgggttcctgcggcgtaatcccacttgctggtttttccctttgcattgcatttgggtgatgaatggccctttgatgttcctggcatctgccttcctgcc

SEQ ID NO: 895984 - DNA, 120 bp, Artificial Sequence
  ENSG00000215483_131 (sequence is synthesized)
tcaggaactcactgctgggtcctcttttccctgctaatggccctgtttgccttccacgacagttgagactcagaaacacttgcacccacggcacctttggacattgcagtttgcctctgt

SEQ ID NO: 895985 - DNA, 120 bp, Artificial Sequence
  ENSG00000215483_132 (sequence is synthesized)
ttcactgccctttcttctatttttctttactctgcctcttctgttctttgctctggcctgctcctgttccctggcagctccagccatgcagcaaacagtcaccagtcttcactttatcct

SEQ ID NO: 895986 - DNA, 120 bp, Artificial Sequence
  ENSG00000215483_133 (sequence is synthesized)
cagaactggtgacacagcacctactctccttatctctgtagaggcttcctccaaaatttctattacttaaccctttctcctagactcctccttgccgctcatcatggctgaggccctgct

SEQ ID NO: 895987 - DNA, 120 bp, Artificial Sequence
  ENSG00000215483_134 (sequence is synthesized)
cagatctgtttccctcagttctttgggaaagcagctgtctgacattgatgtgcatttgtttagccttttctatgtgtcaagcataggtttgtatagtcatagaggtggataacatagtct

SEQ ID NO: 895988 - DNA, 120 bp, Artificial Sequence
  ENSG00000215483_135 (sequence is synthesized)
taggtgcttttcttctttttttatagactgcgtcttgctctgtcacccagactggactgcagtggcacaatcacagctacctgtaacctcaaactcctgggctcatgcaatcctcccacc

SEQ ID NO: 895989 - DNA, 120 bp, Artificial Sequence
  ENSG00000215483_136 (sequence is synthesized)
cctctggagtagctgggactacaggtttgtgccactaagcctggataattttttaaattttttgtagagatggggttctcgctatgttgcccaggctttttttttttttttttttttttg

SEQ ID NO: 895990 - DNA, 120 bp, Artificial Sequence
  ENSG00000215483_137 (sequence is synthesized)
ctgggattacaggcttaagccaccgtgcctggcctgcccaggctttttaaaaaatagattttattttttaagtctttggtccacataaccacagcctcccctactatcaacatcccacac

SEQ ID NO: 895991 - DNA, 120 bp, Artificial Sequence
  ENSG00000215483_138 (sequence is synthesized)
aacatcccacaccagagcagtacatttgacatattcgacgcacctaacttgacacatcattatcactcaaagtccacagcttactctagggctcgttcttggcattgtgcattctgtggg

SEQ ID NO: 895992 - DNA, 120 bp, Artificial Sequence
  ENSG00000215483_139 (sequence is synthesized)
ttttgacaaatgtataatgacatgcgtccaccattgtagtatcatcaggagtggtgtcatggccctatacatccttcatgtcttagggatttttaaagcctagtaaaagacatcggaaaa

SEQ ID NO: 895993 - DNA, 120 bp, Artificial Sequence
  ENSG00000215483_140 (sequence is synthesized)
gcaggtgggcaagttgggccagagatgtggtggtgattatgtcagaacaggcaatctctgctttgcaatggtgtcagtcaggcttgcgtagctcatgggaccagctcgcaatcatgcttc

SEQ ID NO: 895994 - DNA, 120 bp, Artificial Sequence
  ENSG00000215483_141 (sequence is synthesized)
tccacccagtgatgactacttctcagtggaacaggtaaagatggcaccccagagagacaattgtgtcatcttctagaactaggttatactattttttaaatataagaaaatcttcgtaaa

SEQ ID NO: 895995 - DNA, 120 bp, Artificial Sequence
  ENSG00000215483_142 (sequence is synthesized)
gtaagtggcatgggagaagtgcgaggtgtggacacgggcaaccctgccatgagatggaggtctctgaatgtcgaaagcgagtgatctgcagatgtacagtgcccacggggcagtcagcct

SEQ ID NO: 895996 - DNA, 120 bp, Artificial Sequence
  ENSG00000215483_143 (sequence is synthesized)
gctctggtgtcagagcgtctgtctgcacagccagccctgacgtgtcttagatgtgtgacacagtatcacctcttgaagacagagctcagacagtgtggtgtaaaggggagaggatggact

SEQ ID NO: 895997 - DNA, 120 bp, Artificial Sequence
  ENSG00000215483_144 (sequence is synthesized)
gtgtccttggggtgacactacgaaaagagatcatctgtaaaggaggtaatagggtggcctgtgatatctatgttcctgttaccatgaagagataatatgaagttttgggagagaaaatct

SEQ ID NO: 895998 - DNA, 120 bp, Artificial Sequence
  ENSG00000215483_145 (sequence is synthesized)
agcagacttactggggacacgctgtagagctccgatgatggctgttggccgaatggatgaatggcttcattaacttcactgcaacacgcaggagtccttgatctccccccttgaaagggg

SEQ ID NO: 895999 - DNA, 120 bp, Artificial Sequence
  ENSG00000215483_146 (sequence is synthesized)
gtgcccttggctgctctccggtgtgggagtcttccccttaatccttgctcctggacgtttgcattttcacaacgaccctttgtggcaggtgggtccctgccttcttcagatgaccttgaa

SEQ ID NO: 896000 - DNA, 120 bp, Artificial Sequence
  ENSG00000215483_147 (sequence is synthesized)
tgaagaatagaaaggagcctatgtgtcatgcaagccgagctcagaaggcagttatgattgggaaccaaggtccaggagatctggacacaaacctgggatgtacaggtgccaccacactgt

SEQ ID NO: 896001 - DNA, 120 bp, Artificial Sequence
  ENSG00000215483_148 (sequence is synthesized)
gcaaagaaagaacaagaaagcagagaaatgaatgcaggattcaataagaggtggtctagggagtaggaatagatcagcagacagtgttatagcacgtagaagctaagtgcttcaagaatt

SEQ ID NO: 896002 - DNA, 120 bp, Artificial Sequence
  ENSG00000215483_149 (sequence is synthesized)
aggtaatgtccgtgtcaaacactgcagaatggtcacatatggatgaggatggatttagcatttaagtgttcaagatgactttagtgaaatgagtttcagaaggggatgagggccatgtat

SEQ ID NO: 896003 - DNA, 120 bp, Artificial Sequence
  ENSG00000215483_150 (sequence is synthesized)
taatgggttaaggagagtatggtaggcataatacgccccacccctcaaagatgtgcctgccctaatccttggagcctgtgaatatgttatcttacagagcaaaagaggctgcacagttgc

SEQ ID NO: 896004 - DNA, 120 bp, Artificial Sequence
  ENSG00000215483_151 (sequence is synthesized)
gactaagggcacagattttgacatggggagattatcctgggttatctgggtgggccccagtttaatcacatgagtctttgtaagtcaaagagccagcaggaagagtgtcagagagatatg

SEQ ID NO: 896005 - DNA, 120 bp, Artificial Sequence
  ENSG00000215483_152 (sequence is synthesized)
atattggagatggaggaagagggccataggccaaggaaatgtggtggcctctagatgcagagaacagttctcagtttataggcaggaagaaaatagagacctcaggcctaccagtgcaag

SEQ ID NO: 896006 - DNA, 120 bp, Artificial Sequence
  ENSG00000215483_153 (sequence is synthesized)
gaattctgctaaccacctaaatgagtaggaagtgcagtctcttctgggaccttcagaatggagcacggcctgtcaacacctagacattagttggctgcaatgcataccagacttctgatc

SEQ ID NO: 896007 - DNA, 120 bp, Artificial Sequence
  ENSG00000237989_0 (sequence is synthesized)
gggtcgtgagaaaatacgcaggaagagataccccgtggacatgtttcccttggaaagtggagggaaccctctgagccgtgattccgcctgaattaagcagtggcgggcactggcctggca

SEQ ID NO: 896008 - DNA, 120 bp, Artificial Sequence
  ENSG00000237989_1 (sequence is synthesized)
ggcggcttctactgccttggatttgcacctctaaggggtcacaggggccacccccgaaacaagacaaagtgtgatcatggacaggccctcggggggccggaagaaggaacggctccagtg

SEQ ID NO: 896009 - DNA, 120 bp, Artificial Sequence
  ENSG00000237989_2 (sequence is synthesized)
atgaaagctgaacgccagctctctccccatcgttctcccggaccaggagagggctgctcggcagggctaggtttaaaaaccttccatgcaacttacgaaggcatccacagtgacttctgc

SEQ ID NO: 896010 - DNA, 120 bp, Artificial Sequence
  ENSG00000237989_3 (sequence is synthesized)
tgctgtggtacgttctgccctcccctcctccccgccccatcctgttctcggctacaagttatttatatgtacagtgtcatctgaacgtgcacgggcctatcccaggacatcacacacaaa

SEQ ID NO: 896011 - DNA, 120 bp, Artificial Sequence
  ENSG00000237989_4 (sequence is synthesized)
gaggcggcggtgaacccaagccgccgggccggcctgtggctcagtgtgtgtttcagaagtcccggccccaggcagctctcctgaacagagccactggaactcaggagggtcaggaccaca

SEQ ID NO: 896012 - DNA, 120 bp, Artificial Sequence
  ENSG00000237989_5 (sequence is synthesized)
gcccaaacaactgcgaccgaaaacaccctacagggcttgagaactaaaaaataaggagggatctgggcagccgagctgcctcctaaagaagccacgtcatagagaaaactgcttgctcta

SEQ ID NO: 896013 - DNA, 120 bp, Artificial Sequence
  ENSG00000237989_6 (sequence is synthesized)
tccatgagacggaggcggccggggtgtcctgccagcagacacgggtctgtccatcaccggccaccacgctgcctctgtccttcactcccatttaagggaaaacgatatctcttcatcttt

SEQ ID NO: 896014 - DNA, 120 bp, Artificial Sequence
  ENSG00000237989_7 (sequence is synthesized)
ctgccctggacattggaaatcagcggtgagaacagtgctcttgctacaaaatgctcaggttctagaatgctcccatctttccttccattccacatggagtttatccaaagcacaaaggcc

SEQ ID NO: 896015 - DNA, 120 bp, Artificial Sequence
  ENSG00000237989_8 (sequence is synthesized)
agtcacggcactgacatccgtggtgcccgctcaccggggagtgggaagcacaagcctgtcctcagaggaccgtgactgtgagcccgcagctgcttgtgggtggggccagcccgcagctcc

SEQ ID NO: 896016 - DNA, 120 bp, Artificial Sequence
  ENSG00000237989_9 (sequence is synthesized)
tcctggaggcctcgggcttcttgctgctgcatttctgtgacatgtggagggaggatcgttttgacacctgcctgggaagtttcaaaggagatggcctctgggcaggggttttaaactgaa

SEQ ID NO: 896017 - DNA, 120 bp, Artificial Sequence
  ENSG00000237989_10 (sequence is synthesized)
gggcaccacacagatccagatgtgaactgtggctgttgtttgcaattgaagcagagatgcagaggatggaacaggagtgctggccatgctgctctatggccttggcccagccaagacctg

SEQ ID NO: 896018 - DNA, 120 bp, Artificial Sequence
  ENSG00000237989_11 (sequence is synthesized)
ctgggaaccacctttgccgcggttgaccgctgggcccgccatgcaccgcccacacctggctgtgcctggagactgagagcagggggtgacggtgggcctggaagagtctctcccttttgc

SEQ ID NO: 896019 - DNA, 120 bp, Artificial Sequence
  ENSG00000237989_12 (sequence is synthesized)
aaacgccagccacagaggtttatttttctccctgagagaaggaagagtgaaggctgagactgagacagaaggacagaaggagaagacttagaagccagtgagcccggaaccacgagacgc

SEQ ID NO: 896020 - DNA, 120 bp, Artificial Sequence
  ENSG00000237989_13 (sequence is synthesized)
gctctgaggacacggggcctcggggaaaccgggcacgggcaggggttggtcttggcttccccgcaacattgccgcgagctcgggtgccgtctccactcgcaggctggcctgtcctctgca

SEQ ID NO: 896021 - DNA, 120 bp, Artificial Sequence
  ENSG00000237989_14 (sequence is synthesized)
gccacgagctcaggcaccgtctccgttcataggccagcctgttctctgcagcctgaggtccctgtggtgccaacatccagatgctgagataattctgccagggtgttggctgatcggtga

SEQ ID NO: 896022 - DNA, 120 bp, Artificial Sequence
  ENSG00000237989_15 (sequence is synthesized)
ttggtggttggctgttccgtgagttctgcattgatcttgctggctgagcgtccaatgcggaggggcaggtgctgttagggtctccactcccatccctctccccaggactcatcacccact

SEQ ID NO: 896023 - DNA, 120 bp, Artificial Sequence
  ENSG00000237989_16 (sequence is synthesized)
gcaaccgtaagctgctaggggctcacagccgtgagtctttgggacgggtggtcccacctggcatgtagctcaggctcctagccccaggaccctgccgctgctcccctcccgcccacatct

SEQ ID NO: 896024 - DNA, 120 bp, Artificial Sequence
  ENSG00000237989_17 (sequence is synthesized)
tggcttagccgtcttccctggctgccagccccttcccctggtcttagttggcttgagccactaaactgaaatagcacaccctgaggccttcaacagcagacctgatttctcaccatctgg

SEQ ID NO: 896025 - DNA, 120 bp, Artificial Sequence
  ENSG00000237989_18 (sequence is synthesized)
aggctggaggtccaggatccaggcccccaaggctgctttctcccccactcccccacccaccttccaggacacgcagactccaccctcttgctgccctgtctcagggctgtccctctgggc

SEQ ID NO: 896026 - DNA, 120 bp, Artificial Sequence
  ENSG00000237989_19 (sequence is synthesized)
aagcaggcccctggcatccccgtgtgtcttctcctcctgttcttataaggacaccagtcatactggatctgggcccaccctagtgacctcatttaccttaatcacctctgaaagaccttg

SEQ ID NO: 896027 - DNA, 120 bp, Artificial Sequence
  ENSG00000237989_20 (sequence is synthesized)
tctcaaaaacagccacattctggggcactgagggttagggctttaacatgggaatttgagggatgcaattcaccccataaaacccagaccattcccccagtaaatcactttcacaagagc

SEQ ID NO: 896028 - DNA, 120 bp, Artificial Sequence
  ENSG00000237989_21 (sequence is synthesized)
tcttctctcaggctttgcttctgggggatcccccttgagatggatccatctagcttcctgcttctcaaagaacagaggggagagctctggtgcgaagggaacgggtggcctcggggacct

SEQ ID NO: 896029 - DNA, 120 bp, Artificial Sequence
  ENSG00000237989_22 (sequence is synthesized)
gcggataagctgctggcactgccaggggacaggctgagctgaaagccaggaggagggcggcgaggcccggggccggacctcattcttctgagtgttataaaatctggctttgctcagaaa

SEQ ID NO: 896030 - DNA, 120 bp, Artificial Sequence
  ENSG00000237987_0 (sequence is synthesized)
cagcctcagagctcccctccaaggctgaaccctgcatctgctccatcgcctgcaccatctccctcctctcttctggacctcataatttcttactttcctatgcctgtaaatggtttgctg

SEQ ID NO: 896031 - DNA, 120 bp, Artificial Sequence
  ENSG00000237987_1 (sequence is synthesized)
cacactgcgaagagcaggaattcttccgtcatgatccacagtctctgttgggttgcagtagtcaccgcgatgctcataaactgagaaaaaatatatatatgtctttttcactttattggc

SEQ ID NO: 896032 - DNA, 120 bp, Artificial Sequence
  ENSG00000237987_2 (sequence is synthesized)
aaatattacataagtatataaatttcactttttacagctaaaggctgcatagccataacttctgagcaatttattaaggttgaataaaattgatataaggaatcattttataaaataaaa

SEQ ID NO: 896033 - DNA, 120 bp, Artificial Sequence
  ENSG00000237986_0 (sequence is synthesized)
aagtcatggccaactcttctggaagggtaatggattcactggattacagtctggtctaagaatgtcaaattcagaaactatgcaacttcaatgtggcaaagacctcgtaaagagccaacg

SEQ ID NO: 896034 - DNA, 120 bp, Artificial Sequence
  ENSG00000237986_1 (sequence is synthesized)
aacagaagaagaaaagaatcgaccccaaggctgaagaactgttatccctctgcagtacatgggggtttgagctcacgtcaatgtgcctgacctaagggcaaatggagctaagcaggaggg

SEQ ID NO: 896035 - DNA, 120 bp, Artificial Sequence
  ENSG00000237986_2 (sequence is synthesized)
agaattagacacttgccacggcttggagacagggtctactgctctctgctgaaccagaggaaagaacacactggctcctgaaccttcgcaggaagacaaggcgagggctgctgggtgccc

SEQ ID NO: 896036 - DNA, 120 bp, Artificial Sequence
  ENSG00000237986_3 (sequence is synthesized)
caatccaaaatatgggcatacgaaacacacctcatccttcacacacacaacatgctcaaccttcactagccacgtgactttctttctcacatcatcctgaatttgcttttctgaaattta

SEQ ID NO: 896037 - DNA, 120 bp, Artificial Sequence
  ENSG00000237986_4 (sequence is synthesized)
cttttcaatcttctgacttttcttcatacctaagaagactggacaaagtgcttgaaaagcaaatggaaacattttatgaataactacgcaaaggaaagacatataaatatttttaaagtt

SEQ ID NO: 896038 - DNA, 120 bp, Artificial Sequence
  ENSG00000237986_5 (sequence is synthesized)
tcccttctacagaaatgagcttaagtcaacactacagttgccactaagtgtaaggattcgtgaaggggaaaacgacggactcccttccctctgttcttctcaagtaatgcaaattagagt

SEQ ID NO: 896039 - DNA, 120 bp, Artificial Sequence
  ENSG00000237986_6 (sequence is synthesized)
gcctggaataaggggaccaaggcctgagatcaaggataaagtggtgtccgccaacaacctcttgtttgtgttttgatcaccatcattattctaataaaggaagctgaaagttgtattaca

SEQ ID NO: 896040 - DNA, 120 bp, Artificial Sequence
  ENSG00000237986_7 (sequence is synthesized)
gagcacaggatcccagagcagagatgtgtgaaggtgtctgaggagcagccagggtgctagagcacacagctgcagaatgacctggctaagagaacacaagatgaggagaacatttacatt

SEQ ID NO: 896041 - DNA, 120 bp, Artificial Sequence
  ENSG00000237986_8 (sequence is synthesized)
gagctgggggaatcagagaaggaattaggttaggtatacgcaacccaaaatgaaaacccagtggccacctctggtgggcaattgaaaaaatgcaaatgatgtcacaaaaggcaggggctg

SEQ ID NO: 896042 - DNA, 120 bp, Artificial Sequence
  ENSG00000237986_9 (sequence is synthesized)
aagacacatctaggagtcactgttgtcttggagataatcaagtcatggccaactcttctggaaggttttgctcatcaggaaatcacagggttggaaaaaaagatgcttggccaaactaca

SEQ ID NO: 896043 - DNA, 120 bp, Artificial Sequence
  ENSG00000237986_10 (sequence is synthesized)
gtggctttgactggaacacagtccctgcagggtggcatccagtgctccctgactccatgcatgaggtgtcatgtggtcagtggccgcatgggttaaaccccagaaggccagacctggagg

SEQ ID NO: 896044 - DNA, 120 bp, Artificial Sequence
  ENSG00000237986_11 (sequence is synthesized)
agagatccagctccagcccatctgggaagtccctgatcgggggtgatgatggtgacaaaggttggttgaccagagagatccaccatccaccatttggggatgtccctaccaggttgagta

SEQ ID NO: 896045 - DNA, 120 bp, Artificial Sequence
  ENSG00000237986_12 (sequence is synthesized)
cagtgtgaggaaaaccccgtagaaactcaggtacccaggaggatcctaaaaccaaaaaggcaagaacagaatatgctatacatgggcacttggtgacaaagaatagagacaaaaacttgg

SEQ ID NO: 896046 - DNA, 120 bp, Artificial Sequence
  ENSG00000237986_13 (sequence is synthesized)
ttttcagaagtataaggtcaaagatagttagtgatggtgccaagctacccactattgaaccggagcactcaattccctggtcccagagtcagggtagaccacaaccttattataacccaa

SEQ ID NO: 896047 - DNA, 120 bp, Artificial Sequence
  ENSG00000237986_14 (sequence is synthesized)
actgttgtcttggagataatcaagtcatggccaactcttctggaaggaattagcacagtcgggcaagtatcttgaaatccactgaagtcctatttttgccatggactggaaggaaggctt

SEQ ID NO: 896048 - DNA, 120 bp, Artificial Sequence
  ENSG00000237986_15 (sequence is synthesized)
aacatgctcaaccttcactagccacgtgactttctttctcacatcatcctgaatttgcttttctgaagactggacaaagtgcttgaaaagcaaatggaaacattttatgaataactacgc

SEQ ID NO: 896049 - DNA, 120 bp, Artificial Sequence
  ENSG00000237986_16 (sequence is synthesized)
agggagcagcatgattctctaaagcaaagcaatggatgtgcccaatagcaccatcactcccagacagcaaccactggacagccaaaggtttagagtcttttcttgcacaggtcaagaata

SEQ ID NO: 896050 - DNA, 120 bp, Artificial Sequence
  ENSG00000237986_17 (sequence is synthesized)
tgtaatagaagagacgggggcggggagagaagaggaatgctgaaagggcattatgcttttgctatttagtaaaagaagtatcaacatgccttctgatgactcctgaacatcccttacaaa

SEQ ID NO: 896051 - DNA, 120 bp, Artificial Sequence
  ENSG00000237986_18 (sequence is synthesized)
tgaaggagccacagagtggggcaactccatgcctttatcactcagccagccaaggaagaggaagacaatcaagccacacttgacaagggacaagaccattcactttcagggccaagggga

SEQ ID NO: 896052 - DNA, 120 bp, Artificial Sequence
  ENSG00000237986_19 (sequence is synthesized)
ttaggacagagcagcattttcccatagtgacaagaggaaacaagagaatcgaaagcatctttcaattccattctgagtcaaagaggttgttcttgcagcccaactgggaacctacatgca

SEQ ID NO: 896053 - DNA, 120 bp, Artificial Sequence
  ENSG00000237986_20 (sequence is synthesized)
cagttagcatacctccgttttataatgtaaaaaaaaaagggaaatcaggattcacctaaatgaatatcaatcaaatggatattccacaactcaagtgatacctgtgaacccgaggtgtta

SEQ ID NO: 896054 - DNA, 120 bp, Artificial Sequence
  ENSG00000237986_21 (sequence is synthesized)
gtaaacttaagggtcaccatctacagactccacagggatgggagatactcttgtgctcctatggttggggctgcctctatatcctttgctttaaaattcagaaggagtgaagatcagctc

SEQ ID NO: 896055 - DNA, 120 bp, Artificial Sequence
  ENSG00000237986_22 (sequence is synthesized)
aggcaataatgctggtttgtcccagagtccagaatctgctatgttacccagagtctcttatgctcaaagaggctgtcaaagaacggggtgtggctaccgtggcctcccaggggcaagtgg

SEQ ID NO: 896056 - DNA, 120 bp, Artificial Sequence
  ENSG00000237986_23 (sequence is synthesized)
tcacactccagcctcacaaagtgagcactgactgtagaggttccactatggtcatggtcttagcaatatgcaggaaacacagtccaaccattcattgtcatctgggtaaaatacaattaa

SEQ ID NO: 896057 - DNA, 120 bp, Artificial Sequence
  ENSG00000237986_24 (sequence is synthesized)
acatcaaagacttgagtctcacatagtgacatcaaaatctttccctcaaggcaaagaaacaacttgtcacatgcacttaaaagaggttctataagttaacattagagagaggaggagaag

SEQ ID NO: 896058 - DNA, 120 bp, Artificial Sequence
  ENSG00000237986_25 (sequence is synthesized)
gtacaaaaccctgggagagaaaaacacataattctctcaaattagtgtcttccatgggctgaaaacatctattaaatggggactttgatcctaaagaaaaaacgacaaaagaatgttgct

SEQ ID NO: 896059 - DNA, 120 bp, Artificial Sequence
  ENSG00000237986_26 (sequence is synthesized)
cgacctcacctctatcaactttcctctgtttcacctggaatgtgtaactcagctgtccacatcttggaccacttgaccatgctgtgtgatcctaaggacataacccaaaaggcaatctcc

SEQ ID NO: 896060 - DNA, 120 bp, Artificial Sequence
  ENSG00000237986_27 (sequence is synthesized)
aaactcacggtgtcgtcaccaattcaacatttctattttaatgtgggatcaacttgtcatggtcacaatgctgattatgacttccatccagttttccttctatacatgtccaaacatgtc

SEQ ID NO: 896061 - DNA, 120 bp, Artificial Sequence
  ENSG00000237986_28 (sequence is synthesized)
accaacatgaccccattgactcgggacttgtcaggggtgagatatgaaaggattcagatctgttttgttcctgcgtggggtcccagaactacttccagcagcaagacagttaagagacac

SEQ ID NO: 896062 - DNA, 120 bp, Artificial Sequence
  ENSG00000237986_29 (sequence is synthesized)
attggatgaggcaacagcggggaagaaagggagctgatcttgaattggctgtgtactgacagattgtatgaatgaaagcaataaaaataagccccaaaatctgggttttgagtggaaaaa

SEQ ID NO: 896063 - DNA, 120 bp, Artificial Sequence
  ENSG00000237986_30 (sequence is synthesized)
caaattccacctgcagacagaacttgatgtgtccaaggatttagaacttctgataacaactacagaccctcgagggctgtggcacggaggctagaaatcacttatctaagggatatctgc

SEQ ID NO: 896064 - DNA, 120 bp, Artificial Sequence
  ENSG00000237986_31 (sequence is synthesized)
ggagataatcaagtcatggccaactcttctggaagggtaatggattcactggattacagtctggtctaagaatgtcaaattcagaaactatgcaacttcaatgtggctgaagaactgtta

SEQ ID NO: 896065 - DNA, 120 bp, Artificial Sequence
  ENSG00000237986_32 (sequence is synthesized)
tgctcgaaggcagcttctttctccatctacaagaggtatcttgaagtcaatagattgtttcctaccatggatgaagcaagcaggccataaagcatggcttactcacagacagcatggact

SEQ ID NO: 896066 - DNA, 120 bp, Artificial Sequence
  ENSG00000237986_33 (sequence is synthesized)
tcatgccaagagctcaaagaatgtggttttcaacttaaatttggaaatgtgaaacactgactccagagatctgtaatctgaaaatcatagcatttttagaactggaagggatctcagagc

SEQ ID NO: 896067 - DNA, 120 bp, Artificial Sequence
  ENSG00000237986_34 (sequence is synthesized)
tctcctcattttacagatcagagacttgagagccacagaagaggagtgatttacatagttactctctattcagagcaaagtaggatctggagccatttttatgtctcctaaggactcagt

SEQ ID NO: 896068 - DNA, 120 bp, Artificial Sequence
  ENSG00000237986_35 (sequence is synthesized)
tactgccctgcagggccacctagcacagtgcctcacccaggccagccatcagtacgtttctgttgaacagctgagtgatctggaaatatagaacaactagcgggaagagagtttggagat

SEQ ID NO: 896069 - DNA, 120 bp, Artificial Sequence
  ENSG00000237986_36 (sequence is synthesized)
agatatcagcacctgggcaggtcatacagctcatccttatcactgcaacgaaacaaagttcaaccgttggctgcaactgagtggactctctttaggatcctctgttggaaggagctagaa

SEQ ID NO: 896070 - DNA, 120 bp, Artificial Sequence
  ENSG00000237986_37 (sequence is synthesized)
gcaggataccatttttttttcctatgttttcttggagttttaacagatttggattctgaaagagtccctggaggtaaagcagagatgggcctgtgtgagcgtggacagggggtgtcacct

SEQ ID NO: 896071 - DNA, 120 bp, Artificial Sequence
  ENSG00000237980_0 (sequence is synthesized)
cccgggctgcctgggagtcactggggagtcctagcccgcccttgggcctagggctccctgatgcggcctccactcttcgcagggccagggggcgaggaaggaggagggagggaagaggga

SEQ ID NO: 896072 - DNA, 120 bp, Artificial Sequence
  ENSG00000237980_1 (sequence is synthesized)
agctggggagtgggagagcgtcctccacgaccgcttgggtcctccgcggggcagcctcggggagggtggctgcagggcccggagtcgcctggatcgcagcgccatctcgtggctgctggc

SEQ ID NO: 896073 - DNA, 120 bp, Artificial Sequence
  ENSG00000237980_2 (sequence is synthesized)
aggtctgccttgggccctcttggcacaaggcaaggaaacaggagctcttcccatcagtgacaggtgcccgccggcccgcacccaggagaatgctccagtgtcaccagtgactcctgctcc

SEQ ID NO: 896074 - DNA, 120 bp, Artificial Sequence
  ENSG00000237980_3 (sequence is synthesized)
cacatctgcctacaggaagccctcttggaacaaaagcatctcacttctgggaggcatcaagtatgtgcatcaccagcaggacagacttgcagcgcctattctgagtgaaaaagagaatct

SEQ ID NO: 896075 - DNA, 120 bp, Artificial Sequence
  ENSG00000237980_4 (sequence is synthesized)
tttggtgctaccctcaaccaacctcatcctttctccacttggattcttctcaacattgaccctcttgaaaagatcataaaaactcactttaaggtgtatatgaggagttttgtctcccag

SEQ ID NO: 896076 - DNA, 120 bp, Artificial Sequence
  ENSG00000237980_5 (sequence is synthesized)
tttgggatgggggggccttcctgaaacctctgaagaaacagcacaccagcacctctgccagccagctgcatccaggatcaatgttccccctagttctggttcactcttttgaagctttcc

SEQ ID NO: 896077 - DNA, 120 bp, Artificial Sequence
  ENSG00000237980_6 (sequence is synthesized)
aagtcccagaagtgaattcttagcctttctttgagctctctttggtccaggcacagctgtaggaaaaattgtacagtggcatgaaaaaagtgaagggtttagtgtagtaaattctgcaaa

SEQ ID NO: 896078 - DNA, 120 bp, Artificial Sequence
  ENSG00000237980_7 (sequence is synthesized)
ttttcttttaaaaaaaactgcattttaaaaaataaaaatactatgtcctattgtaaggtaaatgtatttctacatatgcatgtacacaaatgtacttaagggataattcagttgaaagtc

SEQ ID NO: 896079 - DNA, 120 bp, Artificial Sequence
  ENSG00000237980_8 (sequence is synthesized)
gttatagatctttactgtaaaaatccttggtttacccaaattaatgtttctcctgaaaatgagaattcttgaattacattggatttgggggaacaactgctaatctataggacgtgagca

SEQ ID NO: 896080 - DNA, 120 bp, Artificial Sequence
  ENSG00000237980_9 (sequence is synthesized)
tctggtaggtgcccaatatattttttatacacctgcatataaagtgcaaatactctgggctgggcaacatggttttcagtttttgcacatgtgcacacacacgtgtgtgtatgtggtaat

SEQ ID NO: 896081 - DNA, 120 bp, Artificial Sequence
  ENSG00000237980_10 (sequence is synthesized)
acgttcttatgcgttctatccaaatggtattcagaaacaatactgtggctttatttgatgcacttgtatttttttccattatggttggttttgaatacactcacaattactgttttcaaa

SEQ ID NO: 896082 - DNA, 120 bp, Artificial Sequence
  ENSG00000237980_11 (sequence is synthesized)
tcgcctggatcgcagcgccatctcgtggctgctggcaggtctgccttgggccctcttggcacaaggcaaggaaacaggagctcttcccatcagtgacagcccaggagaatgctccagtgt

SEQ ID NO: 896083 - DNA, 120 bp, Artificial Sequence
  ENSG00000236358_0 (sequence is synthesized)
tcagccgccgccgctggcgcgcactgtacagctgcatcagctgttcgtaggacatgtccagcagctggtccaggtccacgccgcggcttctgaaaggatatgggccagtgcatcagattt

SEQ ID NO: 896084 - DNA, 120 bp, Artificial Sequence
  ENSG00000236358_1 (sequence is synthesized)
aaccagcatagatgtgggaatgagtgggtgggtgcaccggccaagaaggggcctgactgaaggaccagggaacaaccaataggttatggaaggctggagtcagattgcagagactagaga

SEQ ID NO: 896085 - DNA, 120 bp, Artificial Sequence
  ENSG00000236358_2 (sequence is synthesized)
ctcctaatatcaggctgagaaatcaaatagctgttcatcatttgtgcctgaggatggatcagagcaacgtgatgaaagtggcacttgtgtaagacttgcccagcaaagtagggcaaggat

SEQ ID NO: 896086 - DNA, 120 bp, Artificial Sequence
  ENSG00000281120_0 (sequence is synthesized)
ctcaatgactacaagatgcctgcagtcataggttatttcaaagaagataatactgcaaagcgcttggaatatgcatatgtttacatgcttcaaatgatgcggaatcagaaagcagcgatt

SEQ ID NO: 896087 - DNA, 120 bp, Artificial Sequence
  ENSG00000281120_1 (sequence is synthesized)
ggcaaagtcaacattcactttctcagttatggtaattttgttctgtaatcttaatagaaaaatagactaaacagaaggtgtttcaattaaagggaaattaaggatcgttttttcctataa

SEQ ID NO: 896088 - DNA, 120 bp, Artificial Sequence
  ENSG00000272081_0 (sequence is synthesized)
caggctggctgcccactcgctttctctcctcacaagactcgcttccccggccttcgaggatctcgaacggactatagtctggactcgctgggctggaggaaacttggccgctggccaccc

SEQ ID NO: 896089 - DNA, 120 bp, Artificial Sequence
  ENSG00000272081_1 (sequence is synthesized)
ggaggagactgagaagcctttggtcaacagggcgcctttccttgaaccaaaacaaaactttccgaagccggaaaggaaacgcccagtgtcgcctgagagccctggagctgcgcgagaccc

SEQ ID NO: 896090 - DNA, 120 bp, Artificial Sequence
  ENSG00000272081_2 (sequence is synthesized)
gcctcggcctctgacctctaacacgccgggaacaaaccagctggggcggcccgcaggcctgcgggagcggaatgtgacccgaaaccgacggacttcctgacccatagtccatagttctct

SEQ ID NO: 896091 - DNA, 120 bp, Artificial Sequence
  ENSG00000272081_3 (sequence is synthesized)
tcagcaacttgaacattttggaaaaagaaacaagtcttaacatgccacgacctaatggaaaaactaaatccccttcctacaccttgctttccaaaagttaaaaaaaaatagttaaacgct

SEQ ID NO: 896092 - DNA, 120 bp, Artificial Sequence
  ENSG00000272085_0 (sequence is synthesized)
tgttgcctgacagtgatggttgaaggcagctgagtcctgtcatggaaaatgtaaaggccctcccctttttcatttccctccaggaacttctgcctgtagtaataaagaatcctgtgttca

SEQ ID NO: 896093 - DNA, 120 bp, Artificial Sequence
  ENSG00000272084_0 (sequence is synthesized)
tagatgtttcaccagcatcataccttagcacatgcctcgcgttcttcccagaaagtcagccctgggaccaggtgggctggtaaagtcctcagtgctgggccctgtgcctgttgcatgagc

SEQ ID NO: 896094 - DNA, 120 bp, Artificial Sequence
  ENSG00000272084_1 (sequence is synthesized)
ctgtgtcactgtgactgtggaagttggagctagtgagaggaggaggaggtgggcagaggaaggagggtcccttgggctcgagctccacatcagccctgagctgctggcaagcacccctgg

SEQ ID NO: 896095 - DNA, 120 bp, Artificial Sequence
  ENSG00000272084_2 (sequence is synthesized)
cctgcagccagggagagccagagcctttgccaggcagcgagcctccgtgccttccactcctaggtcaggttttgacagcaccactttattactttgtttaagctgttagaaaatttcaga

SEQ ID NO: 896096 - DNA, 120 bp, Artificial Sequence
  ENSG00000272084_3 (sequence is synthesized)
acatcagacacaccctattcaaatgtgagaacaaaaacaccttccagcagtgcctgcttctggaacaggactcctcctgcggaacagggttttgctcaatgactacctccccggtcatgc

SEQ ID NO: 896097 - DNA, 120 bp, Artificial Sequence
  ENSG00000272084_4 (sequence is synthesized)
tgctgtccagtgagcagccgggccagagcttgtcggaccgcagtgtgttctctgctagatgcggcagctgtgactcagggggaatgggggctgtatgcctgctcctgacacacctctgcc

SEQ ID NO: 896098 - DNA, 120 bp, Artificial Sequence
  ENSG00000272084_5 (sequence is synthesized)
cgttgtgctttgcaggtcttttatcagaaatcaccgatccagagagcttcctgaaggacctgttgaactcagtcccctgaccaccacacagcagctgcggcggcgaagacgaagctggct

SEQ ID NO: 896099 - DNA, 120 bp, Artificial Sequence
  ENSG00000272084_6 (sequence is synthesized)
tgccttccaccctctgttctccctccttgtgcattaagttccctccgcgggatgctgcattgttaccccgccctcccctctctcatttttcttggtgtggcttggggtttttaggcttcc

SEQ ID NO: 896100 - DNA, 120 bp, Artificial Sequence
  ENSG00000272084_7 (sequence is synthesized)
tgttttatctcgtgtgtgtggtgcaccagctatgaggttgtctgtaacccaagccatcaaagggcctgtacatacctaggagccatgagttgtcccggccagcttcatacttgagtgtgc

SEQ ID NO: 896101 - DNA, 120 bp, Artificial Sequence
  ENSG00000272084_8 (sequence is synthesized)
acatcttgagaaataaacaagtgacttaacacacattgaaaaggaaggtgttgcctgctgcttcaactcgtcctcagtggcgcaggccaaatggtttcccttgaatgcacagccatttcc

SEQ ID NO: 896102 - DNA, 120 bp, Artificial Sequence
  ENSG00000272084_9 (sequence is synthesized)
ggcgtcagcccgggaagactcatgtcagacccgctgtctccaggcctgttgtcagcgctaagtgcaacctgtctattcttggccagcaagttggggcaccacattggatggctctgattt

SEQ ID NO: 896103 - DNA, 120 bp, Artificial Sequence
  ENSG00000272084_10 (sequence is synthesized)
ttcccaaaacaaagcccatgccttgctcttaattttttggccttaagagctggaacccaaagacacgtggagcccagagctttcctagccctcggctgaaggaaggctcgcggagtaggg

SEQ ID NO: 896104 - DNA, 120 bp, Artificial Sequence
  ENSG00000272084_11 (sequence is synthesized)
cacagtcttgttggaccacagaggcctggggagcatttgacattctcatgctgctgtgaatcgggaatcccttggtgacttctctccagggttgtcatgttaagagagggcctggggcag

SEQ ID NO: 896105 - DNA, 120 bp, Artificial Sequence
  ENSG00000272084_12 (sequence is synthesized)
acttaggatcaggataaagagagtggctgctattgacattgccaagcacccagtgtatcttatttctaatctctttgcccatgagccagagccgcttgcccaagggctcccagccagggg

SEQ ID NO: 896106 - DNA, 120 bp, Artificial Sequence
  ENSG00000272084_13 (sequence is synthesized)
ctgtggagttgtcaggtttgtgcctccgaagctgtgtcctgaccactgtggctgccgctcctggaggcctcagacctgctcccctacacacgtgggcagcaggactcccgagggcctctc

SEQ ID NO: 896107 - DNA, 120 bp, Artificial Sequence
  ENSG00000272084_14 (sequence is synthesized)
cgctcatgcccatctcctttcgttctttgcgggccactcggccaactgacgtcggcctctcctgtctggatgtccagtttctgtggctcactcctcaagccagatcatctgggactgagg

SEQ ID NO: 896108 - DNA, 120 bp, Artificial Sequence
  ENSG00000272084_15 (sequence is synthesized)
gtggcctctgggctcctgtagacttccacagccaggatttcacatccctccccagagcctcggaccgaacagccacaagcagccatgagtgtcgtgcctggactaagctggagagacaaa

SEQ ID NO: 896109 - DNA, 120 bp, Artificial Sequence
  ENSG00000272084_16 (sequence is synthesized)
ggcgtttgtggcaagggcccagctggaagccctggcaggccagagcatgcatgtgctggcttgcacgagcatactttggtgtttgtgttggggacaccgggcttctgagggactggcgtg

SEQ ID NO: 896110 - DNA, 120 bp, Artificial Sequence
  ENSG00000272084_17 (sequence is synthesized)
gctccagggtggggagcagcctggttgaagcgcggccaggcactcactctgttgttcagatcccagctccactgcctgctgtgtccacagtctcctcacctgtcaaatgggaatatctat

SEQ ID NO: 896111 - DNA, 120 bp, Artificial Sequence
  ENSG00000272084_18 (sequence is synthesized)
gtggcgggagggtgctgaggtttccacgagctaatctgcctgctgtgtagtaactagtagcttttcttactgttagtgaacttgttttagtctgaaggaaggcacccatgccccaggtga

SEQ ID NO: 896112 - DNA, 120 bp, Artificial Sequence
  ENSG00000272084_19 (sequence is synthesized)
agtccagctgagttcagtgaggacgatggagacccttggtcttggcacccttctgccttatactgggaatgcctcaggcttgctcctgctgtgtgtctgtggttgcccactttctgctgg

SEQ ID NO: 896113 - DNA, 120 bp, Artificial Sequence
  ENSG00000272084_20 (sequence is synthesized)
tctccgagagactgattcaggtgttcaggagtctgttcgctattacatcacctccttgtgagaaataaagtggagcagcctcatccagacagcaaagcaaggagggagcgtgaggagcag

SEQ ID NO: 896114 - DNA, 120 bp, Artificial Sequence
  ENSG00000272084_21 (sequence is synthesized)
ccaggtgagctggtggcatggggccgcctgtgcagaggccggcctcgctgcttcatgtggctcagggaggctcagcacgtccgtcatcacacctcagggcagcgagagtggacctggtgc

SEQ ID NO: 896115 - DNA, 120 bp, Artificial Sequence
  ENSG00000272084_22 (sequence is synthesized)
cttcagaagcccacccgaggcctgctgctctggcctgcaaaggtggagtcaccaaagctcattacaaagtgtttgcttatttttgtctgccctgcatttttttatttcttgcaaaggcct

SEQ ID NO: 896116 - DNA, 120 bp, Artificial Sequence
  ENSG00000272084_23 (sequence is synthesized)
cagaggatgtgggccccagcccaaacacatcttgttttcactagtagagcttttcctagtgtctgcacaggggtgcttccagtggctctgccatagccccagacaagctgctgacacggc

SEQ ID NO: 896117 - DNA, 120 bp, Artificial Sequence
  ENSG00000272084_24 (sequence is synthesized)
agccatgaggtctgggacaggttccagggggtgcttttggcctgctccagcaggagtggaggctggactggtctccagcaggagtggaggctggactggtctccagcaggagtggaggct

SEQ ID NO: 896118 - DNA, 120 bp, Artificial Sequence
  ENSG00000272084_25 (sequence is synthesized)
ggtctgggctccagcaggagtggaggctggtctgggctccaggagtggaggctggtctgggctccagcaggagtggaggctggtctggggagagagctacacctccccaggcccaggtct

SEQ ID NO: 896119 - DNA, 120 bp, Artificial Sequence
  ENSG00000272084_26 (sequence is synthesized)
cacgaaaggagcatcgaagggcaccgaggaaaaagccacttagccctctcctgtcctgcaccattatctgggcccattggttcttgggtccctgtctttctcaacaggcagccccagttg

SEQ ID NO: 896120 - DNA, 120 bp, Artificial Sequence
  ENSG00000272084_27 (sequence is synthesized)
gggaattaagttgattctggactggctatgcctaatgatagctgcaatttgaaacccataaagttcgagttcagcaataaagttggggaggcagtgtcaacaccttccttgtagaacggc

SEQ ID NO: 896121 - DNA, 120 bp, Artificial Sequence
  ENSG00000272087_0 (sequence is synthesized)
aaagtacagtgagggttgggaatcagtacaatactacctagtgctgctactgttgtccaatacaaggatgtaatatttgaattagccaacaattatccttcttgatagtagtataaacaa

SEQ ID NO: 896122 - DNA, 120 bp, Artificial Sequence
  ENSG00000272087_1 (sequence is synthesized)
ccctcacctatgaatattctcattaatttttttccatgctacagactttggttggtatgtgatctttgccaactataactaatgacttagaaagagatgtgggttctagtcctgatctgt

SEQ ID NO: 896123 - DNA, 120 bp, Artificial Sequence
  ENSG00000272087_2 (sequence is synthesized)
tacctatgaaatgctggtgttggattaaatatctaggaccttttctaacactgtaacattataaccaggatgttttacaaattaaaaataagtaagttttttacttatttatccagttta

SEQ ID NO: 896124 - DNA, 120 bp, Artificial Sequence
  ENSG00000272087_3 (sequence is synthesized)
gttccagtagttgtgactattctcaatagccataggaatcatgctaaattccatgaaggtacacagaatgtatttcctcattaggaacaatattcaaagttattgtgaatgtcacaagat

SEQ ID NO: 896125 - DNA, 120 bp, Artificial Sequence
  ENSG00000272087_4 (sequence is synthesized)
gctgaggaaatgccaaagcaaccacattttttcagacctgatgctactgtagcaacagacattcatgggggaaatgcacttggtgaataattgtaattaaagtatcaattaaaaaactta

SEQ ID NO: 896126 - DNA, 120 bp, Artificial Sequence
  ENSG00000272086_0 (sequence is synthesized)
gcgccccctgacccgcggtcctgcagtcctgctcccgtgacgtgccctccctccttccgttccccgtttccccttcactacccagggctggagcctgaacctggcggggccccccgtgaa

SEQ ID NO: 896127 - DNA, 120 bp, Artificial Sequence
  ENSG00000272086_1 (sequence is synthesized)
tggaagagcctgggccacgcgaaggtggaccccactcagcctccagccgtgccctccacgccccagacaccgccgtcttcggaggcgactccgcggtcgtgtggacggggtcccatttgg

SEQ ID NO: 896128 - DNA, 120 bp, Artificial Sequence
  ENSG00000272086_2 (sequence is synthesized)
actccggggtctgcaggatcggcaggaaggactttgctctctgctgctgggcggggaggggtacgctatctgccgggactccctaaccctttagaaggagcaagtgcgtccaaatggttt

SEQ ID NO: 896129 - DNA, 120 bp, Artificial Sequence
  ENSG00000272086_3 (sequence is synthesized)
cggacttgtgctataaagtgaccagggcgtagtgagtacagttagtaccgcacacgttagcacgctcgaccttaacgatctttttatagagacaataaacctgcagcgtttcatgccacg

SEQ ID NO: 896130 - DNA, 120 bp, Artificial Sequence
  ENSG00000272086_4 (sequence is synthesized)
tctttgtacgcatcggatgtctctccgtgtagttactaggtgaaatcctcttggcgtgcgcaaattaggttaaaaaaatagctgtcaaacctgagacaggagttggaggagtagagggtg

SEQ ID NO: 896131 - DNA, 120 bp, Artificial Sequence
  ENSG00000272086_5 (sequence is synthesized)
gcgcttgttaagtgaaacatttaaccaggaatggtattgtgtgccatcctgtattaaacaatgtatggacagagtggaacaacagcaaagcaaaaaataaaaattttttaaaaaaagtga

SEQ ID NO: 896132 - DNA, 120 bp, Artificial Sequence
  ENSG00000272088_0 (sequence is synthesized)
ataaagaagaatgaaatcatgactgttccagcaacatggatggaactgaagaccactatcttaggtgaaataactcagaaacaaagtcaaatactgcatgctctcccttatatgtgggag

SEQ ID NO: 896133 - DNA, 120 bp, Artificial Sequence
  ENSG00000272088_1 (sequence is synthesized)
cagagaggggaataacagacattggagactggaagggtgggagggtggcagggagggatgagaaattacttcatgggcagaatgtacactactcagtaatggtaacactaaagcccagac

SEQ ID NO: 896134 - DNA, 120 bp, Artificial Sequence
  ENSG00000272088_2 (sequence is synthesized)
tcttccaccatatgctatgtccatgtaacaaaactgcatgtgtaccctgtaattttataaatgttgttaagctgaaaaggtgtgtgtatgtgaacacagtaaacatgtaagtataaacac

SEQ ID NO: 896135 - DNA, 120 bp, Artificial Sequence
  ENSG00000234988_0 (sequence is synthesized)
acaaagcatctgttgagtgtctacggcacaacacacacgttctggtgctggagatcctgccctggctgagcttctggacctggtggggagaaatccacaatgagtactgagacgaccggc

SEQ ID NO: 896136 - DNA, 120 bp, Artificial Sequence
  ENSG00000234988_1 (sequence is synthesized)
aaaagcccggtgaaggcacctaggagtagggcctgcttaccctggaggagtcgggagcagcttccacagcaaggaggcttctaagaaatgatctccagtgcccaggctctgatgcccaac

SEQ ID NO: 896137 - DNA, 120 bp, Artificial Sequence
  ENSG00000234988_2 (sequence is synthesized)
agacctgaagttacatcccaacctgaacaggcggcttttgctctccaggccttcattgccccacagtgggaacaataataatatgcaccttctaggtacccaaaagcacaagagacagtg

SEQ ID NO: 896138 - DNA, 120 bp, Artificial Sequence
  ENSG00000234988_3 (sequence is synthesized)
aacggaaagtgcttggaagccccgtgcccaggtggtgctggccccagctgaactgcggggatagatgttgagtgtccaggttctagcatcatagaacagaatccggcctgttgggaaatc

SEQ ID NO: 896139 - DNA, 120 bp, Artificial Sequence
  ENSG00000234988_4 (sequence is synthesized)
ctgcctacaagtatacctccattaattagtgtcttctgtgaacatttttattaaaaaaagaagaaaagcttctcaacccaagcccaagggcatgtcctgatttgttgaaagtagttgtaa

SEQ ID NO: 896140 - DNA, 120 bp, Artificial Sequence
  ENSG00000234988_5 (sequence is synthesized)
tttgttgaaagtagttgtaagaccatttcattattcactctactttttcatatgttggaaatgttttataagaataaatacaataatatcaggctgtgtgcggtggctcatgcctgtaat

SEQ ID NO: 896141 - DNA, 120 bp, Artificial Sequence
  ENSG00000234988_6 (sequence is synthesized)
gtgagctgagattgtgtcactgcactccatccaggctgggagacagagtgagaccttgtctcaaagaaaaaaaaaaagaaatacaaagatatcagcttaaaacaaaagaactcatttgaa

SEQ ID NO: 896142 - DNA, 120 bp, Artificial Sequence
  ENSG00000234988_7 (sequence is synthesized)
aaagatatcagcttaaaacaaaagaactcatttgaaatttgccagtcttttaaattttgttttctttttttaatactatttgtttttgagagtctcactatgttgcccaggctgttctca

SEQ ID NO: 896143 - DNA, 120 bp, Artificial Sequence
  ENSG00000234988_8 (sequence is synthesized)
atctcagcctgtggagtatctgggattacaggcacatcccgctgcacccagcttcctttccttataagttcaatgaaaccgaattgtatgcttttgctttttaaaaagctgtgcacaaaa

SEQ ID NO: 896144 - DNA, 120 bp, Artificial Sequence
  ENSG00000234988_9 (sequence is synthesized)
atgtcattttatatattaataattatttccctaaatctattcttttgcgtataggtttggagaacctctggaatgatactcccaaaatattattttttaagaaattatttttgggtggtg

SEQ ID NO: 896145 - DNA, 120 bp, Artificial Sequence
  ENSG00000234988_10 (sequence is synthesized)
gagaaataataaaattatttccccttccactgagctgtatgcagcaagagtttgggggcagtgaggtcccggggtcggtggaaagaggggacagggagccacagggcgggtgctgaggtg

SEQ ID NO: 896146 - DNA, 120 bp, Artificial Sequence
  ENSG00000234988_11 (sequence is synthesized)
gacacagccttggggagcacattgcctactcagtccatgcccccatcacaccctttgcctgcaacgcgcctccagctctggaactcatcctccactaacccggcacccacaggccaagct

SEQ ID NO: 896147 - DNA, 120 bp, Artificial Sequence
  ENSG00000234988_12 (sequence is synthesized)
gtcacgcaaggaagcggccacgcgagggcgtgatctaccagggatccgtgcctgggtctgtgcatcctcccttctgcagccagaagaaacccctttgaagaagcgggtggatgacaagct

SEQ ID NO: 896148 - DNA, 120 bp, Artificial Sequence
  ENSG00000234988_13 (sequence is synthesized)
tgcaatacaccggggaggggagcagcatccccagaggcttttccatgcaccctctttctgagcagctctggataccctgggtcagctcccacacaaattgctcataactcattagtcacc

SEQ ID NO: 896149 - DNA, 120 bp, Artificial Sequence
  ENSG00000234988_14 (sequence is synthesized)
cttaaaattaatctctccaacagtgacatcctgtactcaggcggtgtcttaaccccctgaaaatgccttcgtggcaatgtccctgtggcataagcatgccccattttgcaagggagggaa

SEQ ID NO: 896150 - DNA, 120 bp, Artificial Sequence
  ENSG00000234988_15 (sequence is synthesized)
ttaaatttcagagaagttaagcgatccagggaatttcagtagcagaaataagtctagaacggagattacccaacttgactcaaatggcaaaacgtttgtcatggggaatttaattcttta

SEQ ID NO: 896151 - DNA, 120 bp, Artificial Sequence
  ENSG00000234988_16 (sequence is synthesized)
aaccttttcgttgctttatctccttgcttggaatattcaccatccatgtgcccactaaatcctgactgctctgagaccacgttcttcatgccagtcttatctcccgtgcctcctgggctt

SEQ ID NO: 896152 - DNA, 120 bp, Artificial Sequence
  ENSG00000234988_17 (sequence is synthesized)
aggaatctgatgagcctgagtgtggatctgggtcctgccccctgactgtgtggggttacccggattccctgaacttcggtctcccctcatggaaaatggggatggtatgccttcctacat

SEQ ID NO: 896153 - DNA, 120 bp, Artificial Sequence
  ENSG00000234988_18 (sequence is synthesized)
gaaggcgatctcaatatagttaccagctggcgactatacaggcagttgtcagtcagcctgtgggacacatgggtggctggatcagtctggcaggagcaggtggagagaattaccaggtga

SEQ ID NO: 896154 - DNA, 120 bp, Artificial Sequence
  ENSG00000234988_19 (sequence is synthesized)
tatgctgaccccacgaggaccaaggaccgcactgctcaagccttcacctgccacttggcattaaagcctctttacccttgtctccccaaccggacaatacattcctaggtgggagggccc

SEQ ID NO: 896155 - DNA, 120 bp, Artificial Sequence
  ENSG00000234988_20 (sequence is synthesized)
ctgcctttcactgctgctgtcttggagctaggcaatgtaatttcatgtatcagatgacggctgtcaagcactaagttttgtttgttccttctgctgtctcctaagttcacaaataaacaa

SEQ ID NO: 896156 - DNA, 120 bp, Artificial Sequence
  ENSG00000234988_21 (sequence is synthesized)
ccacttctccatgacatttgctcggacggggggtcccaactgccccaatagctttggacatcccatgtgcattgcttgaatgagcaggaccccagggttcttccagaggagcagaagtct

SEQ ID NO: 896157 - DNA, 120 bp, Artificial Sequence
  ENSG00000234986_0 (sequence is synthesized)
atagaccttagtttaggtattggggccaaaggatggatgaccatttcaaacgatccaggctaagccaggaggagagctcaaagtctgatctggtacgttgcaaggatcgagggacagagc

SEQ ID NO: 896158 - DNA, 120 bp, Artificial Sequence
  ENSG00000234986_1 (sequence is synthesized)
gaaagtagcagtactcttttcctaatgcaaccatagatggatgatcagaatttgtaatccataaggtagaagctgctgtgcctgaagaaatagaaagtgggcagaggtggaggggcaaga

SEQ ID NO: 896159 - DNA, 120 bp, Artificial Sequence
  ENSG00000234986_2 (sequence is synthesized)
gtctagtcagcagagtcccaaagaagcttgtcattctctaggcatttgtgcttacattctgatgggcctaatagcagggagatgacatggagcccaggcagaacagctgagatttctact

SEQ ID NO: 896160 - DNA, 120 bp, Artificial Sequence
  ENSG00000234986_3 (sequence is synthesized)
gggagatgacatggagcccaggcagaacagctgagatttctactggtcatgacctccatcttctccttcacacctttcctacctttctttttccatgcattcaacagacatttattaccc

SEQ ID NO: 896161 - DNA, 120 bp, Artificial Sequence
  ENSG00000234986_4 (sequence is synthesized)
agtgccaggtagtaagcgaggacctggggagagcagatgagtaagacaccgtctctgtctctcaggagctctcagattcttagggacacatgtacatcctaataaacacagtgcatctca

SEQ ID NO: 896162 - DNA, 120 bp, Artificial Sequence
  ENSG00000214353_0 (sequence is synthesized)
gaggtgaggcggtgtcatgtgacctgcctggtcccgtggagagccgggcagcgtgggggcagaggctggccctcctgatctgcacccaggcggcttctacaccaccctgcagcaggcctg

SEQ ID NO: 896163 - DNA, 120 bp, Artificial Sequence
  ENSG00000214353_1 (sequence is synthesized)
gccaccggcctcagcgcttctgggagaaggtcagccaggtggaagatggagagggcttctggactgagccctggaggggggctaggggccaccagcaggcagatgagccctgggacccag

SEQ ID NO: 896164 - DNA, 120 bp, Artificial Sequence
  ENSG00000214353_2 (sequence is synthesized)
ctggccaacccacctgaccacggtgacaaggactgcttgggaaggataagcccaggttcgggaaagcaaattcaggctgcaggacagctgcccgggccccccacaagcctggcaccagcc

SEQ ID NO: 896165 - DNA, 120 bp, Artificial Sequence
  ENSG00000214353_3 (sequence is synthesized)
cagggaagactgaggagcctcactccatggggactgcaaacacctgaacacagcgaacctgaaggtatagggcatcttcaggctgctactgaggcggtcctgccgcactcaacccagaac

SEQ ID NO: 896166 - DNA, 66 bp, Artificial Sequence
  ENSG00000214353_4 (sequence is synthesized)
ggctgctactgaggcggtcctgccgcactcaacccagaacctcatcactaaaaggaacctcatggt

SEQ ID NO: 896167 - DNA, 80 bp, Artificial Sequence
  ENSG00000214353_5 (sequence is synthesized)
tgcttcagcctcccaagtagctaggagtacagacatggtctcactctgttatcctctggctcaagtgatcctcccacctc

SEQ ID NO: 896168 - DNA, 120 bp, Artificial Sequence
  ENSG00000214353_6 (sequence is synthesized)
caggcacacgccaccaggcccagataattttttgtattttcagtaaaaacagggtctcgccatgttgcccagactggtcttaaactcctgagctcaagcgatgtgcctgccttggcctcc

SEQ ID NO: 896169 - DNA, 120 bp, Artificial Sequence
  ENSG00000214353_7 (sequence is synthesized)
ccaagtgctgggattagaggcataagccaccatgtctggcccccagtggcttctaatccgccctatctatccatcaagcctgggtggggtgggcttgctcagtgtccttcagattccttc

SEQ ID NO: 896170 - DNA, 120 bp, Artificial Sequence
  ENSG00000214353_8 (sequence is synthesized)
atcaattaactcttttgtgtacgagggtgtcccaaaagcagcagccgcgagtagaatttgccttgggtcattgctgtagtctcccgcatccaggaaagatctaggccgctcgctttccac

SEQ ID NO: 896171 - DNA, 120 bp, Artificial Sequence
  ENSG00000214353_9 (sequence is synthesized)
tctggacctcctgggagaggaagaggaacaaggggtcatgaaaggctgttggctctcttgaataaacaagacccctgtgacaagcacacacagaactctccagagccccataccttgatt

SEQ ID NO: 896172 - DNA, 120 bp, Artificial Sequence
  ENSG00000214353_10 (sequence is synthesized)
caggctcttcaaaaggaccatggctctggagccctgaggacccaaccaacgcccagtcattctcgatagtccccaagcttgtaagtctgtagtcacagtgatctcacaaggaggggacac

SEQ ID NO: 896173 - DNA, 120 bp, Artificial Sequence
  ENSG00000214353_11 (sequence is synthesized)
cagtgctaaacacatctgtcaaatctcagaagggatcactggcctgaggggaatggatgtttaaaatgacagataatacccagcatccttagctatcaggaaaatgcaaatccaaaccac

SEQ ID NO: 896174 - DNA, 120 bp, Artificial Sequence
  ENSG00000214353_12 (sequence is synthesized)
aagatactactgtacacccatcaggatggctaaaataaaagacaaataatagcaagtgttgatgagaatgtggagaaactggaaccctcgtacattgctggtgggaatgtaaaatggtgc

SEQ ID NO: 896175 - DNA, 120 bp, Artificial Sequence
  ENSG00000214353_13 (sequence is synthesized)
aagctgctttggagaacagtctggccattcctccaaaggctaaacatagtcaccacatgactcagcagctccactcctaggtatatgccaaagagaaatgaaaacttatggccacatgaa

SEQ ID NO: 896176 - DNA, 120 bp, Artificial Sequence
  ENSG00000214353_14 (sequence is synthesized)
accttgtatatcaatcatgttcacatcagcattatctacaatagccaaaaagcagaagcaacccaaatatctatcaacagatgaatggataaatgaggtgtggtatagccatacaatgga

SEQ ID NO: 896177 - DNA, 120 bp, Artificial Sequence
  ENSG00000214353_15 (sequence is synthesized)
ctattatttggcaataaaaagggatgaagtactgatgcacgccataaaaatgaactttaaaaacattgtgttaagtgaaagaagccagtcataaaagactacatattgtatccctttctc

SEQ ID NO: 896178 - DNA, 120 bp, Artificial Sequence
  ENSG00000214353_16 (sequence is synthesized)
gaaagtgtttagaacaggcaaacctatggagacggaaaatggactggaggttgcctaggactggaggagacgggggaatagggtataatggctaatggattctttcaagggcacggaaaa

SEQ ID NO: 896179 - DNA, 120 bp, Artificial Sequence
  ENSG00000214353_17 (sequence is synthesized)
tattctaaaattgattgtggtgatggttacataaccctgtgaatctacaaagtcactgaattgtacacttgatgttgggtgaattgtgtggtacatgaattctatctcaataaagggctt

SEQ ID NO: 896180 - DNA, 120 bp, Artificial Sequence
  ENSG00000214353_18 (sequence is synthesized)
agaggacctagaggttgatacctgcctgtccatttctctcttcagcccaggttcgggaaagcaaattcaggctgcaggacagctgcccgggccccccacaagcctggcaccagcccaggg

SEQ ID NO: 896181 - DNA, 120 bp, Artificial Sequence
  ENSG00000214353_19 (sequence is synthesized)
aagactgaggagcctcactccatggggactgagctccttcccttgcgttctgttccacacactttttgggctggaagaatcccctggctagagaagctcatgtcctggtggtggaagaga

SEQ ID NO: 896182 - DNA, 120 bp, Artificial Sequence
  ENSG00000214353_20 (sequence is synthesized)
tgccgccctacagcccaaggccttatgcaaagcaggtgaacagaagccacccccaccccaacctggtctttcctgaccctgtgagccccaaagtctgtagtgagcccctttccagcagaa

SEQ ID NO: 896183 - DNA, 120 bp, Artificial Sequence
  ENSG00000214353_21 (sequence is synthesized)
gccacagggacatgtaggctgccagggtccagggtgtcacgaggaccccgtgcctggcaaatcactgtgacaagcttggctgaaacagtaccccctgggaggaaggccttgtttttcctt

SEQ ID NO: 896184 - DNA, 120 bp, Artificial Sequence
  ENSG00000214353_22 (sequence is synthesized)
gtttccctgggatccttggaactgctctggagctgctggtgaggaggagggcggtgccgtgaccaggtcccctactccactggcatggggcaggatcagtggtgtgtctgagcccctggg

SEQ ID NO: 896185 - DNA, 120 bp, Artificial Sequence
  ENSG00000214353_23 (sequence is synthesized)
gggaataacagctctgataacaatggcagccatgatggctgtgaaaagtgaaagctctcctgggcgctttcctacacagcctcaagtcactccttaaaaagccctatggcctaaagcatg

SEQ ID NO: 896186 - DNA, 120 bp, Artificial Sequence
  ENSG00000214353_24 (sequence is synthesized)
ccacttccatttcggggaagagggaactgaagcacacagataggaagtcacctggccaagattacacggccagggaatggtggggccgcactttggatctgatcagtctgactccagaat

SEQ ID NO: 896187 - DNA, 120 bp, Artificial Sequence
  ENSG00000214353_25 (sequence is synthesized)
aatctcacccgccacacggcacagcctcctgaccagggcagcaggctcagagagagtccctggtggcatcgcctccactgtatcctgggaggggcagcagaacggcagctccagtgtgga

SEQ ID NO: 896188 - DNA, 120 bp, Artificial Sequence
  ENSG00000214353_26 (sequence is synthesized)
ccagcccctctgcacccaggggatacctggcagctccaggtgtccgtggaaggaggttagcacacatttttcagtgtaattttgtatgagaagggtagacagtggctcacacctgaaatc

SEQ ID NO: 896189 - DNA, 120 bp, Artificial Sequence
  ENSG00000214353_27 (sequence is synthesized)
ttagctgggtgtggtggtacattcctatggtcccagccactcgggaggctgaagtgggaggattataagatcccagctgctgccagctcccagctgtcagctcacctatggtgagctatg

SEQ ID NO: 896190 - DNA, 85 bp, Artificial Sequence
  ENSG00000214353_28 (sequence is synthesized)
cctgtggaggcagaggacacgggggaagcctggtgctccccaccagtgcactaagaatccaaaagggccaagatgtcaggctggt

SEQ ID NO: 896191 - DNA, 120 bp, Artificial Sequence
  ENSG00000214353_29 (sequence is synthesized)
gtgcactaagaatccaaaagggccaagatgtcaggctggttggcccctcggcaagctgagctctgtggctcacagtggccctaagatgctgctggccagcctgtggggcctctcctgcaa

SEQ ID NO: 896192 - DNA, 120 bp, Artificial Sequence
  ENSG00000214353_30 (sequence is synthesized)
gtggtgctgtgtcagggccaaagaacggcagcatatcacggagctggtatgtgaactggcagcatttcgtgtattaacattctccaactttctccacagcaaacacctgaacacagcgaa

SEQ ID NO: 896193 - DNA, 120 bp, Artificial Sequence
  ENSG00000214353_31 (sequence is synthesized)
cctgaaggtatagggcatcttcaggctgctactgaggcggtcctgccgcactcaacccagaacctcatcactaaaaggaacctcatggttcaggtaacacaatccttcaaggtacggatg

SEQ ID NO: 896194 - DNA, 120 bp, Artificial Sequence
  ENSG00000214353_32 (sequence is synthesized)
agcaagcccaggtccagaggcagtacgggacccatctgagaccatgaggccatgtaccaagcagtcattccctgggctggagacactctccctgggcttttcttcccttgcctggctgga

SEQ ID NO: 896195 - DNA, 120 bp, Artificial Sequence
  ENSG00000214353_33 (sequence is synthesized)
ggtggaggtcatgggaagcaggtggaccctagaggaccaggcagactgatcttagtgcctaggaaagggagggtcaagatcccagctgctgtcggctcccagctgctctgctgggcaggg

SEQ ID NO: 896196 - DNA, 120 bp, Artificial Sequence
  ENSG00000214353_34 (sequence is synthesized)
ttggctgctgctgctgagctctgcacatgctcagcaggggaactggggctctgggaccctgcactcttcctagagggcacactgcatgatgtgctcagttccccagctgctgggccggag

SEQ ID NO: 896197 - DNA, 120 bp, Artificial Sequence
  ENSG00000214353_35 (sequence is synthesized)
cctgagaggtagcaccctgctgtcgtggcttaccttacccatcaagaacagagggagctcactcagtttaaaatacatttctgcatcagttccaaaaagtctagacgagtcactcctggg

SEQ ID NO: 896198 - DNA, 120 bp, Artificial Sequence
  ENSG00000214353_36 (sequence is synthesized)
ggcttctgagttatttcaaggtgtctgcaaaattccattttcatggagcattttctcataaagcatcttataatgaatgtcttacacatacgcgtactacagtttccaaatgcatggcgc

SEQ ID NO: 896199 - DNA, 66 bp, Artificial Sequence
  ENSG00000214353_37 (sequence is synthesized)
agcgtgagccaccgtgcccagctgtggatgtgcattttttttggaagagggtccatagctttcatc

SEQ ID NO: 896200 - DNA, 120 bp, Artificial Sequence
  ENSG00000214353_38 (sequence is synthesized)
gatgtgcattttttttggaagagggtccatagctttcatcaggctctccaagggtcaatggccactcagaggcacaggactgccaccaccatggcagtttccagccaggtgggaatgcct

SEQ ID NO: 896201 - DNA, 120 bp, Artificial Sequence
  ENSG00000214353_39 (sequence is synthesized)
ttctgccgtgggaggagtctccagtctggccaccaccctgggcagacctgaactgagtgaaactggtggcctcacgtggtgccttgggcaagcggcgcagctgaagaatcacagggtggg

SEQ ID NO: 896202 - DNA, 120 bp, Artificial Sequence
  ENSG00000214353_40 (sequence is synthesized)
tctggctacctggcaactctgcacgatcccacccgtgtccaagctcagtctcactgtgtcaatacccgctgtgggaagaaggtggtgggctggagcccgggcatgttggctctggtttta

SEQ ID NO: 896203 - DNA, 120 bp, Artificial Sequence
  ENSG00000214353_41 (sequence is synthesized)
caactctgaaggtgcccagctcttgagcacagctggtgacactgactgtgcagctgccacgtggggatctctgtcaccaaaagtcaggaagcactagatcatttgttcttgtttggtttt

SEQ ID NO: 896204 - DNA, 120 bp, Artificial Sequence
  ENSG00000214353_42 (sequence is synthesized)
ttaggtaggatggtttggattttaggtaggatttggcattggctcctgaatgacaagtataaaccaaaaccctcgtccagtctagcacttcctggccttggcacaagaactgagggctcc

SEQ ID NO: 896205 - DNA, 120 bp, Artificial Sequence
  ENSG00000214353_43 (sequence is synthesized)
tgtaggctcatcccagccgacagtagcacagtctccccagcgaggcagcggacagcggtgcccctctgcagcccatggcttaagcctacctctgccttctcctagacctccccgacctcc

SEQ ID NO: 896206 - DNA, 120 bp, Artificial Sequence
  ENSG00000214353_44 (sequence is synthesized)
ccctcaatccccatagcccagattacagagacaagtctacaacaggcttttggctgccagagggaggcttttaaatcccagatcagatcctgccattcccacttgtgacactgtctccac

SEQ ID NO: 896207 - DNA, 120 bp, Artificial Sequence
  ENSG00000214353_45 (sequence is synthesized)
agcctccagcgcaaaagctaagccctctgcaggatacacaagtcctcgcatgtctgtccagaccgttccccgagttccaggacccagtacctgagtctgcctccccctttctcctgggat

SEQ ID NO: 896208 - DNA, 120 bp, Artificial Sequence
  ENSG00000214353_46 (sequence is synthesized)
gctcagagccacctggaacgagctcttgaccaccccacccacacctgctcctccttccagccctggtgtgcaaatgacactaggatagcgggggtctggctcacaccaaatttctagaag

SEQ ID NO: 896209 - DNA, 120 bp, Artificial Sequence
  ENSG00000214353_47 (sequence is synthesized)
gcagtctttccctcacctctctcctgcctaccccatcccacccatcagtgagtcctgtggttctcaacacagagctcaaacccacccaactttctccacatgctgctcctccccagcctg

SEQ ID NO: 896210 - DNA, 120 bp, Artificial Sequence
  ENSG00000214353_48 (sequence is synthesized)
agcccccatcccctctgatggggacaacggtgacagctccctagcgggtctgcatccaccgggcccctcctagatccactgtccacagagcagccccgttcttcctcccttctcgtccct

SEQ ID NO: 896211 - DNA, 120 bp, Artificial Sequence
  ENSG00000214353_49 (sequence is synthesized)
gccatgaaagtaatactactgaccccacgagactcagacaaagctgaaggatccgacgtaaaggtttagcactgcgctggggccctggaagcctggctatgttgactggcattagctgtt

SEQ ID NO: 896212 - DNA, 120 bp, Artificial Sequence
  ENSG00000214353_50 (sequence is synthesized)
attcccagccagtcttctcattgcctgggctcaggcaccatggccctccctttctggtaacttcacccctcacatcaatcactcctctttccagtaacttcctggctacttctctgcctc

SEQ ID NO: 896213 - DNA, 120 bp, Artificial Sequence
  ENSG00000214353_51 (sequence is synthesized)
accactggagtaaatgaatgaaggtcagggacacattcaggggccagctcttatcttggagcctacaggggtgagcacaggcaggtgcactggaacgcgtggcagctatgtgaaaaggag

SEQ ID NO: 896214 - DNA, 120 bp, Artificial Sequence
  ENSG00000214353_52 (sequence is synthesized)
acatttcataaacggctgcacctgcgtgcttggaaaacatgctcagggtgctgagggatgaggataagttcacaaatgacatcgatgagggaagaaccctagctaggggtctggggggaa

SEQ ID NO: 896215 - DNA, 120 bp, Artificial Sequence
  ENSG00000214353_53 (sequence is synthesized)
gagcctcttggggtagagtgcacactttctcttcatgagtgattggctctcccagggcccaggttcactgtcaagttcaggggaaagaaacccctgtatgagacccaccatccactctag

SEQ ID NO: 896216 - DNA, 120 bp, Artificial Sequence
  ENSG00000214353_54 (sequence is synthesized)
ccccagagatgccaaggtcacccaaagaaaaagtgacatggggcaagtccaggggactcagaccagggcagaaccgttacagtaccttccgcggggagtcccttcaccttgcagggagta

SEQ ID NO: 896217 - DNA, 120 bp, Artificial Sequence
  ENSG00000214353_55 (sequence is synthesized)
tggagggagccccaaggaagagaattattttgctgcctggtctgcactgcccccatgtggaagactgcgccattacagctgacctgggcgcacaggagacaacagctcctggggccggtg

SEQ ID NO: 896218 - DNA, 120 bp, Artificial Sequence
  ENSG00000214353_56 (sequence is synthesized)
atttatccttaatcttggacatgattaatgactgcccatgctcaggctgtccttgaacagacttccccttgtgggtcttgttggccccccatcatcctggacaaacagacagcgatgagt

SEQ ID NO: 896219 - DNA, 120 bp, Artificial Sequence
  ENSG00000214353_57 (sequence is synthesized)
caaggcaactgtgtctcactgcagtcaccatgtattagctgtacttttattattataacttgcgtttactgacctccaatagcttaatttttttttaatatttaaaaataagtaagaaca

SEQ ID NO: 896220 - DNA, 120 bp, Artificial Sequence
  ENSG00000214353_58 (sequence is synthesized)
gatgtagaggtggtagagccacttgagaactgcaatcctggtcatcatcccaatggccgtgtcactgaggtggcagtttaggacctgcacgatcccgtcgaggtgaagggtcactggggc

SEQ ID NO: 896221 - DNA, 120 bp, Artificial Sequence
  ENSG00000214353_59 (sequence is synthesized)
tctttcagtgctgtgggtaagatcgggagggagagcagaggtgaagcccaccatagccctctcccatggagtcatggcaccaccctgggcctgcacatcctgagtcacacactgctaacc

SEQ ID NO: 896222 - DNA, 120 bp, Artificial Sequence
  ENSG00000214353_60 (sequence is synthesized)
accgtctagggggatcgggggtcagggataacctgatcccacacatccttgctggtctcccaccatcccagctcagcccagcccaggggtttgaagggggcttctctctctccctttcca

SEQ ID NO: 896223 - DNA, 120 bp, Artificial Sequence
  ENSG00000214353_61 (sequence is synthesized)
aagaagtttggagcttgctgctgggctggaaccatgataaccatgttttgggggatgaggaccagtctgctgggctcccactcacttttccttttctttctccagcaccagcctggcttg

SEQ ID NO: 896224 - DNA, 120 bp, Artificial Sequence
  ENSG00000214353_62 (sequence is synthesized)
cacaggaggagaaaccctctcccagtcactgagctgacctgaccaggctcaaggcattaagttcagaccctttcttggaaaaacaaaaccaccaggtctggactgtatgagggaaggtcc

SEQ ID NO: 896225 - DNA, 120 bp, Artificial Sequence
  ENSG00000214353_63 (sequence is synthesized)
cgataacaactgttgacctccgccaggcccttcaccggccatctgaaggatgtttctcaagtgaggtcagggatcgaggcttgtcattgtgccttgccactgcaccagggcactcagcac

SEQ ID NO: 896226 - DNA, 120 bp, Artificial Sequence
  ENSG00000214353_64 (sequence is synthesized)
atttggcctaggagagacacccttgagagttaagaccaaaatgcgctcctttgagttggggaaggggtaaacacagcctctgcctatgagaaacggatattgttcaggaggtacttttgt

SEQ ID NO: 896227 - DNA, 120 bp, Artificial Sequence
  ENSG00000214353_65 (sequence is synthesized)
tctggtgggcacaggaagccccctggcttctgtggactgaagtcctgcgggtccccaaagttctgctaagcagcctgcgggacagcgggtgctgctgggaggcttgagttggttttttgc

SEQ ID NO: 896228 - DNA, 120 bp, Artificial Sequence
  ENSG00000214353_66 (sequence is synthesized)
ccaaagcactgctccctggcacaggctgggttttcaaggtgggggcagcatgggtagaaaaacctcgggatattggggaggggctcccttcctaccgaggcactacactgtacttcccaa

SEQ ID NO: 896229 - DNA, 120 bp, Artificial Sequence
  ENSG00000214353_67 (sequence is synthesized)
atggtgccgacaggtgcaggccaggggttgcattttctaaggacctgggccagcagatcagtcccctgccggtataaaaccgtctcttcgtggcatttctaggctgctcaattattcatt

SEQ ID NO: 896230 - DNA, 120 bp, Artificial Sequence
  ENSG00000214353_68 (sequence is synthesized)
tgcatcaggaactgatggctgtgctttcctcactcgcctgcagcctctctgaagctcatttgatgtgaatccctaaagggcatgattctgcgctctgtaattgctgagaggaattgctat

SEQ ID NO: 896231 - DNA, 120 bp, Artificial Sequence
  ENSG00000214353_69 (sequence is synthesized)
ttaatatggtttgatgatccccatggtgcacatttcaggggcaagagtgggcacatctatcctctggtggccaggagctccgggcatgtgatacagccacagagcctggaactgagtctc

SEQ ID NO: 896232 - DNA, 120 bp, Artificial Sequence
  ENSG00000214353_70 (sequence is synthesized)
ctggtgtcttctgaggatatcgaaacacttaaatctttgctagcctgagacagacggggacagtactgtgcaggtagaggagtctagggcggtaaacactggccccgtcaatctcttaat

SEQ ID NO: 896233 - DNA, 120 bp, Artificial Sequence
  ENSG00000214353_71 (sequence is synthesized)
cagtttctctcaagtccactgtcccgcagaaatacaacgcaagtcacagatataattttacatcttccagttttcaattaaaaaggagaaacaggtgaaatgaatttcaatgctgtttta

SEQ ID NO: 896234 - DNA, 120 bp, Artificial Sequence
  ENSG00000214353_72 (sequence is synthesized)
attgacccaatgtatctaaaatattagcatctcaacatgtaatcaatataacagtgaatgtaaacattcccaacaaaatctattctcttttgtgtcctaagcctttgggacctggtgtgc

SEQ ID NO: 896235 - DNA, 120 bp, Artificial Sequence
  ENSG00000214353_73 (sequence is synthesized)
atttcaccgttacggtgcacctcggttcagagtagccaacaggcactcagtagccacgtggctgccgcggaggcccacacaacagtccacgccaggactttctgagtgtttccttgtcat

SEQ ID NO: 896236 - DNA, 120 bp, Artificial Sequence
  ENSG00000264232_0 (sequence is synthesized)
agttctcatgagatctgatggttttacgaggggcttaccccttcactcagctctcatacttcttccagctgccctgtgaagaaagacgtgtttgcttttccttcagccatgattagtcct

SEQ ID NO: 896237 - DNA, 120 bp, Artificial Sequence
  ENSG00000264232_1 (sequence is synthesized)
gtgatgttatgagaaaaatgatttgaaaatgagcttgaggtttcagccctggaggcctgaacagacgagctggctgtggctagtcactcccccaccagccttggccgtgcactcatgcca

SEQ ID NO: 896238 - DNA, 120 bp, Artificial Sequence
  ENSG00000264232_2 (sequence is synthesized)
ttcagcagatttgatgaagccagctttcatgttacgagctacctctgtggagaagcccacatgtcaagagagtggatgaccctcttgcccacagccagtgaggaatggaggccctgaggc

SEQ ID NO: 896239 - DNA, 120 bp, Artificial Sequence
  ENSG00000264232_3 (sequence is synthesized)
caatgggctacaaagaactaaatcctgtcaacattcatatgcatgaccttggaatcagatcccacccccatcaaggcctgacatgactgcaatcccagctgacattttgattgtagtcat

SEQ ID NO: 896240 - DNA, 120 bp, Artificial Sequence
  ENSG00000264232_4 (sequence is synthesized)
gtaagagtcccagaggacccagttaagctaggcacagtctcttaatgcggggaaattgtgaagtaattagtactgttgttttgggataatgtgttacgtaacaagagacaggtgatacaa

SEQ ID NO: 896241 - DNA, 120 bp, Artificial Sequence
  ENSG00000264232_5 (sequence is synthesized)
tgttatctataatgagtgtattagggatacattaatattcacaaagactatatagctattaactaattgttctgtggcttatagacataattttggatgattcgttctttttttgccact

SEQ ID NO: 896242 - DNA, 120 bp, Artificial Sequence
  ENSG00000264232_6 (sequence is synthesized)
ttgccactaataaatatacaaaaacctttcatgttttaaaatgaataaaaagttataattctgaagaggtcctttatttaaatgaaacacactaaaaccattgaattttaatatttatat

SEQ ID NO: 896243 - DNA, 120 bp, Artificial Sequence
  ENSG00000264232_7 (sequence is synthesized)
gatctgccactgttttttgtaagtgtacctgctattatgactatattttcaagttaaagattcatgacgtttttgtgagaaaatattttaaaaacttgttaattttttcagattaactac

SEQ ID NO: 896244 - DNA, 120 bp, Artificial Sequence
  ENSG00000264232_8 (sequence is synthesized)
aaaaaatctattgtaaaaatttataaaatactaataattaagtctctttattttcatgtcagtgctcttaaaatataggttgtttcaaagacagtagcaataaaaatgtcaattcagaat

SEQ ID NO: 896245 - DNA, 120 bp, Artificial Sequence
  ENSG00000264232_9 (sequence is synthesized)
tccttcagggatgaccctaagtctaacaggtatatcctttgaaacaagaaaaatatctagcaccttgggaaatgaaaatagtacatttttattttctcttaataaaattaactcagattg

SEQ ID NO: 896246 - DNA, 120 bp, Artificial Sequence
  ENSG00000275197_0 (sequence is synthesized)
tctgttggctttctgggtattgtctttctttaatgagacctttctccagaaataaacacatcctcaaaaaaattctgccaaagtaaaattcttcaaatacaacaacgtttaacctagaaa

SEQ ID NO: 896247 - DNA, 120 bp, Artificial Sequence
  ENSG00000275197_1 (sequence is synthesized)
aaaattcttcaaatacaacaacgtttaacctagaaacatgacataatggtttaaaagtactaccgaaatagaaaacgcaaaaatttgttgccctgttctttatatatatatatatatata

SEQ ID NO: 896248 - DNA, 120 bp, Artificial Sequence
  ENSG00000275197_2 (sequence is synthesized)
accaaagccaaaagcagtaccatggacactggattaagaagcaatgccctctcaagagacaaaaacatttactaaatattgttttatttcctagtatagcataattgagagaaaaactga

SEQ ID NO: 896249 - DNA, 120 bp, Artificial Sequence
  ENSG00000275197_3 (sequence is synthesized)
tatattaaatgacataacagttatgattttgcagaaaacagatctgtatttatttcagtgttacttacctgtcttgtctttgctgatgtttcaataaaaggaattccataacttcttgct

SEQ ID NO: 896250 - DNA, 120 bp, Artificial Sequence
  ENSG00000275191_0 (sequence is synthesized)
taaagctagcactgttttgatccccatcactgaagtttgcaacgtttaccttatttgtttaatatagtacattttaacagaacatgttagaaaagatagattactgccacggacgaaaac

SEQ ID NO: 896251 - DNA, 120 bp, Artificial Sequence
  ENSG00000275191_1 (sequence is synthesized)
tgggtggttttcttttgtttgttaaaaaccttattaccttgacagcttgagattctggagacatcacctttgtatgtacttattattattattttaaataatcaacagttgttaaaataa

SEQ ID NO: 896252 - DNA, 120 bp, Artificial Sequence
  ENSG00000275191_2 (sequence is synthesized)
aagctttggagcctgatgtgaaggactgaaggggatttttttgagtctttgagaggatgtctctgcccatgcccagcctgaagaagggaacttgtaagaatcaccattaattaatatgca

SEQ ID NO: 896253 - DNA, 120 bp, Artificial Sequence
  ENSG00000275191_3 (sequence is synthesized)
ttcctaccctacttacatatggctctgtcaataccagtggttgagtctgattgttttaaccaactgttttgagcttgtcttagagctcaccccaattaaaatttgtactcttcaaaagca

SEQ ID NO: 896254 - DNA, 120 bp, Artificial Sequence
  ENSG00000275198_0 (sequence is synthesized)
cttgtcaaactgaacgaggaaagaagcctcagcagcgccaactaagcaaccggctacagaccgcgttccggtgcgtgtgtgacgacaccgccgtgtgctcctccgctgggagatatagtg

SEQ ID NO: 896255 - DNA, 120 bp, Artificial Sequence
  ENSG00000275198_1 (sequence is synthesized)
ccctcgcccttgcctcgccccgcccgcgagcgctccaaaggcttgggcgtgcggcttgctcttcctctccgcttgacgggcggtggttcccccgagacagaaacttgactgaaaaataat

SEQ ID NO: 896256 - DNA, 120 bp, Artificial Sequence
  ENSG00000275198_2 (sequence is synthesized)
accaaatacccgtgctgcggcccgtggccctccatagggccacctgaactagcctcgcctgtccccttgctctttgccgttcgtccttcgcgttttgtgaaaacagttggcgccgcagaa

SEQ ID NO: 896257 - DNA, 120 bp, Artificial Sequence
  ENSG00000275198_3 (sequence is synthesized)
atgagataaacgcccctgagctcgaaacccgcactcgaactgccaccgagccgacccttcctgttttggaactcagggcccggccacccgagaagcaccctcatgggcactttgtttcta

SEQ ID NO: 896258 - DNA, 120 bp, Artificial Sequence
  ENSG00000275198_4 (sequence is synthesized)
caagggcccgtttccatttccttcctaaggtttccttatcccctgcggcaggaggggcccgctgggctcgggttttcagctgcgttggagctgcagaggctgcggagtgaacgcggccag

SEQ ID NO: 896259 - DNA, 120 bp, Artificial Sequence
  ENSG00000275198_5 (sequence is synthesized)
gagcccgcctgggagcgcgcagcgctctaggagccgagagccgctgcttggccctcgctggccgggtaaaccgaggggaagctcctggcctcctttcccttaagccccttattgcttctg

SEQ ID NO: 896260 - DNA, 120 bp, Artificial Sequence
  ENSG00000275198_6 (sequence is synthesized)
tggggaaggccctcctaggtagaggcgaaggaccggggagataacctctcccatgggccacatccgctgccatggtctgtgtcgtgccagaaggtacctctcagccctcagtgccgtgaa

SEQ ID NO: 896261 - DNA, 120 bp, Artificial Sequence
  ENSG00000275198_7 (sequence is synthesized)
aaatctgacactcaagaaggtcgattgacacgcctaacgtcgcacagcaatttagtagcacagcacagaatagaagctacccaggctggctgtctcccaagcctgtgtttctctaccaca

SEQ ID NO: 896262 - DNA, 120 bp, Artificial Sequence
  ENSG00000275198_8 (sequence is synthesized)
cacagtaacactgcgtcttccagagctgaagctgtagtcgtgagatggctcaagcatttgggggaactggaaggcagacctgggaatgaagagaattgttttctttgagcagaattttca

SEQ ID NO: 896263 - DNA, 120 bp, Artificial Sequence
  ENSG00000275198_9 (sequence is synthesized)
gtcagtggcctacagaaaaagtagagaagaaacattacttggttattgtcactgttccaagaggctagctaagaaaattaaatcgtgtggatttcttaaaactgctgtttcgtgtaacct

SEQ ID NO: 896264 - DNA, 120 bp, Artificial Sequence
  ENSG00000275198_10 (sequence is synthesized)
ccaaacatctatctgtgactttggcacaaggtggcttggatgtctgatctttgtgattgaactatattcacatcctgtttctaagattgtgttactaatggtttttcctgaggttttaca

SEQ ID NO: 896265 - DNA, 120 bp, Artificial Sequence
  ENSG00000275198_11 (sequence is synthesized)
accagtagtggtgtctgcgctgtagtcaagtgaaggttctttgatctaaggctatacttgtcagttgctgtttattgcttcttaaacttttactcaaagtcttcttcaaaaaggagaaaa

SEQ ID NO: 896266 - DNA, 120 bp, Artificial Sequence
  ENSG00000275198_12 (sequence is synthesized)
gctgtggttttctttctgtaggcggttagtagtcattcccaaagatgtttgccaagtgagcaaatatattggaacttccaaatgagcatttcactgtaaaaatacctgccccaaaaacaa

SEQ ID NO: 896267 - DNA, 120 bp, Artificial Sequence
  ENSG00000275198_13 (sequence is synthesized)
tacgacatgtttcttttgcaatttatatggtataggaaacatgttctgtgacttctttgtagcaagccagatcctgatgtgaaaaaagagatctaactgtgccaataacaaattgagaat

SEQ ID NO: 896268 - DNA, 120 bp, Artificial Sequence
  ENSG00000275198_14 (sequence is synthesized)
gccaataacaaattgagaattcttgagtaagttcctttcctgtgttcttgggacctcagttttctttttgtttgtttgtttgagacggagattcgctctgtcgccaggctggagtgcagt

SEQ ID NO: 896269 - DNA, 120 bp, Artificial Sequence
  ENSG00000275198_15 (sequence is synthesized)
ggaattacaggcgtgagccaccgcgcctgactgggacctcagttttctagtatgtagaatttgaggattggattagagaatttccagattcccttccagctctagtatatgattccactg

SEQ ID NO: 896270 - DNA, 120 bp, Artificial Sequence
  ENSG00000275198_16 (sequence is synthesized)
cagctctagtatatgattccactgtggagaaattggaccataacttcattatgtcattatacttaggcttatctgtttctgtgtataatgcttgacattgtacaagttgcttatatgttt

SEQ ID NO: 896271 - DNA, 120 bp, Artificial Sequence
  ENSG00000275198_17 (sequence is synthesized)
atttttatattcagtcttcccaatatttattatacttccagaggaaagggtcccagttttacagagaagttaggcttaccaggaagcctgaactacatttatctaaatgtgaattggtgt

SEQ ID NO: 896272 - DNA, 120 bp, Artificial Sequence
  ENSG00000275198_18 (sequence is synthesized)
aacttgctttttagtcgtcagcaaatgagctcactaaattgtgaactccttaaggacaaggcctattcgattcatcatgatattgtctgtgcctagtgaatttcccttacatttctagat

SEQ ID NO: 896273 - DNA, 120 bp, Artificial Sequence
  ENSG00000275198_19 (sequence is synthesized)
aaagatttactgaaggaatgaatgaacagtaattaggacaatagtagaagaatctggatttgaaagggtctttgagtcccaagaaaatcaatcaaaggccggatgcagtggcttacacca

SEQ ID NO: 896274 - DNA, 63 bp, Artificial Sequence
  ENSG00000275198_20 (sequence is synthesized)
ggatgcagtggcttggttcgagaccagcttgagcaatatagggagaccctgtctctacaaaaa

SEQ ID NO: 896275 - DNA, 89 bp, Artificial Sequence
  ENSG00000275198_21 (sequence is synthesized)
tctctacaaaaaatattatggtcccagctaattgggagcctaaggtggcaggatcaccaaaggccaggagtttgaggctgcagtgagct

SEQ ID NO: 896276 - DNA, 120 bp, Artificial Sequence
  ENSG00000275198_22 (sequence is synthesized)
cagagtaggaccctgtctcaaaaaagaaatcaaccaatatttatggagtatctacaatgtagaaggttcggtttcttttttcaacacaatttttttttcctctggttgagttgtctccat

SEQ ID NO: 896277 - DNA, 120 bp, Artificial Sequence
  ENSG00000275198_23 (sequence is synthesized)
tttttatttttaaattaaagaaatatcattatggaacactaatgatcttaaatatcagggcttatctccaagctctcctttgtatgtattctgttacattctttgaagaatacaaggatt

SEQ ID NO: 896278 - DNA, 120 bp, Artificial Sequence
  ENSG00000275198_24 (sequence is synthesized)
tagaagaaaatgacttttaaaaaacctatctgactcactcaaacaaaattgctcactttcctgatctattgttgcttttctggtctttggaaagagatgatgtcttctacccggccttgg

SEQ ID NO: 896279 - DNA, 120 bp, Artificial Sequence
  ENSG00000275198_25 (sequence is synthesized)
atttttttcttttttgtccttcctttttttttggtgggggcaatttttggaagtaaatgtcacaatcgatcagtcaatctgagtaggcatggtctagtctgtcctaagtattttatatga

SEQ ID NO: 896280 - DNA, 120 bp, Artificial Sequence
  ENSG00000275198_26 (sequence is synthesized)
tctagtctgtcctaagtattttatatgagtaccatttgacaaagtcagaattctataatgattcttaacatttttttttttttttttgagatagtctcattctgtcactcaggctggagt

SEQ ID NO: 896281 - DNA, 120 bp, Artificial Sequence
  ENSG00000275198_27 (sequence is synthesized)
tgatccacccgtcttggcctcccaaagggctgtgattacaggcgtgagctgccatgccaggcagatttttaacacttctaaaaagttgtaactcttgagacaagtccactgtgacctcag

SEQ ID NO: 896282 - DNA, 120 bp, Artificial Sequence
  ENSG00000275198_28 (sequence is synthesized)
gttgtaactcttgagacaagtccactgtgacctcagatgtatatacatccacatctctaagagtctcctggttactagggaattccgcacaagttcctcacaaaattcacaagcaagaat

SEQ ID NO: 896283 - DNA, 120 bp, Artificial Sequence
  ENSG00000275198_29 (sequence is synthesized)
atttagaatcatgaaattctaaatctgggaagaaccagagaaagtccatctggtctaacttttacattttccagataagaaaactaagtcccgagaagggactagttagggaaagagcag

SEQ ID NO: 896284 - DNA, 120 bp, Artificial Sequence
  ENSG00000275198_30 (sequence is synthesized)
gcttttagactgctctttcctttgacctttgaaaacattttaatcaaagaacaatcataataaggggagtagaggaatgttatcattcacagggcttccaagtgactgtggaaaatcttg

SEQ ID NO: 896285 - DNA, 120 bp, Artificial Sequence
  ENSG00000275198_31 (sequence is synthesized)
ggaggctttgctttggactttgttatccatttagggactggctgttctgaattgttctctgtgctaggccttatctaaaccgcttgccttaaatctttgaccttcatttaaattgctgac

SEQ ID NO: 896286 - DNA, 120 bp, Artificial Sequence
  ENSG00000275198_32 (sequence is synthesized)
actttccccttgtgaaactgtatcataatttcttctgtcttctttaggctagcagcatttccctttcttattcccagaagagctcagagaagcttatttttttagatgagtgatgcataa

SEQ ID NO: 896287 - DNA, 120 bp, Artificial Sequence
  ENSG00000275198_33 (sequence is synthesized)
aaaggaatgtggctgcacaattctaattatttcataaagttctgaggtatttttagggtgttgcaaagtgctaataaaaaataatcatattcatggacatacagagtggaataatagaca

SEQ ID NO: 896288 - DNA, 120 bp, Artificial Sequence
  ENSG00000275198_34 (sequence is synthesized)
ctggagactccacaaagtgggagggcagtgagggatgagaaattacctgttgggtacatcgtatactactcaggtgacagtcacactaaaagcccagactccaccactgtgcaatatata

SEQ ID NO: 896289 - DNA, 120 bp, Artificial Sequence
  ENSG00000275198_35 (sequence is synthesized)
catgtaacaaaaatgtaccctttaaatctataaaaaataaatcctttctagcccagtttgctaagggttttttttttcatgaagaacatttataataaactctttgttctgcataaaaaa

SEQ ID NO: 896290 - DNA, 120 bp, Artificial Sequence
  ENSG00000253265_0 (sequence is synthesized)
gtgaggctccctgctcagctcccagggctgctaatgcactgggtcctgacccagcctctactctccctgcccgtcacccctggaaagccagcctctatctcctgtagatccagtcatagc

SEQ ID NO: 896291 - DNA, 120 bp, Artificial Sequence
  ENSG00000253265_1 (sequence is synthesized)
agacaggttcagtggcagtgggtcggggacagatttcatgtttaaaataaggaggatggatgctgaggatgttggggtttattgctgccagcaaagtacacattattctcccacaatggt

SEQ ID NO: 896292 - DNA, 120 bp, Artificial Sequence
  ENSG00000162888_0 (sequence is synthesized)
acttggacctgatgcaaggaaacaacctccagccaccttcccccaggcctttagagtgctggtctttgcacagagaagcaccacagaggacagaagcctccaggactcacccttccccat

SEQ ID NO: 896293 - DNA, 120 bp, Artificial Sequence
  ENSG00000162888_1 (sequence is synthesized)
ttctggccctaccaggcagccacagaacagccaaccaggcgcaggtggttcctggtctcgtgcaccaccctcaagagaacacacagagacttagaattagagcaggactcagcccattcc

SEQ ID NO: 896294 - DNA, 120 bp, Artificial Sequence
  ENSG00000162888_2 (sequence is synthesized)
ccagggctcgcctagctgccatcggatccacacatggacacaggtgggtcccgggtatttgcctccctcgctgcctctgccctgccagctgtgccctccacgcttgcccgccccactgca

SEQ ID NO: 896295 - DNA, 120 bp, Artificial Sequence
  ENSG00000162888_3 (sequence is synthesized)
ataatgcagaagcacacagctggctgaggctgggaggcccccttcagagccgtagtgtggagcaccaacaacatgcatgtggctggggctgggtgacgcatgccacctatggtgagcgtg

SEQ ID NO: 896296 - DNA, 120 bp, Artificial Sequence
  ENSG00000162888_4 (sequence is synthesized)
gcaccagtcaggctgcagagaggcagaggatagcccacaccagggctctcagtgtggggaactgcccacgctctcatttccagtgtgaattctcttctatctctaagtggagtgaaggaa

SEQ ID NO: 896297 - DNA, 120 bp, Artificial Sequence
  ENSG00000162888_5 (sequence is synthesized)
caggaacattttccccaaggcccagagctgttaaatcaggggttggaggtcagccctcgccacacattagaatcacctggagaagctgtactacactgacatccaagccctgctccagag

SEQ ID NO: 896298 - DNA, 120 bp, Artificial Sequence
  ENSG00000162888_6 (sequence is synthesized)
caattacaccagaatgtgtggtgggttggagtagaagaagcaggcattggtattctgatatgaggacgggtgagtgccaaggtctcagccccataacaaggtgaggtcctacaggcctca

SEQ ID NO: 896299 - DNA, 120 bp, Artificial Sequence
  ENSG00000162888_7 (sequence is synthesized)
gaatgtggtagcacgtgggaaattgtcctctcttctcaggaggggccagtgttcacacaggcaggggatggagagtgggcctgatctgagaaggcggaacccaaaactcctgaaggggac

SEQ ID NO: 896300 - DNA, 120 bp, Artificial Sequence
  ENSG00000162888_8 (sequence is synthesized)
cctagtgttctcctaaaggagacttctcaatataaccaggtggaacggtagaaagaatccagatttgatttgattttacccctcaaaagccctgaagaatctagattgtagaggcaggca

SEQ ID NO: 896301 - DNA, 120 bp, Artificial Sequence
  ENSG00000162888_9 (sequence is synthesized)
gagccacatacgagtcttgggtctgccacttactagccatgtgatgtgcagaggagacctgttctcagagcctcagtttcctcacctaggaaatagggtgatgatatctactgtataggg

SEQ ID NO: 896302 - DNA, 120 bp, Artificial Sequence
  ENSG00000162888_10 (sequence is synthesized)
caggtgttgtaggagtaaataagctgagctacagaaatctcccagccaactgcctggtccacccagggacagaaaaccactcctctgctcacaccccttcactcactcctccctctgcct

SEQ ID NO: 896303 - DNA, 120 bp, Artificial Sequence
  ENSG00000162888_11 (sequence is synthesized)
cagggctccacaaagccctgggtcctctgaagcctagaagggccaggccaggccctgggctccaggagctcaggaggggctgttacctcatcctcttgccgtgtgtgactaaggacgctt

SEQ ID NO: 896304 - DNA, 120 bp, Artificial Sequence
  ENSG00000162888_12 (sequence is synthesized)
gatacttctgcacgcactcctcctggaacacctgcaggagtcttttggctaaatgactgaaattcaccctagaacgacagagaaccaaggtgcagatgagctgccagaaccactatgcac

SEQ ID NO: 896305 - DNA, 120 bp, Artificial Sequence
  ENSG00000162888_13 (sequence is synthesized)
aagcccaccatccctcagtctccgtcagtctccgtcaccaccttgtcgtaagtgcccaagccctgcgtccacagcagggctatgtctctgggaaaggaggaaggacggtcacacacttgg

SEQ ID NO: 896306 - DNA, 120 bp, Artificial Sequence
  ENSG00000162888_14 (sequence is synthesized)
attgtgaaggttgcagtggccagcaaagcccacatcaacagggagacgtgggagacacacagggggtcctcagggaacacacatgtgctcaagcttagtcctcaggaaagggaagggaaa

SEQ ID NO: 896307 - DNA, 120 bp, Artificial Sequence
  ENSG00000162888_15 (sequence is synthesized)
gtgaggcagccgtggaaagaaggtgtgtgagtgcgtgtgtgtgtgagacaaaaaggggtcggggtgcttgtagaactgggggagtgagttcccagataaccattaaatcagggagggcct

SEQ ID NO: 896308 - DNA, 120 bp, Artificial Sequence
  ENSG00000162888_16 (sequence is synthesized)
cctggacgtgagtgtgtccgggaaacatgggagacagaggagcggggggaggcagggaaggttcaggcagagggcagaagcaggaagtggtaagtggtgcatcagtgaggacaactagag

SEQ ID NO: 896309 - DNA, 120 bp, Artificial Sequence
  ENSG00000253266_0 (sequence is synthesized)
agcttgcccagccctcgagtctcagagaatggagcccttgctgccctttctgcctgagcactcacagctcattaagaagtggaagcacacgtctgcaatcaccgtgtaattaccttgctt

SEQ ID NO: 896310 - DNA, 120 bp, Artificial Sequence
  ENSG00000253266_1 (sequence is synthesized)
cctaattggcagcagacaaggccggcagtcccaactgcagcagtggacaccctgccatcagaatctgctggggagcttttccagagtgtgggtgtcagtcccaccctggcctactggatc

SEQ ID NO: 896311 - DNA, 120 bp, Artificial Sequence
  ENSG00000253266_2 (sequence is synthesized)
ggaacccaaaaccaaaagccctgcctcagcgagcaagttcaaagtcattggcccaaaggaaaaactccaagtcctttgttggtcattcagggtggtcatgagggctgactgaggaacagg

SEQ ID NO: 896312 - DNA, 120 bp, Artificial Sequence
  ENSG00000253266_3 (sequence is synthesized)
ctgtgcacacgcagctcaggaccttgtgagagcatcaggcctgccaacaaccccatggtacaacaagaaaatggctgtgctggagccctggacgccggaaatctgagatgaaggtgccgg

SEQ ID NO: 896313 - DNA, 120 bp, Artificial Sequence
  ENSG00000253266_4 (sequence is synthesized)
ctgccccggtctgcacgtggccttccctgcgtgtttctgtgtccttgctgctgcttagaagcacagcagccattggattaggacccactctcatccagcatggcctcatcttaactcatt

SEQ ID NO: 896314 - DNA, 120 bp, Artificial Sequence
  ENSG00000253266_5 (sequence is synthesized)
acgtctacaaaatctccatttccaaataaggtcccattctggggtcctgagtggacacggcggggacaccatcaacccatcctaaggccttcttgggcagcctcagggggaagccggacc

SEQ ID NO: 896315 - DNA, 120 bp, Artificial Sequence
  ENSG00000253266_6 (sequence is synthesized)
agccttaagtgaaagtggagggttccaaggatcctacaaaggggccctgacccagtcggtgggcagcaggggacagagtggacgtggaacttgtagacagacagaacgatgcacaggact

SEQ ID NO: 896316 - DNA, 120 bp, Artificial Sequence
  ENSG00000253266_7 (sequence is synthesized)
cacccccaccaccagaggtctgtgtgcagagacgacagagggcagcgtccctcccactgcccatcacccatggagtgtggaaaatcccggtcaagacagcagcccgggccgtgaaatcga

SEQ ID NO: 896317 - DNA, 120 bp, Artificial Sequence
  ENSG00000253266_8 (sequence is synthesized)
gtagctcaggaatctgctcctccctccagcaccatggcaacaggcctctgagaactgctgatctgacgccctggacgccggaaatctgagatgaaggtgccggcagggccctgcccgctc

SEQ ID NO: 896318 - DNA, 120 bp, Artificial Sequence
  ENSG00000237914_0 (sequence is synthesized)
ccctccatttcctatatttactcttccagcagacagggacatggaaaaatccgtgacctagcactgacccagcagataagactaaccaccataagtacagtttttgaaagaaaatgaagt

SEQ ID NO: 896319 - DNA, 120 bp, Artificial Sequence
  ENSG00000237914_1 (sequence is synthesized)
actcacacctgctaaaggtcaagccacaggatgttgctgtagacctggataacaatggactgaagtcaagttagcaggtctaatctgtgccaagtcccaaatttgaaaagagggaaggtt

SEQ ID NO: 896320 - DNA, 120 bp, Artificial Sequence
  ENSG00000237914_2 (sequence is synthesized)
tcttggaatctaggtcttcagttgggccaggttgggtccaaaaacaatgatcactgagtactaagaaagccaaaggcagcagaacatagaggagtagaaacaccaagaaaaggctcaaat

SEQ ID NO: 896321 - DNA, 120 bp, Artificial Sequence
  ENSG00000237914_3 (sequence is synthesized)
gttcatgatgatcaccattctacagaagaggaaactgaggctgggagaaatgaaggcactgtctccttgtcctccatgtgtcccagtgggcaccttctgtgtcccaccaagcattcatgt

SEQ ID NO: 896322 - DNA, 120 bp, Artificial Sequence
  ENSG00000237914_4 (sequence is synthesized)
ccattaacagagcaagtgccctgaattcttgagccccaacactgactgcacacccaattgtcccttcgagattcttgacttcatgcaattcaagggagaagcctccctcctgggtgccca

SEQ ID NO: 896323 - DNA, 120 bp, Artificial Sequence
  ENSG00000237914_5 (sequence is synthesized)
ggcccagatacactgtggccagaaacaaaacactgtaggctcctgtcagcctgaggggagcatggaaacttgctcctatgggccccacgcaccccgtaggaaatacctcatctcctcatc

SEQ ID NO: 896324 - DNA, 120 bp, Artificial Sequence
  ENSG00000237914_6 (sequence is synthesized)
cttagtcctcagcaccaagaagaggtgggcatgtgctccgctgagctgcaggaggcccagctctgctccatagatgctgctgagtgaaggagaaacagcacaacatggggggagagtcct

SEQ ID NO: 896325 - DNA, 120 bp, Artificial Sequence
  ENSG00000237914_7 (sequence is synthesized)
aaacgcttcatgtgtgctgagacctgtcttttagaaacaggcttgacatatagtgaaccatctgcagaacctttctaatgagagggtaaagccagcccctcctacccctacaggactttt

SEQ ID NO: 896326 - DNA, 63 bp, Artificial Sequence
  ENSG00000237914_8 (sequence is synthesized)
agagggtaaagccagcccctcctacccctacaggactttttttcatttgttttgttttgtttt

SEQ ID NO: 896327 - DNA, 87 bp, Artificial Sequence
  ENSG00000237914_9 (sequence is synthesized)
tttcgtctttaatgcttttcgctatagaactgaacaatgccagagtccggaaagagaaggttggagcatttctctacacttgaaaaa

SEQ ID NO: 896328 - DNA, 120 bp, Artificial Sequence
  ENSG00000237914_10 (sequence is synthesized)
aaaaaccacatctgagtgagtgttgcagagacaggggctgtaagtcaggctggtggggaggaaatcttggctccctgacctgctcaccactcagatctcctctctgagcctcagtgtcct

SEQ ID NO: 896329 - DNA, 120 bp, Artificial Sequence
  ENSG00000237914_11 (sequence is synthesized)
catctttaaagaggcaacaaatggctccgccctcatagcactggttataagcagactttggcacaactgccactccctggcccccttccctgcctccctcctttctcatccaggtcatca

SEQ ID NO: 896330 - DNA, 120 bp, Artificial Sequence
  ENSG00000237914_12 (sequence is synthesized)
tttaggctgagagcatggcaaagaggggtgagcaccatactaggagttagcatatctgagtcacacctgagctactttctggctgtgactgcctgggctggggaggcaccatctggaaac

SEQ ID NO: 896331 - DNA, 120 bp, Artificial Sequence
  ENSG00000237914_13 (sequence is synthesized)
ttcggtgtctttgcctatattatctgatcagggtaaatccacttccacatctatgttcaagggtggtggggagccctgttgctatgtcatctaggagggaaattagataatattctcata

SEQ ID NO: 896332 - DNA, 120 bp, Artificial Sequence
  ENSG00000237914_14 (sequence is synthesized)
tatgaaaatacacacaccctctgacttagcaatgtcacttccagtgggtgtctcccacctgaggagggtgatacatgtacaaggccatccactgcaggattgttagtagctcaagtttgg

SEQ ID NO: 896333 - DNA, 120 bp, Artificial Sequence
  ENSG00000237914_15 (sequence is synthesized)
gaacaacttacatacccatcaacagaatgctgtgaaataaattttgatatttccataaattggagtgttctgcagctgctaaagagtggagcagttctatgtcctgacgtggaatctcga

SEQ ID NO: 896334 - DNA, 120 bp, Artificial Sequence
  ENSG00000237914_16 (sequence is synthesized)
tacggaatgttagggcttatgtttggaagaagttttccaatcaccaatgggctttagtgtctgaatgtgaggtgcattctgaacctttgggaaatggatgaaaaaagaaatcctggctcc

SEQ ID NO: 896335 - DNA, 120 bp, Artificial Sequence
  ENSG00000237914_17 (sequence is synthesized)
ctgatccatggttctgtttgaggagcttttatttagtacctgtgatgcaccaggttcttctatgaagacagtgtctaacaaacactggggaaggaaggagcctgcctctattcggacctt

SEQ ID NO: 896336 - DNA, 120 bp, Artificial Sequence
  ENSG00000237914_18 (sequence is synthesized)
gactctggctttgattccatcaataactggccatgtgactgtggacaaggcccctatcatctcttggcttaagtcccccatctgtaaaggggagttgggctgaaagtctgaaggtctttc

SEQ ID NO: 896337 - DNA, 120 bp, Artificial Sequence
  ENSG00000237914_19 (sequence is synthesized)
ccgtgctgaaattccaggattcaggaggtaggatgaggattctgggcctctggctggaaaccccaaataagttttattgctgctttaaattgggcacccctgagccacccatacgtatga

SEQ ID NO: 896338 - DNA, 120 bp, Artificial Sequence
  ENSG00000237914_20 (sequence is synthesized)
cctcttttctgaggtgaaggatattctgagatgacccagctctgctcagagcccacagtgactgtatgactcagtccttaaatcacccaaggcttcaaatagacccacagcaaatgcgag

SEQ ID NO: 896339 - DNA, 120 bp, Artificial Sequence
  ENSG00000237914_21 (sequence is synthesized)
acttattggcatctcctcccaccgggccattagactaaacagtgaatctgtgcctcccaggaatcttccctgtgtgatgtttctgaagattaaataaagaaaaacacgatttacactttc

SEQ ID NO: 896340 - DNA, 120 bp, Artificial Sequence
  ENSG00000288003_0 (sequence is synthesized)
accagttccaggcacacagacttcctgtcagttcttggtcaagcaagttctcgtccacctgaggaccttgtccttgcctgttcttccgtctgcctggaaggctttcttctgtcttctgtg

SEQ ID NO: 896341 - DNA, 120 bp, Artificial Sequence
  ENSG00000288003_1 (sequence is synthesized)
cctggctccttccccaccttccggcctcacttgagatgtgatcttctctgaccatcttagctgaagttggcctcctctcccttaatctccattgagctaaacagtttctttcatctagaa

SEQ ID NO: 896342 - DNA, 120 bp, Artificial Sequence
  ENSG00000288003_2 (sequence is synthesized)
ttgcaaagctctggaggccctcccagtcctgaagaggttaacggagagtctagcaccttttaaaggtctgaataggaaacgtttgtcttctgttgtctctaagggcagccactatgagac

SEQ ID NO: 896343 - DNA, 120 bp, Artificial Sequence
  ENSG00000288003_3 (sequence is synthesized)
ttcaaaagaaccttggtctccagaatcttaacctgaacatgaaattgacctatagcctggaagcctgccccaccccacgagttgtcccgctgttctggaccaagccaatatatttcttaa

SEQ ID NO: 896344 - DNA, 120 bp, Artificial Sequence
  ENSG00000288003_4 (sequence is synthesized)
ccaatatatttcttaatgtatctgattgatgtctcatgacttcctgaccaccttgggtacatgttctcaggatctcctgatggatgtgccagaggccatggtcactcatatttggctcag

SEQ ID NO: 896345 - DNA, 84 bp, Artificial Sequence
  ENSG00000288005_0 (sequence is synthesized)
atttttagtagagatggattttcaccatgatgcccaggctggtctggaaatcctgacctcaattgatccacctggctcggccag

SEQ ID NO: 896346 - DNA, 120 bp, Artificial Sequence
  ENSG00000288005_1 (sequence is synthesized)
cctgcccagttagagttttgacagacgtgtatacacccatgtactcaccaccctatgccggagtagaacatttctatcaccccactccttctccttatgttgggcagcattggagcaact

SEQ ID NO: 896347 - DNA, 120 bp, Artificial Sequence
  ENSG00000288005_2 (sequence is synthesized)
gcagaaatttaaactgatacattttaactgctttatctaggggccacaagtggcctgagacccagagaagaatctcaatgtcacactaacttcttggtaagatgcttccagttgtcctgg

SEQ ID NO: 896348 - DNA, 120 bp, Artificial Sequence
  ENSG00000288005_3 (sequence is synthesized)
tatctgaatggcttctaggaatgctcgtgttacaaactgcctaattcacgctgtgtcatgaggaaatggtgcagggacagagactgactgcaaaagagatatgtcctacaatttttgtca

SEQ ID NO: 896349 - DNA, 120 bp, Artificial Sequence
  ENSG00000288005_4 (sequence is synthesized)
ccaagatggaagtgggtaatggaggaaaacaaaggcacagggccagaatctcatctgtggaaaatccttatggatcttatagctcatatgtcaaataaaattgatacaggttccccataa

SEQ ID NO: 896350 - DNA, 120 bp, Artificial Sequence
  ENSG00000288005_5 (sequence is synthesized)
atagaaaaacagtaacaatacatttcaatcaaccaccctatatgaaaagcagaatcatctttctattctctgcagaaaatgacatcacattgttcaagatgagtgtatttgtctgttctc

SEQ ID NO: 896351 - DNA, 120 bp, Artificial Sequence
  ENSG00000288005_6 (sequence is synthesized)
acactgctatatagaattacctgagactgggtaattttaaaagaaaagtgttttaattgcctcatggttctgcattctgtataggaagcatggctggggaggactcaggaaattacaatc

SEQ ID NO: 896352 - DNA, 120 bp, Artificial Sequence
  ENSG00000288005_7 (sequence is synthesized)
atagaagaaggagaaggggaagcaagcaccttgttcacatggtaaagcatgaaagagagtgtgaagggggaagtgccacacacttttaaacaacaagatctcatgagaactccatcatga

SEQ ID NO: 896353 - DNA, 120 bp, Artificial Sequence
  ENSG00000288005_8 (sequence is synthesized)
gacaacaccaaggggatggcactaaaccatcagaaaccaccacccccatgatccagtcatcacccccatgatccagtcaccacttttggggtcacccccaggccccacctccaatactag

SEQ ID NO: 896354 - DNA, 120 bp, Artificial Sequence
  ENSG00000288005_9 (sequence is synthesized)
atttgggtggggacacagagccaaaccatctcaaaggaacactcaaagagggcaaccaaaatacaaagaaatattatagcggtatgacaggcagttaattgataaaaatattatgctatt

SEQ ID NO: 896355 - DNA, 120 bp, Artificial Sequence
  ENSG00000288005_10 (sequence is synthesized)
gataaaaatattatgctatttttctgaattttgtggtgtttgtgacatttgtgagatctttaaaatgtataatttgttgtgatttctttttctcatgcaaaataaaaattaataataata

SEQ ID NO: 896356 - DNA, 120 bp, Artificial Sequence
  ENSG00000253263_0 (sequence is synthesized)
cagctactgtatcccagaaccttcttgccttcccagtcccaaggcaggtgctgtgggaagagtgtgtataaggtctgatggggacagacctggggtgaatctcagtggcacttctcaaca

SEQ ID NO: 896357 - DNA, 120 bp, Artificial Sequence
  ENSG00000253263_1 (sequence is synthesized)
gctatagatccctaagtaagttatctaatcatcatccccacagtgttctcagatgaaaatggggggtaataccccatctcataggagtttaaaaggattaaatagggaatgtagctatca

SEQ ID NO: 896358 - DNA, 120 bp, Artificial Sequence
  ENSG00000253263_2 (sequence is synthesized)
ccatttttcatatttgctctgccacctctacacccagccccgctttctgcaaccaattgtattataaccccctcccaaacacttagtgcatcctcccactcatgtaatttgtttaccttg

SEQ ID NO: 896359 - DNA, 120 bp, Artificial Sequence
  ENSG00000253263_3 (sequence is synthesized)
ttttctatttatttcttttgagatggggtctctgtcagccaggctggagtgctgttgcagtgagccaagataacgccactgcattccagcctggatggcagagcaagactccatctccaa

SEQ ID NO: 896360 - DNA, 120 bp, Artificial Sequence
  ENSG00000275441_0 (sequence is synthesized)
gcgtttcgccggaggtctcaggccacggcccgtcgccacctaccgagtccgggacaaaacaagctcgtcgggctggaaactgcgacgaggggagcaggcgcgttcctcgaaccctttttc

SEQ ID NO: 896361 - DNA, 120 bp, Artificial Sequence
  ENSG00000275441_1 (sequence is synthesized)
ccttttatgagcgtagtcgcgcgcggaggaccttgcacgcatgcgtagtcgttcctctgtgacgtgacccgctgccccgtgggaaatgtagttttcacttggcacaccgctccggctctt

SEQ ID NO: 896362 - DNA, 120 bp, Artificial Sequence
  ENSG00000275441_2 (sequence is synthesized)
ggcggaaccctaatttaaccaaccaaagtgcttgtgcgttttcagcgttttctcccatttccccagactctatttaaaacaaaatgcaataaataaataaataaataaaacttgaaagcg

SEQ ID NO: 896363 - DNA, 120 bp, Artificial Sequence
  ENSG00000275443_0 (sequence is synthesized)
ggaaatgacagttgaaattagaacaggagctaagaggagccagcagaaggggacggcaggaactaggaaatttaaggcggggagaaacaactgagagaagtggacagaaaaaagaaagct

SEQ ID NO: 896364 - DNA, 120 bp, Artificial Sequence
  ENSG00000275443_1 (sequence is synthesized)
tagcataaataagaaggcccgggactcccgtgcgtccagtagacctgctctgctatggatcaaaacaaatgatttgtcattctgaaatgactctgaaagggggaatggaatgtgccccaa

SEQ ID NO: 896365 - DNA, 120 bp, Artificial Sequence
  ENSG00000275443_2 (sequence is synthesized)
cgatcaatattaaattttatgcctgctgcacctttcaaaaggctcaagaagacattgattcaagacccgtgttttctgtatgagtccacaagatcgaagactttatggacagaagtcatg

SEQ ID NO: 896366 - DNA, 120 bp, Artificial Sequence
  ENSG00000275443_3 (sequence is synthesized)
tttgatgttgaccgaggttgtcttgcctccagaaataagagattctgctccatgctggcggggtcctactttgccagaaatttgcaggtgtcaggtggactacctggagaagatgctaca

SEQ ID NO: 896367 - DNA, 120 bp, Artificial Sequence
  ENSG00000275443_4 (sequence is synthesized)
ggagaaagtgaacccggaccgccagtcttcttgagtttgtgagtctatgccttcaccttgttctggcttttttttcttttcttttttatctgttctcagaaagtctgcagcttccaacac

SEQ ID NO: 896368 - DNA, 120 bp, Artificial Sequence
  ENSG00000275443_5 (sequence is synthesized)
cattttatttgctcctcctgtgagtgacagaccagtgtgtcccaagaatacttaatgtattttgtgtcaggggcctgtgggtcagtaaggttattaataaacatcgcctcttgttctaat

SEQ ID NO: 896369 - DNA, 120 bp, Artificial Sequence
  ENSG00000275443_6 (sequence is synthesized)
agacattgattcaactcacagcttactttctgggtagcaggactccacagggaaacaataagggcatcaacatcatggaacttacaagcctggagtcttggcttctgggtcaggtgacct

SEQ ID NO: 896370 - DNA, 120 bp, Artificial Sequence
  ENSG00000275443_7 (sequence is synthesized)
tggggaagtcacttcactttcccagtttctagatgcttccaagacggtgctgtctgcctaaatttttctaaacaactcgaagccatccttaaagtgtttgaggaatggacattctcaggc

SEQ ID NO: 896371 - DNA, 120 bp, Artificial Sequence
  ENSG00000275443_8 (sequence is synthesized)
aaagtcgtttccaagccccttcggctcagcactgcaccgcagatcactgctttctcaaatcaaagggggcccccctgcagagttggtttacaccattaaatttcctccaatgtaaagcca

SEQ ID NO: 896372 - DNA, 120 bp, Artificial Sequence
  ENSG00000271576_0 (sequence is synthesized)
gggggcgggcggtggacccccagctggcagagcctggggcgggggcctgaggtggcgtggaccgcttcttcccccgcggtcgcccgggctggcgctcgcgtgcccatcgctgagatagtg

SEQ ID NO: 896373 - DNA, 120 bp, Artificial Sequence
  ENSG00000271576_1 (sequence is synthesized)
ggaggtggagtgggaaccgctagctttgcagaacgcagagtccctcctcaccctggcggtcccggtgccctggagtgcagtcgcggaatactgttcagcggctcgggtggttttccttgc

SEQ ID NO: 896374 - DNA, 120 bp, Artificial Sequence
  ENSG00000271576_2 (sequence is synthesized)
gtcccgccacgcggcggctcctcactaaaaggctgccttctccccacagctccaggtccgagaggagccgcaccgtcgggttggagatcgcgcgcaagggtggcctctgggtctgcatct

SEQ ID NO: 896375 - DNA, 120 bp, Artificial Sequence
  ENSG00000271576_3 (sequence is synthesized)
gccccgcatcggccacaggaaaagcctggtccctaggcacggtcgtggttcgagcttttcgttctctcgcacattgaggtattcgctcagcccaccacgttgtcctcggggttattaggc

SEQ ID NO: 896376 - DNA, 120 bp, Artificial Sequence
  ENSG00000271576_4 (sequence is synthesized)
cccagtcacaagccctatgatgttttcagacttcccaggtggagataaaggaaaattttactatttctgcagaacttctgttgatgtacagcattgtatttagcaacttctgtgtagatc

SEQ ID NO: 896377 - DNA, 120 bp, Artificial Sequence
  ENSG00000271576_5 (sequence is synthesized)
tgaaaataaatacattaccaattgttagttgcgtttttattaatataaatcttagagtacttgattttgctgttagctttacttaggtaaattatgtggcactctagcatttttgttgtt

SEQ ID NO: 896378 - DNA, 120 bp, Artificial Sequence
  ENSG00000271576_6 (sequence is synthesized)
caaattcaaaatagactgtaacttcccaatttattctatgttcccaaggcaccaggcatagtaggtgttttatgaatacctgttgacttgaaatttctcagacttttaaaaaatttttca

SEQ ID NO: 896379 - DNA, 120 bp, Artificial Sequence
  ENSG00000271576_7 (sequence is synthesized)
ttactgacaaaagatggagcgataaaaagattcttagtacacttcctattattgccaattctattagtaatgtatactgcattacaacttctatacaagcagtaactcatttgctcctca

SEQ ID NO: 896380 - DNA, 120 bp, Artificial Sequence
  ENSG00000271576_8 (sequence is synthesized)
taagaaccctatgagagatgtggttttactgtcatcattttaggagcaaattaaggcacaaagaagtgacttacccaaggttacacagctattatctggtggaagcaggatttgaaccct

SEQ ID NO: 896381 - DNA, 120 bp, Artificial Sequence
  ENSG00000271576_9 (sequence is synthesized)
ggcaattgggctccaaagtctgatcctttgtctataatgttgacaaaaacttgtggatgttgtggtaaattgctttctctccatttgaaatcccattgagttgaagagatagacgcatag

SEQ ID NO: 896382 - DNA, 120 bp, Artificial Sequence
  ENSG00000271576_10 (sequence is synthesized)
tgagtatacgtcccaaggaaatgtattatattgttttctgggtttcagttaattcaaataaaataaaaatagtgaagcaaagatttggactagatgctgtgaggttttgtgtcagcatgc

SEQ ID NO: 896383 - DNA, 120 bp, Artificial Sequence
  ENSG00000271576_11 (sequence is synthesized)
aacagtgtcacaacagtgtcatcaccacgtttggttctgtgttgtggatgtaatattttgccccacatacatagaaagttcaatgaatagcactgaaccacatatataccaaattaaaga

SEQ ID NO: 896384 - DNA, 120 bp, Artificial Sequence
  ENSG00000271576_12 (sequence is synthesized)
caacttttgatattatgtattctagagggaatctttctggtatcagaatattcatactactgtcattgggatgagttttaaatgtatacctttttaaataaatcctctttaataataaaa

SEQ ID NO: 896385 - DNA, 120 bp, Artificial Sequence
  ENSG00000236166_0 (sequence is synthesized)
ataaaaccctcaagtaattggatggaatttctatgtgcctcttcccagcaagcatcccttacccttttgggggagacatggctatatgtcaggcctgtgagaacccaatgcaggaacagc

SEQ ID NO: 896386 - DNA, 120 bp, Artificial Sequence
  ENSG00000236166_1 (sequence is synthesized)
atgtgatatgaaaatggaaactgtcagattgaaaccatacatggcgaagtcaaaaagagactctttcttgcactgtttcagaggataatactggaggctgccatgggagaagtctgcaca

SEQ ID NO: 896387 - DNA, 120 bp, Artificial Sequence
  ENSG00000236166_2 (sequence is synthesized)
gaagattctagaaacagaaagcattcttttcattggtgtgagtcttgaatataaatggaaatcagaggtctgtaatagcaggccagtgtggataaggcagtaaggttttgagtctgagga

SEQ ID NO: 896388 - DNA, 120 bp, Artificial Sequence
  ENSG00000236166_3 (sequence is synthesized)
gatggctgggggcagtttgtagacttattgtcagtccagtgtagaatttgagaatatagccagggcttaaggttccagtttcaaattaaagacaaaagaaatcagcaataccaaaatgaa

SEQ ID NO: 896389 - DNA, 120 bp, Artificial Sequence
  ENSG00000236166_4 (sequence is synthesized)
tatcttctgtctcatgctagcagtggaataggaaaaggactcaaaagacttctactggccataatgaagtacctgttactatatttgctttcctaccataagcaactataaaactggaca

SEQ ID NO: 896390 - DNA, 120 bp, Artificial Sequence
  ENSG00000236166_5 (sequence is synthesized)
atatataggcaactgatctcatgcatttcaagcagcacaggattctgataattaacagaaggaaagcacatgaggataatactggaggctgccatgggagaagtctgcacaaaaagagca

SEQ ID NO: 896391 - DNA, 120 bp, Artificial Sequence
  ENSG00000271579_0 (sequence is synthesized)
taattagcatgcacattccagtttgagaaaagcggcactaaaaagctttgtcaaataggcagtgtgctcccatttctcggtattgtgcctgtgacaggcatcaataatcaaccagagaat

SEQ ID NO: 896392 - DNA, 120 bp, Artificial Sequence
  ENSG00000271579_1 (sequence is synthesized)
cacttccttctgagagcagaatattctcaagtcatggtttcaggtcgcagtgaccaatcaatgggagttggatcaaaattaaacctatcttccatactggtgtcaacacttgaagaaagc

SEQ ID NO: 896393 - DNA, 120 bp, Artificial Sequence
  ENSG00000271579_2 (sequence is synthesized)
tcttttatttccacccatatacacatcatacatgcctgataaatgtttgtggaatgaatgtgttttcccctagccttgtttcctgtgatattcacactattccagtccatacccacagaa

SEQ ID NO: 896394 - DNA, 120 bp, Artificial Sequence
  ENSG00000271579_3 (sequence is synthesized)
aatcagaacttcactgggcatctgggaagttcagcagctgttctaggtgttggattttgctattggccatgacccattagaaggttgaggtgaggttggaaagatgttagggatggaatg

SEQ ID NO: 896395 - DNA, 79 bp, Artificial Sequence
  ENSG00000271579_4 (sequence is synthesized)
tttttcgggcgcgatctcggcttactgcaccctctgcctcccaggttcaagctactctcctgcctcagcctcctgagta

SEQ ID NO: 896396 - DNA, 68 bp, Artificial Sequence
  ENSG00000271579_5 (sequence is synthesized)
agtgcaagggcgcgatctcggcttactgcaccctctgcctcccaggttcaagcttgcccagctaactt

SEQ ID NO: 896397 - DNA, 88 bp, Artificial Sequence
  ENSG00000271579_6 (sequence is synthesized)
tcttcaccatgcttggccgcaagttttcttcaggacatggccccatgtagtccagctctacaaggtggctgctgtgtgaactaggcta

SEQ ID NO: 896398 - DNA, 120 bp, Artificial Sequence
  ENSG00000271579_7 (sequence is synthesized)
agtccagctctacaaggtggctgctgtgtgaactaggctacatgccgaaacgggactgtcgggggaatcagcagggggggcagaccaacagccctgtaagacatagcaataatgattata

SEQ ID NO: 896399 - DNA, 120 bp, Artificial Sequence
  ENSG00000271579_8 (sequence is synthesized)
aatagcatccttctgaccgccttttgatgtactgtccaaggccaggtggaaaatctttcctcccctgcctttccccactaatcaccttcccctcatttttcaataaagattctgagccca

SEQ ID NO: 896400 - DNA, 120 bp, Artificial Sequence
  ENSG00000236164_0 (sequence is synthesized)
ggtgctggtatgatctccctgtttacagaagaggaaacttgagaagttaagcaacctgccaaaggtcttagagcctgaaagattagcccatcgaccaaatccagccaggctttacagcca

SEQ ID NO: 896401 - DNA, 120 bp, Artificial Sequence
  ENSG00000236164_1 (sequence is synthesized)
gcacaaacatcggtcaggtggcctagggcaagtcattcaacctctcagaacttcagtttgtgatgtcagttggggataatgatacttgccttgcagggaaggaagagacagctccagctc

SEQ ID NO: 896402 - DNA, 120 bp, Artificial Sequence
  ENSG00000236164_2 (sequence is synthesized)
ccttttcttggcatcccagtcttcatcacgctcatccagaggcagccccttctgctgggcagcgcaacggtggtcctggcactcgggctctgccctaggaaagaagagagagccttctga

SEQ ID NO: 896403 - DNA, 120 bp, Artificial Sequence
  ENSG00000236164_3 (sequence is synthesized)
ttattcacaggttctgcacaccgcagttcagttgagaaggaaggaggccaagtttgagcatttccaagcatacacttagggaaggtctcagacactaaagaaactacttggaggtggaga

SEQ ID NO: 896404 - DNA, 120 bp, Artificial Sequence
  ENSG00000236164_4 (sequence is synthesized)
aaaattgtgggacccgagtgagatgttaacagactcaaagatagtcactcagcttgaagaaaatgctcctgattcttgaagtgctcacatttatagagcaacctgcagattattgcgaga

SEQ ID NO: 896405 - DNA, 120 bp, Artificial Sequence
  ENSG00000236164_5 (sequence is synthesized)
ctgttttcgtttatttttagttttatttttcataatcataaaagtgatgtgtgttccttgtataaaatttaaaagtacagaaacatataaggaacaaaatgagaatcactcacaatcaca

SEQ ID NO: 896406 - DNA, 120 bp, Artificial Sequence
  ENSG00000236162_0 (sequence is synthesized)
acagacttcagctggctcaatgcacgatcagtgccaactgcagaaacatttcagaagtaactaactaaagccaaattcataataagctgcagatgactcaagactcctggcatttcctcc

SEQ ID NO: 896407 - DNA, 120 bp, Artificial Sequence
  ENSG00000236162_1 (sequence is synthesized)
ccagcctttattcctgggaagagatggtgtttattatgacctgggctgatctttgtgagagaaaaacacaagttagctcaaaactggtaagtacacatgtggttgcctttgagaaatgca

SEQ ID NO: 896408 - DNA, 120 bp, Artificial Sequence
  ENSG00000236162_2 (sequence is synthesized)
aggagagaattacctatataagcagataaaaagttatttgaaaaatatcaagctacccctgcagcagtagacatcatccattataaattcagctatgaaacaagaaacttaagatgtgaa

SEQ ID NO: 896409 - DNA, 120 bp, Artificial Sequence
  ENSG00000236162_3 (sequence is synthesized)
agaccagaaagattttagattttgagtaggaagattttgaggaagacaaggaacactgttcaagtgattctcgcgcctcagcctccctagcagctgagaccgcagggtttccccctcctg

SEQ ID NO: 896410 - DNA, 120 bp, Artificial Sequence
  ENSG00000224914_0 (sequence is synthesized)
cattgtccgcgacgcagctcgggatccgggtcggggtgtcggccgggttgctgccgggcaccgtcgagcgttagccacccagcattgagctgccagcggctgttctccctaagcaccctc

SEQ ID NO: 896411 - DNA, 120 bp, Artificial Sequence
  ENSG00000224914_1 (sequence is synthesized)
gctcacgtcgcctcgcctcgcctcgcctgaccggccgcagccttggataccagccttaaatcgagccgactacggcccagccccgcccgcggcgaggaatccactgaagacctacatttc

SEQ ID NO: 896412 - DNA, 120 bp, Artificial Sequence
  ENSG00000224914_2 (sequence is synthesized)
ccggaaggttaacagcccccttctcagttttcctgctgctcctatcagtgacaaatcagcgtattagaacatgcatgctggctgatcattctgatcaagtcaacaagcttcacaacttac

SEQ ID NO: 896413 - DNA, 120 bp, Artificial Sequence
  ENSG00000224914_3 (sequence is synthesized)
tcaatgaggtcgtccgtgagaacttcactgttttacggggacaggagctacttctttgctgaactgcatcacggtttcaactgctgaggttttcttcaagcttttgcattgtttggaatg

SEQ ID NO: 896414 - DNA, 120 bp, Artificial Sequence
  ENSG00000224914_4 (sequence is synthesized)
tgaagggcatggccgagacacactttgaggttcccactgcattgttacacctcccccctcacttcagggccaggtaacaccaagaaggacgccatgagagcgaaggccgttgggtcaccg

SEQ ID NO: 896415 - DNA, 120 bp, Artificial Sequence
  ENSG00000224914_5 (sequence is synthesized)
ccctttgctctcgcgctgcgcgtctccctgccatcaaccgccgcaactggcgctgggagcggttgagggcggccggcctcgcgctggaacctcgcccgcctcaaggctcctgcggcggca

SEQ ID NO: 896416 - DNA, 120 bp, Artificial Sequence
  ENSG00000224914_6 (sequence is synthesized)
cacggggcaggccaggacccgccctaggagggccccgctggagatgtggaaatggagggacgcggcacctgggcgcttcctggggccagacaacgccccctcattggaacctccatgacc

SEQ ID NO: 896417 - DNA, 120 bp, Artificial Sequence
  ENSG00000224914_7 (sequence is synthesized)
ctgcctctgagaaaccagcgcgtccgcaacgatcactcctaattttcggattcctatcatctgtctccacgtgataacactgaagagccttcacattgatgcaggcccagggcctcaagt

SEQ ID NO: 896418 - DNA, 120 bp, Artificial Sequence
  ENSG00000224914_8 (sequence is synthesized)
gcagagactgagagctctgcaggacacagcatggagccgccattcctctactgggtggaggagcatgtgtcctctgaacaggggatccaagccctgagatgttctttctcagctgtcagt

SEQ ID NO: 896419 - DNA, 120 bp, Artificial Sequence
  ENSG00000224914_9 (sequence is synthesized)
ggctaatttgactgtctctcctcctggggtctaggacttcaaacatgtacagaagcgattgcagaattaagacaagacacttccacaatatattttttgtatcactggctcagaaaaaga

SEQ ID NO: 896420 - DNA, 120 bp, Artificial Sequence
  ENSG00000224914_10 (sequence is synthesized)
ctcattcaaatcctgtatcaaagccacgtgtgagaatcttgagaaagcatcagctgactgacttgacaagggaggaagcaaccaaaaattctgcgcttcttcagtatctgagtatgatat

SEQ ID NO: 896421 - DNA, 120 bp, Artificial Sequence
  ENSG00000224914_11 (sequence is synthesized)
tttgcttcaacatccctcttagatgaagttattgattgaaaatcatttaagtttgccccatggtaaaagatcaagtcctcagaaagatctccaaagtgtttacggtttgttttgttttgg

SEQ ID NO: 896422 - DNA, 120 bp, Artificial Sequence
  ENSG00000224914_12 (sequence is synthesized)
taagtttaccatgattttgcttgaattgctctccgttgatcttctcagctaagatggaggtagagagttgcacagtggaagagggctgcatgtaagaaggcagttctgtctcagaggaca

SEQ ID NO: 896423 - DNA, 120 bp, Artificial Sequence
  ENSG00000224914_13 (sequence is synthesized)
aaaggcctgggagcacccagacagacagtcactgcatggaggtcactcccctcccagtggccactgtggagacatttcacagaaatgcttgctggaccattcaggttcagagttgggaca

SEQ ID NO: 896424 - DNA, 120 bp, Artificial Sequence
  ENSG00000224914_14 (sequence is synthesized)
aaaccgagaactcatggggatattggacaggagttaggaaatgaccttctcacacaactggggcagtgggggagaaccctgggcttgagacttgcaatccaccacttgcccctgcccctg

SEQ ID NO: 896425 - DNA, 120 bp, Artificial Sequence
  ENSG00000224914_15 (sequence is synthesized)
cccctgcagtgtggccgctgttaccttttcctgcaactctgccttcttgagtccaaatgtcttcgaaaggggcaaatgctcgtaagtgccgacagggtgtgtttcagtgaatgtttgcag

SEQ ID NO: 896426 - DNA, 120 bp, Artificial Sequence
  ENSG00000224914_16 (sequence is synthesized)
tgtgcaccggtctggctgaaggcctcttcccttccccaacaccctcccatcgtgcaaaattaccctgcccagcagggagtgacttgtgtgtctcagaagattttgttgctgtgctctgag

SEQ ID NO: 896427 - DNA, 120 bp, Artificial Sequence
  ENSG00000224914_17 (sequence is synthesized)
ttctcactcctcatctcctttgaccagtttcttctaatactccccttgttcacaacacagaacatgagtgctctttcctatcattttgacactaataaacggacagtgattctcagtgtg

SEQ ID NO: 896428 - DNA, 120 bp, Artificial Sequence
  ENSG00000224914_18 (sequence is synthesized)
gtttcaggcagctggaataaagagagacatcgggggaaagccgcgagaaggccagcgtccctggctgggagcagagctagccgagtagggcgcccggctgtcaaactggccggcgcagtg

SEQ ID NO: 896429 - DNA, 120 bp, Artificial Sequence
  ENSG00000224914_19 (sequence is synthesized)
gactcttcgaggggcggcagggccccatctgtgtctttcgctctcgagcccccagctagagttggcttcagcggaatacctactgtgcgggattattcaacaagccgattgatcacattc

SEQ ID NO: 896430 - DNA, 120 bp, Artificial Sequence
  ENSG00000224914_20 (sequence is synthesized)
aagatgaggccaacagtgagctgagagaggccagccagggtgtgtttcagtgaagatgagaaacaatcagataacacctgtttcctccaggaaagaaaatgtggccagggaaaagagatg

SEQ ID NO: 896431 - DNA, 120 bp, Artificial Sequence
  ENSG00000224914_21 (sequence is synthesized)
ggaggaaggccggtcattgcctattccactgtgcacagtttgaatttggagccatgaaaagtattgcttggttaaattaaaatcattcaaaagataaaacataaatatttaacaccagca

SEQ ID NO: 896432 - DNA, 120 bp, Artificial Sequence
  ENSG00000224914_22 (sequence is synthesized)
caatatgctgggaaacaaaatgaaaggatttctggtctcggtgctgtaggtcacatagccactctttcctggattgaggctttccagcaaaggggctgggacgtaaggctggcctgctgg

SEQ ID NO: 896433 - DNA, 120 bp, Artificial Sequence
  ENSG00000224914_23 (sequence is synthesized)
tgtggacagagattccagcaacatgcatgacctgggggtacaaggattgcttcctaaacaatgataagcacacagccacctaatagtctggatcggctgagaccatcctgatttcaaaca

SEQ ID NO: 896434 - DNA, 120 bp, Artificial Sequence
  ENSG00000224914_24 (sequence is synthesized)
ttttgaaagaaatttgggggaatccactgaagacctacatttcccggaaggttaacagcccccttctcagttttcctggtaaagtgtttttatattggtagaataccttctgtcacactc

SEQ ID NO: 896435 - DNA, 120 bp, Artificial Sequence
  ENSG00000224914_25 (sequence is synthesized)
tatatttttcttatctcaagtagaaaaaaattttgcccttttgcttgggactgttaacagccctggtagtggaaagtagaaggaaatgattctgtgaattttctgttatataaattttag

SEQ ID NO: 896436 - DNA, 120 bp, Artificial Sequence
  ENSG00000224914_26 (sequence is synthesized)
ccagtttaggacttttgaatgaggggccatacagccaaggatttaggatttcagctcaggaaagaaaactgcataggtgtttaattgtgtcctagccacttattagctgggtaactttga

SEQ ID NO: 896437 - DNA, 120 bp, Artificial Sequence
  ENSG00000224914_27 (sequence is synthesized)
gcaagttttatacatatccttcccatgagtttttcatttctaatactggctgtgtaatacagtatgtttcatagacttgctgtaataatcgatggagtgtatctaatagtgtttatttta

SEQ ID NO: 896438 - DNA, 120 bp, Artificial Sequence
  ENSG00000224914_28 (sequence is synthesized)
ctgtaactgggccacagttaggaagtactcaattaaaattagccgtcattattcctagtattaatatggtgatgaacagctaaagagcatttaaataattatcattaatatggataaatt

SEQ ID NO: 896439 - DNA, 120 bp, Artificial Sequence
  ENSG00000224914_29 (sequence is synthesized)
aaacaatagcagtttgctttcagatattttgaatattattgtgacatttcccccttctacctttctgggaccttggatacaggaaccatgtaagggtaaatcgtttaggtcttcgttgtg

SEQ ID NO: 896440 - DNA, 120 bp, Artificial Sequence
  ENSG00000224914_30 (sequence is synthesized)
ggacaggggtgatatactacagttccacaggggctgagccaggtttcaagggtgagatagagagctgatggtaaaaataacaatgagagcaaaggccaaaatgtatggagtatttattat

SEQ ID NO: 896441 - DNA, 120 bp, Artificial Sequence
  ENSG00000224914_31 (sequence is synthesized)
gtgtcagacatttttcactaagcattctagtacaatatttcttcagatctatgaagatcttaatcttaagtagtaaatggttttattataaccactatacaaaatagaaacactaacata

SEQ ID NO: 896442 - DNA, 120 bp, Artificial Sequence
  ENSG00000224914_32 (sequence is synthesized)
aaaaggttaaataatctgtttaaattatcttggattatcaacccaattagctgtgtcctcagaacagaagctggtagcactacactgaactataccacacttgcaagccttcagaggaaa

SEQ ID NO: 896443 - DNA, 120 bp, Artificial Sequence
  ENSG00000224914_33 (sequence is synthesized)
attccctaagagaaaatggtatttatgactcaatatttcttcccataccctcagtgacttacgttatttatttactaaatgccaaagcagatagtccaataggaaatatgtagctaaatg

SEQ ID NO: 896444 - DNA, 120 bp, Artificial Sequence
  ENSG00000224914_34 (sequence is synthesized)
gcctgcgaagagaagggaatgtcaaataacaggcaaaatagaatctgacaccctaggtctcagcaagtgttttgaatggacaataaagaaagtgactagaatgtaacctctgaaaaaatg

SEQ ID NO: 896445 - DNA, 120 bp, Artificial Sequence
  ENSG00000224914_35 (sequence is synthesized)
ttgtgaagcaccaatggccttgaaaaaatctagggagctgatgtaaaggacatccacttcataatgacaattgttgaacaaattacttgttggagatggagttgcagacaaaacaaatat

SEQ ID NO: 896446 - DNA, 120 bp, Artificial Sequence
  ENSG00000224914_36 (sequence is synthesized)
ttaccactgctttaaaatacgtttattgtactcaggagaagagtctggaactgtggtttcagaatgagcttatccaacagtaagaagaggactggggcataccttttaaaataataatga

SEQ ID NO: 896447 - DNA, 120 bp, Artificial Sequence
  ENSG00000224914_37 (sequence is synthesized)
tatatttataatcatcctagtgtgatttatttaccttttagtaaatcaagttctcagaaaactaaagtaaaaaaatcttaacattacatatgcaggacttaatctgaataatcataaatt

SEQ ID NO: 896448 - DNA, 120 bp, Artificial Sequence
  ENSG00000224914_38 (sequence is synthesized)
ttcataaacttaatttacataccacaccatagtagctgtgatatagtaaattaataagttttttgtactatggtgtaactctttcatcctaagaataaaaaagattctattatgtcaaaa

SEQ ID NO: 896449 - DNA, 120 bp, Artificial Sequence
  ENSG00000224914_39 (sequence is synthesized)
tctcagttttcctgatataaatttaattcacagttgggcagggcatggtgcctcacacctataatccgagcactttgggagcccgaggcacgcggatcacctgaggttaggagttcaaga

SEQ ID NO: 896450 - DNA, 120 bp, Artificial Sequence
  ENSG00000224914_40 (sequence is synthesized)
tctctactaaaaatacaaaaattactactcgggaggctgaggtaggagagtcgcttgaacccgggagacagaggtttcagtgagcccagatcgcgccaccatactccagcctgggcaaca

SEQ ID NO: 896451 - DNA, 90 bp, Artificial Sequence
  ENSG00000224914_41 (sequence is synthesized)
aacagagcgatgctccatctttaaaaaataaaaataaaatttaattcacagttgtaaccagcctaaattaaaaatatttcttaagaaaaa

SEQ ID NO: 896452 - DNA, 120 bp, Artificial Sequence
  ENSG00000224914_42 (sequence is synthesized)
acatttgatcttatgacagcatttgtatttttaattacagataggattacactaaaagtcatttctgacctgctcccttacccttatggctaaaataaactgctaggccctgaagcaaag

SEQ ID NO: 896453 - DNA, 78 bp, Artificial Sequence
  ENSG00000224910_0 (sequence is synthesized)
atcttggctcacttcaacctccacctcccgtgaactgatgtctgatgaggatgaatccagcgactacctctgcctgtc

SEQ ID NO: 896454 - DNA, 120 bp, Artificial Sequence
  ENSG00000224910_1 (sequence is synthesized)
tctgttgccttcccctagccatcccagccgtgatcttttcttgcctgacaaagaactacaataaatccagtgactatgagctggcagccaagacctccaaacaagcctactactgggcca

SEQ ID NO: 896455 - DNA, 120 bp, Artificial Sequence
  ENSG00000224910_2 (sequence is synthesized)
tcgcgagcatcactgtgggaatcttaggtaccatcttgtacacctacctgatatacttacttagattgtaaactgcttcccagctcttgaacaaaccaccaaatatacaccacagtgcaa

SEQ ID NO: 896456 - DNA, 120 bp, Artificial Sequence
  ENSG00000224910_3 (sequence is synthesized)
ggcggggcctgcctggccgccatggtaatcccctgtggttggtgatcaaggaagagcatagtgccagacctaggtccagtcactccacgcttgcagagtccaattaacaagagcaagttc

SEQ ID NO: 896457 - DNA, 120 bp, Artificial Sequence
  ENSG00000224910_4 (sequence is synthesized)
agaacaggaaggctgttgtacgtggttggagagggagttcaaagagtcagaaagctggtttcagaagttgagaggtgttagagggagacagggcaggactttgtaaggtgtttgaactga

SEQ ID NO: 896458 - DNA, 120 bp, Artificial Sequence
  ENSG00000224910_5 (sequence is synthesized)
caatccttcaccctccctctccatcttgcccctgaccctgactcaacttcttccttgttctcccttctgaactaggagcctgagcaacaccagcacctcctgtgggttcagacccccacc

SEQ ID NO: 896459 - DNA, 82 bp, Artificial Sequence
  ENSG00000224910_6 (sequence is synthesized)
tgagcaacaccagcacctcctgtgggttcagacccccaccctgagtccttacagttccacagcccaccctcacccaacaact

SEQ ID NO: 896460 - DNA, 88 bp, Artificial Sequence
  ENSG00000224910_7 (sequence is synthesized)
aggttcaaacaattagaggcgcccaccaacacgcctggctaattttcgtatttttggtggagctgggtttcaccatgttggccaggct

SEQ ID NO: 896461 - DNA, 68 bp, Artificial Sequence
  ENSG00000224910_8 (sequence is synthesized)
gcaataactcttttatactcatctttccctgttccctctctcctaaaactcagacaaagtttgtattg

SEQ ID NO: 896462 - DNA, 65 bp, Artificial Sequence
  ENSG00000224910_9 (sequence is synthesized)
aagagcatagtgccagacctatcaacctccacctcccgagttctgcctcagcctcccaagtagct

SEQ ID NO: 896463 - DNA, 120 bp, Artificial Sequence
  ENSG00000224910_10 (sequence is synthesized)
ggagagggagttcaaagagtcagaaagctggtttcagaagttgagaggtgttagagggagacagggcaggactttgtaaggtccagtcactccacgcttgcagagtccaattaacaagag

SEQ ID NO: 896464 - DNA, 120 bp, Artificial Sequence
  ENSG00000224910_11 (sequence is synthesized)
aaggaagagcatagtgccagacctaggtgccctcctgggaatgttccaggagggcaggagtaggaggaggagtgttagagtagaggggaaatgatgagagcagaaagggtatcataaagg

SEQ ID NO: 896465 - DNA, 120 bp, Artificial Sequence
  ENSG00000224910_12 (sequence is synthesized)
acctccaattggccagtagaagtagagagacaggctaggaggcggggcctgcctggccgccatggtccagtcactccacgcttgcagagtccaattaacaagagcaagttctggtagaaa

SEQ ID NO: 896466 - DNA, 120 bp, Artificial Sequence; identical to SEQ ID NO: 831493
  ENSG00000224919_0 (sequence is synthesized)

SEQ ID NO: 896467 - DNA, 120 bp, Artificial Sequence
  ENSG00000265544_0 (sequence is synthesized)
ttccatccggctatgacttccgcaagacaatccacttctttgcatttctgtctatctccctgaaagaagacattggtgattccccaggtctcctacaactctgaaattttgattccaggc

SEQ ID NO: 896468 - DNA, 120 bp, Artificial Sequence
  ENSG00000265544_1 (sequence is synthesized)
aatccatggggcagactttttatccttatttgacagatagagaagatgtcatggccctgtaagtcaagagaacaggatggccaaaggcaagaagaaaaagacactggaaggggccccttt

SEQ ID NO: 896469 - DNA, 120 bp, Artificial Sequence
  ENSG00000265544_2 (sequence is synthesized)
ccaagaaacaggacatctaaggacttggaagccccaggcacgtgacccccggcctctctgttctccagctaaggaacgctttatggccttcgcatttattcatgtatttcctggacctac

SEQ ID NO: 896470 - DNA, 120 bp, Artificial Sequence
  ENSG00000265544_3 (sequence is synthesized)
tttgtactaggccaagggaagtgagctgaataagacccagcggggttgagagacataaaaatggcttattgaaattcaatactccaagggctggaagagatggatgagtagcgagccgga

SEQ ID NO: 896471 - DNA, 120 bp, Artificial Sequence
  ENSG00000265544_4 (sequence is synthesized)
ggagcacaaaggcaggagtcccgctgtctgcctagggaatgcttgaggaaataagaatagcccacatttattaagcacacagtacaagcaagcactctattaaatgccttacatgatgta

SEQ ID NO: 896472 - DNA, 120 bp, Artificial Sequence
  ENSG00000265547_0 (sequence is synthesized)
cagaaaaccctgctgtctggaaaaaggaagaggaggaccttctgagaggagatatgagtcactggcagaagactccattcacaaacatgactccccattgtctgcctcacacacagtgcc

SEQ ID NO: 896473 - DNA, 120 bp, Artificial Sequence
  ENSG00000265547_1 (sequence is synthesized)
ctctcccattctccaggaactggccatcctcaaccatgggtcccagctaaaaccccggggcttagctcactggaccaaagagcatctgactgaagcttgccagtcagattcttttctcct

SEQ ID NO: 896474 - DNA, 120 bp, Artificial Sequence
  ENSG00000265547_2 (sequence is synthesized)
acagactgacttcacctgggcccataactcataccaaggaactaattcaactgcttctgtgacttccacccaggaactgactcaacacaagaagacagcttcaaccctctgtaatttcat

SEQ ID NO: 896475 - DNA, 120 bp, Artificial Sequence
  ENSG00000265547_3 (sequence is synthesized)
ccctggcccaaccaatcagcatcccccattccctagccccttgactgccaaactatctttgaaaaaccctaacctttgagcttttggggagggtgatttgagtaataaactcccatcctt

SEQ ID NO: 896476 - DNA, 120 bp, Artificial Sequence
  ENSG00000265542_0 (sequence is synthesized)
ctggcagttttcctgagtacatgggagttagggcagagaacatgatgtggtgctggtagtcaacgcaagctggcacggcctcagccagaagactggagctaggagcaagcaaagcaccaa

SEQ ID NO: 896477 - DNA, 120 bp, Artificial Sequence
  ENSG00000265542_1 (sequence is synthesized)
tgagacagacatccatgaagaagcctgggatgaaagaccacatggagagaaaggcccaccatcattctgcaccaactaccaacggcgtaagggaggttgacttggatctcccaccccagt

SEQ ID NO: 896478 - DNA, 120 bp, Artificial Sequence
  ENSG00000265542_2 (sequence is synthesized)
tgactctccagctgaaagcaactgcctgagcccaaacaaaacctgctgaggaacctccctgctagcaaatggaatcaggagaaataataaatagttctgttgttttaagtcaccaactca

SEQ ID NO: 896479 - DNA, 120 bp, Artificial Sequence
  ENSG00000265542_3 (sequence is synthesized)
cactcaagtgggacagtaagattttctctgaggctggcactggtgcctgcctctgctccggggaatccagacgtggcacccggagttgggcctcatccatcctcagctttcatttgtgac

SEQ ID NO: 896480 - DNA, 120 bp, Artificial Sequence
  ENSG00000265542_4 (sequence is synthesized)
caagcctgactcagaatgggctggcagttttcctgagtacatgggagttagggcagagaacatgatgtggtgctggtagtcaacgcaagctggcacggcctcagccagaagactggagct

SEQ ID NO: 896481 - DNA, 120 bp, Artificial Sequence
  ENSG00000236299_0 (sequence is synthesized)
agggaagggaacccctaagccactttgggagccacatccaccacttctctgcccctgacccaggctggttcctagcccttagggtcctactgcggacctcccggccataattaacgcagg

SEQ ID NO: 896482 - DNA, 120 bp, Artificial Sequence
  ENSG00000236299_1 (sequence is synthesized)
tgcaggaccagagagccccttggtccctcccaacacatgagggaactttgtgtggtgaggtcagattaactcgaagtaccccacaactacacgctaatgaaactagaggaggcacagcct

SEQ ID NO: 896483 - DNA, 120 bp, Artificial Sequence
  ENSG00000236299_2 (sequence is synthesized)
cagctccgtgcaggatggatgcacaagagcagaatctccatgggacgcctttctggagcatcagtattactgcaggatttggaagcaacaagttcaaataattttcaacgttaacacact

SEQ ID NO: 896484 - DNA, 120 bp, Artificial Sequence
  ENSG00000236299_3 (sequence is synthesized)
agaaactctaaggagaccctattttttattcttctaagtagttaaaattagaaatcacagcaagtcaacaggaagctctcctctgccagtctcctaaatcacaatatggccttgtcgtgg

SEQ ID NO: 896485 - DNA, 120 bp, Artificial Sequence
  ENSG00000236299_4 (sequence is synthesized)
ctggagtatttcaaaggctcagtcccactccagaatcggccctgtcgcctccgcccgcactccagagccggctgagaaccgcagcggcgcgggatccacgtgcagcgtctctccaggtca

SEQ ID NO: 896486 - DNA, 120 bp, Artificial Sequence
  ENSG00000236299_5 (sequence is synthesized)
aagctacctagatgtcatcatacaaattacaggctatgacgtccacctcattctctttctggaaggctgaccttaactgtcctgcacattccttacacagcatatttgcccttttcctat

SEQ ID NO: 896487 - DNA, 120 bp, Artificial Sequence
  ENSG00000236299_6 (sequence is synthesized)
gactacaactcccagcatgcacagcgaggtcaacacagcccggctttcctcttcaggactgtgcgccgccccatgttcatgctggctgtgattgtaatccggtcgccctgcaattaaaaa

SEQ ID NO: 896488 - DNA, 120 bp, Artificial Sequence
  ENSG00000236299_7 (sequence is synthesized)
gatcaaagtactccaaaaatgcagctgcttcagtgacaagagggaattaccttctcccaagcctcaggatcctggtacccgacttgcctgccccaggctcactcccattcacacagtcct

SEQ ID NO: 896489 - DNA, 120 bp, Artificial Sequence
  ENSG00000236299_8 (sequence is synthesized)
gagcatccaaagaacactgtagtcttggttctagcagtttctttaaattgcctattggttcattgatgtctatggcctggcttacacattcagctggcgcgtaggtttgttctacaatgc

SEQ ID NO: 896490 - DNA, 85 bp, Artificial Sequence
  ENSG00000236299_9 (sequence is synthesized)
cgaactcctgaactcaagtgatctgcccgccttggccacccaaaactgaatccattttaacactgagtttttcagattaactcga

SEQ ID NO: 896491 - DNA, 60 bp, Artificial Sequence
  ENSG00000236299_10 (sequence is synthesized)
acaactcccagtatgccagtcttgctttgtagcccaggctggaatgctgtgactcgatct

SEQ ID NO: 896492 - DNA, 120 bp, Artificial Sequence
  ENSG00000236299_11 (sequence is synthesized)
tcttggaaacaattttaatttccctttttaaatatccctttggaaccacatttaataatttgctggtggaacttaacagtgataaatctttgaatccatttttcttttctttttctgaca

SEQ ID NO: 896493 - DNA, 120 bp, Artificial Sequence
  ENSG00000236292_0 (sequence is synthesized)
ctgaaagagttcccccaataaacctcctgtactcagtcctctaccaagagtctgcttccgggggaatttgccctaagatagtcgtaacaggactggccctaggaaggagactctaaaatg

SEQ ID NO: 896494 - DNA, 120 bp, Artificial Sequence
  ENSG00000236292_1 (sequence is synthesized)
atattttggagctccatcatccacttgctggtttacaatgatctcatcatagacagcagagaagagcatctctctcagaggaggcactgaacagccaaatacacagaagaacttgttcgg

SEQ ID NO: 896495 - DNA, 120 bp, Artificial Sequence
  ENSG00000236292_2 (sequence is synthesized)
gcctcctatcctctaggattgctgaaaaaggatatagtctctaatctgactttcatcagtaatgaagatcgtttttatttttaaatttgatctgcctactatgtctagtgctcctttgat

SEQ ID NO: 896496 - DNA, 120 bp, Artificial Sequence
  ENSG00000236292_3 (sequence is synthesized)
tccaaactcaaataggaacaacaccaaaaaacagtatgagttactgtccactccctaaacctgcaacactaacagaagagtgctatttcctccaataactgttcacttccttcctatgac

SEQ ID NO: 896497 - DNA, 120 bp, Artificial Sequence
  ENSG00000236292_4 (sequence is synthesized)
acgtaagatacctatgagcaacccagaagggggctacaatagagatactgttagggctgattatgtatgattctcgaagcgctagcttgacctctaccttaaataaaacgtaaagatata

SEQ ID NO: 896498 - DNA, 120 bp, Artificial Sequence
  ENSG00000233661_0 (sequence is synthesized)
ctagaacatactttctgcatgaagatggggaaaataggtggaaggatgtacttcgcatcctcaacacttgttttctgggaagaaacaagaatgtaaaggtcatgtactgacattgtggag

SEQ ID NO: 896499 - DNA, 120 bp, Artificial Sequence
  ENSG00000233661_1 (sequence is synthesized)
aatgttaacaatactgttttctctcctattaataaacctgtacttatattttataaaattgggagcatatttcatacttttataacttgtgtttttcatgtatatcatgaacattttcca

SEQ ID NO: 896500 - DNA, 120 bp, Artificial Sequence
  ENSG00000233661_2 (sequence is synthesized)
tcatgaacattttccaagattgttaaatactctgaaaacatgatttttaatagtaatattaaatatttgtaatattccttttgatagtccactatttatcctacatgatctataacataa

SEQ ID NO: 896501 - DNA, 120 bp, Artificial Sequence
  ENSG00000236295_0 (sequence is synthesized)
gtcactgacttaactgcctgagtagcatctggcttagaactagtggttctgtcctctagccctacttccctatgctccttaaaagacccttttaccagaaatctaaaattaccagtccca

SEQ ID NO: 896502 - DNA, 120 bp, Artificial Sequence
  ENSG00000236295_1 (sequence is synthesized)
tcaagacaagtataaagatagcctactgcagaaaggcatccagaaagaggaagaaggccctgagtagaaggaacaaggtaccacaaagggtgaatgaacctcttaggaaaaggaagcata

SEQ ID NO: 896503 - DNA, 120 bp, Artificial Sequence
  ENSG00000236295_2 (sequence is synthesized)
atgctgacacttagatgagacccaaagaaggaggatttaacctcccaggggctggaggaatatgagggtagatagaaccctgccggccagctctacctacctcttcctttgtgtgacttt

SEQ ID NO: 896504 - DNA, 120 bp, Artificial Sequence
  ENSG00000236295_3 (sequence is synthesized)
tttgaaggtataatagcaccactctgacttgggtcttaactcaagcacatcctaagctgtatgatcttaagcaggttaatcattccacctgtttcaattatgaaatcaggaccctgatta

SEQ ID NO: 896505 - DNA, 120 bp, Artificial Sequence
  ENSG00000236295_4 (sequence is synthesized)
cctcgatgctgcaactgagataaatgaaatgatgattccacaatctgtagtgcagggcctgacaaactgcagtctgcaggccaaatccagcaaagttaacaagccagagctattcactta

SEQ ID NO: 896506 - DNA, 120 bp, Artificial Sequence
  ENSG00000236295_5 (sequence is synthesized)
ctatggctgctttcacctgcaaagaataaaacatctgctatctggccctataactctgtaggggctctctcaagtggccctatcacctcgcataactcacaaaagctgctgtaagttata

SEQ ID NO: 896507 - DNA, 120 bp, Artificial Sequence
  ENSG00000236295_6 (sequence is synthesized)
acttgggtcatggttacttacctcatacaagactttcatcaataaatattgaacgccctagacagaagattcaaatatttcacatcctgaagttctccacaattatcaatttcaaaattt

SEQ ID NO: 896508 - DNA, 120 bp, Artificial Sequence
  ENSG00000236295_7 (sequence is synthesized)
tcttctaagtttcaagtttgaacatgtgatggatctcctggcactgttaaatttattctggttttctcctggactatatgtcttagactatatttactatatgtacatttcttggagtac

SEQ ID NO: 896509 - DNA, 120 bp, Artificial Sequence
  ENSG00000236295_8 (sequence is synthesized)
atggacatgtgaacaggacctggcacatgggcatttattcaatagtaaaacatttcctatgtaaatgtagcaaatatagtgagggtgtcatggaggacagcaccagaatgacacagggaa

SEQ ID NO: 896510 - DNA, 120 bp, Artificial Sequence
  ENSG00000236295_9 (sequence is synthesized)
ggctattgacctctttgcctttgccttctccctgagattatgccagtgtatgcacaacattattacagcctactactgccagacacacttataacccattaactgtagcctgttactacc

SEQ ID NO: 896511 - DNA, 120 bp, Artificial Sequence
  ENSG00000236295_10 (sequence is synthesized)
agaggtgcctgtaacccgttaccacggcctactaccataatacatgcttatatccaatgatatagctatattactacagcctgctaccacaagagcgacttgtattattactacatacac

SEQ ID NO: 896512 - DNA, 120 bp, Artificial Sequence
  ENSG00000236295_11 (sequence is synthesized)
tacctcaggacactctgctcttgcgcccaggaacacctgctataacatctttaagcaataaattgccacctctccacacccctacactgagtaaggccaaatgtgaccactgaagagcaa

SEQ ID NO: 896513 - DNA, 120 bp, Artificial Sequence
  ENSG00000236295_12 (sequence is synthesized)
aagcaatcatcaaagaaacccaagaagctcatcaacatctaggaaataggacaaaaccctggggcccacctaagtcagatgaacaataaaaaggcagtttctgcatctttcatgttccaa

SEQ ID NO: 896514 - DNA, 120 bp, Artificial Sequence
  ENSG00000236295_13 (sequence is synthesized)
gagttttgaggccccaaccttacagattagctttggtcttgctggtaaatggtttttaaagattgcatttatgattctcagggggaggcaagctgtgagtaagagatgatttggtacctt

SEQ ID NO: 896515 - DNA, 120 bp, Artificial Sequence
  ENSG00000236295_14 (sequence is synthesized)
tacataagttatacaaggttcaagtttaattacacaagggattctataaagctgtaagaattatttgatcccaaattgcccaaacactacgttatatctagagtatactaccaggagaag

SEQ ID NO: 896516 - DNA, 120 bp, Artificial Sequence
  ENSG00000236295_15 (sequence is synthesized)
ctcgaggatgttgtcctttaaagaattccaaatgcacatatgcctttgtaagtgtacgttgtgtctttgcacttcctcacatttacaattcctggacttcatgatggatgacctgggctt

SEQ ID NO: 896517 - DNA, 120 bp, Artificial Sequence
  ENSG00000236295_16 (sequence is synthesized)
gtttctaggaaaacaagcatcttcatttctgctaacaaatgaatgagaagtgtgagctgatggtgatctggtggttcacctggctcagcctgcactggccttgtttagacggtctatcaa

SEQ ID NO: 896518 - DNA, 120 bp, Artificial Sequence
  ENSG00000236295_17 (sequence is synthesized)
accaaataagcccttatcatatccagaaagcatctcaatttatcccaaacaaaagcccaaccatgaacatcatagtaaatctttcaaacaggaaaaaaagggtaaactacatatttcctc

SEQ ID NO: 896519 - DNA, 120 bp, Artificial Sequence
  ENSG00000236295_18 (sequence is synthesized)
ctgactcacatggttctccctctgcttacaacacccatctgattacatgaagggctagggtactaaggtcactcaacgtcactcttcagctaaacagtaacactcaaaaacacctttgtc

SEQ ID NO: 896520 - DNA, 120 bp, Artificial Sequence
  ENSG00000236295_19 (sequence is synthesized)
agagaaagaagagaaagtttatttagagacactggcgtggagaggaataatcaatgatgattatggtggtcttgggcctgcaccaaaagcccttctttgtgctggccctgggagaacaca

SEQ ID NO: 896521 - DNA, 120 bp, Artificial Sequence
  ENSG00000236295_20 (sequence is synthesized)
tggcacagaaaagcccagattcaagcagcttcttcaaccaaaacattgacatattctgctgactaaagagacaaataagaaaattaaagatgtacactccaagaacccacgtgtttttca

SEQ ID NO: 896522 - DNA, 120 bp, Artificial Sequence
  ENSG00000236295_21 (sequence is synthesized)
tatagggaccttcccaactcagtttcccagagattccatcaaatacagaccttcaaagagtttgagagtaccacctcaaagagagataatttcctttctttttgcctctgtggggaatat

SEQ ID NO: 896523 - DNA, 120 bp, Artificial Sequence
  ENSG00000236295_22 (sequence is synthesized)
ttcagatgacatgctgaacacctatacctgcaggccttcaccatcttcttctgttcctcaactctggtcagcatgaggttttggttgaaacagcaagatctgcctgctcctactgttgtc

SEQ ID NO: 896524 - DNA, 120 bp, Artificial Sequence
  ENSG00000236295_23 (sequence is synthesized)
cctctctcctaccgcaggtccatttgtccaaagcagtccacccatcattccctttatatagtggcttatgacacgggccctcctggtaaagggacatgatgattgatggtgccttgtcac

SEQ ID NO: 896525 - DNA, 120 bp, Artificial Sequence
  ENSG00000236295_24 (sequence is synthesized)
aatggctgaaagtcaacatgagagcttggttgagtggttggggcagtactgaaatgttggataaaattaagaaaatgcctagtaggactccttaaatcagctggctgcctatcagccagc

SEQ ID NO: 896526 - DNA, 120 bp, Artificial Sequence
  ENSG00000236295_25 (sequence is synthesized)
ccataggaacccccaagaattacagaaaccaagcaaaattctctatgcctttcaaacccaagtctagcttttttttttttttaaagaataaccatttattaaagtagatacagaacactt

SEQ ID NO: 896527 - DNA, 68 bp, Artificial Sequence
  ENSG00000233665_0 (sequence is synthesized)
cactcaccaacgggtgattctgtggatgccactcagcctctttccccagccacccctgtcatcgccca

SEQ ID NO: 896528 - DNA, 82 bp, Artificial Sequence
  ENSG00000233665_1 (sequence is synthesized)
ggccactgctgagtgcccaatttgccagtagcagagaccaacattgagccctctatatggcaccattcttcaggatgattag

SEQ ID NO: 896529 - DNA, 85 bp, Artificial Sequence
  ENSG00000233665_2 (sequence is synthesized)
aattatgcaatgcttctgccaagactaccatccacggactcacagagtgccttattcaccatcaaggtattccacacagcattgc

SEQ ID NO: 896530 - DNA, 120 bp, Artificial Sequence
  ENSG00000233665_3 (sequence is synthesized)
agtgccttattcaccatcaaggtattccacacagcattgcctctgaccaaagcactcactttgtggctaaagaagtgcagcagtgggctcatgctcgtggaattcactggtcttaccacg

SEQ ID NO: 896531 - DNA, 120 bp, Artificial Sequence
  ENSG00000233665_4 (sequence is synthesized)
agcagctggattgatagaacggtggaaaacaaaagtcacacagcagtgcagatttctccaggaagaactgcagctcggaagccaagtgtggaccggggccctgggaagagactgctgagc

SEQ ID NO: 896532 - DNA, 120 bp, Artificial Sequence
  ENSG00000233665_5 (sequence is synthesized)
cccatgaccagtgagtgcaacctcaccacaaccattgatgctgaataggaacctgcaaatccaatggcactgccagaatcaactgaatggctctgagaaggcagccctcagaaatctggg

SEQ ID NO: 896533 - DNA, 120 bp, Artificial Sequence
  ENSG00000233665_6 (sequence is synthesized)
aaattctctcctatggatgatcacaggttctgggatgcagagcaaacagggagctaatggaagcactcaggatgatagaattctaacttcatgaaaacatgtttgattgtgggtcccagt

SEQ ID NO: 896534 - DNA, 120 bp, Artificial Sequence
  ENSG00000233665_7 (sequence is synthesized)
aaagatgtcccagttctcggccagaatcttttctgaagactgagctggaggaggtacccgttctggaatggtctcaaatgcaacctgcaggtttggccccctggaggaagtgagaagaat

SEQ ID NO: 896535 - DNA, 120 bp, Artificial Sequence
  ENSG00000233665_8 (sequence is synthesized)
ggagatgaacacgtttcttgtgtcatgtcctcattctgcccaagacacacctacccggaccatgccgtcttgactcccggtgatgatgatctggcttgtgtcccatgctgggccctccat

SEQ ID NO: 896536 - DNA, 120 bp, Artificial Sequence
  ENSG00000233665_9 (sequence is synthesized)
caggcagcagcaggttatggctccttctgggccccaggctgtggtgatgctggccaggggctgtccattgacattccacagggacaagtgtgctcccgcacaggagacaatggtgccctg

SEQ ID NO: 896537 - DNA, 120 bp, Artificial Sequence
  ENSG00000233665_10 (sequence is synthesized)
tgcagtgagagctggcatcactctaagctggagtcactgcctgcccatcagccacttgctcagctacccagttggtacacccaagtactctcaatctgtcatgctctgaagacccccaag

SEQ ID NO: 896538 - DNA, 120 bp, Artificial Sequence
  ENSG00000233665_11 (sequence is synthesized)
gtaccccaaaacttctttccagctgacttacaggtctgctgtgttttcacacagttgtaaattcttggttcttttcatactgcagtcatgtgcttagatacttctttcctggcagaaggc

SEQ ID NO: 896539 - DNA, 120 bp, Artificial Sequence
  ENSG00000233665_12 (sequence is synthesized)
aatggggtggcagagacttagggtcagggcagacagagaggaaggttgtggatctggggctccctgtcagtctaagacccccttaagtaagtttcctaatgccatcagctgctgtgtcca

SEQ ID NO: 896540 - DNA, 120 bp, Artificial Sequence
  ENSG00000233665_13 (sequence is synthesized)
gagagaaaaatctctcaaagcctgcaaaaatgacaataatgacctgcatttggggtagattcttgtctgtggctactattattctgtcatcagtactctactagttaggatgcacaggaa

SEQ ID NO: 896541 - DNA, 120 bp, Artificial Sequence
  ENSG00000238195_0 (sequence is synthesized)
atccaaaggatctcacagcgtggttccaatgaagattctgctggtgttctaagagtagtatgtgatggaagagctgcctcatcacgtagcagatgaaagcacagtggcctccgcaaggtc

SEQ ID NO: 896542 - DNA, 120 bp, Artificial Sequence
  ENSG00000238195_1 (sequence is synthesized)
ttgtgaccatcaggcaccttgaacttgctggcctcgtgctaaggctcttagcgcagaagagtccggatatttcctgattactctgacacaagagaaaaataaaacctcaattcacttaaa

SEQ ID NO: 896543 - DNA, 120 bp, Artificial Sequence
  ENSG00000238194_0 (sequence is synthesized)
gaccctgccagggaacacgcatggctcggagctcccaagtactctctcctggcaagtgaggagtgtaaataaatcttgggaggaggacatgagagagaaacacagtccctggaggacagc

SEQ ID NO: 896544 - DNA, 120 bp, Artificial Sequence
  ENSG00000238194_1 (sequence is synthesized)
attctggagtggccacatgagttggaaacttccatgccgaagccttaagaggttgccagcttgcagcattcctgaaagtgtagccacctgctccaatacagcgctcatcacccaacatgc

SEQ ID NO: 896545 - DNA, 120 bp, Artificial Sequence
  ENSG00000238194_2 (sequence is synthesized)
tggttgattgaagccacagctgaagaccaaggcagagctggtccaaggaattgtgatgcaggcacaaagaacatctgctgtgaacaacctgctccaaaccaccagcatctctgactaaat

SEQ ID NO: 896546 - DNA, 120 bp, Artificial Sequence
  ENSG00000238194_3 (sequence is synthesized)
gaccttcgaatcctccagcacaatctcatctcactctgcagccattcaaatcttcaacgggcagctctgaaaataaagcccaagtcttcccccaggcctcggcacctccctgggatcctc

SEQ ID NO: 896547 - DNA, 120 bp, Artificial Sequence
  ENSG00000238194_4 (sequence is synthesized)
ccctggccacctcttggcattgtgggcatcaaaaacttgcccctttccatcactcactcagcctcactggtctccttgttcctaccacacccaagcacatgcctgctgcagggccattgc

SEQ ID NO: 896548 - DNA, 120 bp, Artificial Sequence
  ENSG00000238194_5 (sequence is synthesized)
acctgctgttcctgctgccctagtgctcttctcgagggtagtcacatgaccagctccctcactttgcctggtctctgcacagatgccctgctctgaggtcctctctgaccatctatcaca

SEQ ID NO: 896549 - DNA, 120 bp, Artificial Sequence
  ENSG00000238194_6 (sequence is synthesized)
gacagttgggctctcctccctgccagtctcattcctccagcctcactttatcatcactccaggcatctataaccacctagagtcccatcatacatctatttctatgctgtctgtttcccc

SEQ ID NO: 896550 - DNA, 120 bp, Artificial Sequence
  ENSG00000238194_7 (sequence is synthesized)
tcatcccacgagactactcattccatgaaggcagagacatgagtcgtcactgcaacctgccatatatagctatatgcatactcaaaaaacggtgacaggcttaaaacaggtgtccagtaa

SEQ ID NO: 896551 - DNA, 120 bp, Artificial Sequence
  ENSG00000238194_8 (sequence is synthesized)
atatttgttgaatggctgacgaccatgaattctggagggagagttcagaatggtttcatttttaaattccctgcagaggattgcaaataatatttctggctctgaacacctgggtcagac

SEQ ID NO: 896552 - DNA, 120 bp, Artificial Sequence
  ENSG00000238194_9 (sequence is synthesized)
cacaatagaagcactaagatctcttgcagcacagaaatctccacgtccctcaccacaaaccctgaggtattcggtcacagatacaagcggtgcaccctccaaatgccacccagatctaga

SEQ ID NO: 896553 - DNA, 120 bp, Artificial Sequence
  ENSG00000238194_10 (sequence is synthesized)
accagccagaaacgaacagagaagcctcatctcaaagtcagcccctgcccaggagctctcagccaagaaccccagcgtaacaagggtgagaaacagccccgggctgtcacgcaagacaga

SEQ ID NO: 896554 - DNA, 120 bp, Artificial Sequence
  ENSG00000238194_11 (sequence is synthesized)
gacggtgcatgcagaggaaaagcctgcatgcctccgcagggaggatgtgcccactctgacattggggtgagaggaggaaaactgggctcagagggggaaagctgggctcagatgggcaat

SEQ ID NO: 896555 - DNA, 120 bp, Artificial Sequence
  ENSG00000238194_12 (sequence is synthesized)
gggagttgggcaaatccctaagcaagagaagaaaccaaaggcggccagggagacatcagcatgttcctcctgcacagccatgacatcctacaaatgatatctcttaattttaacatcagc

SEQ ID NO: 896556 - DNA, 120 bp, Artificial Sequence
  ENSG00000238194_13 (sequence is synthesized)
tttgggagagggccatgaatagatttctaaatatattccagagcagaattaagtgggatcttccagtttctgaaagtgacttgcggagagtgcatcagatgggatgagaacatgacatca

SEQ ID NO: 896557 - DNA, 120 bp, Artificial Sequence
  ENSG00000238194_14 (sequence is synthesized)
gccacacaggcagccgtactgggcagctgcctgccgggcaaaccccgtgcccacagagaccattctcaaccactcctcccaaccacaccagttccacgcaccttctctaacaggaatggg

SEQ ID NO: 896558 - DNA, 120 bp, Artificial Sequence
  ENSG00000238194_15 (sequence is synthesized)
gcctgcctcagggtcaactgaggcctctagctatcagattccagagagatctctgcagaccctggctctaggcagaatttacaaagaaaacaaatgagaatctatttccatgactcaaga

SEQ ID NO: 896559 - DNA, 120 bp, Artificial Sequence
  ENSG00000238194_16 (sequence is synthesized)
tgccccgcaagcagaagaggaatttaaaaagaagttctggattgaaggacattctacagaacaccctacaggtgctcctcaaaactgctaaggtcactaagaacaagcaaagtcagaaaa

SEQ ID NO: 896560 - DNA, 120 bp, Artificial Sequence
  ENSG00000238194_17 (sequence is synthesized)
ggcgtcacagcaagacagcctgaaggtacatgatgtccagatgtcatgcgggatctggatggcatcctgggatggaaaaagggcattagaaaaatactaaggatgttggaataaagtatg

SEQ ID NO: 896561 - DNA, 120 bp, Artificial Sequence
  ENSG00000238197_0 (sequence is synthesized)
aggagggagaccacgcccactctgcgccgaccggctgggcctggcacccgcgggcggccccagcctcagtctccagctacctttgcctcctgcggccgcccccaggcagagctgcgatcc

SEQ ID NO: 896562 - DNA, 120 bp, Artificial Sequence
  ENSG00000238197_1 (sequence is synthesized)
caccgccgggggtgcagggagagggaagatctggcctccttggtccttttgcgtgggctcttcagagcgtgagcgccggggagggactccggagaaaagcttggggggctgcgtattgct

SEQ ID NO: 896563 - DNA, 120 bp, Artificial Sequence
  ENSG00000238197_2 (sequence is synthesized)
gctccccaagctgggcgtcaggaccaaccccgccgcccccacgggcctgacgggagaggaggaagggctcgggacggtcggctcgccgagccaaccaggtggcgcctgaagagctgtcca

SEQ ID NO: 896564 - DNA, 120 bp, Artificial Sequence
  ENSG00000238197_3 (sequence is synthesized)
tggtgtcgacagcccagcaaacggcaccgagttcctagtctgagtgtctggataggtagcagaagaaaaactaatgcctgctctgggacagttctgttcggtgccttttcttgtgtgttc

SEQ ID NO: 896565 - DNA, 120 bp, Artificial Sequence
  ENSG00000238197_4 (sequence is synthesized)
tggagctcacagggttctatcgaagagtgcttaggtgtatacgatggagagtgggacgtcacaaaccaggatctcaaggctgagtccaacaaaacatggccgtagggaggccacgacagc

SEQ ID NO: 896566 - DNA, 120 bp, Artificial Sequence
  ENSG00000238197_5 (sequence is synthesized)
tgtggttgtcaccgacggatgaatagcttttgccaaccgtggaatttagtaactaaaggcacctaacccttttatctcatcctcatttttcaacaaatggtgcttcctggctaatatcag

SEQ ID NO: 896567 - DNA, 120 bp, Artificial Sequence
  ENSG00000238197_6 (sequence is synthesized)
cgtgtcccatagatttctgcttccattgaatagacctaataagaaagagaatgaagtcaaagccaacagggcagaaagaaattgaaaacctgaagaacccagcactcaaactgtctccac

SEQ ID NO: 896568 - DNA, 120 bp, Artificial Sequence
  ENSG00000238197_7 (sequence is synthesized)
ttgcgtttgctttttctttacctcttctccttctggttttcaacagccaaagcaggatttaaatttggttatgttgcaaaaatcatttccctcttcaggccctgtcatgtgacttgattt

SEQ ID NO: 896569 - DNA, 120 bp, Artificial Sequence
  ENSG00000238197_8 (sequence is synthesized)
tttcgtccattttagagaagctgtacccaccctggtttcaggacacggaactaaatttattagaaaagaagccacttcaagtcatgaaggagaaacacaaagattcttggatttagttct

SEQ ID NO: 896570 - DNA, 120 bp, Artificial Sequence
  ENSG00000238197_9 (sequence is synthesized)
tcttggatttagttctaagaactagaggggatttctatgtcagtactgtctcagaaaaaactgttgatatcaaatgtgttgcttgagaagtacctttttttttttgagacggagtctcgc

SEQ ID NO: 896571 - DNA, 120 bp, Artificial Sequence
  ENSG00000238197_10 (sequence is synthesized)
taacaggcgtgagccatcgcgcccggccgagaggtaccttttatgacaactgaaatcattcagtttcaagaggagttgggtactgaaaccaaacttgcttactccaaagcccaaaatcct

SEQ ID NO: 896572 - DNA, 120 bp, Artificial Sequence
  ENSG00000238197_11 (sequence is synthesized)
ttccaccatgcctgtgtgtctgtaaggctacactagaaatgcttcctttcttatagtgggaagcatgggtactaagctcttttacgaacaagtgttctgcatattcctggttccttttta

SEQ ID NO: 896573 - DNA, 120 bp, Artificial Sequence
  ENSG00000238197_12 (sequence is synthesized)
ttttggactgaggagatttaggtcaaaatttctgggttctgggttggaattccagcttctttcttcaaattaaactggggggtagcaagacttattcctagatttgttagaaggccacag

SEQ ID NO: 896574 - DNA, 120 bp, Artificial Sequence
  ENSG00000238197_13 (sequence is synthesized)
cttttccacatctcattttagtcatgaaaaagacacatgcccagagtttgaaaaacataaaggcaatttgactagtggcttgattggttctatcttctttttcttgtccctctttcctat

SEQ ID NO: 896575 - DNA, 120 bp, Artificial Sequence
  ENSG00000238197_14 (sequence is synthesized)
ttatacttctacttttgttacagcatttgacaatagttggaaaaattttcactgaccttgaaatgtctttgggatagggtgacttaaaatataggttaagtggcatacacaaacttctta

SEQ ID NO: 896576 - DNA, 120 bp, Artificial Sequence
  ENSG00000238197_15 (sequence is synthesized)
gtgagatcctaagggcctacagagacaggctgacaccaactcaacccttgaaactgtgcaatgaagagcctgtgggaggctaaaaaacgctacttcaaaaagagatccttgtctgtgaat

SEQ ID NO: 896577 - DNA, 120 bp, Artificial Sequence
  ENSG00000238197_16 (sequence is synthesized)
gttaatttaggtttacagatttgattaagggtcttgagattattttcaattatccaggtgggccctagagccctagatgcaatcataagtgtccttataacagggaggcagaggaaaatt

SEQ ID NO: 896578 - DNA, 120 bp, Artificial Sequence
  ENSG00000238197_17 (sequence is synthesized)
aaacacgcacacaggagagagagagagagaaaaaaaagtgatgtgaagacagcagcagagattggagcgatgtggccatagccaagctatgtcagcagccatcagaagttggaagaggca

SEQ ID NO: 896579 - DNA, 120 bp, Artificial Sequence
  ENSG00000238197_18 (sequence is synthesized)
aggaaggatttgagcctagagcctttggaaggagcatggccctgttggttctggcctccagaactgcaagaaaatacatttttgttgttttaaaccacccagttcatggtaatttgtaac

SEQ ID NO: 896580 - DNA, 120 bp, Artificial Sequence
  ENSG00000238197_19 (sequence is synthesized)
accagctacaagaaattaacacaaggctgatgtgactttccatcaggagagagacagccccagctctgtaacatttgactacttttgtaagagtttcatgatttcaaggatgattattag

SEQ ID NO: 896581 - DNA, 120 bp, Artificial Sequence
  ENSG00000238197_20 (sequence is synthesized)
cattttcaattttttggccaattctgggtgctggtaatgttaccactgcaggcaactatggctctactcaactgaagacctcttataggcaatgtggaccatacctgctttcctgagaga

SEQ ID NO: 896582 - DNA, 120 bp, Artificial Sequence
  ENSG00000238197_21 (sequence is synthesized)
gaagacgtgcctttcgtcaagattgtaagtttcctgaggccttcccacccatgcggaactgaaaaaatcttcctgtgacttcctacaacttttgggataaggaccaaagtatttcaaatg

SEQ ID NO: 896583 - DNA, 120 bp, Artificial Sequence
  ENSG00000238197_22 (sequence is synthesized)
acctacaagatcctctatcatctggactatggacttacttgctcactccagctgtcctatgctttcttcagcgcctccagtgtagcctgctctctttcacctcagggctaacttctattt

SEQ ID NO: 896584 - DNA, 120 bp, Artificial Sequence
  ENSG00000238197_23 (sequence is synthesized)
tttctccaggtcgaatgatctaaatatcacttcctcagggtggaaggaaatcttctgggactagctagtcaaggtctctgtgccccttgtcatatgttccacattaccttgaatgtcccc

SEQ ID NO: 896585 - DNA, 120 bp, Artificial Sequence
  ENSG00000238197_24 (sequence is synthesized)
tttcataactcatcacacctgagattacctatttgttgtcaactgtgctggactgtgaactccacaaagattccacttctagcttactcagtgctatatccccgaacctcagaagagtat

SEQ ID NO: 896586 - DNA, 120 bp, Artificial Sequence
  ENSG00000238197_25 (sequence is synthesized)
ctgctacagcagtactccttatctgtggtttcagtcagctgtggcacagtacaataacatattttgagagagaaactacattcatataacctttaccacagtatattattaataactgtt

SEQ ID NO: 896587 - DNA, 120 bp, Artificial Sequence
  ENSG00000238197_26 (sequence is synthesized)
ttaatctcttactgtgcctaatttataagttaaactttatcataggtatgtatgtagaggaaaaaacagtatatatagggttcggtactatctgtggtttcaggtagccactgggcatct

SEQ ID NO: 896588 - DNA, 120 bp, Artificial Sequence
  ENSG00000238197_27 (sequence is synthesized)
tagccactgggcatcttagaacatataccccatggatacagggaggactactgtagtctacttgctgaaaaaattaattgtggcttagtcaggcatttcgttgagtacgatggaccttac

SEQ ID NO: 896589 - DNA, 120 bp, Artificial Sequence
  ENSG00000238197_28 (sequence is synthesized)
tttggaactcagaaatcactttctcctgtgaaaatatcaaacttgaatgaacttttggaataaaatactttgtaaaatggagattttgggtatagatataaatagatctaagcctatgga

SEQ ID NO: 896590 - DNA, 120 bp, Artificial Sequence
  ENSG00000238197_29 (sequence is synthesized)
gttaataaaaaacaaaacactctaaaaaatgtaatatatgaagtcaaacgaaatctgagtcttttagatagtctatggacacgtaccttaactgaagaccaaaactgtcgttgaaaaaac

SEQ ID NO: 896591 - DNA, 120 bp, Artificial Sequence
  ENSG00000238197_30 (sequence is synthesized)
aagtaaggcccagaatttttattttctaagacactaagtaaaaaaaagagaaacatatcatgatcagatattttatatgtaggtgccatatgattcctggacaaaagatttttctacaaa

SEQ ID NO: 896592 - DNA, 120 bp, Artificial Sequence
  ENSG00000238197_31 (sequence is synthesized)
aacacaaggctgatgtgactttccatcaggagagagacagccccaggtgagacctgcctgcctcattgtctgacagctttcccagcctcctccaggctcccctccgttttctcttatacg

SEQ ID NO: 896593 - DNA, 120 bp, Artificial Sequence
  ENSG00000238197_32 (sequence is synthesized)
cattcccccaataaacttcctgtacatttaataccatctcagtgtctgctcccaggaggaccctaactgacacactggggcatttagcctccaattccttttctcccttggctgagatct

SEQ ID NO: 896594 - DNA, 120 bp, Artificial Sequence
  ENSG00000238197_33 (sequence is synthesized)
gttccaggaagtatctccaggacactccagcctgttgcacaggccaaagaaaagccctcaggcagaggagcaaatacttgcaagaggacaccagtggcaagaacagggacatgccaccct

SEQ ID NO: 896595 - DNA, 120 bp, Artificial Sequence
  ENSG00000238197_34 (sequence is synthesized)
gagaaacaagaactggatttaacctttggttgcaaacaactaaaaactggacggctggagatatcatgctaccagacttcaaactataaggccacagtaaccaaaacagcatggtactga

SEQ ID NO: 896596 - DNA, 120 bp, Artificial Sequence
  ENSG00000238197_35 (sequence is synthesized)
gagaactcagcaataagaccgcacacctacaaccatctgatctccgacaaacctgacacgaacaagcaatggggaaaagattccctgtttaataaatggtgttgggagaattggctagcc

SEQ ID NO: 896597 - DNA, 120 bp, Artificial Sequence
  ENSG00000238197_36 (sequence is synthesized)
ggctagccatatacagaaaattgaaactgggctccttccttacaccatatacaaaagttaagtcaagatggattaaagacttaaatgtaaaccccaaaactataaaaatcctagaagaaa

SEQ ID NO: 896598 - DNA, 78 bp, Artificial Sequence
  ENSG00000238197_37 (sequence is synthesized)
caaaatatctaattcaactaaagagcttctacgcagcaaaagaaactattatcagagtgaacagacaacctacagaat

SEQ ID NO: 896599 - DNA, 120 bp, Artificial Sequence
  ENSG00000238197_38 (sequence is synthesized)
aacagatacttctcaaaagaagacattcatgtagccaacaaacatgaaaaaaagctcaacatcaccgatgattggagaaatgcaaatctaaaccacaatgagataccatcccatgccaat

SEQ ID NO: 896600 - DNA, 120 bp, Artificial Sequence
  ENSG00000238197_39 (sequence is synthesized)
ccacaatgagataccatcccatgccaatcagaatgggaattatttaaaagtccagaaacaaaagatgctggtaaggtttcagagaaaaaggaacacttttacactattggtgggagtgta

SEQ ID NO: 896601 - DNA, 76 bp, Artificial Sequence
  ENSG00000238197_40 (sequence is synthesized)
agagaaaaaggaacacttttacactattggtgggagtgtaaggaagacagtgtgccaattcctcacagatctagaa

SEQ ID NO: 896602 - DNA, 120 bp, Artificial Sequence
  ENSG00000238197_41 (sequence is synthesized)
tcctgaggccttcccacccatgcggaactagttttatttgagaaaatgccataccactgaagaaaattgcctaacagctggaaagaagaaaaaaaataggaaaaaatcttcctgtgactt

SEQ ID NO: 896603 - DNA, 120 bp, Artificial Sequence
  ENSG00000238197_42 (sequence is synthesized)
acatagtaaaacaccatatgaaatacagcagaccatgtcttgccaaagtactaagaaatattaatactttcaaaggtacagatatttcctagaatggttacatttgaatattcaatttta

SEQ ID NO: 896604 - DNA, 120 bp, Artificial Sequence
  ENSG00000238197_43 (sequence is synthesized)
attagtcaaaatcgaaacagccacatgtagctagtggctacagcactggtcagcacagatacagaacattttccatcattgcagacagtactatcagggagtgctgagtcttaggtaagt

SEQ ID NO: 896605 - DNA, 120 bp, Artificial Sequence
  ENSG00000238197_44 (sequence is synthesized)
gtcctccattcaaaattacactctagctggttctatgcacacccccaccccgccccgcgctgcccacaaaagatgggagagtctgactacaaccctgcatggctaccatgtatcatgaac

SEQ ID NO: 896606 - DNA, 120 bp, Artificial Sequence
  ENSG00000238197_45 (sequence is synthesized)
tacaaccaagttatatcacttatgcatctcaagctacccaagctcaatcaatatatagaaaatgaaagctatcatcataaaatgaaagccccatcccatcccaccataaaaacttatagt

SEQ ID NO: 896607 - DNA, 120 bp, Artificial Sequence
  ENSG00000238197_46 (sequence is synthesized)
ttcccagttgtttctcaacttagtaaatggtaacactattcaaccagctgcttgcggcagaggtctggaggtcattcctgacctctctctcaagttgtgtgtctccacgaccatccagtc

SEQ ID NO: 896608 - DNA, 120 bp, Artificial Sequence
  ENSG00000238197_47 (sequence is synthesized)
tgtccatttccctcagttcctgctgccatcctccgaatctgacccaccttaatctcttcagaaccctgcagttactccagtgattatgagcaagagcactgagtagcctttctgaagcag

SEQ ID NO: 896609 - DNA, 120 bp, Artificial Sequence
  ENSG00000238197_48 (sequence is synthesized)
ggctctgcaagagttctaaacctacagaaaatgatttgtgtggctctttactcagttctcccaagaatgatacatagctagtactgttacagatgcaggggaaaaagaagaattcattat

SEQ ID NO: 896610 - DNA, 120 bp, Artificial Sequence
  ENSG00000238197_49 (sequence is synthesized)
agacaatggaggccttagggcattaggtattaagtctcccacagaagcccagttgagaagagcagctcaagagtcagactggctgagtttgattcccatctctaattaccaatggaatga

SEQ ID NO: 896611 - DNA, 120 bp, Artificial Sequence
  ENSG00000238197_50 (sequence is synthesized)
ccttgtgcaggttattgtgtgcctcactaccccatcagtaaagtgaaaaaacagcgtgtacctcattgagccattctgaggattcaacaagataatctatgtaaaaggtgcgggacagtg

SEQ ID NO: 896612 - DNA, 120 bp, Artificial Sequence
  ENSG00000238197_51 (sequence is synthesized)
cttggtacatagtaaacacacagtaagtactagttcccataaaatacacaataaataccagttcccattttcactatcactatccatacctacttcaatctattatctccacatagcaga

SEQ ID NO: 896613 - DNA, 81 bp, Artificial Sequence
  ENSG00000238197_52 (sequence is synthesized)
tatccatacctacttcaatctattatctccacatagcagacagagtaatcttaaaaatggtaatttatagacctgtggtta

SEQ ID NO: 896614 - DNA, 120 bp, Artificial Sequence
  ENSG00000238197_53 (sequence is synthesized)
gacaaacaccctaaattctagatgttgatttgtgagcaagttatttctcctatgggcaactctagttgaaatatgcaattcattatgttgaaacatggaattgttattttcataggttaa

SEQ ID NO: 896615 - DNA, 120 bp, Artificial Sequence
  ENSG00000238197_54 (sequence is synthesized)
aaaaaaatcacatagtggcaatatagtagtagtgctcgttttttgttttttgtttttttgtcaaaaatgctagacaacatggaagatcagggaaatattaacagtctgattcagtaacct

SEQ ID NO: 896616 - DNA, 120 bp, Artificial Sequence
  ENSG00000238197_55 (sequence is synthesized)
ttaacagcttcttttcaggttacacaggctaagctaacttttatatcaggatcaggatctgcagagttattagtatagtgctctgcagatcctggtcctagtatagcaggatctgcagac

SEQ ID NO: 896617 - DNA, 120 bp, Artificial Sequence
  ENSG00000238197_56 (sequence is synthesized)
cctagttgtacctggccatgttccccaccaatgactgagaaagaaatggctcgaacagaaaacagtggtcttgaaaggcaacgcaacagtaggttacaaatagcattagctttttcttta

SEQ ID NO: 896618 - DNA, 120 bp, Artificial Sequence
  ENSG00000238197_57 (sequence is synthesized)
aagaaattcattgtaaccagtgaaggataagattttaaattagaaaaatggaaatcctatgaataaaaaactagtaagcttgagagcagaatcactgtggaaaaaaaacagattgaaaaa

SEQ ID NO: 896619 - DNA, 120 bp, Artificial Sequence
  ENSG00000238197_58 (sequence is synthesized)
taacttgcaggtatcatagacaggaaattgccactagagaaaacaggaaacttgtgatagataaaaatgaagtattttcatttggaacaagagaccaactgaagagagatcaagtgaagg

SEQ ID NO: 896620 - DNA, 120 bp, Artificial Sequence
  ENSG00000238197_59 (sequence is synthesized)
gggtttattttaatgaaacacaaagattcttgtggaaatcaaagtgccggagccagaaacagggctcaaccttcaagattagagctgtattcaagttgttcaagttggctctcggtccca

SEQ ID NO: 896621 - DNA, 120 bp, Artificial Sequence
  ENSG00000238197_60 (sequence is synthesized)
ttcccacccatgcggaactattcatgaaccattgtttggggaaacaattgattacctgtggagaagaaagacgtaaaataaaatagttaagacagaataaattaaagtattaaaagcaaa

SEQ ID NO: 896622 - DNA, 120 bp, Artificial Sequence
  ENSG00000238197_61 (sequence is synthesized)
gtcattagggaaatgcaaatgaaaaccacaatgagataccacattgcaccctgtagaatgacttaaaaagcaaaacactgacaacagcaagtatggtgggagtaaggaataaccaggaca

SEQ ID NO: 896623 - DNA, 120 bp, Artificial Sequence
  ENSG00000238197_62 (sequence is synthesized)
gtaataggttactggtaagaacgcaaaattatacagccacttcagaagacagctttgcccggctgtttcacccaaatgaaatgaaacttacatattcagaacacccttatagaagctctt

SEQ ID NO: 896624 - DNA, 120 bp, Artificial Sequence
  ENSG00000238197_63 (sequence is synthesized)
acacccttatagaaggtctgttcataaccaaattggaaatgtcggggccaagggaaggcttcccctttgccctatgaagtttcgctgaaaattactgacaagaggcaaattaacaggaga

SEQ ID NO: 896625 - DNA, 120 bp, Artificial Sequence
  ENSG00000238197_64 (sequence is synthesized)
aaaggcatataaatttatttgatcacagttttatgtaacatgacagccttcagaatgaagacccaaagatggaggagaaattgtctactatgtttaggtttaacgaaatatgtacaggca

SEQ ID NO: 896626 - DNA, 120 bp, Artificial Sequence
  ENSG00000238197_65 (sequence is synthesized)
tgcagaaacatgactggacaaaaaggtatgatctactgctcaagagaagacaacacaaggcctgtccgtccagattcttcttggcctctctgagcagcattctttccttctgggtatggg

SEQ ID NO: 896627 - DNA, 120 bp, Artificial Sequence
  ENSG00000238197_66 (sequence is synthesized)
gcaggaccctctctggaatgggggttttatgacctataatcaaacaaggtaggtcagatgttttatggccagtttttacacagaaaggcagaggcaaaattaagagtaatatatttaggt

SEQ ID NO: 896628 - DNA, 120 bp, Artificial Sequence
  ENSG00000238197_67 (sequence is synthesized)
tttatggttggctttgcggaaaaggggttctggtgtctatgacccgcctggggcaacagggattctagtttctatggcaaccctcaagggagaacaggactgaaaggtgggcaggagaag

SEQ ID NO: 896629 - DNA, 120 bp, Artificial Sequence
  ENSG00000238197_68 (sequence is synthesized)
gtcaaagaaaaagttcttctaaggctgtttctgaggccttcattttatggtattgttttctgagtcccaagagaaacaatccaaatgtcccttaattagggactaaatgaaaaccaaaac

SEQ ID NO: 896630 - DNA, 120 bp, Artificial Sequence
  ENSG00000238197_69 (sequence is synthesized)
ctaactctggtgcacctacacagcaaggctgaacctcaaatttattcagtggaagcagccagactcaaaagactttgcctatcatgtaattcccttctcttcataggacatagactggga

SEQ ID NO: 896631 - DNA, 120 bp, Artificial Sequence
  ENSG00000238197_70 (sequence is synthesized)
ggtggccaggggcttgtggtgaccttgactacaaaagagaatggggaatttctcaggacaataaaagttgtacatatcttgattttggtagtgataacatggctgtatctgctcatcaga

SEQ ID NO: 896632 - DNA, 120 bp, Artificial Sequence
  ENSG00000238197_71 (sequence is synthesized)
atttacagaactatacactaaaaagagtgaattttaccgtatgtaaattataccttttattttttttttaaggaaaaaatcttcctgtgacttcctacaacttttgggataaggaccaaa

SEQ ID NO: 896633 - DNA, 74 bp, Artificial Sequence
  ENSG00000238197_72 (sequence is synthesized)
cccaagcaccacatgttctcgcaagtgggagctgaacaatgagaatatatggacacatactggggaaaaacaca

SEQ ID NO: 896634 - DNA, 120 bp, Artificial Sequence
  ENSG00000238197_73 (sequence is synthesized)
gcagtgttttgtcaaaacttttctcatacattttcctaaagatatttagcaagagcctaagaagtcatgtgctagggattttcattgtactgaatgattgtatcctttaagccgctgctg

SEQ ID NO: 896635 - DNA, 120 bp, Artificial Sequence
  ENSG00000238197_74 (sequence is synthesized)
gagttaggactgacaggaacgcagtacaaattactgggggctagagtcccaaagcaggccagggaccagtctacattgcatgtcgataccaatcccatataacaatattcagcctgtgtt

SEQ ID NO: 896636 - DNA, 120 bp, Artificial Sequence
  ENSG00000238197_75 (sequence is synthesized)
tgggcagtctgaggcagcttttagcagctgtgaacccagtatccatggacagtttcatttctggagggcagtcttcaaaacgtttatgaaagtacacctcccattcagatatgttttttt

SEQ ID NO: 896637 - DNA, 120 bp, Artificial Sequence
  ENSG00000238197_76 (sequence is synthesized)
cttcctacatgtagtgctagtgtttttctcattttcatttacttgaaacaacagatcaaatgttttgtcataatcagtgaatggcaagactccctttattacatgggtattaccatgtta

SEQ ID NO: 896638 - DNA, 120 bp, Artificial Sequence
  ENSG00000238197_77 (sequence is synthesized)
gagataagaagagctcttgtaaccattaacaaccactacaatgtagcaacttacagtttcctattttatattgcagctctgtaacatttgactacttttgtaagagtttcatgatttcaa

SEQ ID NO: 896639 - DNA, 120 bp, Artificial Sequence
  ENSG00000238197_78 (sequence is synthesized)
tggctacagtagtactagtcactcttgactgtggtttatgttgtttcaataaagtagctttccttctcaaaaacatttgtcacctattttggagttaattcagaggattgctccaaaaga

SEQ ID NO: 896640 - DNA, 120 bp, Artificial Sequence
  ENSG00000238197_79 (sequence is synthesized)
aaaaactgaaaagcaaaaccagctttattaaaatgtaaccctctggatttatcttttgataattcctttcataagaaataatgtccttaagctatttcaggaataaaaatgttctgcttg

SEQ ID NO: 896641 - DNA, 120 bp, Artificial Sequence
  ENSG00000238192_0 (sequence is synthesized)
cagtggacatcattgtccagtgtgggaagcctggccccactcagaccctgctcaccctgctaccgacccagctgccatcttcctcagactccagcaggccctccactcctagcacacagg

SEQ ID NO: 896642 - DNA, 120 bp, Artificial Sequence
  ENSG00000238192_1 (sequence is synthesized)
ccggattgaatcttcaggaaagaagagcacacccagggtgggacctgaccttcccaaggtcacacaactgcggagcagcagatctgggtcctggatccccaaactctgatgagatgcagg

SEQ ID NO: 896643 - DNA, 120 bp, Artificial Sequence
  ENSG00000238192_2 (sequence is synthesized)
gcagcgtgagctgctgtcctgcggtttgaaggaccatctaggtggcctcgcagactgacctccaggaagaccagatggcatcctgctccacacgtttactcttggtgactttggatcact

SEQ ID NO: 896644 - DNA, 120 bp, Artificial Sequence
  ENSG00000238192_3 (sequence is synthesized)
tggttaatttctttaggctttatttcccttatctgtgcaatgagattggtgatgttgtgtttaatggagatggtgatgataacagtagtaaaacacattaaagagcctggccacgataaa

SEQ ID NO: 896645 - DNA, 120 bp, Artificial Sequence
  ENSG00000232131_0 (sequence is synthesized)
acgctgctccagagaactctgctctacattgtcagaaaccagctttcaacttgggttccaggatgaagacatgtggaacagaacccgaacttgaacctcagctttggcatccggcttaac

SEQ ID NO: 896646 - DNA, 120 bp, Artificial Sequence
  ENSG00000232131_1 (sequence is synthesized)
ctttgccaaggccagcctgcagaacccagccaggagtagctaaaccacagtcaacctgcaaatccatgaaggatatactcagagaagaatcacgagtgccaagagagaccatgaggcaaa

SEQ ID NO: 896647 - DNA, 120 bp, Artificial Sequence
  ENSG00000232131_2 (sequence is synthesized)
ccagcctacccttcgtgagctaaacacaacctcactcttgccagcattgtaactgactttttaaatctagtaatctgcacttctttgatgccatgaagtcagtattattttcatgtcttg

SEQ ID NO: 896648 - DNA, 120 bp, Artificial Sequence
  ENSG00000232131_3 (sequence is synthesized)
gccatcttaagttcctgttttgtgaatattctattcctattccttgttataaaggttttcagagttaagacatgttaaatagaaattattttggaaggttctgtgattcaaaatatcaaa

SEQ ID NO: 896649 - DNA, 120 bp, Artificial Sequence
  ENSG00000232130_0 (sequence is synthesized)
ggcgcagtgagcactgagccacggaaactcaactctgccatgtcccacaggcaagcatgaatcaggatgacagtcaatgccacaaaatccaaagccgtgtgggtgcttttttgactagag

SEQ ID NO: 896650 - DNA, 120 bp, Artificial Sequence
  ENSG00000232130_1 (sequence is synthesized)
acagagcaagggcaggagtgaagcttaggcttctgcaccaacccagcgagacatcagtcatctctaagcactgcagctctctgcccctctgattctcaaaggaagaccacaaggaccata

SEQ ID NO: 896651 - DNA, 120 bp, Artificial Sequence
  ENSG00000232130_2 (sequence is synthesized)
ttgaagaggcagagaggagctgcagcatgtattcacaactgagaacttgtcctgtgaaggaagaaaacaatgccccttggagcaaagaattaagagatgacttatatttgaaaaaccacc

SEQ ID NO: 896652 - DNA, 120 bp, Artificial Sequence
  ENSG00000232130_3 (sequence is synthesized)
cacagctgcatgttgatgtgctcgagtggcttgttgatgctgcctgaagttggggttctggctgtaccagttatttaccctttgattaaaaaaatactttaattctgattgaaaatcacc

SEQ ID NO: 896653 - DNA, 120 bp, Artificial Sequence
  ENSG00000232132_0 (sequence is synthesized)
agactcgctggctccgccggcgtgccatccgcgccgccagtgggagggtatagctgggtgggaggagatggaaaagtaagtggagcgccctgaagggaaggaaagggatctggagcccca

SEQ ID NO: 896654 - DNA, 120 bp, Artificial Sequence
  ENSG00000232132_1 (sequence is synthesized)
acccaaatgccaggattcttcgttgggagtcccaccagttaaagagcagtaagacatgccattgcctacagaaagccgtctacacaggcctaaatcacagggaggcgatgttccaaattt

SEQ ID NO: 896655 - DNA, 120 bp, Artificial Sequence
  ENSG00000232132_2 (sequence is synthesized)
tccttaccacttcactgatttttagttttttatcacttcctctaccacaaagaactactcaaagtggctattgatggttagtgtgatcacagatcttagtaatgaattgcatttggaata

SEQ ID NO: 896656 - DNA, 120 bp, Artificial Sequence
  ENSG00000238198_0 (sequence is synthesized)
agtgaggggcggggccagacgcagccgagtatcttgaggagaaggactttaaagcgttcagggattttagctgccgctgtggagttccgccgctgttcttccgctggagggcgcagtagt

SEQ ID NO: 896657 - DNA, 90 bp, Artificial Sequence
  ENSG00000238198_1 (sequence is synthesized)
ggagttccgccgctgttcttccgctggagggcgcagtagttccttaagagggaatggtgcggcgaatagctgtgagttcaaagtcctgac

SEQ ID NO: 896658 - DNA, 82 bp, Artificial Sequence
  ENSG00000238198_2 (sequence is synthesized)
acagaatcttgccctatcacccaggctgtagtgccgtggtataatcttggctcgccgcaacctccgcctcctgggttcaagc

SEQ ID NO: 896659 - DNA, 65 bp, Artificial Sequence
  ENSG00000238198_3 (sequence is synthesized)
tgacctcaagtgattcacctaactctaacattttatcatcaagaaatgcttgctatatgtataca

SEQ ID NO: 896660 - DNA, 120 bp, Artificial Sequence
  ENSG00000238198_4 (sequence is synthesized)
taacattttatcatcaagaaatgcttgctatatgtatacatacattagattcacagcctgcataagagtttgtgtgatttcttacttagtaaatactgagtggtaaggacaattccaaat

SEQ ID NO: 896661 - DNA, 120 bp, Artificial Sequence
  ENSG00000238198_5 (sequence is synthesized)
tcatcccatgaaagttaatagggaattcctagcaggtcataggtcagatagaaaatctgtccttcatgaaacgctgaggacgtgcaattccaattaaacccactcaatctggagaaagaa

SEQ ID NO: 896662 - DNA, 120 bp, Artificial Sequence
  ENSG00000238198_6 (sequence is synthesized)
atcaaagggagggggtgggcctggaaagagtacatcttatcttcaggtactgtttgtttgattttttttaatacttggggtttgtttctgggaagaattcttgacctggcaaaaattcat

SEQ ID NO: 896663 - DNA, 120 bp, Artificial Sequence
  ENSG00000238198_7 (sequence is synthesized)
agtaattactcaggggaaaggaaaaagaagaaacaaacaaacaaaaaatacattaatgtggttggaaaaaaaatctaagaacatggtgttggtgggagagaagactaaatgtttgtggaa

SEQ ID NO: 896664 - DNA, 120 bp, Artificial Sequence
  ENSG00000238198_8 (sequence is synthesized)
gacccacccaagtgcttttgatgtttgaccagttattatcttattgttcttcctgctatagatacagctgcaatttatgtaacaggatgtttaaaaagattaaagagaatctgtagtagg

SEQ ID NO: 896665 - DNA, 120 bp, Artificial Sequence
  ENSG00000238198_9 (sequence is synthesized)
tcttagaataaaccatctatttgtttccttttttaaaaaagaaacaaacaaaatttgtatttcagtatggctgcttccttccagcaagtgatatggaataacaggcaaagacagcaaacc

SEQ ID NO: 896666 - DNA, 120 bp, Artificial Sequence
  ENSG00000238198_10 (sequence is synthesized)
aataacagagcaaagacaagttggtgctggttcaaactgtggcccatgccggttcttaattagctttgagctttgagtctaaaatgttttaactctacattatacacgtgtttggaattt

SEQ ID NO: 896667 - DNA, 120 bp, Artificial Sequence
  ENSG00000238198_11 (sequence is synthesized)
atttggattcaacctgttcatcagaaaatgggttattctatgatacaagcaggatcattgtgtgaaatttatgactgcaatcacccaacgtgaagatgaaagtttaaacatttttttgct

SEQ ID NO: 896668 - DNA, 120 bp, Artificial Sequence
  ENSG00000238198_12 (sequence is synthesized)
agaggagttttcaaaaaaaaaaaaaaaaagtgttctatagatgtcccaaacatacagagtgacttactggcgtttaagtctttctgccatgtggagtgctatcttaagtgataaattggc

SEQ ID NO: 896669 - DNA, 120 bp, Artificial Sequence
  ENSG00000238198_13 (sequence is synthesized)
actgggcacttgataaaaggtcattgggcatattctccaagtttctggtgttagtcatgaattaattgcttgttaactttaattctcctagcaacctaggctaatacctactgcacactt

SEQ ID NO: 896670 - DNA, 120 bp, Artificial Sequence
  ENSG00000238198_14 (sequence is synthesized)
gctctctctctctcactgtatttctgtgcatgtgtatgtgcataatttttttctgaacttgtttctgtttgataataacttacagacatgatgcccctttccattaagcacttcagtgga

SEQ ID NO: 896671 - DNA, 73 bp, Artificial Sequence
  ENSG00000238198_15 (sequence is synthesized)
aactcactgcaacctctgcctcctggattccagctattctcctgcctcagcctccaggtagctgggactacat

SEQ ID NO: 896672 - DNA, 120 bp, Artificial Sequence
  ENSG00000238198_16 (sequence is synthesized)
ggattacaggagtgagccaccacgccccgccagtgtatattttctaaaaacaaggatattctctttcataaccacaattataaaaattaagaaatcaatattgattcaataatattttct

SEQ ID NO: 896673 - DNA, 120 bp, Artificial Sequence
  ENSG00000238198_17 (sequence is synthesized)
taaaaattaagaaatcaatattgattcaataatattttctaacctacagacctcatttgaatttgctcaaatgttccaataatgtccattatggtaaaataaattctatatcatacattg

SEQ ID NO: 896674 - DNA, 120 bp, Artificial Sequence
  ENSG00000223649_0 (sequence is synthesized)
ggcgacccaggcccaggcagtgagggagcacttgtgtccagatggcattctgtccgcttcctcctccagccggtgctcagtgtggcacaaactgggcaagaccattctcacccaaccctc

SEQ ID NO: 896675 - DNA, 120 bp, Artificial Sequence
  ENSG00000223649_1 (sequence is synthesized)
tgctgagccctaggtgtacctgctgttggcaaatgtttccagctgcctggcaagctcaagagcagacagttctgactttcagaaggaggggctgtccagggagaagaggaacatggaaca

SEQ ID NO: 896676 - DNA, 120 bp, Artificial Sequence
  ENSG00000223649_2 (sequence is synthesized)
cgttgaggtatttgagataacatttggggatagcagaagcatcctgttgctgttctgcagcatcccacactcatgtctgggcctccttcctgtctctgctctctggtcacgctgtcactt

SEQ ID NO: 896677 - DNA, 120 bp, Artificial Sequence
  ENSG00000223649_3 (sequence is synthesized)
gtagactgttctgcctagaagccatgtgtgggccagcttgcacctaacagacattaggtagcactaaaacagatgcacactgccctgtgaggggcatgggaatactgtaatgggcatgaa

SEQ ID NO: 896678 - DNA, 120 bp, Artificial Sequence
  ENSG00000287960_0 (sequence is synthesized)
caaatctgccagcagggagtataaggagatggacaaaccatttgggtgtcctcaaggtgcatgcaaccatggaacaggagactggagggatccatggcggccaaccatgggcctggtccc

SEQ ID NO: 896679 - DNA, 120 bp, Artificial Sequence
  ENSG00000287960_1 (sequence is synthesized)
tccggtatgggccatgagccagctgagcctgagtgtgaagatggagaaaaggctgaccggagtcacgaggacatcaaaccccataacctgagggcaactcaagaaaaccacgcaggaagc

SEQ ID NO: 896680 - DNA, 120 bp, Artificial Sequence
  ENSG00000287960_2 (sequence is synthesized)
tgagaaaatgctggagcgtcagggccaggcaaaaacccctgaatccatgttcttggccatgttagccataatgtcctgtgtggtatgttttctctctgcagaggcaaaaacatattgggc

SEQ ID NO: 896681 - DNA, 120 bp, Artificial Sequence
  ENSG00000287960_3 (sequence is synthesized)
atatgtttctaatcccctagtagtatggcttgtactttggagtggcactccccctgagatctatcatgatcagggagcatgggctccaggacctctaactcctcctgacatagaacagtt

SEQ ID NO: 896682 - DNA, 120 bp, Artificial Sequence
  ENSG00000287960_4 (sequence is synthesized)
agactctcagaacaatgtcatcaattatatggccccactggaaggactcccctggtgtatcactacaaagatattgctcaactgtagtagctgtcttacaattcaagctcaagcatggtt

SEQ ID NO: 896683 - DNA, 120 bp, Artificial Sequence
  ENSG00000287960_5 (sequence is synthesized)
gagtcaccatggaaaagtcatgtgcttattaggtcttagttctattaatgtaactggtgtgctaaccaaccattcccggcccaatcaccccaattgtgttgactatatggaatggattcc

SEQ ID NO: 896684 - DNA, 120 bp, Artificial Sequence
  ENSG00000287960_6 (sequence is synthesized)
cttcaatagttcctaccccgctccatggacccaatgtcttggcccactggctagaaaacaatctatgttaactgaagacattgtgacttggggacctaaaggtcaactagatggtaaaga

SEQ ID NO: 896685 - DNA, 120 bp, Artificial Sequence
  ENSG00000287960_7 (sequence is synthesized)
taaaatcagacatcatggcacaaacttcactgtcattggtagcagactttcaatgcttcttctttacaccacaccaggatccaatcccattctgctgccagggttgcttggcatggaaca

SEQ ID NO: 896686 - DNA, 120 bp, Artificial Sequence
  ENSG00000287960_8 (sequence is synthesized)
ggctttatcccgcctcttcttcagtggcaatatctaggtaggaaaggtccaattcaagaaacaatatggaaagcagcagtcccatttacaaatggtactatctgggtaggggtactctct

SEQ ID NO: 896687 - DNA, 120 bp, Artificial Sequence
  ENSG00000287960_9 (sequence is synthesized)
aatactagtactgctactcgacacagttttgatgttacatttgtaaagagtatcaccactaaatttacggtttgtgtttttaatccttatgtctttatggcagctaagaaggaccagctc

SEQ ID NO: 896688 - DNA, 120 bp, Artificial Sequence
  ENSG00000287960_10 (sequence is synthesized)
caggtaaacaatacccaattgacctgtaaatcttgtcagttatatcactgcattaatcatagcacattgcaaacacatctctaccttgataattatgggtcgcatccctgggatatggat

SEQ ID NO: 896689 - DNA, 120 bp, Artificial Sequence
  ENSG00000287960_11 (sequence is synthesized)
cattgtacccgtaaagtcttaggcatgataatttttgctattatttccttggtcacactaataacttctgtagtaatgtcctctgtagctttgcatagttctgttcaaacagctcagtac

SEQ ID NO: 896690 - DNA, 88 bp, Artificial Sequence
  ENSG00000287960_12 (sequence is synthesized)
ctctgtagctttgcatagttctgttcaaacagctcagtacgtggagaactagacatgtaccaccaagaaaatatggctacttcagagc

SEQ ID NO: 896691 - DNA, 120 bp, Artificial Sequence
  ENSG00000287960_13 (sequence is synthesized)
aatgttgaaatccatggttccatggttagggcaacaagtacaaagcttacaattgcaacagcaattgtgctgtcattttaatcacactcatatttgtgtaaccaacttagaatataacca

SEQ ID NO: 896692 - DNA, 120 bp, Artificial Sequence
  ENSG00000287960_14 (sequence is synthesized)
ggagctttcacatccaatatcgcctttgatattggtgaattatgaaacaaaattattggtttaaataagcaaactcaagagtttcagccttctttagaagcctggaccaaattccagtga

SEQ ID NO: 896693 - DNA, 120 bp, Artificial Sequence
  ENSG00000287960_15 (sequence is synthesized)
ggtctggagagcctcaatccttggacctatctaaagcgccacattaacatctcatgtatagttctgggaataatgctgttctgtctttgttttctgttcatagtctataaaattggatgg

SEQ ID NO: 896694 - DNA, 120 bp, Artificial Sequence
  ENSG00000287960_16 (sequence is synthesized)
actgccaatcagaaaatgagagctgcccaacctggccttacattcattcaattaatgcaaaaacagaaagggggagatattgggagctgaaaacctgagggtcatgaccaactcagcatt

SEQ ID NO: 896695 - DNA, 120 bp, Artificial Sequence
  ENSG00000287960_17 (sequence is synthesized)
tgaatgcaggatgtgggcaaactcacatctgtgcctgccaccagaaggtaggctgagggcaatcactccctggcactgtgcaccttgaggttatctactggaatatctggagcctactgt

SEQ ID NO: 896696 - DNA, 120 bp, Artificial Sequence
  ENSG00000287960_18 (sequence is synthesized)
caccttgaggttatctactggaatatctggagcctactgttcaaggaaagcagacatgcaggcctgcactaaatcatgcaactggctcatgatcacctgctcctccctatttcctttact

SEQ ID NO: 896697 - DNA, 120 bp, Artificial Sequence
  ENSG00000287960_19 (sequence is synthesized)
tgttcactagaagcaaggagccccctgaccccttcttttaaaacagatctttttatctttgtctttattcctgtgttcatcctcctttgctcagtcctctggggtctgtggcagaagata

SEQ ID NO: 896698 - DNA, 120 bp, Artificial Sequence
  ENSG00000287960_20 (sequence is synthesized)
ctttgctcagtcctctggggtctgtggcagaagataaaaaacactattacatgagattttccaccttttcattgtctatccatttattcacattttcatttattctcagagaaggaactg

SEQ ID NO: 896699 - DNA, 120 bp, Artificial Sequence
  ENSG00000287960_21 (sequence is synthesized)
ttttaattccttttaaacgtttttatttagtgttctttgtaaagttttctgtacttttctttctagattatatccttttttactttcttttcaaaatactttctaaataaaatacctacc

SEQ ID NO: 896700 - DNA, 120 bp, Artificial Sequence
  ENSG00000274719_0 (sequence is synthesized)
tgctaggattacaggcatgagccacggtgtccggcctattgtgtaactttttaaattaaaaatgacagcataatatgtcaaacaagagataacaccttgtcatgttagtacctacatctc

SEQ ID NO: 896701 - DNA, 120 bp, Artificial Sequence
  ENSG00000274719_1 (sequence is synthesized)
atttaatcctgtattaatgtacacttgagggtggtttttccactaatttttcctattaaacagactgctgaaataaaaacctttggagacccaagaaaaattttacttgtaaatctgtaa

SEQ ID NO: 896702 - DNA, 120 bp, Artificial Sequence
  ENSG00000274719_2 (sequence is synthesized)
ctgtatacacatatgtatatacgtatacacacacgtatatgtgtacatattagatgctcagttggatatggttctagaagtggaattgcaaaataaaaacatatttacaacttgcttacc

SEQ ID NO: 896703 - DNA, 120 bp, Artificial Sequence
  ENSG00000274718_0 (sequence is synthesized)
aatactcaaaggaaattggcttttctcctgaaagagatggattcattaaggaaatttagattgtgacttcaatgttcgttttcatgaacatcactgttcactaaaatcaaaacgagaaat

SEQ ID NO: 896704 - DNA, 120 bp, Artificial Sequence
  ENSG00000274718_1 (sequence is synthesized)
atgtttggagaaggcgttaactagattagtaaatgttgattcttattagcttatcagctaaaatattgcatagtggcaaggaagagcaaatagcttggctggaatgtaggtttcatttat

SEQ ID NO: 896705 - DNA, 120 bp, Artificial Sequence
  ENSG00000274718_2 (sequence is synthesized)
atcaggaaaatcaggctgtggagtctagaaactcctacgtaggttttacctaggagtgtgactaatggaatagagaagtttaatagcaccagcacatttcagaaggctgctgaatagtag

SEQ ID NO: 896706 - DNA, 120 bp, Artificial Sequence
  ENSG00000274718_3 (sequence is synthesized)
acagttgcaaatacattatattgagggatctgctaacaggatgtactctgaacaagaaaacattgcagaaacaatctacatgtatatcatagctccaggattactgttcagggggtcatt

SEQ ID NO: 896707 - DNA, 120 bp, Artificial Sequence
  ENSG00000274718_4 (sequence is synthesized)
tatgtttataaccttcaaaaattcaaagctcttacgttatttgatcatgcttattttcatgggaatcagtgcttttattcctatttaaatggctaaagttgttatgcattgggagatggg

SEQ ID NO: 896708 - DNA, 120 bp, Artificial Sequence
  ENSG00000274718_5 (sequence is synthesized)
tttcttattctgcctttacgttataaaaacaacaaaatgatatatttgttgtcttctcaagtatttatccttatcccttaaaattaacatctgccaaataattttaccaaagaaaaacag

SEQ ID NO: 896709 - DNA, 120 bp, Artificial Sequence
  ENSG00000274718_6 (sequence is synthesized)
gcaaatccagaatatcttcttatctagtgaaggccattgcttaaatatgtccactccataaatcaagtaaataacaaccccaagatattttcttttttcacactgaatgcatcctgaaaa

SEQ ID NO: 896710 - DNA, 120 bp, Artificial Sequence
  ENSG00000274718_7 (sequence is synthesized)
cacgaaattaggtacaccctttgttgttctcatatactgtttatgtgacacatataagtgaaaatggattatgctcttatatacacattaatctcaaaaaagacttttgtgcttttagaa

SEQ ID NO: 896711 - DNA, 120 bp, Artificial Sequence
  ENSG00000274718_8 (sequence is synthesized)
ttcacaggcaatgtgcaaattcttgatgagcatgtctacattttctacttatttttgtggttgtagttttgagatggagtctagctctgtcccctgggctggagtgcaatggtgcgatca

SEQ ID NO: 896712 - DNA, 120 bp, Artificial Sequence
  ENSG00000274718_9 (sequence is synthesized)
tagctcacttcagtctcaaaatcctgggctcaagagattgtcccacctcagcctaccgagcagctagaaccgcaggtgcatgtcaccatgtccagctaatttttatttttacttttattt

SEQ ID NO: 896713 - DNA, 120 bp, Artificial Sequence
  ENSG00000274718_10 (sequence is synthesized)
ttttatttttacttttattttttgtagagatgtggtctccctgtattgcccagtctggcctagaactcctggcctcaactgatcctcctgactcagtctctcaaagtgctgggattacag

SEQ ID NO: 896714 - DNA, 120 bp, Artificial Sequence
  ENSG00000274718_11 (sequence is synthesized)
aaatgtctacattttttaaaacaaattaaacataaagagctcataaagaatagtcaaagtttatttgtggaaaaatataagactgatctataagcttttaattccactataatttgtgaa

SEQ ID NO: 896715 - DNA, 120 bp, Artificial Sequence
  ENSG00000274718_12 (sequence is synthesized)
ccaccttgatttgatagggttgatttggcaaactagcattttctctctatctgtgtacttccaccatgctccagctcagtgattttctaatgttggtgggcagagaatcaagtagagact

SEQ ID NO: 896716 - DNA, 120 bp, Artificial Sequence
  ENSG00000274718_13 (sequence is synthesized)
tagtcaacttgggcccctctccagagacctgcctcagtagaactaggctggggtccaaggaaactatttttaacaagaaccccttagtaactttttctaacctaagaacgcttctaccta

SEQ ID NO: 896717 - DNA, 120 bp, Artificial Sequence
  ENSG00000274718_14 (sequence is synthesized)
cagtattggcactgctggatagagtggccggtgtgagtcaaatgagggtgcatgctctaaattctaaaccagtatcaagattcatctgtggagaatatagtgttaaataatgttatttgt

SEQ ID NO: 896718 - DNA, 120 bp, Artificial Sequence
  ENSG00000274718_15 (sequence is synthesized)
gattaagcattagcgtgtatagaattaagtcatgaacacttttcatagaatgcaaacaatgtataccccacatgacattaaaaatctatgtcatcattgtcatcatcaaaattactattt

SEQ ID NO: 896719 - DNA, 120 bp, Artificial Sequence
  ENSG00000274718_16 (sequence is synthesized)
gacaaactcttttaagaacgtgtgtacatacacaccatttgcaagcaacaaaagtgacagagggaaaacgcttcactcaagatacacagaacgaggcccatatggagaaatggacagaag

SEQ ID NO: 896720 - DNA, 120 bp, Artificial Sequence
  ENSG00000274718_17 (sequence is synthesized)
ttactgacaaataaaataaaagatttgaacagtaagaaaaatctgcctgtgtctacacagaaagttggctattataaagatgaaaattctccctaaatcaagttacatattcctgaaaac

SEQ ID NO: 896721 - DNA, 120 bp, Artificial Sequence
  ENSG00000274718_18 (sequence is synthesized)
aaaacgtgattatttttcctgaaagaaactatcctccaaaacagagggagccattttatatttgacttcttacaaaatctctcataacgtgggggcctctctctattttatttcaaactt

SEQ ID NO: 896722 - DNA, 120 bp, Artificial Sequence
  ENSG00000274718_19 (sequence is synthesized)
cattttgggaagacacaaaggctcttgaaatgagagccaccaatgtttgttttagatgcttataaagcttacctcatggagctgttaacatagcaaaataaattttttaacaaaggaaaa

SEQ ID NO: 896723 - DNA, 120 bp, Artificial Sequence
  ENSG00000274718_20 (sequence is synthesized)
tttggtaactatttctggggtaaagattttacaatagcaagtattatcactagacattactttaaatgtggatttttttaaatcatggtagaaaacaatataaaaagtgttcatgtggca

SEQ ID NO: 896724 - DNA, 120 bp, Artificial Sequence
  ENSG00000274718_21 (sequence is synthesized)
gttgttaagaatacacatcttcagggttttttaatataaaaaggggaaagaacagtctcattattatatgcatagtttctctgatttggtacaaaatttcccagtgatgtcattgtggaa

SEQ ID NO: 896725 - DNA, 120 bp, Artificial Sequence
  ENSG00000274718_22 (sequence is synthesized)
tgatccaagtgttgcctgtcagcagagataggagtgaagttgatgatgatggttagatggcctcacaagggactctagtgatagtaaaggttccagtggcaaacacacaagtgaaaagtt

SEQ ID NO: 896726 - DNA, 120 bp, Artificial Sequence
  ENSG00000274718_23 (sequence is synthesized)
agtttgaatatagtttcataatgtttgagagtgtaaaaaatgcatttttaaattaatgcattactttctgtactattttaaataagtgtgtatctaaataaacacataaaatgttatgag

SEQ ID NO: 896727 - DNA, 120 bp, Artificial Sequence
  ENSG00000223641_0 (sequence is synthesized)
tgtgtgctgaataaattccagaagagccagagacttgaggccacagctgacagcactctacttgaagcatccaacatatgggattttgacatctacctaagccaattttaaagtgctgtg

SEQ ID NO: 896728 - DNA, 120 bp, Artificial Sequence
  ENSG00000223641_1 (sequence is synthesized)
actcttctgcctggatcatgctcagtaagaatggtgacatcgctggatccagctcccaggtgcatctaaggaaacgagccctgtgtgatagtggtaaagagaacaactgcatccttctgt

SEQ ID NO: 896729 - DNA, 120 bp, Artificial Sequence
  ENSG00000223641_2 (sequence is synthesized)
agctgatgccttgttgagctttgaagcacattgagaagaatctgaaatccttcctcattatggggtgtgttcaggctgctgaggtgcccattctcaagattttcactggacattctgggg

SEQ ID NO: 896730 - DNA, 120 bp, Artificial Sequence
  ENSG00000223641_3 (sequence is synthesized)
gttcagtgtggccaggctgaggctgcccttttaaagggagaaatgtcaggggggctgcacttgtggttgccatcctgatttctttgtggaaatacctagtgggtgaggaaggactcaagg

SEQ ID NO: 896731 - DNA, 120 bp, Artificial Sequence
  ENSG00000223641_4 (sequence is synthesized)
accgggaacatgacagagcacctaggctgacctaccacgtggccctctgagatcactgctggcaggagtgtttcatggagctccaggcccctattctaagatgcttgcccatagcccctt

SEQ ID NO: 896732 - DNA, 120 bp, Artificial Sequence
  ENSG00000223641_5 (sequence is synthesized)
ccgtgacttccaggaaaggtctactcttttagcaagctgcacccactggtctctaggagacaagtattcatttacctttgtgtaagtcaccttctgcttcatttctattaaatgttctcc

SEQ ID NO: 896733 - DNA, 120 bp, Artificial Sequence
  ENSG00000223643_0 (sequence is synthesized)
gcaggacgattgcctgcaagacagggcctggagaaggccagggcacccaaggccacagaaatgcccagggatgagtcccggctggagatgccttggctgaactcactgtgtacttccagg

SEQ ID NO: 896734 - DNA, 120 bp, Artificial Sequence
  ENSG00000223643_1 (sequence is synthesized)
gtgcacagggcagtgtcttcttggtactacacatgaagatgtcctgctctccccttctcaaggagagagtgcctgacctgagctgggcccatcagatccagtacttacccggaataggaa

SEQ ID NO: 896735 - DNA, 120 bp, Artificial Sequence
  ENSG00000223643_2 (sequence is synthesized)
aaagatggagagggtgaccaaagattacaaaaatctctgaagcttatccacttgagagagagtccctgaagatactggcctttcatttcctgctatgtatatccagtgtgactgaactct

SEQ ID NO: 896736 - DNA, 120 bp, Artificial Sequence
  ENSG00000223643_3 (sequence is synthesized)
gttataataatgtagtagttggccctcaaactaggacacaaacatgttagagggatttgagtttgatgtcatgcatgcaatgtgatcccactgtgtgactacagaaatgttggcaaaagt

SEQ ID NO: 896737 - DNA, 120 bp, Artificial Sequence
  ENSG00000223643_4 (sequence is synthesized)
aagttcagaggaaatggtaggcaagtacttcccagttttggccagaagatggagaaaaaaagaattctcataaaatattaaaagtatctacggagaaatagacaagtgatgcacgacaga

SEQ ID NO: 896738 - DNA, 120 bp, Artificial Sequence
  ENSG00000223643_5 (sequence is synthesized)
tacatgtgtcagtctggtctctgcagttgtatttgtaataatacacattggaacaatgtcatggccatcggttagagaatgtttgaagaatgacccattcatatcaggaaggacgtttca

SEQ ID NO: 896739 - DNA, 120 bp, Artificial Sequence
  ENSG00000223642_0 (sequence is synthesized)
ggagacagtgtaaacagaagcatacaagatttacttatggtcagttgtgatgctccttcaaaagctggcagaacaaaaagcataatggttggctggaacagcctgtgcatgcaaaacagg

SEQ ID NO: 896740 - DNA, 120 bp, Artificial Sequence
  ENSG00000223642_1 (sequence is synthesized)
aatcagaacaaaacacccccaaatacatgaagttaaaataattaaaagcagctaattttattattgcctgtgcatgcaaaacaggtctcaaagtcatgcaacagcaccactacaacttgc

SEQ ID NO: 896741 - DNA, 120 bp, Artificial Sequence
  ENSG00000223642_2 (sequence is synthesized)
tttgtgtttgaattaggacatacaggatttgtctaggcatgctgtaatactagttttgtgaaactctggtgtgataaatagctacttttatctaaaccaatgttatttactacactaaaa

SEQ ID NO: 896742 - DNA, 120 bp, Artificial Sequence
  ENSG00000223642_3 (sequence is synthesized)
aaagacaattaaaatcttagccaggaaaactaacacatacattggaactcttcctacattcttttatgttctaacactcagttgctatctctaaacttttggtttgcatatgaaaaccag

SEQ ID NO: 896743 - DNA, 120 bp, Artificial Sequence
  ENSG00000223642_4 (sequence is synthesized)
taaatcacaacaaacctatattctgaaaaatttatatttagaagagccaatgctttaggaaaaagcattactttataaggtaatatttttctagaaacatacacttacttctgctttttt

SEQ ID NO: 896744 - DNA, 120 bp, Artificial Sequence
  ENSG00000223642_5 (sequence is synthesized)
acgagcttccatagctttcataagcatcatgtgttgtcgccttcgctctcgttcctattaggccagataaaatgtggaaaataactcagccacaattaacagtttgattttccaatgaaa

SEQ ID NO: 896745 - DNA, 120 bp, Artificial Sequence
  ENSG00000223642_6 (sequence is synthesized)
aaggcacagtatgaaaataagcctgtgcatgcaaaacaggtctcaaagtcatgcaacagcaccactacaacttgcaaataatgtcagacttgaaatgaagctacatgtctcacaagtggc

SEQ ID NO: 896746 - DNA, 120 bp, Artificial Sequence
  ENSG00000223642_7 (sequence is synthesized)
aacttttaagtaatcctgaaagcattaagaagcaatgaaggcaaatcttattttgtataacttgaatttaattttctactaatattttacatgtttaagaaaaacaagcttttattaaaa

SEQ ID NO: 896747 - DNA, 120 bp, Artificial Sequence
  ENSG00000223642_8 (sequence is synthesized)
tttgaacattcgagcaatatacttcattgactgatacattaatttaaaaattctgaaaattgttcaagatatcaacttatacaaagtctaccaggatattaaagtacttacacaaattta

SEQ ID NO: 896748 - DNA, 120 bp, Artificial Sequence
  ENSG00000223642_9 (sequence is synthesized)
ttagacctggatcacatacagcagctgagaggagcctcacaagcaagtcttgtacttcacccatgctgtcccctatatttagcaatccctcttgaagaacactcagcctcactgtatgac

SEQ ID NO: 896749 - DNA, 120 bp, Artificial Sequence
  ENSG00000274712_0 (sequence is synthesized)
gggatgaaacaagagggcggctgaagccgatcctgagtggggccccagcaattcggaatgagccttttccctccacccgcttctgccgaccggggccctcccgcgcggcctcgcaggcct

SEQ ID NO: 896750 - DNA, 120 bp, Artificial Sequence
  ENSG00000274712_1 (sequence is synthesized)
ccccacccgcgcccgtccctcctcctccgctttcccttctcccccgtcctcggctccgacattaggggcaggcggggcaggcagcccaagcagcctgcggcttccgctgcggagcgctgc

SEQ ID NO: 896751 - DNA, 120 bp, Artificial Sequence
  ENSG00000274712_2 (sequence is synthesized)
ccgccgccgccgcccaagtccggacccatcggggggctcagctcgcggcaccgcgagcagcaggggcaggtgggccgccgccgccgcctaggttgaggcagcctccaagccgtggctgag

SEQ ID NO: 896752 - DNA, 120 bp, Artificial Sequence
  ENSG00000274712_3 (sequence is synthesized)
cgcctaggttgaggcagcctccaagccgtggctgagctcgcccaggggggagcagcagtagccggaggaagccgccgctggtcccccaagcaccagcgcccgggtggaaggggcgaggag

SEQ ID NO: 896753 - DNA, 120 bp, Artificial Sequence
  ENSG00000274712_4 (sequence is synthesized)
gcgggggcggcggcggcggcggcggccacctggcccggaccaccgcggcccggagggccgtgaacaaagtggtgtacgatgaccacgggagctaggaggaagaggacggcgacgtcgagg

SEQ ID NO: 896754 - DNA, 120 bp, Artificial Sequence
  ENSG00000274712_5 (sequence is synthesized)
agacccaggagtctgaggacaacgaggagcatgagatggaggaggacgaggctgattccgattatctggaggagctggaagacgacgacgacgccagttactgcacagaaagcagcttca

SEQ ID NO: 896755 - DNA, 120 bp, Artificial Sequence
  ENSG00000274712_6 (sequence is synthesized)
ggagccatagtacctacagcagcactccaggtacccacccagcccagttgctgcagactccttccccacctcctctgccctccccccttgctcactcgtgtgctgtgcatcctgctccga

SEQ ID NO: 896756 - DNA, 120 bp, Artificial Sequence
  ENSG00000274712_7 (sequence is synthesized)
tctccccccaaccccgcctcccccccaaacagaggggaaatgcgagggcacatcaagtggcaaaaaactagatttacaagaggaaagaggcgcattgttaaaaatggagattgcattgtt

SEQ ID NO: 896757 - DNA, 120 bp, Artificial Sequence
  ENSG00000274712_8 (sequence is synthesized)
ctccaccgggcaggattgaaactttggcaaacacgtatccattgcattcatttctttccccttgttttggtctggttttctggaatgaaagaagcctcttgttttacaaacctctttgca

SEQ ID NO: 896758 - DNA, 120 bp, Artificial Sequence
  ENSG00000274712_9 (sequence is synthesized)
tttctaatgtggtttctttcagatttttattagatatgttacttaaaagggaattaagggtttggacagattgtggcacacaaacacacacaaaaacatgtctgttttcacatccctagc

SEQ ID NO: 896759 - DNA, 120 bp, Artificial Sequence
  ENSG00000274712_10 (sequence is synthesized)
tgtggttttaaaattgtgttaaggaaatggatcatttgggttagtaggggaattttatctggtcctgtatgtttgcttttattcttcgagtgctaatgggcctgtgcaacagttgctggt

SEQ ID NO: 896760 - DNA, 120 bp, Artificial Sequence
  ENSG00000274712_11 (sequence is synthesized)
aaatggctgattaaaaagcaaagcagaaagccaaacaagacccacccaactttggttattcattcgattcaaaattgtttttggttaaatcaaaaatgaaagtacaaaaccgcaggaacg

SEQ ID NO: 896761 - DNA, 120 bp, Artificial Sequence
  ENSG00000274712_12 (sequence is synthesized)
cgcatcttagctcatttgatcgctttgccttgcttgggaaatgcagtttcgtgtcacctgttgcagaagatatgtagttgatcatctagacataattgctgaagataaacttttggacca

SEQ ID NO: 896762 - DNA, 120 bp, Artificial Sequence
  ENSG00000274712_13 (sequence is synthesized)
acttctaagtcacacagcatcattatcagatttattacacaacgacttttttgttttcactctatttctgaggaaaaagccttcccgaaatccgtaatgaatttctccatggtaacccct

SEQ ID NO: 896763 - DNA, 120 bp, Artificial Sequence
  ENSG00000274712_14 (sequence is synthesized)
cttctgttttcacacagaaaagtttctctagactgttgctaagatgcattttgttaaataccccccccccacaaaggctgctttgtattaaatacgtagttggaatttactaaattgtga

SEQ ID NO: 896764 - DNA, 120 bp, Artificial Sequence
  ENSG00000274712_15 (sequence is synthesized)
aattaacgtaaccgaagcaacaaccggcaagacttttcctttataattttgcaaatctagattaattaaattagaatctgtttttaaaagcattaaaaaaataaagtttatgagaaaata

SEQ ID NO: 896765 - DNA, 78 bp, Artificial Sequence
  ENSG00000223647_0 (sequence is synthesized)
ggtttcgccatattggccaggctggtctccacctccggtgatccgcaccgcgcctggcctgaagaatcttttcaaatg

SEQ ID NO: 896766 - DNA, 120 bp, Artificial Sequence
  ENSG00000223647_1 (sequence is synthesized)
gaatgttttcaactaaaaccaccacctggagtgccaaactgcaacggggacctagacagattcagattgtgccactggagccctggaattggattgctggatagactcactgtgttaatt

SEQ ID NO: 896767 - DNA, 120 bp, Artificial Sequence
  ENSG00000223647_2 (sequence is synthesized)
tatttaatcttggatcaagatccacagcatggaagaagactgaaccatcacttagaggagagctgcttacccctcactgggttgtggcatgaacaataaatacacttttaagatactgaa

SEQ ID NO: 896768 - DNA, 120 bp, Artificial Sequence
  ENSG00000223646_0 (sequence is synthesized)
cccaaggtaggcagcttcccgctcctcgtcttgggacctaaacccaggaagtcaaatgtccttttctagcaggtcgcctggttagaggccgtggacgaagcggtccaggcacagccagct

SEQ ID NO: 896769 - DNA, 120 bp, Artificial Sequence
  ENSG00000223646_1 (sequence is synthesized)
gcagggcgcggcctcggcggcgctgctcgtggccctggtcagtgagcgcactcactcctggactaagctctatgcaactcattttcatctagcattacctctccaaaacctgaatctcca

SEQ ID NO: 896770 - DNA, 120 bp, Artificial Sequence
  ENSG00000223646_2 (sequence is synthesized)
caagaaagccacacagcaattaaccagtgttgcaagaactgcttctgtaataaaggtgggaagacaaattgatgcaaccctcttgaaaagcaatctggcaatatgaaccaagagccatga

SEQ ID NO: 896771 - DNA, 120 bp, Artificial Sequence
  ENSG00000223646_3 (sequence is synthesized)
taaatggctgtaatgttggctgtaaatatgaaattttctttcacacaccaatgttttcaagaatggcatattcacatgcagtatgtgacattgcttggtgaagttccaaaaatacatggc

SEQ ID NO: 896772 - DNA, 120 bp, Artificial Sequence
  ENSG00000223646_4 (sequence is synthesized)
aagagaagaattgaagagcaaagaattcatgcaaaactggtttcagcaagtacaactatggtccaagggaactatgcccatttctccttcatgcttacaggatcccattagttcaacttc

SEQ ID NO: 896773 - DNA, 120 bp, Artificial Sequence
  ENSG00000223646_5 (sequence is synthesized)
agtttttcttagttcctattactaagacttctttaacttatactatgtagatttagttttaactctatacgcagaagttgaaacttattcagcatgaattaaacatttattaagtacgca

SEQ ID NO: 896774 - DNA, 120 bp, Artificial Sequence
  ENSG00000223646_6 (sequence is synthesized)
catagaggaattggctttgggcagatggaaggacctcagagaaaagaaacaaaggaaagaaaactggatggataaaggtttgtagaaatactattcacaggaagcaaataggaattcctt

SEQ ID NO: 896775 - DNA, 120 bp, Artificial Sequence
  ENSG00000223646_7 (sequence is synthesized)
atcgctaaacagacactaagtcaattggttattgctggtgaaaaggatgtttaagcagagtgagagactctcagcaaaaaaaggtaactgaaagagtggtaagtcagacaaagaagaaaa

SEQ ID NO: 896776 - DNA, 120 bp, Artificial Sequence
  ENSG00000223646_8 (sequence is synthesized)
atgccaaagaagagggtcaagaacaactcatatgactccgaaatcccttacccacattggagttataaaaagttcaggagctggagacaaaaggcaggttcataaagaggattccttgga

SEQ ID NO: 896777 - DNA, 120 bp, Artificial Sequence
  ENSG00000223646_9 (sequence is synthesized)
tatgacagatgaaagaagcagtaaaggatgctaacaaagctatttctttggacaatctgaacctgacggagtcttactctgtcgcccaggcaggagtgcaatggcacaatcttggctcac

SEQ ID NO: 896778 - DNA, 120 bp, Artificial Sequence
  ENSG00000223646_10 (sequence is synthesized)
ataaaggtacaaagaaatttggagtagagctgaattgcatccccctcaaattcatatgttaaaattctgatcctcaatacctcagaatgtgactgtttctgaagacagggcctttaaaga

SEQ ID NO: 896779 - DNA, 120 bp, Artificial Sequence
  ENSG00000223646_11 (sequence is synthesized)
tgtaattaaggtaaaaaagtcatatcggtgggccctaatacaacattaaggatgtccctataagaagaggagattagaacacaggcatgcacagagagatgacatgtggagacacaagga

SEQ ID NO: 896780 - DNA, 120 bp, Artificial Sequence
  ENSG00000223646_12 (sequence is synthesized)
aaaatgaccatctcgtcaaggtgaaaagccttttgaagaaaccaaccctgccaaaggttaaaattccctgtggaattttaagcttcacagatatgaggaagtaaatttctgttgcttaaa

SEQ ID NO: 896781 - DNA, 120 bp, Artificial Sequence
  ENSG00000223646_13 (sequence is synthesized)
gcaaattaggaccagaaccaaggtctcctgacctaagtgctactcccaccatactacatgatctgctgtttaaaattttgcaaatccatcgctggtaaggagatggaaaataagaaagaa

SEQ ID NO: 896782 - DNA, 120 bp, Artificial Sequence
  ENSG00000223646_14 (sequence is synthesized)
ggagagagaaaacaaccacatggaaaagctctccaggaagagaatcaatagggtttttcagctgcttcaaaaaagcatctatagcatcctgtgcaagctggagtggttgctgaagctaat

SEQ ID NO: 896783 - DNA, 120 bp, Artificial Sequence
  ENSG00000223646_15 (sequence is synthesized)
ggtatcccattgtatcaaggatgtaccacagttggtttatccatatacacctgtttatggatatctgggttgtttctagttttggttattacatttcaagctgctgtgagtattcccata

SEQ ID NO: 896784 - DNA, 120 bp, Artificial Sequence
  ENSG00000223646_16 (sequence is synthesized)
atagaagccaaagaagtagacagaaaataaatcaatccactctgctcaaagagcacacagtctaatgaagatgatgaacatgaagtcaacttcgtagtgttgagagcactgtttctccag

SEQ ID NO: 896785 - DNA, 120 bp, Artificial Sequence
  ENSG00000223646_17 (sequence is synthesized)
agcagcacttctcatcaggggctgcacgttagacttacctggggagtatacataagttcagatgcccaggctgtacttcagaatctctggagctctatgcaactcattttcatctagcat

SEQ ID NO: 896786 - DNA, 120 bp, Artificial Sequence
  ENSG00000223646_18 (sequence is synthesized)
gggcaggagcaatgaagggaagaaaggcttcaactgacccctcgacctgaaggcccacagccgggaacaccggcaaggagaacacaagagaatgcacgggaaaacacaagtcaaaaacaa

SEQ ID NO: 896787 - DNA, 120 bp, Artificial Sequence
  ENSG00000223646_19 (sequence is synthesized)
tccatattactttgtaacctgttcccctatacttgccttatgttgaagactttagttggtgaccacccttgaatgccagaaatagcaagttatttattgttaaacatatacatgcatgta

SEQ ID NO: 896788 - DNA, 120 bp, Artificial Sequence
  ENSG00000223646_20 (sequence is synthesized)
gctgaaaacttcataatgaaaccagaaaatcacagaagcataaacacagctgcttatgcctataaaatgagaaaattgaagccaacagaagttaactaacttgcctaaaataacacagct

SEQ ID NO: 896789 - DNA, 120 bp, Artificial Sequence
  ENSG00000223646_21 (sequence is synthesized)
gtggccacaccaatggtagacagcagaaccagatttcaaaccagctttttctccagcattattcttcatgagaagaataattaaacttattgtgtaataaagtgtgtttttaaggtataa

SEQ ID NO: 896790 - DNA, 120 bp, Artificial Sequence
  ENSG00000223646_22 (sequence is synthesized)
gcctgggcgacagagcgacactccgtatcaaaaaaaaaaaaaagaagatggaggagcagcagtaaggcttatcaacggaaatattcgtactgatgagcatagaggaagaggttttgtttg

SEQ ID NO: 896791 - DNA, 120 bp, Artificial Sequence
  ENSG00000223646_23 (sequence is synthesized)
actgatgagcatagaggaagaggttttgtttgcttgtttaagaatccagggtggcagcagcaggccctgcttttggggtagaggtggccagctagaagggcattgtaccttccctgggtc

SEQ ID NO: 896792 - DNA, 120 bp, Artificial Sequence
  ENSG00000223646_24 (sequence is synthesized)
tatgtgatgaaagaagcagtaaaggatgctaacaaagctatttctttggacaatctgaacctgatgagaaaattgaagccaacagaagttaactaacttgcctaaaataacacagctgtg

SEQ ID NO: 896793 - DNA, 120 bp, Artificial Sequence
  ENSG00000223646_25 (sequence is synthesized)
agttatagatatgaatctacaagtattggagtctgcctgttgaggttccattgagtgtaaattcaatcctgtggatctggaaaagattatgggatataaacagatggaaccaagggacag

SEQ ID NO: 896794 - DNA, 120 bp, Artificial Sequence
  ENSG00000223646_26 (sequence is synthesized)
aagcctgggaaaagtgatcaggcctggagatgcacaagcaagattttggagtttacaccaaagtgagaattaatgattaaattatgaacttggagagaaaaatgagattctgaagtttgg

SEQ ID NO: 896795 - DNA, 120 bp, Artificial Sequence
  ENSG00000223646_27 (sequence is synthesized)
ttttgaaggcagaagtggcatctcttctgaaagaaaagataggaatgaatgaagagctaccttgccatgaagattcattaccttttctttgctcttttcttccttggccagctgtctacc

SEQ ID NO: 896796 - DNA, 120 bp, Artificial Sequence
  ENSG00000223646_28 (sequence is synthesized)
tcaggaactgaagatgcttatgaagtcattagtatcatggactgtaaaaatcaaacactgtgtaattctcagaatacaactagacactgctctcatgggaaggagattgaactatgtgtc

SEQ ID NO: 896797 - DNA, 120 bp, Artificial Sequence
  ENSG00000223646_29 (sequence is synthesized)
ttgcgtcttggaaaaaatgcaaagcgactcactaaccatgaagaaacagcaaattaggaagacaggatgatcaatttccttgtcttattaaaaaataaagtctgctttcttttctctctc

SEQ ID NO: 896798 - DNA, 120 bp, Artificial Sequence
  ENSG00000223646_30 (sequence is synthesized)
ggctgcccagaaatctgagagaaaataagacatgtaaagtcctgctcacccatgaaagtttctaaatacaggagctctgattctaaaatcatctccatttatattggtttatctttttaa

SEQ ID NO: 896799 - DNA, 120 bp, Artificial Sequence
  ENSG00000223646_31 (sequence is synthesized)
gacactttgttgtttcagagctaccttgccatgaagattcattaccttttctttgctcttttcttccttggccagctgtctacctcagtttatcttcttcagcaagttcttctttcagtt

SEQ ID NO: 896800 - DNA, 120 bp, Artificial Sequence
  ENSG00000223646_32 (sequence is synthesized)
cagaatatcctcaagcaggatgagcctggagaaaaactgtgaaattattggagtttacctttaaaaccataaaatgataagggcctgatagggttaagaatcaaaagaaaggaatggtgg

SEQ ID NO: 896801 - DNA, 120 bp, Artificial Sequence
  ENSG00000223646_33 (sequence is synthesized)
tttggacaaaagtttatcaaggaacttttcacgcttaggatgaattacaacaagaaccaacatttctttagttccagcagctctatgcaactcattttcatctagcattacctctccaaa

SEQ ID NO: 896802 - DNA, 120 bp, Artificial Sequence
  ENSG00000223646_34 (sequence is synthesized)
agtatgtggaggcctttgcttgattccatgcctttgtatgaaaatattttctgtagtacatgacaaacacataaccattatttgctcatatatgtctcccttactgcattatgagtcatt

SEQ ID NO: 896803 - DNA, 120 bp, Artificial Sequence
  ENSG00000223646_35 (sequence is synthesized)
cagaacagagaccatgtcttgtttatcactgtataccaagcatctgcagagggtaaagagtcgagatacattaattgatttccccttggaaataaaatgtaaaggaaaactatggaaaaa

SEQ ID NO: 896804 - DNA, 120 bp, Artificial Sequence
  ENSG00000223646_36 (sequence is synthesized)
acagctgcttatgcctataaagtaagtggtttacaagggaaagcctaatcagtagaatcgagtgtttagtcaattacattaacagtagacaaatagaaatcatatgtatttgacaggagg

SEQ ID NO: 896805 - DNA, 120 bp, Artificial Sequence
  ENSG00000223646_37 (sequence is synthesized)
ccattttaagaaactttgtatttgtatgctgcaaacataatgagacacttaaaaagaaatgtcatccattattcatgaatttgaataaaatacagagctctcttgaaaaaaatcagaaaa

SEQ ID NO: 896806 - DNA, 120 bp, Artificial Sequence
  ENSG00000281692_0 (sequence is synthesized)
agagacagaaacctgcggcaatggagaaaatgctaatacagacatcttacttcagtgtctggcaaacaagattatacactgaggacgatgtagacgtcagcttccctgacgagggaagct

SEQ ID NO: 896807 - DNA, 120 bp, Artificial Sequence
  ENSG00000281692_1 (sequence is synthesized)
gcagctttctgatgattcctgaagcctacattctattaatttccccgaagagccctattgcctaatggaacattgtgagaatggccagtctggaaagcaggatcagtggagctggcttct

SEQ ID NO: 896808 - DNA, 120 bp, Artificial Sequence
  ENSG00000281692_2 (sequence is synthesized)
ggctcactggctttcagctgagccttccaaatggctgggaatgaacatccagttagaagcctcggtttggaacagtggttctcagacttcatggtgtgtgacagtcactggggaacttgt

SEQ ID NO: 896809 - DNA, 120 bp, Artificial Sequence
  ENSG00000281692_3 (sequence is synthesized)
ccaaacacagattgacagaccccatcccaaagtttctgattcagcggctctagggagggccctaagaacacgagctcctcttcccaagctcccaggtgacgctgaggttgctgccccggg

SEQ ID NO: 896810 - DNA, 120 bp, Artificial Sequence
  ENSG00000281692_4 (sequence is synthesized)
agcccactttgagaactgctgatctagggtgtgctggggtaactctggctgtcagaggggtcaggacacttggtctccttctctttggtctcactgagaatgtgaatgtgaatggccttt

SEQ ID NO: 896811 - DNA, 120 bp, Artificial Sequence
  ENSG00000281692_5 (sequence is synthesized)
tgaggccacttgcactgagtcctctacagggcacactggacggcgggggagcgtctggaaggggtctgcacaccggcttgcagcctcagtgatgctcatctagtgcgggtcctgcgtggt

SEQ ID NO: 896812 - DNA, 120 bp, Artificial Sequence
  ENSG00000281692_6 (sequence is synthesized)
ccccagaggaacccagtgagaaatccggaggagacggacagagaggaggatgacttccttttgtattacaacgtcatgattacaaataatcataatagagtgcccattttaaagtggcct

SEQ ID NO: 896813 - DNA, 120 bp, Artificial Sequence
  ENSG00000281692_7 (sequence is synthesized)
tactgaatctactccacaaaagaactaggacgcacgtgtctatcccggtctctggtctcttgtccagcgatagcatcctccgggctgcgtgaactcagcttggggctgtgaagggacagc

SEQ ID NO: 896814 - DNA, 120 bp, Artificial Sequence
  ENSG00000281692_8 (sequence is synthesized)
cgtatatcttgtcaccgagggccaccgcaatggggagctgcacctgacacatttacatttcacaaagatatctgccactccgtggacacggaccagcaagaggcttggatgacctaggat

SEQ ID NO: 896815 - DNA, 120 bp, Artificial Sequence
  ENSG00000281692_9 (sequence is synthesized)
tctgatgatgtattctccatttcaattctagactgtgtgcaaacttcattctttcttctacgttctttagttatgactattacaggagaaaggaaaaaatcgaaggtgaaggaagcaaag

SEQ ID NO: 896816 - DNA, 120 bp, Artificial Sequence
  ENSG00000281692_10 (sequence is synthesized)
acagaaaggaaggacggtttggtggccagagcgaggtcttcccacgtcactcccgggacgtgtgctgacgcgttgctcctccgtcctgcagaacgccgtgggtcgtggcagcagctgcag

SEQ ID NO: 896817 - DNA, 120 bp, Artificial Sequence
  ENSG00000281692_11 (sequence is synthesized)
ctgtttcacaggctgtcctccctgtagactaagcatctactccgcgctatagggcaatgcgagacaaaaaagacccccgggagcttgccatccagctgaggaagcctaattagccacgct

SEQ ID NO: 896818 - DNA, 120 bp, Artificial Sequence
  ENSG00000281692_12 (sequence is synthesized)
tcctgtagcatacagtggtcactttctcctccatggaagtatgtctgggcccacgcaccccactgcttccagagcctccacgcgctgtgtgtcccccgtggcgctttgcttgccaccgag

SEQ ID NO: 896819 - DNA, 120 bp, Artificial Sequence
  ENSG00000281692_13 (sequence is synthesized)
ccctgcgtcttgagaactctgaacggtttgttgtagtcaagacactcggagatcctagagacgcgaaaagcaggaggggaacgtgtgacggccactgcgaggctcagggagaatttaatt

SEQ ID NO: 896820 - DNA, 120 bp, Artificial Sequence
  ENSG00000281692_14 (sequence is synthesized)
caaatttggatttttctcactcttacgctttggggcaatactgttaaatggtaaatatatagccattgtatgaacagcaatacacaaaggagttatttggaaatgaaagccttattgaag

SEQ ID NO: 896821 - DNA, 120 bp, Artificial Sequence
  ENSG00000281692_15 (sequence is synthesized)
ctaggaaaccaaagaaatactgaatctactccacaaaaggtacttggttggctgcttccccaggaacatccctccatcctcacgggtatcccgccatggacctcggggagccctggacaa

SEQ ID NO: 896822 - DNA, 120 bp, Artificial Sequence
  ENSG00000281692_16 (sequence is synthesized)
acatgcatgtgtgcgacgcttgtaacaaacctgcaaggttaccaagggcttcaacgacatttattctcccagcaagcaagtcatgagtgtgtcctgccttatctatggtggaaggaaagt

SEQ ID NO: 896823 - DNA, 120 bp, Artificial Sequence
  ENSG00000281692_17 (sequence is synthesized)
acaaataaatgtttcctttagattgctcattcaacatgcctgaagtgttgttcatttgataccgaatagatgaagtcatttatgaactctatctatactttttcgtaatgactaagaaaa

SEQ ID NO: 896824 - DNA, 120 bp, Artificial Sequence
  ENSG00000281692_18 (sequence is synthesized)
tcctaaataggcacgatttcaggaaggaagcccttctgctaattttgagaacgtcctggctgaagcggcagcatcgcactctcaaagggaacagcgagaccacaccggggaaggcagagt

SEQ ID NO: 896825 - DNA, 120 bp, Artificial Sequence
  ENSG00000281692_19 (sequence is synthesized)
tgtcaggtccacgggaggagagtcccggccccaacacgctctcctgcctgagatgcctgaagagctggaggctgttagaaggcaacgaaccaaacattctcccaggaaacactaacttgg

SEQ ID NO: 896826 - DNA, 120 bp, Artificial Sequence
  ENSG00000281692_20 (sequence is synthesized)
gaagcttgaattttatgatgcaacttgccaggctcagtaacaacaatggtttgtgttacttcctaggtacacaatagctagactgtagaactgactgtagaaattagcaactatctcaga

SEQ ID NO: 896827 - DNA, 120 bp, Artificial Sequence
  ENSG00000281692_21 (sequence is synthesized)
caaatacatgacgattatactgatagaacaacattcaccttagccgcagagagcatgagacattgactcaggcagactgactctctccacgcacccaaggctgaatgacagccataaaac

SEQ ID NO: 896828 - DNA, 120 bp, Artificial Sequence
  ENSG00000281692_22 (sequence is synthesized)
caaggctctgaaataaatagctgcggaggcctcgtggttcagccgcaccgccatcggtctagggctgtgctctggccgttggcatgtggagcatttgctgccaggcgtagccactttgca

SEQ ID NO: 896829 - DNA, 120 bp, Artificial Sequence
  ENSG00000281692_23 (sequence is synthesized)
cacatggcgcttgagtgaactcaggccagatccaagctctttccgtacccagcatttgtcggaatcaagccgactgcagaaatcgccttgccatgtgttccccactggggccaggtaatc

SEQ ID NO: 896830 - DNA, 120 bp, Artificial Sequence
  ENSG00000281692_24 (sequence is synthesized)
tcgctgaagcaacactgagtggaatttaaaaaaaaaatgctgacagaagaaatcaaatagtttctttctggaccagaaaaggcatatttttgattctcaaatgctgaactaaaaaatttc

SEQ ID NO: 896831 - DNA, 120 bp, Artificial Sequence
  ENSG00000281692_25 (sequence is synthesized)
aagagctttaaggcccaagtaaaaggattttcacctattaagacctgtaacctttgacgtcatcagtcacagctaaagctggctttcttctgattgggttgcagtgatgtcatccgctgt

SEQ ID NO: 896832 - DNA, 120 bp, Artificial Sequence
  ENSG00000281692_26 (sequence is synthesized)
ggtgagagagaaagcgagccctggcggcctggctcaggtcttggcaggtttgtgcaggtggaactcactgcatttattattatcatgtttcttgacgacactaagccatcacagattctc

SEQ ID NO: 896833 - DNA, 120 bp, Artificial Sequence
  ENSG00000281692_27 (sequence is synthesized)
tgttggatgattctgaataaattttccttttttttttttttgagacggagcctcactctgtggtccaagctgaagtgtagtggtgcaaccttggctcactacagcctctgcctcccaggt

SEQ ID NO: 896834 - DNA, 80 bp, Artificial Sequence
  ENSG00000281692_28 (sequence is synthesized)
gccaaatttttcctttgtgtttattggatttagtagttaaaagattgagatgaccaaaacagaaactccttgtttgtatt

SEQ ID NO: 896835 - DNA, 120 bp, Artificial Sequence
  ENSG00000281692_29 (sequence is synthesized)
aagattgagatgaccaaaacagaaactccttgtttgtatttactccttgttttttaagcagaaatgtcaattttagtgaaataaagctaaaaattttcaaaagaaatttattcaacagat

SEQ ID NO: 896836 - DNA, 120 bp, Artificial Sequence
  ENSG00000281692_30 (sequence is synthesized)
aacatattgctaaaaaaagtcattaacaataactcataatgtttgcgaatttagaaatggttgcttttgagtttttttaatatgaattaagaaaggggaaaaggaaagctacaggtatat

SEQ ID NO: 896837 - DNA, 120 bp, Artificial Sequence
  ENSG00000281692_31 (sequence is synthesized)
tttatcttttaagatatttacagtttcaatacctagattaaattgtcaccatttgttttgccagaaatgtgtttgtttgggttagcttggactgaatttactatatagaaatagtgttac

SEQ ID NO: 896838 - DNA, 120 bp, Artificial Sequence
  ENSG00000281692_32 (sequence is synthesized)
ctgttttagaataagagttttctccagtaaagtttagataattatagggaaacagctatgaattccaatctggtcttttctggaggtgaaggagtgagaaagaaaagaaagaggcagggg

SEQ ID NO: 896839 - DNA, 120 bp, Artificial Sequence
  ENSG00000281692_33 (sequence is synthesized)
aaaacctaggaccaaattcattttttttctttttaaacaatgagtaagagaagagccttttggggagaagccgtgaagttatctgcttttagaatcctaaagaaatgcttctttcactct

SEQ ID NO: 896840 - DNA, 120 bp, Artificial Sequence
  ENSG00000281692_34 (sequence is synthesized)
atttttttagctttgctatgtaactttgaggggactcaacttttctcccccttaaccataatgtgtgtttccccatttggaatcctgggtgtttctgtgtctgggccatgcttagccact

SEQ ID NO: 896841 - DNA, 120 bp, Artificial Sequence
  ENSG00000281692_35 (sequence is synthesized)
gcttccttggctgacttcatgttctcttggaaaccgaaggttccctacattcccttaaatacaaccttacaatggatatttccaaagtcttggttcatgggtgtgtgaatcaaagttgca

SEQ ID NO: 896842 - DNA, 120 bp, Artificial Sequence
  ENSG00000281692_36 (sequence is synthesized)
atggtttttcaaccaaaacttacaataaccacggcatctggcacgctagagatgcccaagggcttacccacttcaaatcttctcagatcttgttgacattaatgaaattcacaagatttc

SEQ ID NO: 896843 - DNA, 120 bp, Artificial Sequence
  ENSG00000281692_37 (sequence is synthesized)
tttcctctgaagataaaagctttgaagtaagcactcgattcccagctggatgtctcgttctctttctctcttcttgacaccgaaggctgggtcactaaagcactaggttactaagccatc

SEQ ID NO: 896844 - DNA, 120 bp, Artificial Sequence
  ENSG00000281692_38 (sequence is synthesized)
atatttccaaaagcttgaggaaacgttttcatcttctgaatggggccattggtcacctgaagagatcatgaatcttggcctaagagtcaattcaatatctaaatttccctcacatagaca

SEQ ID NO: 896845 - DNA, 120 bp, Artificial Sequence
  ENSG00000281692_39 (sequence is synthesized)
atgacaatttctaaacaattgtcgttgtccaactgcaaagtagattcatttatctatgaaatgtacaacactaacaatgggatcatactgatatagtgaaaagaatactggacttcaagg

SEQ ID NO: 896846 - DNA, 120 bp, Artificial Sequence
  ENSG00000281692_40 (sequence is synthesized)
caaatagcctgagatataattttcaataacttagtagctatactattcaataactcactagctatttaactatgggcaggttatttaacttctctgaatctcagttactgcctctgaata

SEQ ID NO: 896847 - DNA, 120 bp, Artificial Sequence
  ENSG00000281692_41 (sequence is synthesized)
ctgtctttgaacagacaggtgggccctgcatttccgggagctttggagggtatttaaaatactttcctctgacttggtttaaacagaataatgaacacctttctccacgagagcagcatc

SEQ ID NO: 896848 - DNA, 120 bp, Artificial Sequence
  ENSG00000281692_42 (sequence is synthesized)
tatttgtgttttccaaagcctgagtgtctccaaggaatcttaccttgggctgataattcttccctcaagacagcagtacctttgacacaggacacgctccaaagcccagcgcccctacct

SEQ ID NO: 896849 - DNA, 120 bp, Artificial Sequence
  ENSG00000281692_43 (sequence is synthesized)
aagtcagacaggagggcaaagcccagcgcccctgcctaagtcagacacgagggcaaagctcagcgcccctgcctaagtcagagatgagggcaaagcccagcgccctgcctaaatcagaca

SEQ ID NO: 896850 - DNA, 120 bp, Artificial Sequence
  ENSG00000281692_44 (sequence is synthesized)
ggagagcatagcccagcgctcctgcctaagtcagacaggacggcaaagcccagcaccctgcctaagtcacacacgagggcaaagcccaggagtatcactctgttgcccaggctggagtgc

SEQ ID NO: 896851 - DNA, 120 bp, Artificial Sequence
  ENSG00000281692_45 (sequence is synthesized)
cagccaacaaatgtcttttgaaggctgactaggcccagggcgtgcttcctggcgagggagatgtcatagtgaaaggcgctccctgctctcacagagctcacgccctagggtagagacaca

SEQ ID NO: 896852 - DNA, 120 bp, Artificial Sequence
  ENSG00000281692_46 (sequence is synthesized)
cggtaaagaaataagtgaaaaatcaagcatataggtactgcagtcagacactcgtccatgttttgaagcaagtaaagccataggcgacagagattaagaggtatggcgtcaaggaaggcc

SEQ ID NO: 896853 - DNA, 120 bp, Artificial Sequence
  ENSG00000281692_47 (sequence is synthesized)
cttctgaggtagcgacacttagcagagaccacagtgaggccaggggagggaggaggctcagtgaacactgtggggggcgtccaggcaccgctctgtggggaggatatgctgggcctgctg

SEQ ID NO: 896854 - DNA, 120 bp, Artificial Sequence
  ENSG00000281692_48 (sequence is synthesized)
ctggagcagggacgaagccagcacagcctctgcccacagaggggcccaacaccaccaggaagaaacagctcaggaggaaccagggccacatccttcaggccgcacatcacccgcagcaga

SEQ ID NO: 896855 - DNA, 120 bp, Artificial Sequence
  ENSG00000281692_49 (sequence is synthesized)
gatctggaatgtgccccagctgggaggcagaagccgttggagggttgagagcatggggaccttattggcgtttaaagggtcactgacttccgggtagaggatccggccaccccttgcaag

SEQ ID NO: 896856 - DNA, 120 bp, Artificial Sequence
  ENSG00000281692_50 (sequence is synthesized)
gttgggggtcagctgggggagccagggacctggactagagtgaggacgaggggctgggacttggtcagatgcagatcttgaaggtgtcgtagacaggatttgtactggactgggtgcaga

SEQ ID NO: 896857 - DNA, 120 bp, Artificial Sequence
  ENSG00000281692_51 (sequence is synthesized)
cgcggggagagggtgcggggtcggagagtggcgggagtcaggtgggtccatgcattcggtttggatcgatctcttcggcatcctgggggaaatgcccagcaggcgctggggaagttgagg

SEQ ID NO: 896858 - DNA, 120 bp, Artificial Sequence
  ENSG00000281692_52 (sequence is synthesized)
ccagagagcaaatgtgagaatcggccatgcacagacggcatgtgaatccgtgggattggtcgggtcacctggtggaaatagaggtgaggcagaggcttgagttgggaggcctgcggtgtt

SEQ ID NO: 896859 - DNA, 120 bp, Artificial Sequence
  ENSG00000281692_53 (sequence is synthesized)
tagaggtgaggaagaggagaaagacgcagcaaaggtgactgagaaggagcagtccgtctcagcatgcatgcacctcccacacaacacggcctgtccttactgcagtggccctcaggctcc

SEQ ID NO: 896860 - DNA, 120 bp, Artificial Sequence
  ENSG00000281692_54 (sequence is synthesized)
ctgggtggttgtcactaagcaggtggacggtacattctctcttctccttctctcaatggaagcactgccatttcttagatggaaattacaacatctgtaaatgccctcaaattatcttca

SEQ ID NO: 896861 - DNA, 120 bp, Artificial Sequence
  ENSG00000281692_55 (sequence is synthesized)
aaatactgtatgtcatgtgcacttgtctgggtagagggtgcagagtttccaacagattcttaaggcaatgctagggaatatttcccaataaattctaaataaaaaagaagctaaagtaat

SEQ ID NO: 896862 - DNA, 120 bp, Artificial Sequence
  ENSG00000281692_56 (sequence is synthesized)
aaatttttacacttatcaagcacaggaagagaacaaatcctttcacccagatttaaacttacagaaacttggcaaagtaaaaatgaataaagaatccaagtaccttacaaatattcccac

SEQ ID NO: 896863 - DNA, 120 bp, Artificial Sequence
  ENSG00000281692_57 (sequence is synthesized)
tggggaaagcaaaagtcaacctctgtaacagagaaatgcaaatcaatcaatgtgcaaagggcactttccaccacatatctgtccatgtcattaactactgataggagaattgggtaattg

SEQ ID NO: 896864 - DNA, 120 bp, Artificial Sequence
  ENSG00000281692_58 (sequence is synthesized)
ccaagttacttgtaagaagaaccgagctatatcagtagtgagatctaaaattggataagattgtgcaagcaaaaggaatagaatcatttcttattgaggcaaccatggaaagaatcttag

SEQ ID NO: 896865 - DNA, 120 bp, Artificial Sequence
  ENSG00000281692_59 (sequence is synthesized)
aaagtttcttctatagctactacacgcttctttaatatcatcaccagcacttgaactggagagcaaactagggtttgctagttagggtttcttcaaaacaaagcttgacttctgttttgg

SEQ ID NO: 896866 - DNA, 120 bp, Artificial Sequence
  ENSG00000281692_60 (sequence is synthesized)
atttccatgcagcttgcatgcatccacacatttaagactgcaaaagaaacaaagatgatgggagatatttttagaatcggattcaacaccggtacatatcttcctgttgcaaagtgctct

SEQ ID NO: 896867 - DNA, 120 bp, Artificial Sequence
  ENSG00000281692_61 (sequence is synthesized)
ttttagagcatttacataatttgcccaaggtcacaagacagctactcagtggtagaaagatacttcaaacgcagttctgctgggctcccactcctgcaccagaaccattatgctgtagta

SEQ ID NO: 896868 - DNA, 120 bp, Artificial Sequence
  ENSG00000281692_62 (sequence is synthesized)
tctatcatcgtgtcctcgcagtgacctgggaagagaggctgtactgcaggcgaggaaagacaaagtgactcgctccaggctgtccagctcctgagtgaccggctcagccttcccacccag

SEQ ID NO: 896869 - DNA, 120 bp, Artificial Sequence
  ENSG00000281692_63 (sequence is synthesized)
ctcccctaccctggcgtccaagatctcattccttgcctccctcttaactgacttgaacacctgaatggtgtcttcgagtaaatgtaacagtcataagaggacaaacaaaaacccttgcct

SEQ ID NO: 896870 - DNA, 120 bp, Artificial Sequence
  ENSG00000281692_64 (sequence is synthesized)
aatactcagtccccagtatttcccacttttcatcattccgttcctttagctgtcttagaaaggtggtttcagtgtataaatgtagcaggtggaagaagctgttgtcttgctcagaggccg

SEQ ID NO: 896871 - DNA, 120 bp, Artificial Sequence
  ENSG00000281692_65 (sequence is synthesized)
gaaagctgctgacatttcctccttctctgttgagttaatcagaaattatttggcaggagacccgggtattattttagaaggcagacgtaggtgggctgaccatcggaaaaagcagtcttt

SEQ ID NO: 896872 - DNA, 120 bp, Artificial Sequence
  ENSG00000281692_66 (sequence is synthesized)
tctaattctattaaaataacaaaaatgtgggttttggggttttattttgccttttaatttccagagaacatgatactatctatatagttattttgggtttttgcaaaattatcttctttt

SEQ ID NO: 896873 - DNA, 120 bp, Artificial Sequence
  ENSG00000281692_67 (sequence is synthesized)
cacaagaaactcaccattgcacgtaagaagcatcatattgtctgaggagttctcagatatatatatcgctctgcccgggtagagagtagtcatgttttgtacttgtttttctttgaaata

SEQ ID NO: 896874 - DNA, 120 bp, Artificial Sequence
  ENSG00000269318_0 (sequence is synthesized)
ccacccaaagtccctggggtttctctactggacagcctggcagaagaggccagtgccttagagaacagcaggtggggaggtgagggagggcagaagttggagggaccctggcaagggcct

SEQ ID NO: 896875 - DNA, 120 bp, Artificial Sequence
  ENSG00000269318_1 (sequence is synthesized)
ggactctgtcctgagtgatggaagaagccctaacccaggcccccaaggcgccaccagccatagcttcccaagcccaccggtgggaagcagaccaacgcatcgtgtgcccagctgcgcact

SEQ ID NO: 896876 - DNA, 120 bp, Artificial Sequence
  ENSG00000269318_2 (sequence is synthesized)
gccagcccctgcctgcccgccccgcagcgagctcaccatctcgtgaaggatgtcattggtcaggaagctgtcctggacgtaggccatctccacatccatggggatgccatagtcactggg

SEQ ID NO: 896877 - DNA, 120 bp, Artificial Sequence
  ENSG00000269318_3 (sequence is synthesized)
cctttgctggcagggacacagaccagtgagagaagcctcaccagcccgcagcccatggcagctggggacaattggcagtgcccgggctgggaacgggagagtgcacaccccggctcagct

SEQ ID NO: 896878 - DNA, 120 bp, Artificial Sequence
  ENSG00000269318_4 (sequence is synthesized)
ctgcaccgggatcggcacctggtggtgggaccagggaggcagtgtagcatccttactgtgggagaggcccagaggagagccagggccctgaaatgacttcccagggctgacctctgactt

SEQ ID NO: 896879 - DNA, 120 bp, Artificial Sequence
  ENSG00000269318_5 (sequence is synthesized)
cagggcaggattggggaatgaagccaggcagggtcaggaagggagccctctttgtactgagcagccaatgacacaacggaggccccacgcccaggacctcaccaaaatatgggcagggca

SEQ ID NO: 896880 - DNA, 120 bp, Artificial Sequence
  ENSG00000269318_6 (sequence is synthesized)
gcagtcacgtccccatttcatagatggagaaactggggccccaactctccagtggagcctggaaccaggggcccctgcctagtcgtgacccaaatgccccagtgctcccgggccccccag

SEQ ID NO: 896881 - DNA, 120 bp, Artificial Sequence
  ENSG00000269318_7 (sequence is synthesized)
gccccacctacctcgggaggaggcatcacccagaaaggtgagatcttggactcggggcctgggttgccagaatagtaaggggctggcgggagagagggagaggggttggccctgggaggc

SEQ ID NO: 896882 - DNA, 120 bp, Artificial Sequence
  ENSG00000269318_8 (sequence is synthesized)
tcggctggcccagcatcccccctccttgctccccccacagccccatcccgcgtacagcagagcagggcgaggcagggctggaagccattgctggagccctgcagccgcagctggtagtcc

SEQ ID NO: 896883 - DNA, 120 bp, Artificial Sequence
  ENSG00000269318_9 (sequence is synthesized)
atctgtgcgtcgatgtcctgcagagatggcagcgccgggctgtgtgggtggctgtggtaccagcccaccagggacaggccccgcaggaacaggctctggtagatctggggacagaggcgc

SEQ ID NO: 896884 - DNA, 120 bp, Artificial Sequence
  ENSG00000269318_10 (sequence is synthesized)
agctcagcgggcacaggggcctgaacggctctagtgagcttatgtggctggccagccctgaacgaattcctgctgtgtatcaggcctggggacacagtgatgaccaagacaggccctgcc

SEQ ID NO: 896885 - DNA, 120 bp, Artificial Sequence
  ENSG00000269318_11 (sequence is synthesized)
cccaccgccactgagtccagtgggagctggagagacagccaacaaggacctcttttaatataaaagatgcaccctgccacaaagccaggacaccaaagtcattttgttcactgctgtagc

SEQ ID NO: 896886 - DNA, 120 bp, Artificial Sequence
  ENSG00000269318_12 (sequence is synthesized)
ccaggacaccaaagtcattttgttcactgctgtagcccagcttacagaataatggtcgccacacagtaagcactcaacaaacagttaaaactaggctgggagcagtggctcacgcctata

SEQ ID NO: 896887 - DNA, 70 bp, Artificial Sequence
  ENSG00000269318_13 (sequence is synthesized)
gaaatctgtactcccatctactatggaggctgaggcaggaggatgttgaacctgggcagctgatgctgca

SEQ ID NO: 896888 - DNA, 90 bp, Artificial Sequence
  ENSG00000269318_14 (sequence is synthesized)
tgtggtggcgtgtgtctgtactcccatctactatggaggctgaggcaggaggatgttgaacctgggcagctgatgtccagcctgggcaac

SEQ ID NO: 896889 - DNA, 120 bp, Artificial Sequence
  ENSG00000281691_0 (sequence is synthesized)
aaatgccgccacagactttcactatgttctcttcactgtcaaatggagagtttgatatactaagcttactctcaatggacataataggaatataacaaactagaaaaaagggaaacatta

SEQ ID NO: 896890 - DNA, 120 bp, Artificial Sequence
  ENSG00000281691_1 (sequence is synthesized)
agatgttttagtgattaccagacaggtattcagtagttaacaaagccctgccaggtaggtagccatgtttaaaggcagaacaaattctataatgaagtccttggtactgtacttattcta

SEQ ID NO: 896891 - DNA, 120 bp, Artificial Sequence
  ENSG00000281691_2 (sequence is synthesized)
gtaacatcaattttaatatatacaaagctttttttttaaaaaaaagtcactcctttggaacaaaccactccttcaacctttttttaaaattgtacagacttgttccattttcatgaatat

SEQ ID NO: 896892 - DNA, 120 bp, Artificial Sequence
  ENSG00000281691_3 (sequence is synthesized)
ctagacttggtgagtgaagcaacctgattggcttccatccagctggtagcatcttgcaagtgataaaactccacgaaggcgaaaccacggcttacacctagagacagcattcagatatag

SEQ ID NO: 896893 - DNA, 120 bp, Artificial Sequence
  ENSG00000281691_4 (sequence is synthesized)
acgggatacttgtgttagtcagttcctttataacaggtgaatctctctcccactgcttcaacactgcgtgacaaagccaattgggaagcagctttacaaatgtgacttgacttggggatc

SEQ ID NO: 896894 - DNA, 120 bp, Artificial Sequence
  ENSG00000281691_5 (sequence is synthesized)
gcttaaagtaaccatgcaaccgactatagtcaaaaaaaaaaaggagtttataaatcattacttacctaaggaaaaaaaagtccctaaaacaaagtttaaaaaagttcctcagatgctaac

SEQ ID NO: 896895 - DNA, 120 bp, Artificial Sequence
  ENSG00000281691_6 (sequence is synthesized)
atggttttcaaagagtcacattccttagccatggcaaacctttcattctgaattcatgtgcttgaagactgggggaatcaggatgttctttagggactgaggtgggaatggggaagagaa

SEQ ID NO: 896896 - DNA, 120 bp, Artificial Sequence
  ENSG00000281691_7 (sequence is synthesized)
caataatatcaggaactaagcaagctctcacctgttttcctcttcatcagcctcacatccgcaggctgagggccttcgaaggactccatcatttctcgaatctgcacagggttttacatt

SEQ ID NO: 896897 - DNA, 120 bp, Artificial Sequence
  ENSG00000281691_8 (sequence is synthesized)
atttacagttaaagcttttgccacacactattccccatggaataggaattacatcaactgtttaattagccaagttttttttttttttaagatgggagtctctgtctctcactcacttga

SEQ ID NO: 896898 - DNA, 62 bp, Artificial Sequence
  ENSG00000281691_9 (sequence is synthesized)
accaccatgcgtgactacgtgatctcggctcacttcaacctccacctcctggattcaagcga

SEQ ID NO: 896899 - DNA, 120 bp, Artificial Sequence
  ENSG00000236838_0 (sequence is synthesized)
aaaacaccctcaaggatgggcactgcacagactgtaacaacaaggaacgtggctttgcatcctcccagcaacaaagtctaccacggatcccaccccactctgatttcggctcagccgaga

SEQ ID NO: 896900 - DNA, 120 bp, Artificial Sequence
  ENSG00000236838_1 (sequence is synthesized)
gccatcatggcactttgggaggcctgtcacgagttacacaggcctaggctgcccacaccccagctcagcagaaaaagagaactgcaatccaagtcagacagatcctgcctggactctccg

SEQ ID NO: 896901 - DNA, 120 bp, Artificial Sequence
  ENSG00000236838_2 (sequence is synthesized)
cagagagcctggagagtctgaccagcaaagaaacagcaatcttcctacctaccccactctcaatcccccccaccccaatccaggctcccgaagaagaaaaacaaacaacaacagagcagg

SEQ ID NO: 896902 - DNA, 120 bp, Artificial Sequence
  ENSG00000236839_0 (sequence is synthesized)
gagggccaatcttctttactcggtctgatactgactcaaatcctaatctcttccagaaacatcttcatagatgaacccggaaataatgttttactagccatctgggcatcccttagccca

SEQ ID NO: 896903 - DNA, 120 bp, Artificial Sequence
  ENSG00000236839_1 (sequence is synthesized)
tcatctctttgccttctgagttctcactcattccctgctctggtccacccagcaggagtccacatggccagcatttctattgagtttacgcagactcacagaaaggaaccactgatagga

SEQ ID NO: 896904 - DNA, 120 bp, Artificial Sequence
  ENSG00000236839_2 (sequence is synthesized)
aggccacgggcactgttttaatggtggaatcattccacatctgtgaataaaatgctacagaacctttagggctagcagccgtctcagaggacttctgatgcaatctttctcctatggact

SEQ ID NO: 896905 - DNA, 120 bp, Artificial Sequence
  ENSG00000236834_0 (sequence is synthesized)
gtgtgctcagcctcagagccgtaggcgagagcgcctgtctgcatgagtgagcatatgggtgtttttgagtctgtgggtgtcacagagaggagatcgggagctgcctgctcacaggcactt

SEQ ID NO: 896906 - DNA, 120 bp, Artificial Sequence
  ENSG00000236834_1 (sequence is synthesized)
tgggaccccgaaagaaaaggctgtgccgagagagttcttccagtcagaggtgtcatgaagactggacatgggcctatcagggccatgggcatgatgtcagccaaggaactcgcggcctgc

SEQ ID NO: 896907 - DNA, 120 bp, Artificial Sequence
  ENSG00000236834_2 (sequence is synthesized)
ctctgccaagagaccagcatctcggcctgagcactcccagcctcccatcgccttcaacctggctgcattcagctgccatgcccctacctccttgtgtggtcagcaccctccaggacttca

SEQ ID NO: 896908 - DNA, 120 bp, Artificial Sequence
  ENSG00000236834_3 (sequence is synthesized)
tcttgggtcacccaaaggccgaggacattgctggccagcaggaaattcatggtgcatccaggaagacttccaagaggtggtggagcagggggcgccacacccagacagctgtgtgtaatt

SEQ ID NO: 896909 - DNA, 120 bp, Artificial Sequence
  ENSG00000236834_4 (sequence is synthesized)
tgctggccgccaaggcctatgtgcctggaaaccagcagggctgctgcaggaggagggctgcagaatgctccagctcagacctgactcagggttttagagggcatagggcataaggctgtg

SEQ ID NO: 896910 - DNA, 120 bp, Artificial Sequence
  ENSG00000236834_5 (sequence is synthesized)
gacatagacagccctactgcgcaggaagagcataaaccagccggagggcatgcatgtgggctgctgttagattctgttctcctttgaggtagggaaggatgtgtttctattttatggatg

SEQ ID NO: 896911 - DNA, 120 bp, Artificial Sequence
  ENSG00000236834_6 (sequence is synthesized)
agcaaactgaggcagagtgctggagtgatttcccccagcaacgatggcagatttagctccagggcttagattttaggatcctccctctcaaataccatgatgtatcatgggctttctctc

SEQ ID NO: 896912 - DNA, 120 bp, Artificial Sequence
  ENSG00000236834_7 (sequence is synthesized)
cacagaaaattagaaactcagaaatggaaagggaacaatgaaacttacccattctcccactgctcacatttccttctggtttttttgcgtgtgcatataaaatatatctcagaaaattga

SEQ ID NO: 896913 - DNA, 120 bp, Artificial Sequence
  ENSG00000236836_0 (sequence is synthesized)
taacagatccacccactttggagaccagtcctggcagctgctacaacctgactcagaaacttcttgataatacttgagcagtttcccagtactacagcaagtactgcagggtcctgagga

SEQ ID NO: 896914 - DNA, 120 bp, Artificial Sequence
  ENSG00000236836_1 (sequence is synthesized)
agcttgattgacaagtgagtcatcaggaccatctgacgccaggagggatacattcatttgcaagtaaactattattacaatcatcggactttatactaatagattttgaatgacatggtc

SEQ ID NO: 896915 - DNA, 120 bp, Artificial Sequence
  ENSG00000236837_0 (sequence is synthesized)
aagttctattaatacatgagagtttgacttttgaatgtcagactttatagtaattagataagactcagctgctttttggctgactaccaaattttaatctctgtgtttgttttccgccct

SEQ ID NO: 896916 - DNA, 120 bp, Artificial Sequence
  ENSG00000236837_1 (sequence is synthesized)
ttggcccactttctctgacagccagcattctgagagacaagtggtagaagatacctgggggtctcactattttacatttctacgttaatcgattaaacttcctgagtttgggctgaacac

SEQ ID NO: 896917 - DNA, 120 bp, Artificial Sequence
  ENSG00000236837_2 (sequence is synthesized)
taaagaaaagaggtttaattggctcacagctctgaaggctgtactggaagcatgcctgggaaggtctcaggaaactcacaatcaagacagaaggtttttctataatgtaccaccagcaac

SEQ ID NO: 896918 - DNA, 120 bp, Artificial Sequence
  ENSG00000236837_3 (sequence is synthesized)
tataatgtaccaccagcaactatggtgatgacagcttttggaacatcctttcattatttcaaaagtaaataatcgaatatggtttaattacttgagcctcaacaacaacaaagaagaaca

SEQ ID NO: 896919 - DNA, 120 bp, Artificial Sequence
  ENSG00000236837_4 (sequence is synthesized)
taggttcctggctttttttgtttgttttttgagactgaaacttttggggaaactctgtgtatagtcacatagaatacagtgcaaataaagtaataacttgaccccaaacagaaacttcaa

SEQ ID NO: 896920 - DNA, 120 bp, Artificial Sequence
  ENSG00000236833_0 (sequence is synthesized)
cggccttttacacagcacagcacccagccctcggcagcccagagcaggaaccaacagggtaggtgcccaggggccccaaaggtcagagttcctcgcacagctgccagggagcacagggac

SEQ ID NO: 896921 - DNA, 120 bp, Artificial Sequence
  ENSG00000236833_1 (sequence is synthesized)
cgcagcacagggtcttctgctcagcaccgggaccccgctcgctgcagctaaagaaacagatacgtccaagggctccacggccggggccgggcacctggaacagggtggtcctggggcggc

SEQ ID NO: 896922 - DNA, 120 bp, Artificial Sequence
  ENSG00000236833_2 (sequence is synthesized)
cacatccactccttccagctaacacttcacagagatgtctgactgatgtccactgctcagctgcacccctgagctggtgagcattcaggtagagcacccacctctacttttctcaccccg

SEQ ID NO: 896923 - DNA, 120 bp, Artificial Sequence
  ENSG00000236833_3 (sequence is synthesized)
aaaatcagagactggttctcagctggtgcagccaccgccccagcgtaccggatgcaggactttccctgcgaacactggacagtcccagcaaagcagacggtgggtcgctctgtatctctg

SEQ ID NO: 896924 - DNA, 120 bp, Artificial Sequence
  ENSG00000236833_4 (sequence is synthesized)
aagaacagctgggcctgcgtgtgtcattctcaggcatctggcccagggcttctcctccaggaaggtggctgctcagctccgggcactgccaggggccacggaccccgcctcctttccagg

SEQ ID NO: 896925 - DNA, 120 bp, Artificial Sequence
  ENSG00000236833_5 (sequence is synthesized)
ctgttccacagcatctgccttcatactcacagccaccgcggcgtgcgtcccagggattctcagaatagaattctgtgcctctctcgcctctggaagtgaccgcgctctgtaggaaaatat

SEQ ID NO: 896926 - DNA, 120 bp, Artificial Sequence
  ENSG00000236833_6 (sequence is synthesized)
tggctctaaactgctctaagtatgtcagttacttagaacaatcagaaaggggcagaacaagctggggtgtggagtcaggggtcagggcacagacagcacctcttgtcttgcagagagaat

SEQ ID NO: 896927 - DNA, 120 bp, Artificial Sequence
  ENSG00000236833_7 (sequence is synthesized)
gctagcaatttgcaagttacttgaaaaggtttgtgattttccaacgccctgagtaattctagccaaaatgcgtgactcgcctcacactagatgcttgctgtaattgtgtctctgtattaa

SEQ ID NO: 896928 - DNA, 120 bp, Artificial Sequence
  ENSG00000236833_8 (sequence is synthesized)
actgaccgttctttggagcttcagaatggaccaggaggaaaaggtaaataccaacctcgctacaacctcagaggcatcaacgccctcctgctacagacgcatctgttctcgcctggctcc

SEQ ID NO: 896929 - DNA, 120 bp, Artificial Sequence
  ENSG00000236833_9 (sequence is synthesized)
tgccggctgccctgggagaggccacaaaatgccctccacggagacaaggcctgagaaccttcgggacgcccgctgccgctcactgtgttgaagaactgcccgttccgcaccccgggccct

SEQ ID NO: 896930 - DNA, 120 bp, Artificial Sequence
  ENSG00000236833_10 (sequence is synthesized)
agacacacggctctgtggaggacgaggaagtgccgtcaggtgagacttcaccgtgaaatatcttctgagacacaacaatctccctgaattaaaactacagactctaatttataaaaactg

SEQ ID NO: 896931 - DNA, 120 bp, Artificial Sequence
  ENSG00000236833_11 (sequence is synthesized)
tgtgtttcaaaagctccaagtgtttacattctccgattcatcattccttcttctaatttattttaggaaataatgcaaagtactcacaaaaatttatatagaaagatgttcattgcagaa

SEQ ID NO: 896932 - DNA, 120 bp, Artificial Sequence
  ENSG00000234476_0 (sequence is synthesized)
cccagccccaaatgtccgtggaaccggccccactaacctgcatccagctgcctcttccacctgggccctgctctcagatggaagtgtcaccaaacacccagatcgccgtgctcctgcttc

SEQ ID NO: 896933 - DNA, 120 bp, Artificial Sequence
  ENSG00000234476_1 (sequence is synthesized)
tctgggttcaatgagaccctccacccagatgagcatgagcccagccagggtgggctgttcagtttcttccctgggaatctggagctggattgagctggtctgcaggaagccccagggctg

SEQ ID NO: 896934 - DNA, 120 bp, Artificial Sequence
  ENSG00000234476_2 (sequence is synthesized)
cagggctgcgacagcaggacgatgagctggcagagcttcgcacaggctgcctggaaactggcacagctgcattcatcagaagaaacagttgcagccgggtgtggtggctcacgcctgtaa

SEQ ID NO: 896935 - DNA, 120 bp, Artificial Sequence
  ENSG00000234476_3 (sequence is synthesized)
gttcaagaccagcctggccaacatgagtggacacaacctgaaaaccaactggactgagcatccttctcctaaaatctcagccagaagccacgatggagggtcctgggaagggaagagatg

SEQ ID NO: 896936 - DNA, 120 bp, Artificial Sequence
  ENSG00000234476_4 (sequence is synthesized)
gattctaaaaccttgggtctgcctgcaaacttctctctgatcccagccgagagctgtgcacacgctagctagccctgtcacacaatagcccagtgttcccgtcacagtgcctgggaatga

SEQ ID NO: 896937 - DNA, 120 bp, Artificial Sequence
  ENSG00000234476_5 (sequence is synthesized)
gaggcttttgaggccacagagctatgacaagtccccaggttgaattgactctgggaggacaaatttctgagagactcacgggacccttatccaggacaacctcacaaagatccctgaaac

SEQ ID NO: 896938 - DNA, 120 bp, Artificial Sequence
  ENSG00000234476_6 (sequence is synthesized)
tgagcttcctctgcttcgtgcatagtttgaggtataaactttccttgtgtctcggtcagatgaagtgaaggatgaatattatcccaggctaaagtaacgaaaagtccagaagccagcgat

SEQ ID NO: 896939 - DNA, 120 bp, Artificial Sequence
  ENSG00000234476_7 (sequence is synthesized)
gacagagatgtgtgtggaagaaggctgtgagcatttccatcaaaccctgtgagtttccgaagatcttatcccgaagatatgtgtttggccaataaaacactgaataaaaatccatcatgt

SEQ ID NO: 896940 - DNA, 120 bp, Artificial Sequence
  ENSG00000234476_8 (sequence is synthesized)
ggcagaggcagaatcagaccttataaagatgttttgaatagcggctgttctgggatcgcagcccagtgacagtgaatgctttctgagttctcggatgagaaggaacagagtgacagactg

SEQ ID NO: 896941 - DNA, 120 bp, Artificial Sequence
  ENSG00000234476_9 (sequence is synthesized)
accataactggccactgtggtgtgtgctcagctccagaccagcaccttatttggtggggggagagggttcaaggccccagcgagacagtgagtcctggtagggaaggaactctggccaag

SEQ ID NO: 896942 - DNA, 120 bp, Artificial Sequence
  ENSG00000234476_10 (sequence is synthesized)
ctgcaggctgtgcagtggagtgggttaggaggggccctcggggagggaagaacaaggagagagggaagtgagaggaaaggaggtttctccttcatctaaatcccaagtatacacccttct

SEQ ID NO: 896943 - DNA, 120 bp, Artificial Sequence
  ENSG00000234476_11 (sequence is synthesized)
aaggtctgttctggcccttccctagggagtgccttcccctctacctgccaggtcccatagataaggatgtcctcccctgcaggcgcctggcctccatcacagcatgcccactctgtgccc

SEQ ID NO: 896944 - DNA, 120 bp, Artificial Sequence
  ENSG00000234476_12 (sequence is synthesized)
gctgcaacctcctctgactctcccactagaccggtgcctggtacacatgctcctgcgtgcatgaacatcggtcagctatgggtcctcaagatgacaaaaccccctgctcctgtgtcctca

SEQ ID NO: 896945 - DNA, 120 bp, Artificial Sequence
  ENSG00000234476_13 (sequence is synthesized)
cggggatctgcaccagcactgggctgaacactctccctgcaatctgtcagtcacgtcttctgtagcattttctttctggcaacaacggttggggtcattaaaagtgtctttgaaatgcaa

SEQ ID NO: 896946 - DNA, 120 bp, Artificial Sequence
  ENSG00000234476_14 (sequence is synthesized)
ctgcatccagctgcctcttccacctgggccctgctctcagatggaagtgtcaccaaacacccagatcgccgtgctcctgcttctctgggtaagcacttacagaggctacacaggtgcttg

SEQ ID NO: 896947 - DNA, 120 bp, Artificial Sequence
  ENSG00000234476_15 (sequence is synthesized)
ccaggttacgttaggctgtgccttctttccttgtggcccatgcacaggcctctggccagctctgtccgggtggcagctctcctggtgtccggcaagcttcctctgctcggactctgccag

SEQ ID NO: 896948 - DNA, 120 bp, Artificial Sequence
  ENSG00000234476_16 (sequence is synthesized)
tcaaagcccagccctggctcctggagtctgcagtgcaagtggcctcagaagcccagcctccctctgcagctgaaccctgcagcccttgtgtgagagtggacacaacctgaaaaccaactg

SEQ ID NO: 896949 - DNA, 120 bp, Artificial Sequence
  ENSG00000234476_17 (sequence is synthesized)
tgcggcatcgtctgggcagaggagctggggcgtttgccagaagtctccaacgggccatctggtcccagagagcagagcacacagcctcaagaaatacgagaaaggcggcaggggcagagt

SEQ ID NO: 896950 - DNA, 120 bp, Artificial Sequence
  ENSG00000234477_0 (sequence is synthesized)
cagaacagtggcccacactcctagaatttgagaaaatggcatcttcttcagaggacagaggtcaatctccagggcctggaatgtgcgcttcagttcgtggatgtcaccttgtctgctctg

SEQ ID NO: 896951 - DNA, 120 bp, Artificial Sequence
  ENSG00000234477_1 (sequence is synthesized)
cacagtggctggactggctgcctcctgggacatggctgcagactgtgggaccaagcaaggcaaaggcgtcagcattgggacctcatggaaatgcaacctttgggaagaccttaatcagat

SEQ ID NO: 896952 - DNA, 120 bp, Artificial Sequence
  ENSG00000234477_2 (sequence is synthesized)
cttccctgggacctgtatccaccttcacattgacattgaagtcacttggcacatgatgcttctccatttcctatttaataacagagaaaggaaatgaaccggctttgacaatcagaaggc

SEQ ID NO: 896953 - DNA, 120 bp, Artificial Sequence
  ENSG00000234477_3 (sequence is synthesized)
aagcccatctccattgaggtttctattttggttctatggtatgtttcagttctgaaatttccactggagtctttccatcttcttcattgagtcttctctatttttgcatttgttgtaaga

SEQ ID NO: 896954 - DNA, 120 bp, Artificial Sequence
  ENSG00000234477_4 (sequence is synthesized)
gtttattgaagcattgcttactgaagcatttttatgatgactatttaaaaatcattgtcaataagtaaaatagtgtaactggatgtttgtaacaccaaagatacatgcttgaggggatgg

SEQ ID NO: 896955 - DNA, 120 bp, Artificial Sequence
  ENSG00000234477_5 (sequence is synthesized)
acaccccattctccatgtgattattacacattgcatgcctgtgtcaaatcatctcatgtaccccataaatatatacatctatgtacccagaaaaataacaaataaaaagttaaaaaccct

SEQ ID NO: 896956 - DNA, 120 bp, Artificial Sequence
  ENSG00000250865_0 (sequence is synthesized)
aatccatgtcaaactaagaaaaaaagtcaggaaaaatcatcacatttcttgaatgcagaggaatttggggaccaaaacttgaaaggaaataaggaaaggagaactatgcagaaggagaag

SEQ ID NO: 896957 - DNA, 90 bp, Artificial Sequence
  ENSG00000250865_1 (sequence is synthesized)
gaaaggaaataaggaaaggagaactatgcagaaggagaagttgaatatgccttcaaaactgggacatgagagagtctggctctgtctcgg

SEQ ID NO: 896958 - DNA, 76 bp, Artificial Sequence
  ENSG00000250865_2 (sequence is synthesized)
catgatctgctgcacccggtgtccactgatgatattcttatggagagcctcagatgtgaactatcagcagttcaca

SEQ ID NO: 896959 - DNA, 120 bp, Artificial Sequence
  ENSG00000250865_3 (sequence is synthesized)
cttatggagagcctcagatgtgaactatcagcagttcacaacctgcttttgaagaaatgtgttctgaaagaggatctgggtgatccacctaagcatccaaaacaatgaagaactaccaga

SEQ ID NO: 896960 - DNA, 120 bp, Artificial Sequence
  ENSG00000250863_0 (sequence is synthesized)
gctcttgagctgcttgctcaaggcctttccttccctatggagtgtactttgtttaaatccctgccttcactgccttgctttgtttgtgtgttttgttcaattctctgttaaaaacgccaa

SEQ ID NO: 896961 - DNA, 120 bp, Artificial Sequence
  ENSG00000250863_1 (sequence is synthesized)
gaacctggacaactaccctaaacaggcaacaaaagcacaaagacgttgtacacaaaaatattttccttctgtatatctttattctagaagtttttttctatttatttatttattttttat

SEQ ID NO: 896962 - DNA, 120 bp, Artificial Sequence
  ENSG00000250863_2 (sequence is synthesized)
tttgattgttttttgccgttaacatttttttgttaaaaagtaagaccaaaacacacttgttagcctgggcctacacagggtcattaagacatcactaagcaacaggaattttttcagatc

SEQ ID NO: 896963 - DNA, 120 bp, Artificial Sequence
  ENSG00000250863_3 (sequence is synthesized)
cattataatcttatgggaccacagtgtatatgcggtctgttgttgaccaaaatattgttgtgtgacacattaatggggtgaggatattattctctattattatcttatgtaatttttaaa

SEQ ID NO: 896964 - DNA, 120 bp, Artificial Sequence
  ENSG00000250863_4 (sequence is synthesized)
tgccatcagataaaacacagaagggagcacagagctgcctggtcctgcagctctcctggagtgaggtggtgctgctaaccactggaagctgaagtccagaggctctattcagtcaagggg

SEQ ID NO: 896965 - DNA, 120 bp, Artificial Sequence
  ENSG00000250863_5 (sequence is synthesized)
tgatgaactctctttgggtctggagacaggctggaactgggatgagatatggagaccctgccatttacgacaacgtggatgtatctgcaggacattaagacaagtgcaataagcaagaca

SEQ ID NO: 896966 - DNA, 120 bp, Artificial Sequence
  ENSG00000250863_6 (sequence is synthesized)
cggaaagaaaatatagcatggtctctcttatatgtggaattttaaaaattaactctgaatactttggattaaactgattaaatgaagctgtaagcatctttgaagtacaaatgatacttg

SEQ ID NO: 896967 - DNA, 120 bp, Artificial Sequence
  ENSG00000250863_7 (sequence is synthesized)
ttgcaagtaaaatatgggaagtcaaagagattaaaggatgagaaccagaaattgcttatggccagtgtcctgagtaagcctcagaatcgcatcctagaagcatcaagttcttgtgttacc

SEQ ID NO: 896968 - DNA, 120 bp, Artificial Sequence
  ENSG00000250863_8 (sequence is synthesized)
ctatggatctaaaaaacgacttccttagtttgatgtagtctgcagacatctcatcatcacaaaaacttgaaagcacttacagcactaagaaactacctttgcagattgtaaaaaaagata

SEQ ID NO: 896969 - DNA, 120 bp, Artificial Sequence
  ENSG00000250863_9 (sequence is synthesized)
gaatcctacttagtgttttgatcacacctgcctatttccccaaggttttactgcagggttaaagaatgaataagcatctagttatatttaataaactccatgccttatggctgattctaa

SEQ ID NO: 896970 - DNA, 120 bp, Artificial Sequence
  ENSG00000250863_10 (sequence is synthesized)
aggcacatggctttgttacattcgcttgaagctctgctttattttctaaaaatggttgcttacagtggtcccttgcagcccatggtgatagtttatagggtgctatgttatttttgttta

SEQ ID NO: 896971 - DNA, 120 bp, Artificial Sequence
  ENSG00000250863_11 (sequence is synthesized)
cttgagtggatatttatacacatgcctctttagattcaggtgttttcattttttttgtcaggagtttggtatccatatgcagaaaaatgctgatgagtcattgcatttatctattgctta

SEQ ID NO: 896972 - DNA, 120 bp, Artificial Sequence
  ENSG00000250863_12 (sequence is synthesized)
gagagatgatgatgggtcataaacccagatatttaaacaaacaaccagaatagtttgttactttcaggcaagattcctgatcgttttgttgttgttgttgctgttgttgtttttcctgca

SEQ ID NO: 896973 - DNA, 120 bp, Artificial Sequence
  ENSG00000250863_13 (sequence is synthesized)
atgaaagaggcagcagaagggaatcagataaataaccctctcacatatcgtatttacttgtaatattgttatgccatcaagtagaacaaaaatcaatataattgctttatatttatcaag

SEQ ID NO: 896974 - DNA, 120 bp, Artificial Sequence
  ENSG00000250863_14 (sequence is synthesized)
gactgaacccagggtgtactagagagctaaaaatggcccaagagttattcctcattgaaattaaatggacaggcatttatacttctacctttatcattcaaggtatgtgggctatccctg

SEQ ID NO: 896975 - DNA, 120 bp, Artificial Sequence
  ENSG00000250863_15 (sequence is synthesized)
gaagaggatgatcttgaaccaggtgactttgcagctgaggtgatctctgaaggggatgagataaagaatgtctatgaagagctcttccagcagctggacaacaagtgtgcttttgaaaga

SEQ ID NO: 896976 - DNA, 120 bp, Artificial Sequence
  ENSG00000250863_16 (sequence is synthesized)
tctcaacaccaccctgtgaagtatctactcatatttcctgatttttccgatgagatactgaagcacacagtgtataataacttgcttgacttcacagttggtaagtggtaaatctgagac

SEQ ID NO: 896977 - DNA, 120 bp, Artificial Sequence
  ENSG00000250863_17 (sequence is synthesized)
tcatgcctagaaagttgcgttccagaatccacatggttaaccaccatgctataacagttgacataagctgaaacctggaagagtagaatggtcaattctcagcttagagcaatttgtgag

SEQ ID NO: 896978 - DNA, 120 bp, Artificial Sequence
  ENSG00000250863_18 (sequence is synthesized)
tactgtctgaccaaaccaattattacaaaatttatctggtttatagcaataataaaatacaggaattggttactgtaagatctggttctgaaaaaaagaaagcaagaaagaagccataca

SEQ ID NO: 896979 - DNA, 120 bp, Artificial Sequence
  ENSG00000250863_19 (sequence is synthesized)
tctggttctgaaaaaaagaaagcaagaaagaagccatacaaattaagagaaaaagatgtaaaaagtgataataaatattatatacatatacactaattgtatatcatatacactaattgt

SEQ ID NO: 896980 - DNA, 120 bp, Artificial Sequence
  ENSG00000250863_20 (sequence is synthesized)
caccaaattattaaagcagaattattaaaatagtagaaaatagctaatgaaataattataaaaatatgaaaatactgcatgaaaaagccacatcattacgtgttcactggtgaaatcttt

SEQ ID NO: 896981 - DNA, 120 bp, Artificial Sequence
  ENSG00000250863_21 (sequence is synthesized)
agaagttagaagaaaaatataattagcatattacattgtccatttcaaatcatgaaaacaatgtgagattaacaaattcatcatatacagttaatatctcaacatcaaacttgataattt

SEQ ID NO: 896982 - DNA, 120 bp, Artificial Sequence
  ENSG00000250863_22 (sequence is synthesized)
aattaaaataggaaactttatactgatttcatacatgtacataataaaacattcagatagaaatactaacaactagaattaaacatgatgcaacactacagaaagggtttgattcaagaa

SEQ ID NO: 896983 - DNA, 120 bp, Artificial Sequence
  ENSG00000250863_23 (sequence is synthesized)
tgcaagttactaaatcaataaaaaattattttatcaatgaaatatatgctcaaatgagtaccttaaaagacccatctcaagttttaaaattgagtttaatagcattagaatgatttttct

SEQ ID NO: 896984 - DNA, 120 bp, Artificial Sequence
  ENSG00000250863_24 (sequence is synthesized)
ttattaaaatatttgagataaaatttttattttgttatttttgcaaatgtatgggatacataagaatttttttatatgcatataatgctttgtgataagtcatatttagggtgtccatca

SEQ ID NO: 896985 - DNA, 120 bp, Artificial Sequence
  ENSG00000250863_25 (sequence is synthesized)
tccaagcacaatacattttaaagtatagttatcctactctgctatcaaacattgaatttaatccttctaacttactgcatatttgtaccctttaatctatttcttcatcgtctctgtcag

SEQ ID NO: 896986 - DNA, 120 bp, Artificial Sequence
  ENSG00000250863_26 (sequence is synthesized)
ccttcattctccccaatctgtgttacctatttttccactctctacctccacatcttcaaatattttagcttccacatataaatgagaatgtgatatttgtctttttgtgcctggcttatg

SEQ ID NO: 896987 - DNA, 120 bp, Artificial Sequence
  ENSG00000250863_27 (sequence is synthesized)
aaatcaaaattttaaaactttgtctttatattgagaaatgattatatgatttctgcttcaccattattatttaatataatttagaaattttgttctcatcaatgatagaagccagaaatt

SEQ ID NO: 896988 - DNA, 120 bp, Artificial Sequence
  ENSG00000250863_28 (sequence is synthesized)
aaattagaagtaataaatggtggaaagggagagataatcatattatagggagatgacattttatccctaggaacctaaaaaaagtcagccagaaatgagcttgaatttagtgacattgta

SEQ ID NO: 896989 - DNA, 120 bp, Artificial Sequence
  ENSG00000250863_29 (sequence is synthesized)
gataattttataaaagtcaatctgccagcaatactagataggaatgaaaatgagccatagagagtggacaagtagagatgtgagaaatccacattctcttgtaatggttagcacaggctt

SEQ ID NO: 896990 - DNA, 120 bp, Artificial Sequence
  ENSG00000250863_30 (sequence is synthesized)
cctgcaggatattgtccttgaactgaaagttgaatggaaaaagtaatacgcttcttgaaccaaaaaaggaagacatgcttagtaagagggaaaacaagtcaaactggccattcgactgga

SEQ ID NO: 896991 - DNA, 120 bp, Artificial Sequence
  ENSG00000250863_31 (sequence is synthesized)
tctctcttttcttactattgaattttttggaggttttggtaacactgctctcctttctctgactttcctgtagcattctcttctgtttattttacacatgatacattctatcaagttctg

SEQ ID NO: 896992 - DNA, 120 bp, Artificial Sequence
  ENSG00000250863_32 (sequence is synthesized)
cacagcactcctatcttaatactgttgaactttatattcaattatttggaattaataaatagatctgttattttgtaattaagtacaaatgagacactgtacatttctctaaatgtaact

SEQ ID NO: 896993 - DNA, 120 bp, Artificial Sequence
  ENSG00000250863_33 (sequence is synthesized)
caaagttttacattttcttcacttttatgagagtcctagatgaataaatgatagtctatactatgaataaacagggcctagttattcttagaatagtttcaatttaattctgttaccact

SEQ ID NO: 896994 - DNA, 120 bp, Artificial Sequence
  ENSG00000250863_34 (sequence is synthesized)
catgggtaaaaatgccttcatttttttttctttcctgtttttgacacagagttaaggatgaatgaattgaagatacctaataattattgtttctatttttcctacttcatatatttaaat

SEQ ID NO: 896995 - DNA, 120 bp, Artificial Sequence
  ENSG00000250863_35 (sequence is synthesized)
caggtgatacaccaagtaacattatttttctcccatctctttcaggcatagaacaatttctaaagtaacagtaaacgctaatgtttaaaataaattgtgtgtgtgtgtgtgtgtgcatgc

SEQ ID NO: 896996 - DNA, 120 bp, Artificial Sequence
  ENSG00000250863_36 (sequence is synthesized)
acatatgttttagccaagtaagtgaactgcaacctgactcaattccaaaaagattgttttggaaaccattaaaagaaatccaagtaccaaggaaggccttcaacatggtcacaagtctct

SEQ ID NO: 896997 - DNA, 120 bp, Artificial Sequence
  ENSG00000250863_37 (sequence is synthesized)
atcactactgtatttatgtggggccaaatagtgggtgttatggagtaaaaattttctttccccctaaattcatatgttgaaggtcaaaaccccagtgtgactattgagagatagggcctg

SEQ ID NO: 896998 - DNA, 120 bp, Artificial Sequence
  ENSG00000250863_38 (sequence is synthesized)
aagagacactagagtgatcgctcttgaccatgtgaagacacagcaaacaggtggcatgtgcaagtcaggaggagagccctcaccagaaacgaaatcagtggacaccttgacccatgagcc

SEQ ID NO: 896999 - DNA, 120 bp, Artificial Sequence
  ENSG00000250863_39 (sequence is synthesized)
accagaactgtgagaaataaacatctgctgtttaagccacctcatgtatgatattcggttatggcatcccaagaaaactagtacagtgggatattttaaaactcagctcttttaggaaac

SEQ ID NO: 897000 - DNA, 120 bp, Artificial Sequence
  ENSG00000250863_40 (sequence is synthesized)
actgaacaattaaaaagacaaaagagtatgtgtcacacaataatactgtatgtatcccatactaaggtcctaaggggacacataactatgtctttcaagaaaaaccccacctaccaactc

SEQ ID NO: 897001 - DNA, 120 bp, Artificial Sequence
  ENSG00000250863_41 (sequence is synthesized)
agtgagtagacatggacccactaataaatagagcagagatttaagagaggatagggcttaagctctaatgaagagtcacaaagatcacaaatccagaaacattttcacttctaaatggtt

SEQ ID NO: 897002 - DNA, 120 bp, Artificial Sequence
  ENSG00000250863_42 (sequence is synthesized)
tactgttccttaatttgaattttcagtccacatagacacagcatattaaaattatgcacaacacacatgcacctacgtagagaaagaaaaagagggagagaaagaatatatgtgattgga

SEQ ID NO: 897003 - DNA, 120 bp, Artificial Sequence
  ENSG00000250863_43 (sequence is synthesized)
cttttgggagaatacactttgtgtcaagcattgtacctatcatcaaacaaatactataaggaggcatcatccctatttttgaagatgataaactgagacacaaagatataacttgaacat

SEQ ID NO: 897004 - DNA, 120 bp, Artificial Sequence
  ENSG00000250863_44 (sequence is synthesized)
gattccactattatttgtgaactaaataacaacaattcattttcagttagaacatggaagcccacaacaataaaaatgaaccatttatgaacctcacatcacaaagatccatatctccag

SEQ ID NO: 897005 - DNA, 120 bp, Artificial Sequence
  ENSG00000250863_45 (sequence is synthesized)
aggttctgaaggatacatttggataagcggtggattattccaaatgaactttcttataaggcttcatctgacatttgtaattattagtagtcacaattatgaaaaaattggcttacaggc

SEQ ID NO: 897006 - DNA, 120 bp, Artificial Sequence
  ENSG00000250863_46 (sequence is synthesized)
tttaaaaaatttttttaaattaggaagggatcatctcactgagttacccagaacaaagtgaaaatttgtttgattgtattgtgtatggataccaaacaaaattgcctgattgtattgtat

SEQ ID NO: 897007 - DNA, 120 bp, Artificial Sequence
  ENSG00000250863_47 (sequence is synthesized)
atagaactggaaaacatgccaggaatggaggcatttatgaacaagctacttgtgtgcctctctctcattcctggtgtgtgcttatggcaactcagcttatttttggatctgctcacgatt

SEQ ID NO: 897008 - DNA, 120 bp, Artificial Sequence
  ENSG00000250863_48 (sequence is synthesized)
tctgcttctttacaacatttgctctctgtgaccccacatagtccccattgtatcccaaccctctcaaaatagttttccagctttatcttcgaatacaaattgcctcattatcttgatatt

SEQ ID NO: 897009 - DNA, 120 bp, Artificial Sequence
  ENSG00000250863_49 (sequence is synthesized)
tgctagatcaaatttaaacatcaaggagagtatgattagactatttgagctttttttgtattatgtcatatcgtaggactctgcctatcttatgcatcagccaccttcaaattatgtagc

SEQ ID NO: 897010 - DNA, 120 bp, Artificial Sequence
  ENSG00000250863_50 (sequence is synthesized)
ttctaatcaacggtggtcagaaaggagagggctagtggggaaaacaaaagcctaatgatagttatgtcttaacctgggtttgtaactattcattctgttatttgttcaacaacatttatt

SEQ ID NO: 897011 - DNA, 120 bp, Artificial Sequence
  ENSG00000250863_51 (sequence is synthesized)
aggtgcctactatgtttcagacattgttccaggctctgagttacacctgcggtcaaaatggacaaaatcttgatccagttgaggtgaaattgaagaagggagaaatgcacagcaaagaaa

SEQ ID NO: 897012 - DNA, 120 bp, Artificial Sequence
  ENSG00000250863_52 (sequence is synthesized)
tggatacataaatattcagtgtctcaggaggtaataggtcttctgggagaaatacaaagcaggatataacggaaatgtgatagggctgctattaatactattgctaaattaattagagaa

SEQ ID NO: 897013 - DNA, 120 bp, Artificial Sequence
  ENSG00000250863_53 (sequence is synthesized)
gacttctctgataaggtgatatttgaaaagatgcattaaggttgagatggaggaagccatataactatctgggagaatggtgttctaggtgtcctgtgatgtcagcacgctttggaaagt

SEQ ID NO: 897014 - DNA, 120 bp, Artificial Sequence
  ENSG00000250863_54 (sequence is synthesized)
ttggggaacagccaaggatgacaatgttactgtagcagagagcagcaggagaatgataaaaaatgaggtctataagggagtgaaattttaggccacagaaaggactttgaatcttacttt

SEQ ID NO: 897015 - DNA, 120 bp, Artificial Sequence
  ENSG00000250863_55 (sequence is synthesized)
tttagttgaaaattcgtttgagcatttgagcaaagtagtgatatcaactgatttatgtttttaaggaaacattatgagggctggctgtggaatatttagtaaaatgacaagaatgagaag

SEQ ID NO: 897016 - DNA, 120 bp, Artificial Sequence
  ENSG00000250863_56 (sequence is synthesized)
agggaatttctctttaaagtagctgtggataatgcaggcaaaatgattgatgtctatttcaattacacagatagtttgaatgattgactccagcatacaaagtaaaacaatctactgtat

SEQ ID NO: 897017 - DNA, 120 bp, Artificial Sequence
  ENSG00000250863_57 (sequence is synthesized)
tatagtgtaaacaaaatactctccgattttttagtaattcatattttaggaggatattaataataaccataaatatttatattcatggagagtgtttcttatattcttatgaagctcaaa

SEQ ID NO: 897018 - DNA, 120 bp, Artificial Sequence
  ENSG00000250863_58 (sequence is synthesized)
agctcaaaatttactatcatcagttagttccttttactaatgcattatgaagagttctgtgtgcactcccagtatgacctattcatttcatactcattaagaaattaatgtttttcaagc

SEQ ID NO: 897019 - DNA, 120 bp, Artificial Sequence
  ENSG00000250863_59 (sequence is synthesized)
aaatgttacaaatgaatgtttaatttagtggcaattaagaatgtatatttacagaacatttcttattaattaacacatggctaaacatagaaaagtttgaccttccactgtaactactca

SEQ ID NO: 897020 - DNA, 120 bp, Artificial Sequence
  ENSG00000250863_60 (sequence is synthesized)
cctgactctgcattattttcaaaaccaccggaacttgatccgacctggtcatgtctccctctgcaaacacattccttcctaatgaggtcctactccccaggtggtatgcagcaaattcag

SEQ ID NO: 897021 - DNA, 120 bp, Artificial Sequence
  ENSG00000250863_61 (sequence is synthesized)
ttctttgcatttttctgtacagtccaacacttaaacatccagctgattctgaggaaggcttaatatccagaagcaattctgataagcagctgttataaaatgccttcccattcctatttg

SEQ ID NO: 897022 - DNA, 120 bp, Artificial Sequence
  ENSG00000250863_62 (sequence is synthesized)
aaatgagcaaaatgagggacttacctcaaaatcaggtctttagtacaaacagtacatgtttagatgtacacatgagtgctagccctcagaatcacaaattagaggaaaaactccatattt

SEQ ID NO: 897023 - DNA, 120 bp, Artificial Sequence
  ENSG00000250863_63 (sequence is synthesized)
attttactagctttttcccgctttttttcctccttgggcttttcttctcattaaaaggcaagattgacatcaaatagtagcaaactatgttgtaaaatttttaccaaaccagtcaactag

SEQ ID NO: 897024 - DNA, 120 bp, Artificial Sequence
  ENSG00000250863_64 (sequence is synthesized)
tttctgaatgcgtgtgttcatcaaagactgggggaataaaacaggtcacagcctgctattggaagcttagcgaaatcatctgtgttcttcttcctcatcataattccccaaagaaaagat

SEQ ID NO: 897025 - DNA, 120 bp, Artificial Sequence
  ENSG00000250863_65 (sequence is synthesized)
tataaacatattctgctcatgttatacttaatcaaacattaattaaatacaatacctaaggctctgagtcccaactgtagaccataatggttttacagttcacttcaactctttaggata

SEQ ID NO: 897026 - DNA, 120 bp, Artificial Sequence
  ENSG00000250863_66 (sequence is synthesized)
aatagcctgccattaaaggcactagctgtgcttacaatttttttttaaattgtagtcattttgctaattatagagtcacggagaaataagagatagttttgtctactactttgtcatcac

SEQ ID NO: 897027 - DNA, 120 bp, Artificial Sequence
  ENSG00000250863_67 (sequence is synthesized)
taaacaatgttttctgggattttgaaattggtattttgtttgttatgcattagccatggataagagaattaataggaccatagttattttctcatgaatgttatgcattaatgttttgaa

SEQ ID NO: 897028 - DNA, 120 bp, Artificial Sequence
  ENSG00000250863_68 (sequence is synthesized)
aaggttatttgaggatgggtacttaagattgttagaactagtaagcaattaatcattgcagatttatgccataatgtacttaagtaacaacaagctttttttttcttaaatgttaattaa

SEQ ID NO: 897029 - DNA, 120 bp, Artificial Sequence
  ENSG00000250863_69 (sequence is synthesized)
gtatcctctcaatttatacaactctacgatgtttctataccactcatatggcccaacttgtatttaggcttacaactattttttatgagaatgagtaatgatttacatcttttatttgtc

SEQ ID NO: 897030 - DNA, 120 bp, Artificial Sequence
  ENSG00000250863_70 (sequence is synthesized)
attaaactgatgcagcagtcatccaagagatgtccacatatgtactcctgttaatgttagttcctttcatccaagccatcagaggttctccctggatctcatttttgggctctgaaaaat

SEQ ID NO: 897031 - DNA, 120 bp, Artificial Sequence
  ENSG00000250863_71 (sequence is synthesized)
catcaccccctcccccaccaccattcactgaatgtagccactggtcgtggctgccttttctgctattttatagaaccaagcctgaatctataaagcgcttcccttggtacctcccagaaa

SEQ ID NO: 897032 - DNA, 120 bp, Artificial Sequence
  ENSG00000250863_72 (sequence is synthesized)
tcaatattaatttccaggttcatagtctcacagcttgaacacaaactattcagacctttgaaattacctttatttctttacttccagagtagctgactttttcattctctgctggagcgt

SEQ ID NO: 897033 - DNA, 120 bp, Artificial Sequence
  ENSG00000228113_0 (sequence is synthesized)
cccagcacagagcagagtagaacagagtaggattggagctgagagatagtaagtaaataggcagcagaaatatgtcaagcaacaataccccatgtcagcattttacctatggatggcatt

SEQ ID NO: 897034 - DNA, 120 bp, Artificial Sequence
  ENSG00000228113_1 (sequence is synthesized)
ttctattttcggtgacggactatgagccaggataaacacattactctcttctttaacaaaaagagcatggttaactccaaagacttctctagaccagcctggatggtacctaaactttaa

SEQ ID NO: 897035 - DNA, 120 bp, Artificial Sequence
  ENSG00000228113_2 (sequence is synthesized)
tcaaccaatgctcaagtaaaagagcagtatccagccccagcacacctaactgttttgcataacatagtctctgatttcaggagcagaagaaaatatataagaagagatttacctgggtaa

SEQ ID NO: 897036 - DNA, 120 bp, Artificial Sequence
  ENSG00000228113_3 (sequence is synthesized)
tgctttcggcaaagcatccagtggtcaagccagtctgggaatcgacggtattttgtgcctcggtacagttgtagaatggcagcaataacaccagggaggtaaaccaaagcaagcagttgc

SEQ ID NO: 897037 - DNA, 120 bp, Artificial Sequence
  ENSG00000228113_4 (sequence is synthesized)
tcctgactggagagcccaggctgagatggtgttaaatgcttttaccacgtgggctcctggcaccaaatgagcaagatctcaccccacaggccttggaaacctgaggcagtattcttctgg

SEQ ID NO: 897038 - DNA, 120 bp, Artificial Sequence
  ENSG00000228113_5 (sequence is synthesized)
gatgtttccaactaggcttcccatgaggatgttagagccagcctggctggtgaattttacttctctcacctctcagaggtaagaggtctgagaggctcaggcccttccagcttttgagga

SEQ ID NO: 897039 - DNA, 120 bp, Artificial Sequence
  ENSG00000228113_6 (sequence is synthesized)
gagattttcaagcacatctaggaagtatttcaaaaggtaatttaggaaaaatttcaaaagataatctttaggcccttcacatgctcctatcttccaggttctggaagcagctatcgcaag

SEQ ID NO: 897040 - DNA, 120 bp, Artificial Sequence
  ENSG00000228113_7 (sequence is synthesized)
tgcttaaatgttcctcctgtgactctgtgactgtccaaagtccctgtttccagttcagctttctttgaaaagcccttgagctttaatatcaccatcatgcctcattaaaactcctattca

SEQ ID NO: 897041 - DNA, 120 bp, Artificial Sequence
  ENSG00000228113_8 (sequence is synthesized)
ctgggtgcagaagactgcttattactgaaagtaatttgactaaaacataaatactgcaaaatctgtctacatacgtctctttgaaacaacctgaactcttctctcaatataaaattgagg

SEQ ID NO: 897042 - DNA, 120 bp, Artificial Sequence
  ENSG00000228113_9 (sequence is synthesized)
caaccattccacccagaagattttttttcccagaactaataatcccatccccgttgctggtgattaacttaataacgagcatgacaatcaacaaacagattgaaaaggcaacctactcag

SEQ ID NO: 897043 - DNA, 120 bp, Artificial Sequence
  ENSG00000228113_10 (sequence is synthesized)
aatgggagaaaatatgaaaccatataccagagatgaaagtaatatccagaatatataaagaattcctacaacttgataacaaaaacaccccaatctaaaaatggacacagaatttaaata

SEQ ID NO: 897044 - DNA, 120 bp, Artificial Sequence
  ENSG00000228113_11 (sequence is synthesized)
gacatttctccaatgaagatggccaccacacatgtgaaaagatgctcaacatcactaatcatcaagggaaatgcaaatcaaaaccacaatagcacaatgagatatcatttcagaccccgt

SEQ ID NO: 897045 - DNA, 120 bp, Artificial Sequence
  ENSG00000228113_12 (sequence is synthesized)
attccgcagagtcccagcacagagcagagtagaacagagtaggattggagctgagagatagtaagtaaataggcagcagaaatatgtcaagcaacaataccccatctggaataaaagcac

SEQ ID NO: 897046 - DNA, 120 bp, Artificial Sequence
  ENSG00000228113_13 (sequence is synthesized)
catgaatgcaggaattttgccaacttctggcacagagatggctttcaaaatctatttggtgaatgaatgaatgaattgcattttcttcctaaatttcacaattgagcggtcctaatctgc

SEQ ID NO: 897047 - DNA, 120 bp, Artificial Sequence
  ENSG00000228113_14 (sequence is synthesized)
ctttcaaaaaaacagaaaataagtgttggtaaggaaacacctgcacactgttgatgggattataaaatgggcagccactatggaaaatagtatggaggttcctaaaaaaactgcaattag

SEQ ID NO: 897048 - DNA, 120 bp, Artificial Sequence
  ENSG00000228113_15 (sequence is synthesized)
tgctctcctatgttcatgcagcattattcacaacagccaagatgtagaggtgattcaaatgtccatcagtgaatgaatagataaagaaatgtggtatatacatacaatggaatcttagcc

SEQ ID NO: 897049 - DNA, 120 bp, Artificial Sequence
  ENSG00000228113_16 (sequence is synthesized)
taaaaaagaaagaattcctgtcatatgctacagcatggatgaaccttgaggaccttatggagcggtcctaatctgcatatccaagagcaatgtatgtgaacctacgtttccacagcctca

SEQ ID NO: 897050 - DNA, 120 bp, Artificial Sequence
  ENSG00000228113_17 (sequence is synthesized)
cccacagaatgtgtgctcaaacatttggatttttgcccatctactagatctcaccccacaggccttggaaacctgaggcagtattcttctgggatgtttccaactaggcttcccatgagg

SEQ ID NO: 897051 - DNA, 120 bp, Artificial Sequence
  ENSG00000228113_18 (sequence is synthesized)
agtgctcctgactggagagcccaggctgagatggtgttaaatgcttttaccacgtgggctcctggcaccaaatgagcaagcaatgtcaccttgagaaagttactcaaactctgtgtctca

SEQ ID NO: 897052 - DNA, 120 bp, Artificial Sequence
  ENSG00000228113_19 (sequence is synthesized)
gtttcatcatctgtaaaatgagggattgctagtacctacttgaaagatactgcgagtgaggacagcaaaaatcagctaatgaccatgaacagatctcaccccacaggccttggaaacctg

SEQ ID NO: 897053 - DNA, 120 bp, Artificial Sequence
  ENSG00000228113_20 (sequence is synthesized)
atcaatcaaacttttgtttgatataattatagattccaaggaagttgtaaagatagtacaggaggtccctgtgcatctttcacccagtttcctccagttttatgccactagagtacaata

SEQ ID NO: 897054 - DNA, 120 bp, Artificial Sequence
  ENSG00000228113_21 (sequence is synthesized)
tccaaaccaggacattgacattggagccatatgcatgtatatttccatgtcattttatctcatgtgtatgctcatgtacccatcacttcaatcaggttagagactagaccatccctcatg

SEQ ID NO: 897055 - DNA, 75 bp, Artificial Sequence
  ENSG00000228113_22 (sequence is synthesized)
atgctacagcatggatgaaccttgaggaccttatgatggattctgctctgtcgcccaggctggattgcagcggtg

SEQ ID NO: 897056 - DNA, 120 bp, Artificial Sequence
  ENSG00000228113_23 (sequence is synthesized)
atatgctacagcatggatgaaccttgaggaccttatgtccgaggatgaacacacaagagattcacaggaacaaaccagaccactgacttgctgcactgaagttgcaatacttctgagacg

SEQ ID NO: 897057 - DNA, 120 bp, Artificial Sequence
  ENSG00000228113_24 (sequence is synthesized)
gtgttttgttacctgcagcacagaaacactttccctgaaaaacagatacaacttttaaagcataatttttattctttaggtattctgatctcaccccacaggccttggaaacctgaggca

SEQ ID NO: 897058 - DNA, 120 bp, Artificial Sequence
  ENSG00000228113_25 (sequence is synthesized)
ctacaatttggtcattttgagaatgaataaaatcacacagtaatgcaagccttttgagactagcattttttcactcagcataacatacttaagatccatcaataattcttccattttatt

SEQ ID NO: 897059 - DNA, 120 bp, Artificial Sequence
  ENSG00000228113_26 (sequence is synthesized)
gccgagcggtattctacagtatagatatactaaagtttaactcttcatctaaggtaggacattttggttgtttccagttttggctattacaaataaagcttctatgagtattcacctaca

SEQ ID NO: 897060 - DNA, 120 bp, Artificial Sequence
  ENSG00000228113_27 (sequence is synthesized)
cacctagtttaaaaacagttaattaattctgtatttactccttttccttatttaataattattttgaaaggctacaacagcaccatgccaaatgatgacgtaaaacagtgaaccgatttt

SEQ ID NO: 897061 - DNA, 120 bp, Artificial Sequence
  ENSG00000228113_28 (sequence is synthesized)
aaaataaggatgtagaattaacatatgtaacaagatgttttaaacttgtatgtggtgtcttagataggtaagtaccagggtttttagttgatgatggttttaggcacatcacacttataa

SEQ ID NO: 897062 - DNA, 120 bp, Artificial Sequence
  ENSG00000228113_29 (sequence is synthesized)
aagacatggttctccacactgtgagtagtttgatcttctgtgtttgtggtgccgcatcacttatgaatgcttctaatctcagtgtataaatggaaccagtttcatacaaggtaatggaag

SEQ ID NO: 897063 - DNA, 120 bp, Artificial Sequence
  ENSG00000228113_30 (sequence is synthesized)
cagacagtgggagatataacagttgaccaccttatttggtcaagctcaagaaaattattcacagcacatattagcaaaatgtaatatttagtgggcatttcatcttggaattatattttg

SEQ ID NO: 897064 - DNA, 120 bp, Artificial Sequence
  ENSG00000228113_31 (sequence is synthesized)
ctggaattacaggcgtgagccactgcacttggcctacaacttccgtttgacactggagcggtcctaatctgcatatccaagagcaatgtatgtgaacctacgtttccacagcctcaccca

SEQ ID NO: 897065 - DNA, 120 bp, Artificial Sequence
  ENSG00000228113_32 (sequence is synthesized)
ccgtacaccagggtgtgggctgtacacaagatcagggtcaaataacccagtttggactataaacaagaaacaaaaatatgagcagaagaaaatatataagaagagatttacctgggtaac

SEQ ID NO: 897066 - DNA, 66 bp, Artificial Sequence
  ENSG00000228113_33 (sequence is synthesized)
actaggcttcccatgaggatgttagagccagcctggctggtgaattttacttctctcacctctcag

SEQ ID NO: 897067 - DNA, 120 bp, Artificial Sequence
  ENSG00000228113_34 (sequence is synthesized)
cgcagagtcccagcacagagcagagtagaacagagtaggattggagctgagagataatggggtctctgttgcccaggctggaggacaatggcgtgatctcagctcaccgtgacttctgcc

SEQ ID NO: 897068 - DNA, 120 bp, Artificial Sequence
  ENSG00000228113_35 (sequence is synthesized)
agagcagtatccagccccagcacacctaactgttttgcataacatagatctcaccccacaggccttggaaacctgaggcagtattcttctgggatgtttccaactaggcttcccatgagg

SEQ ID NO: 897069 - DNA, 120 bp, Artificial Sequence
  ENSG00000228113_36 (sequence is synthesized)
agcctagggaagagtaaggtgtccggccgggctgtatctcgtgggtggcgagggaacattgcctgtctcggaaacagttcccaagacaacgcgcatcccagacgcccggcgaggctgcct

SEQ ID NO: 897070 - DNA, 120 bp, Artificial Sequence
  ENSG00000228113_37 (sequence is synthesized)
agcctggctggtgaattttacttctctcacctctcagagctctttttaactgagtgagaattggagaatgtggtcagaggaacagggtccactggaaagaaacttcaagcttgtgtatta

SEQ ID NO: 897071 - DNA, 120 bp, Artificial Sequence
  ENSG00000228115_0 (sequence is synthesized)
gcatgtctgcacagacctcaaatgatggagcattctcctcccctcctctggctgtcctttgtcagactctacaatcatggctagaagaaaaaagttgacttaaccgttctttgttgaaat

SEQ ID NO: 897072 - DNA, 120 bp, Artificial Sequence
  ENSG00000228115_1 (sequence is synthesized)
ttcaataaaagactcttacgtaaccagatcctatgagcagagagccatcgtgcctccaacttagtttcttcagattggctggttttggtgctcaacttttgactttacccaccttcctga

SEQ ID NO: 897073 - DNA, 120 bp, Artificial Sequence
  ENSG00000228115_2 (sequence is synthesized)
caaagtgttgaggaccactaggtaagcatgctatcttcaacgttaaaaaaaaaaatcatgattgaaggcagctgcacttcatatatcaaggagcattgaatataactaactctaaaactt

SEQ ID NO: 897074 - DNA, 120 bp, Artificial Sequence
  ENSG00000234478_0 (sequence is synthesized)
agagtgaattctggcaacacactgagtgatgcttgtcaatggccactatcaggaatttaaaacaagatttggaattatgacatctggacaaacacatatgcaaaacctaccttttggtcc

SEQ ID NO: 897075 - DNA, 120 bp, Artificial Sequence
  ENSG00000234478_1 (sequence is synthesized)
attctccagggcttcttctgcagcttctggttccagttctttttcggagctgtcagtgtgtgttttggcctgtccattaactgacatcatattacttggtacagttgcattcacttttga

SEQ ID NO: 897076 - DNA, 120 bp, Artificial Sequence
  ENSG00000234478_2 (sequence is synthesized)
gcctacaaaccaagagaaagtgaagacacactgaccaggaaggctagcaaataagacatctgccctggagtacatctgataccatgcttttgccctaccaaagtgctatgctcaagaaat

SEQ ID NO: 897077 - DNA, 120 bp, Artificial Sequence
  ENSG00000234478_3 (sequence is synthesized)
accaaagtgctatgctcaagaaattactaataaatttttatcagtttttatcctgtctataatgaatattattagtacaatatcaaactgacagctaaaaataataaaaaatcaataaaa

SEQ ID NO: 897078 - DNA, 120 bp, Artificial Sequence
  ENSG00000247970_0 (sequence is synthesized)
tgcgcccggaggacgcggccttagccaatcccagggctacagggcgcttttaaaatgcaggaacctacttcagggaaccatacagaggccaaattcagaatccctacttgaaccgctgac

SEQ ID NO: 897079 - DNA, 120 bp, Artificial Sequence
  ENSG00000247970_1 (sequence is synthesized)
cttttgccctctccaaggccggaagcaagcccttgcctgatgcacgcctcagtcgccccgtctgtaaagtgggcagcccatcaaattcacatctccctggctgagagtcatctggagaaa

SEQ ID NO: 897080 - DNA, 120 bp, Artificial Sequence
  ENSG00000247970_2 (sequence is synthesized)
taatgactatgtgacctaatgaaaattgcacggtgcctgccgagcgaggtgggtaagccactggcccaacgctgtcattacaggaggtgaagcagcgcgtgggctgatgactggcaaggg

SEQ ID NO: 897081 - DNA, 120 bp, Artificial Sequence
  ENSG00000247970_3 (sequence is synthesized)
gtgcagccgcaggaacctttcatcatgggttcccttgggaggccaggtaggtcagctctgaaagcacccggtgctgcggggcctgccttcctgtggcttcggcttgggcgccatcccaag

SEQ ID NO: 897082 - DNA, 120 bp, Artificial Sequence
  ENSG00000247970_4 (sequence is synthesized)
tctgcagaggaggaagctaaggtgtaggggggtcaaggcactggcctaaggtcccacagccaaggggtggctgggaggtgcaatcaggtctgcctggcacagagtctggtctcctgacca

SEQ ID NO: 897083 - DNA, 120 bp, Artificial Sequence
  ENSG00000247970_5 (sequence is synthesized)
cgatgccaaactggttattattgtcaccacaatagaatactaataatagttgtcgtaattattattattgtggagggctgttctccaggcaggcaggtctgggttgctgcgtcactgggg

SEQ ID NO: 897084 - DNA, 120 bp, Artificial Sequence
  ENSG00000247970_6 (sequence is synthesized)
ccaggaggctggctagtgcccacaatgaggcagggtcctgtcccaaacagcactaggagaatgctggagatgggaggctgagcccatcctgcagcctgggtcagcagcctggggcctcac

SEQ ID NO: 897085 - DNA, 120 bp, Artificial Sequence
  ENSG00000247970_7 (sequence is synthesized)
ccccaccctccatccaatgctgggtggcgggcagcctctccaatgcccatctgccctggagggctctggtgatggatacagtggagattcgttgatatgaacattaaacattcaaccaga

SEQ ID NO: 897086 - DNA, 120 bp, Artificial Sequence
  ENSG00000262098_0 (sequence is synthesized)
gctgatccctggaatctgccgctaattctcactcagattttgagattttctctgcggctgcaggagccaacagagtcctttgtgcggcctcaggactcggctttcagaggccctggagcc

SEQ ID NO: 897087 - DNA, 120 bp, Artificial Sequence
  ENSG00000262098_1 (sequence is synthesized)
tggattcagccgtaattcttcattctttggctcaagggaaaaccttgattctgcacaggattgcaaaagccgaggcactccagctaggacacggcgtcattggagtgccctgggaggagt

SEQ ID NO: 897088 - DNA, 120 bp, Artificial Sequence
  ENSG00000262098_2 (sequence is synthesized)
gacaccctcctcctgggctggcgcggggaagagaagctcccgcgtgtgaaacagctccaccaccaagcgcctgcagacgagcggtgtgttccgcctggaacctgccgagggaacgtgtgg

SEQ ID NO: 897089 - DNA, 120 bp, Artificial Sequence
  ENSG00000262097_0 (sequence is synthesized)
gatcctggggtactgacaagaaatattttggagaagttagatagggtagaggcagaagtagacgcaattaaacatgaaggattgtgaaggcaaaagatgaaccagccagcctagtctctg

SEQ ID NO: 897090 - DNA, 120 bp, Artificial Sequence
  ENSG00000262097_1 (sequence is synthesized)
gatgcataagctccaagtgtggaggagacccggagagaaaagcagactgttctctgtgtttacctgtaagcacaggccgcaacctgccatgctgtttttaaatgcccaagagctggtgac

SEQ ID NO: 897091 - DNA, 120 bp, Artificial Sequence
  ENSG00000262097_2 (sequence is synthesized)
aagagggtttccctttgccatctggacctgattgccttagagtgaaagtcgacattgcaaaccacagtgacacgtggataaaactcacgttgttggggggagaagagcaaaacatatgct

SEQ ID NO: 897092 - DNA, 120 bp, Artificial Sequence
  ENSG00000262097_3 (sequence is synthesized)
tcacaataaaaacactcagtatcctaggaataggagggaacttcctcaaccagataaagggcatctatgaaaaacccagagctaacatcacacttaatcgtgaaagactgaaagctttcc

SEQ ID NO: 897093 - DNA, 120 bp, Artificial Sequence
  ENSG00000262097_4 (sequence is synthesized)
ctctaaaatcagaaacaagaaaaggatgtctactactgccactgctattcaacattgttctggaaaattctaggcagaacaagtaggcaagagaaaagaagaggtatccagattggaaag

SEQ ID NO: 897094 - DNA, 120 bp, Artificial Sequence
  ENSG00000262097_5 (sequence is synthesized)
gaagaaataaaactgtctctgtttgacagttgtcataaccttgtacatagaagattatgaagaagctaccaaaaactatttgaatgactaaacaagtttagtatggttgcaggatacaag

SEQ ID NO: 897095 - DNA, 120 bp, Artificial Sequence
  ENSG00000262097_6 (sequence is synthesized)
atcaatatgcaaaaaccagctgtagttcttctatatgttgaaaagaagaaaatttagaacgaaattaagaaaaattcattcacaagagcatcaaaaaggataaaaaataaggccaggcat

SEQ ID NO: 897096 - DNA, 120 bp, Artificial Sequence
  ENSG00000262097_7 (sequence is synthesized)
ggtggctcatgccagttaatcccagcactatgggaggctgaggaaggaggatcactcaagcccaggagtttgagaccacctgagcaacacggcaagactctatctctaccaaaaatttta

SEQ ID NO: 897097 - DNA, 87 bp, Artificial Sequence
  ENSG00000262097_8 (sequence is synthesized)
tgagcaacacggcaagactctatctctaccaaaaattttaaaaaattagccaggtgtagtggccatgcctgcagtcctagtactcag

SEQ ID NO: 897098 - DNA, 120 bp, Artificial Sequence
  ENSG00000262097_9 (sequence is synthesized)
tccagcctgggtgtcagagagagagaccctgtctctaaatgaaaataaataaatacataaaattttaaaaaagaatgaaatacttaggaatacatttaaccaaagaagtatgaggctttt

SEQ ID NO: 897099 - DNA, 120 bp, Artificial Sequence
  ENSG00000262097_10 (sequence is synthesized)
tacattgcaaaactatataacattgttgaaagaaactaaagaagacctaaataaatggaaagacatcccatgtttatagatggaaaagtttaatattaagatagcaaaacttctcaaatt

SEQ ID NO: 897100 - DNA, 120 bp, Artificial Sequence
  ENSG00000262097_11 (sequence is synthesized)
gatctacagattcaatgccatcctttcaaaataccagctaacttttttgcagaagttaacaaaccaatcctaaaattcatatggaaattcaagagaatcagagcagttaaccttcaaaaa

SEQ ID NO: 897101 - DNA, 120 bp, Artificial Sequence
  ENSG00000262097_12 (sequence is synthesized)
aacttagtacaaagctatagtaatcagatactatgaaattgacataaggacagacatatagatcacttgactaggcttgacagtccagaaataaaccttcacatttctgatcaattgatt

SEQ ID NO: 897102 - DNA, 120 bp, Artificial Sequence
  ENSG00000262097_13 (sequence is synthesized)
ttctacgaggcagccaacacaattctgttttaaatatggtggtaggacaacggagtagctacattcaaaagaatgaagtgagacccttaactcacaccataaacaaaaactaattcaaaa

SEQ ID NO: 897103 - DNA, 120 bp, Artificial Sequence
  ENSG00000262097_14 (sequence is synthesized)
tggatcaaagacctaaatgcaagcattaaaactataaaactcttagaagaaaacataggaggaaatcttcatgaccttggattagtcaatggattctaagatatgatacccaaagcataa

SEQ ID NO: 897104 - DNA, 120 bp, Artificial Sequence
  ENSG00000262097_15 (sequence is synthesized)
ataagcaacaaaagaaaaaatagaaaaattggactttatttttttaagagatggggtcttgttatgttgcccaggctggacttgaaatcctaggctcaagtgatcctcctacctcagcct

SEQ ID NO: 897105 - DNA, 120 bp, Artificial Sequence
  ENSG00000262097_16 (sequence is synthesized)
agttgctgggactacaaacatgtaccgccatgcccagctaaattggactttaaaatggaaaacttttgtgcttcaaagacgtcaaaaaagtgaagacaacccacagaatgagagaaaatt

SEQ ID NO: 897106 - DNA, 120 bp, Artificial Sequence
  ENSG00000262097_17 (sequence is synthesized)
ttcacaaattgtatatctgataagagacttgtgcctagaatctataaagaatgattaccactcaataataaaaagacaaataaccccattaaaaacaggcaaaggatctgaatagacgtt

SEQ ID NO: 897107 - DNA, 120 bp, Artificial Sequence
  ENSG00000262097_18 (sequence is synthesized)
tctccaaagaagataaataaatggccgataaacacttgaaaagatgctcaacatcatttgccatcagggaaaagcaaatcaaaaccatgatgagatgatgagataccacttcacacccac

SEQ ID NO: 897108 - DNA, 120 bp, Artificial Sequence
  ENSG00000262097_19 (sequence is synthesized)
tagggtggctataataaaaaagacagatcgtaataactgttggcaaggaggtagtgaaattcgaaccatcatcacacattgctggtgggaatgtaaagtagcacagagctttgaaaaact

SEQ ID NO: 897109 - DNA, 120 bp, Artificial Sequence
  ENSG00000262097_20 (sequence is synthesized)
gtaaagtagcacagagctttgaaaaactgtttggcagtttctcaaaaacttagagttaccatatgactcagcaacttccctcgtaggtatatagaagagaaatgaaaacatatgtccaca

SEQ ID NO: 897110 - DNA, 120 bp, Artificial Sequence
  ENSG00000262097_21 (sequence is synthesized)
cgtattattcataatagccaaaagtggaaatcacccaaatggtaaactgatgagtgaataaataaaatgtgctttatacatatgatgaaacattctttgtcaataatgaagaactgatcc

SEQ ID NO: 897111 - DNA, 120 bp, Artificial Sequence
  ENSG00000262097_22 (sequence is synthesized)
ctgccgcaacatgggggaacttaaaagcatgatgttaagtgaaggaagtcagattcaaaggtccatgattccattataaatggcattccatctgtggaattccatatatggaacgtctag

SEQ ID NO: 897112 - DNA, 120 bp, Artificial Sequence
  ENSG00000262097_23 (sequence is synthesized)
aataggaacacttcctttctatagagacagaaaggaaattaggagttgccaagagaggatggggagactggtgggtgatggctgagaaggtggccgtgtttctttttggggtaacgaaag

SEQ ID NO: 897113 - DNA, 120 bp, Artificial Sequence
  ENSG00000262097_24 (sequence is synthesized)
tgttctgaaattgattgtagtgatggcagtacaactctgaatttactgaaagccattgacttgtacattttaaattggtgacttgtacggtgtacgaattacatctcaataaagctggtt

SEQ ID NO: 897114 - DNA, 120 bp, Artificial Sequence
  ENSG00000262097_25 (sequence is synthesized)
gcttggggaggaggggagagagaggaagcttcaagagtgtctttgtggttgctggttgaccagtataaacggtatttacacatttagagtggcagactcaccagtacgtgagagaattgt

SEQ ID NO: 897115 - DNA, 120 bp, Artificial Sequence
  ENSG00000262097_26 (sequence is synthesized)
cgatgatgcaggcaacttacatgaaatgtacccctccagcattcaacgcagcagaatcacctagtagaagttattctctttctaatttgttttcagttgttttaatttcatcgagtctca

SEQ ID NO: 897116 - DNA, 120 bp, Artificial Sequence
  ENSG00000262097_27 (sequence is synthesized)
ttgttttaatttcatcgagtctcaagttggtgctagcctaggtcattaacacctcccggacacttgctaaccttgccttttttttttttcccggacggagtcttgctctgtcacccaggc

SEQ ID NO: 897117 - DNA, 120 bp, Artificial Sequence
  ENSG00000262097_28 (sequence is synthesized)
ggtatgagccaccatgcctggcctaatcttgccttttagcaaccatgacagcaccagtcttcaggcttacagcgagcgagagcaaccagctatcttttaatcatagtattgcttttggtt

SEQ ID NO: 897118 - DNA, 120 bp, Artificial Sequence
  ENSG00000262097_29 (sequence is synthesized)
accagctatcttttaatcatagtattgcttttggttgtatttattttctacagaccatgagaggggctttttgttatggctggttctttttagaggaaagacaaataatgaatcagtaat

SEQ ID NO: 897119 - DNA, 120 bp, Artificial Sequence
  ENSG00000262097_30 (sequence is synthesized)
aattgagttggaacaaggatacagtgcctcatggcagaggcctgaaaaagagcccagatttccagctcctattcagcgaagtgggttccccaggtggcaggctgcagatcaagcttgggg

SEQ ID NO: 897120 - DNA, 120 bp, Artificial Sequence
  ENSG00000262097_31 (sequence is synthesized)
aaggttctggtctgaggtcagtgggtccagctggtcagcagatggcaacgagggaactttggatgagagttgttgtcggagcccgccggcctggttttgcagcctgcttgaagcccgtct

SEQ ID NO: 897121 - DNA, 120 bp, Artificial Sequence
  ENSG00000262097_32 (sequence is synthesized)
cttccctgggatgacagaagccagttcatcagtgttcaccgtgggacacgaggctgaggagagtgggtggctgctgaagtcacctttgcttctggcggccaaacctgattttgctctggg

SEQ ID NO: 897122 - DNA, 120 bp, Artificial Sequence
  ENSG00000262097_33 (sequence is synthesized)
cgatcattgttcactactctcagatctgggtttgagcagactggacccacctcgggccatccgcgcttgtcttcgttgctttgggtacggtgatgggttctagatgggtagtgagatgca

SEQ ID NO: 897123 - DNA, 120 bp, Artificial Sequence
  ENSG00000262097_34 (sequence is synthesized)
aagaggctttttctgggaatgctggggctggatctttcccactggctttgaacccaagaaggggagatgccagaacccctgtatcccctatgaggagggcgctcacagcagataatggag

SEQ ID NO: 897124 - DNA, 120 bp, Artificial Sequence
  ENSG00000262097_35 (sequence is synthesized)
catcctacccagcttctaatctaagctcaaacacaccctccttcaggaagatttgctgttctaccttctccccaccaagcagagtgaagggattcttctttggaactcccactctccttt

SEQ ID NO: 897125 - DNA, 120 bp, Artificial Sequence
  ENSG00000262097_36 (sequence is synthesized)
atccatgaagacacacaacactctcagaagtcactgctccatgctgtgcccctcatccctgcctgggagctcggtatctctgcctcccaccttgctaaccagcacctctgccttcactca

SEQ ID NO: 897126 - DNA, 120 bp, Artificial Sequence
  ENSG00000262097_37 (sequence is synthesized)
gagcgctcaggacatagctgtaagccactcaaaaacagttcttgaaatctcaagttcaatactggcctcctaaatcctagcaattcccagaggagtgagaggtgggaggtggcaaggatg

SEQ ID NO: 897127 - DNA, 120 bp, Artificial Sequence
  ENSG00000262097_38 (sequence is synthesized)
gcctggggcaggggtggaagggggagtcgtggcaggggcaaatgctaggtagcttgagagagataaagaagatgtaattagagaagaggggtgatatgtgatttaaccttctcctttatc

SEQ ID NO: 897128 - DNA, 120 bp, Artificial Sequence; identical to SEQ ID NO: 873190
  ENSG00000262094_0 (sequence is synthesized)

SEQ ID NO: 897129 - DNA, 120 bp, Artificial Sequence
  ENSG00000262094_1 (sequence is synthesized)
atggggctgtgcggcgtcccctccctggcgcccacctgtgccctgcacactggcctgcactgtggtgatctcgcttggcccccacctgattcccgacatacagcagaggaagcttaggct

SEQ ID NO: 897130 - DNA, 120 bp, Artificial Sequence; identical to SEQ ID NO: 829539
  ENSG00000262094_2 (sequence is synthesized)

SEQ ID NO: 897131 - DNA, 120 bp, Artificial Sequence; identical to SEQ ID NO: 829540
  ENSG00000262094_3 (sequence is synthesized)

SEQ ID NO: 897132 - DNA, 120 bp, Artificial Sequence; identical to SEQ ID NO: 829541
  ENSG00000262094_4 (sequence is synthesized)

SEQ ID NO: 897133 - DNA, 120 bp, Artificial Sequence; identical to SEQ ID NO: 873197
  ENSG00000262094_5 (sequence is synthesized)

SEQ ID NO: 897134 - DNA, 120 bp, Artificial Sequence
  ENSG00000262094_6 (sequence is synthesized)
cagctggccacaaccaggaaaagggtgtccagggcctcagagctgcttcagtggggccatttccaggctcccaagcagtaatgtgggtgccctctcaagaacagaagcggaacagcctaa

SEQ ID NO: 897135 - DNA, 120 bp, Artificial Sequence
  ENSG00000262094_7 (sequence is synthesized)
cgctaatgtttgggaagaagagaacagtgatccccctggttacctcccatctctctctgcagttctcatgcatctgtgcacacacgctcacacacacatatgtccatcaatccactcaca

SEQ ID NO: 897136 - DNA, 120 bp, Artificial Sequence
  ENSG00000262094_8 (sequence is synthesized)
atgtttgacttaaagcagaaaccatataaagggcaggataaggagaaaagacgaaaggaactgaaaagatgcaaacagccactaacacgccaatttgcaccttgcacagggcctgggaag

SEQ ID NO: 897137 - DNA, 120 bp, Artificial Sequence
  ENSG00000262094_9 (sequence is synthesized)
taatgacacggcttctcgttatgcatcaatgatctcatgttttcattttaacaaacaccctaatacaaaaataggctttatagggaggagagaaaatatgttttatagggaggagagaaa

SEQ ID NO: 897138 - DNA, 120 bp, Artificial Sequence
  ENSG00000262094_10 (sequence is synthesized)
agccattctgaagagctggataggttgcctttggcccacatggagtcagccccctgcccacgccaccaggctcacgttcagggccctggctggagaaacctgagctgcaggacccgctgc

SEQ ID NO: 897139 - DNA, 120 bp, Artificial Sequence
  ENSG00000262094_11 (sequence is synthesized)
ccaccaatgcagaagagaaggcagtatgctttttgcattgggtggaacaaaaacagaagaaatgggaatttggtgagaaataagggaggtggtcctcagaatctgcagagcagtggcttc

SEQ ID NO: 897140 - DNA, 120 bp, Artificial Sequence
  ENSG00000262094_12 (sequence is synthesized)
caaactctgtgatgcaaccccagccagaaaaacactttacatcatggctgagggcacatacgtgcacgcacatatgcacaatacaggaaatctggaatacagaaagccctggaattccta

SEQ ID NO: 897141 - DNA, 120 bp, Artificial Sequence
  ENSG00000262094_13 (sequence is synthesized)
aataacatcctgcccacatgggaattctgccctagctgatggcttctccgaggcctaggcccaaatccacacctgctgtttagcccagagccaagcctaggagtgtagggtcccctatgc

SEQ ID NO: 897142 - DNA, 120 bp, Artificial Sequence
  ENSG00000262094_14 (sequence is synthesized)
atgggtgtccaaccccatccctgtccggaatagcacgggtgcttctcggtgccacaaatgttggtggcggctggggaggagtggttcctccaaggctccatgcctgcctccaccactgag

SEQ ID NO: 897143 - DNA, 120 bp, Artificial Sequence
  ENSG00000262094_15 (sequence is synthesized)
gccagcacggtgggactgggctagggagacaggcaggctggcctacccactgaaggagccagtctgcttccacctagtcagcagctccagggagcgcatctccctccaggaagggcagga

SEQ ID NO: 897144 - DNA, 120 bp, Artificial Sequence
  ENSG00000262094_16 (sequence is synthesized)
gagctggaaaggtgggcatttgatatcatgaggtataaagagagctcctaggggtcccagacatcaactaataaaagcacctcagaagttcatagatggggaaatagctgtgtgaatata

SEQ ID NO: 897145 - DNA, 120 bp, Artificial Sequence
  ENSG00000262094_17 (sequence is synthesized)
ccgtgttatccaagtcatgcggagaggaagggctcgaacccatggctactactccccacccccgtcctcctcctcctctttccattaagtttttgtgattatgaaagtagcttacatttg

SEQ ID NO: 897146 - DNA, 120 bp, Artificial Sequence
  ENSG00000262094_18 (sequence is synthesized)
gtgtagaaaatatggaacatatggaaaaatttaaaaagactcaggcaaagggtcatgtgtcacttcttatgaccagaggccgttgctctttattaacagatggaaatgttttcttccaaa

SEQ ID NO: 897147 - DNA, 120 bp, Artificial Sequence
  ENSG00000262094_19 (sequence is synthesized)
gctacagggctaggtgcacacaattagtaaccgtagcgatatacgtgtacacgtttctcttttgacttatttctttatggtctgtcttcttataactgctacacccatgccgccgtcgtt

SEQ ID NO: 897148 - DNA, 120 bp, Artificial Sequence
  ENSG00000262094_20 (sequence is synthesized)
agttacctcagtgtttatgcaaaaatacctgttatcattgcctattttattgtgtaaagtggcctatgaaatgttctgttgtgtttttatgtttctcaaatacataccttttaaaaatgt

SEQ ID NO: 897149 - DNA, 120 bp, Artificial Sequence
  ENSG00000262094_21 (sequence is synthesized)
caaagagacacgcacactctgagtttctgagagtaagccactgtcagttcctggggtgagccaccagccacatggacacaatttcctctttttgatggaaatgttttcttccaaattgtg

SEQ ID NO: 897150 - DNA, 120 bp, Artificial Sequence
  ENSG00000246662_0 (sequence is synthesized)
gtgcatgaaggcttcttagatgaagagtaatggggatgtcttacacagcaagatgagaaaacacagaccacttggctctctagcgaggaccagaatttgagtcaaaattatatgcatgtc

SEQ ID NO: 897151 - DNA, 120 bp, Artificial Sequence
  ENSG00000246662_1 (sequence is synthesized)
ccagcaaagcttcgcaaagatgtcagtattaattgtcaccatcctccagggagaaagcaacagcccacaattgcctgcattttctttcctcttcaaaaccacttctgctccaaagaccat

SEQ ID NO: 897152 - DNA, 120 bp, Artificial Sequence
  ENSG00000246662_2 (sequence is synthesized)
gaacctgaactgaagaaacgactccttcctgctggtgtgagataattcagtctccatgatgtcttaatcctgggcctcccttaattgacttctaactgtgctgaactgtggctgctagga

SEQ ID NO: 897153 - DNA, 120 bp, Artificial Sequence
  ENSG00000246662_3 (sequence is synthesized)
aagaacttagaaacaatgggtttctagattgggtggaaggactggcttgggatcctgagagagcaagaaaagtttaccgggagcttcagaaaaagttattcatcatttttggagtggata

SEQ ID NO: 897154 - DNA, 120 bp, Artificial Sequence
  ENSG00000246662_4 (sequence is synthesized)
ttcagaagtgacttccctcttttgctctggtgcctggctacttcaagagttgagctaatcacagggaagattcagtctcagttcagctgcctcatttgatcagctcaagactgagtccaa

SEQ ID NO: 897155 - DNA, 120 bp, Artificial Sequence
  ENSG00000246662_5 (sequence is synthesized)
caaaagtggtctgtctaatgaaactcattttcattttttctcattagtctatacacgattgagactgtagaacgacaaaagaataaaaagaagaatgacaattaaaaatcattttctctg

SEQ ID NO: 897156 - DNA, 120 bp, Artificial Sequence
  ENSG00000246662_6 (sequence is synthesized)
aagcaggcagggaccgagaggggtgatggcgcgcccacccctgcagagccgcctgcgcggttgtcccgcgcgtccctgccggcgaaggctgtgagaagcaccgcggggctacggcgcctc

SEQ ID NO: 897157 - DNA, 120 bp, Artificial Sequence
  ENSG00000246662_7 (sequence is synthesized)
catcctctctaacagccgcgcttaccagacagccagcctccagcgctgctaggctactccgagcaggggagaaaagacgccggtccgccggggaccaggagggagacgtgaaaccagagg

SEQ ID NO: 897158 - DNA, 120 bp, Artificial Sequence
  ENSG00000246662_8 (sequence is synthesized)
cccgggggccccctctccgcctgtgcgacttgtagtctcgtaccagacgcgtccgcttcactgctgaatctgaaaacgtgggctcttgagagctgcccttggaaggagctgtgctttctg

SEQ ID NO: 897159 - DNA, 120 bp, Artificial Sequence
  ENSG00000246662_9 (sequence is synthesized)
cctcatctttaacttttcgtttattcagcaaatatgtatcaagttccgacttcgtggaagagattgtgttagacactgggagtaatagaaacataattaagaagcaggggtcccggacct

SEQ ID NO: 897160 - DNA, 120 bp, Artificial Sequence
  ENSG00000246662_10 (sequence is synthesized)
gaagggcctgagcgtcggttctgaaggctgagaagttcaagagcaagtgctggcatctgatgagggccttcttgctgtatcatcctacggtggaagggtttcactgtatctcccaggctg

SEQ ID NO: 897161 - DNA, 120 bp, Artificial Sequence
  ENSG00000246662_11 (sequence is synthesized)
gaatatagtggagatcatggctcactgcaaccttgacctcctgggctcaagcggtcttcacacctcagcctccccagtagctgatcctacaggttctttcaaactgggaaagctcattaa

SEQ ID NO: 897162 - DNA, 120 bp, Artificial Sequence
  ENSG00000246662_12 (sequence is synthesized)
aagaaaaatgagaaaatctattggctggatcctgaacccttggaagctctgtctggatacattcttctctggcaggatgctctatgtggctctttccatgtgtagtttccaatgaaacag

SEQ ID NO: 897163 - DNA, 120 bp, Artificial Sequence
  ENSG00000246662_13 (sequence is synthesized)
tattctgaggggctgatctgcagaaaaggccaagtgaaaagtcacccaataatgagaaaggaggaagatggcatgtagaatgcatgaataggaaattatattgagaaatccagatgtgca

SEQ ID NO: 897164 - DNA, 120 bp, Artificial Sequence
  ENSG00000246662_14 (sequence is synthesized)
gttgtgcaagagcaagctggtgtggatttttgaatggatattctgaagacaactaggtgccggatgccatgttgtcagctgccctatggagagacccatgtgggcaaggaactctggcca

SEQ ID NO: 897165 - DNA, 120 bp, Artificial Sequence
  ENSG00000246662_15 (sequence is synthesized)
acagatggtctgggtggtctctggtccacagccagggaagagctgagcacctctgaccagaggcttatgacaaactgaatcctgccagcaagacaccaaccaatccagaagtatcagcca

SEQ ID NO: 897166 - DNA, 120 bp, Artificial Sequence
  ENSG00000246662_16 (sequence is synthesized)
tcgcaatttacaaggcactggaatcgtttcttgtcttcaaattagtcctgagctgtactggagaaagaaaaaaaaggggcctttacccttcttgctgtcttgtcaccacaagtgagactt

SEQ ID NO: 897167 - DNA, 120 bp, Artificial Sequence
  ENSG00000246662_17 (sequence is synthesized)
tcttacagtctcagaatggatggttgccttttaacaatttagttagggacagaaaggaaaaagagttagggttgccaatacttcgtcaattttgtcttaataaagttgcctcacatggcc

SEQ ID NO: 897168 - DNA, 120 bp, Artificial Sequence
  ENSG00000255480_0 (sequence is synthesized)
tcatgcaaagagagcctgacgaggcagaggaaagatcatggcaggacttctgtcttggtggacagatgtaggatgtggataccaaagaattgagtagatctgtcacaaagcaatggaaga

SEQ ID NO: 897169 - DNA, 120 bp, Artificial Sequence
  ENSG00000255480_1 (sequence is synthesized)
tttgatatgggtgggccaactgcgaataaaaagaagacgttcacttgggagatagaaaagagaagttctagtcatgacttttccaatttacttgctatataaccttgaataagtaccctc

SEQ ID NO: 897170 - DNA, 120 bp, Artificial Sequence
  ENSG00000255480_2 (sequence is synthesized)
tctgaattcctgtctccttacctgtggaatgaagacaaaaattcctaaggctctagcaagattgtcaaacaaaggcctatatgtgtgagttgcaaataaaaggaaagcaccttctgataa

SEQ ID NO: 897171 - DNA, 120 bp, Artificial Sequence
  ENSG00000243296_0 (sequence is synthesized)
acactgaaataggtaatgataataatagctactgctttttaagttcctaggaaaaattagatgttctgtaaatactacctctgatcctactatctttataagttacatattatttgcctc

SEQ ID NO: 897172 - DNA, 120 bp, Artificial Sequence
  ENSG00000243296_1 (sequence is synthesized)
ctgtcaaggaattaatgagtctatagtactatgcagcactgagcatgttctcctatctcctcaaagaagagagagaacccttacatttacttatcagagaactgagaaaatgaaaccaca

SEQ ID NO: 897173 - DNA, 120 bp, Artificial Sequence
  ENSG00000243296_2 (sequence is synthesized)
ttcttcatgtgtgaagaatcaagtgacattgtaccctagggactcaataaggctactccatcttgcaaaaaaaaagatatcttactagaaatattaaaataaaatgtcaagatgtgtatt

SEQ ID NO: 897174 - DNA, 120 bp, Artificial Sequence
  ENSG00000261670_0 (sequence is synthesized)
gactaatttaaaaaaaaaaaaaggtgattcattcatttcctccaccagagccacatctcagcctcagggctcaaggatggcagcagcatgaggttaattttggactcacaggctgcttgc

SEQ ID NO: 897175 - DNA, 120 bp, Artificial Sequence
  ENSG00000261670_1 (sequence is synthesized)
ttgaaaactgttagcttcacttctcatctccttgtgggtagggagctgccactgatggcatttacagaataacaaatgaggattaagctttctatttgggagatattttgagcaaaatta

SEQ ID NO: 897176 - DNA, 120 bp, Artificial Sequence
  ENSG00000261670_2 (sequence is synthesized)
gattaagctttctatttgggagatattttgagcaaaattaaacatggtgtaggcagagtggattagattgaaatgatccccattctgacaaagcccttaaaacacacacacacacacaca

SEQ ID NO: 897177 - DNA, 120 bp, Artificial Sequence
  ENSG00000261670_3 (sequence is synthesized)
taaccctcaagaacaaggtaaatcacaaaacatctgcagtgtcctaccagttttccagtaattgcaatagagtataattaaggtaactaagtctaaggactctgtgtttaaatgctggct

SEQ ID NO: 897178 - DNA, 120 bp, Artificial Sequence
  ENSG00000261670_4 (sequence is synthesized)
gtaccacctgctagctgtataaccttgaaaacatatttgatctccctaagtttcagtttcctccaatgttatattggggttaataacgacagctaacattcattgagtatatatcatgcc

SEQ ID NO: 897179 - DNA, 120 bp, Artificial Sequence
  ENSG00000261670_5 (sequence is synthesized)
cagagtgtccattcacttatttatttctgatttaacaaattggaagatgggtcagaagaaaatactcagacttaagcccaaagttatggaaattacagaaaagatagtaaaagataaatt

SEQ ID NO: 897180 - DNA, 120 bp, Artificial Sequence
  ENSG00000261670_6 (sequence is synthesized)
gacacagcaaataggtttaacacatgtgcatctggagtcccagaaggagatgtgaaagaatatggagaaggttattatttgccagccactgctttaagtactttacagatatatcttatt

SEQ ID NO: 897181 - DNA, 120 bp, Artificial Sequence
  ENSG00000261670_7 (sequence is synthesized)
taatcctcataaaatctctctgaggtaggcactattcttgccacacccattttacagatgaggaaaccaaggcaccaagttaggtaacttgcccagggccacacagctagtaagtggtag

SEQ ID NO: 897182 - DNA, 120 bp, Artificial Sequence
  ENSG00000261670_8 (sequence is synthesized)
agctgagatataaacccaagcagtctgagctgtgtccacattttaaaccagccttattctgaggaccatacatatgtcaactcattaaatgctcaccaataagtcctatgagtactatca

SEQ ID NO: 897183 - DNA, 120 bp, Artificial Sequence
  ENSG00000261670_9 (sequence is synthesized)
ttatccccattctataggtgaaagaggttaggcaatttggccaagattacataattaggtaatgatagagctaagatacaatgccagacaagtctgtctctaaaacccacaatcataatt

SEQ ID NO: 897184 - DNA, 120 bp, Artificial Sequence
  ENSG00000261670_10 (sequence is synthesized)
tttatgctatatcctctgtcagtaatagtacctttatcatagagttctttagtccagtcctggcatacactcagatattattatcatttacgattactattactgattgtcctctgatag

SEQ ID NO: 897185 - DNA, 120 bp, Artificial Sequence
  ENSG00000261670_11 (sequence is synthesized)
ttgtagctccctaagagctcaagttgcaatcacagtgaggtgggagtagcaggaatgtatagcatgctgcctgaatatgacaccctgctctcagcaggttcctaagatgaggaaactatt

SEQ ID NO: 897186 - DNA, 120 bp, Artificial Sequence
  ENSG00000261670_12 (sequence is synthesized)
agagttcctaaaatgaaggtccttgctagagattccatgtatttcagttcatttactctctttgcctaactgcagtatagaaggtgactggataccagaaaaattgtagggaaagaggaa

SEQ ID NO: 897187 - DNA, 120 bp, Artificial Sequence
  ENSG00000261670_13 (sequence is synthesized)
gggagttttaattctttgttttaatcctttgttgggagttttaaaatttgatagaattccaatctgtcttgactgagagcaagctagcacagaataccacatcacactccccaaatgatg

SEQ ID NO: 897188 - DNA, 70 bp, Artificial Sequence
  ENSG00000261670_14 (sequence is synthesized)
aagctagcacagaataccacatcacactccccaaatgatgctaaggcatttataaccacacaggctggag

SEQ ID NO: 897189 - DNA, 120 bp, Artificial Sequence
  ENSG00000261670_15 (sequence is synthesized)
agccaccatgcccggccatatatatatatataattttttttttaataagccttaactctatgccaactacttttccaagtgcatatgttaatttatgtgttccttagaaaagccctagga

SEQ ID NO: 897190 - DNA, 120 bp, Artificial Sequence
  ENSG00000261670_16 (sequence is synthesized)
gatgcataatattatctgctcactttatagatgaggaaattaaggcctggtgttcaaggccacacagtcagtaagtgataaaactggaatttgaacagttttgccccagaacccaagatc

SEQ ID NO: 897191 - DNA, 66 bp, Artificial Sequence
  ENSG00000261670_17 (sequence is synthesized)
aaactggaatttgaacagttttgccccagaacccaagatcttatgttcctctcacttcaatactag

SEQ ID NO: 897192 - DNA, 120 bp, Artificial Sequence
  ENSG00000261670_18 (sequence is synthesized)
gaagtgctgagattacaggcatgagtcaccgcacccagcttccaacactagttttaatactcttcccacattaccgattacccctctatctcatgaatgaaactaaatattaaatatata

SEQ ID NO: 897193 - DNA, 120 bp, Artificial Sequence
  ENSG00000261670_19 (sequence is synthesized)
attgtaaagtacaaggtgattttcatgaagttgttttgcggtcctcttaaaaatgcttcccatctctcaccattacattgtactctgcttttttttttttttttttgaaataggatctca

SEQ ID NO: 897194 - DNA, 120 bp, Artificial Sequence
  ENSG00000261670_20 (sequence is synthesized)
atctcagctcactgcaacctctaccttctgggctcaagtgtcacctctgcctcctgagtaggtgggactacaggcatgcaccatcacacctggctattttttttgttttttgtagagatg

SEQ ID NO: 897195 - DNA, 120 bp, Artificial Sequence
  ENSG00000261670_21 (sequence is synthesized)
cctggctattttttttgttttttgtagagatggggttttgttatgttgcccaggattgtctcaaactcctgggtccacacaatctacctgcctaggccttccaaagaactgggattacag

SEQ ID NO: 897196 - DNA, 120 bp, Artificial Sequence
  ENSG00000261670_22 (sequence is synthesized)
gtgtgagccactgcccccagcccattgtactttgattcttttgcctgcaatgttttcagcccttcgcccaaggtgagatttttgataatacaaaagttctgaatccatttgacagggttt

SEQ ID NO: 897197 - DNA, 120 bp, Artificial Sequence
  ENSG00000261670_23 (sequence is synthesized)
acttgtcaacaaagtggatacaggtatcttcttcttgtccacagccaaatcttgtggcgatagtcagatagtagaaggtggtggtgggggatgtctactctgcctttttttttttttttt

SEQ ID NO: 897198 - DNA, 120 bp, Artificial Sequence
  ENSG00000261670_24 (sequence is synthesized)
caggctggagtacagtggcacgatcatagttcactgcagcttcgaacttctgggctcgagtgatcctctcacctcagcctccaagtagttgggatgacaggtgcataccaacatgcccag

SEQ ID NO: 897199 - DNA, 120 bp, Artificial Sequence
  ENSG00000261670_25 (sequence is synthesized)
gtagttgggatgacaggtgcataccaacatgcccagcaaatttttcttgtggttttttaagagatgggggtcacgctgtgttgcccaggttgttcctgaactcctgacctgaagggattc

SEQ ID NO: 897200 - DNA, 120 bp, Artificial Sequence
  ENSG00000261670_26 (sequence is synthesized)
tcctgtcttagcctcccaagtcaccgcaattacaggtgtgagccactgtgcctggctcccctctgcctttcgttacctttcctagggcaggaattgttggcatatactggcaccagtgcc

SEQ ID NO: 897201 - DNA, 120 bp, Artificial Sequence
  ENSG00000261670_27 (sequence is synthesized)
caacattgtttcactttattttggatcctaaaaaattaatttctcctcaatttatttatgaagaaatatatcttatcaaaagaccaaggaagcaggatttgtaagcaaagaagatttcag

SEQ ID NO: 897202 - DNA, 120 bp, Artificial Sequence
  ENSG00000261670_28 (sequence is synthesized)
gaatttgtaggttttacatgttcttctacctcagatatatagctgactctttttttgggaaggggcacagaaaaatttatgtaccctgttaaatagcagtagacaatagttacggtctgc

SEQ ID NO: 897203 - DNA, 120 bp, Artificial Sequence
  ENSG00000261670_29 (sequence is synthesized)
tagccccatctacttctcatgagaagaaaaaaggtctacaaaggcattgtcacagaggtttttggcctcttgtaagagactttcctgaggtttttatatagccaagtgttttgcttattt

SEQ ID NO: 897204 - DNA, 120 bp, Artificial Sequence
  ENSG00000261670_30 (sequence is synthesized)
actactttgtggcactggatcaaataatgtatgctgatatataatacattgattaatgcattttccaaactcatgaccagcttgaaatatattgttttttggttttttttttgagacaga

SEQ ID NO: 897205 - DNA, 120 bp, Artificial Sequence
  ENSG00000261670_31 (sequence is synthesized)
acaggcaagagccaccgcgcctggcccagcttgaaatatttttatagaatgtctcagagtctataaaataatttttaatattttgtaatatttttagagatatcagtgaaggatttaaaa

SEQ ID NO: 897206 - DNA, 120 bp, Artificial Sequence
  ENSG00000261670_32 (sequence is synthesized)
aaggatttaaaaaataagagacagacagtataatgtaaaaattttctcatgggatattttttgttaccaatgtgaatttattgatactaccttgatgctaatagtgaattctttgaaggc

SEQ ID NO: 897207 - DNA, 120 bp, Artificial Sequence
  ENSG00000261670_33 (sequence is synthesized)
aagacattcatttgttttttagttcacagtgaacctaacatagtaacttgaatgtaatagatgcttcattattgtttgttgaatgtatgaatgattaaataaataaatttagtaccatca

SEQ ID NO: 897208 - DNA, 120 bp, Artificial Sequence
  ENSG00000261671_0 (sequence is synthesized)
caatcatgtaatcgttcagttacttcaaacgtaaagtaggctcagatttattttttcctaacaaactggttctagtccactcaagattctatccaaaaagcagtatttagcacttttcag

SEQ ID NO: 897209 - DNA, 120 bp, Artificial Sequence
  ENSG00000261671_1 (sequence is synthesized)
gctaattccaaacaaacgaagattaacagatcatcagtttagcttcacacatgaaattgaaaaatgaattgctggtcaaaatgctaaaaacacaaatgtgaaatttatatgtgttccttg

SEQ ID NO: 897210 - DNA, 120 bp, Artificial Sequence
  ENSG00000261671_2 (sequence is synthesized)
ttcctaaatattgaaaaaatatcaactaatcatcaagtttgccaaagcaaaaaaaaattgaaatataattcctagttaattggtttaccattcattattacttctctttgaattcagtaa

SEQ ID NO: 897211 - DNA, 120 bp, Artificial Sequence
  ENSG00000261671_3 (sequence is synthesized)
agttcaaataactggaaaccattttctcaatggtgcagcatttcttaatgtcagttcaagatgtttggagacatattgctgattttagaagctgatgtgtgctgatttatgaaggaattg

SEQ ID NO: 897212 - DNA, 120 bp, Artificial Sequence
  ENSG00000261671_4 (sequence is synthesized)
tttagcttgtactctgggctctgatcaagggagatacactctcagatacagcctggcatttaagggtacctctttcctagctgattatctgcttcctgagttcagttgtaatagcttgcg

SEQ ID NO: 897213 - DNA, 120 bp, Artificial Sequence
  ENSG00000261671_5 (sequence is synthesized)
agcttctcccatcccatatgactggattctgatttcttattttctgatagcagggtaaactttgttctcccttattactaaacgttgacttgacaaataaatagacctcctgcattttaa

SEQ ID NO: 897214 - DNA, 120 bp, Artificial Sequence
  ENSG00000261675_0 (sequence is synthesized)
aaagcaaaaccgttgtgagaggtgagagctgggcttgaaggttggagggagtagcggaaggtcccagtgagctgcagggggtctctgtgatggaaaggtggcttcctcagacaaggaagg

SEQ ID NO: 897215 - DNA, 120 bp, Artificial Sequence
  ENSG00000261675_1 (sequence is synthesized)
tgctgcgaatgggggaagacagaatccaacaaagaaagagaccacacaccccacacgcacacaggcacgttcacacacacatacacagtccacttagcccagcactgcagtcactcacag

SEQ ID NO: 897216 - DNA, 120 bp, Artificial Sequence
  ENSG00000261675_2 (sequence is synthesized)
ggacacactcagtctcaacccttccatcccatacacggccaggggcgtggctcaaaggaaattgactcatgccctccaaagccatggacgacaacaactccacactggcctttgtgttca

SEQ ID NO: 897217 - DNA, 120 bp, Artificial Sequence
  ENSG00000261675_3 (sequence is synthesized)
ttcacaacctcccaacagagcatacacatgaacacacacatgcacacatacccacacacgcacacatacccacacacacacacacaccactcgcatgcatgggaagggcacccgtctaga

SEQ ID NO: 897218 - DNA, 120 bp, Artificial Sequence
  ENSG00000261675_4 (sequence is synthesized)
atccaggactggattccggaattccttgctgcatggcctctctgggccttaattttccccccatgtaagcatgtggattgacccagagaagcactaaaggcccattcttgctctatgtat

SEQ ID NO: 897219 - DNA, 120 bp, Artificial Sequence
  ENSG00000261675_5 (sequence is synthesized)
ctgtgacttaagatctgccacctgccccgaggatatgccagggatgaccaggacagctgccaccaagcccccaggctcatcatcagtcagcctctcagacacacacacacacacacacca

SEQ ID NO: 897220 - DNA, 120 bp, Artificial Sequence
  ENSG00000261675_6 (sequence is synthesized)
tatacctcctcactgtgctccccgaacacctgcccccacatccaatgtcaaagcaaaaatacacacatgtgagcaaacataaagctgttcaggcaaagaggggaaagacgcaggggtccc

SEQ ID NO: 897221 - DNA, 120 bp, Artificial Sequence
  ENSG00000261675_7 (sequence is synthesized)
caaagcccttcttcactttgtgtccccttgctgcgatcatggagagttaaagaggcttccttgggagaagagctctgccaccagggcttccccagtgtctttgggggtctgtgaaaaaga

SEQ ID NO: 897222 - DNA, 120 bp, Artificial Sequence
  ENSG00000261675_8 (sequence is synthesized)
tctgaggtttactgggagggctcaaggctgagggaatggagaggaaaattttagcagttccatcccagtgtaaggaccaaccccaaaagttaaacttgcaccacagactaaaggtcaagg

SEQ ID NO: 897223 - DNA, 120 bp, Artificial Sequence
  ENSG00000261675_9 (sequence is synthesized)
gcatcctgtgtttctcccctttcttccccagagtgacaagggccagttcagactgacagaaatccaacagctttcctgagctggaaatttcagaacagtctgcaagttactcccaggtga

SEQ ID NO: 897224 - DNA, 120 bp, Artificial Sequence
  ENSG00000261675_10 (sequence is synthesized)
ctgaaggtcaaggtgaggcccccctgcctctgcctgcgagtctcccccggtttgcatttttcttgacaccggcatttcctgaggttgagctctctggggagttctagagaatggctagta

SEQ ID NO: 897225 - DNA, 120 bp, Artificial Sequence
  ENSG00000261675_11 (sequence is synthesized)
aggctttttgagcttgcacatctcacctgcctttcctgtcttttgcctgggaaaggaaagttattttcccaggtcagcaaggggcagaacatcggccagcccagcccagaagtacagggg

SEQ ID NO: 897226 - DNA, 120 bp, Artificial Sequence
  ENSG00000261675_12 (sequence is synthesized)
gaggtcatgggccctggggcagaacaatgggagacaattcaaggtgtggtaacaacaaccaagttgccctcagtctgggcagaaactgaactctacccctctcccaccccaatcttgccc

SEQ ID NO: 897227 - DNA, 120 bp, Artificial Sequence
  ENSG00000261675_13 (sequence is synthesized)
gccatcccaccagattccagacctaaagggatcaaggatgagagcgaagggagaagggagggtccccaagaaaaccgcacccaagcgagcactgtctgaagagaaaaactagctccagtt

SEQ ID NO: 897228 - DNA, 120 bp, Artificial Sequence
  ENSG00000261675_14 (sequence is synthesized)
ctccgaattctggcagagcgtctgggaaggcgatcagtgcttctttccatggcgcaaggcctgggttctgggtgtgcttgaagaaagccactggggtgtggggtgacatcgccatggctg

SEQ ID NO: 897229 - DNA, 120 bp, Artificial Sequence
  ENSG00000261675_15 (sequence is synthesized)
agaaggggctagggggtccggagggaaggagccaggaccggaactgcaagggcgttgctgcccaggggtgtggatgattgctcatgtccagctcagaccagttcaagaaactaacctcca

SEQ ID NO: 897230 - DNA, 120 bp, Artificial Sequence
  ENSG00000261675_16 (sequence is synthesized)
tttattttcttggtgagtcctttttttttttttcagactgttaacagaaaaaaaattttaaaaagcagaaaactgaaaaaaaaaatcctggtacatgaaataaagattttttttttttat

SEQ ID NO: 897231 - DNA, 120 bp, Artificial Sequence
  ENSG00000267784_0 (sequence is synthesized)
cgttgttagaaaccacacaggtgtattccccactctgagatatgtcaatattaaataattccagttctgccacagtgtcttcaaaatagatgttgcaccggtctcctttcactagttctc

SEQ ID NO: 897232 - DNA, 120 bp, Artificial Sequence
  ENSG00000267784_1 (sequence is synthesized)
tggcacctctgaaccagttgactttgaatggaggggttcctctaataacgcttgtgaaggttacatttttgcctggtagtacttccaaaggttcaggttctttcacaaaagagggtggtt

SEQ ID NO: 897233 - DNA, 120 bp, Artificial Sequence
  ENSG00000267784_2 (sequence is synthesized)
ctatatagacatggagaacaattaaaagatcctgtaagcttcagatggagttgcaattttgaataaaacattagagcactttcaaatgtttgtcaacatagatgtgcacctgaagaggaa

SEQ ID NO: 897234 - DNA, 120 bp, Artificial Sequence
  ENSG00000267784_3 (sequence is synthesized)
tttgtaagaaattccttacaagtttgactgtctactgaccttgtacagttagcactgcacgacattcatcagacccagcgacattagcagccacgcatgtgtaattgcccatatctgagg

SEQ ID NO: 897235 - DNA, 120 bp, Artificial Sequence
  ENSG00000267784_4 (sequence is synthesized)
aatccagagaattcaactgcaatgtgcagacattatctgaaaatgtggtttggtactttgctccactgacaatcttggttttctcatgaaaccaggcaactgaaataggtgatgatccag

SEQ ID NO: 897236 - DNA, 120 bp, Artificial Sequence
  ENSG00000267784_5 (sequence is synthesized)
ctactttgcattccaagatgcaagaagcacctaacaccccaccagtatttttcagtcttcgtgtgaaagagggaggaactgctcggtctgtgtgaggaaaggtaagagactcatcatgat

SEQ ID NO: 897237 - DNA, 120 bp, Artificial Sequence
  ENSG00000267784_6 (sequence is synthesized)
ttgaaagaatagaagagacttgaaagaaggaaacttgtaaaaggaatttgcataagcaaccagaagaaaacagcagaactaacctgaaacatcaaccacagctgtgcagctgcttttccc

SEQ ID NO: 897238 - DNA, 120 bp, Artificial Sequence
  ENSG00000267784_7 (sequence is synthesized)
aacattattttgaacctggaaagtgtatgtgcctgcatcttgcctttcaactgagagaatccttaaggaagagattttgttgtagaagctaaatttgtgtttttggctgctggtcaacag

SEQ ID NO: 897239 - DNA, 120 bp, Artificial Sequence
  ENSG00000267784_8 (sequence is synthesized)
ctttccatccttgtaccattcaacagagagttccggagtgccagccaccttacactccagagtgcacgtttctcctacagtcaccgtcatcggtcctgccttctcaacaatgactgcggg

SEQ ID NO: 897240 - DNA, 120 bp, Artificial Sequence
  ENSG00000267784_9 (sequence is synthesized)
ctctgaaataaaacgtgatatccatctgtcaaagtctgggatctttactctgtctctactatcacattcactaagattgtttctcccagtgagatggttatgttagggtgctctctctct

SEQ ID NO: 897241 - DNA, 120 bp, Artificial Sequence
  ENSG00000267784_10 (sequence is synthesized)
cgactttaaagtgtgattccataattacatgcagtcatagaattatagctattttttattttaatattttttcttttcagttttttctttattttttgtttttcccaccactcttgctgt

SEQ ID NO: 897242 - DNA, 120 bp, Artificial Sequence
  ENSG00000267784_11 (sequence is synthesized)
cgtcttatgtagcaattattcttaagaaatatatgttcgtgcatgactcaacttcaaaacaatttaaacaatgtgcattagatagtatatattgatttccacttgaccctctgtagatca

SEQ ID NO: 897243 - DNA, 120 bp, Artificial Sequence
  ENSG00000267784_12 (sequence is synthesized)
aagtctacaggttattgtgaattacttggtatttttgctctaccttaaggtgctaaagacaattctttgaaagttgttattcaaacaattgtttaattgtcattaattttatgtggaagc

SEQ ID NO: 897244 - DNA, 120 bp, Artificial Sequence
  ENSG00000267784_13 (sequence is synthesized)
tttgctatcaaatgccaacctttggagttcttgttagttttaacaattactcttgtagcacatgctgggctctgtattctttcatgcttaatcaaagagagtcatgattgtatctgctaa

SEQ ID NO: 897245 - DNA, 120 bp, Artificial Sequence
  ENSG00000267784_14 (sequence is synthesized)
tttcaaatagatgaggataaatatagttctagaagaaactcagaaaaagaatctgccagtaactcttagtaattcattccagcatttggcaccagtttctatcgtgggctattgtaccaa

SEQ ID NO: 897246 - DNA, 120 bp, Artificial Sequence
  ENSG00000267784_15 (sequence is synthesized)
cctaagaccatcagtgtggccatgttctccctcattccaccatcattcttgatttggcagatatactttccagcattagctggctctgcttttgcaaactgtagagttgcaacattttcc

SEQ ID NO: 897247 - DNA, 120 bp, Artificial Sequence
  ENSG00000267784_16 (sequence is synthesized)
acaaatgtaatcctgatgttttcactttctctaatcacttcttccttctctttaagccactggacaaaaataggctgggcgccttctatggatgcttgtaattcagcaggctctccggct

SEQ ID NO: 897248 - DNA, 120 bp, Artificial Sequence
  ENSG00000267784_17 (sequence is synthesized)
acaacagtgaggctgttcagtttggagacaaatcttggtggttctgaacaggaaaagatggatggaaattgttgaaaagattgtccagatcatgcgagagtgaaaaaagtaggattttgc

SEQ ID NO: 897249 - DNA, 120 bp, Artificial Sequence
  ENSG00000267784_18 (sequence is synthesized)
acatttatgacatttctgccatgtggatgaactatatttacctttcaattttacagtacaaacacaagtatcacttcccacttcattctgtgctttgcagtggtattcaccgatgtctga

SEQ ID NO: 897250 - DNA, 120 bp, Artificial Sequence
  ENSG00000267784_19 (sequence is synthesized)
agtgtccacattgagaatgtgaatacttgtgtggaagtttttggatgcaatcttgtatttcttgctgcttctgagttgccgcttgtctttgtaccataccacctcaaacggtggtgttcc

SEQ ID NO: 897251 - DNA, 120 bp, Artificial Sequence
  ENSG00000267784_20 (sequence is synthesized)
cgaaagttcacattcaagactgacttcagcatttttaagggtttctactataggagggaagctgctaaaaacaggtggctctgcaaaaaacaagaatttctcatgaattgggctactgaa

SEQ ID NO: 897252 - DNA, 120 bp, Artificial Sequence
  ENSG00000267784_21 (sequence is synthesized)
tttcacaaaatgaaaattttttatttgtctttaaattggaagaaaggtttaagatattctaatgggtaagtagagtccagcactaacactctcatgggataacagcctcagaagccattt

SEQ ID NO: 897253 - DNA, 120 bp, Artificial Sequence
  ENSG00000267784_22 (sequence is synthesized)
gccttcacaagataaccagctagatgggcagagaacccagatagatcctagatgtcgttactgaacagttcaacattctatctactacaccttactgatgtatcttaggctacaaagatt

SEQ ID NO: 897254 - DNA, 120 bp, Artificial Sequence
  ENSG00000267784_23 (sequence is synthesized)
gatacaaaaattgcaaacaagcaagtatagcaataaataatgatttgcatgaagtatggaattctaatttcaaggatgattttttttgtatatgttctataacagacacttggaagtcat

SEQ ID NO: 897255 - DNA, 120 bp, Artificial Sequence
  ENSG00000267784_24 (sequence is synthesized)
cacaacatccgtgatctaagtcttccatttcagcaaatgattactgcaataattgtcttaaaacaagacaaacttggcctttgtgacaaaaaaaaaaagcactggaaaattgcagcaaaa

SEQ ID NO: 897256 - DNA, 120 bp, Artificial Sequence
  ENSG00000267784_25 (sequence is synthesized)
aaacacagatactatttgtaccaaggtatagtcatataatttttaaaggataggaagtgatccttgagagagaaggaaaaaatattattgtcctgttttaaacataagtttaaaacctgt

SEQ ID NO: 897257 - DNA, 120 bp, Artificial Sequence
  ENSG00000267784_26 (sequence is synthesized)
attgctttcactttgcatagatatagtaaaagtgcttgttattaatgatatagattatagtgagaatgatatatctgtaagttgattgaaagcaaaagactaattttaaaatgcctactt

SEQ ID NO: 897258 - DNA, 120 bp, Artificial Sequence
  ENSG00000267784_27 (sequence is synthesized)
catttttttgtgcagttttgaaacatcacgtttgatgtttggcaaatgtgttgaggtaatcagaattatgacactggaataacaaaaatatttcataatgactagttacatgtaagcaaa

SEQ ID NO: 897259 - DNA, 120 bp, Artificial Sequence
  ENSG00000267784_28 (sequence is synthesized)
attcaagaaggaaaccatctaaaaagggaaataatactagctcagaaaaatattctatgatctcaaatggaaactaaaatgatagtaaatgaataaagagctataatacccaggggagaa

SEQ ID NO: 897260 - DNA, 120 bp, Artificial Sequence
  ENSG00000267786_0 (sequence is synthesized)
atgttatgccatgagtcatgggaccagcctgagtcctgggggacctcgtctgaccacaccctactccccaagtccccagcagtatcatgagatccttcttgttgtttgttagccttggac

SEQ ID NO: 897261 - DNA, 120 bp, Artificial Sequence
  ENSG00000267786_1 (sequence is synthesized)
agctgaagtcaggtatttgcgatcagaatcatttggaacttgctgaattgtttggaaaatccttctgtagaggagaagaacttgttgccttctgatgaactgctttaacattagtgttgc

SEQ ID NO: 897262 - DNA, 120 bp, Artificial Sequence
  ENSG00000267786_2 (sequence is synthesized)
tgggtttcctacagggtgagtgccccagaaggaacacagaaagctgggctgccgcttcatcacggctttctcggaaaacgggggcgctgagaagcccaacttccagctatatatgtcgcc

SEQ ID NO: 897263 - DNA, 120 bp, Artificial Sequence
  ENSG00000267786_3 (sequence is synthesized)
cgccaccgcccacagggcccccgacggcgatgctggtgacagcgctccctgcgtgggcgccactctccccgtgctccccgcgcctgcagccaggcacgacggtgtgggtgtgcccgcccg

SEQ ID NO: 897264 - DNA, 120 bp, Artificial Sequence
  ENSG00000267787_0 (sequence is synthesized)
ccctacattgacttcaggagtccagcttcactaatttatctagggcttcctggttttccagttcccgtcatcaaagcactcagggcaccctacaaccgaaatttcccttcccaagggaat

SEQ ID NO: 897265 - DNA, 120 bp, Artificial Sequence
  ENSG00000267787_1 (sequence is synthesized)
tctcctgttaaaagtgtggcatttctgagaaaaagtaaggcatttctggaaaaaaaaatcccttcttcctgcatttgaagcttggagtgcccaataatttttctattccacctaaagagg

SEQ ID NO: 897266 - DNA, 120 bp, Artificial Sequence
  ENSG00000267787_2 (sequence is synthesized)
taagattttgtattagaaaaacatacgataatattagtgcaaaagacagcaatctagatgagagatctactgagatgaaaaataaataccgtgtaaaccatgtagttcatcaagtaatca

SEQ ID NO: 897267 - DNA, 120 bp, Artificial Sequence
  ENSG00000267787_3 (sequence is synthesized)
attttagttcttttaaatctggttttcccactattcttcattattttagtgtcagcacctgaaaatggaaaattcaatgtagtcatcagttgggaaaaatcaattcactagctcaccaat

SEQ ID NO: 897268 - DNA, 78 bp, Artificial Sequence
  ENSG00000267787_4 (sequence is synthesized)
aaaattactcttctggaggctgagttgggcggatcacctgaggtcaggggttcgaggccagcctggccaacatggcaa

SEQ ID NO: 897269 - DNA, 71 bp, Artificial Sequence
  ENSG00000267787_5 (sequence is synthesized)
gatgctattactcttcttttggttttgatggacaaaggacagaaaagcaatcccctctaagtctttaaaga

SEQ ID NO: 897270 - DNA, 120 bp, Artificial Sequence
  ENSG00000267787_6 (sequence is synthesized)
acaaaggacagaaaagcaatcccctctaagtctttaaagatcatagctgattaatttcccaagaaactctgaacgtacctgcaaaaatgactaagccgtggcagaaatcggtgttcctaa

SEQ ID NO: 897271 - DNA, 120 bp, Artificial Sequence
  ENSG00000267787_7 (sequence is synthesized)
tctgttattgggttcttcacattcaataaaaccttttaaaaatataagattcacataattaatcacatacaaaagtctttctggttttaatcaataggaattgaaccaagcaactaaaat

SEQ ID NO: 897272 - DNA, 120 bp, Artificial Sequence
  ENSG00000267787_8 (sequence is synthesized)
ttaaagcaaagtaagacatgtttggtacaaaccatcaaatgtagccaatgtatcttctctttggaggtactggtctgtgatttcaagtgacatcttaaattttaaattggtttctctaaa

SEQ ID NO: 897273 - DNA, 120 bp, Artificial Sequence
  ENSG00000267787_9 (sequence is synthesized)
ggaatggggaaaaaatgaattaaatgaacaaatttttgagttcaaagtggaagttaatcatccaaagttacattagccatacctggacatgaagcctaaataattagctgtttctatttt

SEQ ID NO: 897274 - DNA, 120 bp, Artificial Sequence
  ENSG00000267787_10 (sequence is synthesized)
caaactctgttcaccttggaacttcaggtttggaaaaggttatcccctgaagtcgagaaaatttctgaccttgggaaatgttggttcccttcactgtttgttgttgtgaaggttaggaca

SEQ ID NO: 897275 - DNA, 120 bp, Artificial Sequence
  ENSG00000267787_11 (sequence is synthesized)
gaggtacccacaaacatccttctcattaactttaactttaccatcagctaggactaccaaagtgctgtttgaaaatgtagtgtctaatatttaatcacattaaaatgattctataacaca

SEQ ID NO: 897276 - DNA, 120 bp, Artificial Sequence
  ENSG00000267787_12 (sequence is synthesized)
tatttgttacagaaattctgtttcgcctctgtcaaattcttttccagagtgaataactggatcacatgtttttgaaagacaattttatttggaaaaggaagtcttagctttactcccaac

SEQ ID NO: 897277 - DNA, 120 bp, Artificial Sequence
  ENSG00000267787_13 (sequence is synthesized)
tgccccaccatagtgcaagaacttgtcagatatgctctcccagcccttcttactaaggacaatgggtacttgtccaagcccatccaccattctgtcagtcgcatcctaagaagagatcag

SEQ ID NO: 897278 - DNA, 120 bp, Artificial Sequence
  ENSG00000267787_14 (sequence is synthesized)
agaagattctctcctagaccacgcaaaatagaccgatcatctttggcacgtgtggccatgacccacatgaggatttataagcgacctagtcaccgggacttcatgtggttaccttttctg

SEQ ID NO: 897279 - DNA, 120 bp, Artificial Sequence
  ENSG00000267787_15 (sequence is synthesized)
aatggctcccggttctcctctgcttccctgttgactcggttttgttctggttcaacagcagacccctggtcatcaagttcatcttctgtttcatcatcactgtagggaaccacttcgtca

SEQ ID NO: 897280 - DNA, 120 bp, Artificial Sequence
  ENSG00000267787_16 (sequence is synthesized)
gaggaagcaagcacggaggaatggatttgacaacccacatgtccgtgactcaaagcaagcaaggccttgcacaaccaactcgccacccacacaatctgcacagtctcagtgagaaagcag

SEQ ID NO: 897281 - DNA, 120 bp, Artificial Sequence
  ENSG00000267787_17 (sequence is synthesized)
gagcagggagctctccgctgagagtgaagaaatgtcctcaactcgacttctctgcagtgtgcatgtgtgtgaaacacagacacacacgggaggaatttggctctgtcattttagtgtacc

SEQ ID NO: 897282 - DNA, 120 bp, Artificial Sequence
  ENSG00000267787_18 (sequence is synthesized)
actttcttgtttttgccaaattaataggtgaagatggcctatcaaaatcattttgattttcacttctttatttcagatggagtttctctcttattttccaggctgcagtacagtggcgtg

SEQ ID NO: 897283 - DNA, 73 bp, Artificial Sequence
  ENSG00000267787_19 (sequence is synthesized)
tcctgacctcaggtgaactgtatctcttgttcggaggaatatctaatcaagaaaatcatttttactgttttta

SEQ ID NO: 897284 - DNA, 120 bp, Artificial Sequence
  ENSG00000267787_20 (sequence is synthesized)
gtgagccacccactgtatctcttgttcggaggaatatctaatcaagaaaatcatttttactgtttttattttttggtttgttcgtttttttcctgtgagatggagtttcactcttgttgc

SEQ ID NO: 897285 - DNA, 120 bp, Artificial Sequence
  ENSG00000267787_21 (sequence is synthesized)
attatgactcttgcccagtttttggttgaatactgcctgcatgctgctacaatgccccttttacagaacattgtctaacatgtaaatattctggaatagtacccccaaattcaacttgac

SEQ ID NO: 897286 - DNA, 120 bp, Artificial Sequence
  ENSG00000267787_22 (sequence is synthesized)
atgaagacaagaacaaaaccattcagtactgattaaatgcttgggataatgtgcaacaatctagatgatccaaagagtatttgatgacattgcattaatgaccttaagttaatagctgca

SEQ ID NO: 897287 - DNA, 120 bp, Artificial Sequence
  ENSG00000267787_23 (sequence is synthesized)
cccttctggttaccgctagaactgagctttcgctcgccgtccaccactgctgttttgctgccgtcgcagacccgccgctgacttccatccctccaatccagcagggcgcccgctgtgctc

SEQ ID NO: 897288 - DNA, 78 bp, Artificial Sequence
  ENSG00000267787_24 (sequence is synthesized)
acttccatccctccaatccagcagggcgcccgctgtgctcctgatccagggaagcacccgttgccactcctgatcgtt

SEQ ID NO: 897289 - DNA, 84 bp, Artificial Sequence
  ENSG00000267787_25 (sequence is synthesized)
ggcatctggatattaagactgtctccagccctttgaggttgagagaggaagcaagcacggaggaatggatttgacaacccacat

SEQ ID NO: 897290 - DNA, 120 bp, Artificial Sequence
  ENSG00000267787_26 (sequence is synthesized)
atccctaaggtcaggtgctgtgtatggtatggatttggaaacttcataatgtctctgaccaccactccaggacactgcagacaggtgtgcatttactcagcatccagtaaacacctgcaa

SEQ ID NO: 897291 - DNA, 120 bp, Artificial Sequence
  ENSG00000267787_27 (sequence is synthesized)
ggtgcagagtactacactaggcacagggaacagagctactgactgactgccagagtttcgaagaatacagataagtcaactattaaagctaggaaacagaccggatgcggtggctcacgc

SEQ ID NO: 897292 - DNA, 87 bp, Artificial Sequence
  ENSG00000267787_28 (sequence is synthesized)
ccagcactttggaagaccgaggcgggtggatcaactgaggtcaatccgtccctattaataatacaaaaaaattagctgggcatggtg

SEQ ID NO: 897293 - DNA, 87 bp, Artificial Sequence
  ENSG00000267787_29 (sequence is synthesized)
agggaatttcactttaattttggtcaagtatcatgagtttagtaccttctgattcaaggcagaaggcacttaagctcaatcctcaac

SEQ ID NO: 897294 - DNA, 120 bp, Artificial Sequence
  ENSG00000267787_30 (sequence is synthesized)
tctgattcaaggcagaaggcacttaagctcaatcctcaacagcttgaaatcaaaaccagaaacccactctaagaggtaatccatctaaatgtttgctatggaaaggtagcggacacacaa

SEQ ID NO: 897295 - DNA, 120 bp, Artificial Sequence
  ENSG00000267787_31 (sequence is synthesized)
catacaggagtcaatggcctccccacatttgggtgagatggggctcgcggggtgcatgcactccccacactgagaatctccccacaggcagattctgtgaccagaacaggaagaatcatt

SEQ ID NO: 897296 - DNA, 120 bp, Artificial Sequence
  ENSG00000267787_32 (sequence is synthesized)
agagggggggtttggcatgggggaaaaagaggcttctagaaagccttcaagggcagaatggcagtaacagagacctcgggaaaaccagctaaaatccgaggcttctctgactaaggctgc

SEQ ID NO: 897297 - DNA, 120 bp, Artificial Sequence
  ENSG00000267787_33 (sequence is synthesized)
agggaggcgtgtctggagcgctgaaaccagaacactatgataatgatttctgtgaatgtgatgctaaggttgttcggctagaattttagggaacaccatggaggaaatattttcagcctg

SEQ ID NO: 897298 - DNA, 120 bp, Artificial Sequence
  ENSG00000267787_34 (sequence is synthesized)
atatcaaatctggggtccagagagaaaagtctcagcttgctcatggagaagagctacaagagaagcccacatctgtttgccagggtgggagaaccagcaggagatgaaatagaaaagcca

SEQ ID NO: 897299 - DNA, 120 bp, Artificial Sequence
  ENSG00000225733_0 (sequence is synthesized)
gtcgctcacgaggtcgcgcctcgcacccgccttcctccttttcttttaccctccccttcagaaaaaacggcggttgggctgcgacggccgccaaaggcggactagaagcggaggggtgaa

SEQ ID NO: 897300 - DNA, 120 bp, Artificial Sequence
  ENSG00000225733_1 (sequence is synthesized)
aatcccggcagagaaggaagaagggactgcaggcgggaggaggaggaggataaggaggaagggagcccgcccagccggagccatctccgtcgagaacaaaatggcggcgctggcggaggg

SEQ ID NO: 897301 - DNA, 120 bp, Artificial Sequence
  ENSG00000225733_2 (sequence is synthesized)
caaaatggcggcgctggcggagggccaactataaggcggggccgcggccattccccctccacccccacccttgcgccggccgggccggtcagggggaacccgctcgcttcgcccggccgc

SEQ ID NO: 897302 - DNA, 120 bp, Artificial Sequence
  ENSG00000225733_3 (sequence is synthesized)
ccggcccactatgcaaagcgccgggcgccgccgccgccaccccgtggcaaaggtcgaggggttaatgctctggaagacggatgaaaaggcactgcccgagaagcggggtgaagacagcgg

SEQ ID NO: 897303 - DNA, 120 bp, Artificial Sequence
  ENSG00000225733_4 (sequence is synthesized)
gagtgaataactccctccagggaaagcggtttcaggcatgaaccatggaccacagagaagccactggagcctggggagaagccaccaggccacttggaagaaggcaagtggtccccaggt

SEQ ID NO: 897304 - DNA, 120 bp, Artificial Sequence
  ENSG00000225733_5 (sequence is synthesized)
tacctctcatcaggcccgggacagccctgccccgcttcttcagctccccgaagcagccgtcgcagaccttggccatcctgtccttcagcaacagaattggctgagtaatgtggaatgtgg

SEQ ID NO: 897305 - DNA, 120 bp, Artificial Sequence
  ENSG00000225733_6 (sequence is synthesized)
ccaggagaccagccagatgcagagcccagtgagccctgccctgcgtctctgtgcagggtgtgtgatgtgtggcttcccagacagtcatccaacaggcactttccaagtccctgctctgca

SEQ ID NO: 897306 - DNA, 120 bp, Artificial Sequence
  ENSG00000225733_7 (sequence is synthesized)
ccagggagggcttcctgagtggcaagagctacgcctgggctgggtgccagctagctgggtgaagttctcacagtgtccactagatgccgcgcctacaccacagggtctcactatgttgcc

SEQ ID NO: 897307 - DNA, 120 bp, Artificial Sequence
  ENSG00000225733_8 (sequence is synthesized)
caggctggtcccaaactcctggcctcaagtaatccttcagcctcagcctcccagattgatggaattacaggtataagccaccatgccccacctaataaatgattttaatgagaaaatgca

SEQ ID NO: 897308 - DNA, 120 bp, Artificial Sequence
  ENSG00000225733_9 (sequence is synthesized)
gcgctcggtccatccggcccgtgggctgtggggccccgggcggcggcggctacgtagctgccgccggccttggccgcggccgggcgggcggatatgtggcttaaatggcgcaggcgtcgg

SEQ ID NO: 897309 - DNA, 120 bp, Artificial Sequence
  ENSG00000225733_10 (sequence is synthesized)
tggcttaaatggcgcaggcgtcggggcctagaggctgaagggctggtcgtcctaaaaactcgtggacgtcgcgcacggttacccggacgcaggcccgcccctctggggaaccgcgagctc

SEQ ID NO: 897310 - DNA, 120 bp, Artificial Sequence
  ENSG00000225733_11 (sequence is synthesized)
ctcgcagctgggtggggaccgtcctcgcagtggcggcctccaccctgccttctcgcttagccaaggcttctggaaggctcgcaaagtgtctgttgttggaagaagccgggccctgactgg

SEQ ID NO: 897311 - DNA, 120 bp, Artificial Sequence
  ENSG00000225733_12 (sequence is synthesized)
cgcgacggattctcccagccgctcagcagagcgtctaatatgctttttgtctaatgatgttagataaaaagcaaatttggagcagttttcttattcgagttcaaaatggttcataaagca

SEQ ID NO: 897312 - DNA, 120 bp, Artificial Sequence
  ENSG00000225733_13 (sequence is synthesized)
gcgaagacaactcaaaacatcagtaacacatttggcccaggaactgctaacaaacatacagtgcagtggtggcttaagaagttttgcaaggaagagagccttgaagatgaggaacgtgat

SEQ ID NO: 897313 - DNA, 120 bp, Artificial Sequence
  ENSG00000225733_14 (sequence is synthesized)
atgggccatgggaagttgacaacgaccaattgagagcaatcattgaactacatgaaaaattacagaagaactcagcgttgactattctacggtcattagggtcgttcagcattcgaagca

SEQ ID NO: 897314 - DNA, 120 bp, Artificial Sequence
  ENSG00000225733_15 (sequence is synthesized)
ttgataagtgggtgcctcatgagctgagcggaaatcaaaactatcgttttgaagtgtagtcttcttttatgctacgcaacaacaaaccatttctcaatcggattgtgacatgtaatgaaa

SEQ ID NO: 897315 - DNA, 120 bp, Artificial Sequence
  ENSG00000225733_16 (sequence is synthesized)
aaccatttctcaatcggattgtgacatgtaatgaaaagtgaattttatacaacaaccagctcagtggttggaccaagaggcagctccaaagcagttcccaaagccaaacttgcaccaaaa

SEQ ID NO: 897316 - DNA, 120 bp, Artificial Sequence
  ENSG00000225733_17 (sequence is synthesized)
cccaaagccaaacttgcaccaaaaaaaaggtcatggtcactgttcggtggtctgctgcccatctgatccactacagttttctgaatcctggtgaaaccattacatctgagaagtatgctc

SEQ ID NO: 897317 - DNA, 120 bp, Artificial Sequence
  ENSG00000225733_18 (sequence is synthesized)
gcctgcattggtcaacagaaagggcccaattcttctccacgacaacacctgactgcgtgtcgcacaaccagtgcttcaaaagttgaaggaattgggctacaaagttttgcctcatccacc

SEQ ID NO: 897318 - DNA, 120 bp, Artificial Sequence
  ENSG00000225733_19 (sequence is synthesized)
atattcacctgacctttcgccaactgactaccacttctgctagcatcttgacaactttttgcagggaaaacacttcagcatggtgcagaaaatgctttccaagagttcgtcaaatcctga

SEQ ID NO: 897319 - DNA, 85 bp, Artificial Sequence
  ENSG00000225733_20 (sequence is synthesized)
ttttgattaatagaatatgttttagcgtagttacaatgatttaaaattcgcagtctggaaatttaatttttgcatcaacctaata

SEQ ID NO: 897320 - DNA, 120 bp, Artificial Sequence
  ENSG00000225733_21 (sequence is synthesized)
attcgcagtctggaaatttaatttttgcatcaacctaatatttctatggtaaatccttgcaaacatggaaacaatgcatttggcccagtgctttgtggttgtgtactctttttctttgtt

SEQ ID NO: 897321 - DNA, 70 bp, Artificial Sequence
  ENSG00000225733_22 (sequence is synthesized)
tggcccagtgctttgtggttgtgtactctttttctttgtttttttaatagatgggtgaggtgggtggatc

SEQ ID NO: 897322 - DNA, 72 bp, Artificial Sequence
  ENSG00000225733_23 (sequence is synthesized)
gggtggcgggcatctaattccagctacttcatgaggctgcgacaggagaatcatttgaactcgggaggcaga

SEQ ID NO: 897323 - DNA, 72 bp, Artificial Sequence
  ENSG00000225733_24 (sequence is synthesized)
tgagcgaaactgtctcaaaaaaaaaaaaagttggggtctcgctgtgttgaccaggctggtctcgaactcctg

SEQ ID NO: 897324 - DNA, 120 bp, Artificial Sequence
  ENSG00000225733_25 (sequence is synthesized)
tacaggcgtgagccaccacaccctgcctggttgtgtactcttttaaatactaagtttttaatgttaaatgctgcttttagatacactgtaaaaatacacctatcaatgagtttttttatt

SEQ ID NO: 897325 - DNA, 120 bp, Artificial Sequence
  ENSG00000225733_26 (sequence is synthesized)
tattaaaaacattgcaattgtactagactttaaatactaagcaataattcaggcttcaatgttggtttatagttttctcatttctttcatttaatacctctgtaaaatgaagcagttact

SEQ ID NO: 897326 - DNA, 120 bp, Artificial Sequence
  ENSG00000225733_27 (sequence is synthesized)
tccattttcctgaggtgagataagtgccctgcacaatgttataggcccagtaagtgagactggagctctgatctaatccctttgacattaaagtttgtgcagtaaaccagctatgtcagt

SEQ ID NO: 897327 - DNA, 120 bp, Artificial Sequence
  ENSG00000225733_28 (sequence is synthesized)
ttgccacatttgtaatagtgttcaataaattttcacttaaaggtttaatattaaagtagtagcaagaattcataaccttaattggctttaacagcttttctttccctgaaaacagatgca

SEQ ID NO: 897328 - DNA, 120 bp, Artificial Sequence
  ENSG00000225733_29 (sequence is synthesized)
tatgtacacatgcacacagattgcttacaatatcagcacgtaaaaggcctttgcacattgaagtcggcactgctttggtgccttttttgttttttggctcggtgttttgactgcaagtct

SEQ ID NO: 897329 - DNA, 120 bp, Artificial Sequence
  ENSG00000225733_30 (sequence is synthesized)
ttttggatagaattttatagttagaaagtagctaacacttgggttttataggcacaaaaaacaagtcttatactagctgtactttattttttgagttcttattaatgaggaacatccact

SEQ ID NO: 897330 - DNA, 120 bp, Artificial Sequence
  ENSG00000225733_31 (sequence is synthesized)
tttgcattgacagtgatttcaagattgctttatcagcctttaaaggattcttgactagtcgtgcacatcagaactgccaggtccccagtggttctgaagcagtaagctttgggtgggctc

SEQ ID NO: 897331 - DNA, 120 bp, Artificial Sequence
  ENSG00000225733_32 (sequence is synthesized)
tggcatcagcactttcactaagcttcacagataattctgatgcatactccaggcctgaaccactgatcaatttgaaacatgcataacaaagcaaaaaaagttttgtttcaccttttgaaa

SEQ ID NO: 897332 - DNA, 120 bp, Artificial Sequence
  ENSG00000225733_33 (sequence is synthesized)
tacagttaactcttttaccatgccagagatcattcagagagacaggtcgttgctccggagtgatacagatctggcagtacccagcccttgtgtgtgtgcgttagctcagcacctgcccac

SEQ ID NO: 897333 - DNA, 120 bp, Artificial Sequence
  ENSG00000225733_34 (sequence is synthesized)
actgcgagcccccgtaggatgtgccttgtccttccctgtttcagcacttaacacactacctggtacagagtatgtagtgggcatctgttgaatgaatgcttttcccagtagcagtgtatt

SEQ ID NO: 897334 - DNA, 120 bp, Artificial Sequence
  ENSG00000225733_35 (sequence is synthesized)
catacaatattaatataattgtcccctggcttacagataaaaatgaaagcatcaagtgcccagtgagtgagacccaggtgttcttcctccacccctagtggtcccctgggcaggtctttt

SEQ ID NO: 897335 - DNA, 120 bp, Artificial Sequence
  ENSG00000225733_36 (sequence is synthesized)
tttttttgtaacactcaccagtctgttctgtagtcaatcattgattgacttgtctgtgaacttggaggaactgtttcatagtttcattagcacagagtaaacatgtttgccatgcaaggt

SEQ ID NO: 897336 - DNA, 120 bp, Artificial Sequence
  ENSG00000225733_37 (sequence is synthesized)
tattttgcatctgcatttaagtgataatgttgaatcaatgaaaagtgttgattaagcagtagttgtagatatgctaagtttttcaaattactaatatcaagtggagattgtttttacttt

SEQ ID NO: 897337 - DNA, 120 bp, Artificial Sequence
  ENSG00000225733_38 (sequence is synthesized)
taagggtattgcttttgtgatagcataaataatggttttccttttttgtaatgtaaattaattgctggcaacttttgtattcccatagactggggaagcttaattgcctttacaagtact

SEQ ID NO: 897338 - DNA, 120 bp, Artificial Sequence
  ENSG00000225733_39 (sequence is synthesized)
caagtacttatgtacaactttgtatcaaattttctgtaatagtttatgctttagtactatatatgtactaataattttatctgacttctgtttatatcatttgtacaattacatggttgt

SEQ ID NO: 897339 - DNA, 80 bp, Artificial Sequence
  ENSG00000225733_40 (sequence is synthesized)
gggctcccggtgtcggcggatggcgggagcccgggggccgcgggctcgcggggcagcgggcgagagacgagacgccgaga

SEQ ID NO: 897340 - DNA, 120 bp, Artificial Sequence
  ENSG00000225731_0 (sequence is synthesized)
agtacagtggcccagggcagactagctggaatcagcctcccgggtgggtttcgaggcgtttccagggtcaggggtcaagtaggggcatgttcccgggacactgcttctttctgccagaag

SEQ ID NO: 897341 - DNA, 120 bp, Artificial Sequence
  ENSG00000225731_1 (sequence is synthesized)
gacgaagaatctggagagtgcaatatttggatctggtcctgctgatgtgtttctgtgctacagaaaccttctccacccctcttctacccaacagctagaggacatggggtccggaagtgc

SEQ ID NO: 897342 - DNA, 120 bp, Artificial Sequence
  ENSG00000225731_2 (sequence is synthesized)
atgtggctggagccagtgtggtcgctgtcgtgatggccgagtccagatgagctgccgctggggaaacacagggtacctgaggtctgaggtcgggacgtctttgtccaaccactaagagtc

SEQ ID NO: 897343 - DNA, 120 bp, Artificial Sequence
  ENSG00000225731_3 (sequence is synthesized)
cacattctcctttggagccgggtctccgttttctccagcatcatgggcccctcaaggaagctgatgcatgccacaggctgtcttctcagaaaaggtacccaagaacacattttgggtttg

SEQ ID NO: 897344 - DNA, 120 bp, Artificial Sequence
  ENSG00000225731_4 (sequence is synthesized)
catgtggattgggaagcccaacgtggcctccagcggtgctccttggctttgtctagactgcaggatcccacccatgccctgtggatttgccacgtggacactgacgtgagcaaatggaca

SEQ ID NO: 897345 - DNA, 120 bp, Artificial Sequence
  ENSG00000225731_5 (sequence is synthesized)
cgtggacactgacgtgagcaaatggacaattcaacatcagtggcagaaaggagctcagtctggttcacacgtggaaggcagcacattctgaaagagaatcacttgaacccaggaggcgaa

SEQ ID NO: 897346 - DNA, 120 bp, Artificial Sequence
  ENSG00000225731_6 (sequence is synthesized)
gcctggacaacagagcaagactctgtctctcaaaaaaagaaaaagaaaagcgacgacattcagtcaatcagccagatatttttggtgatgctgcaactcttaatggtatcctgtctggat

SEQ ID NO: 897347 - DNA, 120 bp, Artificial Sequence
  ENSG00000225731_7 (sequence is synthesized)
tgacaaagagttcacttgtcaagctgtgagtggaacacagaattgtgaggcctatggaattcaagcattgatcttgatattatggatgaggacaaaaagggtgggtgacttgaagctgtt

SEQ ID NO: 897348 - DNA, 120 bp, Artificial Sequence
  ENSG00000225731_8 (sequence is synthesized)
ttcttcccagaatttgagctttgtgatcattgaatcaggacttgaatcgacactccttggctccctagtcctttttctgcttttcctttggtggtgattggaggctgtagtaggctgttc

SEQ ID NO: 897349 - DNA, 120 bp, Artificial Sequence
  ENSG00000225731_9 (sequence is synthesized)
ttctgttgctataaagagatacctgaggctgggcaatttataagcaaaagaggtttgattggctcccagttctgtgggctttacaggaagcctggtgccggcatctgcttggctcttggg

SEQ ID NO: 897350 - DNA, 120 bp, Artificial Sequence
  ENSG00000225731_10 (sequence is synthesized)
gaggcctcgagaagcctccaatcatggtggaaggcaacggagaagcaggagggtagagagatgccacgtgcttttaaacaaccagatcttgcgagaactcactatctcaaggagagcacc

SEQ ID NO: 897351 - DNA, 120 bp, Artificial Sequence
  ENSG00000225731_11 (sequence is synthesized)
aagccatttaggaggcatctgcctggtgacccaaacacctcccaccagccccacctccaacattgcgaatgacatttcaacgtgagatgtggaggggacatccagactgtatcagaaacc

SEQ ID NO: 897352 - DNA, 120 bp, Artificial Sequence
  ENSG00000225731_12 (sequence is synthesized)
aagagataacaacttagtagacatattccaaaaaattatgacccacagggtgccgatcagtgtgcagagaatgtcttcatttacacacaaaaagacacagacaagacactcagcagaggt

SEQ ID NO: 897353 - DNA, 120 bp, Artificial Sequence
  ENSG00000225731_13 (sequence is synthesized)
tctcagaggggctaagtgcggaaggcttcgtgtgttcatttttattctttggggctgaaagaatgctttataccatgagctgtgcttcttttaaaatagaaataaaatgcttagttagtc

SEQ ID NO: 897354 - DNA, 120 bp, Artificial Sequence
  ENSG00000267783_0 (sequence is synthesized)
acagttccagggagggagagtcagagcctttctgtgaactatggggaaatggctgaccactccgcctctggatggatagatacatggacagctggtttaagttttgacaaagaaaaaccc

SEQ ID NO: 897355 - DNA, 120 bp, Artificial Sequence
  ENSG00000267783_1 (sequence is synthesized)
gacagccaacccactggacagggcaagaggccacttctgggggagagtggacaaagttgcttcagtccaccagagacaaaagcacaaacaatcattctaaatgaagtgcttttaattttc

SEQ ID NO: 897356 - DNA, 120 bp, Artificial Sequence
  ENSG00000267788_0 (sequence is synthesized)
tggaggtagtagagctggtggtagtgatggaggtgatggaggtggctgtggtggtggtggtgatagtgatggaggtgatgttggtaatgatggtattggtggtgatgatggaggtgatgg

SEQ ID NO: 897357 - DNA, 120 bp, Artificial Sequence
  ENSG00000267788_1 (sequence is synthesized)
tggtaattgtgatggtggtggcgatggaggtggtagtggtggtgatgataatgatggtagccatggaggtgatggtggtggtagagatggtggaggtggtgatggtgttgggagtttatc

SEQ ID NO: 897358 - DNA, 120 bp, Artificial Sequence
  ENSG00000267789_0 (sequence is synthesized)
ctaagagggaggtgggaaacaaatgccagtgggcaagggcgaaacagggagacaatttcagcaaccatttcagtgccctaagaaggagatggcgaggagtgaatgatcttcgtggcctgg

SEQ ID NO: 897359 - DNA, 120 bp, Artificial Sequence
  ENSG00000267789_1 (sequence is synthesized)
caggaggagctcacattgttgacaattaacccaatccaagagacctgcataaatcaatcactacaggaaaaaaaaaattgttcttgatctacagtgacaaatgtgtagacaaggatgctg

SEQ ID NO: 897360 - DNA, 120 bp, Artificial Sequence
  ENSG00000267789_2 (sequence is synthesized)
ccaagtgttgtaaagaaccgaggcacctcaccaatagccagcatgggcttgctggtcacaagagtgtgccatcttggaagcagatcctccagccccagtccagtcttcagatgactgcag

SEQ ID NO: 897361 - DNA, 120 bp, Artificial Sequence
  ENSG00000267789_3 (sequence is synthesized)
tcccaactgtcattcgagttcatgggagataataagccagaactacccagccacaagccactcttgcgttcctgacccacagaaactgtgtgagataataaatattagttgttgttttaa

SEQ ID NO: 897362 - DNA, 120 bp, Artificial Sequence
  ENSG00000225738_0 (sequence is synthesized)
ccagaaaaacggtcagaagtctgaggtacctgagagaagacagcaaaatgagatctggaatttgaggagcacctgttaggagaagagccatctctactactccccaaaagattccctgtt

SEQ ID NO: 897363 - DNA, 120 bp, Artificial Sequence
  ENSG00000225738_1 (sequence is synthesized)
ccaaagaacctgagcatcagtgaattctggtatcttctgggagccctggaactaatctcttgaagataccaacggatgactgtgttttaaaaggcgagagagagatgtcactcaggactg

SEQ ID NO: 897364 - DNA, 120 bp, Artificial Sequence
  ENSG00000225738_2 (sequence is synthesized)
aattctggagaaattattcaaagtagtcctaaactgttcatcctatcctgccttacccttctctcagaaaccccaacaaaggccatgccttacaacttaccttgctcctgtttctgcctc

SEQ ID NO: 897365 - DNA, 120 bp, Artificial Sequence
  ENSG00000225738_3 (sequence is synthesized)
catctctactgtaagcacaagcaacacagagggagtggggatgtcaggagggtatcccaaggacaacatacaggattttgtcatattcttcctccaaagatcacagaaaacttgtgatcc

SEQ ID NO: 897366 - DNA, 120 bp, Artificial Sequence
  ENSG00000225738_4 (sequence is synthesized)
atatccactattttttgttccaagtctctgataagcaagtcatccaatccatgttaaaacaggctggattcttgcatcataagacgttaatttatatttttacaagatccttttagctgc

SEQ ID NO: 897367 - DNA, 120 bp, Artificial Sequence
  ENSG00000229647_0 (sequence is synthesized)
ggttttcccagggcatggaaaggacagggctcccagtggagatatcatgtagctatagggcctagaagtattttttcagtagatgaaatttagaaataatttgaatattttatgctgggg

SEQ ID NO: 897368 - DNA, 120 bp, Artificial Sequence
  ENSG00000229647_1 (sequence is synthesized)
aggtagcttgtggagtgaaatggtcgggtaaaggaaacactgagttcaagtgcttctttataaaggacacttaactgatctaaatatttgtcaagctgaatcgctacatccactctcacc

SEQ ID NO: 897369 - DNA, 120 bp, Artificial Sequence
  ENSG00000229647_2 (sequence is synthesized)
tgcctgaaatcaatatgctcaagtcaaacgcatttgcctgcatctgaatgtggagaatgaacttcttaaagctgaactggcagctggaaggggagagagaagagctggacagggagccag

SEQ ID NO: 897370 - DNA, 120 bp, Artificial Sequence
  ENSG00000229647_3 (sequence is synthesized)
gacaccggagttcttttccactgtggtgggatctggaagaagctgttgaatctctgtagagttagcttttaaatgctgtgagtctttggaaagctgtgcgaataactgctaaacacccag

SEQ ID NO: 897371 - DNA, 120 bp, Artificial Sequence
  ENSG00000229647_4 (sequence is synthesized)
gacagcttatgcattttttgaaaaaggttcctggtgctggttccagcagaatagacacagagatgcatggcctaactcccactccctcttcaggactgagccacgcagccccccatctgc

SEQ ID NO: 897372 - DNA, 120 bp, Artificial Sequence
  ENSG00000229647_5 (sequence is synthesized)
tacattccaagtgattagtccatagtgtggtacaaaggttgtacccatcttgcctgaattcaggatctcttggaaaaccaccccagctctgcagctcctggtggggtgctgaggcctctg

SEQ ID NO: 897373 - DNA, 120 bp, Artificial Sequence
  ENSG00000229647_6 (sequence is synthesized)
ctgcagctgcatcgcagtttactttcccctctgcctagtcctgctgccttcactccccaacagatcacccgctctgaacatgccatctactgtggaaatcttcaatctttaattaatttt

SEQ ID NO: 897374 - DNA, 120 bp, Artificial Sequence
  ENSG00000229647_7 (sequence is synthesized)
tcctgttacaggaagattaagtctaaaagggtatctcccctagttgatccagaactaaataacattgttttcagtacttccagtaacttgcttacactcttacttctaaagcattgaatg

SEQ ID NO: 897375 - DNA, 120 bp, Artificial Sequence
  ENSG00000229647_8 (sequence is synthesized)
tatcatcttatgtgcttgtcacccccagcttgtgtcataggagaaagtatacggagatcaggtacaacttcagttcaacagcttatgagctattggatcagtctccttattaatctctca

SEQ ID NO: 897376 - DNA, 120 bp, Artificial Sequence
  ENSG00000229647_9 (sequence is synthesized)
gagcctcaatttccttgtttaaaatgggggcaatacctaccttaaggaatttcttgaggatcaaaagaaaccctagtaacaaagccttgaaccatgtctgacttatagtatatattctaa

SEQ ID NO: 897377 - DNA, 120 bp, Artificial Sequence
  ENSG00000229647_10 (sequence is synthesized)
tcactccccaacaggtattgttccccagagaactccctgcccccagtcacctgtaagcaaatctccactgcagtctgtggcctgggaaacctgctctaggatcccaaagtgaacacagct

SEQ ID NO: 897378 - DNA, 120 bp, Artificial Sequence
  ENSG00000229647_11 (sequence is synthesized)
tcccattgaaatgtgtctttgggtgttaatctgtcctgccatctttacatctaatcaagaggtagagcttcccctggtgttcctgctgggtacataaaggatcttttccattgtctttta

SEQ ID NO: 897379 - DNA, 120 bp, Artificial Sequence
  ENSG00000229647_12 (sequence is synthesized)
gcaagttcttttcatgtcttgtccatgaattcttcattcattcattcattcattcatccaacaaccaagcattcactgatgctccaattgtgcaagacactgttttaggccttgagaata

SEQ ID NO: 897380 - DNA, 120 bp, Artificial Sequence
  ENSG00000229647_13 (sequence is synthesized)
caaactgcacaagcaggacaatgtaaccagtgttatgcagggtctggtctagtgggaggagaagacagtgaccatggcccatgatgagtgacagaatgaaaagtaatcaggaagatatga

SEQ ID NO: 897381 - DNA, 120 bp, Artificial Sequence
  ENSG00000229647_14 (sequence is synthesized)
tgagacctaaatgacaaggagtgaagccaatggaacatctgaaagaatagttttctagaaagagagcccagctagtgtgagccctaaagtaggtagaaaatgggcttggagggttttata

SEQ ID NO: 897382 - DNA, 120 bp, Artificial Sequence
  ENSG00000229647_15 (sequence is synthesized)
tgaggagcagcgggaagtaggcagaggcctggtcattgtaggtcatgttggctagagtaaagagcttgtgtttgattctcagggcaatgaagagcctttggagaatttaaagcaaagtgg

SEQ ID NO: 897383 - DNA, 120 bp, Artificial Sequence
  ENSG00000229647_16 (sequence is synthesized)
ggagggggaacaagagctgatttacattattctgaacagcaccaggagggatagtactggataataagagtggtaaaaggagaccatttaggaggttatagcaattgtccagggtggcct

SEQ ID NO: 897384 - DNA, 120 bp, Artificial Sequence
  ENSG00000229647_17 (sequence is synthesized)
ggcctgccacggtagccacagagacggtgagaggtgaggaggtgccaggtaccgtcatgggagacataatgacattcgatcaatgctgaactacatatatgacggtggtaccatgagatt

SEQ ID NO: 897385 - DNA, 120 bp, Artificial Sequence
  ENSG00000229647_18 (sequence is synthesized)
ataatggagctgaaaaattcccatcacctagtgacctcgtagctgctggaacattgcagggcaatgcatacacacatgtatgtggtgatagtggtgcacacaaacctactatgctgccag

SEQ ID NO: 897386 - DNA, 120 bp, Artificial Sequence
  ENSG00000229647_19 (sequence is synthesized)
tcctataaaagtgtagcacacaggattatgtacagtacataacacttgataatgataacaaatgactaggttactggtttatgcatttaccatactatacttttatcgttattttagaga

SEQ ID NO: 897387 - DNA, 120 bp, Artificial Sequence
  ENSG00000229647_20 (sequence is synthesized)
gtactccctctacttatttaataaatatagttaactgtaaaacagcctcaggcaggtcgttcaggaggtattctaaagaaggcattactatcacaggagatgacaactccatgcgtgtta

SEQ ID NO: 897388 - DNA, 82 bp, Artificial Sequence
  ENSG00000229647_21 (sequence is synthesized)
cctatgctaatgtgtgcttgtgtcttagtttttcacaaaaaaggtttaaaaataaaaatacaaaagaataaaaaaggttata

SEQ ID NO: 897389 - DNA, 120 bp, Artificial Sequence
  ENSG00000229647_22 (sequence is synthesized)
tttcacaaaaaaggtttaaaaataaaaatacaaaagaataaaaaaggttatagaataaggatataaagaaagaaaatacttttgtacagctgtataagtgtttgtgttttaaattaagtg

SEQ ID NO: 897390 - DNA, 120 bp, Artificial Sequence
  ENSG00000229647_23 (sequence is synthesized)
gctgttgaatctctgtagagttagcttttaaatgctccttgaattctcaggcagtgaatgcactaccgtgtgcagaaggcaaggacatggctgagcatgttgttttcttcaccttatatg

SEQ ID NO: 897391 - DNA, 120 bp, Artificial Sequence
  ENSG00000229646_0 (sequence is synthesized)
gaatggtgttgccatcactgttctggcaccggagaaaggattctacatcgttaggagaaaagaaaaaggagaatttgggcttgcactgagaggattacctttggtggtctggaagtggtg

SEQ ID NO: 897392 - DNA, 120 bp, Artificial Sequence
  ENSG00000229643_0 (sequence is synthesized)
acaggaagaaagtggtggagtcagaggtcacaatccaaagcaaggtgacagtctcttgacgaagacaccctgagtgctgaattaaggggctaaataacagtgctatagtggtttcataat

SEQ ID NO: 897393 - DNA, 120 bp, Artificial Sequence
  ENSG00000229643_1 (sequence is synthesized)
ccagcaatttggcaagccaagctttgatggctctggcagaaagccttcctgttccaaactcaccacttatcaccatagtacccgcgttcaggcattaagaagaaaagagcatccaatccc

SEQ ID NO: 897394 - DNA, 120 bp, Artificial Sequence
  ENSG00000229643_2 (sequence is synthesized)
tctgctttcctgcatcggctcccatgcacaagcaaatgtgttgtgttagtggctatcaaatattcatgtatttgatcaaggaaatttgtatttccaaatggtaaaacaaaaatactacta

SEQ ID NO: 897395 - DNA, 120 bp, Artificial Sequence
  ENSG00000229643_3 (sequence is synthesized)
gggagtggaatgaattgatgctgggtgggatgtggcctccacacttaactcttgttttcctgaattacatgtttctcttcgggcctagggtttcctgcatctggctcaatgacttccaca

SEQ ID NO: 897396 - DNA, 120 bp, Artificial Sequence
  ENSG00000229643_4 (sequence is synthesized)
ctaagcatttcccagttcatggagaacgacactcattggaatccactacgaggcttttgggtcctctgacaggaatcatcgaagattgcctgatgccagcacaaggcagctcattgtctc

SEQ ID NO: 897397 - DNA, 120 bp, Artificial Sequence
  ENSG00000229643_5 (sequence is synthesized)
agtggctcttgatggtactgctggacacccttttcaggattgctatcaccacagacggcctttgagacactgactcaacatcatctgcaactgtgagaagccaatcagaggtgtgagaac

SEQ ID NO: 897398 - DNA, 120 bp, Artificial Sequence
  ENSG00000229643_6 (sequence is synthesized)
acagctccaccttggtcttgccgttgtcatggttactgcctttccctgagagcctctgtgaggcccaggatgaagagagacagtgtggtaaagagaacaaccatctttcactgacgccag

SEQ ID NO: 897399 - DNA, 120 bp, Artificial Sequence
  ENSG00000229643_7 (sequence is synthesized)
cctctggggtctcagggttttctgggtgtggctcaccattttccatactaaacgttttctgctccatgaagaacgacctacgtgggaatccattgtgtgattgtttccttcaaaatactg

SEQ ID NO: 897400 - DNA, 120 bp, Artificial Sequence
  ENSG00000229643_8 (sequence is synthesized)
tcaagttttaaagactgggcagctttgatagttttaaaactataaattccagctatagctgctaacaaggaaactcttgttctcccacttttattggatggctgcatgattcctgtggga

SEQ ID NO: 897401 - DNA, 120 bp, Artificial Sequence
  ENSG00000229643_9 (sequence is synthesized)
tgagaaagaggcaaccatgtctggcttttgcctggtaatccagcctctgtttcatttcatctgcacaaccttctcattgtggaagggttctttcatcgggctgttggtggatgggactgc

SEQ ID NO: 897402 - DNA, 120 bp, Artificial Sequence
  ENSG00000229643_10 (sequence is synthesized)
ctctcatcacaattatttagctgccctgaaatacatactttagtaaacaatttagcacttgtaatttttcaactttgttttcagcggaagttaatgatgtatggcatttctagtaggtaa

SEQ ID NO: 897403 - DNA, 120 bp, Artificial Sequence
  ENSG00000229643_11 (sequence is synthesized)
atgaatgtctgaattgttgtgagttactttagtcacttctcagctaacaatttaagttatcaaaggtctttacttgtgcaatatcataaatgatggatattaaaaattaatagaatggat

SEQ ID NO: 897404 - DNA, 120 bp, Artificial Sequence
  ENSG00000229643_12 (sequence is synthesized)
ctcttagtttgacccataatagcaatttccaaccaaagattccacaggcagggtccagatctgggcaacagttattaacataatggttattgttgagaataaattttgatacgtctagct

SEQ ID NO: 897405 - DNA, 120 bp, Artificial Sequence
  ENSG00000229643_13 (sequence is synthesized)
gtgcttgaatgtcagtgctttgaagggacaggtttggcgtattaataagaaagggtgcattggactgaatactaataaatgaattgtttttcttatcttctataacatgaaagttcaatt

SEQ ID NO: 897406 - DNA, 120 bp, Artificial Sequence
  ENSG00000229643_14 (sequence is synthesized)
tgagatatagaaacactggaacatttcacagcatggcctgacatttcactgcgtttttattttttaacgatgtacaaagttcattaaatacacaaaggtaggactgctacaggaagaaag

SEQ ID NO: 897407 - DNA, 120 bp, Artificial Sequence
  ENSG00000229643_15 (sequence is synthesized)
tggtggagtcagaggtcacaatccaaagcaaggtgacagtctcttgacgaagacaccctgagtgctgaattaaggtgagaatcaactttcagctgttaacaggggacagggagaatgaag

SEQ ID NO: 897408 - DNA, 120 bp, Artificial Sequence
  ENSG00000229643_16 (sequence is synthesized)
ttatcagcagttaacattattggattaattgaaatgaatgttgacagagattttattggctttacatcaaatggagtatagtacttcaaattgcgtatttgatgagggtaaactcttatc

SEQ ID NO: 897409 - DNA, 120 bp, Artificial Sequence
  ENSG00000229643_17 (sequence is synthesized)
aatttgccacatgtaaaattgagaattaattaagagattacacaacccatacattatgggtatctcatataaatttaaatacacatgtgcaaacttgcagtgtgcaaatatttgtctata

SEQ ID NO: 897410 - DNA, 120 bp, Artificial Sequence
  ENSG00000229643_18 (sequence is synthesized)
cctaaatatatccaaatccattgatgaacagttagaaatttagaaattattctcccattttatcattccctttcctagaatttggtcacaaatataatttttccatctctttgaatccta

SEQ ID NO: 897411 - DNA, 120 bp, Artificial Sequence
  ENSG00000229643_19 (sequence is synthesized)
ctctctggaggtatgtaatgtatggacacagtaaagccttgagatatcacagggtttgtatcagagaaaataataacactggtgttacaaaagatccactgtgaggagaaagatatattt

SEQ ID NO: 897412 - DNA, 120 bp, Artificial Sequence
  ENSG00000229643_20 (sequence is synthesized)
gatccactgtgaggagaaagatatatttaacatgattacaaatacagaagtattatttcatcaaaagctgatatcagtgaatacaatttgtttttaatgttttatttaaaatatttaata

SEQ ID NO: 897413 - DNA, 120 bp, Artificial Sequence
  ENSG00000229643_21 (sequence is synthesized)
atattggtaagaaataatgattcagaatttcctttaatttgttgattatttaaaatgtaagtgaaatactaaaaagtactgtataatgtagtttcatgaagcattctctatggttttata

SEQ ID NO: 897414 - DNA, 120 bp, Artificial Sequence
  ENSG00000229642_0 (sequence is synthesized)
gattttctgaatggagcgtggtagcatgttatagagtccaaggaatttgccaaatccgtgtgagaagatttgcctctcacatgtgagagaattttttgagaaaaaaaagatcctgacccc

SEQ ID NO: 897415 - DNA, 120 bp, Artificial Sequence
  ENSG00000229642_1 (sequence is synthesized)
gaaggtggagaaggagatttagaggaagagtgataaatcagaagtcttcgtccaagaattagctttgcaccatctacagacctaagcagctgcagtcctggaactgtgtgataacttgcc

SEQ ID NO: 897416 - DNA, 120 bp, Artificial Sequence
  ENSG00000229642_2 (sequence is synthesized)
cagaaaatcttcttgtggaatctgtctttacatggaaaagacttggcaatatttgtacagcaactggaagaaaggtctttgctgagatatacaaagaggcagaatgtgtgtggatcaccg

SEQ ID NO: 897417 - DNA, 120 bp, Artificial Sequence
  ENSG00000229649_0 (sequence is synthesized)
agtttcttgaaacagctccatattctttcttctggcctcccacatattccttgggctagaaatctctttcttgattttaatcttggcagccaccctccatgacagccttaggtctgcaca

SEQ ID NO: 897418 - DNA, 120 bp, Artificial Sequence
  ENSG00000229649_1 (sequence is synthesized)
ttcatcgagagagccttgcttccttcccagcaccctgcacacgggtgtacatgggtacacatacatgcacacacacatgcacacacatatgcacacacatgtacacacatgcacgcgcac

SEQ ID NO: 897419 - DNA, 120 bp, Artificial Sequence
  ENSG00000229649_2 (sequence is synthesized)
acacacacacacatatacacacacgcatcctttgttaggagtgagtttactactacattctggcctgtctcccacgttcgagtcaggcgaaggggaacagcagctttgaagatgaattta

SEQ ID NO: 897420 - DNA, 120 bp, Artificial Sequence
  ENSG00000229649_3 (sequence is synthesized)
accagttcttcctgagggcggattgcggtctccttatctgacccttgctgagagagaaggagcagcgtggaggaggcggcagtcagggaagccttgtctcagtccaagagcaaagtgact

SEQ ID NO: 897421 - DNA, 120 bp, Artificial Sequence
  ENSG00000229649_4 (sequence is synthesized)
accgtgtgctgagcactggagcttggtgacccaaagatgaataagactcgactcttatccttaaggagcctgcagtctgatcaagtcattactgagaagagaggaaggaaaagataccct

SEQ ID NO: 897422 - DNA, 120 bp, Artificial Sequence
  ENSG00000229649_5 (sequence is synthesized)
tggcctttccaacttgtcaagggtcaactgaattcctgagccggtccccctgagagggcagtgggcgagattccagcaggtaatggatgagcacagctatgccctgacagggacattgcc

SEQ ID NO: 897423 - DNA, 120 bp, Artificial Sequence
  ENSG00000229649_6 (sequence is synthesized)
tgcaattggttccagtcatatatggagccaaactgctttgaaaattgggggggatggtgacagaagagagcaggcccacccctcccccatcccctaggagcctagggccctgtcttgatc

SEQ ID NO: 897424 - DNA, 120 bp, Artificial Sequence
  ENSG00000229649_7 (sequence is synthesized)
ccccttctgggagatgaaacgtgtggtttcccaaagctaggagcagagcaaatatcttctgcctcggaggggttggtctctgcacaggctgggaacccccagggaagcagcactgagggc

SEQ ID NO: 897425 - DNA, 120 bp, Artificial Sequence
  ENSG00000229649_8 (sequence is synthesized)
cctaggagagagggcagaggccagaggcagggtactgcctgctcagaaggtcagattccagagcaaacagcaagctgtctgccttttcagactctgaaaggatgggggtaggggcaggaa

SEQ ID NO: 897426 - DNA, 120 bp, Artificial Sequence
  ENSG00000229649_9 (sequence is synthesized)
ccccaggacactgtgtctgcccaagtgtttgctgagaaagtggaggccagtgcagccaccggttgagtgcagccactgggtcagcgcagcggccgggtgagtgcagccctcggattttgc

SEQ ID NO: 897427 - DNA, 120 bp, Artificial Sequence
  ENSG00000229649_10 (sequence is synthesized)
cccaataaccagagtcccattagcacagtctgagcagggggcctggcagagcacttcgccctcctctgtcatttagcggggaaacagttcacacagggacaactaccatcttgagtctct

SEQ ID NO: 897428 - DNA, 120 bp, Artificial Sequence
  ENSG00000229649_11 (sequence is synthesized)
tctgtcaactgccctgtggtctctctggccacactgggacagagcatcactccagtaaaccctctgagctcatttccctagctgagcaggttcccgcctctgttcctagagcaccagcat

SEQ ID NO: 897429 - DNA, 120 bp, Artificial Sequence
  ENSG00000229649_12 (sequence is synthesized)
gagtgagcctcaggaaccaccccagattttaggagttaggagtgggtctagctgtgctgatggccacctggggctctggtgaactctagcctcctcccatccgcccatcgagggcatcgt

SEQ ID NO: 897430 - DNA, 120 bp, Artificial Sequence
  ENSG00000229649_13 (sequence is synthesized)
caggcctctgtgctgagccatttgcctcctgctctgccccaaacctgttcagcccccaacattctcactttcctgtccccttcatgcttcttaggtcatttctctctgcttctgcaaacc

SEQ ID NO: 897431 - DNA, 120 bp, Artificial Sequence
  ENSG00000229649_14 (sequence is synthesized)
tccctgccaaatgttcccccaccccaaaccgacccttttcatctctatgtccccccgtgtacacctctctcaaaatgcagggccacggggccctccttcttagggactaggccatgccta

SEQ ID NO: 897432 - DNA, 120 bp, Artificial Sequence
  ENSG00000229649_15 (sequence is synthesized)
gactaggccatgcctaggggtagggctgctgtggcattagtgacaaaaactgctatgtctacccacgtaaatcacataaatatacaagcaggggccaggcgtggtggctcatgcctataa

SEQ ID NO: 897433 - DNA, 120 bp, Artificial Sequence
  ENSG00000286561_0 (sequence is synthesized)
tgtgagtgccccaactgtctaagtgggaaagggagaccctcctctcccgaacacacaccggagaagctgaaggtctgtttgtgggagaagtttccgactttacctaaagctgagtcaagt

SEQ ID NO: 897434 - DNA, 120 bp, Artificial Sequence
  ENSG00000286561_1 (sequence is synthesized)
actttacctaaagctgagtcaagttagagagccaagcgaaatacaggggtagagaaagcagcagaaaggccctgggagcttgccgggtcccaaagcagcccattcctgcctggcaccaca

SEQ ID NO: 897435 - DNA, 120 bp, Artificial Sequence
  ENSG00000286561_2 (sequence is synthesized)
aggagcagcagactgaaattattaactggcagcaaaccagccttcagcatacacatgatgacaatgcctgggaggattctgttggagaaacaagaaggaaggaaacttggatcttgagtg

SEQ ID NO: 897436 - DNA, 120 bp, Artificial Sequence
  ENSG00000286561_3 (sequence is synthesized)
acttcatagagcaaactggtctggcataatggaacatctctatggactgctgcatgaatgttcgataacactttattttgtttgagccattgcattttgttctgattttactatatatgc

SEQ ID NO: 897437 - DNA, 120 bp, Artificial Sequence
  ENSG00000286561_4 (sequence is synthesized)
tgctgcagcaagcacagaggattgcatttgagacactttattcaagtagtttagtaatattctaaaaaaattagtatttattataagaattaacaattagtatacatcaaaagggtgctg

SEQ ID NO: 897438 - DNA, 120 bp, Artificial Sequence
  ENSG00000286561_5 (sequence is synthesized)
tttagccacttagaaaaagctgatctttagcattttacaaaagtctatttaaaaataacttacataaaagtgtaagagaaaacaaccaagatgagtgaagttgttatattgacaatatta

SEQ ID NO: 897439 - DNA, 120 bp, Artificial Sequence
  ENSG00000286561_6 (sequence is synthesized)
tacttcattctaatttattcattacgattttaagaaatttgcatttggcaacacttggtttgtcctacctccagcgactgtttttatttatttggcaacacttggttggtcctacctcca

SEQ ID NO: 897440 - DNA, 66 bp, Artificial Sequence
  ENSG00000286561_7 (sequence is synthesized)
atgtatgtatgtatgtatttatttttgagacagagtcttactctcgcccaggctggagtatagtgg

SEQ ID NO: 897441 - DNA, 120 bp, Artificial Sequence
  ENSG00000286561_8 (sequence is synthesized)
cccgaagtgctaggattacaggtgtgggccaccgtgcctggcctccagtgactgtttatatttagcagaaataaaattatgtacaaaccaggtggatatgcttctaactagtattaatta

SEQ ID NO: 897442 - DNA, 120 bp, Artificial Sequence
  ENSG00000286561_9 (sequence is synthesized)
ggttttattaaatgtttattgatttacacatatttttatacagtgataccaaaattaaataggaactaagtatcaacatataaagttagaaagaatgatgactatacgaatgaaagtcct

SEQ ID NO: 897443 - DNA, 120 bp, Artificial Sequence
  ENSG00000286561_10 (sequence is synthesized)
aaagtcctgcttataattataatgttaaataatattttgttagtttaaatgacacctctgatttggttacaactataattacttctttgctggcatttaaaactaaaacagaagaagaat

SEQ ID NO: 897444 - DNA, 120 bp, Artificial Sequence
  ENSG00000286561_11 (sequence is synthesized)
tacaaaatcttagggatctgtggatcatagatgctatgcagcctaactttacagtgaagaatttttctcaggctctctgaaaagtgtcacataatcttttccttacactctacttacagt

SEQ ID NO: 897445 - DNA, 120 bp, Artificial Sequence
  ENSG00000286561_12 (sequence is synthesized)
gcttgagagtacactcctcatctcacataaggaaatccattccataaccaggcagttctaattgttggaaacacttttactgggcagaaatctgtttctatagccacttcatccactgat

SEQ ID NO: 897446 - DNA, 120 bp, Artificial Sequence
  ENSG00000286561_13 (sequence is synthesized)
tttatttcagccttttagagttacaaaaaatgaatctcaacccttcttctatgacagtaacttaaatacttacttttacctatcaaatagtatcagattattacctgagaaaatttcctt

SEQ ID NO: 897447 - DNA, 120 bp, Artificial Sequence
  ENSG00000226423_0 (sequence is synthesized)
acagtcagagatcagaggccacaccatcctagcagtggagcaggaccagctgggacagggtccttctgtgacacctgctgcatcaccagcctatgtgaatggattcagctgccagaactc

SEQ ID NO: 897448 - DNA, 120 bp, Artificial Sequence
  ENSG00000226423_1 (sequence is synthesized)
acagagtatcagtattagcaccgaaacctcacaggaaaaatgctccacgtttagctccatgaacttcagacttaaacagcatcactggctcctgaccaggattccagctccacaaacctc

SEQ ID NO: 897449 - DNA, 120 bp, Artificial Sequence
  ENSG00000226423_2 (sequence is synthesized)
gctccagctctgagaccctcagacttgaaccgcagcaccagctgttccccagatctccagctccatgaccctcagacttaaacaacagcagcaccagctcatccgtgggtctatatctcc

SEQ ID NO: 897450 - DNA, 120 bp, Artificial Sequence
  ENSG00000226423_3 (sequence is synthesized)
acgaccctcaagctaggaaaacatcagctcctccccgggtctccaaccgcacgaccctccaactagaaacacaccagctcctccctcagtctccagctccacaagcctcccactagaaca

SEQ ID NO: 897451 - DNA, 120 bp, Artificial Sequence
  ENSG00000226420_0 (sequence is synthesized)
ctctaagctgactcagctgcctgaagtgtctgtggctttgggacagatggccaggatcacctgccatggagaggacttagaaagctattatgcacactggtaccaacacaagtcagtcca

SEQ ID NO: 897452 - DNA, 120 bp, Artificial Sequence
  ENSG00000226420_1 (sequence is synthesized)
cctaatctcattgtatacaatgatagaaagctgtgctcagagatcactgagcgattctctggttcctgctcagggggaacagccacactgaccattactggggctcacgttgaagacgag

SEQ ID NO: 897453 - DNA, 120 bp, Artificial Sequence
  ENSG00000286562_0 (sequence is synthesized)
gccgccgcggggctgcggccgaggaggcgaggacccagacgcccagagctggcgcttcctgtctctctgcgccagcctcggcctgcggcggggtagagcgccggaaacggctttagcggc

SEQ ID NO: 897454 - DNA, 120 bp, Artificial Sequence
  ENSG00000286562_1 (sequence is synthesized)
tttgggaattgcgggcgaaagttaaacggagagatcttagagatttgcccgcaaatcgaaacaaaactgcccctactaactctgtgccaacctgtgcaccgtctcactgtgaacccctga

SEQ ID NO: 897455 - DNA, 120 bp, Artificial Sequence
  ENSG00000286562_2 (sequence is synthesized)
tggagaagattttaaattattagtaattatttgtggagacgggatctcactgtgattcccaggctggtctccaactcccagcatcaaagtgatcctcccgccgtggcctcccatatgtgc

SEQ ID NO: 897456 - DNA, 120 bp, Artificial Sequence
  ENSG00000286562_3 (sequence is synthesized)
tgagatgacagcacaaagaaaagtaaaagccatgaagctcagtatctccctcctcaccaccacaagactatttacagtatgagtcaatttcagaacttctgagagcatgaggcagaccca

SEQ ID NO: 897457 - DNA, 120 bp, Artificial Sequence
  ENSG00000286562_4 (sequence is synthesized)
caccacttccagcttttgaggatctggacattttcaactttggtactgaggaaattatttaagggcattgtgagttgtttgttaattttaagtaagtaaagcatttacattatttaaaaa

SEQ ID NO: 897458 - DNA, 120 bp, Artificial Sequence
  ENSG00000226426_0 (sequence is synthesized)
aaatgaagcagttggaagcaaagaagctgctgctttgggatccgcaaatcagaggatcaggaaatgtgaaacaactttcctgacagcttcagggagtgacatccaggcaggaactcggcg

SEQ ID NO: 897459 - DNA, 120 bp, Artificial Sequence
  ENSG00000226426_1 (sequence is synthesized)
gcttggcagagctggaggaggatagcagcctgcattcactggatgcctggtgtgaggaaagaactggcacatgtcctgattcagccatctgtgcttcctctccccaccaaagtgaaaatg

SEQ ID NO: 897460 - DNA, 120 bp, Artificial Sequence
  ENSG00000226426_2 (sequence is synthesized)
aaacacattctctccattcaagttctacttcaagacctcacaatagagggcacctccacgatctcattcctggcagcacttgaatgggggctgctgaacaatacactctcagtacttgct

SEQ ID NO: 897461 - DNA, 120 bp, Artificial Sequence
  ENSG00000226426_3 (sequence is synthesized)
cagaaagaaagacaagacttgggacgaaaacaggtgaaagctcttccgagatttagagagacaggacccggtgccgaattgctttccaggcggtcaagccgcattgctcattacgtggag

SEQ ID NO: 897462 - DNA, 120 bp, Artificial Sequence
  ENSG00000226426_4 (sequence is synthesized)
tgaatgggatgattccaaaccagccctggacgaggtggcaagtgaacatgtgctttaattgctgcttattcaatgtttaaattatacgtttttatatttaagccagtgttaatttatttt

SEQ ID NO: 897463 - DNA, 120 bp, Artificial Sequence
  ENSG00000286564_0 (sequence is synthesized)
gattatgcaaactgtgagaaattcaaaaactgaggaagctcctgcctgtgttttcgtatcgcaatgagaactgaagctaggcatgtattcaccaacatgagataaatatgagtgcatgaa

SEQ ID NO: 897464 - DNA, 120 bp, Artificial Sequence
  ENSG00000286564_1 (sequence is synthesized)
gcagcagaggctgctaagcatgctgaagaatggacccttgttcctaaagtcttcctcaggacagagacacaaacaggaccaggtgacctcaattatttgtgaatggagaatgggtgtatg

SEQ ID NO: 897465 - DNA, 120 bp, Artificial Sequence
  ENSG00000286564_2 (sequence is synthesized)
aactgtctctttaaactctcccaaagacgaccagttaatattacattattaaaaatgtaaaggaagtttcattctactaacaatacaagtgcagtaaaatactttatatgttatagttgc

SEQ ID NO: 897466 - DNA, 120 bp, Artificial Sequence
  ENSG00000286564_3 (sequence is synthesized)
tccataaattttaggctccgtctgttgatcatttttttaccaccagaatatagagaaaacaatgaaggaacttccactttgagcttatctgagccacacagaggaaaaaagtggtaaaca

SEQ ID NO: 897467 - DNA, 120 bp, Artificial Sequence
  ENSG00000286564_4 (sequence is synthesized)
aagtggtaaacagaaataataggaaagtttagaaaaaaatttattgttctttcataattaaatgtactatgtattttttaaagaaataaccttagctattttgaatctatatccctttct

SEQ ID NO: 897468 - DNA, 120 bp, Artificial Sequence
  ENSG00000286564_5 (sequence is synthesized)
aaaactttaacatatttgaactcctcactgaatacctcactccctgccttatctaactgtcttcatttttttggttaggaaatttaatactatgttgtttatgtaagacatggttttctg

SEQ ID NO: 897469 - DNA, 120 bp, Artificial Sequence
  ENSG00000286564_6 (sequence is synthesized)
atgaccccagtatttaattacatttgacagtattatttgctcaccacaagttttgttctgttttgttttattatttctttaaaaatctactcatttctctacattattattgctaaaatt

SEQ ID NO: 897470 - DNA, 120 bp, Artificial Sequence
  ENSG00000286564_7 (sequence is synthesized)
catcccttaaatattatttttgtgatgatctgtgaaacatgaacacttttattctttgtctagaattgccttaattccccttgttctttgatgttatttaggctgggcatagaattatag

SEQ ID NO: 897471 - DNA, 120 bp, Artificial Sequence
  ENSG00000286564_8 (sequence is synthesized)
ataatatacattatttataatttttaaacaatgtgtgaagtttctctatagtatgtacttgtatccagtgccatactattcttctacacagaatgatctattgaaaatgcaatatagtga

SEQ ID NO: 897472 - DNA, 120 bp, Artificial Sequence
  ENSG00000286564_9 (sequence is synthesized)
gttacattatgatattgcttaaaatcctgcaccacccccatatctacaggataaaattcaaatttatcaggaaagccgcaatggttcatgccaatccctatagccttatctctgaccatt

SEQ ID NO: 897473 - DNA, 120 bp, Artificial Sequence
  ENSG00000286564_10 (sequence is synthesized)
gtagacctcacactttatgtgccagacacataaaaatacttctcattcactgaacatactatgctgtttttaggttctgagtgtctatttattctgttctctctactaaaagtatcttcc

SEQ ID NO: 897474 - DNA, 120 bp, Artificial Sequence
  ENSG00000286564_11 (sequence is synthesized)
ttctcattctcaattttatttttaactaataaattttccttaatatttaagcctttattgaaaccttatctcttccaagaagcttgacctaactcctccagtatgaggtaactgtgtttc

SEQ ID NO: 897475 - DNA, 120 bp, Artificial Sequence
  ENSG00000286564_12 (sequence is synthesized)
ttctgtgctcccaaaatactccatttatgtgaatgactctcccaatggatcttaagtttcttggtatcaggggctatgtctaacacatttctagcccctatcatatatactactcttcac

SEQ ID NO: 897476 - DNA, 120 bp, Artificial Sequence
  ENSG00000286564_13 (sequence is synthesized)
ttagaagattcttagtatatatttgctgagtatttaaaataactaaggaaaagaaggtagacaatataatatgaattttaccataattccatggacccatatatattgtattaacattca

SEQ ID NO: 897477 - DNA, 120 bp, Artificial Sequence
  ENSG00000286564_14 (sequence is synthesized)
aacttcaactactatcctatctttataattcacttactctagaatactcacaagaatctaaatatttgataaggtcaataatttaaaactgggaaaagaaaacaaagtttcctccctcct

SEQ ID NO: 897478 - DNA, 120 bp, Artificial Sequence
  ENSG00000286564_15 (sequence is synthesized)
cagttcttatagagaaaagcagtatgtcaacgtacattgaaatttatttctagattaaaaaaacatttattgtctacaaagaatttaaaatacctggtactattgaaaatctcaaaacca

SEQ ID NO: 897479 - DNA, 120 bp, Artificial Sequence
  ENSG00000286564_16 (sequence is synthesized)
caacaacgtaaagaaacttcttagaagatttatacattattttttattattttttaaatttctggatttaagacaaaatactctaacttcaccagattcaaaatctaattctcatgcaag

SEQ ID NO: 897480 - DNA, 120 bp, Artificial Sequence
  ENSG00000286567_0 (sequence is synthesized)
cagccttccctagagagaaggcttcttctctcccgtagtccccaggccaggtggaacaaccagtgctctggttgaagacctctacaggtagacaggtggcaagatactgcttgggcccat

SEQ ID NO: 897481 - DNA, 120 bp, Artificial Sequence
  ENSG00000286567_1 (sequence is synthesized)
tttcttcatcattttctggtgatactttacttcatgtagatatggactttgatttgcttctgcagttctcaaaattctaggatacattttgttcaaaactaaaatgaagcttacaaaaat

SEQ ID NO: 897482 - DNA, 120 bp, Artificial Sequence
  ENSG00000286567_2 (sequence is synthesized)
atcttcagaaaagaaatataagacctgagaagatataatactactgaatagggaagattggagtattgtgttggatggcttgttccatttcttttcaaacaagagaaagaaagggatggt

SEQ ID NO: 897483 - DNA, 120 bp, Artificial Sequence
  ENSG00000286567_3 (sequence is synthesized)
tcgtggaccttgttagcaatgcacgctgcaggagctgtaatagaagtgactgtctaattgtcattgtttcccgagaagtcattatgtacccagatagcatgtgtcttttcaacatgacaa

SEQ ID NO: 897484 - DNA, 120 bp, Artificial Sequence
  ENSG00000286567_4 (sequence is synthesized)
taattaaatcacctcaaccactgcacagaagtgtgagctagtttaacgcattgatgagtacctaagttttacaattctagggaatgttacctgaggtgtgctttcaatgggtgattttca

SEQ ID NO: 897485 - DNA, 120 bp, Artificial Sequence
  ENSG00000286567_5 (sequence is synthesized)
tacacattagtttgatatatttcacacttctccctagctcataaatttttttaaaaggctctatggctgtttcattttgattaaaaagttaataaatcttgctcgttctaaattaaacac

SEQ ID NO: 897486 - DNA, 120 bp, Artificial Sequence
  ENSG00000286566_0 (sequence is synthesized)
aagtatgagctgggagactgggcttacccaggtctcaggtgacacagctgtaaaatgctcagcctgatttatcccttaaagactgttaaaaggaattaaatgagacaatgtgtggctcaa

SEQ ID NO: 897487 - DNA, 120 bp, Artificial Sequence
  ENSG00000286566_1 (sequence is synthesized)
cacaatgcccaatcatttaaaggcacccaaagtagccattattagaacagttaccatggctctactaaacttactaaatctatagtctgtgccttctggggccacacataaatagagaat

SEQ ID NO: 897488 - DNA, 120 bp, Artificial Sequence
  ENSG00000286566_2 (sequence is synthesized)
aagctgggatggaggtgactttacacttaccaatttagggaaagccagtctttgaagaggggaggaaagaaagacaacatggactaaaagcaaagagaagccacagtccatcaaaaggtg

SEQ ID NO: 897489 - DNA, 120 bp, Artificial Sequence
  ENSG00000286566_3 (sequence is synthesized)
aaaaacaaatcagtttgacattactatttgctgtgttcagaaactaagattatatacccacccttggtttctatgagattctcctgtttccttccaataaagtcttcatttttgcttaaa

SEQ ID NO: 897490 - DNA, 120 bp, Artificial Sequence
  ENSG00000286569_0 (sequence is synthesized)
gtgagccacctcgcccggcccatcgctgtaacttttattcatcctattggtctcagcttaaagattatacatttagggtgggtgaatgtgcacatgtgtggtaagagagggggctccctg

SEQ ID NO: 897491 - DNA, 120 bp, Artificial Sequence
  ENSG00000286569_1 (sequence is synthesized)
actcactcctagactaggttagagactacctgctttatgttgctagaccacctatattttctttttattacacacactggactttattgcacttgtttgtttaaatgactatgagctcca

SEQ ID NO: 897492 - DNA, 120 bp, Artificial Sequence
  ENSG00000286569_2 (sequence is synthesized)
caaacgtaaagatgatgtccatcttattcacccttgtattcccagtacctggcataattcctagtacaatgtattgtgaaatgaatatttattaactgaatctatgaatgattgacctat

SEQ ID NO: 897493 - DNA, 120 bp, Artificial Sequence
  ENSG00000286569_3 (sequence is synthesized)
ttttattctgacttttcttactggccacacatatttccactttttttctacctgtcaaaggtggtaaaaaaaatagctgccttttgagtgaggttgtagtaattaaagatgaccacataa

SEQ ID NO: 897494 - DNA, 120 bp, Artificial Sequence
  ENSG00000286569_4 (sequence is synthesized)
tatgagtggaaacactttggaaagaataaaaaccaatgcaaatgtgattgctagaacatgtttttagcctaaatatacgtgtgtgtgaatatgtatttgtgtgtgtgtctgtgtgtgtat

SEQ ID NO: 897495 - DNA, 120 bp, Artificial Sequence
  ENSG00000286569_5 (sequence is synthesized)
agagaagaaggaagaaggggaaaaaagatgaagaataagaggaggaggaggaaaagggggcaagaagtccttcagcaaagctctgggacagcacttactgtctggtatgtggtaccctct

SEQ ID NO: 897496 - DNA, 120 bp, Artificial Sequence
  ENSG00000286569_6 (sequence is synthesized)
gtaagaggcattaagataatctgtgagattccacatctgccctcaggagcccaagtgagaagggaagagaacacatacacacagacatcagctcactgcagggcagatgtgggaagtgac

SEQ ID NO: 897497 - DNA, 120 bp, Artificial Sequence
  ENSG00000286569_7 (sequence is synthesized)
ccgtgtgctaaacgagatggcaaatgtctcttcctgcctggcagctgcaaggcttctatacaggacttcagagacagggacagggagtagaagaaatatccactgctcgttctgcctcag

SEQ ID NO: 897498 - DNA, 120 bp, Artificial Sequence
  ENSG00000286569_8 (sequence is synthesized)
cagggagtagaagaaatatccactgctcgttctgcctcaggaattcttcaggccagaggctggaaagcaatgagaaaatgttgttctcagccgggtgcagtggcttatgcctataatccc

SEQ ID NO: 897499 - DNA, 120 bp, Artificial Sequence
  ENSG00000286568_0 (sequence is synthesized)
ttttttttttttttttttttgaggtatcaaagctctgtaccaaaaccaccagggaaaactgctgatcacagaaaaactgggtttattaaacttgctgagcaaaagaaagcaccaccttaa

SEQ ID NO: 897500 - DNA, 120 bp, Artificial Sequence
  ENSG00000286568_1 (sequence is synthesized)
gagtttcagtattctcaaaaggcgagtcagggaaaggtactgctcatgttccatgaggtgtaggggttgtcacaaggtgatctggggcagaaattattaagtcggtgcaaaagtaattgg

SEQ ID NO: 897501 - DNA, 120 bp, Artificial Sequence
  ENSG00000286568_2 (sequence is synthesized)
gagctgggcagggataggttgaaatttgtaatgagaagtcagtggtcttatcttggaacatattagtcttaaccagctggtatcaaaaccccttatgtttagtttgctatgcatgtcatg

SEQ ID NO: 897502 - DNA, 120 bp, Artificial Sequence
  ENSG00000286568_3 (sequence is synthesized)
gtttgtacagtttatctgacccattgccatcaacatccacatttttccacccaacatcatgctctgtgccattaagagcattgttgatgccctgcttccattgcctacagttttcctttg

SEQ ID NO: 897503 - DNA, 120 bp, Artificial Sequence
  ENSG00000286568_4 (sequence is synthesized)
cagtagctggctcccattttgaaagtttcaacgtccatgtgtggtacatcatgactgctgcttggctgatggtgattttgatatgcctcatgatttcagaattgacagaatgtgaaaaaa

SEQ ID NO: 897504 - DNA, 120 bp, Artificial Sequence
  ENSG00000286568_5 (sequence is synthesized)
ttgtgcaatttagaatcaataaaatagagtaataatttgataacaataaagtctaattctcatctcggagagtagaaccaatcaaatgtttaaactcccattagagaagtagttaattct

SEQ ID NO: 897505 - DNA, 120 bp, Artificial Sequence
  ENSG00000286568_6 (sequence is synthesized)
gctctgatccttataattgtagcattaattttatttcctcaacttaacaattaactactttttcaagtctttttctactgggaaagtatcttgttcccaaagaaataatctaaaccatgt

SEQ ID NO: 897506 - DNA, 120 bp, Artificial Sequence
  ENSG00000286568_7 (sequence is synthesized)
aaagagacaaagcctgaagtgttttgcctgtagaattgctgtgccacgggatgaaattagaaaggattaagatactcaaaggtacatttttaattggattttttaattggatggatttga

SEQ ID NO: 897507 - DNA, 120 bp, Artificial Sequence
  ENSG00000286568_8 (sequence is synthesized)
acttggctccattgtaacttgcccaataagcataatggtagctcccaagaagtcaagtccagcagcaatcaggactgtgacttttggactcactgatttcccagaaatggtgtgtgtgcc

SEQ ID NO: 897508 - DNA, 120 bp, Artificial Sequence
  ENSG00000286568_9 (sequence is synthesized)
tattcacatactgtgtggggatgcggagggagagaaccgaaaatctatttatattgttaatattatgctttcctctgaaagattacccaaaatgtcaggcttacagataatggccacatt

SEQ ID NO: 897509 - DNA, 120 bp, Artificial Sequence
  ENSG00000286568_10 (sequence is synthesized)
gccttatgactagaatgggtgaaggaagaaatttcatatattaccaggcaaatgaagagttttagaagccccatacggtgaacagatgttagggctccattccctcttgtgcctgatagt

SEQ ID NO: 897510 - DNA, 120 bp, Artificial Sequence
  ENSG00000286568_11 (sequence is synthesized)
aattcaaattaaaataatactaagtcagaaaatgagcttttatttctccaacaacattctgatttctccatgactattttgacacttttttttttgagatatgaaaaatcttgtttcttc

SEQ ID NO: 897511 - DNA, 79 bp, Artificial Sequence
  ENSG00000227773_0 (sequence is synthesized)
ccaggctggagtacggcctgggtgacaagagcgaaactccatctgaaaaaaacaaaaaaaagaattaattggaacttta

SEQ ID NO: 897512 - DNA, 120 bp, Artificial Sequence
  ENSG00000227773_1 (sequence is synthesized)
tttttctcattttccttttttgttttccttctttttttcccccttttatatatttatgaaatctcttgagatcgcattttaaactttaggaaacaaaccaataatgtgagtagaagacac

SEQ ID NO: 897513 - DNA, 120 bp, Artificial Sequence
  ENSG00000227773_2 (sequence is synthesized)
aagcccagagagacatggtggaataaaagcaagagaataatatagaataatatagtgagtagatgttgagcaagaaactgaggttttgaagcttaaatctccttcccaactactaaaatc

SEQ ID NO: 897514 - DNA, 120 bp, Artificial Sequence
  ENSG00000250133_0 (sequence is synthesized)
aggttccgcaggtccacaactgcatgtggcctgtagcccccattctccacatttggaggggtgtgggtggcagaccagggctttgaagcggacctgcagatttccctcaaatccagctaa

SEQ ID NO: 897515 - DNA, 120 bp, Artificial Sequence
  ENSG00000250133_1 (sequence is synthesized)
ggcctgcgctggaagcagaaactgagttctcttggcctgccgcgaggaaacccgcgtcctgcccccacccaaggaaatttgcagtgactttggagcccagactgaggaagcggaggtggc

SEQ ID NO: 897516 - DNA, 120 bp, Artificial Sequence
  ENSG00000250133_2 (sequence is synthesized)
aagtacaattaaggggccagagccgctcgtctctcccccgccctccctgcccgactgcgagctgtctggcctcaaacctcagggcgacacgcgaacctggagccggaaactcagcccgtg

SEQ ID NO: 897517 - DNA, 120 bp, Artificial Sequence
  ENSG00000250133_3 (sequence is synthesized)
gcagagggagtcagaggactctgcatccagaaaacagaagcaaagcgcccttccaacttggggacgccttaaccagcccctctcagttgcagataacccaatgaatgaaagtgcaaattc

SEQ ID NO: 897518 - DNA, 120 bp, Artificial Sequence
  ENSG00000250133_4 (sequence is synthesized)
cgctggaagcagaaactgagttctcttggcctgccgcgaggaaacccgcgtcctgcccccacccaaggtgggtatctgggatccctacacaccaggagtcaggtcccgaggcccagcagg

SEQ ID NO: 897519 - DNA, 120 bp, Artificial Sequence
  ENSG00000250133_5 (sequence is synthesized)
agtgaaatccccagggcctgtgaacgtggctctctcaaagccacggcctgccgggcctgcattcccgccggcgcccccgccctgacgctccgcagcaagcggggctatttccggctcccc

SEQ ID NO: 897520 - DNA, 120 bp, Artificial Sequence
  ENSG00000250133_6 (sequence is synthesized)
caacgcggtctggttttccagcctgggagtggctggagggggagccgccccagagctagagccgctccctgccctgcccggagccccagtggccctgagcgccttgttacctgatctttt

SEQ ID NO: 897521 - DNA, 120 bp, Artificial Sequence
  ENSG00000250133_7 (sequence is synthesized)
cttgggaaggagagctcagggtttggggcgtctcagacagaaaggcaaaccgcatctcctgaggcagacagacccacaacatgagtgtgagcctgagatcacatacaggttcaacatttc

SEQ ID NO: 897522 - DNA, 120 bp, Artificial Sequence
  ENSG00000250133_8 (sequence is synthesized)
ccgaggcctctttgccaggcccggcgggcgccgatctccctaccttctctccctccagggcctcaggcagagagacccagaagactctgtccctctggtttggtccaatcccgcttcgga

SEQ ID NO: 897523 - DNA, 120 bp, Artificial Sequence
  ENSG00000250133_9 (sequence is synthesized)
ggacaggcggctcccgcctggggagggaagccccggccaccacggccgccgccgcccgccctccttccctccctccctccttctcgccctccctctctctccctccctcgcgcgctgccg

SEQ ID NO: 897524 - DNA, 120 bp, Artificial Sequence
  ENSG00000250133_10 (sequence is synthesized)
cggggccctcccgcgggcaacctggtctggaccaaatccaggtatatccgaaagagagaaaaaagaaaggaccttttacgcggaaaagaaaagacagaaagaccttccattgcatttatt

SEQ ID NO: 897525 - DNA, 120 bp, Artificial Sequence
  ENSG00000250133_11 (sequence is synthesized)
tttcatgctgtgaccattggtcggcctcagttcagacgtcccggacacggcccggcagctgcagaggcgtgcagggcctgcagcctctcccacgctgaccgccgcgccccgcgcgccgct

SEQ ID NO: 897526 - DNA, 120 bp, Artificial Sequence
  ENSG00000250133_12 (sequence is synthesized)
tgctccacactctgggccgccgcccccagggcagcccaaacacccagcagacctcaaggtcctttctatagactcaacatgcggttgcccgcctcgccgccggccacagcccgggagccc

SEQ ID NO: 897527 - DNA, 120 bp, Artificial Sequence
  ENSG00000250133_13 (sequence is synthesized)
gctctgctctgtctgcggccaaagtccatacacaatccaccttgccggtgctctcgcaccctgcccgaacaccccttctggccacgcagccgtccgggccacactcgtgctgcggtccag

SEQ ID NO: 897528 - DNA, 120 bp, Artificial Sequence
  ENSG00000250133_14 (sequence is synthesized)
cccaggacttcgaacctcgccccctgcacgacccacacaaagccctgagccctggcgttcccacccgaagcccccagtccccgctgccgccgtcttcttcacctgttctcgggaagggct

SEQ ID NO: 897529 - DNA, 120 bp, Artificial Sequence
  ENSG00000250133_15 (sequence is synthesized)
gcatctccgagccgaagtcaggccgtgggccggggcgaggtcccagagaggccacagcggatctgccaggctgagccggagccccagcagccgacgagagatctcagagaccaaggctcg

SEQ ID NO: 897530 - DNA, 120 bp, Artificial Sequence
  ENSG00000250133_16 (sequence is synthesized)
ccttggcgagctcttgccttttcttcctcccgcaagtctcaaacattcatacactgagagttcagctctataaatcctgctcctctttcccatatcataattaaaaaaaaaacagtaggg

SEQ ID NO: 897531 - DNA, 120 bp, Artificial Sequence
  ENSG00000250133_17 (sequence is synthesized)
gaggttttaacttttattgcgatttctggagttgggctgcggagcatatattaagtttacgcttatgcgctctcggcggggagggtcctttaagaaataaaaatccatcttaatatccac

SEQ ID NO: 897532 - DNA, 120 bp, Artificial Sequence
  ENSG00000225881_0 (sequence is synthesized)
cgcccttataagaagaggaagagagagatcgctttccactgaaatgtaccgaggaaaggctatgtgaggacatagcccagaagaggccctcaccagagcccagctatgctggcaccctga

SEQ ID NO: 897533 - DNA, 120 bp, Artificial Sequence
  ENSG00000225881_1 (sequence is synthesized)
cctcctgctccagcctccagactgtgaggaaatacgtttccatggttgaagccacccagtctatggtattttgttgtggctgcctgagctaagacaccatcacacaatgaccagggaggc

SEQ ID NO: 897534 - DNA, 120 bp, Artificial Sequence
  ENSG00000225881_2 (sequence is synthesized)
tctttggccgtggtcagcagaggcagctgtgccactgcctgtgggtgccacgcctgcctcacagcagcaacttcctcataagaaagtctctgctgttatttagatgtgtgtcttgtctcc

SEQ ID NO: 897535 - DNA, 120 bp, Artificial Sequence
  ENSG00000225881_3 (sequence is synthesized)
aggttgacatctttttttctgacttgtctgcaaacccgtcatgaggattgttgcacagtcatgtttgggtaatgccacgtacagtctttccttcttaggcaattatattagcagttaaag

SEQ ID NO: 897536 - DNA, 120 bp, Artificial Sequence
  ENSG00000225881_4 (sequence is synthesized)
gctctgagaagttttgcaatgaagatgctgtcataagtttgtctaattcagcatttgacaacagaactgattttcctagcaacattttggtccagagagaaggtgatgcaagatgcagaa

SEQ ID NO: 897537 - DNA, 120 bp, Artificial Sequence
  ENSG00000225881_5 (sequence is synthesized)
atgactgagagtatggtgagcacttgttcactacgccagaaataaaagatcattgaagtgagattgattaaaactacaatcaataaaagatcattgaagtgaaattgattaaaactacaa

SEQ ID NO: 897538 - DNA, 90 bp, Artificial Sequence
  ENSG00000225886_0 (sequence is synthesized)
ggaatccgtttcctctccgcatcagtggcagagatgtccctgccccaaccgacagggtctcactgtgtcaccaaggctggctcatgttca

SEQ ID NO: 897539 - DNA, 120 bp, Artificial Sequence
  ENSG00000225886_1 (sequence is synthesized)
ctcccgagtagctgggactataggggtgcaccaccatgcccaggttttggccagcttctttactgcatcctgttttaccagtgggatcagtggggtctttgtgacccgtatcttgtattg

SEQ ID NO: 897540 - DNA, 120 bp, Artificial Sequence
  ENSG00000225886_2 (sequence is synthesized)
gactaagaatgccaaacctcgtgggaaagcagcccagcaggtcccacccttatttcatctagcccctgttcaagatggaattgctcttcttggaacacctctgacatatttcccccctcc

SEQ ID NO: 897541 - DNA, 120 bp, Artificial Sequence
  ENSG00000225886_3 (sequence is synthesized)
cttttacgaggggactcttaagcctaagggttgtagagggttgtagatctatcctctgtaacgtcttcaggctgaataggggagataatatttttgcctaattattagggtcttttgtat

SEQ ID NO: 897542 - DNA, 120 bp, Artificial Sequence
  ENSG00000225886_4 (sequence is synthesized)
tcagggtagagaagagctcagtcagttatggtgaaggccattcataactcttccagatatcaccttctgttctgacaaaaggtgctatgtgaaagataataaatgttcaatttaagaaaa

SEQ ID NO: 897543 - DNA, 120 bp, Artificial Sequence
  ENSG00000225886_5 (sequence is synthesized)
aggatccctctcaggagcctcgggaatccgtttcctctccgcatcagtggcagagatgtccctgccccaaccggtgggtgtgcggattctgtgcggattcgcacggtgtttggcacgtga

SEQ ID NO: 897544 - DNA, 120 bp, Artificial Sequence
  ENSG00000225886_6 (sequence is synthesized)
aagaaagcacagaagggtgtgtggaaaaagaaactcagtttccctcaccgtacgagaggcttctgacagcagaagtgtgggggtttctccccaccagcaagcaaacaatcagtcctctgg

SEQ ID NO: 897545 - DNA, 120 bp, Artificial Sequence
  ENSG00000225886_7 (sequence is synthesized)
gctgagggtccccaaattcaattctgacaccactatgggtagatagtggccgatcccacatgttgagggttcagtcccccagactgccaatcgaaagccctaggttgttttacctgtgtt

SEQ ID NO: 897546 - DNA, 90 bp, Artificial Sequence
  ENSG00000225886_8 (sequence is synthesized)
agactgccaatcgaaagccctaggttgttttacctgtgtttctgactgactataaactggggttcccacaattccctcctgcagttttac

SEQ ID NO: 897547 - DNA, 120 bp, Artificial Sequence
  ENSG00000225886_9 (sequence is synthesized)
ggaatccgtttcctctccgcatcagtggcagagatgtccctgccccaaccggtgggtgtgcggattctgtgcggattcgcacggtgtttggcacgtgacagggtctcactgtgtcaccaa

SEQ ID NO: 897548 - DNA, 120 bp, Artificial Sequence
  ENSG00000225886_10 (sequence is synthesized)
catggtgtcagaagtgggatctgaagcataatcattttcagaataaactggtgattcttggaaccagggtgcagtactcccttgaggcctttcagctctctacttccacggctctccttt

SEQ ID NO: 897549 - DNA, 120 bp, Artificial Sequence
  ENSG00000225886_11 (sequence is synthesized)
ttctgccctggtgagtcttctctcaagccaagcctccctctttttggcagatgctctttaactttgtttgggatgtgatttgagtaacatcaccttaataaagagtgttgcatcccttct

SEQ ID NO: 897550 - DNA, 120 bp, Artificial Sequence
  ENSG00000225886_12 (sequence is synthesized)
ggaatccgtttcctctccgcatcagtggcagagatgtccctgccccaaccggtgggtgtgcggattctgtgcggattcgcacggtgtttggcacgtgggtctcactctattgctcaggct

SEQ ID NO: 897551 - DNA, 78 bp, Artificial Sequence
  ENSG00000225886_13 (sequence is synthesized)
catagctgggactacagacagggtctcactgtgtcaccaaggctggctcaatcacggctcactgcagcctcgacctcc

SEQ ID NO: 897552 - DNA, 120 bp, Artificial Sequence
  ENSG00000225886_14 (sequence is synthesized)
ctcccgagtagctgggactataggggtgcaccaccatgcccagagcagccttccaaacagaatgttgtccattcaccttggaactgccatccacaaaccaagctgtttgctggccagttg

SEQ ID NO: 897553 - DNA, 120 bp, Artificial Sequence
  ENSG00000225886_15 (sequence is synthesized)
gttgagagccgttatgggacactgtagaagccagcagctcctcacgcaaaccagtcctagcagaaaagaggctcctttcttttatctcctcctggcactccccaggtagcatgcttctgt

SEQ ID NO: 897554 - DNA, 120 bp, Artificial Sequence
  ENSG00000260788_0 (sequence is synthesized)
gcccatttttctttgacatgttcagatgttggcaaggctgaaaactgcaggggatctggttgtgataatccaggcctgaatatatacaaatatgaacaagacccacaaggactgctcatc

SEQ ID NO: 897555 - DNA, 120 bp, Artificial Sequence
  ENSG00000260788_1 (sequence is synthesized)
accccagtattccatttacaacatcctgaatgaactcccgaccaggcctataattctctcttgcagccaaatatcctgcttactcctggtatctacctggtcagcagacctcatgagtta

SEQ ID NO: 897556 - DNA, 120 bp, Artificial Sequence
  ENSG00000260788_2 (sequence is synthesized)
tcgcccagtgacaaaaccatcccaaagatgcaccagtccagcacaaagtatgactgtcaatctcacaaaagatgtagggttctacgaggatactcagagtataagaattacgctaagtga

SEQ ID NO: 897557 - DNA, 120 bp, Artificial Sequence
  ENSG00000260788_3 (sequence is synthesized)
ttctatgtatacaaagaccaaaccatcacattatgcctcataaatatatacaattattatttgctaattacaagtaaagcaatacaagaagaaaaaaaggaatcataagtaaatccatga

SEQ ID NO: 897558 - DNA, 120 bp, Artificial Sequence
  ENSG00000260788_4 (sequence is synthesized)
caagtgaaaacgcaatggagagaagggaatcaatgattgaagaagagaaaggacagtggatttacaactgcttcgaaagagtgatttgactggcaaaggactggggagaggtcctttggg

SEQ ID NO: 897559 - DNA, 120 bp, Artificial Sequence
  ENSG00000260788_5 (sequence is synthesized)
aaatggacaaagccctcgaatggttaggaaagacaatctctttataaatgcagggcataagctgagcacaaggtgaagtttggcatgtactgccgtgggatgttgtaaaaattatgtcaa

SEQ ID NO: 897560 - DNA, 120 bp, Artificial Sequence
  ENSG00000260788_6 (sequence is synthesized)
aagcaaagcaattcttggttcatctgtgttcactgtgagactagcctattattggggttaaacttataaacaaacttctattcatcatttttttctccaaaataaagtgatcaaattgtc

SEQ ID NO: 897561 - DNA, 120 bp, Artificial Sequence
  ENSG00000260788_7 (sequence is synthesized)
gatctggttgtgataatccaggattgaaaatctccaactgaagggcttggagcaagttaaccccgagtcttcacgggaaaaagatatctacctcctaatcctggaacttgggaatgttac

SEQ ID NO: 897562 - DNA, 120 bp, Artificial Sequence
  ENSG00000260788_8 (sequence is synthesized)
ttcatagagcaaagactttgcagagctgagttaaggtctttgagatgagattattttgagttatcttggggttgtttgtggtttgctaaatgcaatcagaagtgtcctcagggggaggca

SEQ ID NO: 897563 - DNA, 120 bp, Artificial Sequence
  ENSG00000260788_9 (sequence is synthesized)
gaggagatttgagacacagaaaaggagaagaccacacgaccgtggaggcagagattggagtgatgtggccacaaaccaaggaatgctgcagccaccagaagtggggagtggcaggaagga

SEQ ID NO: 897564 - DNA, 120 bp, Artificial Sequence
  ENSG00000260788_10 (sequence is synthesized)
ccctcccctagacctctagatggaacgtggccctgccaacgtcttggttttgactcagttagactgattttggacttctgtcctccagaactgtgggagaataaatttctagcctccatg

SEQ ID NO: 897565 - DNA, 120 bp, Artificial Sequence
  ENSG00000260788_11 (sequence is synthesized)
tttgcaatactttgttaccgtggcattactaatttattatagtaggtataatatccccacttacagatgaggactctgaggcacaaaccaacagctacgcaaatcgtagagtcaggacgt

SEQ ID NO: 897566 - DNA, 120 bp, Artificial Sequence
  ENSG00000260788_12 (sequence is synthesized)
gggcccaggtggtctgaccttggagctgcgaccctgaacccacactcaaaactgctgcttcccagctaacttagtgactcagggtgggtggtcagcaggtatgtttcacctgaaggatct

SEQ ID NO: 897567 - DNA, 120 bp, Artificial Sequence
  ENSG00000260788_13 (sequence is synthesized)
tacttcgaagaagatacgaattctgagaaaaggtggcctctgaggatagagttaagttgaatcgaagtgtggtgggtgggattattcagatgtaggtggaagccagagggatgcctcctg

SEQ ID NO: 897568 - DNA, 120 bp, Artificial Sequence
  ENSG00000260788_14 (sequence is synthesized)
tgtggccaaggagaagaagaactgcccttgtccatgacttaaaggtcatcttgggggctgcaatgggattgttacctgggggaggctgtggtcactgaagaagggatggtcaacttgggt

SEQ ID NO: 897569 - DNA, 120 bp, Artificial Sequence
  ENSG00000260788_15 (sequence is synthesized)
tgttgagaaggggagccagggaataagaaattgctggctgacaaagggaatgggcatctatgcagtcaccacaagcctcatggcgacccaggacagacagcaattcacctaccaccctcg

SEQ ID NO: 897570 - DNA, 120 bp, Artificial Sequence
  ENSG00000260788_16 (sequence is synthesized)
cctggccaccatccagagcccctccgagtgttcccagcctctcctggagtctcagaaccaatcatctggaggtctttgggcttccagtcagcattgacagatgctctgatacagcgctgt

SEQ ID NO: 897571 - DNA, 120 bp, Artificial Sequence
  ENSG00000260788_17 (sequence is synthesized)
tgtaaatttaattcacacagaggcggtctgggttggtatcaatcctttttgtgttggggtcatgtgaactgacctgagaatcaaatcaagtttttgtcctgcaaagtggatgtaccagac

SEQ ID NO: 897572 - DNA, 120 bp, Artificial Sequence
  ENSG00000260788_18 (sequence is synthesized)
aaacagcctcggggtgcagcctccctttaatattaatagtaacacagctgcagcagcatcgagccttacattgcgccggctggacaccgctccaggagcttccagcatctatgccttcag

SEQ ID NO: 897573 - DNA, 120 bp, Artificial Sequence
  ENSG00000260788_19 (sequence is synthesized)
ccctcacaccagccctgggaggttgataatattattcctccccttttacagatgaggaactgagaggcctagagatatgtgaactttgccaagatcattggctaatatggggcatggttg

SEQ ID NO: 897574 - DNA, 120 bp, Artificial Sequence
  ENSG00000260788_20 (sequence is synthesized)
ggattcgcaggctggatctctggtgccaaggcctgctgtcaccctctgctgcttccccccagccgttcacattgccagcatcacatgagtgttagagtcatggactctggagaggaaagg

SEQ ID NO: 897575 - DNA, 120 bp, Artificial Sequence
  ENSG00000260788_21 (sequence is synthesized)
acctgggttctaacagtgagcctggcaagctacttctctgtgtttctacttcctcctctgtgactcggggacagtcccagtggtgttctggggtagctgtgagggcaaactgaagctgac

SEQ ID NO: 897576 - DNA, 120 bp, Artificial Sequence
  ENSG00000260788_22 (sequence is synthesized)
acaaagggcttggtcttgtgcggggcgccctcgggggagccgttgcagagtcaggctatgggtgtgttaatggctcactggggtcatggccctgtgtgtcctccctgatgtgactcacac

SEQ ID NO: 897577 - DNA, 120 bp, Artificial Sequence
  ENSG00000260788_23 (sequence is synthesized)
ggtcccctggaatgtttcagaaacatccgactcagcagagcctaggggaacaatgttttgatgctgcaactgtgacaggggacagatggggagaacggatgaggcgaacgcagggcttcc

SEQ ID NO: 897578 - DNA, 120 bp, Artificial Sequence
  ENSG00000260788_24 (sequence is synthesized)
acatgcccttgctgctgcaatgatcctttcactattttgtgaaaacagaagcgatgaattactcatgagaatgaactgctttaaaaacaccaggctttcatttaaagagtcatttatgct

SEQ ID NO: 897579 - DNA, 120 bp, Artificial Sequence
  ENSG00000260788_25 (sequence is synthesized)
tccacctggcaaatttttactgtttcaagaccccactcatacgtctcctctcgttcatccagtgtgactttcccagtagaattaatcacctcactaggtctgtgcgaggcacatgcactg

SEQ ID NO: 897580 - DNA, 120 bp, Artificial Sequence
  ENSG00000260788_26 (sequence is synthesized)
gtaaaaatgcctttgggagcctaacacgggccctgacggctctgccatctccactaaactctaagctccttggtgtcaggataggtaaaagttggtcaatagacacacagaatgcttcct

SEQ ID NO: 897581 - DNA, 120 bp, Artificial Sequence
  ENSG00000260788_27 (sequence is synthesized)
tgggcccagcttggtgctaaaccctttaagagcatcactacatttatttttgtgactcatgacaacctgatgaagtgggtatcatccttgttttaaggttgaggtaaccaagaatcagag

SEQ ID NO: 897582 - DNA, 120 bp, Artificial Sequence
  ENSG00000260788_28 (sequence is synthesized)
aggcttagcaacttgtcaaaagcggcccagttaataagagacagagctggaatgtagcaccagcatgctggattccaggggctgggcttctcggtacacagtgtttttcatgcctaaggc

SEQ ID NO: 897583 - DNA, 120 bp, Artificial Sequence
  ENSG00000260788_29 (sequence is synthesized)
tggggtggtgtgctctgcacccccagggccgagtagagtgcctggacgcagacggtgcccggtaaaggtttattacatcttttctccttctgttggaacaatcatggggatggaaaaagc

SEQ ID NO: 897584 - DNA, 120 bp, Artificial Sequence
  ENSG00000260788_30 (sequence is synthesized)
gatctggttgtgataatccaggtacatgccccaaggaaatgaggctacatgaggacacagcaagaaggtggctgtctgcaagccagaaagagagccctccccagagactgaaccagctag

SEQ ID NO: 897585 - DNA, 120 bp, Artificial Sequence
  ENSG00000260788_31 (sequence is synthesized)
tcttggacttccagcctccagaactgttattctaggtcgacttccgtgtctggatgtaaccaaatcaccagccagaccgtgaccaggacacatcataccgcttgcccccggcagagatcc

SEQ ID NO: 897586 - DNA, 120 bp, Artificial Sequence
  ENSG00000260788_32 (sequence is synthesized)
agagatcctgtgcccacatgtgataagatgcaacgatctcattcaaactctgtcttgtcctgctagtcctgctagccctgctaaaccacttgagcccctggagtctcttcctccctggag

SEQ ID NO: 897587 - DNA, 120 bp, Artificial Sequence
  ENSG00000260788_33 (sequence is synthesized)
cttctacagcattcctatctggaccattcgccaggtggttaacactggaaacaaaaactatgttgtttgctggtttggatttcttacagctcccaggagaccacaagctacttggaggta

SEQ ID NO: 897588 - DNA, 120 bp, Artificial Sequence
  ENSG00000260788_34 (sequence is synthesized)
ggaccaagtggtgtacataacgaccagacagccacaaagagtcccttgctcagacaggtgttcagcaactcttcccagagcaaaacatgcctgtcttgcccactgcggagtaactgcaag

SEQ ID NO: 897589 - DNA, 120 bp, Artificial Sequence
  ENSG00000260788_35 (sequence is synthesized)
gcagcgcactgctcctctggggtctcagacccaatggcagccttacaagaataaactcaagctgttttaaaaaatatttttaaacagcaaacctctcctctctaaatgacatttaattgc

SEQ ID NO: 897590 - DNA, 120 bp, Artificial Sequence
  ENSG00000260788_36 (sequence is synthesized)
gcaacttctttgtggctgggcgtgcaaacaacctgcgttcttcagggctctgggtatgggttacaagattcatcgtgactcaattctccaatccactgagttttggaggacacaggcagt

SEQ ID NO: 897591 - DNA, 120 bp, Artificial Sequence
  ENSG00000260788_37 (sequence is synthesized)
gtgtcactgcagatggactgccaacccccaattaaactgttctggatggctactggtggtgaccttcaggtgacattggtcaagcctcaaaggagtgtggccacccaaccctagcagagt

SEQ ID NO: 897592 - DNA, 120 bp, Artificial Sequence
  ENSG00000260788_38 (sequence is synthesized)
ttgagtgtgccaggtgctcattactgaacccacttctcagtctacatcaaacaaccatgctggccagaaatggtgtgctgagttctgacgatacagaaacaccacactactgatgataca

SEQ ID NO: 897593 - DNA, 120 bp, Artificial Sequence
  ENSG00000260788_39 (sequence is synthesized)
ggtgcatacatgaaacctcctggtggcaggaagactcgttcctgagggcctgatggctcccacaccgaggaatgctctgccagaggccagtccatttcaggcacagttataacccactcc

SEQ ID NO: 897594 - DNA, 120 bp, Artificial Sequence
  ENSG00000260788_40 (sequence is synthesized)
ataaaggttgtgccagggagaaaattatgacaggaccttgcttgaaagaagaggcagtcacaaggccccatggggcttaccttccaggatggactggccctgggtttgggattgcatcaa

SEQ ID NO: 897595 - DNA, 120 bp, Artificial Sequence
  ENSG00000260788_41 (sequence is synthesized)
tttcatttctggctctcatgagtcggattccctcttttctcagagtatggaagccagtggagcgtggcaaaggtgtctggcaccctgtctttgctgcttcctgtgaaaacgagatggtct

SEQ ID NO: 897596 - DNA, 120 bp, Artificial Sequence
  ENSG00000260788_42 (sequence is synthesized)
gctgcttcctgtgaaaacgagatggtctgcctgaaatgatacattggctgtttcatttctgggctccccttgtgtcttttttttttaaagacagagacggggtctcactatgttgcccag

SEQ ID NO: 897597 - DNA, 120 bp, Artificial Sequence
  ENSG00000260788_43 (sequence is synthesized)
atcttcctgcctcagcctcccaaagagcaggattatgaacgtgagccattacgcccaacttcccctaatctcttgtgcttggcataatgctggtatgcagtaggtgctcaataaatgctg

SEQ ID NO: 897598 - DNA, 120 bp, Artificial Sequence
  ENSG00000260788_44 (sequence is synthesized)
tttttctttgacatgttcagatgttggcaaggctgaaaactgcaggggatctggttgtgataatccagcttcttctgggacgtaatctcaacacccaccctccgaaaacaagaaggacca

SEQ ID NO: 897599 - DNA, 120 bp, Artificial Sequence
  ENSG00000260788_45 (sequence is synthesized)
atgttcagtataagctcttgacaaagatttgtttcttcctttcagatgttatctaggttcttcccctctggtccgtttatgttatgcttgcgcagactctgaccccatcaactaagatac

SEQ ID NO: 897600 - DNA, 120 bp, Artificial Sequence
  ENSG00000260788_46 (sequence is synthesized)
gatctcagctccaacaccaaggcctctgtgttccctagagaagccactctggatggtctctctgaagtctgcctccttccctggccagctctacaacttagaatgcctgaatatatacaa

SEQ ID NO: 897601 - DNA, 120 bp, Artificial Sequence
  ENSG00000229393_0 (sequence is synthesized)
cggccaggcctgcttgcgcaacccttttacgagcattccacggccctgacctgttcccgcagtgcgcgggtatccctaatcagacacacggctccagacactcggcgctcagccacgcca

SEQ ID NO: 897602 - DNA, 120 bp, Artificial Sequence
  ENSG00000229393_1 (sequence is synthesized)
cagcaaacagctccgactgctgcccgctctccccagcctggacctgggcctgcctggacactgcctcgctggacgcgttggaaatcagggcacgtcgcgtccgcaggccccatgccagac

SEQ ID NO: 897603 - DNA, 120 bp, Artificial Sequence
  ENSG00000229393_2 (sequence is synthesized)
tcccgccagcctccctgtgctctgggtaccacggcccagaggtgtgccctgcccctccttcaccctcatagggagccaggatgggattggacggccctccccacggcccagagtggccaa

SEQ ID NO: 897604 - DNA, 120 bp, Artificial Sequence
  ENSG00000229393_3 (sequence is synthesized)
ggggccttcccgtcaccaggctgcactggctggagcccgaggccccacgtgcactgcagcaggaggctcccaggttgtccaggtccacatggctctcagacatgctcgtctctctccacc

SEQ ID NO: 897605 - DNA, 120 bp, Artificial Sequence
  ENSG00000229395_0 (sequence is synthesized)
agcaaatcatggaaataagaaaatcagaatggattatttcaagcatgagaaacattttaccaacatttacatttgctatatcaacagtttctattgggtggcacttctaggaattttgat

SEQ ID NO: 897606 - DNA, 120 bp, Artificial Sequence
  ENSG00000229395_1 (sequence is synthesized)
actgacagcagcttcgaacatgacaaagatgtgactgaggtaccggtacgtcctgtggaattaccgtctgagctggtgttgctatcaaacctgcattgcttaccacggtgatatctctct

SEQ ID NO: 897607 - DNA, 120 bp, Artificial Sequence
  ENSG00000229395_2 (sequence is synthesized)
aatgtgagacgagttccatttcccatcgcttgtcctgcttccctccattaaaaatagtaggtatttgagctaacttctctcagcacatcattttcacaacttctctgtaaaatgggaatg

SEQ ID NO: 897608 - DNA, 120 bp, Artificial Sequence
  ENSG00000229395_3 (sequence is synthesized)
atttccctggtgactttgtaaattgtgttttattgtttatttctatttatgtcaaagaaagataatgtgaaattgtcaaaacttgctaaatgtaatatacaaataaatgttggtaattaa

SEQ ID NO: 897609 - DNA, 120 bp, Artificial Sequence
  ENSG00000251095_0 (sequence is synthesized)
gacaatattgttccggaatttttagctggcactcagatttctgtctgcctctcattggcaaacatgacatttcagcaatttctctaaagaggaatgactggggggtatgtacagcaggca

SEQ ID NO: 897610 - DNA, 120 bp, Artificial Sequence
  ENSG00000251095_1 (sequence is synthesized)
tcatgtaagaaaaactcacacctcacgacatatttgtttgatttattcagcagacttcagcaaaggaaagatgtgaaagcaacccttgattgttgattttttgttcattctgaaaatcac

SEQ ID NO: 897611 - DNA, 120 bp, Artificial Sequence
  ENSG00000251095_2 (sequence is synthesized)
tagtgatgctttgagcacaaggaaggactttctggaatctacttatctgaccaagaaagcttctttccaaaagaaatgcaattgtcttgagacttcttccctagggatctgatcaactaa

SEQ ID NO: 897612 - DNA, 120 bp, Artificial Sequence
  ENSG00000251095_3 (sequence is synthesized)
ccagaaaagagcaaccaccagagaagagactgtgggtgtcattgtgactggctgctacctccccatgagtcttctaaaataaaacctgcaaattcacatcttccccatgcttccagagaa

SEQ ID NO: 897613 - DNA, 120 bp, Artificial Sequence
  ENSG00000251095_4 (sequence is synthesized)
aaaagaaaaccaggtagtcgtacagtgtccagaaggcaaaaggacaagtatgcactgccctacttacctactttccacactgctgcacaggaaaatctgacagaggacaataacaaacat

SEQ ID NO: 897614 - DNA, 120 bp, Artificial Sequence
  ENSG00000251095_5 (sequence is synthesized)
ctcaccagctcatgcgttcttttttgatcctaattccgagagactcaccaaagacatgaagagaaaacaaacaatacttttcttggaaatattgtaattgctggtacatttgttgttctg

SEQ ID NO: 897615 - DNA, 120 bp, Artificial Sequence
  ENSG00000251095_6 (sequence is synthesized)
gcataaagtagaaattgtcaggtaaacattgcttccttttggatcaaaaagaaatttaaccaaataaatgcaagaggtatgagggaagataatgggaaataaatgagatttgagaaatca

SEQ ID NO: 897616 - DNA, 120 bp, Artificial Sequence
  ENSG00000251095_7 (sequence is synthesized)
ggcaactcgctggggtccccttccaccctttgaaaactttgttctttggttctttgcaataaatgttgctgctgctcactcttcgggtctgcactggctttatgagctgtaacactcact

SEQ ID NO: 897617 - DNA, 85 bp, Artificial Sequence
  ENSG00000251095_8 (sequence is synthesized)
cactgcgaaggtctgcagcttcactcctggagccagtgagaccccgagcccaccgggaggaccgaagaacttcagatgcgccgcg

SEQ ID NO: 897618 - DNA, 120 bp, Artificial Sequence
  ENSG00000251095_9 (sequence is synthesized)
acgaacccaccagaaggaagaaactcggaacacatccgaatatcagtaggaacaaactccggacacgccgcttttaagaactgtaacactcacctcgagggtccgcggcttcattcttga

SEQ ID NO: 897619 - DNA, 120 bp, Artificial Sequence
  ENSG00000251095_10 (sequence is synthesized)
gtccgcggcttcattcttgaagtcagggagaccaagaaccccccaattccggacacagggggacttggctgcttcctgtttctatcatagacgcagctggcctcagaatattccacttat

SEQ ID NO: 897620 - DNA, 120 bp, Artificial Sequence
  ENSG00000251095_11 (sequence is synthesized)
ggatgaaagaatgatagtgttattttatggaagaatttaagaagatgttgcggtatcatcgactttattttttgttcattctgaaaatcacatcgccagatccaacacctttttatccca

SEQ ID NO: 897621 - DNA, 120 bp, Artificial Sequence
  ENSG00000251095_12 (sequence is synthesized)
atcaccagtacaagccacccgtatcagtgtacactgtggctgaccgatccatagtgatgctttgaggtgtctgagtagatttggaaatgcccattcagccctcagagctcctctgcttta

SEQ ID NO: 897622 - DNA, 120 bp, Artificial Sequence
  ENSG00000251095_13 (sequence is synthesized)
agggtgatggacttcctgtaccactacgtagtgcatgagtgccagccactggtatctagaactgtgattagtgaggaaacactaggaggaacaaacaacccaactctttttatctaatct

SEQ ID NO: 897623 - DNA, 120 bp, Artificial Sequence
  ENSG00000251095_14 (sequence is synthesized)
cttattccagttaaaactcaagctgcaattcaaaatgaaatcagtatcttttttctctacttttcagcaaagcaagatgctaccttataattaccacgtaacaatcaatcgcaaacatag

SEQ ID NO: 897624 - DNA, 120 bp, Artificial Sequence
  ENSG00000251095_15 (sequence is synthesized)
tggcttaaagcagctcctcttttagcctacatatctgcaaactggcagtctggactgagctcagctggatgttttttctgagctgatcatgtatgtagggtctgctgctggctggtttag

SEQ ID NO: 897625 - DNA, 120 bp, Artificial Sequence
  ENSG00000251095_16 (sequence is synthesized)
actgatggtggatgagaaaccacatgaagaagagaggcatgatggtggcagagttctgaaagagtcacacagaagggcgttgagttcgtggcttgaaaatagcatcctgtcacttctacc

SEQ ID NO: 897626 - DNA, 120 bp, Artificial Sequence
  ENSG00000251095_17 (sequence is synthesized)
acattctatttaccaggccagcccagataaagatgtgaagaaacagactccatctcttgatgggagaagttgaaaatcaatggaaaatggcatggataaggaaaggagtgatgattgtgg

SEQ ID NO: 897627 - DNA, 120 bp, Artificial Sequence
  ENSG00000251095_18 (sequence is synthesized)
ccatatttgtaatggccatatttgatacccttttcagttttcctagccacacttctcattggccaggaaaattaaatgcatgtcaacactgaagaaaacagatcttggttaaaagcaatg

SEQ ID NO: 897628 - DNA, 120 bp, Artificial Sequence
  ENSG00000251095_19 (sequence is synthesized)
atgtagctaatatcccgttcaggtaaaagattacttatatagtgtgagacaggcatgaggcagagaagtgcttacaggttggtttctgctttgttagcagatttacttttagatcatata

SEQ ID NO: 897629 - DNA, 120 bp, Artificial Sequence
  ENSG00000251095_20 (sequence is synthesized)
ctactttgtttttactgttttattgagaaaaaataacaaatatttccaaaattttgcagcatgcaactcagtgcttcagttggcattcaatcaaaatttccttgaaataaaaaaagacaa

SEQ ID NO: 897630 - DNA, 120 bp, Artificial Sequence
  ENSG00000251095_21 (sequence is synthesized)
taatggcacagagcctaaggtcatgtcagtaaaccccttctccaaccctgcttcctttcctatcagacagtgattgaatttccagaccttaatgtcaactgtttatcagctgggcttctg

SEQ ID NO: 897631 - DNA, 120 bp, Artificial Sequence
  ENSG00000251095_22 (sequence is synthesized)
aaacctgtttaatggcttctgtgatgcagtttcttcctgttccggattgtttgagctccatatataggaggtaccatcatcatttcagagacatcagtataataagcccaacgggagaat

SEQ ID NO: 897632 - DNA, 120 bp, Artificial Sequence
  ENSG00000251095_23 (sequence is synthesized)
gatatggcaatttctaaatttcctagaaggatcgctcaggaggatgggcttgagcaggctgccttccatgtcacaccaccactgggcacattttgttttttggcaactgccccaacagga

SEQ ID NO: 897633 - DNA, 120 bp, Artificial Sequence
  ENSG00000251095_24 (sequence is synthesized)
cacaaagaccctgctaccatgtattcacttcagtgaaagggaagcaccgaaatgctgagtgggggcaggtacagatacttcaatcactgctgatggaagacttcgagatacactgtaaaa

SEQ ID NO: 897634 - DNA, 120 bp, Artificial Sequence
  ENSG00000251095_25 (sequence is synthesized)
actttgagaaatgtcatgactgggcacattggaactgagcacttgtacaggatggaacatctgtcagcagatctcaagaaactgggagcaaagatatttcttaggcttcaggttcgtagt

SEQ ID NO: 897635 - DNA, 120 bp, Artificial Sequence
  ENSG00000251095_26 (sequence is synthesized)
ctgttggcaggtccctctttttattttcgctgagagctttcttttactaaatgccaccatccttacctttcaaggtgtctgcgtgcctaatttttcctggttgttagacaagaacccgga

SEQ ID NO: 897636 - DNA, 120 bp, Artificial Sequence
  ENSG00000251095_27 (sequence is synthesized)
ttttagttgaactctggagcaaaaatcctgcatcatttgtaggtcaacaacaagaggccaggacctcccaagaaaagctttactaatgtaatagctttggccaagtccacccaatatatt

SEQ ID NO: 897637 - DNA, 120 bp, Artificial Sequence
  ENSG00000251095_28 (sequence is synthesized)
ttcctctctgcaaagagaaacaagctattgtctcatcttaggtttcatcttcttccatgccactgttattcatgttcaaatcctggctgtccttcagggtccaattcaaatgattatcgc

SEQ ID NO: 897638 - DNA, 120 bp, Artificial Sequence
  ENSG00000251095_29 (sequence is synthesized)
cattttctattaatgtcatttcttcctattttctaccttttgttagctatgttaaagtgtttctttaccaacatcccccatatattgtgtaacacagtgtctatggcttactcatttttg

SEQ ID NO: 897639 - DNA, 120 bp, Artificial Sequence
  ENSG00000251095_30 (sequence is synthesized)
aatccttatcatgacctgacataatgaagattcttagtacatagtgatacatgtaaatatgagttaattagtacatgatagacttgatttccagaatgattttgtatagttgaattgtgt

SEQ ID NO: 897640 - DNA, 120 bp, Artificial Sequence
  ENSG00000251095_31 (sequence is synthesized)
agtaaggggacacatgtgaaatgaagactttagtcagtatcaagaagatattttgggtgacttcacatatctgccaatgataaatctagaaacaataggtgcttgggtaggtgatttcct

SEQ ID NO: 897641 - DNA, 120 bp, Artificial Sequence
  ENSG00000251095_32 (sequence is synthesized)
tttgccttctttatcattgttttcccagtatttcttacattcatctaatttcattagatgcccatatactttatactggctcttcctgtgaggttcgaactggtccagtccatttgtttt

SEQ ID NO: 897642 - DNA, 120 bp, Artificial Sequence
  ENSG00000251095_33 (sequence is synthesized)
cagaattgattcatctggagagtcatctcctatcctcccaaacaatgatataccagtctgaggactgtgtagaagggacttctctttctactcagtatgaccaaaataattcaattctag

SEQ ID NO: 897643 - DNA, 120 bp, Artificial Sequence
  ENSG00000251095_34 (sequence is synthesized)
ttgtggtgtgtgatttatgaatattttgtcctttagtttgtgtgagccaattttgtgccataagaattttagcctccttttccacaaaagagtgatttaatcaaacaaaagttgacaatc

SEQ ID NO: 897644 - DNA, 120 bp, Artificial Sequence
  ENSG00000251095_35 (sequence is synthesized)
ttatgactcttctactagattagctccttcatgtcaaaatctgtcaagtttatgatttattcagatagcacttgtttttggtgtaataactaaactgttgctttagagtctactacattc

SEQ ID NO: 897645 - DNA, 120 bp, Artificial Sequence
  ENSG00000251095_36 (sequence is synthesized)
tcctctattatttggcatttttctctttattattttgttcaagtaggatattgtgctgagttgaaccatgaaatgaattgtattgagcaacatcaacaacataaatattctggggtgtca

SEQ ID NO: 897646 - DNA, 120 bp, Artificial Sequence
  ENSG00000251095_37 (sequence is synthesized)
gtctactctatagaagggatcatgctttgaacctcatcttgaaaggagattcaatctttccttcttgctcctaatatcaacagagggtggaatatatggccctgctgctgaagtttgaga

SEQ ID NO: 897647 - DNA, 120 bp, Artificial Sequence
  ENSG00000251095_38 (sequence is synthesized)
tataaaatatgtacctagagctaatataatggagatccctgaaaaagttttcctaaaaaaataaaaattaaaaaaaacacacacacaatgaaataaaaatgagaggtaaaatctgctcaa

SEQ ID NO: 897648 - DNA, 120 bp, Artificial Sequence
  ENSG00000251095_39 (sequence is synthesized)
gtggtacatatacacaacggagtgctattcagccataaaaaagaatgatactctgtcatctgcaacaacatgaatggaactggagatcattatgttgttaaataagccagacacagaaag

SEQ ID NO: 897649 - DNA, 120 bp, Artificial Sequence
  ENSG00000251095_40 (sequence is synthesized)
acaaacatcacatattttcacttattttggggatataaaagtcaaaacaaactcatggagatagagaacagatagacggttaccagaggctaggaggaggagtggtggggggcagttagt

SEQ ID NO: 897650 - DNA, 120 bp, Artificial Sequence
  ENSG00000251095_41 (sequence is synthesized)
gatggttaattggtacaaaaaaatggttagaaataataaataagacctagtattagataggacaacaggaggactatagtcaaaaataatttatttgtacatttcaaagtaactaaaaga

SEQ ID NO: 897651 - DNA, 120 bp, Artificial Sequence
  ENSG00000251095_42 (sequence is synthesized)
gtgtaattgtattatttgtagcacataggataaatgcttgaggtgacggataccccatttaccctgatgtgattattacacatcgtatgcctgtaccaaaagatctcatgtacctcataa

SEQ ID NO: 897652 - DNA, 120 bp, Artificial Sequence
  ENSG00000251095_43 (sequence is synthesized)
atacatacacctactatatacccacacaaattaaaaattaaaaaaatttaaagaaattacagtttgttggttttgaatatttgaccaaattttttactaagcacagatagattgaatata

SEQ ID NO: 897653 - DNA, 120 bp, Artificial Sequence
  ENSG00000251095_44 (sequence is synthesized)
tagtgggtagtttatatactaaagttattgttatgagaaagaatggcttaggaatattatttaaaattaattaaggggtgttaaaaataaaataccaagtgtaaaaatgacaaaggcaag

SEQ ID NO: 897654 - DNA, 120 bp, Artificial Sequence
  ENSG00000251095_45 (sequence is synthesized)
aagaaacagtatataatgtgagtaaatcttaatctttccaagagaggagacagtacataatgtctaaaattgttaaaccatgaaatagaaatatagttattttattcataattaaggaga

SEQ ID NO: 897655 - DNA, 120 bp, Artificial Sequence
  ENSG00000251095_46 (sequence is synthesized)
taactactatagcacgaaatcgtgccaaaaatggttgcctctgggaaatgtgattatagatattataatattttggactgtaaaaatctgcttttaagactgaggaaatacaaataggac

SEQ ID NO: 897656 - DNA, 120 bp, Artificial Sequence
  ENSG00000251095_47 (sequence is synthesized)
aatatttatttgaaatttgtatcctcagggagtgtaaagaaattaatgtatccacaaaataataatagctgctatttgaaaacatagttttcttgaaagttaaaatagtaatagtcttct

SEQ ID NO: 897657 - DNA, 120 bp, Artificial Sequence
  ENSG00000251095_48 (sequence is synthesized)
aaaaattttgttagttttggttttctctttaatctgagttatgtagaaaagtgcttatttcaaattaggtaggcttgttttattcctttttctgtcttttttctatcaactagtgtttta

SEQ ID NO: 897658 - DNA, 120 bp, Artificial Sequence
  ENSG00000251095_49 (sequence is synthesized)
ttgtgttcagaaaatgccatgcattaaaagactacttttgagaatttctagagattttctttgttactaaagagatttttgtaattgttacatgggattttaaaaagaatgtaaattatc

SEQ ID NO: 897659 - DNA, 120 bp, Artificial Sequence
  ENSG00000251095_50 (sequence is synthesized)
ctttttgtcaagtataatgatttctgaaacctagctgtgtcagaatactgtataatactgtaatagtatgttgtttttggctatgtgtacttatttcttagagtggtatgttaaagcctc

SEQ ID NO: 897660 - DNA, 120 bp, Artificial Sequence
  ENSG00000251095_51 (sequence is synthesized)
gaccttgtgactttgtttatttctctctctacatctaaacatttccaagacatgttatttgcaataccaagaccataactattatgtatttaatcaaaataaaatatttcggctctctat

SEQ ID NO: 897661 - DNA, 120 bp, Artificial Sequence
  ENSG00000251095_52 (sequence is synthesized)
caagattgtcttctagtcaccggcacttgacacactaaattgatgcacatccattttaaacccggcatttgtgctccatatcttgccctttgacctatttggattcatgtgggaatgtga

SEQ ID NO: 897662 - DNA, 120 bp, Artificial Sequence
  ENSG00000251095_53 (sequence is synthesized)
cctctgcttgaataggatgatgacattttcaaagaagctaaatcttaccaaaaatcagattctggtacgattgtgatcaagtagtataataaagctaatcgtggcttgcagaaatcgaaa

SEQ ID NO: 897663 - DNA, 120 bp, Artificial Sequence
  ENSG00000251095_54 (sequence is synthesized)
agatttctgtctgcctctcattggcaaacatgacatttcagcaatttctctaaagaggaatgactgggggattttttgttcattctgaaaatcacatcgccagatccaacacctttttat

SEQ ID NO: 897664 - DNA, 120 bp, Artificial Sequence
  ENSG00000260780_0 (sequence is synthesized)
gagtgcagtggcacaattatggctcactgtagcctcaccttcctgggatcaagcaatcctctttcttcagcctccagaggagctgggaccacagaaaacatcttgatggatgtcttctta

SEQ ID NO: 897665 - DNA, 120 bp, Artificial Sequence
  ENSG00000260780_1 (sequence is synthesized)
gatggatgtcttcttaggatgcactttacaaacatctgtgggggaatttcacccatgacaaaggctatattaagaggggaagcaaaatgggaaggtgtacacctccctcccccacaatgt

SEQ ID NO: 897666 - DNA, 120 bp, Artificial Sequence
  ENSG00000260780_2 (sequence is synthesized)
ttaatattatccagccagcccagagtcctttcaaccatcctgtatgacaactaagaaaatctgatggcacttggatatgacagtagacaactggacactactaatctttccaagatacat

SEQ ID NO: 897667 - DNA, 120 bp, Artificial Sequence
  ENSG00000260780_3 (sequence is synthesized)
gctactgcattctgtggatgatattctggcttctgaagacttgtcattgctacagcaacaccgagatgcattggcactcttcaatccagaggatgggccatcaacgcacaaaagtggaag

SEQ ID NO: 897668 - DNA, 120 bp, Artificial Sequence
  ENSG00000260785_0 (sequence is synthesized)
agccctgggcaattcaccttttctttaaatactcatgtcacatttgtgctgttgccaatgcttctcagaccctccagatgaggacatttccctgaggaggtggctatgatggtagaactt

SEQ ID NO: 897669 - DNA, 120 bp, Artificial Sequence
  ENSG00000260785_1 (sequence is synthesized)
gaggtggctatgatggtagaacttacaagacttcagtggacataaggagacggggtcaaggtggcaggcaagatggtcaaatagaagtagcttcagtctgcagctcccagtgagatcaac

SEQ ID NO: 897670 - DNA, 120 bp, Artificial Sequence
  ENSG00000260785_2 (sequence is synthesized)
ttctaactgaggaaacaatgccaagaatacgttaatctaaacccatgatgtttctacatctcaaagaacagagagaaaaggaaactggagagaggccagaagtgaccaactctattccct

SEQ ID NO: 897671 - DNA, 120 bp, Artificial Sequence
  ENSG00000260785_3 (sequence is synthesized)
catttctgtgttatactccctttgtctaatcttccctaccctaccaggtggtttaagaattttatcctttctccagactagaagaggaagtgggggccggaattaggtgtatacaaattg

SEQ ID NO: 897672 - DNA, 120 bp, Artificial Sequence
  ENSG00000260785_4 (sequence is synthesized)
ttggaaagcctttgtgtggatttggagggctgaagtagagtatcatttttacaaagcagcccaagcctctaatctgagcaggaagattcacactcattctctggcatgagtcctatcagg

SEQ ID NO: 897673 - DNA, 120 bp, Artificial Sequence
  ENSG00000260785_5 (sequence is synthesized)
aggatcaatgaagccaaggctgtagaaataaataattaatctctccacccaaggaggctagtaaacaatattcaatacgtgaatactgagttctgccaagaggaagaagcatataaacca

SEQ ID NO: 897674 - DNA, 120 bp, Artificial Sequence
  ENSG00000260785_6 (sequence is synthesized)
ggcaactgctgaacgcattgccaaaaagggagacttacgcatcattcactaaagctttccaaaaactaaatcagatccaagaacagataaactcctgcagaatgacaatggtggagaaat

SEQ ID NO: 897675 - DNA, 120 bp, Artificial Sequence
  ENSG00000260785_7 (sequence is synthesized)
tgacctcccagcattgcagacttacatcagttgttctgatgttcttagttatatcagattccttccagaatcttctaaatatatcagacggtcagacacaaccccaggccctaataaaaa

SEQ ID NO: 897676 - DNA, 120 bp, Artificial Sequence
  ENSG00000260785_8 (sequence is synthesized)
acacatccaacatagaagaaccacttagtacttctctctggctcatatttcttccactatttactaaatgtcgaccttaggctaatttcttaaatccgtgtccaagggtttctttaaatg

SEQ ID NO: 897677 - DNA, 120 bp, Artificial Sequence
  ENSG00000260785_9 (sequence is synthesized)
gagataatattaccttatcgtcaatctattgtaagaattagataaaagggtgcatgcgaaggaccaagcagtgtagatgtcacactgtaagtgcttaatacgtgtctcagcttattattc

SEQ ID NO: 897678 - DNA, 120 bp, Artificial Sequence
  ENSG00000260785_10 (sequence is synthesized)
tgcaagagaagttaactacctaataaattgtgtagatatcaagtgcccctcatggcactttaatcaaagaaatctgttgttaattcctattgtaaacctcagttgctacatcagccagct

SEQ ID NO: 897679 - DNA, 120 bp, Artificial Sequence
  ENSG00000260785_11 (sequence is synthesized)
cttcaaagggataaatatgacattattattttctaaatgacttttattttctaaatgctcttagagtgtttgatcccccggaagctatcatcattaatgatttctcgagtatactgagag

SEQ ID NO: 897680 - DNA, 120 bp, Artificial Sequence
  ENSG00000260785_12 (sequence is synthesized)
taatgtttaggtgtaaaggaagtgaaaagtaaacatgaatgcttctttgctcttcaaagatgaaggttctgagatcaaagagcctgagtgatgtgaccacatccctaaagatggtgccaa

SEQ ID NO: 897681 - DNA, 120 bp, Artificial Sequence
  ENSG00000260785_13 (sequence is synthesized)
atgccgccctactgataaggctgctgtggggaccgtgcacctgtgttcttctcttaatacttactctgggtctctgttgacaaggaacattttgaagtttctaagaattatttaataacc

SEQ ID NO: 897682 - DNA, 120 bp, Artificial Sequence
  ENSG00000260785_14 (sequence is synthesized)
ctaataatcattgtttctttagtgactcaagtctacacctgtaatgctcaggtttttctttcttttttcaatcggggaacgtattttttttttcttgtagtctcttaaataacagattat

SEQ ID NO: 897683 - DNA, 120 bp, Artificial Sequence
  ENSG00000260785_15 (sequence is synthesized)
ataataaaaaagagaaactttctcaagaaggaagctatctgcactgctctgctgaactctaagccacctctgctactaaaacagatagtagcccctgttggggtctctggagcagggaaa

SEQ ID NO: 897684 - DNA, 120 bp, Artificial Sequence
  ENSG00000260785_16 (sequence is synthesized)
tccaagctgtcatggagcatgtattcagtaaccaaagaggattctacaagttttgtttttctggctaggtgacttcagcccatcaaagacaaagatgaaataaaataatctgaatgatca

SEQ ID NO: 897685 - DNA, 65 bp, Artificial Sequence
  ENSG00000260785_17 (sequence is synthesized)
aacacagaaggcaggtggtttctgcatttctaactgagcctctcacctgcagcagaggggcctga

SEQ ID NO: 897686 - DNA, 120 bp, Artificial Sequence
  ENSG00000260785_18 (sequence is synthesized)
acaagacttcagtggacataaggaagcaaggaggctctgcaaagtagtctgcagtgaaagtgcagagaaagctgaagatggggcccaggacttaatcatcagagcagcagagcacctaaa

SEQ ID NO: 897687 - DNA, 120 bp, Artificial Sequence
  ENSG00000260785_19 (sequence is synthesized)
gggcaattcaccttttctttaaatactcatgtcacatttgtgctgttgccaatgcttctcagaccctccagatgagtacaagtatcacacaaagacattctggagaatggcagaaaagtg

SEQ ID NO: 897688 - DNA, 120 bp, Artificial Sequence
  ENSG00000260785_20 (sequence is synthesized)
gttaaacttccagccatgcaggcttgaaatgccaaggtacgagcccaagggcacgtccaatgaacatactgcacattgggctccatctcagagcctgcttcccaagaattcgacctgtgg

SEQ ID NO: 897689 - DNA, 120 bp, Artificial Sequence
  ENSG00000260785_21 (sequence is synthesized)
catgggtagggcaatggccagccacagtcacagagatttttccataatgagaagactcttgttgaaggtttaccctaggctggaatgacaagagagaatctggaaggtaccagggagacg

SEQ ID NO: 897690 - DNA, 120 bp, Artificial Sequence
  ENSG00000260785_22 (sequence is synthesized)
tgggcaattcaccttttctttaaatactcatgtcacatttgtgctgttgccaatgcttctcagaccctccagatgaggtctcccattggttgaacccactggaagccagaggtcgagggg

SEQ ID NO: 897691 - DNA, 120 bp, Artificial Sequence
  ENSG00000251093_0 (sequence is synthesized)
tcacttttaaaacaatgaggttttattatttccaattacttacagcaagtaactgcatctaactaccatcaaagcattactagaaatgttagaaatctactagaaataactagaaatctg

SEQ ID NO: 897692 - DNA, 120 bp, Artificial Sequence
  ENSG00000251093_1 (sequence is synthesized)
ccaagctagatatatagagtacatgttagtataatcaagttttattttgttggaagggacctgtattattcaggattctttctgtttcaaataatttttaaaaactgaactcaaactggc

SEQ ID NO: 897693 - DNA, 120 bp, Artificial Sequence
  ENSG00000251093_2 (sequence is synthesized)
tccactgcttggctatagtttcctctgtattggtgtcattctcaggcaagccctacccgacttgctagcaagatagttgccagaagttctgggcctacctcttaccctttcagcaacctg

SEQ ID NO: 897694 - DNA, 120 bp, Artificial Sequence
  ENSG00000251093_3 (sequence is synthesized)
taaaggaaacgatttctttttcccaatagtttccttaaaagtcttaggactgcttcaaattttccgagcgtggaccatgtgccctttcttggccaacgagataaaagtcactgaatgtct

SEQ ID NO: 897695 - DNA, 120 bp, Artificial Sequence
  ENSG00000260786_0 (sequence is synthesized)
gagattcagacacacagaaagattgttatgtggtggcagaggcagatattgtagtgatgcatttccatgccgggaaatgctaaggatggctgttaataaccagaagctgggagacaggca

SEQ ID NO: 897696 - DNA, 120 bp, Artificial Sequence
  ENSG00000260786_1 (sequence is synthesized)
tggagcagattcccactctggatgcccaagaaggaatcaaccctgctatcctcctgactttagacttctagactcctgaactgtgaaagaacatctttgtattgccttaaatcacccagt

SEQ ID NO: 897697 - DNA, 120 bp, Artificial Sequence
  ENSG00000260786_2 (sequence is synthesized)
ttgtggtagtttgttatggtaacaataggaaataatatagtaactaatatagatgcttagtaaccattttcccatcccaaaattgactaaggaagctaataagaaggggtagaaaagtgg

SEQ ID NO: 897698 - DNA, 120 bp, Artificial Sequence
  ENSG00000260786_3 (sequence is synthesized)
atttcgaaatagcctttaatgttcaataggtgttccacttcagcacaaatggaaatttccttcctggttcttgtgactgctctagtatttatttacaaattgatatgagaacttttgctt

SEQ ID NO: 897699 - DNA, 120 bp, Artificial Sequence
  ENSG00000260786_4 (sequence is synthesized)
ttgatggatggaaggatccaatcaaggcaaagatatgcagggagaaaggagaggtggacaatagaagggaatgacatggaaattctcctcatctcctggtctgctggattgtcctttaaa

SEQ ID NO: 897700 - DNA, 120 bp, Artificial Sequence
  ENSG00000260786_5 (sequence is synthesized)
agcagaactcaagttattgtttaataagcaatttcatgaaacactcgtgctttaaggaccagtaaagcaaaaatcaaggtggaggaaaatttcttctttcacaatttgctctgtagatct

SEQ ID NO: 897701 - DNA, 82 bp, Artificial Sequence
  ENSG00000260786_6 (sequence is synthesized)
ggaggaaaatttcttctttcacaatttgctctgtagatcttgtcctatagttgttgtgaggacaatagtgaattaatgtaag

SEQ ID NO: 897702 - DNA, 87 bp, Artificial Sequence
  ENSG00000260786_7 (sequence is synthesized)
aaattcaaaaattagctgggcattttctgagggaggagaatcacttgatcccaggaggtagaggttgaagtgggccgagatcacgcc

SEQ ID NO: 897703 - DNA, 120 bp, Artificial Sequence
  ENSG00000260786_8 (sequence is synthesized)
atcacgccactgcattccagcctgggccatagaaggagactctgtctcaaaaaaaaaaaaaagtgaattaatatatgttaagtgcttagaacacgtctgacatatagtaagtatagtgtt

SEQ ID NO: 897704 - DNA, 120 bp, Artificial Sequence
  ENSG00000260786_9 (sequence is synthesized)
gaacacgtctgacatatagtaagtatagtgttttctataattataaaaagggaagaacataaacagatctatttctaagcacaaaagacttccttggggacaccccaaaacaactgggag

SEQ ID NO: 897705 - DNA, 120 bp, Artificial Sequence
  ENSG00000260786_10 (sequence is synthesized)
aattgctgctcatatatctgtaactacagacaagcctaaggaatttgtcttactaattcatattcattaatttaatgaatatgtgttgaataccttctaaatggataaactcaatgaagg

SEQ ID NO: 897706 - DNA, 120 bp, Artificial Sequence
  ENSG00000260786_11 (sequence is synthesized)
gagaaatcatttaggcactgctaccccggtgacagagcagacagtaagtggtgactgactgagtgttccttgtacagcactgagtgccaagaatactcgggggaacaagacatcattgtc

SEQ ID NO: 897707 - DNA, 120 bp, Artificial Sequence
  ENSG00000260786_12 (sequence is synthesized)
tcacaatcagcagagccaagaggtgcaggttagaatgatgaacttgatctacatggaatgttcttaacaaagttttaattttttcccaatgtcgccaaaataaatagttttgactaatta

SEQ ID NO: 897708 - DNA, 120 bp, Artificial Sequence
  ENSG00000260786_13 (sequence is synthesized)
gtggaatagtttatttcttccaaactttcagataaattatatgagaatgaaattaggaggaagaacagaaaaatcagtcatttcaagcaactgcatggaaaagaatgtatttcctttgaa

SEQ ID NO: 897709 - DNA, 120 bp, Artificial Sequence
  ENSG00000260786_14 (sequence is synthesized)
aactctgggaatgtaaattcttaaccatttatggggattttagtaaatgcaggcaaggcatttcattcttacagctttctttgaagacagaaatacataatagcctactccgtaacaaca

SEQ ID NO: 897710 - DNA, 120 bp, Artificial Sequence
  ENSG00000260786_15 (sequence is synthesized)
tttcagtagtctttgagatttattttttctataacttgtagaagaaataggatcatttccgaagcagtatgactaggaatattactttgaaaaagtccaataaccatttctgatcttttt

SEQ ID NO: 897711 - DNA, 120 bp, Artificial Sequence
  ENSG00000260786_16 (sequence is synthesized)
caaacagaaaaagtagaaaacgtcacctagtgtactatcctttaggcttttggttgaactcaagctattctggaaaagtcttgcttatcccccaaccttgtaaatatttagtgtttccag

SEQ ID NO: 897712 - DNA, 120 bp, Artificial Sequence
  ENSG00000260786_17 (sequence is synthesized)
tttcccataatgtaaatgcagcattacaaacagcatgacaactgtgtatacaacaaattttgacaggactgctgaagatagaagtacaattctttgaagacaaatgaagtcccttataga

SEQ ID NO: 897713 - DNA, 120 bp, Artificial Sequence
  ENSG00000260786_18 (sequence is synthesized)
gttttaatgataaatagaagggtacttagtcttccaactcccatgtcaatcagtgataaattttcctccaagcttaccataaaacggccaggttctgaggtctgggaagggcgtactcag

SEQ ID NO: 897714 - DNA, 120 bp, Artificial Sequence
  ENSG00000260786_19 (sequence is synthesized)
tgccaaaccttatcttaaagaagggaagtccaatgtcatagtgcagagtgtgattcaaactgatttctctgtctgtttcataatggagatataatcttaggcctggtgcagtggctcacc

SEQ ID NO: 897715 - DNA, 69 bp, Artificial Sequence
  ENSG00000260786_20 (sequence is synthesized)
taatggagatataatcttaggcctggtgcagtggctcacccctgtaatctcagtacttcgggaggccaa

SEQ ID NO: 897716 - DNA, 120 bp, Artificial Sequence
  ENSG00000260786_21 (sequence is synthesized)
tgatggtggcaggtgcctgtagtctcagctatttgggaggttgtggcaggagcattgcttgagactgggaggcagagggtgcagtgaaccaagactgcgttactgcatttcagcctgggc

SEQ ID NO: 897717 - DNA, 120 bp, Artificial Sequence
  ENSG00000260786_22 (sequence is synthesized)
aacacagccacaccctgtctcaataataataataattataataataataatagatatataatcttgttaagaatatatgttactatactgaagcaatgcagtgcaatgtacctcaacatt

SEQ ID NO: 897718 - DNA, 120 bp, Artificial Sequence
  ENSG00000260786_23 (sequence is synthesized)
gctcagaattcagagggtcatcatatagttccaaatgaaaaaccttaattgcaacagagagaaaaaagatgttaagcgtctagcattgttgcctaactaaagtacttggtatatattgtt

SEQ ID NO: 897719 - DNA, 120 bp, Artificial Sequence
  ENSG00000260786_24 (sequence is synthesized)
ccttttcttctttttctcttttgtctaacttacaaaacatgaatatttatttccaagcttttttaaaaaaaactttttaattctgttttgtatctgagaagtaaagagatggtgaagtga

SEQ ID NO: 897720 - DNA, 120 bp, Artificial Sequence
  ENSG00000260786_25 (sequence is synthesized)
gcacaattgtaagtaatactggataattactttggaggagattgctaggtagtgagacaagtggataatatcataagtgctagggctgagtatgaagttccgtgggaacacaaaggagga

SEQ ID NO: 897721 - DNA, 120 bp, Artificial Sequence
  ENSG00000260786_26 (sequence is synthesized)
aatagctatgaatcttaagaatagattgttatttaaactaaattctttcatggaaaaaaatagccttttaacacattatctcttacagaaaaccaattaataaaaacaaaacaaaatgaa

SEQ ID NO: 897722 - DNA, 120 bp, Artificial Sequence
  ENSG00000225489_0 (sequence is synthesized)
gttttttcgtaactggcagtagtaatctggcggttgacactctcgttgcctgtataggctgatggcccactcacctttttagctgggctcctgacctgtccggccagaaagttgccactg

SEQ ID NO: 897723 - DNA, 120 bp, Artificial Sequence
  ENSG00000225489_1 (sequence is synthesized)
ggaaacctggacccctactgaatggatctgctggcacctagacctcagagaagggggaactgaagactgaagtctgaccactgttctttgttgaaaatttctttctcaggggcttggagg

SEQ ID NO: 897724 - DNA, 120 bp, Artificial Sequence
  ENSG00000225489_2 (sequence is synthesized)
gatcacatctacaatcctgagctaatattctcttctgctgtccccaaaatttaaacgaagcttctcttaacccattgcaaatgagaaaaatctttgaatctacctatgactataagccct

SEQ ID NO: 897725 - DNA, 120 bp, Artificial Sequence
  ENSG00000225489_3 (sequence is synthesized)
tatttcaagatatcctgcctttttaggccagaaccaaagtgtaacctccatctattgatttacaattttgcctgtaactttggctttcctgaaatttaccccagccttaaaaaaaaaaaa

SEQ ID NO: 897726 - DNA, 120 bp, Artificial Sequence
  ENSG00000225489_4 (sequence is synthesized)
gaacagaaaaagaaaactgcaaggcatcagggaggtcagaatttgggcatgagctgcctgatcctccttgctttgcatctttgcaaatagatgccttcagctgtgcatgatggctcacac

SEQ ID NO: 897727 - DNA, 120 bp, Artificial Sequence
  ENSG00000225489_5 (sequence is synthesized)
ctctcatcccagcactttgggagggcaaggcgggaggattgctccatcccaggagttcgagatcaggggcaaaatgccgaaaccctgtctctacaaaaaattaaaaaattagctgggcat

SEQ ID NO: 897728 - DNA, 87 bp, Artificial Sequence
  ENSG00000225489_6 (sequence is synthesized)
ctacttgggaggctgaggcagggggattgcttgagcccaagaggttgaggctacatgagccatcatgagaccctgtctcaaaacaaa

SEQ ID NO: 897729 - DNA, 72 bp, Artificial Sequence
  ENSG00000225489_7 (sequence is synthesized)
tgccactgcactccagcctgggaaacagaatgagaccctgtctcaaaacaaaacatttgaaaaataacaagt

SEQ ID NO: 897730 - DNA, 120 bp, Artificial Sequence
  ENSG00000225489_8 (sequence is synthesized)
caaaaaataaatacatgccttcctttctactgctgcacaacctcactgtgtcaggcaggcatctctggatccagctggtttttgttttgctgaggctcagcttcttcctggaactttttg

SEQ ID NO: 897731 - DNA, 120 bp, Artificial Sequence
  ENSG00000225489_9 (sequence is synthesized)
aaacaacactcaagggtctcaaatggctgacatgatggtctgtgacctgaaagttgttgaatagttggagtgttctgcattcatgtggaagaggctaaaggatgtttgatgaagcactat

SEQ ID NO: 897732 - DNA, 120 bp, Artificial Sequence
  ENSG00000225489_10 (sequence is synthesized)
gggctgccctggaagaggactgaagaagcagctgcagaatcaaggtctctgttgcccaggctagagggcagtggtgcaatcacacctcactgcagcctcaacatcccaggctcaggaaag

SEQ ID NO: 897733 - DNA, 120 bp, Artificial Sequence
  ENSG00000225489_11 (sequence is synthesized)
ctcaacatcccaggctcaggaaagaaacgtccactctgctccagtcaaccccactgctggtgtcctctgcactgccttgcactccctgaagagagcctgggcaacagagcgagactccat

SEQ ID NO: 897734 - DNA, 120 bp, Artificial Sequence
  ENSG00000225489_12 (sequence is synthesized)
tggggactatgtatatagatttactacactgaagccctccagcagtctaagaactgatgcctctaacgaaggaaaggactgcatgtttctgatgaagctaccatgacctaccagatttcc

SEQ ID NO: 897735 - DNA, 120 bp, Artificial Sequence
  ENSG00000225489_13 (sequence is synthesized)
aacgcctgccaaaattaatctatttgtctgtggtagaagaggccataccattgtggcccttgaaacttactgtatgatgttttatttagtgaacagttcacatacccaaatggttgtaac

SEQ ID NO: 897736 - DNA, 120 bp, Artificial Sequence
  ENSG00000225489_14 (sequence is synthesized)
tgatactgctgaatatattgtaagaacagaagtgttaagtatgtataacacttcttttgattgtaaggaatgttcccagtggggaaatgccataattaaaacagtgatcgtgggatgaat

SEQ ID NO: 897737 - DNA, 120 bp, Artificial Sequence
  ENSG00000225489_15 (sequence is synthesized)
gactgaagaagcagctgcaggaaagaaacgtccactctgctccagtcaaccccactgctggtgtcctctgcactgccttgcactccctgaagagagcctgggcaacagagcgagactcca

SEQ ID NO: 897738 - DNA, 120 bp, Artificial Sequence
  ENSG00000225489_16 (sequence is synthesized)
tgaatgcttcaagaccacagtgctctcctgccttggaaacaccttcgccttcctccgcttctctttggctaccatggtcaccctccacactgctttcctcaactctcgggcaggctggtc

SEQ ID NO: 897739 - DNA, 120 bp, Artificial Sequence
  ENSG00000225489_17 (sequence is synthesized)
caaaattagactattatttagaagtatatcaatttgcagccagggcagtggctcacgcctgtcctttacacatataagatggtaatacacggccgggcacagtggcttgtgcctgtaatc

SEQ ID NO: 897740 - DNA, 120 bp, Artificial Sequence
  ENSG00000225489_18 (sequence is synthesized)
ggggaccctgggttccagtatttcctggcgatcttacccactaccaccatctagtcaatttgaaccacctcctcaaccacctatgagggcctaaacactctttcactccctttcctgcca

SEQ ID NO: 897741 - DNA, 120 bp, Artificial Sequence
  ENSG00000225489_19 (sequence is synthesized)
ggagcccggatgcgcgctgggactcggtgcagtccagctccacggtcgcgcgtcccacagctcccttcacgtccgttcctccgtttccccaccttgggagggccaggacttccgaggctt

SEQ ID NO: 897742 - DNA, 120 bp, Artificial Sequence
  ENSG00000225489_20 (sequence is synthesized)
tagggggcaggaagctgcgagaaggtggcgcttgcttaggtgaggcgcggaggatggtattagagagaggaacgtgactggaagctccctggccatggacgatcgctgggttctaggcgc

SEQ ID NO: 897743 - DNA, 120 bp, Artificial Sequence
  ENSG00000267033_0 (sequence is synthesized)
gcataagacctggcagcattagctttgtgcccttggaagccagttgctgtgcaggaagtctgatggccctgctggaaagaaaggacctggaagatgagatgacatgaaggaagaggccac

SEQ ID NO: 897744 - DNA, 120 bp, Artificial Sequence
  ENSG00000267033_1 (sequence is synthesized)
gaaagaagcactgagagcataatggacccagtttctgtcttactgtgaactcttctgttctccactgcacacatttatggtgttaagaaaaaataatttatcggagccttataatacaat

SEQ ID NO: 897745 - DNA, 73 bp, Artificial Sequence
  ENSG00000267033_2 (sequence is synthesized)
ctgcagtgctctgaccccgccaaaaataactaattttttaaaaaatacagcatgtttgaatctgccaaacaaa

SEQ ID NO: 897746 - DNA, 120 bp, Artificial Sequence
  ENSG00000282718_0 (sequence is synthesized)
gtgactgtggtggggaaggaacacagatggtgctgcgaggccgtctccagactgtggaagccacaagccactggcgtctgcttctgtggagaaacaaacttcagccacccacgggcgccc

SEQ ID NO: 897747 - DNA, 120 bp, Artificial Sequence
  ENSG00000282718_1 (sequence is synthesized)
ccgcaagggccgggctgattcctcgagagtggctggcgctgggcctgcacagcactcttccctactctacgcttaccttcctcccctcccctatcctctggggcaattcagaaacggaag

SEQ ID NO: 897748 - DNA, 120 bp, Artificial Sequence
  ENSG00000282718_2 (sequence is synthesized)
aaaaagagaagacgcagggaaggaattacctagagatccccaggactgccacgctgggccagactcacaggacactacttccctgaattattcgcttctagaactatggatgatgggttc

SEQ ID NO: 897749 - DNA, 120 bp, Artificial Sequence
  ENSG00000282718_3 (sequence is synthesized)
atgggttcatctaacccttccttgatttgtttgttttcactatgttatttataaagataatgggttgtatgataaatacttcttttttctttttttctctctctctcttttttttttttt

SEQ ID NO: 897750 - DNA, 120 bp, Artificial Sequence
  ENSG00000226286_0 (sequence is synthesized)
gccttgccagccccagctgaaccacttcagagagccattaacctctgcaaaacggagtggacaacttccacgtggctttctgtagaaatcagatgggactgcaagcaatggcacggcccc

SEQ ID NO: 897751 - DNA, 120 bp, Artificial Sequence
  ENSG00000226286_1 (sequence is synthesized)
actccaccaccagaagccggttaccaccgtccttcgggctttgtcctggagggtgcggggctggtgtggaccactcagtctggcagtgaccaccacccagtcagaggcacggcagaacgc

SEQ ID NO: 897752 - DNA, 120 bp, Artificial Sequence
  ENSG00000226286_2 (sequence is synthesized)
acctgctgcacggacgctgtttgaacttcttcaaaacgtggtgcagtgtttcctgaagacatttaccatccttggcagttaaatacagcacagtgtcaattacaggtccatcttctgtaa

SEQ ID NO: 897753 - DNA, 120 bp, Artificial Sequence
  ENSG00000260252_0 (sequence is synthesized)
ttaggcaaaaagaaattttattctttcacagaagtctgaggcaggcaggtccagagttcatgcaggagctcaataacatcagagattgggctctttttgttcttcttagcatatcgatgt

SEQ ID NO: 897754 - DNA, 120 bp, Artificial Sequence
  ENSG00000260252_1 (sequence is synthesized)
tgctgggcacctcggggacctaagatggctgttgtagctccatgcatcatgattaaaccagagacaggaagtgtacgatggaagaggccagaggtcacttttcagtgtctatccttccaa

SEQ ID NO: 897755 - DNA, 67 bp, Artificial Sequence
  ENSG00000260252_2 (sequence is synthesized)
gatacaaacttcttttttcccaacattgggaattatgtcatacaaattattcagtaatatgcttttt

SEQ ID NO: 897756 - DNA, 120 bp, Artificial Sequence
  ENSG00000254577_0 (sequence is synthesized)
aggcatgagccaccgcgcccggcctcatgtagaacttttaattgaactttttgtccccgtttacattataatgtgaaaataaaagatgaaaatcaaaatgaaagcatttgttgatttgaa

SEQ ID NO: 897757 - DNA, 120 bp, Artificial Sequence
  ENSG00000260257_0 (sequence is synthesized)
ttttttttttaaagtagctgctgaacacaggagaatctgcctttttcttgaatcgtggtttttttgtttttttttttttcaagacggagtgttgctgttgtcgcccgggctggagtgctg

SEQ ID NO: 897758 - DNA, 120 bp, Artificial Sequence
  ENSG00000260257_1 (sequence is synthesized)
ctgaatcatggttttttgaaaccattggcatctgaacctgtagctctctctggtagtgttgtgtggttttaaatgtcatgtgagctgagttactgacctcaacctactgccagatgaagg

SEQ ID NO: 897759 - DNA, 120 bp, Artificial Sequence
  ENSG00000260257_2 (sequence is synthesized)
tgtgatcctgtgataccaatcttgagggtcccttctagttttagcagtcagtgacttctcttgtttatttttgtttgaaaaagtaaaaggctctctttttggctatagagttgcatcttg

SEQ ID NO: 897760 - DNA, 120 bp, Artificial Sequence
  ENSG00000260257_3 (sequence is synthesized)
aaatttttgacaaattacatagagctgaagaaggatacaagttttgatatcttaaaatcacagggttgaagcttgaaaggacagtattggcattgcagctaagtgggagtgtgaggaagc

SEQ ID NO: 897761 - DNA, 120 bp, Artificial Sequence
  ENSG00000260257_4 (sequence is synthesized)
gccttctctagggcaggtaattgcatctgttaatgtggtccttgggcccctgagttgctgccttccaatcagaattcccttagcattagccagtgacgcctgaattaatctcaggtagga

SEQ ID NO: 897762 - DNA, 120 bp, Artificial Sequence
  ENSG00000260257_5 (sequence is synthesized)
cttctaacttttttccaaaattatttttgtgcagaggtttatctagatttttcttctaaatgtcctcctccccacttgttttattattactgtttttttctctctttaattttttttttt

SEQ ID NO: 897763 - DNA, 120 bp, Artificial Sequence
  ENSG00000260257_6 (sequence is synthesized)
tgggattataggcgtgagccattgcgcctggctctgttactgtttttctaacctgagttacttaggatcatattttcattcttttttaaaaagatgggagttttctgaacttttccttaa

SEQ ID NO: 897764 - DNA, 120 bp, Artificial Sequence
  ENSG00000260257_7 (sequence is synthesized)
ctaaaaagtggaatgcatcttaatattttcctttttttacttgtgtttctccccagggagggaaaaacatatttattgtgacagaatttagcatattttaggccacattaaaatactgat

SEQ ID NO: 897765 - DNA, 120 bp, Artificial Sequence
  ENSG00000260257_8 (sequence is synthesized)
aaatgtattaatcagtgaaaataggttatagtgaaaaatatataccatttgattaataaaaatgttattggaaaaatgcaagaactgctgtaagaattgctaacattgtgttggaaaata

SEQ ID NO: 897766 - DNA, 120 bp, Artificial Sequence
  ENSG00000260257_9 (sequence is synthesized)
aatatactaagctaagaaacaatgggaaactgtcatatgtagggccaacagcctttttttttttaaacccttccaatttattaatatctagtctaataaaccctgatttataggacctct

SEQ ID NO: 897767 - DNA, 120 bp, Artificial Sequence
  ENSG00000260257_10 (sequence is synthesized)
gcaccttttttgactttttattcatccattcttaatattctacactatgacaaaatccttaaaactccattattgatgaaatgggaacagacttttgtttttgtatgttggtgttctctg

SEQ ID NO: 897768 - DNA, 120 bp, Artificial Sequence
  ENSG00000260257_11 (sequence is synthesized)
agtggtgaaggcccagggagaatgttttgtttggtggtcacttagcatttgaaaacatccacttccttgtgacttagctgggtatcttttaacatctggaagccacgtccctgattgaaa

SEQ ID NO: 897769 - DNA, 120 bp, Artificial Sequence
  ENSG00000260257_12 (sequence is synthesized)
tctctggagacaacttacctttcaccaacttgtctgccaaattgcaccatggaccaagattgcagtggctgcatcaagtctaggcctgccctgaagtctggatttgtaagtcccccattt

SEQ ID NO: 897770 - DNA, 120 bp, Artificial Sequence
  ENSG00000260257_13 (sequence is synthesized)
caaatggggcagaaggcagaggagcagaggagccactgtgcctttcgctgtcctggagccagttggccttctggttttggtgaaccctgcttttataagaggactccctggcatcttcca

SEQ ID NO: 897771 - DNA, 120 bp, Artificial Sequence
  ENSG00000260257_14 (sequence is synthesized)
gtttcccgctacttgttttatgtattattttatgtctgtgtttgtcctggagtgctgtaactcctttcactgtctgctgtaagttcaacttcttcaataaaagaaatgtttcaaattgga

SEQ ID NO: 897772 - DNA, 120 bp, Artificial Sequence
  ENSG00000260256_0 (sequence is synthesized)
gaaaccacaactggagaaaaaggcagtgacagggccgcaggcactggcacactctggtcctgagtgaggcgcgggagcaggtgacaggcggcgggctcctcagaggacactccaggaagg

SEQ ID NO: 897773 - DNA, 120 bp, Artificial Sequence
  ENSG00000260256_1 (sequence is synthesized)
agggaggtcccagctagagcaggagcagcaaactctctgcacagggccgcatggtcgctgtggcaggctttgccggccacgtggtctctgtcccagctcctcgcctctgcccttgcagtg

SEQ ID NO: 897774 - DNA, 120 bp, Artificial Sequence
  ENSG00000260256_2 (sequence is synthesized)
gctgcggggatccacttctatgcagattttcttccgcctctgccacccctgagatgctagaccaccccctcctcctcccccttctcctactcacaggaagacggcaaggcctttatgatg

SEQ ID NO: 897775 - DNA, 120 bp, Artificial Sequence
  ENSG00000260256_3 (sequence is synthesized)
acctgcttctacttaatgtaaatatattttatcttcgttatgattttcttaataacattttcttctctctagttccctttattgtaggaatacagtttataatacaacatacaaaatatg

SEQ ID NO: 897776 - DNA, 120 bp, Artificial Sequence
  ENSG00000254573_0 (sequence is synthesized)
ctcagccggctgaggtggtgggtctgaggagcctctgaggaatgggactgagggagacatagagctccctaatgctgaatctcttccctgtgctgaagaaaactccagacctcccagcca

SEQ ID NO: 897777 - DNA, 120 bp, Artificial Sequence
  ENSG00000254573_1 (sequence is synthesized)
ctggaactaaaattggcatccagaggtccggccttcagatgaaacgatcttcaagcaagcagacacagcttgcgctccctcaggactgaccagaggctgtgctttggggaactcggacca

SEQ ID NO: 897778 - DNA, 120 bp, Artificial Sequence
  ENSG00000254573_2 (sequence is synthesized)
gactgatctgaccacccggggcgtccagcatgattggtcggggtcctgcccgcaccctctcacccctccacgcagaggcacggtgggagaggcccctgcccaccccggatgagcctgaga

SEQ ID NO: 897779 - DNA, 120 bp, Artificial Sequence
  ENSG00000254573_3 (sequence is synthesized)
ctccagcctgaaatgaagttgctgaaatgagccctttccccagccgttcagcagcctagctgttttaccactgaaataaagtgtccaatttatcctgccattttgaggaagctgttttca

SEQ ID NO: 897780 - DNA, 120 bp, Artificial Sequence
  ENSG00000260254_0 (sequence is synthesized)
attcctggagaggaaagagaggcttcttagagaaggcagcctctaagctggaccatgtacattgctaagaatattttggccaataggatactgctttttaaggatttcccccatggacag

SEQ ID NO: 897781 - DNA, 120 bp, Artificial Sequence
  ENSG00000260254_1 (sequence is synthesized)
tccatcttgcaaatgactcttctgatattgactttaaaaataaaattgttatcctgagcctcttttggaaacataaaaaacaaagtgcaaagagatcactgccgttctcagattctgtga

SEQ ID NO: 897782 - DNA, 120 bp, Artificial Sequence
  ENSG00000260254_2 (sequence is synthesized)
tttgcccataccaagagtcagaaggtctccagagccattggcactgagatctgaacataagctatggtttctgagcaggtaggagaaaataaaactccagtattttgtcaataagtgcct

SEQ ID NO: 897783 - DNA, 120 bp, Artificial Sequence
  ENSG00000260254_3 (sequence is synthesized)
taactcggtattgctaagcttattatttccaattccctattcttttcttacatcaaaagttaaaagagtagggattctctactttgtcccactaaagacaatagagtagataataggatg

SEQ ID NO: 897784 - DNA, 120 bp, Artificial Sequence
  ENSG00000260254_4 (sequence is synthesized)
gcattacagcagtgcagatttatagtagacattggcaagaactttgagataggaaagaagggattaaaattggactggatagccagagctagcctgagattctttttcagacatcttcaa

SEQ ID NO: 897785 - DNA, 120 bp, Artificial Sequence
  ENSG00000260254_5 (sequence is synthesized)
gaatgggagaggctactgtctacctaacacaggtgcctcataagattaccttgtaagatttcttccagatccaagattctccagagacaaggctgagaaacagttgtcatgcttaacttc

SEQ ID NO: 897786 - DNA, 120 bp, Artificial Sequence
  ENSG00000260254_6 (sequence is synthesized)
agaagctgctgagcgtggccagggtcagaagcggtcccttcagagggacctatgttttgtttctgctgccatttggtaaagggagtcaccagactgggagaatcgtttgacaagtgaggt

SEQ ID NO: 897787 - DNA, 120 bp, Artificial Sequence
  ENSG00000260254_7 (sequence is synthesized)
cagggaaatggcaatttttgatcccaggtggcgagaaagcctcccagtgaaggtaaacagaagtggagatagatcaaggggtgaggggtcagtccattagaaggctgacaaggccagctg

SEQ ID NO: 897788 - DNA, 120 bp, Artificial Sequence
  ENSG00000260254_8 (sequence is synthesized)
tcttctggagtgtctggagggagggatgctgatgtgattgacctcagtcttgggatgggagcaggagcgggggaaaggacgtgagtagcaggatggaggaaggagaccacggcaagagtg

SEQ ID NO: 897789 - DNA, 120 bp, Artificial Sequence
  ENSG00000260254_9 (sequence is synthesized)
agaaaggggcatctctagcccaatttctgcacatggatactgctagctttgggcagtttagccttgtgctgcagttgtgccaagtggagttgagaggttggctaaaaaaaaaaaacccaa

SEQ ID NO: 897790 - DNA, 120 bp, Artificial Sequence
  ENSG00000260254_10 (sequence is synthesized)
aaaacctcttactcatttgcatgtggtatttgcatctcatttgcatatattcacttaatgtcagatgtgcacaattttccagcttctgctttttcgcctccccaacttcccaccttgtgc

SEQ ID NO: 897791 - DNA, 120 bp, Artificial Sequence
  ENSG00000260254_11 (sequence is synthesized)
cttcatcttcctttctcaacacctcttcctcaccccatgagtattttctccttattgtgttctcttcttcctacaaagtagtatgaagagcacagctttgcttccgggtagaactgcact

SEQ ID NO: 897792 - DNA, 120 bp, Artificial Sequence
  ENSG00000260254_12 (sequence is synthesized)
tttgtccaggctcctccatgtatctgtcttttggtcctcaacaaacctgtggtctctcatatgctcatctgtaaaatgggaacaataatatctatgtctcagagttgttgtaaagaataa

SEQ ID NO: 897793 - DNA, 120 bp, Artificial Sequence
  ENSG00000260254_13 (sequence is synthesized)
actaaataaaattagcataaagcacctggccctgcagtaggaacttgacaagttgtgccagttctggtcccagctctctcttcatgccttctatatcaatttagggaaactgcggcgctg

SEQ ID NO: 897794 - DNA, 120 bp, Artificial Sequence
  ENSG00000260254_14 (sequence is synthesized)
gagttggtgttttccttggaactgatggataagcaagttgattctttaaatcgtcatctttcttggtcatgtgtccaagctgcatttacaaccaggggaagggcaggagaaacagtgtga

SEQ ID NO: 897795 - DNA, 120 bp, Artificial Sequence
  ENSG00000260254_15 (sequence is synthesized)
acaacagtgttccttttggacatcttccagtgtcttctaactgagggcttttctcattcctcttccccagtgtctgaagcctgaggatgccctggttcctaatcccagggcagggcagac

SEQ ID NO: 897796 - DNA, 120 bp, Artificial Sequence
  ENSG00000260254_16 (sequence is synthesized)
tgctttctctgtagcctcccagcttcacagcagcctgatctccaaagcctggggcacatccccaaatccctggctccaccgctgtccctgatgaagatgcctgggtcagcttccaagaac

SEQ ID NO: 897797 - DNA, 120 bp, Artificial Sequence
  ENSG00000260254_17 (sequence is synthesized)
ctcttgcttctctatccaaacagcatcctggcatctcaccaggcactggcttcagagtttgtattttgggagatgtatagcaaggagaaaatcgttaaatctccactctgcatcctgaaa

SEQ ID NO: 897798 - DNA, 120 bp, Artificial Sequence
  ENSG00000260254_18 (sequence is synthesized)
agtaacttctgtgaaactctccttccatctcctcatcaatttcagtcagctgtttttgttttctctttttctctgaagcaagggcaaggagttgtattgtaaaatgatagtagctgatgc

SEQ ID NO: 897799 - DNA, 120 bp, Artificial Sequence
  ENSG00000260254_19 (sequence is synthesized)
tagagcagcatttactatgtgccacttactgttctaagcactctatgtatatgatttcatttaattctcatgacagtcttatgaagtagatatccccattttacagatgagactaagaag

SEQ ID NO: 897800 - DNA, 120 bp, Artificial Sequence
  ENSG00000260254_20 (sequence is synthesized)
tttaaaaacttgtccaaggttttacagctaggaaggacggagacagaattttaatctagccagtcagctccaaaatcgattttcttaaccacttgtcacagtggattaacacagggaaga

SEQ ID NO: 897801 - DNA, 120 bp, Artificial Sequence
  ENSG00000260254_21 (sequence is synthesized)
tgtgtctggaatgaaaagtaatgaaggtttccaagtttgggataagaaataacagagtcatgttgtagtaagcgggattaggtgggacatcaggtagaactttctacttataagaattga

SEQ ID NO: 897802 - DNA, 120 bp, Artificial Sequence
  ENSG00000260254_22 (sequence is synthesized)
tagcagggctagtagcatcgtatgataccctggtagcaaatggtggctctcttagagtctgcaaaaaccacatgttcctctgtgtggaggaaaggcgatatctataggtgaggagctggg

SEQ ID NO: 897803 - DNA, 120 bp, Artificial Sequence
  ENSG00000260254_23 (sequence is synthesized)
actgggaagaggattaaagacttctggaaagtgatcagagaatcgatcctcaatcaatatttggtgagtattatgaatagggtacttaaataggaatttgctgagatttttttctgggca

SEQ ID NO: 897804 - DNA, 120 bp, Artificial Sequence
  ENSG00000260254_24 (sequence is synthesized)
aggccttatgccagacaccaaggaaggatgagccaggtcacctccttgggatctttccaggttcagaagaccttaaagcctcatagtatgggcagggggagggaagattgatggcctcta

SEQ ID NO: 897805 - DNA, 120 bp, Artificial Sequence
  ENSG00000260254_25 (sequence is synthesized)
cttttccttcttgcttctgctatgtgtggtccagatctcagtctatgccttctcaggtccaggagcccttgcccctggactgggacagccccacaatctctggactcaatccagacttgg

SEQ ID NO: 897806 - DNA, 120 bp, Artificial Sequence
  ENSG00000260254_26 (sequence is synthesized)
ttccaggcctccttcccaagtaggcttgagtagaacaacgtcccttatcagcaggtctgtgaggctgtcttcctcatttccctctaaaggctcatttgaaccttatctacccagttttta

SEQ ID NO: 897807 - DNA, 120 bp, Artificial Sequence
  ENSG00000260254_27 (sequence is synthesized)
agagggtttagtttcagttctttttgacctatcatctggtcatcaatttataggagagtcatttcgtcacttagttattggttcatttattctccaaacagttattaatagtctcatata

SEQ ID NO: 897808 - DNA, 120 bp, Artificial Sequence
  ENSG00000260254_28 (sequence is synthesized)
tgacaaaccctgtgcttaagcccagggatgtagagatcaaagagttctgtctgttctgctctcaagggtccactgtctagtggcagagacagacaacttcagaacaggttgtactatgtc

SEQ ID NO: 897809 - DNA, 120 bp, Artificial Sequence
  ENSG00000260254_29 (sequence is synthesized)
ccccaaatcatactgtcttagagggacaatctagataatctgtctcctgatcagggccccctactgatcctgtattttttagtgtggctacatttgccatccatggtaccaattaattaa

SEQ ID NO: 897810 - DNA, 120 bp, Artificial Sequence
  ENSG00000260254_30 (sequence is synthesized)
ttaattgctttttattttatattctgggagttttggtgttttgcaggggaaatgcaaatgtatgcaaatcatcacacaaatttatgcaaagacaacatggaaatgtgtcccaagatttcc

SEQ ID NO: 897811 - DNA, 120 bp, Artificial Sequence
  ENSG00000260254_31 (sequence is synthesized)
tgggaaaaaaaaatctggaggcctcagtcagtccctcagcaggctgcctgttcccaggcctgtcctgtcttcccttttgtttgggttcttaatctgtgctgggttccctgcctggccact

SEQ ID NO: 897812 - DNA, 120 bp, Artificial Sequence
  ENSG00000260254_32 (sequence is synthesized)
ctgaggtcagtaatgcaggtgggcaggtggcagcctggccatccattatcctgaaacctctcagcttcccaagccaccagaaaactccctcactccctataatcggctttcatttgaaac

SEQ ID NO: 897813 - DNA, 120 bp, Artificial Sequence
  ENSG00000260254_33 (sequence is synthesized)
aatcaagagatttcctaccactttccctatgaccaggtttcggaaaacacccagatggtgagtttcaggtttggagcttgacttggacaaagggacttaatagaggaggttggcagtgtc

SEQ ID NO: 897814 - DNA, 120 bp, Artificial Sequence
  ENSG00000260254_34 (sequence is synthesized)
tgcttgtggttattgaaaaatccagaccaattcagtgagcatcttctgtgtgcacagccttggttccccagagagatgggagacaaccgcaagggctggggaagcgagggctgggaggat

SEQ ID NO: 897815 - DNA, 120 bp, Artificial Sequence
  ENSG00000260254_35 (sequence is synthesized)
ggcagaaactctgtggctctgcaaggtaaggctgcccagcaggtgtcatggtgataaacagcctgtctcctgctctggacaggaaacctcatggaagctgtgtggtggaaggaggggctg

SEQ ID NO: 897816 - DNA, 120 bp, Artificial Sequence
  ENSG00000260254_36 (sequence is synthesized)
taaggacagaggctgacagagagggcacgagaaggggatcagcctcatcaacctgcagggtgtcatcattgggtagtccacggctttgcagagtcagagagcaaggggagcagggcaaag

SEQ ID NO: 897817 - DNA, 120 bp, Artificial Sequence
  ENSG00000260254_37 (sequence is synthesized)
cttgggcctccattggagaggaaatgacagcaggaggaaaggctgacctgagggaggagctggctacctgcttccagaacctcctctggccaggagagcactgtgtccagggctgcactt

SEQ ID NO: 897818 - DNA, 120 bp, Artificial Sequence
  ENSG00000260254_38 (sequence is synthesized)
aggcgtatggtacacagacaccatcgagttgccaagtgtggccagtccctcataaaacatggaagctgaaggctgcctgagagatttgatttaggctggatgtaaagaacttccggaggg

SEQ ID NO: 897819 - DNA, 120 bp, Artificial Sequence
  ENSG00000260254_39 (sequence is synthesized)
tgggcgttgtgagataccagaacaggtgactaagagaggatgcaaaatctccttcccttggagagtcgttgaaacatttgaaatccatttgttgtgtgggagaggaggcacagttctgtc

SEQ ID NO: 897820 - DNA, 120 bp, Artificial Sequence
  ENSG00000260254_40 (sequence is synthesized)
tggaggcagagggatggactagatgacttctgggagttcacagagactaaggatagatctccccaagtaggtgtacagcatcaatctgcctgctcatgtgcagccctgtccaaagatccc

SEQ ID NO: 897821 - DNA, 120 bp, Artificial Sequence
  ENSG00000260254_41 (sequence is synthesized)
tcgtttggtgtttcttgctctccttccctccctccttctgatgagagtctcaacagatcacgggtcaagccatcccctccaggatgaaatggagctctgtttcatcgggccactcatgcc

SEQ ID NO: 897822 - DNA, 120 bp, Artificial Sequence
  ENSG00000260254_42 (sequence is synthesized)
ctctcccttcccttgtggatgcagagcttctccacatctttgggggagctcccctccaggccagcagcgctgggcagcctcgttgccattccggccagagcctggagctcagccctctgg

SEQ ID NO: 897823 - DNA, 120 bp, Artificial Sequence
  ENSG00000260254_43 (sequence is synthesized)
aggggcacagggcagcgttctggcaagcaagcatgtcagagcagctctggcgtttccctagaacaattcaaattgctttttttacacctcactgcactatgccaaccctgattcacatta

SEQ ID NO: 897824 - DNA, 120 bp, Artificial Sequence
  ENSG00000260254_44 (sequence is synthesized)
tttgtgcactcgctaagtgtacattatctgatccgtcaccctgtaaaacgctgcaagaagaatccgtggctcctgtctgctgctgactgtgggtcaggcacagaagtctctgtacaaatt

SEQ ID NO: 897825 - DNA, 120 bp, Artificial Sequence
  ENSG00000260254_45 (sequence is synthesized)
tttttgcaaaatgggacagacggaataaacccaaagccaccttcaacaatagcccaccatggctgtgagctgggagagaaagtccatgcctcctgccccaggaactcaggttctcttgga

SEQ ID NO: 897826 - DNA, 120 bp, Artificial Sequence
  ENSG00000260254_46 (sequence is synthesized)
aaagactgttcaaccagaaagctccagcaccttttcttcccatggcctcctttctttgtcacattatttaacaggaggagacaagcaggaggggtaacaagtctttgaacccagctatgc

SEQ ID NO: 897827 - DNA, 120 bp, Artificial Sequence
  ENSG00000260254_47 (sequence is synthesized)
agatttcctctgactgacgctaagggtctggagagagcaggaggcaagaaggaggtgggattgagagagagcaggagggatgatactctgtcctgtgaatatctcagcttctctaggggt

SEQ ID NO: 897828 - DNA, 120 bp, Artificial Sequence
  ENSG00000260254_48 (sequence is synthesized)
gaatagggctccctgttctgctctgcccaaggtactctgtaaattgatcaaagaccctggaatccttccattctgggtcagctgggagctctgctaactggcagctccccataccaaacc

SEQ ID NO: 897829 - DNA, 120 bp, Artificial Sequence
  ENSG00000260254_49 (sequence is synthesized)
ctagaaatagcttatctgtaggaagcccaagttttctaaagttattagaaaattgctggctcttacttttgaccagatatcattctgcccttctgcttctctcttctataaatctgggta

SEQ ID NO: 897830 - DNA, 120 bp, Artificial Sequence
  ENSG00000260254_50 (sequence is synthesized)
aatgggacacttttgttcttagagatctcactctatcccaaatggccactgaaatattgacaattcatcccattgaagatcaggggcttatttctaaatgggaactgccaggatcttctg

SEQ ID NO: 897831 - DNA, 120 bp, Artificial Sequence
  ENSG00000260254_51 (sequence is synthesized)
caggttggatgaaagcccctgtccagatttgaaagtggatcccacgttctgcagggagagcttcagattcatcctcacattgaagacaaatgactttccctgcaagcgtccaggtttcct

SEQ ID NO: 897832 - DNA, 120 bp, Artificial Sequence
  ENSG00000260254_52 (sequence is synthesized)
gcaccatcttaggtctgtgtttaatttgctgcatgtgtatggagaacacacagggtacacgagcctatcctagggcctgtggattggagaaagtggaacaagaaaaagacctggtccctg

SEQ ID NO: 897833 - DNA, 120 bp, Artificial Sequence
  ENSG00000260254_53 (sequence is synthesized)
ccctggggttgcttatgatctggttggattgacaaatagctctctttcccagctgttcctgatttggttccagcctcagggctcctgaagggcattttgcagcagtgaagcccaggggtc

SEQ ID NO: 897834 - DNA, 120 bp, Artificial Sequence
  ENSG00000260254_54 (sequence is synthesized)
gcccagctgagaaccacatttcctttcttttggcaggagccggcagcttccacatgggagctcaaatctcaatgaaaacaagaaatctgatgcctcactgacaactcattttctcaacct

SEQ ID NO: 897835 - DNA, 120 bp, Artificial Sequence
  ENSG00000260254_55 (sequence is synthesized)
tcattctagggaaaggcgactttgtgttccagctgccatattgtagctgcaacccctgatgcaccatcaattaaaaacagcaataattatgcatgggaaaaagccacagataataggctt

SEQ ID NO: 897836 - DNA, 120 bp, Artificial Sequence
  ENSG00000260254_56 (sequence is synthesized)
ccattagattaagtagttatatgaataaaaaaaatacaacctatacttcggctaattaaacccactcaccatctgattaagatgtgttgtgagaccatggaaaactaccaaccactaact

SEQ ID NO: 897837 - DNA, 120 bp, Artificial Sequence
  ENSG00000260254_57 (sequence is synthesized)
gtaagtaatccggcacagatgggaattaatagtacattccctggtttagagataatggatctccatagaggttgatcagaatcattaataagcatcgacaggatggacagtacaaaacag

SEQ ID NO: 897838 - DNA, 120 bp, Artificial Sequence
  ENSG00000260254_58 (sequence is synthesized)
ctggtgcctaatgttggggtggagcaggccatgttcttaattccactccacctactgagatgagccggaagacggatagatgtgctgagacgccatcagagctgaggttctacgggagtt

SEQ ID NO: 897839 - DNA, 120 bp, Artificial Sequence
  ENSG00000260254_59 (sequence is synthesized)
ctggacttgctgcctgggctcgagggagctgaaaaggaatcgggacccaaccaaagggtgggagttggccccgctgctcggctttgcaaggatctactccaagggtagctagaaccaaag

SEQ ID NO: 897840 - DNA, 120 bp, Artificial Sequence
  ENSG00000260254_60 (sequence is synthesized)
cttccgctctccgggaaggcagcctgcccgttacccagagaggctctctcctaggggcgtggcttgggttaccatgggaaccaggcctggttgacatatcccagggctgctgttttgggg

SEQ ID NO: 897841 - DNA, 120 bp, Artificial Sequence
  ENSG00000260254_61 (sequence is synthesized)
actgagaattcagggctagtcccagaaataacgcctgggagtagcagctgtggggagagatacgagcgtgtccgctgcgtggggagtgcggaggggatccgagggaggtggccggccaga

SEQ ID NO: 897842 - DNA, 120 bp, Artificial Sequence
  ENSG00000260254_62 (sequence is synthesized)
gcgccctaggacacagtgttcccaatgtccgtttagagctactctccagcctccagcttctgtccttaggagcagctgcgaggagagcacccgggccctgccttctaattaccactaatt

SEQ ID NO: 897843 - DNA, 120 bp, Artificial Sequence
  ENSG00000260254_63 (sequence is synthesized)
aggtaaatgcggagacgcctctctctccctcccccgacctacaaaggcaactgagagacacacagagaggtcacacacagccgtttccaaatggagacaggcaagggtgatgtggcctga

SEQ ID NO: 897844 - DNA, 120 bp, Artificial Sequence
  ENSG00000260254_64 (sequence is synthesized)
ataccaagcagccgctgcccaagggaaggggagcggggacagggcaggaggcttctgagcgtgtggcccctagctagggaggcaccgaggcgggagagggagcccaggccactttcccag

SEQ ID NO: 897845 - DNA, 120 bp, Artificial Sequence
  ENSG00000260254_65 (sequence is synthesized)
cctgggttcctggctcccccgccttgactgtgcaggggtgtctggttgaggagggaagtcctagatcagtccccagtcccagtcctcggagggtttgctctttctggaagtccttggctc

SEQ ID NO: 897846 - DNA, 120 bp, Artificial Sequence
  ENSG00000260254_66 (sequence is synthesized)
aggatccttggacttgtctgtgggtttggttcttctcctggttgtctggatgggaggggaggggcctaggcttgctggggctgtgtgtagggtcaaaggcactatggatcctaatggaga

SEQ ID NO: 897847 - DNA, 120 bp, Artificial Sequence
  ENSG00000260254_67 (sequence is synthesized)
acctcagggcaaaaccaacagtactgccatacccatggatgtggtgcaggttcggttccaaaccatagcaaagcaaatatagcaataaagcaagtcacacaagttttttggtttcccagt

SEQ ID NO: 897848 - DNA, 120 bp, Artificial Sequence
  ENSG00000260254_68 (sequence is synthesized)
gtgtataaaagttatgtttgcactatagttgattaggtgtgcaatggcattatgtctaaaagagcgtataccttaattttaaaatattttattgataaaaatgctaacacagagacatga

SEQ ID NO: 897849 - DNA, 120 bp, Artificial Sequence
  ENSG00000260254_69 (sequence is synthesized)
agtcagcacgtgctgttggaaaatggcactgatagacctgctcaatgctgggttgccacaaacattcaatttgtaaaaaaatctaacctgcggagcataataaagcaaagtgccataaaa

SEQ ID NO: 897850 - DNA, 120 bp, Artificial Sequence
  ENSG00000260259_0 (sequence is synthesized)
gggctccagggatcggctccgactgctgcagttcgggccttattttagggtgaagcccgggcagccgacccggctgcgccgtagtgggaggccacggcgattacccaggtgaaggtcttc

SEQ ID NO: 897851 - DNA, 120 bp, Artificial Sequence
  ENSG00000260259_1 (sequence is synthesized)
cagcccagccctggaaggtggaaaaagaaaagttgacatggaatgtttaggaagcaccattggtccaggtccaggatcggggcagccagcatgtcctctaatctggcttcactgttgaaa

SEQ ID NO: 897852 - DNA, 120 bp, Artificial Sequence
  ENSG00000260259_2 (sequence is synthesized)
tccagtcgagcaagcagggcccaaaccactgcgagaccagctcggtcgggcccaaaccaccgcccactgcgagaccagctcggtcgggcccaaaccaccgcccactgcgggaccagctcg

SEQ ID NO: 897853 - DNA, 120 bp, Artificial Sequence
  ENSG00000260259_3 (sequence is synthesized)
ggaccagctcggtcgggcccaaaccaccgcccactgcgggaccagctcggtcgggcccaaaccactgcccactgcgggaccagctcggtcgtggagaccctaacccagcggcgctagagg

SEQ ID NO: 897854 - DNA, 120 bp, Artificial Sequence
  ENSG00000260259_4 (sequence is synthesized)
acacacagaaatataggtacctcgcaagggttttttgcatgtctgatacctacggctccaacaggacccactgactgatgatggctccacctggacctgccaactactcctgcagcccca

SEQ ID NO: 897855 - DNA, 120 bp, Artificial Sequence
  ENSG00000260259_5 (sequence is synthesized)
cccagaagcggttcagcacacgggaggatcctgtctcacaccctacgatggccccccgcccccacaacccatcagcagcaagcacccactgccaagctaccccaccccttcccccaaact

SEQ ID NO: 897856 - DNA, 120 bp, Artificial Sequence
  ENSG00000254578_0 (sequence is synthesized)
ttttcatattcctgcaaaattcctaagatttattggagactaggcctcttctctggatccacaaccgtgtccagcccagaatcaggacccccaaacgtgtctgggaccctgtccctttca

SEQ ID NO: 897857 - DNA, 120 bp, Artificial Sequence
  ENSG00000254578_1 (sequence is synthesized)
gtgcagcaaacccacttcagtaggcagaagagtctacccctagggagaaggcggcagtatgtacgaggacacagataggagatactcaactttggagaggaaggaagcgcagaagccagc

SEQ ID NO: 897858 - DNA, 120 bp, Artificial Sequence
  ENSG00000254578_2 (sequence is synthesized)
gacctggagccctacgcgcggcactctagtaagcccaggttccaggtccccattactggatgttaggagaagttcagtcctagactttccggatccctgaggccactgcacacacctgtg

SEQ ID NO: 897859 - DNA, 120 bp, Artificial Sequence
  ENSG00000258603_0 (sequence is synthesized)
ctggcactggcggccgaggttccgcgctgaagaggagggaggaggggggcccggcctggcaggtcgtggccctgtggggcaaaaccctgcagggccacgtgatgggacctgggctggtcc

SEQ ID NO: 897860 - DNA, 120 bp, Artificial Sequence
  ENSG00000258603_1 (sequence is synthesized)
gcccagggtcctttgagctcctagaggtcccgtgtggaaccatctggaagaggtaggatcccctcgcgagtttaccccggacgtgtggcgaataaagttaagcatttttaacgatttttt

SEQ ID NO: 897861 - DNA, 120 bp, Artificial Sequence
  ENSG00000258603_2 (sequence is synthesized)
accattgagatgtttatggaagaaagtttgaatttgctgccaggcatctacctgtgcctttgagtgagcctttggctcacctccatagaatattgcctcacccaaaacagcgtgcacaga

SEQ ID NO: 897862 - DNA, 120 bp, Artificial Sequence
  ENSG00000258603_3 (sequence is synthesized)
ggagggcccagggtcctttgagctcctagaggtcccgtgtggaaccatctggaagaggtaggatcccctcgcgagtttaccccggacgtgtggcgaataaagttaagcatttttaacggt

SEQ ID NO: 897863 - DNA, 120 bp, Artificial Sequence
  ENSG00000258603_4 (sequence is synthesized)
gatcaccagaacgcacctttggatgctgcagcataaagtccacggcttcttcaaagtactccagatgtacatcattcagatcttcggggaggtcttcaaatctgaaataagccagggcaa

SEQ ID NO: 897864 - DNA, 120 bp, Artificial Sequence
  ENSG00000258603_5 (sequence is synthesized)
ctggccctgtattcacaaaggcccctgctgctcccaaacagatcaatgatcccaggaaagggccccctgcctggagaacatcacaaatcacagggagctttagtttctcaaaagacagta

SEQ ID NO: 897865 - DNA, 120 bp, Artificial Sequence
  ENSG00000258603_6 (sequence is synthesized)
agcaaacaagtttttgaagccaaggagattgggggtagagagattggcagagaaagaacaaaatgtcttattttctcaaacaataatgataatatagagggataaaaaactacatattgg

SEQ ID NO: 897866 - DNA, 120 bp, Artificial Sequence
  ENSG00000258603_7 (sequence is synthesized)
gtacaatgtatactactcaggcgacaggtgcactaaaatctcagcgttcatcactgtacagttcatccgtgtaaccccaaaccacctgtacaccaaaaggtattgaaattaaaaaaaaaa

SEQ ID NO: 897867 - DNA, 120 bp, Artificial Sequence
  ENSG00000258603_8 (sequence is synthesized)
ggtaggatcccctcgcgagtttaccccggacgtgtggcgaataaagttaagcatttttaacggcatagtcccagcatttctggaggccaaggcaggaagatcacttgattccaggagttt

SEQ ID NO: 897868 - DNA, 120 bp, Artificial Sequence
  ENSG00000258603_9 (sequence is synthesized)
ggccaaggcaggaagatcacttgattccaggagtttgaaaccagcctggacaacatagtaagaccctgtctctacaaaaaaaagttttaaaacattagccaggcatggtggtgcacacct

SEQ ID NO: 897869 - DNA, 120 bp, Artificial Sequence
  ENSG00000258603_10 (sequence is synthesized)
aggctgcagtgagccatgactgtgccaccgcactccagcttgggtgacagagtgaggccctgtctcaaacataaataaataaacaaaaaactgtatctaacaaacaccaccccagaagct

SEQ ID NO: 897870 - DNA, 120 bp, Artificial Sequence
  ENSG00000258603_11 (sequence is synthesized)
caaacaccaccccagaagctgactgcacactcttggactccacctcagaacttcagaatccaaatctgttggtagagatgagagtattatttttttaaagctttcagaagatactgatac

SEQ ID NO: 897871 - DNA, 120 bp, Artificial Sequence
  ENSG00000258603_12 (sequence is synthesized)
taaggcttattgctttttagtcttttctttcaaggcagtttcctctattttaataacaagggagaatgcaagatattactccttttagcacatgttactcaacctactttgaccacttgt

SEQ ID NO: 897872 - DNA, 120 bp, Artificial Sequence
  ENSG00000258603_13 (sequence is synthesized)
acaggataaaggtatcagaccagagggtgagggtaagcgactgataagcaaacagaaaagtggaactaaatttggaatctctgagatactacccagtttgagttgagttctgtattcata

SEQ ID NO: 897873 - DNA, 120 bp, Artificial Sequence
  ENSG00000258603_14 (sequence is synthesized)
aaatattagaggcaggagaggaatttagtccaactcctacgttttccagctggggatctaggaagttcatcaggttttaactagaggcatgtggcctaacccttccaaccccattcctcc

SEQ ID NO: 897874 - DNA, 120 bp, Artificial Sequence
  ENSG00000258603_15 (sequence is synthesized)
ccttctagcccaagttcctagaaatgcagataatgctggtgggttgctcattccagggcctggtctgcagttatgccaggattgacttagtcaattttttatgctgtctatgtacaaaag

SEQ ID NO: 897875 - DNA, 120 bp, Artificial Sequence
  ENSG00000258603_16 (sequence is synthesized)
gaccccggacctgccactctgcttttggttctagagggctatttgttgggagtggggtgctgcctcataatgctggtcacgtaatgtgtaagtttcgataataaggagcctccaaactcc

SEQ ID NO: 897876 - DNA, 120 bp, Artificial Sequence
  ENSG00000258603_17 (sequence is synthesized)
attaataagtcctttctttcttctctaagcaccctctcttttaattgctgagtaccccatagccctaaattcttcccgaagcgcccagtgcatctaactgtaggacccagagacttgcct

SEQ ID NO: 897877 - DNA, 120 bp, Artificial Sequence
  ENSG00000258603_18 (sequence is synthesized)
tctaaggacaacagtccatcctctaaactaataataacaattcctcacacatatattttagtttgcaaagaactttcatacgtttctaattttgaggttcatatcaatcaacactaaatt

SEQ ID NO: 897878 - DNA, 120 bp, Artificial Sequence
  ENSG00000258603_19 (sequence is synthesized)
agaacaggtatcagactcaattttcagattgggaaactacagatttcaaattatttgcccaaggtaacatgactgggaagtgcacaatttggccttacacctgtcccgtgactccaagac

SEQ ID NO: 897879 - DNA, 120 bp, Artificial Sequence
  ENSG00000258603_20 (sequence is synthesized)
ttgtgtaacattttgttctgtccccattccttttcaaaacagacctatcatgtgttcccttccttcttaataagccatcatatcggatgataataactattccttaagttttttttgttt

SEQ ID NO: 897880 - DNA, 77 bp, Artificial Sequence
  ENSG00000258603_21 (sequence is synthesized)
tatcggatgataataactattccttaagttttttttgttttttttttttgagaagaagtttcactcttgtcacccag

SEQ ID NO: 897881 - DNA, 120 bp, Artificial Sequence
  ENSG00000258603_22 (sequence is synthesized)
caggcgtgagccaccgcacccagcctccttaagaatttctaataattgataatggtaatatggtattctttctgggatgtttgcattgtaactaaagattctttatgtcaaaggctaaag

SEQ ID NO: 897882 - DNA, 120 bp, Artificial Sequence
  ENSG00000258603_23 (sequence is synthesized)
tggtattctttctgggatgtttgcattgtaactaaagattctttatgtcaaaggctaaagggcatttatctgcggacaccctaaatcactcctttttttttgagatagagttttgctctt

SEQ ID NO: 897883 - DNA, 120 bp, Artificial Sequence
  ENSG00000258603_24 (sequence is synthesized)
tccttataggtagtcatctggggatgaaatgagtcctcatcccatttttcaactgtttaggatcaaattgccccctgccttagaagcaagatgtggacacactgatgtgttaggaatgta

SEQ ID NO: 897884 - DNA, 120 bp, Artificial Sequence
  ENSG00000258603_25 (sequence is synthesized)
aaatgttttagaagaatatgcaaggcaggagaatattaatgttcttttcatttgaccattcatactcaaccagtgaggaactcctcttaacaagaatcttataagacaggtctgatgtca

SEQ ID NO: 897885 - DNA, 120 bp, Artificial Sequence
  ENSG00000258603_26 (sequence is synthesized)
aaatctctcacttttttttttttaactaagaatatccttatttctctttcatgtttgaaggctgtttttgctgaatataatattctagattggaagtttttttgcttcagcactttgtca

SEQ ID NO: 897886 - DNA, 120 bp, Artificial Sequence
  ENSG00000258603_27 (sequence is synthesized)
ccccactctctgcttgtaaagtttctgctgagaagtctgctaccagccatattggagctcctttatgatgttattaatatgtccttcttttctcttgctgcttttaggatccttttttag

SEQ ID NO: 897887 - DNA, 120 bp, Artificial Sequence
  ENSG00000258603_28 (sequence is synthesized)
ccttgacctttgagagtttgattattatatgccttgaggtagtcttattgaggctgagttggcttggtgttttatgaccttcttatacctgtatattcatatctttctctagttttagaa

SEQ ID NO: 897888 - DNA, 120 bp, Artificial Sequence
  ENSG00000258601_0 (sequence is synthesized)
ggaagaatggccattcaagcactttcagaggaggcagagtggtagatgggaagactgttctgggtttacaacgacataatgtatagtcccctcacccacctgtgaacatttcaatcactc

SEQ ID NO: 897889 - DNA, 120 bp, Artificial Sequence
  ENSG00000258601_1 (sequence is synthesized)
tttttaaaggaataacaagtacaaaagagactaggccaactttcataagatgctctgagataaaggggaagtgaggcgtgatgcatggacacatggtaaatagagatatctgccactgtt

SEQ ID NO: 897890 - DNA, 120 bp, Artificial Sequence
  ENSG00000258601_2 (sequence is synthesized)
agccctagtgggtgcagagacacagatgggagaagcctggatccctaaatcgcacactgaggaaaaccggctaccatccaggaaaacctgtgttgtactattgtagaagtgactctactt

SEQ ID NO: 897891 - DNA, 120 bp, Artificial Sequence
  ENSG00000258601_3 (sequence is synthesized)
ctacgggttaaattgctgaaacttaaggattttttgttactgtattgggtgtgccttaactgatacaaggattgggattgtactgtgactctgcctctctatgagtcctctttaaagatg

SEQ ID NO: 897892 - DNA, 120 bp, Artificial Sequence
  ENSG00000258600_0 (sequence is synthesized)
gttccaccataaagtttaaatggatcttactttggttcagactttagaaacgattgacatctgggttatgtatatttcacttcccacgttctgcacggtaatcttctaaactttagcaac

SEQ ID NO: 897893 - DNA, 120 bp, Artificial Sequence
  ENSG00000258600_1 (sequence is synthesized)
ttatcttattaattcctttaggcttgatatgaagcctgccccagataagtgcctcataaaagaagaataaacaaatgaatgaataaaagcaaatgccatactatagacttttgagtaaaa

SEQ ID NO: 897894 - DNA, 120 bp, Artificial Sequence
  ENSG00000258600_2 (sequence is synthesized)
agattttctctacaacatattaaaagaatgaaccagcagaacaaacttcaaactttaaaacaatgttgtttaagttagtcatgtctgagatgataaataaatcaacaggagaaaagtgaa

SEQ ID NO: 897895 - DNA, 120 bp, Artificial Sequence
  ENSG00000258600_3 (sequence is synthesized)
gatttgaattggaaaaccactgacacttaattgctaaagtgactttgactagttattcatctatggaataggaagaaaacttacttgatcgtgttggcatgatgattaaacatgacttat

SEQ ID NO: 897896 - DNA, 120 bp, Artificial Sequence
  ENSG00000258600_4 (sequence is synthesized)
gtacatgcaagtgctgagcactagtctataacctctatgggcattgcgatcactatgacatatccagagactagctcaatttctagtacattggaggcacttgataaatgtttccttaat

SEQ ID NO: 897897 - DNA, 120 bp, Artificial Sequence
  ENSG00000258600_5 (sequence is synthesized)
ttgaaatctgagaacaggacattaagttctttcacattagatccagcagttgagatacattttgcttgtgctgcagttttctattatggatatgtaatgtgtctaataaagaaatgagaa

SEQ ID NO: 897898 - DNA, 120 bp, Artificial Sequence
  ENSG00000258604_0 (sequence is synthesized)
aagacccagactcccagggtcatcaacctcctcgggtcactaaccctccccagtgtctgtctacccctaagtccagagaacacgtcctctctaggctcgagccggaatcaatataggcta

SEQ ID NO: 897899 - DNA, 120 bp, Artificial Sequence
  ENSG00000258604_1 (sequence is synthesized)
gaggaacatctttgacctgcatagaaacttatctgaagattttcagaatctgagcctcaccctcagtctatcccagttttatcctgacctgtccacatctgttatactccaaggcttgct

SEQ ID NO: 897900 - DNA, 120 bp, Artificial Sequence
  ENSG00000258604_2 (sequence is synthesized)
gggcccaacactggaagctatttaatgtttctattgcgactggccttttaaagccagtgggattctccatgctacacttgagcctggagactagaaaacatgacagcctgttttcattaa

SEQ ID NO: 897901 - DNA, 73 bp, Artificial Sequence
  ENSG00000258604_3 (sequence is synthesized)
ggcatcagttcaggctgcgcggaggagagaaggaagtgctgatgtggagagacaaggtctcacttttgcccaa

SEQ ID NO: 897902 - DNA, 63 bp, Artificial Sequence
  ENSG00000258609_0 (sequence is synthesized)
gctcatgaaatttggtgatgtgactcggatagggggacctcccttgggagatcagttagacca

SEQ ID NO: 897903 - DNA, 120 bp, Artificial Sequence
  ENSG00000258609_1 (sequence is synthesized)
agtggggcctgagccccgttagggcatgagctgctgaatgattcatgtgaacaccatgcacatgggagtgaggttttgagcagtgtgccacaggagcctaccctcaggccccaccataaa

SEQ ID NO: 897904 - DNA, 120 bp, Artificial Sequence
  ENSG00000258609_2 (sequence is synthesized)
atgtagggccagtcctacattttatcaatgacttgcgtgaacacagaaaatgtggatacaaccaaaaggtaacaatccaattaaaaaatggacaaaaaacttgaataaacatttctcaaa

SEQ ID NO: 897905 - DNA, 120 bp, Artificial Sequence
  ENSG00000258609_3 (sequence is synthesized)
agaagatatacaaatgatcaaaaagcatatgaaaaaatgctcaacatcgctaattgtaagagaaatgcaaatcaaaactataatgagataccaccttatattgattaggaagactgctat

SEQ ID NO: 897906 - DNA, 120 bp, Artificial Sequence
  ENSG00000258609_4 (sequence is synthesized)
aaaaatagtaaacaaacaaacaaacaaagtaagtcttggggaggatgcagagaaattaaaatttttgtgcactgttagtgggaatgtaaaatggtgcagctgttacgggaaacggtatga

SEQ ID NO: 897907 - DNA, 84 bp, Artificial Sequence
  ENSG00000258609_5 (sequence is synthesized)
tgaatcttcacaacggaatcttcacaacatctctgcaaggtggataattattagctcgatttcatagtgggaaaatcaaggctc

SEQ ID NO: 897908 - DNA, 120 bp, Artificial Sequence
  ENSG00000258609_6 (sequence is synthesized)
taattattagctcgatttcatagtgggaaaatcaaggctcagatgaaccttcctcaagtcctggtaaacaaggagcggaggcagggcttaaacccggctgctgtggctccaaatcctcac

SEQ ID NO: 897909 - DNA, 120 bp, Artificial Sequence
  ENSG00000258609_7 (sequence is synthesized)
gtgcctctcaccctgctagctaaagacagttccaccagatgacccaggagagcaggcgctgggacaaggaagcagctgtgacctggcccaaaggcagtgcttttctttgcatagcatttt

SEQ ID NO: 897910 - DNA, 120 bp, Artificial Sequence
  ENSG00000258609_8 (sequence is synthesized)
ttaaatttaaaaagcacagtgcataccagttgatgccccagccctccctcccagaagaaaacagattcggtttacctgagactcaacttcaatcccttggacagaagagtgctatgctag

SEQ ID NO: 897911 - DNA, 120 bp, Artificial Sequence
  ENSG00000258609_9 (sequence is synthesized)
gtgccagaaacacaactacagatttctacctggtgcatggccatcgctcatgaagactacaacttccagcttcctttgaagaaaaagaggacttgatggcattgtcgctaagtaagaaat

SEQ ID NO: 897912 - DNA, 120 bp, Artificial Sequence
  ENSG00000258609_10 (sequence is synthesized)
ggtgggtcttccccctgtggtttccaccaccttgtgccaactcaaatgatgggaatgatgtcatttaacagacctagtgtgaccaagactgcgatctgtccctcagtatctgttctcttc

SEQ ID NO: 897913 - DNA, 120 bp, Artificial Sequence
  ENSG00000258609_11 (sequence is synthesized)
ttatcagaaacacaactacagatttctacctggtgcatggccatcgctcatgaagactacaacttccagcttcctttgaagaaaaagaggacttgatggcattgtcgctaagtaagaaat

SEQ ID NO: 897914 - DNA, 120 bp, Artificial Sequence
  ENSG00000258609_12 (sequence is synthesized)
gaagaaaaagaggacttgatggcattgtcgctaagtaagaaataatgtgtgtgacttcagggttgcccccttaaagggaggggacattttccatcctgctgttcagagtatggatgtgat

SEQ ID NO: 897915 - DNA, 120 bp, Artificial Sequence
  ENSG00000258609_13 (sequence is synthesized)
gagagacatcttggatgatgcagaggaggtgaacaccccaggacaatgaaaccacaggagagaaagagcctgcgctggcccatctagcacagccactggacacagggaccacctgcctct

SEQ ID NO: 897916 - DNA, 120 bp, Artificial Sequence
  ENSG00000258609_14 (sequence is synthesized)
gcactcttatggaaggaggaaatctaactttcccagtttaaggcactgttactttgggctcctgttacataactgtggcagaatgaaggttcaacatggaaactggcaatgttgaagaaa

SEQ ID NO: 897917 - DNA, 120 bp, Artificial Sequence
  ENSG00000258609_15 (sequence is synthesized)
cataaagttcattgcttgaatatctgaagttgtggactcaatctcatacctgctccacttatgagttatagttcttccaggtctcaggaatgggatcagcaggtctcagggttgtactct

SEQ ID NO: 897918 - DNA, 120 bp, Artificial Sequence
  ENSG00000258609_16 (sequence is synthesized)
cctggatctctcaccagccacctcaaaccagctgccatagcctgtccacttccactccaatcttctcttccttcatcacctcccttgcacaccctgataacctcgaaagagaactcttcc

SEQ ID NO: 897919 - DNA, 120 bp, Artificial Sequence
  ENSG00000258609_17 (sequence is synthesized)
caaggctctgttccaaacacatcgccactctgcttagaaccttcaatgactcctcatggcctaggaggtttctctcccatctggatccagctgacgttcccagcaccttctcctgactcc

SEQ ID NO: 897920 - DNA, 120 bp, Artificial Sequence
  ENSG00000258609_18 (sequence is synthesized)
tttcactttaaattctatgactggaaagttttgggcagagttggacatgtgcacttagcttccagaagacagaatccttttaaaagagtcagagaaaacactggcttcctgccatgacat

SEQ ID NO: 897921 - DNA, 120 bp, Artificial Sequence
  ENSG00000258609_19 (sequence is synthesized)
gagatacagacaggagagttgggaagctttttaaagatggcactatgactacaatcacagaaactctccatgaggaagtaaaagaaagcacctgcaacactccagctatgcagaccactc

SEQ ID NO: 897922 - DNA, 120 bp, Artificial Sequence
  ENSG00000258609_20 (sequence is synthesized)
tgtaatgggctcagatctggacaggtgtgtggaaaggtgggtcaacaggtcaggcgtcacagacttggaacattcatggtggaaaagaaaaagccccaaagaagagacttcaggataaat

SEQ ID NO: 897923 - DNA, 120 bp, Artificial Sequence
  ENSG00000258609_21 (sequence is synthesized)
gagaaaatactcaagacagcaaaagtctcttttagaaatgttggagaaagaacacttaatgtcaggagttactgttgattgatggccttactgtgtagcaggtgagaaacccattgttca

SEQ ID NO: 897924 - DNA, 120 bp, Artificial Sequence
  ENSG00000258609_22 (sequence is synthesized)
gttccctaaagtcaccctattctcccaatcatcctatggagggggaaccatgatggttatccccatcttataaataaagcaacagaggcttagaaggacgaactctttttctcaaggtta

SEQ ID NO: 897925 - DNA, 120 bp, Artificial Sequence
  ENSG00000258609_23 (sequence is synthesized)
cccagatcattttgcagaagtccctagatttgaatcatgctcttgctttgaggttaaagacacaggggaagtcgaactccttatctcctatatcctgaatagggaaaaccaaacattgtc

SEQ ID NO: 897926 - DNA, 120 bp, Artificial Sequence
  ENSG00000258609_24 (sequence is synthesized)
gaagaccacctgacatctcatgaatggtcaatggagcctgctctgactgcagaagccactgagagatgcactggccagcctggcatgcaagctggacactcgccttgcctttctgccaat

SEQ ID NO: 897927 - DNA, 120 bp, Artificial Sequence
  ENSG00000258609_25 (sequence is synthesized)
ttcagggcttcactcaccccagaaggtgctcctgggtgccttccttgggaggaaggctgggtttttcctgacagagtttacagtggccaaattgaggatgggaaaattgtgggatgggga

SEQ ID NO: 897928 - DNA, 120 bp, Artificial Sequence
  ENSG00000258609_26 (sequence is synthesized)
agagagatgttatctgagctcagagatgatcaaaccctttgtcccccaaaggattcgttaaataggacaagcctaggatggggatttggagggtattattccagtgcaattagccatgag

SEQ ID NO: 897929 - DNA, 85 bp, Artificial Sequence
  ENSG00000258609_27 (sequence is synthesized)
gcttcgggtaactctcacagtggaaggctggagtgcagtggtacaatcatggcacactgcagcctcaacctcatgggctcagaga

SEQ ID NO: 897930 - DNA, 120 bp, Artificial Sequence
  ENSG00000266952_0 (sequence is synthesized)
gggatgccccgcaggcctggactgatccaccaggagaacttcagtgcatcatgggtcctgctattgctcatcctcttccctggaaatgtgcggtttcacaggatggtaaacatctttccc

SEQ ID NO: 897931 - DNA, 120 bp, Artificial Sequence
  ENSG00000266952_1 (sequence is synthesized)
tggaacagagccttgaggatgctatggtgcagtatgatgaccaccatcccagtctgccaaggaatgagtaacttcctgcaatttaggactttcggccctaaaaccagtacagtcctggac

SEQ ID NO: 897932 - DNA, 120 bp, Artificial Sequence
  ENSG00000266952_2 (sequence is synthesized)
acactaagattgttggtcaccctagaagaatggagatctggcggctaccactcacatatactcgtagaacattgattgcaaggtaacttactggctgaagcaggtgatgcattgcttcgg

SEQ ID NO: 897933 - DNA, 120 bp, Artificial Sequence
  ENSG00000266952_3 (sequence is synthesized)
tggggctgatgtcgaaaaccttcagcttcccaagacaacactgatcaggcctccaggagcatttctcctgctcagtgtcacagtgccactgcagagcgcaattcctggggcacgtcggac

SEQ ID NO: 897934 - DNA, 120 bp, Artificial Sequence
  ENSG00000266952_4 (sequence is synthesized)
attcagtaaatacgtttattgaatgaataaaacataacacagtaagtaattcatcttaaagtcaaccatttacattactttttatccctgaatacccttcctctacctgtcaattcagca

SEQ ID NO: 897935 - DNA, 120 bp, Artificial Sequence
  ENSG00000266952_5 (sequence is synthesized)
gtccaagggaaaaaccagcttggtcaacattaaatttggagctcccacatcatatattttcatagaactaaactaagacatagtttaaagagaaaatgtttcactcctcacgtgaccatg

SEQ ID NO: 897936 - DNA, 120 bp, Artificial Sequence
  ENSG00000266952_6 (sequence is synthesized)
ttctctttggactggcttttccccttccattccatatctctaagtccagtttatcctttgagtcctgactcactcaagcttctccccacttccttccttgaccacttgttaagtgtttgc

SEQ ID NO: 897937 - DNA, 120 bp, Artificial Sequence
  ENSG00000266952_7 (sequence is synthesized)
accagtagtctagaagtataaaggcatacacctcattatcactacacactgtttcataggtaagtcttaatttcaaattagttcctaactccttgttgacaatgactatgaccaagacgt

SEQ ID NO: 897938 - DNA, 120 bp, Artificial Sequence
  ENSG00000266952_8 (sequence is synthesized)
caatcctcctttagggtctaaaacagtactgtgcatgtcagaggcattcattatatgcttgtgaattgaccagaataaatgaccgaattgaagtctgattttggtcaattcaccagacaa

SEQ ID NO: 897939 - DNA, 120 bp, Artificial Sequence
  ENSG00000266952_9 (sequence is synthesized)
agggccacagaagcattgcatcctttcatgacagaattagggcatgattccatttctatatgaaatactagctgtgtgttgttattaaaattattttctggccccactgagagttgaaag

SEQ ID NO: 897940 - DNA, 120 bp, Artificial Sequence
  ENSG00000266952_10 (sequence is synthesized)
aaatttaaaggattccttctattcatcatttttaagaaatttcatttttagttatgaggcagtgtaaggcatattaccattttatttggacacttatttagaccagattgcaaattttct

SEQ ID NO: 897941 - DNA, 120 bp, Artificial Sequence
  ENSG00000266952_11 (sequence is synthesized)
gttaattgagtgctgaattggccaacacaccattgtagatgtactccatagcttctgcacatggaatttattacagacttttcatccacatctgctcctttactttgcttaatatactat

SEQ ID NO: 897942 - DNA, 120 bp, Artificial Sequence
  ENSG00000266952_12 (sequence is synthesized)
agtatttctcttagatacaggggaagacaaagaatatcaaatgacaagtgaagaaaaattaacttagaattattcacagttaaattgtatctatactcaggttatctaataaaatattaa

SEQ ID NO: 897943 - DNA, 120 bp, Artificial Sequence
  ENSG00000266952_13 (sequence is synthesized)
ataaactatgtatcttttttgttgtcctgttatatactttccatgtttctcattacacaaatacacatttagaaagctgaaaatatgtagatgagcaaatacgaggttacctaaaatcct

SEQ ID NO: 897944 - DNA, 120 bp, Artificial Sequence
  ENSG00000266952_14 (sequence is synthesized)
tcctatcatccagagatgataactattgacattctgctatatatacttctaaacattttcttgtaaaacataatttttaaatagattatattcgtatttttgaggaaaatatttttcagt

SEQ ID NO: 897945 - DNA, 120 bp, Artificial Sequence
  ENSG00000266952_15 (sequence is synthesized)
aagttgctatttcaaaattaacactgtaaattcctttctatgacagtaaatacacatgtatatttcatgtgaaatagttgtagcaacttttactgtataaacccatgtaacatatttagc

SEQ ID NO: 897946 - DNA, 120 bp, Artificial Sequence
  ENSG00000266952_16 (sequence is synthesized)
aaatcaatacatattgtaggaaacttagtttccaattttcaatatgttaaaattttgacaagaatatttttgtgtaaacatttttataagtatataatgcttcctgaggataaattctaa

SEQ ID NO: 897947 - DNA, 120 bp, Artificial Sequence
  ENSG00000266952_17 (sequence is synthesized)
aaagaggtcttactaagtcaatatatattttttcctataattttgacatgatttgcgaatttgcccttcaaaaaacttatacccatttatactctgtttcacccttcctaaaaagtacta

SEQ ID NO: 897948 - DNA, 120 bp, Artificial Sequence
  ENSG00000266952_18 (sequence is synthesized)
gttatcatccttcacttttcatgtttagaatcggttaggtgaaaaatagcatttccatttactattttttattattttcaactactgttgaggttaaatatctttctatgtggttttggg

SEQ ID NO: 897949 - DNA, 120 bp, Artificial Sequence
  ENSG00000266952_19 (sequence is synthesized)
tgggccaattttatttttctactagaatgataatcttttattggtttttcagactattacctatattcctgagtctgacatatcaaagtttttaatccaataaataaaatatcattttaa

SEQ ID NO: 897950 - DNA, 120 bp, Artificial Sequence
  ENSG00000266952_20 (sequence is synthesized)
tttctcctgctcagtgtcacaggtggcacaaagacggactgaaaggctagagtaggaagaaggggcattgcttcttccagtttgctcactgttcttccagaattactgtagccacggtgg

SEQ ID NO: 897951 - DNA, 120 bp, Artificial Sequence
  ENSG00000266952_21 (sequence is synthesized)
attctcagaagcagcctcagagacaccaggcatggcccatcagcaccctcctcagagacctgagttcagcattgtgggagcccctccaagctcctgagacaccagcaccatctggcaaac

SEQ ID NO: 897952 - DNA, 120 bp, Artificial Sequence
  ENSG00000266952_22 (sequence is synthesized)
actccgtttcagatgtctgggtcttacctctcaggaaacagagcgacctcagggcaagggaccacgagaaatgaagacattccctaggtatctgagagctggcaatcaaaagctgatgga

SEQ ID NO: 897953 - DNA, 120 bp, Artificial Sequence
  ENSG00000266952_23 (sequence is synthesized)
ggatgcttcagtatttcaactatatgcaagaactgatcaagacgccataaagtgcaacttggagcaactgcagaccatgaaatcgaatattttctacaaataacaataaagaaatgaaat

SEQ ID NO: 897954 - DNA, 120 bp, Artificial Sequence
  ENSG00000266952_24 (sequence is synthesized)
atagcatgcggaagggtgtaggaacataaaactgcatggacaaagaagagaatccgtggatcacgcagaaacaatataagagacaaaagtggaacttctgcagtcccagctactcagaag

SEQ ID NO: 897955 - DNA, 88 bp, Artificial Sequence
  ENSG00000266952_25 (sequence is synthesized)
gctgaccctgcagcgagctatgttcataccactgcaccccagcctgagtgacagagtaaaaccctgtctctaaaaaagaaaaaaaaaa

SEQ ID NO: 897956 - DNA, 120 bp, Artificial Sequence
  ENSG00000266950_0 (sequence is synthesized)
ttggcgtcccaaagagctgagattgcaggagttaacctcaccgaaagatacaaccgatttaagaagaaaatgttaaaactctcttcaagggcctatagaagaaacgggatgaatggaaac

SEQ ID NO: 897957 - DNA, 120 bp, Artificial Sequence
  ENSG00000266950_1 (sequence is synthesized)
attgtaataagttctcgggaaggtagagacttttatttgggacatagaggcttggccaaccagaatggaggacccacccaagtcccgcccccaagcctgagccctctcctttgctccacc

SEQ ID NO: 897958 - DNA, 120 bp, Artificial Sequence
  ENSG00000266950_2 (sequence is synthesized)
cactctgcctgaagtcccctcaacccctccgacttcgcagtctcccagcccggccttctggggctggtcttcattggaagccacgcccccaggtctgtcggataaacattttacaaccta

SEQ ID NO: 897959 - DNA, 120 bp, Artificial Sequence
  ENSG00000266951_0 (sequence is synthesized)
agacgaggtcgagacagtggaaggcagagccaggggaccctgagtggagtctccttctgctctgtccttgctttgatgatgggcagtactgcccctcctgggctcaggcttttttttttt

SEQ ID NO: 897960 - DNA, 120 bp, Artificial Sequence
  ENSG00000266951_1 (sequence is synthesized)
tttttttttcttgagacggagtcttgcgctgtcacccaggctggagtgcattggcgcgacgggatggagggtgagctcggctcactgcaaactctgcttcctgggttcaagcgattctcc

SEQ ID NO: 897961 - DNA, 120 bp, Artificial Sequence
  ENSG00000266951_2 (sequence is synthesized)
atctgcgcacctcggcctcccaaattgctttcatgctgagatcaccaacacatgggaccacacaattcatccttgggaaggccaaggtgggaagtgaaatctggcccaatattgaagcca

SEQ ID NO: 897962 - DNA, 120 bp, Artificial Sequence
  ENSG00000266951_3 (sequence is synthesized)
taagcatatgttgaactttcatgagccatgagcaaggactcacaccccagcaggactctgcagcctgggagaagccaagtttcatcactgaggtcctgattcctggaccaggtagcagaa

SEQ ID NO: 897963 - DNA, 120 bp, Artificial Sequence
  ENSG00000266957_0 (sequence is synthesized)
cagctgagcccctgtgccaaccctcaggttagaagctgctaagacaaatacgagatcttctgagcgtgccagcccatccatctgcaccagtaactctgtcttcatccgcaggcttccttc

SEQ ID NO: 897964 - DNA, 120 bp, Artificial Sequence
  ENSG00000266954_0 (sequence is synthesized)
ctccagctgaagtgcacgttggaaggaatcagaccaggttcccaggcttcctatctttgcctttgatgggtactattgtgctctctgcattgttctgctgaaactgcagtctgctgcccc

SEQ ID NO: 897965 - DNA, 120 bp, Artificial Sequence
  ENSG00000266954_1 (sequence is synthesized)
tgtgtgcgttgctgcgctggtgatggaggaaagagcggctgaagcgatccctctggatgaaggacggcgctgtgaacctgtccctggaccgcggggcatgcatgatctggaaggaaaaga

SEQ ID NO: 897966 - DNA, 120 bp, Artificial Sequence
  ENSG00000266954_2 (sequence is synthesized)
aaagttacgcttggtgtgtgttcctaccagtttgaacaccatctcccaggaaaaaaaaaaagaaaacaggaaaatccaattccagaaaaaaaagtgtacttttctgattccttatgacag

SEQ ID NO: 897967 - DNA, 120 bp, Artificial Sequence
  ENSG00000266954_3 (sequence is synthesized)
accactcaccttgccaaatcccagcgcatccaggagggctgagcaatggagagctgtgggtaatggaaagcttgggctcctgggagtttctgtgcgtgctacgtgtgcattttccccttg

SEQ ID NO: 897968 - DNA, 120 bp, Artificial Sequence
  ENSG00000227489_0 (sequence is synthesized)
ctggttttatgatctgactatttgatgatctctactgagatggtaaaaactttgtttttggcagttaagagatggaagaaatctggttatttggttccttattgtgtttgtgtgcttttc

SEQ ID NO: 897969 - DNA, 120 bp, Artificial Sequence
  ENSG00000227489_1 (sequence is synthesized)
tattgtggagcttaactcaatgaagaaaacatttcttgcacactagaaagcagagcagccctttgagatcttcaacagtaaagtttttcctctgtgtttaacttgtgactgaggttgtgg

SEQ ID NO: 897970 - DNA, 120 bp, Artificial Sequence
  ENSG00000227489_2 (sequence is synthesized)
tacacatcttctgatgtttgctgctgtcatcttatgcttgcctgaaggctctgttgtaaattacagagtaaatttttgtcttcaataaagaaagctgcactcacagactcatggaaagca

SEQ ID NO: 897971 - DNA, 120 bp, Artificial Sequence
  ENSG00000227489_3 (sequence is synthesized)
atatactgggacttttacctattgatgcttcacagcatacattcatggttataggctttggagcttaaagctgacaatatttaaacaagtgtcagatcataccagcagactgagtcagga

SEQ ID NO: 897972 - DNA, 120 bp, Artificial Sequence
  ENSG00000227489_4 (sequence is synthesized)
cagctaggtcttttttaaaactagaagcggaaaacttcattaataacagacagatgacctatgactcagtaaaggaattaattccattggactgaatgaattaatgagggaaatttaatt

SEQ ID NO: 897973 - DNA, 120 bp, Artificial Sequence
  ENSG00000242808_0 (sequence is synthesized)
gacgccactgtgctgttgcgtcttgcgcagcgcagacacctccactctggattgaaacgaaaaagctcgcgatccaacttagaaataatgtttcattcaagataaggctcgtggcttagg

SEQ ID NO: 897974 - DNA, 120 bp, Artificial Sequence
  ENSG00000242808_1 (sequence is synthesized)
agattgtgacctggcttgcatcattctaagacttctatcgtctgttttcaaaacccaaggaggacctccttttctgtgtgatagttcctcatgctttgccagccactgggtctttaagga

SEQ ID NO: 897975 - DNA, 120 bp, Artificial Sequence
  ENSG00000242808_2 (sequence is synthesized)
agcttgccaagagttcccggctgggaaggacagttcgagttcatcatagacaatgagctggcaccacagtttaagtgactcaccaacctggttgcccacttcaaaatgtcaagaaccaca

SEQ ID NO: 897976 - DNA, 120 bp, Artificial Sequence
  ENSG00000242808_3 (sequence is synthesized)
ctatctaattgaaagaactgtgttttagcaaagtgtaattggatcgcctggcaagatcatctcaaactatgtctctgaccttgcctttcagtggctattttgagcacaagaggagaaagg

SEQ ID NO: 897977 - DNA, 120 bp, Artificial Sequence
  ENSG00000242808_4 (sequence is synthesized)
aaatgattcctgaattatatcttgtttttaaaaattaagattaattaatacttggttttatgttcattccattgtaggaacttagtgattattacaaaacagtcaaaataggtcatagca

SEQ ID NO: 897978 - DNA, 120 bp, Artificial Sequence
  ENSG00000242808_5 (sequence is synthesized)
aaatgaacgtttaagattaggttaaaacattcctctgaaattttagtattcacttttgaagtgtcaattactatatttctgtaatttctcatttttttcttggcttagagtcaagatgaa

SEQ ID NO: 897979 - DNA, 120 bp, Artificial Sequence
  ENSG00000242808_6 (sequence is synthesized)
aaatgatatttgaatcaaagacattgttttgttatatagccactcctttctaaaatgcaaatccaccctcccctcaccaatgctttattctttgtgcgcgcacacacacacacacacaca

SEQ ID NO: 897980 - DNA, 120 bp, Artificial Sequence
  ENSG00000242808_7 (sequence is synthesized)
cacacacacacacacacagacatacacagaaccagcacccaaatggtagaggaggtccttccaagacttctaggacctggatcatgtaagcagtagatgagaaaatgaagtaagagatat

SEQ ID NO: 897981 - DNA, 120 bp, Artificial Sequence
  ENSG00000242808_8 (sequence is synthesized)
gaaaatgaagtaagagatatagagtaataacaataaaagtcaatgatttcattttacaaaaaagtcattgtgtagtactcagatatttttaagagcaagtattattatgactaaagtata

SEQ ID NO: 897982 - DNA, 120 bp, Artificial Sequence
  ENSG00000242808_9 (sequence is synthesized)
ttatgattctcatctaatttcaagccacacataggcgccatttgaaagcattttgtgttacaacctatcaacaaaaatcaactaatagttttataacgtgcataggtttaccccatgggg

SEQ ID NO: 897983 - DNA, 120 bp, Artificial Sequence
  ENSG00000242808_10 (sequence is synthesized)
aattaaaatttttatctgcaagtatttctgttgttgtgagactttaggacaagacaacatttggtgttaacatagaagaatattctatggcttttttagctttaaagttcattactctaa

SEQ ID NO: 897984 - DNA, 120 bp, Artificial Sequence
  ENSG00000242808_11 (sequence is synthesized)
aataaagtacacgtggtatttttttcttcctagtgttctcttattatatgtagagtattttcggttgttgtttttaacgtatacattatttttattaagtcatttcataaaagataagat

SEQ ID NO: 897985 - DNA, 120 bp, Artificial Sequence
  ENSG00000242808_12 (sequence is synthesized)
ttcaagtcaagcaaaattgggcaattttctttcaggaaaaaaaaaatattgagcatgattttgaggtaaaactgattatttacagcatcttttctctaataggctaacatttatgatgga

SEQ ID NO: 897986 - DNA, 120 bp, Artificial Sequence
  ENSG00000242808_13 (sequence is synthesized)
tcttatttcaaagttgattattctcaaagaaaagtggagatattagaatttccgagtaaattgcattgttttaaaaagtactttaatgcattgttcacattgttgccagctattgaccaa

SEQ ID NO: 897987 - DNA, 120 bp, Artificial Sequence
  ENSG00000242808_14 (sequence is synthesized)
aaaagagaagaagaaaaaagaaataaaaaaagcagtatctgctccaaacgtcaagttttgcagtttgaaagacttgtacattataattgtttttttcttttttggaaagcagtagtaatt

SEQ ID NO: 897988 - DNA, 89 bp, Artificial Sequence
  ENSG00000242808_15 (sequence is synthesized)
ttataattgtttttttcttttttggaaagcagtagtaattaataccaaaggcatagacaatttagggccataacctcccttcccccctc

SEQ ID NO: 897989 - DNA, 120 bp, Artificial Sequence
  ENSG00000242808_16 (sequence is synthesized)
acatatttttttcctaatttttttccctccattcagtaagaaggataagcttttagagtacccagtcaccgtggtaactgccaaaaaaattctcctgaagtttgaagaggtcagctagca

SEQ ID NO: 897990 - DNA, 120 bp, Artificial Sequence
  ENSG00000242808_17 (sequence is synthesized)
gggtcaacaaccctggcctctctctgagctcggtctagcatgccccagcctgcggttggagtgtcaggccagatctgaccctgggaggtggaccattctggctctgatataaatttttcg

SEQ ID NO: 897991 - DNA, 120 bp, Artificial Sequence
  ENSG00000242808_18 (sequence is synthesized)
agtcagttcatggcctggactctccaggtggcctccaaaatcgattttgaccccctgaccctgtctcacggaggcatagcatccaccctaagtaaggatttagccaggaatgacagcttt

SEQ ID NO: 897992 - DNA, 120 bp, Artificial Sequence
  ENSG00000242808_19 (sequence is synthesized)
ccactgagtgttattggggacagtataaacagtttggaaagcaagtaaggaggtgtgagggctagcaatcattaaaagcacattaaaaaacaatttttaaaaatctttattagagaaagt

SEQ ID NO: 897993 - DNA, 120 bp, Artificial Sequence
  ENSG00000242808_20 (sequence is synthesized)
tgtaaatgcatatctgttacagaattcctgtgatttgtagagttttctagtcagttttgaatataaataggtcacatatctttatctttttgcatactttgttacaaatatgcaaataag

SEQ ID NO: 897994 - DNA, 120 bp, Artificial Sequence
  ENSG00000242808_21 (sequence is synthesized)
ataggcatacttgctacaaaataggtacagcaggaatgtaatatgttcagaaaaggcaaactggttattaaaacacattaacaggtaaggagtttctaatattttaaatactaaaatttt

SEQ ID NO: 897995 - DNA, 120 bp, Artificial Sequence
  ENSG00000242808_22 (sequence is synthesized)
acatgtgtattttgaagtttttaaaatggaaaaataaagaacctttaaaaaacccaacagtgtggaataaagataaacttgttgcactcaaggtacatttctactttgtaaagcaagaag

SEQ ID NO: 897996 - DNA, 120 bp, Artificial Sequence
  ENSG00000242808_23 (sequence is synthesized)
ccaatacactcagttggataaaaatgagagaaaaattgtaaatatagagagttacagcttatagagctgaagaggaataaaacaaaaaaaagtgtctctgaataactttatgtattttca

SEQ ID NO: 897997 - DNA, 120 bp, Artificial Sequence
  ENSG00000242808_24 (sequence is synthesized)
gggattgcagtggcaaagctaggctaggtcttggaggctggtgtaaggcgatgtgggtgaaggcaggaggctgatggaaagactggggggaagaaaagccgaaatggattcacggtgcct

SEQ ID NO: 897998 - DNA, 120 bp, Artificial Sequence
  ENSG00000242808_25 (sequence is synthesized)
cttttttacctgccaatcaaactgctacaagacaacaccctgatctggcatggacatgtaaaagcaatagtcttggaaaagcgaatctaccagcagggggcgcaccagccacatccctga

SEQ ID NO: 897999 - DNA, 120 bp, Artificial Sequence
  ENSG00000242808_26 (sequence is synthesized)
aaccagccgcgctgaaaagccggtggccgccttctcttccccagatcttctcaaccttttctctttcctaatctccaggtccgtgtttaccttaatattacacctggattaaacagaaaa

SEQ ID NO: 898000 - DNA, 120 bp, Artificial Sequence
  ENSG00000242808_27 (sequence is synthesized)
atgtgcattttgtaggaagaaaactgtgaatggaaaaaggagaaggggagagaaacgggggaaatctggataatacattaaagtaaccataattttggagatgcattcatcttattgaaa

SEQ ID NO: 898001 - DNA, 120 bp, Artificial Sequence
  ENSG00000242808_28 (sequence is synthesized)
atatatttcctcatggttgtgattcctcttcactcttttgaatttggaaggatggcatacacatctgaaaaataccactacttccttcattggactgcaaggtatttctgtttggaaaag

SEQ ID NO: 898002 - DNA, 120 bp, Artificial Sequence
  ENSG00000242808_29 (sequence is synthesized)
gccgctagaaaaagaagtttgacattcagaaacttatcaagaggttctactctttggatagagaccaaaatcatactttgaaaaagcctgacaggtttcttcggaaaagtggccatccat

SEQ ID NO: 898003 - DNA, 120 bp, Artificial Sequence
  ENSG00000242808_30 (sequence is synthesized)
gaacagaaactgaagttgtatactgtgcatatgtaatcctacacaagaggaaggcaatgtttaaagctgctgtcacctcttagggaaaaaactggaattctgagtcaagtatgtatgcat

SEQ ID NO: 898004 - DNA, 120 bp, Artificial Sequence
  ENSG00000242808_31 (sequence is synthesized)
tttctgttttcctgtcttgtgggtctttatgactaaaaacatttttatgaaattgctctctgcttctttaagctttgtgtggtcttgtttgtttgttctcaaatctcaaaccatgccata

SEQ ID NO: 898005 - DNA, 120 bp, Artificial Sequence
  ENSG00000242808_32 (sequence is synthesized)
aaacaaagatcttattttatttaaagaagttcctttttgttataagctagaatgaagaatgatttcaggacaatgagacagaaactacctcttgaaagctgtaatgttgaagctggctac

SEQ ID NO: 898006 - DNA, 120 bp, Artificial Sequence
  ENSG00000242808_33 (sequence is synthesized)
atagctaaaatagagtagactgattttcttttctaggcctgtttggtcaatttaaaccatattaatgggtgatcaaaccctgaagagttctctgaggatttaagttaccagcccacaata

SEQ ID NO: 898007 - DNA, 120 bp, Artificial Sequence
  ENSG00000242808_34 (sequence is synthesized)
tactgacaatccactgaacaacaacaaaacaacatttaatttcactttatgcagcacaaacgcagactgagacactctatcaaatggttaagagcatgggtttcaagtcagatccacctg

SEQ ID NO: 898008 - DNA, 120 bp, Artificial Sequence
  ENSG00000242808_35 (sequence is synthesized)
gatgtgagctctgggtctagcacttgctaaccatgtaatcttgggcaatttaacttcatgaattctatttcttcatctgtattataggaatgaggccatatttcatgagagtaagatgca

SEQ ID NO: 898009 - DNA, 120 bp, Artificial Sequence
  ENSG00000242808_36 (sequence is synthesized)
ttttttttcacattttaacatctctgatgttagaatgcatgttacaattgatggtgtgtcttcattcaattgccaacactttttcttttcttactagtacataactgtgtaattacaacc

SEQ ID NO: 898010 - DNA, 120 bp, Artificial Sequence
  ENSG00000242808_37 (sequence is synthesized)
tatgacatttgagattcaattaaataattaacatatacctcatagagttgttctgagatataaataaaataatgatgtagaaccttatgtcctataaaacctgccccacggaagacttct

SEQ ID NO: 898011 - DNA, 120 bp, Artificial Sequence
  ENSG00000242808_38 (sequence is synthesized)
agtaaatcataccagttaatgttgtacagtgtgatgtttgtaaagtctggcattttcctgtcttgttagtcataatttctgtttgccaactctaaaagttaatttctttgcaaaaatctt

SEQ ID NO: 898012 - DNA, 120 bp, Artificial Sequence
  ENSG00000242808_39 (sequence is synthesized)
tttgttggaacagtctgcctactgagtagctcgtcaaatttcctctaattgttctggcagcatgacattgaccctacgggtttacatatgaaatatggtcaaaataaaggttttatgaaa

SEQ ID NO: 898013 - DNA, 120 bp, Artificial Sequence
  ENSG00000242808_40 (sequence is synthesized)
gccaatcaaactgctacaagacaacaccctgatctggcatggacatcgcgggtccaagcctgtagccccaaatcggataatctctgcagctgataacaagcaaaagagaagccaggcaac

SEQ ID NO: 898014 - DNA, 120 bp, Artificial Sequence
  ENSG00000242808_41 (sequence is synthesized)
gcaggaagaaatgtaatgaattgagtgctgtcagagatgtcttctgtttgaacaatctgcgatgggctgaatggcagggactccctcatccagtgcagatccaacttagaaataatgttt

SEQ ID NO: 898015 - DNA, 120 bp, Artificial Sequence
  ENSG00000242808_42 (sequence is synthesized)
acaccctgatctggcatggacatagatctggaaatacaccctgtgtggcagtcatttaacactggtagatttaagtctgaaagcgttaacttttggaattaaattctaatttagatttaa

SEQ ID NO: 898016 - DNA, 120 bp, Artificial Sequence
  ENSG00000242808_43 (sequence is synthesized)
acgcggaggagaaggaaagtcgctcaagcagtggacagagcggagaaagcgacttcgggtctgctggagtttgctggaggtgcactccagactctgtttgcctgcctatcaccaacagag

SEQ ID NO: 898017 - DNA, 81 bp, Artificial Sequence
  ENSG00000242808_44 (sequence is synthesized)
ggagctctcctctatgagttcagcctgagaaaactcctgagcatgtgcgaaaaagaaaagaagaaaagaaaagtaaagaaa

SEQ ID NO: 898018 - DNA, 120 bp, Artificial Sequence
  ENSG00000242808_45 (sequence is synthesized)
catgtgcgaaaaagaaaagaagaaaagaaaagtaaagaaaagaaaaaaggaaaaagggcaagctcctgagtggatctctcagggagccaccagacagtgaatgaaggagggaagaaagga

SEQ ID NO: 898019 - DNA, 120 bp, Artificial Sequence
  ENSG00000242808_46 (sequence is synthesized)
gcatggacatactaaagctctgtactcgaccccgcgagcggctctcgccttccggggctggaacccgactcagatgtgaagcggcactgagccgctgcgcaggttcgtgcccagcgcccc

SEQ ID NO: 898020 - DNA, 120 bp, Artificial Sequence
  ENSG00000242808_47 (sequence is synthesized)
ctgttggacacagtaggagctgcgcagcgccagtcccagaaatcgctggaatcctgctctggggttagagaaaactcttttattgccctccaaaaaagaaacgggatgcgaaaacaaatt

SEQ ID NO: 898021 - DNA, 120 bp, Artificial Sequence
  ENSG00000242808_48 (sequence is synthesized)
gtgactgatgtggcacacttatgaagaaaagcctctttttccatgcttgtttttcctccccaaggagccaacagagtttctattctccaactctgctcttcaccttacccaagtcattgc

SEQ ID NO: 898022 - DNA, 120 bp, Artificial Sequence
  ENSG00000242808_49 (sequence is synthesized)
agtcacctggagtcacggaaatgaccatgattgcctgaactttcatgacttctgtggataactgtggttgcagaaaagagaaaacctggaccgtgagggacatttcactccctgggcttt

SEQ ID NO: 898023 - DNA, 120 bp, Artificial Sequence
  ENSG00000242808_50 (sequence is synthesized)
cctcatccagtgcagacacagcccaggcagacagaaggaaacggagcattaatccaactgcagtcaccccaaagtacaggccatttggatccagaagagaaactggttccttctacaagc

SEQ ID NO: 898024 - DNA, 120 bp, Artificial Sequence
  ENSG00000242808_51 (sequence is synthesized)
atcataagtgtgttctgcaaagaaacttcaactgtagatcaaatatgcctataatacaaagttcttcattacaggaaacaactgaataccttgctgtcttttgaactatattttcccctg

SEQ ID NO: 898025 - DNA, 120 bp, Artificial Sequence
  ENSG00000242808_52 (sequence is synthesized)
gaaatatatcacatcatctgtctgtccacaggctttccttggggcttatgaaggtattttagaatttttatattggcatttttcaggggagataaaggtgaaccctcaagggcagtcaga

SEQ ID NO: 898026 - DNA, 120 bp, Artificial Sequence
  ENSG00000242808_53 (sequence is synthesized)
ggtacactaacctgactttaatagctttcttattagtcaataaccaaggttaatatcaatgactttgtttttagatttgaagccatcatgtatgatattgccagacgtattgctgtgctt

SEQ ID NO: 898027 - DNA, 120 bp, Artificial Sequence
  ENSG00000242808_54 (sequence is synthesized)
tgggtgaccttttgttattttgaattggggctacttattgatttttctctttttcgcttactttatgataaattctttaatgcatattttggtatttgtaccttataagtatgaacccag

SEQ ID NO: 898028 - DNA, 120 bp, Artificial Sequence
  ENSG00000242808_55 (sequence is synthesized)
aaagcaaaattcaagtatccttagctatttctaacaaaatgcattttagaaaatgataaggtttgcagttggagacttagctttatttatattcataagcctttcatctttatacatact

SEQ ID NO: 898029 - DNA, 120 bp, Artificial Sequence
  ENSG00000242808_56 (sequence is synthesized)
gagagacagagaaaatatgggtgagtagtgtctccatctgagatttttttctcagtaagatcatgtctttttggctccattccactacttccttcattggactgcaaggtatttctgttt

SEQ ID NO: 898030 - DNA, 120 bp, Artificial Sequence
  ENSG00000242808_57 (sequence is synthesized)
aaaaaaaagagaaccacagctttggacaaaagtctatagccagtgcatttgaaaactccccttgcaccagggctgactgtagctgggggaagacattttactcatttgctctttcctttc

SEQ ID NO: 898031 - DNA, 120 bp, Artificial Sequence
  ENSG00000242808_58 (sequence is synthesized)
atacagtcagctggtccctcttctcaggtgtagatcacctattataattttacctaattttgatactctgataaggaaagtcccaggacttatcagctgggataggcctcacttacaaga

SEQ ID NO: 898032 - DNA, 120 bp, Artificial Sequence
  ENSG00000242808_59 (sequence is synthesized)
tttgattttctctaggaaagtagaattctctttgagagttctagcctgtgaactcagtatgtaaatgtggccatcaagaagacagaactgccaagaggaaagattatgaatgtttttctt

SEQ ID NO: 898033 - DNA, 120 bp, Artificial Sequence
  ENSG00000242808_60 (sequence is synthesized)
ccttaaaaccattcacagtgtttcttcttccagtgctttactcagacttctccccttttcccagctctgttgaaaatggcttcaaaagcaacactgcagtggctaaaccaattgtactgt

SEQ ID NO: 898034 - DNA, 120 bp, Artificial Sequence
  ENSG00000242808_61 (sequence is synthesized)
gaagttgttgagatgccatttcatctgaatccttcgtaaaaattagatttttaagtaggggtgaatatccttttgggagagggaatgggagggtagaagaaggggggaaaggacagagca

SEQ ID NO: 898035 - DNA, 120 bp, Artificial Sequence
  ENSG00000242808_62 (sequence is synthesized)
tacaggggaagagctgaagttgggttggggaagtttaatatactatacttttaaaatttttttacttttggctaatatttatctatttatttatttttattttttgtagagacagggttt

SEQ ID NO: 898036 - DNA, 120 bp, Artificial Sequence
  ENSG00000242808_63 (sequence is synthesized)
aaactactgagcttgagaatctgcttgtcttggcctcccaaagagctaggattacaggcatgagccatcgagcctggctccttttattcttttcatgacactacctcttcctaggagagg

SEQ ID NO: 898037 - DNA, 120 bp, Artificial Sequence
  ENSG00000242808_64 (sequence is synthesized)
tatatcacatcatctgtctgtccacaggctttccttggggcttatgaagtgaatgaaggagggaagaaaggagagacagagaaaatatgggaagtatgcagctggcatcagaagctggaa

SEQ ID NO: 898038 - DNA, 120 bp, Artificial Sequence
  ENSG00000242808_65 (sequence is synthesized)
gtcagactgagattgttgagtctcaggatgttgcaggacaggatggatgaagaatgctagtcctggcagttggggcctaaggccagggcccttttttatcactttcttgtgttgcctctc

SEQ ID NO: 898039 - DNA, 120 bp, Artificial Sequence
  ENSG00000242808_66 (sequence is synthesized)
tgcccaagaaaaaatctgtctcttgcatacagctcctctaatacgtgtccattagaaggaaggagtttctttaatgagctctatggttttatcttgctcataacagcttagtttaatgcc

SEQ ID NO: 898040 - DNA, 120 bp, Artificial Sequence
  ENSG00000242808_67 (sequence is synthesized)
actgaaactgtaacatttttttgtgcctaatatcaactgacaaatataaagttattcctaatttattaattcaaatgatatattgcaaaataaaatctgcttaatatgaaaagaagtaat

SEQ ID NO: 898041 - DNA, 120 bp, Artificial Sequence
  ENSG00000242808_68 (sequence is synthesized)
tgcctgttgagtgtcttatatgcacataagaacttttcccatttgcaggtgaaatttgtatttgtttatgaaaataattgattggattgaaacaacatcggaattcagttggcttttagt

SEQ ID NO: 898042 - DNA, 120 bp, Artificial Sequence
  ENSG00000242808_69 (sequence is synthesized)
ttgtatatttactgtacttaatgtgccatgggttgtgattttgaatagaatcatagacatcctgtgcattttggaagcttgccactgggaaaggcttaatatttgtaaattaatagtttg

SEQ ID NO: 898043 - DNA, 120 bp, Artificial Sequence
  ENSG00000242808_70 (sequence is synthesized)
ataaagcttaaaattttccatcttttgagatttctccctcttttaataagtaactttgtcaagcaacattctctattgaagggaagaaaactttcaattgggtcttaatatactattcac

SEQ ID NO: 898044 - DNA, 120 bp, Artificial Sequence
  ENSG00000242808_71 (sequence is synthesized)
ctttccctttattaatataaagattatgtttagtactgtgtttaacaagaaatgtacttacacaagtatttaatcttagctttcttaaggaaataggcaaatatcttagttactaatatt

SEQ ID NO: 898045 - DNA, 120 bp, Artificial Sequence
  ENSG00000242808_72 (sequence is synthesized)
aaatatattaaagcttacacataaagcactaaaggatgtcagaattgagaattttttaatgaaagaaaaaatattttgatgattaataaattaaaatgttctgggctgatttatagagaa

SEQ ID NO: 898046 - DNA, 120 bp, Artificial Sequence
  ENSG00000242808_73 (sequence is synthesized)
atattccaccaaaggtatcagtcttcatgtcaacttgcccttcctaacagttctataattatcattgagttttaaaaatgtttaaattggattttcatgtctaggattaagtgtatatta

SEQ ID NO: 898047 - DNA, 120 bp, Artificial Sequence
  ENSG00000242808_74 (sequence is synthesized)
atacaagagagaacaaaatggttattcaggggaacgctttcgatttttattgtgggtagcctgcacaaagagccgtgttattgtatttaaaagaaccatctgtagcagaaacaatggcat

SEQ ID NO: 898048 - DNA, 120 bp, Artificial Sequence
  ENSG00000242808_75 (sequence is synthesized)
caaattatctttgaatacccactgaaaaaacataaagcttttttttttattcttcttctgtacggtggggggatagagcagtgttaggataactgacttttttgttgttctctgggtgca

SEQ ID NO: 898049 - DNA, 120 bp, Artificial Sequence
  ENSG00000242808_76 (sequence is synthesized)
ttcttctcgctccccctctctctccccctcaccctctctctcttctctctctccctctccctctctctctctctctctcttttaaaaaatcagccatttggggttttaagccataaacga

SEQ ID NO: 898050 - DNA, 120 bp, Artificial Sequence
  ENSG00000242808_77 (sequence is synthesized)
actgacttctcctgcattgctctcataaggaccccggtcattacctcaggccaaccaggcaatccaggataaactccccatctcaagacctttaacctgattacttctgcagaaccccaa

SEQ ID NO: 898051 - DNA, 70 bp, Artificial Sequence
  ENSG00000242808_78 (sequence is synthesized)
aacagccatattaaagaagaaaacaatcaactctgagctcaccaacttctcaaaccttgattctaaaaag

SEQ ID NO: 898052 - DNA, 120 bp, Artificial Sequence
  ENSG00000242808_79 (sequence is synthesized)
tactacataaattgtaatgtattacattgctaatggaaataaaaatatgctgatacttttctgggagggaggttgtttcactgatcagatatttttcctgtgagagggagaacatagtga

SEQ ID NO: 898053 - DNA, 120 bp, Artificial Sequence
  ENSG00000242808_80 (sequence is synthesized)
ttaaatactattgctctggcaagaaaaataacagcaaaccaactaaaccaaaaaaagcaagtaaagaacaaaacaaaaaacaattaaaattacattaatgtaacaataatccgtcaaatt

SEQ ID NO: 898054 - DNA, 120 bp, Artificial Sequence
  ENSG00000242808_81 (sequence is synthesized)
ccacagcttattattgaaattttccatactgagatttatttttgtttgcaatatccgatatacagttgtcttggatatagatttatattttaaagtagttagcatgcagttgaccaagcc

SEQ ID NO: 898055 - DNA, 120 bp, Artificial Sequence
  ENSG00000242808_82 (sequence is synthesized)
tttgttcatttgagggagtatgtgtgaagggttagaactaaaggataaattaactctgttgaattatttctgaagttgtttgcttccagtgaaaaacaagaaacatgatttggtaataca

SEQ ID NO: 898056 - DNA, 120 bp, Artificial Sequence
  ENSG00000242808_83 (sequence is synthesized)
gaaacatatggaagatggcccattgtgctctcttaattctttgataatctggacattgacttttccattatatgacctgggcttgtgggcatcatgtcataatgcacctgttcagacatc

SEQ ID NO: 898057 - DNA, 120 bp, Artificial Sequence
  ENSG00000242808_84 (sequence is synthesized)
tccctgtaccaatatggatcacttgaagagactcctttgcccccatcaaaaaggatacagttgtgtatctcttccatttttgtttacagtgcctaaaattatttgagcagtttttcacct

SEQ ID NO: 898058 - DNA, 120 bp, Artificial Sequence
  ENSG00000242808_85 (sequence is synthesized)
aatcatactttgaaaaaatgagaagagatggaagccaaggaagggtgtgtggaatcaagtagcagttctcaaaacagcatatatcaagacctcagcacatatcaagacctcagcacatat

SEQ ID NO: 898059 - DNA, 120 bp, Artificial Sequence
  ENSG00000242808_86 (sequence is synthesized)
aatagtaagtaatgtgtgatttatttttcaattactgttactaattgtaataaagctgaaatttgattactggaggagtttgaaatcatcatgcatgccttgaaggaaaatgggttttgt

SEQ ID NO: 898060 - DNA, 120 bp, Artificial Sequence
  ENSG00000242808_87 (sequence is synthesized)
gaaacatttgcattatttggtgtgaattacctttggtgtgatttaactgtttatcacacaattactgttgtgataatgaatgtgttattcactattgctaaatttacccagtatattctg

SEQ ID NO: 898061 - DNA, 120 bp, Artificial Sequence
  ENSG00000242808_88 (sequence is synthesized)
gattccaaggattgagaagttttgcagtggtcaactggtatagacatcccattaccactacttccttcattggactgcaaggtatttctgtttggaaaagtaatggagtccagtcaactt

SEQ ID NO: 898062 - DNA, 120 bp, Artificial Sequence
  ENSG00000242808_89 (sequence is synthesized)
agagaccaaaatcatactttgaatgatatgcaatgcaagactcccaagattctgggcagtggcagggaggtgcagcttctagtctgccgcatgatcacaatgaaagcctgacaggtttct

SEQ ID NO: 898063 - DNA, 120 bp, Artificial Sequence
  ENSG00000242808_90 (sequence is synthesized)
agtctagtgggagatgtggctggggctaagaggaagagctgcagtttcctgggccaaagagctgagttggacagggagatggcagcttaccaaggcctgctggttctcagctctagagtc

SEQ ID NO: 898064 - DNA, 120 bp, Artificial Sequence
  ENSG00000242808_91 (sequence is synthesized)
tgccttatggtccgagcaggatttatttttaagaacagagcaagttacgtggaagcaaggaaggttttgaggacagaggtttgggtctcctaacttctagtcgggactgtgagaagggcg

SEQ ID NO: 898065 - DNA, 120 bp, Artificial Sequence
  ENSG00000242808_92 (sequence is synthesized)
tgctttgagactcggtggcctgcaggcagcgggagacgaggggactgggcagccttcctccaaggggcccgcagctgggggagcgccaggcagggagcagggacaaggagatccaactta

SEQ ID NO: 898066 - DNA, 120 bp, Artificial Sequence
  ENSG00000242808_93 (sequence is synthesized)
cagctctagctacttggaaggtcgtggcaatgctgtctcagaatgtccgtttctagagtacagagaagaaattctagcttgacgtccacgtgcatttgtctgtgtttcagaggaaattcc

SEQ ID NO: 898067 - DNA, 120 bp, Artificial Sequence
  ENSG00000242808_94 (sequence is synthesized)
aattctaaactcttggaagaaacaatttctcggcatgctgaagagaattgctgttttttggcacctgaaacacttttacccaagggttctgattatttaaataattggtatgctataaat

SEQ ID NO: 898068 - DNA, 120 bp, Artificial Sequence
  ENSG00000242808_95 (sequence is synthesized)
cagaaatgtggtttaatgtagatgagttgtaaaaacatgagacaaacatgctccaggctaaaaatatctggattaaaaaagaaaaagaaaagaagaggtgggagaagagagagaggaagg

SEQ ID NO: 898069 - DNA, 120 bp, Artificial Sequence
  ENSG00000242808_96 (sequence is synthesized)
caatcaaactgctacaagacaacaccctgatctggcatggacattctcaataccttcacagaggtgaagaagcagcaaccaaatgaattagacagcaacatgattcctagagaatggcaa

SEQ ID NO: 898070 - DNA, 120 bp, Artificial Sequence
  ENSG00000242808_97 (sequence is synthesized)
tttctccatcctagtaatcaaatttgagcaaaatcaaatggggctttctatgaaagtaccttttgttgatctgaacgagctggtaatttacaaaatacccttcctttgtgaggaaggcta

SEQ ID NO: 898071 - DNA, 120 bp, Artificial Sequence
  ENSG00000242808_98 (sequence is synthesized)
aagaaaaaaagaatcagtagcttttaaagctgggccttagtgggactctaaatgcaatgaaagcagtctgtgttgagagactgaaatgcatttcaaagccaggcctgattcggggtacaa

SEQ ID NO: 898072 - DNA, 120 bp, Artificial Sequence
  ENSG00000242808_99 (sequence is synthesized)
gctatctgtggtctagtctgaactgtacctggggtagtgacaatggccttctgaccctatggctcttcctgactgtggatagaattgatagcactttttcaatttctcccttgtctttgc

SEQ ID NO: 898073 - DNA, 83 bp, Artificial Sequence
  ENSG00000242808_100 (sequence is synthesized)
taagtagcttgcaacccaactttgacattcactgctagctcactcctccccccacctcactttcttccccactccctttaaga

SEQ ID NO: 898074 - DNA, 120 bp, Artificial Sequence
  ENSG00000242808_101 (sequence is synthesized)
caacaccctgatctggcatggacatcacattattatgcataatcgccagccacagttagtttattgtctcgataagtacagcaggcttaattaaaataaagctgtaaataaatgcaacca

SEQ ID NO: 898075 - DNA, 120 bp, Artificial Sequence
  ENSG00000242808_102 (sequence is synthesized)
caaacacatgcatctgagaatgtgtaaaagttgttatatatcctcccaaggaaaaaaattgtgccttgagagaaaggcaacgagatttaaaagatttgtgtctataaccgtctgttatta

SEQ ID NO: 898076 - DNA, 120 bp, Artificial Sequence
  ENSG00000242808_103 (sequence is synthesized)
gtatttattttaacaaatatacaccacccttatccacaccaattccttggttgtttcttcaaacaattatccacaagctttttaaagtttttagaataatgctattaagcagaccgatgc

SEQ ID NO: 898077 - DNA, 120 bp, Artificial Sequence
  ENSG00000242808_104 (sequence is synthesized)
atacacaatcataaagtgaattcttggtctgccctttgtggcgtctggacaatcataattcattcacatgttgaatctcataatttgtacctattttttcccatggtctaacctcccact

SEQ ID NO: 898078 - DNA, 120 bp, Artificial Sequence
  ENSG00000242808_105 (sequence is synthesized)
tacctcgaggttgtatgtatatttctaagttaggcaaattaaatctgattcttatgatttggttccgcagcttataagatatgttaacttttcttttgtttagattatgtataattagtc

SEQ ID NO: 898079 - DNA, 120 bp, Artificial Sequence
  ENSG00000242808_106 (sequence is synthesized)
ggcacaaaagcatcgtagtgttgtcattcaccactatgcaggagggaaagccaatttcatttcagaatgtcctcaattaatctgtagaaattattaattttattaaatcccaacccttga

SEQ ID NO: 898080 - DNA, 120 bp, Artificial Sequence
  ENSG00000242808_107 (sequence is synthesized)
gcttttttacctgccaatcaaactgctacaagacaacaccctgatctggcatggacataatcaagctttggtcattccggaagtcgtgtagcatgctccaatttgaagtgactgagatct

SEQ ID NO: 898081 - DNA, 120 bp, Artificial Sequence
  ENSG00000242808_108 (sequence is synthesized)
tttgtgacttacagaggagaaggaaatgttttaaaaattggcttatgccagtctccttactctgaaattctcaattttcttgtattacaggataaatataaatatcatctcaccaaattg

SEQ ID NO: 898082 - DNA, 120 bp, Artificial Sequence
  ENSG00000242808_109 (sequence is synthesized)
gcattttgtggtcataaaatggaagtgattgtaaggccacgtattcagcacaatgaccttgatcctgaatgaagtggagagaggagagagagaacagcgtgactaacagctcttgttgaa

SEQ ID NO: 898083 - DNA, 120 bp, Artificial Sequence
  ENSG00000242808_110 (sequence is synthesized)
gcacaagtaactttttatgttccactccacaatgatgaaaaagtaaacacagagacaggttttagatgttgatggctttatatcaaagtgaaatatatttgtcatgttccaaagttacct

SEQ ID NO: 898084 - DNA, 120 bp, Artificial Sequence
  ENSG00000242808_111 (sequence is synthesized)
tcattatcattatttttagaggaatggttaaaagcataggctctggaatcaaacagcttgggttcaaatcttggatctttcacttcttagctgcatgaccttcattaagttctcatctgt

SEQ ID NO: 898085 - DNA, 120 bp, Artificial Sequence
  ENSG00000242808_112 (sequence is synthesized)
aaaaatagggaaaatacgagaaactacttcatgggattgttacaaagataaagtgcaataatgcatgtgtctggcatagagtaagctctttcagtgtcagttagtattagcataattaag

SEQ ID NO: 898086 - DNA, 120 bp, Artificial Sequence
  ENSG00000242808_113 (sequence is synthesized)
tgcagaatgtttgtaaaatgttatctaaattgtactatactcgacctggtttaaagtaagtgaatggatatctgtgaaactttctgacatgtgctaaaatacattgcagccttcattaaa

SEQ ID NO: 898087 - DNA, 120 bp, Artificial Sequence
  ENSG00000242808_114 (sequence is synthesized)
tcgtaaaaggggacgcggaggagaaggaaagtcgctcaagcagtggacagagcggagaaagcgacttcgggttggttgaagggtctgctggagtttgctggaggtgcactccagactctg

SEQ ID NO: 898088 - DNA, 120 bp, Artificial Sequence
  ENSG00000242808_115 (sequence is synthesized)
tactttcgcgaagcgcattaggatgtgggctctggcttgagctccaaaatagcttgcttgtcaattgcgagctgcagcaatatcaaagtgaactgtcccaagtaactcttgtctagaagc

SEQ ID NO: 898089 - DNA, 120 bp, Artificial Sequence
  ENSG00000242808_116 (sequence is synthesized)
tgggaagaagcttaagcagctcgctttaatgatgatttgtagctcggcgaggggcacggacagcaaacaccccgcaggtgtgtgccgtaacaccatcatccggacttgaatgtagattac

SEQ ID NO: 898090 - DNA, 120 bp, Artificial Sequence
  ENSG00000242808_117 (sequence is synthesized)
tctggcgatcgtttgatcggccctttgaaaccctttacaattgcctgtgacgaacggccagtctcagtttttctctgaataatccctgaggatccaacttagaaataatgtttcattcaa

SEQ ID NO: 898091 - DNA, 66 bp, Artificial Sequence
  ENSG00000242808_118 (sequence is synthesized)
cttaagctgataaacaacttcagtcccaacaggcaaccagagagccaaatcatgaatgaactccca

SEQ ID NO: 898092 - DNA, 88 bp, Artificial Sequence
  ENSG00000242808_119 (sequence is synthesized)
aggcaacgcaattgctacaacaacaaaaaacacctaggatacagctaacgagggaagtaaagaacctcttcaaggagaactacaaacc

SEQ ID NO: 898093 - DNA, 86 bp, Artificial Sequence
  ENSG00000242808_120 (sequence is synthesized)
atttgtagattcaatgctattcccgttaaaatacctcaaaattcatatggaatcaaaaagggcccaaatagccaagacaatcctaa

SEQ ID NO: 898094 - DNA, 87 bp, Artificial Sequence
  ENSG00000242808_121 (sequence is synthesized)
caaactgtgttggtacaagaacaaacacattgaccaatggaacagaatacagaactcagaaataagaccacacacctacaatcatct

SEQ ID NO: 898095 - DNA, 80 bp, Artificial Sequence
  ENSG00000242808_122 (sequence is synthesized)
tgttggtacaagaacaaacacattgaccaatggaacagaatacagaactcagaaataagaccacacacctacaataaaaa

SEQ ID NO: 898096 - DNA, 80 bp, Artificial Sequence
  ENSG00000242808_123 (sequence is synthesized)
ccctatttaataaatggtgctgggagaattggctacccatatgcagaaagttgaaactggacccttttcttacaccatac

SEQ ID NO: 898097 - DNA, 87 bp, Artificial Sequence
  ENSG00000242808_124 (sequence is synthesized)
gtaaaacccaaaactataaaaacctagaaaaaaatctaggcaataccattcatgacataggtatggtcgaggatttcatgatgaaat

SEQ ID NO: 898098 - DNA, 90 bp, Artificial Sequence
  ENSG00000242808_125 (sequence is synthesized)
agtgaaagaaactatcatcagagtgaagagacaacctatagaatgggagactctaatgtccagagtctacaaagaacttcaacaaattca

SEQ ID NO: 898099 - DNA, 120 bp, Artificial Sequence
  ENSG00000242808_126 (sequence is synthesized)
ctagtgactgtggcaactatctctcactgatgttccagaaagagaagaactccttcctgctagactttcttcgatatttcagttgtgataagcagatttaactagcgtttggaaagttgc

SEQ ID NO: 898100 - DNA, 120 bp, Artificial Sequence
  ENSG00000242808_127 (sequence is synthesized)
tcactatcatcaatgcatgttatgccttcacttctctggatttgaagctcttgctgcttgctgccttgtcattctttatttatgctgacttgtccatacacaaaagcctgctgaagtcct

SEQ ID NO: 898101 - DNA, 120 bp, Artificial Sequence
  ENSG00000242808_128 (sequence is synthesized)
gtcttagtgagtttcatttgatccacactgtacttaaaaagcacatcttacatcctttaaagctggttaaatcgctctcctcatggcttacttttccacactgttcacaagagctaagct

SEQ ID NO: 898102 - DNA, 120 bp, Artificial Sequence
  ENSG00000242808_129 (sequence is synthesized)
aatacaacttataaacaggtcacatacacagatttcacctacttatatgttgtaaacatcaacttactgtaaatgttttcactataatgctagttccagaacataaattttcttattatt

SEQ ID NO: 898103 - DNA, 120 bp, Artificial Sequence
  ENSG00000242808_130 (sequence is synthesized)
tctaagagcaattctagggaaagttacattctgtgttggagtttcctttcctcaagtcttccatagtcttttaaaagtgttactctacactgtggaattgagggaaacattatttcctct

SEQ ID NO: 898104 - DNA, 120 bp, Artificial Sequence
  ENSG00000242808_131 (sequence is synthesized)
ttaaggttaaagtggggacatcagcagactctccagtgaattaatcctcagcagagtggtgtctccaaaggagtaatccagaagaggcagtaccacagcgatgagaggaggggcaggtag

SEQ ID NO: 898105 - DNA, 120 bp, Artificial Sequence
  ENSG00000242808_132 (sequence is synthesized)
aacatatggaggaaattattcctgatcatggctgtggcaactcactaggaaactcccagaaattatactgggagtggcagaagtaaaagaatatactttcaacttccagctagtaggcca

SEQ ID NO: 898106 - DNA, 120 bp, Artificial Sequence
  ENSG00000242808_133 (sequence is synthesized)
gtggggctcacatcgtaataacttgggtaagaataatctctgatagtatgcacaggctggtcaggctggtgacatatgggttatattcagtatataattttgaattactttggatagctt

SEQ ID NO: 898107 - DNA, 120 bp, Artificial Sequence
  ENSG00000242808_134 (sequence is synthesized)
aaggatggccgtgaatttacttggtttataatcagagaagtgtttatttataaataatctatctatcactaactgataccttagtaagaaaaaaagttaactcaaatcctcctctccttc

SEQ ID NO: 898108 - DNA, 120 bp, Artificial Sequence
  ENSG00000242808_135 (sequence is synthesized)
acattttagggaaatgcagtagaatataaaaataaattataacaagttatggaggacatctgtttaaaaatggaccacaaggatatcagatttgaataatttctcattttctctttgcac

SEQ ID NO: 898109 - DNA, 120 bp, Artificial Sequence
  ENSG00000242808_136 (sequence is synthesized)
agaattttattgaatcagcaagactatatcctttctaaaaataaattcatcaaaagagcatcatttccttaaagtcattccttatgctattgtaaatggcatttttaaaacttaaaatat

SEQ ID NO: 898110 - DNA, 120 bp, Artificial Sequence
  ENSG00000242808_137 (sequence is synthesized)
ttaaaaaggtacacttcagtggttttaaatatattcacaaagctgggcaaccatctccactatctaattccaagacatatttgttatcccccaaagaaacctcgtacccatttgcagtca

SEQ ID NO: 898111 - DNA, 120 bp, Artificial Sequence
  ENSG00000242808_138 (sequence is synthesized)
ctctctattatccccttccctgatcccctggtaagcactaatctactttccatctttatagatttgtctattctgtatttatatgaatgaaatcatacatatgtggccattagtgtcagg

SEQ ID NO: 898112 - DNA, 120 bp, Artificial Sequence
  ENSG00000242808_139 (sequence is synthesized)
cttctttcactaagtataatgttttccggtatcattcatgtcatagtagtatgtattagttcttcattcctttttatggttgaataaaaatttattgtatggctgcaccacattttggat

SEQ ID NO: 898113 - DNA, 120 bp, Artificial Sequence
  ENSG00000242808_140 (sequence is synthesized)
atctattcatcagctgctggaatttgagtttctactttttgactattatgaaataactctgctatgaacatatctgtacaatttttgtataaacattttttcaattattttggacataca

SEQ ID NO: 898114 - DNA, 120 bp, Artificial Sequence
  ENSG00000242808_141 (sequence is synthesized)
tctaggagaggaattcctggatcacttggtaattctatgtttaatttttaagcagctatcaaactgttttccatggtggctgcactgttttatatacctaccagctatgtatggttctaa

SEQ ID NO: 898115 - DNA, 120 bp, Artificial Sequence
  ENSG00000242808_142 (sequence is synthesized)
tttctctgcatcctcaccaacacttgttattttccaagttttttttcattatattcatcctatgaggtgcaaagcgatgtcctgttttggtttctattcgcattttcttgctgactaata

SEQ ID NO: 898116 - DNA, 120 bp, Artificial Sequence
  ENSG00000242808_143 (sequence is synthesized)
atgttgagcattgttttcgtctttcatctgtttattgaccatttgtatatcttctttgtaaaattgtctgtttaaattcctatttaaaaattgggccatcatttttattattgagttgta

SEQ ID NO: 898117 - DNA, 120 bp, Artificial Sequence
  ENSG00000242808_144 (sequence is synthesized)
agagttctttactctggatactaaatctttatcagatacatgatttgcaaatattttcttccattctatgggttaccttttttcctttctttctcctttccttccccttccccttccctt

SEQ ID NO: 898118 - DNA, 86 bp, Artificial Sequence
  ENSG00000242808_145 (sequence is synthesized)
actcaggctggagtgcagtggcatgattatggctcactgcaacctcaacctttcaggctcaagtgatcctactgccttagcctcta

SEQ ID NO: 898119 - DNA, 66 bp, Artificial Sequence
  ENSG00000242808_146 (sequence is synthesized)
atgccaccacacgcaatcttcaactcctggctcaagtggtctgcctgcttctgcctcccaaagtgc

SEQ ID NO: 898120 - DNA, 120 bp, Artificial Sequence
  ENSG00000242808_147 (sequence is synthesized)
tgggattacaggcatgagccagcatgcctagccagatcttttaaaatgaaatgtaggcatttacagatacaggtttacctgagtcctgttccactgaattccacacttttgatatattgt

SEQ ID NO: 898121 - DNA, 120 bp, Artificial Sequence
  ENSG00000242808_148 (sequence is synthesized)
ccacacttttgatatattgtgtttttgtcttcagttaaagaatttcccaatttcctttctgagatttcctttgacccattgattattttgaactgtgttttacacatgttccacatattt

SEQ ID NO: 898122 - DNA, 120 bp, Artificial Sequence
  ENSG00000242808_149 (sequence is synthesized)
gtgatccccaatttccttctgctatgaatttccagtttcattccattgtcatcagagaacatacttagtatgcttttaatcccttaaattaatgagacttgttttatggcctaacctgac

SEQ ID NO: 898123 - DNA, 120 bp, Artificial Sequence
  ENSG00000242808_150 (sequence is synthesized)
ctttcctggggaatgtttcatgtgcacttgagaagaatgtattatatatttttctgtgattaagtgaaatgttctttagatatctgttaggtctagttggtttatagcattgttcaagac

SEQ ID NO: 898124 - DNA, 85 bp, Artificial Sequence
  ENSG00000242808_151 (sequence is synthesized)
tgttcagtatttggaagaaagcctgacaggtttcttcggaaaagtggccatccatggaatgaatgaaatgttctctttctattcc

SEQ ID NO: 898125 - DNA, 120 bp, Artificial Sequence
  ENSG00000242808_152 (sequence is synthesized)
ccaaaatgctgggattacaggtgtgattcatgtttttatcccaaatgcttggcacagtgacttttccagttggaactcaataacgaaggaagctctggcctgaggaaagcaagttgcaat

SEQ ID NO: 898126 - DNA, 120 bp, Artificial Sequence
  ENSG00000242808_153 (sequence is synthesized)
gaagatgttggattcattttgagccaaactggtatgaggaggtcagctaaaagcatgaagaggagataacctagtcccatcaattgaattctcctaggagccagggtcagatttgagaaa

SEQ ID NO: 898127 - DNA, 120 bp, Artificial Sequence
  ENSG00000242808_154 (sequence is synthesized)
cttctggaggatccagttagctttagaagctgtagatctggttttacttagcagttctggtccattttaatttgttacatttgcgtttcactgaaattggtataaaaagtaaataaaacg

SEQ ID NO: 898128 - DNA, 120 bp, Artificial Sequence
  ENSG00000242808_155 (sequence is synthesized)
ttcaaaaaatatttattgagtacctactatgtaccagaaatgtggctaggcattgtggatattgctgtataaatcccaattcctgccctcttgaagctaacattctacttaaagaaactg

SEQ ID NO: 898129 - DNA, 120 bp, Artificial Sequence
  ENSG00000242808_156 (sequence is synthesized)
atatgaaaccattaattatataattcagtatttaattggagtcatattaaatgctacaaaggaaaaatgcaaagtactgaaaaaacacacaacagaaggatgtgatctaatatagaatat

SEQ ID NO: 898130 - DNA, 88 bp, Artificial Sequence
  ENSG00000242808_157 (sequence is synthesized)
gaggctcagggagccctcacgttctttcgcttttttacctgccaatcaaactgctacaagacaacaccctgatctggcatggacatac

SEQ ID NO: 898131 - DNA, 120 bp, Artificial Sequence
  ENSG00000242808_158 (sequence is synthesized)
taattctttctttgccttttttactctgaattcctaaatcattgtttgaaagagtattttgaccaatgcccagtttataagggttctggggcatttttgcttcttgtatgagttcagtgg

SEQ ID NO: 898132 - DNA, 120 bp, Artificial Sequence
  ENSG00000242808_159 (sequence is synthesized)
agtgttagttggctaactaattacaagggactaaaaataaaccatggtttattattttccaattttgaattacaaaattatttaaatgtctgtaatcgaagtgctacattactatgtaat

SEQ ID NO: 898133 - DNA, 120 bp, Artificial Sequence
  ENSG00000242808_160 (sequence is synthesized)
gaaattacaatacagcttaatgatattaggaaactgcatgcaaaaaaatatttgtacacaaggtggtgatgttagcaaccaactacagtacttttattctgctaaaaaacacaataaata

SEQ ID NO: 898134 - DNA, 120 bp, Artificial Sequence
  ENSG00000242808_161 (sequence is synthesized)
acaacagattactttccccaagtgatccccaaagggcatctttagttgttcatataatgatagcatgtaagggcacagagccacatggaaaacctgtcagcatatgtcattagagtagca

SEQ ID NO: 898135 - DNA, 120 bp, Artificial Sequence
  ENSG00000242808_162 (sequence is synthesized)
tcggaaaagtggccatccatggaatgaatgaaatgttctctttctattccagtaatttcttgatccccttcctaagtattgttctgagttcctgggagaagttcagctatcctaattcac

SEQ ID NO: 898136 - DNA, 120 bp, Artificial Sequence
  ENSG00000242808_163 (sequence is synthesized)
caattgagttgcataccaaaccactggcaccttttcttgtgaaataccatttttatttgaaagaataattggcaaacaaactatggttattcagacttgcattttttttaatttaattaa

SEQ ID NO: 898137 - DNA, 120 bp, Artificial Sequence
  ENSG00000242808_164 (sequence is synthesized)
aaacaaaatgaatgtgtaatcttgagaaaaaaatgacagcattattgacagtaataaattttaagctttcaaatagaaattaggattttggaaaacttatatccaccactgtgagtttca

SEQ ID NO: 898138 - DNA, 120 bp, Artificial Sequence
  ENSG00000242808_165 (sequence is synthesized)
tatcttcccaatacttaagcacttttctgatgagatcggtgttattattaacaaacatgatttttaaatattgtatgcgatatgcattactcagcgaaccaatattttctaaatgacaaa

SEQ ID NO: 898139 - DNA, 120 bp, Artificial Sequence
  ENSG00000242808_166 (sequence is synthesized)
attgcaaataacctttaagaaactaccacttgtcaatctttggtgcagtatcaaagaaaaatatccacaggtatctgcaaaggctgttaaaatactcctcacttttccaactatatgtct

SEQ ID NO: 898140 - DNA, 120 bp, Artificial Sequence
  ENSG00000242808_167 (sequence is synthesized)
gtgtgaagccggattttctagatatacttcaatcaaaacaacatttcacacgagattgaatgctgaagcaaatatgagaatccagctgtcttctattaagccagacattaaagagatttg

SEQ ID NO: 898141 - DNA, 120 bp, Artificial Sequence
  ENSG00000242808_168 (sequence is synthesized)
tttgtacatgtgtaaaatgatgacgctcttctcactcaatgtttatgttgtaaaagcattatttttcatttaaaaatgttaatattttatggctttatgattatttttaattattaaata

SEQ ID NO: 898142 - DNA, 120 bp, Artificial Sequence
  ENSG00000242808_169 (sequence is synthesized)
agttttctgttttaatttctaatatggtaaataacaaaagcttttgagatcctcaataattttttttttttgagacaagctctcacgctgttacccaggctggagtgcagcagtgcaatc

SEQ ID NO: 898143 - DNA, 79 bp, Artificial Sequence
  ENSG00000242808_170 (sequence is synthesized)
ctcccacctcagcctcctcaggagccaggacctttgtagagatagggttttgctctgttgtccaggctggtcttgaact

SEQ ID NO: 898144 - DNA, 82 bp, Artificial Sequence
  ENSG00000242808_171 (sequence is synthesized)
caccacacccagctaatttttgaattttttttgtagagatagggttttgctggtccacctgcctcagtctcccaaagtgctg

SEQ ID NO: 898145 - DNA, 120 bp, Artificial Sequence
  ENSG00000242808_172 (sequence is synthesized)
atcctcaataattttaagagtataaaagggtcctgaaaaaaaatgtttgagagctgctgaaatagagtttatttctcagataactgaaacttcagaataatcatacaggccatgaaaaca

SEQ ID NO: 898146 - DNA, 120 bp, Artificial Sequence
  ENSG00000242808_173 (sequence is synthesized)
ccctctatatttgccaggcatataactataatttgacctttggctaaaataccttgattctctcttaggaaaaaataagagtacaggagacacccccaaaaatgcatagtacaagaaaaa

SEQ ID NO: 898147 - DNA, 120 bp, Artificial Sequence
  ENSG00000242808_174 (sequence is synthesized)
gacacccccaaaaatgcatagtacaagaaaaatgttttattttttttaattacaaaatgggtccaggcatgatggctcacgcctgtaatccatgcactttgggaggccgaggcgagcgga

SEQ ID NO: 898148 - DNA, 68 bp, Artificial Sequence
  ENSG00000242808_175 (sequence is synthesized)
aaaaatgttgaatatcaacaatgggtttcagtgctgtattgttgagttttgtatgaactaatctagct

SEQ ID NO: 898149 - DNA, 120 bp, Artificial Sequence
  ENSG00000242808_176 (sequence is synthesized)
ctctaatagtctatctaatgacttgatgtacagacagtctctgacttacaattgtttaacttagagtttttgactttacaagggtgagaaagcatgtgtattcagtagaacccacacttt

SEQ ID NO: 898150 - DNA, 120 bp, Artificial Sequence
  ENSG00000242808_177 (sequence is synthesized)
gctaagttttcttgttttatataccacacaatcttcctcacacatttatagttttaattcatagtaataatgttttctagagacctttctatttatgcctgaaatgaaattctcatataa

SEQ ID NO: 898151 - DNA, 120 bp, Artificial Sequence
  ENSG00000242808_178 (sequence is synthesized)
attatgtgagcttatttcttcaaaatgaatatccagagagaggcaagaattattctgacattattaaactgcatttttaatgcagtttaagtgacatttcttataatttaatcaagcatt

SEQ ID NO: 898152 - DNA, 120 bp, Artificial Sequence
  ENSG00000242808_179 (sequence is synthesized)
ataattaaaataacaaagctttgattagagactttttttttcatttgggaaagtgaaaagttcatttttaccttcctaaaaataagacagacatatgctatctgaagacatgataccttg

SEQ ID NO: 898153 - DNA, 120 bp, Artificial Sequence
  ENSG00000242808_180 (sequence is synthesized)
gattagagtacatgccacaagtattttttaaaacatagatgcagcattggcatttctgagtaactacagtgcatattttaaatatataaatgccttagaatgaagcaatatggggcagaa

SEQ ID NO: 898154 - DNA, 120 bp, Artificial Sequence
  ENSG00000242808_181 (sequence is synthesized)
ttagttctgaaatctctgaggtagcttgaacagtatttgcattagggctggcactgctaaagcaagcagatcctgggaatttcatgtaggcaaacatgagatccttgtttctggagacaa

SEQ ID NO: 898155 - DNA, 120 bp, Artificial Sequence
  ENSG00000242808_182 (sequence is synthesized)
tgattaaatttcaagtcaattgacctcaacatgatagtacataattctcacttgcctaccaaatggcctgagttctcattttgaccctgattctgacacctgcgtttttaatgtttggtg

SEQ ID NO: 898156 - DNA, 120 bp, Artificial Sequence
  ENSG00000242808_183 (sequence is synthesized)
tagctaaagctatggttgctcttttgtttagaaataaagtgggtagagaacagttctaagtaaataacaaatggtagccagccgaatgagtctttaatacagcgctcaacgtgttcgatt

SEQ ID NO: 898157 - DNA, 120 bp, Artificial Sequence
  ENSG00000242808_184 (sequence is synthesized)
tttttaatgcattaactctgagttcatgtaaattattattcaatcttttctttttaaacagtatggatttatgggtaacaatttactaactatggatacacagtaaatccaaatcagtga

SEQ ID NO: 898158 - DNA, 120 bp, Artificial Sequence
  ENSG00000242808_185 (sequence is synthesized)
attacaaataaggaaaggatgtgagaattttgatgttaagtgctttcaaattaactttgattatgtaacatatcataggcgaaatatgccttgcacttcaattatttttgagccctagga

SEQ ID NO: 898159 - DNA, 120 bp, Artificial Sequence
  ENSG00000242808_186 (sequence is synthesized)
atgaaatagcagcattgtttttcttccttagtataaatagaacaaaagtctccttaacttaagcaagatgaccgtatttgagtttgggagacaaacctttatcttttcccaaaagcaaaa

SEQ ID NO: 898160 - DNA, 120 bp, Artificial Sequence
  ENSG00000242808_187 (sequence is synthesized)
cccttgcaagctgcaccaggaatgtgggctgccattttcatgtccactgcctgactggggaagtgggagatggtagatgggttaaaatgctacgacactcttttatcaaagtttagcaac

SEQ ID NO: 898161 - DNA, 120 bp, Artificial Sequence
  ENSG00000242808_188 (sequence is synthesized)
ttctttctgtttaagttttcccatcattgttgtaagttttttattagattccagagttctgaaaaagttgattctaacatttttttggcttaattgttactttaatggaaggactgagtt

SEQ ID NO: 898162 - DNA, 120 bp, Artificial Sequence
  ENSG00000242808_189 (sequence is synthesized)
ttagagttccctactctgccattttttgtaatatcagtcctgttatttatttggaagatattgatttcttttgttttatcaagtggttattttgactcagctcaaactaaaaagttggcc

SEQ ID NO: 898163 - DNA, 120 bp, Artificial Sequence
  ENSG00000242808_190 (sequence is synthesized)
ttcctgtggagaatgatagctttaatttcagtttgttattttatcttatctggtctggctgacatttgtcctgtacaaacatggtataaaagtcagccagagatttgggcagagtttata

SEQ ID NO: 898164 - DNA, 120 bp, Artificial Sequence
  ENSG00000242808_191 (sequence is synthesized)
tgttttctttctgggatgtcttttactctgcaaatcttgtggttaccttgatgcccagagtgggaaagtccatggagaaagtagctggtttcagtttttagttatccaaatgtcatgaac

SEQ ID NO: 898165 - DNA, 120 bp, Artificial Sequence
  ENSG00000242808_192 (sequence is synthesized)
ttgggcctcggttttttgccttttaagaaaaacttattattatggtaaaatacatataaaagttaccatcttaactattttaagtgttcgttggtattaaatacattcataatgttgtgc

SEQ ID NO: 898166 - DNA, 120 bp, Artificial Sequence
  ENSG00000242808_193 (sequence is synthesized)
aaccatcaccatcttccatctccagaactcttttcatcttaacaaactgaaactctctatccattagataataactcccttccctccagccccttgcaagcaccattctactactaatgc

SEQ ID NO: 898167 - DNA, 120 bp, Artificial Sequence
  ENSG00000242808_194 (sequence is synthesized)
tgctatgaacatgggtatacaaatatctatttgagaacctgctttcaatattttgaacatatacccagaactgaaattgctgcatcatatggtaattctatttttaattattttaaggaa

SEQ ID NO: 898168 - DNA, 120 bp, Artificial Sequence
  ENSG00000242808_195 (sequence is synthesized)
tcaccatactatttcccacagctgcaataccatttttggtttttaacaacattgcataagggttccagtttttctacatccttgccaacacctattattttcttttttttttttataata

SEQ ID NO: 898169 - DNA, 120 bp, Artificial Sequence
  ENSG00000242808_196 (sequence is synthesized)
gccatcttaatgagtataaggtgatatctcattgtagcttttatttgcatttctctaatcattaatgaggttgaatcttcttatgtgcttattgcctctttgtatatctctgtggaaaaa

SEQ ID NO: 898170 - DNA, 120 bp, Artificial Sequence
  ENSG00000242808_197 (sequence is synthesized)
ttctcctgcctcaggctcctgagtagctgagatgacaagctcccaccaccatgctcagctaatttatccaacttagaaataatgtttcattcaagataaggctcgtggcttaggagattg

SEQ ID NO: 898171 - DNA, 120 bp, Artificial Sequence
  ENSG00000242808_198 (sequence is synthesized)
gctgtagtgtactggcctagctctaaaactttgcagtacatcacttatttttaactttcactttttttctcttttcttcttttggagaaagaaagcctgacaggtttcttcggaaaagtg

SEQ ID NO: 898172 - DNA, 120 bp, Artificial Sequence
  ENSG00000242808_199 (sequence is synthesized)
tcacgttctttcgcttttttacctgccaatcaaactgctacaagacaacaccctgatctggcatggacatagtcttgctgtgatgcccaggctgctggagtgcaatggtgtgatctctgc

SEQ ID NO: 898173 - DNA, 120 bp, Artificial Sequence
  ENSG00000242808_200 (sequence is synthesized)
gaggggaaaggcatagagaaaaaggggagaagacactcttgcaaaagaagggagaaacagaagcaatagctccttacatttcctcagaaagggagagtgagaaagcttgattattttcta

SEQ ID NO: 898174 - DNA, 120 bp, Artificial Sequence
  ENSG00000242808_201 (sequence is synthesized)
ggaaatggtatgtagaaaggtttggcaggaggtgagtttatgagggaatttgaaagtattaaagggaaaattacttctctgaaaaagcaagaagagtacagagacacaagagccaaggag

SEQ ID NO: 898175 - DNA, 120 bp, Artificial Sequence
  ENSG00000242808_202 (sequence is synthesized)
gccgaatggatagctcaactgttcacaagtgagtgagcccaaaatgatgagaattgccagggcagcaggcctaccccataaaaagcctttttaactgaaaatgtttttagtttccccaga

SEQ ID NO: 898176 - DNA, 120 bp, Artificial Sequence
  ENSG00000242808_203 (sequence is synthesized)
gaaagagggaggggtgaggaaagggccaggacagttccctcagtgccaccactgcgggcaaggacagttccctcagtgccaccactgcgcctggagagatccccgcggccctgccgctgg

SEQ ID NO: 898177 - DNA, 120 bp, Artificial Sequence
  ENSG00000242808_204 (sequence is synthesized)
ctgattctcccctgtgccttgacttgctgaaacatctctctggggaaaattactccctacttgcttacatgtgtgtattaaaaaacacatgtagccatacacatgtttcatcacggcaac

SEQ ID NO: 898178 - DNA, 120 bp, Artificial Sequence
  ENSG00000242808_205 (sequence is synthesized)
aaaaaatatcaacattctagccccaggagcaaaacgtatcaatcattcgcctaaatattgttcagtagatgggggcgggaataggtagacctcctaggagagcggtcacaagtcccctct

SEQ ID NO: 898179 - DNA, 120 bp, Artificial Sequence
  ENSG00000242808_206 (sequence is synthesized)
cctccgcatggacaccaggaatgcggggtctggcggtgctgggcgcagggcgagaagatttgatgtgcaggatccaacttagaaataatgtttcattcaagataaggctcgtggcttagg

SEQ ID NO: 898180 - DNA, 120 bp, Artificial Sequence
  ENSG00000242808_207 (sequence is synthesized)
ataatcaaactttacctttacgtagaactaaaagaagcattccatgctactttccaacaacgtgtaacattttaaaacaagttcacttaccaaaagggagacaaactgaaagaagtaaca

SEQ ID NO: 898181 - DNA, 120 bp, Artificial Sequence
  ENSG00000242808_208 (sequence is synthesized)
caaaaatacaaatgcaaaattgcttttttctagaaatggtctaaaatttttattgtgagagaaagaataacagggaacacatttgtttgtttcctttgggacctaagacaaacgtattga

SEQ ID NO: 898182 - DNA, 120 bp, Artificial Sequence
  ENSG00000242808_209 (sequence is synthesized)
aaaggacaaatcacaaaatagagaataactgctaaagagtaaaattatgtttacaagtagtaaagattcaagaattcagcccttaatacataagtttccattgactcctatttagatata

SEQ ID NO: 898183 - DNA, 120 bp, Artificial Sequence
  ENSG00000242808_210 (sequence is synthesized)
tctaagtgtaaaattgtctctgtagctctaataaaatatacctactttccagacagctttccgtctgaaaacttttgcctcccaagcttccccctgcctttacagttaagtttcctgatt

SEQ ID NO: 898184 - DNA, 120 bp, Artificial Sequence
  ENSG00000242808_211 (sequence is synthesized)
ccaatcctaactacaaccttggtccactgaggacaatatctttccctctattcatgttccttgtgcacaaattcaagtttttatgtttctattagtataattcagagcaattaaaaattg

SEQ ID NO: 898185 - DNA, 120 bp, Artificial Sequence
  ENSG00000242808_212 (sequence is synthesized)
aagctgcaaaaataagtcacaaacattatttctcatgaaatatttgaccttatcaattctaaaatataaattaatacaagctaacattaaaaccagctcatatttcttgtaaagtggtac

SEQ ID NO: 898186 - DNA, 120 bp, Artificial Sequence
  ENSG00000242808_213 (sequence is synthesized)
ataatgacctctcaggcataattaattaattttattatatttatccctaaaattcacatatttgttatagtgacatgtatttattctcagatacttttttaaagtaaatgatgtcatcag

SEQ ID NO: 898187 - DNA, 120 bp, Artificial Sequence
  ENSG00000242808_214 (sequence is synthesized)
tcagcaggaacacagaacttgttggctgcaagatagaaagcatatatgccatgaaccaaaaaggtaggaaggtgtattttcaattttaaggttcttctcctaagatgaaaagagctgcaa

SEQ ID NO: 898188 - DNA, 120 bp, Artificial Sequence
  ENSG00000242808_215 (sequence is synthesized)
ctgtttttgcaagtaagaaagcaaaatatctgttcttgaattatctaaggatgagtcagaaacttaaagccgaagaaaagtaataaataatgacaacagatgtttgtaaacgtgtgctcc

SEQ ID NO: 898189 - DNA, 120 bp, Artificial Sequence
  ENSG00000242808_216 (sequence is synthesized)
cctgttcagtgtttgtatgtgttgttttgccttgatgtgctgtcagcagcctctcacctgggagtagtgatatcttatcaaagcccaaacagttcctcttcacaacagacagataatagt

SEQ ID NO: 898190 - DNA, 120 bp, Artificial Sequence
  ENSG00000242808_217 (sequence is synthesized)
ccctttcaatttatcatactggaagtctaaaagaaccatgggaacgactggtcaggtgacagcttgatggacagtttgacaccccttaaagcatcatgggaaatggttgtcacctgattt

SEQ ID NO: 898191 - DNA, 120 bp, Artificial Sequence
  ENSG00000242808_218 (sequence is synthesized)
tcagagcgaccagggagataaccttcagaatgatgagggaaacaaaaatctgaatatgtgtataagatccagtgccagcatcagtgctcacttaagtgataataagtatgaatttagatg

SEQ ID NO: 898192 - DNA, 120 bp, Artificial Sequence
  ENSG00000242808_219 (sequence is synthesized)
actcaaaatgttgttatcaaacctgaggggttttccaagtccagaagtgcccatcatctctttagatgccttttatatttttattcaaatgtcatttcaaaaatatatacataatataag

SEQ ID NO: 898193 - DNA, 120 bp, Artificial Sequence
  ENSG00000242808_220 (sequence is synthesized)
gctttcattttaaagagacacaatcaaacgtactaaatatttaaccacatgttaaatatattagctgaccactaatattctccagatttcaagtctgctttccttttgacaaactcctcg

SEQ ID NO: 898194 - DNA, 120 bp, Artificial Sequence
  ENSG00000242808_221 (sequence is synthesized)
tataccatatcctaaatatagtctgcataccgcagttctaattaagaaggctattataaaaaaaatcatatagatcaaattttacaggcgggactaactcagactcatgaagatcggtgt

SEQ ID NO: 898195 - DNA, 120 bp, Artificial Sequence
  ENSG00000242808_222 (sequence is synthesized)
aaaatacactaatgctaacaatagctgatgagctaaaaaataaaaataaaaatacgccgggcacggtggcccacacctggaatcccagcactttgggacgacgaggcaggcggatcacaa

SEQ ID NO: 898196 - DNA, 120 bp, Artificial Sequence
  ENSG00000242808_223 (sequence is synthesized)
ggggagagtaaagcctcatttttttttcagtcactctatctggggttgcttatctcctctcccccaaccctctgcctcaccccaccaggaccaaatagaattgaaacttcattgcctttg

SEQ ID NO: 898197 - DNA, 120 bp, Artificial Sequence
  ENSG00000242808_224 (sequence is synthesized)
cctgtactgagcctaaaaactcagggtttgataaggttactgcaccaatgatacaattgtagatttttaaaagcctcctcaaagagacagatgtttgggctgattaagaattgaggagga

SEQ ID NO: 898198 - DNA, 120 bp, Artificial Sequence
  ENSG00000242808_225 (sequence is synthesized)
tttaccttaatattacacctggattaaacagaaaacagtgctgtattttgaagagcgccgaatatgtatgcattttgagaaacccaatctcaccctttccgggttcccaagaactaaaac

SEQ ID NO: 898199 - DNA, 120 bp, Artificial Sequence
  ENSG00000242808_226 (sequence is synthesized)
aagccataacttgagagaaaaaggagaaccttcggggggcaggaaggttgattggaaataacttaaggaaagtctgcagaattcttttttttacaacttttctgagtttccagtgggtat

SEQ ID NO: 898200 - DNA, 120 bp, Artificial Sequence
  ENSG00000242808_227 (sequence is synthesized)
atttagtgtgagtttgacagtaacaggctagggagggcagagattggagaaattgggggtcgggggagtgattatgggaagaaggttagtaaggaacaaaacaatgcaccgttttgtaaa

SEQ ID NO: 898201 - DNA, 120 bp, Artificial Sequence
  ENSG00000242808_228 (sequence is synthesized)
gataataaatggaacgtggctggtagatactattcagtacattttcttagggtgagtaagggtagaccaggggaggagggggcggagagagtgttacagaagaaagaaaataagtaaccc

SEQ ID NO: 898202 - DNA, 120 bp, Artificial Sequence
  ENSG00000242808_229 (sequence is synthesized)
atgtctgacaccctgcacaaaattgcaaaagcagcagtgcccaaaagaaaaacaatcaaaagaaagcacagggttttcatctccaagaatgctatctttaggacaatctgcatcatgaat

SEQ ID NO: 898203 - DNA, 120 bp, Artificial Sequence
  ENSG00000242808_230 (sequence is synthesized)
ttagttgtgatgtgtgttgtgaatcttctaaaggatcctttatttatctacaccttaatgtagctttaaatatctgctttatttctatgtataatcttaacaaaagtagttacattacca

SEQ ID NO: 898204 - DNA, 120 bp, Artificial Sequence
  ENSG00000242808_231 (sequence is synthesized)
tgcctggtactgatttttacatctgactttttgctgttacatttcaagaaggttaatattgcttttgtaaccctgtcatgagtaatgcattttcccagtaaacatgtcataatgttaaag

SEQ ID NO: 898205 - DNA, 120 bp, Artificial Sequence
  ENSG00000242808_232 (sequence is synthesized)
gctgttcaagaagcagtgtttctgttgaaacagttttgtatttatttctctattgtttattatccataatatagtgtaaggctttgaaaagaacacgcatatttatgtaattaacacttt

SEQ ID NO: 898206 - DNA, 120 bp, Artificial Sequence
  ENSG00000242808_233 (sequence is synthesized)
ttgttattaggaaagccttcccattaaaaactaagagagtctaagaaaactatataaatgggcaacttttcaggaaaaatatttgcattcgattttaatttgccatcaagcttatatgtt

SEQ ID NO: 898207 - DNA, 120 bp, Artificial Sequence
  ENSG00000242808_234 (sequence is synthesized)
tttttcttattttttaatctaaaatatatgttgaaattcaaaaggtgttcaccacatgcagtgtggcagcgttcaatattctttaacagctgtatactgtgtgggtctgtatgaagttac

SEQ ID NO: 898208 - DNA, 120 bp, Artificial Sequence
  ENSG00000242808_235 (sequence is synthesized)
aggggctcacaagctttataacggacacaaacattcttttctatttcagtcttaactcctagaagcaggagtaagacttggaaagaaccaagcagcctcctgccccactgagaccagagt

SEQ ID NO: 898209 - DNA, 120 bp, Artificial Sequence
  ENSG00000242808_236 (sequence is synthesized)
acctctgctattatctgctgtgtatattagagttccattaagatttactcatgaaaatcccatgctagaaagaaaaagtgaaacattactgactgaggctatcttatagaaaaggaaagc

SEQ ID NO: 898210 - DNA, 120 bp, Artificial Sequence
  ENSG00000242808_237 (sequence is synthesized)
agggtttactcaaggttgtacactgagtgagtgacagtgtcaattttatcacccagtttcttgtctcctggtcccaggcttactctcctaaccagacacagtcatggctctgtatgtcca

SEQ ID NO: 898211 - DNA, 120 bp, Artificial Sequence
  ENSG00000242808_238 (sequence is synthesized)
ggcctcctaaactatattgctaaaagctcacaccaagagattcacagccatatgtttaaaatcaggatgcttcctgaagatatagtatctaggtggtaaatggaattttttaacattata

SEQ ID NO: 898212 - DNA, 120 bp, Artificial Sequence
  ENSG00000242808_239 (sequence is synthesized)
gaccaaaatcaagccctttatttggcaatattattcattctggctgcattgttgtagctgttaggtaaaagattgattcctcttacttcttagtaaagtaatattttggaggtttcttaa

SEQ ID NO: 898213 - DNA, 120 bp, Artificial Sequence
  ENSG00000242808_240 (sequence is synthesized)
tggtatttctaattgtggtaaaaaaataaaatttactaccctcaccatttttaacggtatagttcagtaatgttaacttaagtggtattttttacagtagaaaaataattagtacttaaa

SEQ ID NO: 898214 - DNA, 120 bp, Artificial Sequence
  ENSG00000242808_241 (sequence is synthesized)
tccaaaagaaagaaattttttttaaaaaactgaattaagatgctaatttttcaaaacatgttttatggaataccatccctataagctatgccagctaaaaaaaaaataacacggtcaaat

SEQ ID NO: 898215 - DNA, 120 bp, Artificial Sequence
  ENSG00000227481_0 (sequence is synthesized)
agatgcagggcagagccacgtgaggctcaggagggtgtaaggaagctgttttgacccaaaacaagaagagaagactggaacccagacaaaagggccttggtcctcatgggagaaaggaac

SEQ ID NO: 898216 - DNA, 120 bp, Artificial Sequence
  ENSG00000227481_1 (sequence is synthesized)
tgagatgtgacattggcccttggagcagaggccacaggccctgctctgcccttgaggagctgccagtggactgtcaaggcgataagtgccatgcacaagaacaaggaactatgggggccc

SEQ ID NO: 898217 - DNA, 120 bp, Artificial Sequence
  ENSG00000227481_2 (sequence is synthesized)
aacagcagggtttgggggctcctctccgagggcaaacatcagcagaagctgcaagctgtcatccctgacttgacatccagcttggtcgtcatgaaggtgccagacatttcttggtagtgg

SEQ ID NO: 898218 - DNA, 120 bp, Artificial Sequence
  ENSG00000227481_3 (sequence is synthesized)
attgtaatcatttcctgggatgaccatgacaaagtaccagactgtgtgacttccacaacagaaatatattttctcaccattctgaaggctggacgtctgagatcagggtgtcaacttctt

SEQ ID NO: 898219 - DNA, 120 bp, Artificial Sequence
  ENSG00000227487_0 (sequence is synthesized)
ctctctgccttatcccagccccttggttgacggtcgcctcagagaagccctggatgaggctgaagacacatctaacaaggaggacacagcacagcacaaatgcacaccaccacaggacac

SEQ ID NO: 898220 - DNA, 120 bp, Artificial Sequence
  ENSG00000227487_1 (sequence is synthesized)
aacccgatgacagcagacaaagagaggccgtactcggtctttgctggcgcaggcgaaacagagctgtctgcagtggaaggagcaagctcaggggcttgtccactggccccagcggcggga

SEQ ID NO: 898221 - DNA, 120 bp, Artificial Sequence
  ENSG00000227487_2 (sequence is synthesized)
gcaggagagcccagggctgcaaaaacatcctttgcaagggttccaaatggagaacgtgcaatgaaaggaaaggcaccagctgatggcgcagggtggtgcagctgctgggtccctgggctg

SEQ ID NO: 898222 - DNA, 120 bp, Artificial Sequence
  ENSG00000227487_3 (sequence is synthesized)
gagcagagcccaaacctcagcaaggtggacaggtctgcactcacgagaaggcggccttgccctcctccatgtccttgcccttggccccgggcccggcttttccacacaggttgaccgcaa

SEQ ID NO: 898223 - DNA, 120 bp, Artificial Sequence
  ENSG00000227487_4 (sequence is synthesized)
gcacatgaacaggccacacttgttcaggaagtagcaggtgatgtccacaaccaccaggagcaggacgaagatgacgatgaggatgcccacgatggccccggtgctcaggcctgaggtggg

SEQ ID NO: 898224 - DNA, 120 bp, Artificial Sequence
  ENSG00000227487_5 (sequence is synthesized)
gctgccgttggcttgagtgggagagagatggctggtggttaacagactgagatgcgagacctccagaccctgccagcaaaagcccctgcgggtggggagggcccagaggacagagtcatg

SEQ ID NO: 898225 - DNA, 120 bp, Artificial Sequence
  ENSG00000227487_6 (sequence is synthesized)
gcattcatgcccagagtgacaccttcctggggaccttctatgccccagaattgagaaaacagggtctttctataccttccagagggagggatgacaacatcatctcacagattggggaac

SEQ ID NO: 898226 - DNA, 120 bp, Artificial Sequence
  ENSG00000227487_7 (sequence is synthesized)
aggggtgagcctggtcagctggcctcccgtgagtcctgggagcagactgagccccgcctgtctgagaacaccggataatgaggcagttggagggcgctgctgtgtttcccctggaccagg

SEQ ID NO: 898227 - DNA, 120 bp, Artificial Sequence
  ENSG00000227487_8 (sequence is synthesized)
gcaaaaggctttgcagcacaggcaggcagtgatcactgatttcaggcggggctgtggctcctcaagtgctcagggataggggcccaaaatggggtggtggagggttcctggggctttctt

SEQ ID NO: 898228 - DNA, 120 bp, Artificial Sequence
  ENSG00000227487_9 (sequence is synthesized)
tctttccctctttaggaatgaccccaaaggagccctgcattagagcacactgggttcatagtttaccctcctcactgcaccccaggaagacaagtgaagcctgggtgactccagagacat

SEQ ID NO: 898229 - DNA, 120 bp, Artificial Sequence
  ENSG00000227487_10 (sequence is synthesized)
ggaggcctccccaggccatgggcaaggtgaaaggtctgggaatactcaccatctaggagctcaggcctgcttggaccagacttcaggaaaacctgaagtgagtgcagactcactcagagg

SEQ ID NO: 898230 - DNA, 120 bp, Artificial Sequence
  ENSG00000227487_11 (sequence is synthesized)
tgcacacacacacaggcacactcacacgcaggataaatgcccatgcagacaggcatgcactctcacattctagcacctggcaccctggttctggctggactcactgtgaaagactcagcc

SEQ ID NO: 898231 - DNA, 120 bp, Artificial Sequence
  ENSG00000227487_12 (sequence is synthesized)
tgtgtcttacttccctggtgcccatctgcaatccccccagggtctttggctattgatggtttcacagagagacctggactcagctctctggggcccctgggagatcaacccatggttacg

SEQ ID NO: 898232 - DNA, 120 bp, Artificial Sequence
  ENSG00000227487_13 (sequence is synthesized)
attgacactagttgcctgggatggaccaattgacctcttggtggttcccatcagtgtctgggagacagtggtcatgatgcaggaagcaaggacccatgtggagctctgccattaagtcga

SEQ ID NO: 898233 - DNA, 120 bp, Artificial Sequence
  ENSG00000227487_14 (sequence is synthesized)
tgtgggaacaatcaccctcgactgaaatatgggcacttctaattcatctttcctccagaacaacctgcttccataactggcagccctgccccaccagtagactatgtctaaagcttcctg

SEQ ID NO: 898234 - DNA, 120 bp, Artificial Sequence
  ENSG00000227487_15 (sequence is synthesized)
tgctctcagggccaactgaagccacccaggactgcagactgaagatgggaactgtagccagcactacctggggctcaccccaccagccaccccactcccaacccagctcgctaggctttg

SEQ ID NO: 898235 - DNA, 120 bp, Artificial Sequence
  ENSG00000227487_16 (sequence is synthesized)
ccaagcaccaggccaggctcagcagcttgcgagccatgtaacatgccagatagatagtggagggaacatgtaactgagtaaccagcaccagagctgggccacacattttttgtttttcat

SEQ ID NO: 898236 - DNA, 120 bp, Artificial Sequence
  ENSG00000227487_17 (sequence is synthesized)
gcagcctgtatttgcgggagggtggtggtattgatggctctgtgtgccccaggggtctctgtccaggcactctagtgcttctctggtggctgtccctctccactggtccatatttcaaac

SEQ ID NO: 898237 - DNA, 120 bp, Artificial Sequence
  ENSG00000227487_18 (sequence is synthesized)
ttcagtttggggaatgggccatcagcctagcatgccagagaggatccctcacaaatgactcctgagacccctgggtgcagctcgtacatgtttttagtccctttgggaccttggcttgcc

SEQ ID NO: 898238 - DNA, 120 bp, Artificial Sequence
  ENSG00000227487_19 (sequence is synthesized)
tcccagcccttcctcctcaggctctctggctggtccctgctgacctcgcactgaagatcctagcgcattcccccaggaaggcttgagatggcgaagaactctgcttggagaacccagctc

SEQ ID NO: 898239 - DNA, 120 bp, Artificial Sequence
  ENSG00000227487_20 (sequence is synthesized)
tggacacctgtctctgggctttggcagcaggaagctggccactggccttagccgtcagctagaatgggtcattttcttagcagccatgaatgcagaggtatttctggttagtctcataag

SEQ ID NO: 898240 - DNA, 120 bp, Artificial Sequence
  ENSG00000227487_21 (sequence is synthesized)
aacaaaaccatccacttccccagagtcctcacacattccacccaaaaagcaaaggagacacaggccttcttggtcttcaggatcccatagctgtttccctgaacagggaagaaactttag

SEQ ID NO: 898241 - DNA, 120 bp, Artificial Sequence
  ENSG00000227487_22 (sequence is synthesized)
ctccctgaagaaagatctgaaagtatttttttgatgacagtggggaatatgtctggatttttggactcaatggcactaattatatcttctgaggtttatgtgtaaatatgattttgtgaa

SEQ ID NO: 898242 - DNA, 120 bp, Artificial Sequence
  ENSG00000227487_23 (sequence is synthesized)
actaatcatatctctaaagaggaaaaataaactcctgcaaagctgctctatgtgcttgagaggacagcagctgggacaactgctctgtgctcatcagacccagctggagggcggcactgg

SEQ ID NO: 898243 - DNA, 120 bp, Artificial Sequence
  ENSG00000227487_24 (sequence is synthesized)
cactgcgcacatccaggggagggccaggcagggaaaaggcttctgaactgtggcataaacaagtagggcagcggcctcccctttcatttgaatataaaattcaaagtctttctcccggcc

SEQ ID NO: 898244 - DNA, 120 bp, Artificial Sequence
  ENSG00000227487_25 (sequence is synthesized)
taaaaggcccaccatctgctgcagactctgcccactcctctgttgggcctcatggcgtgaaccggcagcctcccttctgcctgctgaacacatccagctcaacccgctttagggccttga

SEQ ID NO: 898245 - DNA, 120 bp, Artificial Sequence
  ENSG00000227487_26 (sequence is synthesized)
tgattctgtgcctggaacactccctccagggtggctctctgttgtcctgcaggcctcagtcccagtgtcaccttctcagagaagccttatctgatctcttatctagtgtggcacctccag

SEQ ID NO: 898246 - DNA, 120 bp, Artificial Sequence
  ENSG00000227487_27 (sequence is synthesized)
ccaatacctaccatgctgctagcctgttttattctcttctaactactatctgccactttctgttcatttacatgcttatgatctagccatcccccctaggacatcccagcaggtaccctg

SEQ ID NO: 898247 - DNA, 120 bp, Artificial Sequence
  ENSG00000227487_28 (sequence is synthesized)
cctgtctctcttgtatctccccagcatctaggacaatcctgattcacagaaaatgttcaaagaatacttgttgcacaaatggatgagtgtttagtctggagacgagaatactatttccaa

SEQ ID NO: 898248 - DNA, 120 bp, Artificial Sequence
  ENSG00000227487_29 (sequence is synthesized)
atatttaaaggtgttataaccagaaggaagaagtagtcttactgtatatggcaccaatgtgtggaaattatggtggtggcagattttagctccatctgagaaaggactaataaacagggc

SEQ ID NO: 898249 - DNA, 120 bp, Artificial Sequence
  ENSG00000227487_30 (sequence is synthesized)
gaatccaacatagtgtgggctgctctgagaggtgagttccttgatgctgaaggcactcgagcagaggccagaagaccccttggcagggacgctgtaaggctgtggatgaggctcccacac

SEQ ID NO: 898250 - DNA, 120 bp, Artificial Sequence
  ENSG00000227487_31 (sequence is synthesized)
tgggcaggagcatgggtggagagtgtctcttcaaccacaagagcctgtcattccaagtcatacattctacactgcctggcacacggtacaggttccctaatgccagtctccagagtgtgg

SEQ ID NO: 898251 - DNA, 120 bp, Artificial Sequence
  ENSG00000227487_32 (sequence is synthesized)
actgagaaagactttttcctggaagaccaaaatgctcggtaggtcccatatttaatcactgatccttgtgattttatttttgcatgacaaatacctttaaactcaatatatctccacctg

SEQ ID NO: 898252 - DNA, 120 bp, Artificial Sequence
  ENSG00000227487_33 (sequence is synthesized)
tagcaaattcctagggtgtttgttaacaattcagaatctggggctccccacttttatgggatctgaatcactgggtatgaggctcaggaaacaggagttgaacaagcagcccaggtgatt

SEQ ID NO: 898253 - DNA, 120 bp, Artificial Sequence
  ENSG00000227487_34 (sequence is synthesized)
cttatgaggaccacgctcctaggtcttccctcccctgcattacaaagaggagcacgtgatcccatgatttgccaccccagggtgcactgtgctgtctcacccagtgaccctgaaaacaaa

SEQ ID NO: 898254 - DNA, 120 bp, Artificial Sequence
  ENSG00000227487_35 (sequence is synthesized)
cttgacctaaggtattgagtggatcaagagaaaacaaagagtatgccccaaaggaaaagcgaccatactgtatgccaacactgagtctaaactcctcaagcaggtgagatgctctttaag

SEQ ID NO: 898255 - DNA, 120 bp, Artificial Sequence
  ENSG00000227487_36 (sequence is synthesized)
ctaggaagagaatgtttgtggcttttacaaaaaagaggctgtgaagaagggacaggctgtgaaatgggcagcagggtattgaaggcgaaagccaacacccattccctctcagtggctatc

SEQ ID NO: 898256 - DNA, 120 bp, Artificial Sequence
  ENSG00000227487_37 (sequence is synthesized)
acagaattgtttagtccaagataactagaagaacaaaggccatctcctgcctcttgtgtaatatttcataaaaggaaaaatataaacctccatgggtctgtctttgctatggtcttccct

SEQ ID NO: 898257 - DNA, 120 bp, Artificial Sequence
  ENSG00000227487_38 (sequence is synthesized)
cagccctcccttgactaactcacctgtgcaccttggatgcaaagaaggcttctggggaagagtttccccataacctcgaggtcagagctgcccaggacagggagattatgaaggtggagc

SEQ ID NO: 898258 - DNA, 120 bp, Artificial Sequence
  ENSG00000227487_39 (sequence is synthesized)
tgtccatcttctgtgattcctggcttgggaggggttggcactaaagagggaactggcttgctccaagaatgagacccacagatgcctatttttgtatgccttaatataggaacatgggtc

SEQ ID NO: 898259 - DNA, 120 bp, Artificial Sequence
  ENSG00000227487_40 (sequence is synthesized)
tcacattttataaatatccagatgggcctgagtccttgtgccatgagaccctggtgcagcagaaatgcccttttcacccccaagactcccagaagatggtcagactcttggaactgttga

SEQ ID NO: 898260 - DNA, 120 bp, Artificial Sequence
  ENSG00000227487_41 (sequence is synthesized)
gctggggttctggttcactcataagccctttacatgtctgcttgctccttcgaatcagctaaacagatggctggtctcaggggcttgcaggatgcgtctgagttaagtgtgattatgaat

SEQ ID NO: 898261 - DNA, 120 bp, Artificial Sequence
  ENSG00000227487_42 (sequence is synthesized)
agaatacagtttgcaaagagaatcttctctcagattccctctccacaagctcactctgtgcagcctctgttagggatagtataaaggctgctgtgtcatcaggtgaccttgccacagagt

SEQ ID NO: 898262 - DNA, 120 bp, Artificial Sequence
  ENSG00000227487_43 (sequence is synthesized)
tgtgcatctgttggctcagagtgtggccccatccccatagtgaccacctccccagttctgcaaaggcattttcccctcccactgcctgctggggactccaaggcagcaatgcctcttaac

SEQ ID NO: 898263 - DNA, 120 bp, Artificial Sequence
  ENSG00000227487_44 (sequence is synthesized)
agctcttaggatgcctgggaaaaagagattgctccccgttaggaagaaaaagtatttcattcaccaggctactatttctctaggtaatagtctatccaggtacatgagaggcggagggaa

SEQ ID NO: 898264 - DNA, 120 bp, Artificial Sequence
  ENSG00000227487_45 (sequence is synthesized)
agggtctttgctgctttgtcagacacaactattgaataaaatcaagccacgctggtgagttcacatgaactgttatttcctttaataatgcaaaggtgtaaacttcataaagccctcact

SEQ ID NO: 898265 - DNA, 120 bp, Artificial Sequence
  ENSG00000227487_46 (sequence is synthesized)
agtggcctgactgcaagggctcccccagggaaaacagaagccgctgctaggatgataaggataaaacataattaacatggcctaattagccagcaggcggctgctcctggggcccagctg

SEQ ID NO: 898266 - DNA, 120 bp, Artificial Sequence
  ENSG00000227484_0 (sequence is synthesized)
cttgaactcgctgtcatggatggtgaagtagggacggaagtcgcagcagaacctgaggggctgcaggcagctgtgggcagaggcagcagggagcaggtgaggcaggggcagcccaggcac

SEQ ID NO: 898267 - DNA, 120 bp, Artificial Sequence
  ENSG00000227484_1 (sequence is synthesized)
agccgcgatggtccagcttccccagccgggaccgggccaaggcgatacctggtcaaggccagcaccatctccgaggacacgtcgggcgagggtgccaggactagcaggggctccccgagg

SEQ ID NO: 898268 - DNA, 120 bp, Artificial Sequence
  ENSG00000227484_2 (sequence is synthesized)
ctggggccgggcaggaaggtcggggaggtcaggcaggggctgagactcctggctctggccccgctctcccaccgttcacccaggctggcccaggcactggtgaacacagcacgctgctcc

SEQ ID NO: 898269 - DNA, 120 bp, Artificial Sequence
  ENSG00000227484_3 (sequence is synthesized)
agggtgaagacagatctatctgaagatgtgtctcggggtgaaccaaggaagcaggtgtgggaccacccggcccaggagcaggactcaatcgggtgaagcccagctgtttcagctccacct

SEQ ID NO: 898270 - DNA, 66 bp, Artificial Sequence
  ENSG00000228939_0 (sequence is synthesized)
gggcatttgtaagttcccagggaaacctaatcacattgtatagtattttttaatgaagaaacacta

SEQ ID NO: 898271 - DNA, 120 bp, Artificial Sequence
  ENSG00000228939_1 (sequence is synthesized)
atgaatagcttgagtccagaagctggtcttgaacccctggcctcaagagatcctctcacttcagcctcccatagcatgtgggattataggtgtgagctactgtgcccagctgttgttttc

SEQ ID NO: 898272 - DNA, 120 bp, Artificial Sequence
  ENSG00000228939_2 (sequence is synthesized)
gtggtaagagggagcatttgttttctagagcctgcagcatgtgtgggtcagttgaaaatgtataaaaattttgagttacgcacggtggcttgtgcctgtaatcccaatactttgggaggc

SEQ ID NO: 898273 - DNA, 87 bp, Artificial Sequence
  ENSG00000228939_3 (sequence is synthesized)
cttgtgccaggagtttacctaaaaatatgtaaaaaaaattttaaaataaaaattttgaaatgcaatttgtgtcttaaaattctgcct

SEQ ID NO: 898274 - DNA, 120 bp, Artificial Sequence
  ENSG00000245468_0 (sequence is synthesized)
ctctccgccattaactcggagcccggcgcagtggaaagcgggccaagaagcagaggtccaggttccaactcttgattctatcacaaaacactgcacccgaggcagccaggcagcttccga

SEQ ID NO: 898275 - DNA, 120 bp, Artificial Sequence
  ENSG00000245468_1 (sequence is synthesized)
agacctcttggatgcagcaacatcagaggggtgattacccccaattgccaaagaggtttccagcgctggaaggaaatttggagatcaaggccgagttggcctcagccaagtgaaatggga

SEQ ID NO: 898276 - DNA, 120 bp, Artificial Sequence
  ENSG00000245468_2 (sequence is synthesized)
atcaggaccattacaaagaaattcaattaaaataaaagacacatcataaactttgactggaaaactccaaatggaattaatattacgttggtcaaattacctagataattgctttcattt

SEQ ID NO: 898277 - DNA, 120 bp, Artificial Sequence
  ENSG00000245468_3 (sequence is synthesized)
ttcattgcatcttgatagaaaggaccaagctacttaaaaatgagtcccaaaatgtatccatttcatcttctcaatgactcctaaaaccctctccaaatgactcagatgcattagctagct

SEQ ID NO: 898278 - DNA, 120 bp, Artificial Sequence
  ENSG00000245468_4 (sequence is synthesized)
attaccccaaaacctaacagctcaaaactacaacaaacatcctccccagcttttgatatttgctgtctttttcatttcaggcgtgggccgggtgaggatgtagtgatttcatgttgcggt

SEQ ID NO: 898279 - DNA, 120 bp, Artificial Sequence
  ENSG00000245468_5 (sequence is synthesized)
tttactttgcatcttcctaatgatcagtgcaactgaacacttcttccatgatggttgacaatttagcaaccctcttctgtgaagtatccccatctgtccatggggttgtctgtcttatcc

SEQ ID NO: 898280 - DNA, 120 bp, Artificial Sequence
  ENSG00000245468_6 (sequence is synthesized)
ttcataagctctagttctctgtattggctgaatacaagtcctgttggggatatacacatatattgcaactatccttcccactctcttgacagtgtctgttgatgaacagaatttcttgtt

SEQ ID NO: 898281 - DNA, 120 bp, Artificial Sequence
  ENSG00000245468_7 (sequence is synthesized)
aacagaatttcttgttttcaatacagttcaatttatcaatttctcagttagcacttttgagcactgttttaagaaatctttaggccgggtgtgatggctcacacctgtaatcccaccact

SEQ ID NO: 898282 - DNA, 70 bp, Artificial Sequence
  ENSG00000245468_8 (sequence is synthesized)
cactttgggaggccaaggcgggcagagttaggttagtgcacttctgtttagggagttaggagttagtgct

SEQ ID NO: 898283 - DNA, 120 bp, Artificial Sequence
  ENSG00000245468_9 (sequence is synthesized)
ctcggagcccggcgcagtggaaagcgggccaagaagcagaggtccaggttccaactcttgattctatcacaaaacactgcacccgaggcagccaggcagcttccgaagacctcgttttcg

SEQ ID NO: 898284 - DNA, 120 bp, Artificial Sequence
  ENSG00000245468_10 (sequence is synthesized)
tacaggcataagccaccgcacctggccaacaattttttaaggaaaagaagaaaggaaaattattgacctcagcttccaccttaactagaaaagaccaaatgaaacctaaaataaaaagaa

SEQ ID NO: 898285 - DNA, 120 bp, Artificial Sequence
  ENSG00000245468_11 (sequence is synthesized)
gaaaagaaataataaaaatcagagttgaaatcaatgaaacagagaacagaaaataatagagaacatcaatgaaacagaacgttcttgagaaaattgttaaatttataaattatagttaga

SEQ ID NO: 898286 - DNA, 120 bp, Artificial Sequence
  ENSG00000245468_12 (sequence is synthesized)
ttgatcaggaacaaaagagaaaataaaaatgaccattatcacaaatgaaatggataactttactacacattctacagatatttttaaagtctgaggcacagacctttaatataaaaacgc

SEQ ID NO: 898287 - DNA, 120 bp, Artificial Sequence
  ENSG00000245468_13 (sequence is synthesized)
cacttttgctctgttttacaaaattgaaaatcaatcccgtgccttgtccaggttgttttaggtacacgagtgtaaaactgtatggtacccactgtaatagacgaagcccagctttccatt

SEQ ID NO: 898288 - DNA, 120 bp, Artificial Sequence
  ENSG00000245468_14 (sequence is synthesized)
tgatcatgtgcttatgttttcatctatggggtccccaggacccctgcacacagtaggtgtgcagtaaacgttgagtaagtcaatagatggtggtggttggcatcgtcttcctaatgtacg

SEQ ID NO: 898289 - DNA, 120 bp, Artificial Sequence
  ENSG00000245468_15 (sequence is synthesized)
ctagactctgtagtggcacaaaagtcagcacctggaatccacgtgggtttccgtatcctccaccaaatgttcaccaagcactcctctgtgcaaggcctgaaacaacagaggagaacagag

SEQ ID NO: 898290 - DNA, 120 bp, Artificial Sequence
  ENSG00000245468_16 (sequence is synthesized)
atttggaactttgagttaataatggtagttagatgatattttggactccaagttgaccctagaatacttaagccttcggagcatgttaggatgggatgaaggcgttttgcctgcgggaag

SEQ ID NO: 898291 - DNA, 120 bp, Artificial Sequence
  ENSG00000245468_17 (sequence is synthesized)
gacatgaacttggaggaaccagagtgtggactgttatgggttgactaggaccctcaaaaacgacgttcaagtccaaaccctcactacctgtccttctgaccttatttgggaacggggctg

SEQ ID NO: 898292 - DNA, 120 bp, Artificial Sequence
  ENSG00000245468_18 (sequence is synthesized)
tgcagatgtcattagttaagatgagatcacactggagattacggtgggccctaagccaatatgaggggtgtcttcatgagcagagggaaatccgaacacaatacagggaaaaggaaaatc

SEQ ID NO: 898293 - DNA, 120 bp, Artificial Sequence
  ENSG00000245468_19 (sequence is synthesized)
caactcttgattctatcacaaaacactgcacccgaggcagccaggcagcttccgaagacctcattctcctaaacacatccattcctgtttctggcagaacttttgcaaacccatcccagt

SEQ ID NO: 898294 - DNA, 120 bp, Artificial Sequence
  ENSG00000245468_20 (sequence is synthesized)
attaactcggagcccggcgcagtggaaagcgggccaagaagcagaggtccaggttccaactcttgattctatcacaaaacactgcacccgaggcagccaggcagcttccgaagacctcgt

SEQ ID NO: 898295 - DNA, 120 bp, Artificial Sequence
  ENSG00000245468_21 (sequence is synthesized)
aagtgccccgccatttgctgggtgctggggatacagacatgaaaagaaaaataaaagactcagccctgcctccgggaactcacagtcccgctgacggtttagtcctctcctctctctggg

SEQ ID NO: 898296 - DNA, 120 bp, Artificial Sequence
  ENSG00000245468_22 (sequence is synthesized)
cctcactgcccccatctgggagattgacaggttggactgtcacgaccgtctcgccgccgctgcagagacgcccctggatcacagcgcccctgcctctgcggccctggacagggctcaggg

SEQ ID NO: 898297 - DNA, 120 bp, Artificial Sequence
  ENSG00000245468_23 (sequence is synthesized)
cccagcccctaaaattgctcagggtgaggttggatggatcaaccacagcaactgtcacctcacagcaggagacagggaaactgagtcccagagagtcaagagagtgcttacctgagacct

SEQ ID NO: 898298 - DNA, 90 bp, Artificial Sequence
  ENSG00000245468_24 (sequence is synthesized)
ctgagtcccagagagtcaagagagtgcttacctgagacctgggtaatactggaagctgtccttccatccaccaagagctcttcgccgaga

SEQ ID NO: 898299 - DNA, 120 bp, Artificial Sequence
  ENSG00000245468_25 (sequence is synthesized)
atgttggccaggctggtctcgagctcttgacctcaagtaatccacctgccttggcttcccaaagtggtggggttaccggcgtaagccactatgcccagcccaagagctctttgccttctg

SEQ ID NO: 898300 - DNA, 120 bp, Artificial Sequence
  ENSG00000245468_26 (sequence is synthesized)
agctctttgccttctgagagcagcgtcctgtggaggcagaaacaggtatctgccctcaccaagcctgacttctcaccggcttcccccaacaattgcactgcaggttccgcacgcttttcc

SEQ ID NO: 898301 - DNA, 120 bp, Artificial Sequence
  ENSG00000245468_27 (sequence is synthesized)
tgcgtgttggcatccacagcacgtgataagggctatgggatttgggcgaccctggagggtgaggaaagggaaggtgcccatgtgaggactaggcgtctggagagaggaagggagagggcc

SEQ ID NO: 898302 - DNA, 120 bp, Artificial Sequence
  ENSG00000245468_28 (sequence is synthesized)
cggcgggaggaagtgctgccccaagcggcaggacagggctctgaaaaaccacaagatgcttgtgaacagccagtgctgctgctggtccaagccgttaccctgtgcgatgcctgaggagcg

SEQ ID NO: 898303 - DNA, 120 bp, Artificial Sequence
  ENSG00000245468_29 (sequence is synthesized)
ccctgaagttttgaaaggcggaagatgagctccctgcaaggagggttttcctgcggtgggatagaggcctcgcccagagcccgagggcagcacagcacccctcgcaggccacctgtctgc

SEQ ID NO: 898304 - DNA, 120 bp, Artificial Sequence
  ENSG00000245468_30 (sequence is synthesized)
atagttcaccctcctcggcctcctctctccctcctcccaccaaggtgggccctttgttctccatctgactcaccagggctccttccccactcccaccccacaccagccctgcctcaagct

SEQ ID NO: 898305 - DNA, 120 bp, Artificial Sequence
  ENSG00000245468_31 (sequence is synthesized)
ggagggggaatgctgggggagctggggagttggtttgggtcctgcttctgagaggcgagagctccaaaggacccctccctgcccagcgtgtttcatccccagattcttagagctgaccac

SEQ ID NO: 898306 - DNA, 120 bp, Artificial Sequence
  ENSG00000245468_32 (sequence is synthesized)
ccccccccccacccacccacccacccacacacacactggctccagctgtcctcagggtcccagtgccctctggacactatgccaggacagcccctctgagtctgccagtagctaccatac

SEQ ID NO: 898307 - DNA, 120 bp, Artificial Sequence
  ENSG00000245468_33 (sequence is synthesized)
atacccctccctccttctccaagctaaatggcctctgttccctcaaaaacaaagaactaaaggcaagcactagaatgatcaagctcttagaagaagcagagggccgtgtctccaggacct

SEQ ID NO: 898308 - DNA, 120 bp, Artificial Sequence
  ENSG00000245468_34 (sequence is synthesized)
catggaggcaacagcttcttagccttgacaccaaagcatgagcaacaaaaggaagaataaataaattggatttcagcaaattcaaaacagttgtgctctaaaggacactatcaagaaaat

SEQ ID NO: 898309 - DNA, 64 bp, Artificial Sequence
  ENSG00000245468_35 (sequence is synthesized)
ttcaaaacagttgtgctctaaaggacactatcaagagcggttcgatcacttgaggccaggagtt

SEQ ID NO: 898310 - DNA, 120 bp, Artificial Sequence
  ENSG00000245466_0 (sequence is synthesized)
gtgcgcgcagctgtgcaggatgaatcacagacatcagagatggagaacacctgttactgtgggtcatcggcttggcgtgcgtccggtctagtttccatttacaggacagttctgtgccct

SEQ ID NO: 898311 - DNA, 120 bp, Artificial Sequence
  ENSG00000245466_1 (sequence is synthesized)
tcctcaggaggtcccattccttccttcttttggtcggttctgagtgtcagctgtctactggggatctgctaaggctaagaggcaaagataggcaagtcactcccctgacctcaagaaact

SEQ ID NO: 898312 - DNA, 120 bp, Artificial Sequence
  ENSG00000245466_2 (sequence is synthesized)
cccagtctacaggcgaagatacaccacccaccggtagagtcgctggaccagaatattaggtgttccagtcaaagtcacccagatttgccaaaagacctggcacaaatgtcacttccacta

SEQ ID NO: 898313 - DNA, 120 bp, Artificial Sequence
  ENSG00000245466_3 (sequence is synthesized)
tgaagtcccactgacttccatatacaagtcacaagtgatgatgccccatctggattggtaaagaactcacagcaagaaaaatcactgatgtggaaaaactcaggacagcattcttttgct

SEQ ID NO: 898314 - DNA, 120 bp, Artificial Sequence
  ENSG00000245466_4 (sequence is synthesized)
gaccacttaccacttttgcacgtacccagcagcccactgaagtgcttgtacctgtgtgcctggggaaggtggggagaatatttcttcttttacccctccaaggtctgtatctttattact

SEQ ID NO: 898315 - DNA, 120 bp, Artificial Sequence
  ENSG00000245466_5 (sequence is synthesized)
ttgatagttcctgccttagtttagttcaccatcacctctcgtctggattattaggaactattcttaatatacatccaatccaccctccacactgacatctgagttctcattctccaaatg

SEQ ID NO: 898316 - DNA, 120 bp, Artificial Sequence
  ENSG00000245466_6 (sequence is synthesized)
caagccttcattgactagccagtgccttcaggatcaagtcaaaattcctaaatgcagaggagccctaacaaactagacccaagtgtcccttccagtctcatcttccagcaccatcacatt

SEQ ID NO: 898317 - DNA, 120 bp, Artificial Sequence
  ENSG00000245466_7 (sequence is synthesized)
gtatgcacaaggcaccgtgtatttgctcctcttggaagaaaatccctcccacttctgtgactctttaccagctccctgctctcctccagccagagaaaagcaccctttccctttcctcta

SEQ ID NO: 898318 - DNA, 120 bp, Artificial Sequence
  ENSG00000245466_8 (sequence is synthesized)
ccaggaaaatcatactcaactttcaatacctagttcaaatttcagttgctgtgttcaatatgttagaggcagaacaggaaaatgggaaagagtaaggattctggacacttgtgctcctcc

SEQ ID NO: 898319 - DNA, 120 bp, Artificial Sequence
  ENSG00000245466_9 (sequence is synthesized)
attgatcacatttgtaagattgagtgacttgtttaacttccttaagcttctgttttcttatatgtaagttggagatttaacagtaactaccacatcaggttattgggaggattaaatgtg

SEQ ID NO: 898320 - DNA, 120 bp, Artificial Sequence
  ENSG00000245466_10 (sequence is synthesized)
acaatatttctaaagcacttaggactgtgcctggcatatcagaagtacttaacatgtaaacattaactattattctagttttgctgacattttctcaacccagttatattttggcttaac

SEQ ID NO: 898321 - DNA, 120 bp, Artificial Sequence
  ENSG00000245466_11 (sequence is synthesized)
tgactttaagaaacttaatttaattaatttatttatttttgagacagggtctcattatgttgcccgggctggggtgcagtggctattcacaggcaccgtcccacgactgatcagcatggg

SEQ ID NO: 898322 - DNA, 120 bp, Artificial Sequence
  ENSG00000245466_12 (sequence is synthesized)
cctgctcacagggggtcaccatattgatgccagacttagtgcagacatccagtgggcttcaggcactacagcctagaactcctggactcaagcaatcctcccctcagtctcccaagtaac

SEQ ID NO: 898323 - DNA, 120 bp, Artificial Sequence
  ENSG00000245466_13 (sequence is synthesized)
tgagactactagcatgcaccactacacccaattaaaacggcttttatacctagaattatattagcttgggtgaattgaataaccaaggtaactgcattacccactctagttcatttattc

SEQ ID NO: 898324 - DNA, 120 bp, Artificial Sequence
  ENSG00000245466_14 (sequence is synthesized)
cttaatatttaccacagctgcatctcatggagtgtggtttgaacaagttatattgaactgccatgtggccgtgacccttgtaagtataactctatcaagaactattaatctgggctccag

SEQ ID NO: 898325 - DNA, 120 bp, Artificial Sequence
  ENSG00000245466_15 (sequence is synthesized)
cttttgtattttgggaattctgagagtctggtcaggtatttctagtgctttgctttaataataagcaatatgaacatcaccaaataatttaaagattctacctgttccatgaaagggcaa

SEQ ID NO: 898326 - DNA, 120 bp, Artificial Sequence
  ENSG00000245466_16 (sequence is synthesized)
agcaactcctaaatgccaaaggagatgaaaaaccaaagaaggaggtaaacaaatccactttgttggttttgggtaatttattatggggaatttacaggcacaagtgtggttttgggcata

SEQ ID NO: 898327 - DNA, 120 bp, Artificial Sequence
  ENSG00000245466_17 (sequence is synthesized)
cgcaagataggtagatctccgtacctcaagcccccagacccagggcttatatcttgagaagaaagcatacatgctctggaaggaatgtgtagccagttttgggcatcacagcccgtgatt

SEQ ID NO: 898328 - DNA, 120 bp, Artificial Sequence
  ENSG00000245466_18 (sequence is synthesized)
tctgtgataacaagcgttgttttggaggaaaccttcaataagtagatgtttctacataaggagtaatacatcagctagccattttggaggcattccccacctcctggttaattagaaatt

SEQ ID NO: 898329 - DNA, 120 bp, Artificial Sequence
  ENSG00000245466_19 (sequence is synthesized)
gcatggcagattcgcttttaaaataaagtaactcttgtccccataatacctttgtaaaatctttccacctatgtttgctatgcctgtagggagacaaatacttttattgaatttgtacat

SEQ ID NO: 898330 - DNA, 120 bp, Artificial Sequence
  ENSG00000245466_20 (sequence is synthesized)
acaaggcttattttcattaccactttgaacttattcaatctaatttcacatctgatttatttccatttcaactatacctcaaagtcaaatttattttcattctatattaaaatatacaat

SEQ ID NO: 898331 - DNA, 120 bp, Artificial Sequence
  ENSG00000245466_21 (sequence is synthesized)
gatcactatgatttccaatcttgtttttgagatctgacaaattcttatgtgtaaatatagttttctggtaaggggagtaatagatttgcaacaaaaattatgaattacttgttttatctt

SEQ ID NO: 898332 - DNA, 120 bp, Artificial Sequence
  ENSG00000245466_22 (sequence is synthesized)
tgagtgtatatacgtatacctgtatgtcttatttatctaaaatacaaacttaagcatgttaagaatagaagcctttcccattattccacacctccgtgggggctttagaactgactgata

SEQ ID NO: 898333 - DNA, 120 bp, Artificial Sequence
  ENSG00000245466_23 (sequence is synthesized)
ttctgtaaactgataacatctattacatcacttttcactttgtattacaatattggattatatggccattctgtacccacccacaactgagagctgaatgcataaataaatgaagactgc

SEQ ID NO: 898334 - DNA, 120 bp, Artificial Sequence
  ENSG00000229536_0 (sequence is synthesized)
acttattccctggcgctggcagttgtcaaactgggtcttgtagatgctaagtctccatagaggtatcgtaggatattctttctgggagccctgagcccatctaacctccagttcgtccat

SEQ ID NO: 898335 - DNA, 120 bp, Artificial Sequence
  ENSG00000229536_1 (sequence is synthesized)
caactgattactgctcagtcacctcagatgataccactgggagccagagaactgcctagctgtgccctgcctgaatgtctgactcatcactcatggtgaaatcatacgtgatgtgtaggg

SEQ ID NO: 898336 - DNA, 120 bp, Artificial Sequence
  ENSG00000229536_2 (sequence is synthesized)
aagtgtgtggggcagtggaaggaatgtggaccgttgcctcccttcgcttgtctggatgaccttggatgaggcctcaatcctggtagtcacctggactcctcctgaatttcccgcatgtcc

SEQ ID NO: 898337 - DNA, 120 bp, Artificial Sequence
  ENSG00000229536_3 (sequence is synthesized)
tgcagcagtgaccccatctgacatgttgtgtggctggctgtcccccagtgaaatcatagccctggagggcagggtgtgtttcttcgttttcctgcctggtgtgtggagaccctgtgtgac

SEQ ID NO: 898338 - DNA, 120 bp, Artificial Sequence
  ENSG00000229536_4 (sequence is synthesized)
cgttttcctgcctggtgtgtggagaccctgtgtgaccgtggcgcagatcaggagctcgacggagctttgcttttgttgcccaggctggagtggaatggcacaatctctgctcactgcaac

SEQ ID NO: 898339 - DNA, 120 bp, Artificial Sequence
  ENSG00000229536_5 (sequence is synthesized)
gcctcctgagcagctgggattacagtgttgggagaaaagcttgggatgaccgactgcgggggcgagtggcggtggccagctgaggtcggccctgaaggtgctcctaacacagcctgcgag

SEQ ID NO: 898340 - DNA, 120 bp, Artificial Sequence
  ENSG00000229536_6 (sequence is synthesized)
gaggtcatttcctcctcatgtgtccaaagaattacttgaagtaacactgatggatggcagccctgtggcctgggttcctccgatacctgtgaggcagtatctttaacaccacccctacag

SEQ ID NO: 898341 - DNA, 120 bp, Artificial Sequence
  ENSG00000229536_7 (sequence is synthesized)
tcggggcctttcagatgccaggctgtcctgggtcttttacatgggccttttcatggaccagagtggggcttcccaaacggcaatctggagccctttccaccagcatggcaggcccaggaa

SEQ ID NO: 898342 - DNA, 120 bp, Artificial Sequence
  ENSG00000229536_8 (sequence is synthesized)
tgaaggatgctagtggacacgttgctcatgaccctgactgcagcctccagcacccctcttgtttcctcccccctccagccacttttttgaaacaaaattttcttttaatttttacgtact

SEQ ID NO: 898343 - DNA, 120 bp, Artificial Sequence
  ENSG00000229536_9 (sequence is synthesized)
taaatcataccatgtttttatgactttgacactgtgctagaaaaactcaccctgccacagagtaagtcaaatattcacctatgtaatctcttcccatgctcatgttttcattttttatac

SEQ ID NO: 898344 - DNA, 120 bp, Artificial Sequence
  ENSG00000229536_10 (sequence is synthesized)
ataaaccttaattccttctagaattcatttgggtacatgctgtgatgtatggctttgtctttattcattccagcggttagccagttttcccaataccatcatttacaggacaatctatgc

SEQ ID NO: 898345 - DNA, 120 bp, Artificial Sequence
  ENSG00000229536_11 (sequence is synthesized)
ttcacccactggtctgaagtgccagctttatcataaactaagtatgtgtctgtacacgtacataacaaataagtttatattttatataatgcacacgtgtttatggacttttagtcatct

SEQ ID NO: 898346 - DNA, 120 bp, Artificial Sequence
  ENSG00000229536_12 (sequence is synthesized)
taacagtttttcagtctatcagtctattactgttgcagtaacaccattttattgattgtagctttataaagcatttcagtatctaagaagatatatctccctcataaaatattttcccaa

SEQ ID NO: 898347 - DNA, 120 bp, Artificial Sequence
  ENSG00000229536_13 (sequence is synthesized)
gctcccggcccggccccgcccccgcccctctccccggaagaatgggggcctctgctcacaccagattggtcggacggcatcacgtgacctcatctcttggactcgcttgctattcccgaa

SEQ ID NO: 898348 - DNA, 120 bp, Artificial Sequence
  ENSG00000229536_14 (sequence is synthesized)
aagggggaaaggatttgggggggacaatcgcggagcctctcgctggctttagggagagagggctggggtagaggagagccccagggagcaggcagaggatattctttctgggagccctga

SEQ ID NO: 898349 - DNA, 120 bp, Artificial Sequence
  ENSG00000229536_15 (sequence is synthesized)
ggtggatgacctttttcctgaagaaactgctgcagaatgaaagctccaggcgcttgggtgcagcaagtaggctatgcatttcccaccagcaggaatctagctcctggccaaggtgagcca

SEQ ID NO: 898350 - DNA, 120 bp, Artificial Sequence
  ENSG00000229536_16 (sequence is synthesized)
cgcagagcagcagccacgggtatcatcctcccaggaggcagatcccaattcgcggagaagacccggccagcgggaggatgccagcctcatcctcaaggctgggattgggactctttccag

SEQ ID NO: 898351 - DNA, 120 bp, Artificial Sequence
  ENSG00000229536_17 (sequence is synthesized)
aaggaacgacctctgtgcttgagttggttggggggcgcaatggattctttaacactggggaaattcatacagatgaaagtgagagacacatgacagtgaactgtaaacatcagccaggtc

SEQ ID NO: 898352 - DNA, 120 bp, Artificial Sequence
  ENSG00000229536_18 (sequence is synthesized)
ttagaaacgctgggggagggacacacaaaccttgtgagaagaaaaataagcttttgtggaagtgaggtttggaggccaagagtcctttaagcgtcttaaaggatccactgtgcatccttt

SEQ ID NO: 898353 - DNA, 120 bp, Artificial Sequence
  ENSG00000229536_19 (sequence is synthesized)
gctctttagaagccattctagcagctggtctctgcttgggaatgtacaagtgttggctctgggacatgtaatcgcctgtgcctcctgatgtggtttccaagcatccactgaggtttcttt

SEQ ID NO: 898354 - DNA, 120 bp, Artificial Sequence
  ENSG00000229536_20 (sequence is synthesized)
cactttgggggaaaagatgagaggccctgtgcttaaacaatttggaagcagaaatccaaacaccagggacctgagtgcagcaagggcagggtcctgggagggcctctccagaaaccgctc

SEQ ID NO: 898355 - DNA, 120 bp, Artificial Sequence
  ENSG00000229536_21 (sequence is synthesized)
tccttctggagggaggatggggtcatctttgctgagcagaaggcagcgatggtttccttttagatgctgtgggtgcccctgtcagcaagaaccccagttgtggcctcaggggtggggagg

SEQ ID NO: 898356 - DNA, 120 bp, Artificial Sequence
  ENSG00000229536_22 (sequence is synthesized)
agagctctttcagtgttgccttaggtgtgtgtctgtgtgtgtcctaacccagtccttcccacactcccccacgtgctgatcacgacgagcacctctaaggctgggtctttgcattagaaa

SEQ ID NO: 898357 - DNA, 120 bp, Artificial Sequence
  ENSG00000229536_23 (sequence is synthesized)
gttatttgttaggggtacagggggcaaagaaggcacctggcactcatcctcacctccaactcccatgcttgggcaggatgtctttgtccctgagtgaggtgacgagctttgctggcccca

SEQ ID NO: 898358 - DNA, 120 bp, Artificial Sequence
  ENSG00000229536_24 (sequence is synthesized)
cagtcttacctgcctggtcgggtgagccaagggggaccctgtccatgatgtctgggccaagatgtccctgttggcgaccctggagggtcctctgtcctgctgctgctcctgtggtcacgt

SEQ ID NO: 898359 - DNA, 120 bp, Artificial Sequence
  ENSG00000229536_25 (sequence is synthesized)
agggggtctgctcctcatggacccaccacccccgtgtagttgtaatgcaagtgaggggttctaattttgtcagctttatcttagtgaaataaaggttaatatcacagaaccgaaaacaaa

SEQ ID NO: 898360 - DNA, 120 bp, Artificial Sequence
  ENSG00000229536_26 (sequence is synthesized)
cgtagccctggagcagtcacagggctgcaaaggctgccgggaagtgtgttccatactgtgtgcccagagcaagggaaggggtttggtgggagtttgccagttccaccacagcgctgctgt

SEQ ID NO: 898361 - DNA, 120 bp, Artificial Sequence
  ENSG00000229536_27 (sequence is synthesized)
gacaattgaaatcaaatgcatgaagggactggttttcacacaggtcaggtgtcatgactgctacaagctgggttttcctccagcttgtactcctgtccagacagagcgtctatttttttt

SEQ ID NO: 898362 - DNA, 120 bp, Artificial Sequence
  ENSG00000229536_28 (sequence is synthesized)
tctatctactgaatcagagaacctacctttctcaggtcagagtccaaattcccaacttgtatcaaatgagattttcttcccagtaataaatagtgggatgtctacagacatttgcaaggt

SEQ ID NO: 898363 - DNA, 120 bp, Artificial Sequence
  ENSG00000229536_29 (sequence is synthesized)
gttcgtcgcacctcgtgatttctcccttggcagggacctgtggccactgtgtctggctcaggacactgacaaaacaccaggctcaggattttttcccccacaatacaactagatcctgac

SEQ ID NO: 898364 - DNA, 120 bp, Artificial Sequence
  ENSG00000229536_30 (sequence is synthesized)
caagggtttttgatgaaaatcagattttgaagactgctgtggtttataagagcttcctcaagaagaagactttgtagacctcaccatttacagatatgagagagaagtttccttctgagt

SEQ ID NO: 898365 - DNA, 120 bp, Artificial Sequence
  ENSG00000229536_31 (sequence is synthesized)
gatctcattctgctctgatgtccctgggaacacacattggagccaatatctcccatcttttcaaattaaattagctccctgtagggagccagataaaagaatgatggaaagaaatggaac

SEQ ID NO: 898366 - DNA, 120 bp, Artificial Sequence
  ENSG00000229536_32 (sequence is synthesized)
tgggggggacaatcgcggagcctctcgctggctttagggagagagggctggggtagaggagagccccagggagcaggcagaggtgggttggctagggccttgtgtgacttgggctgagaa

SEQ ID NO: 898367 - DNA, 120 bp, Artificial Sequence
  ENSG00000283045_0 (sequence is synthesized)
cttccaaagagcatgtgtaatttaaaactttactaaaaaactgaaaggtaacaaattgaaaacaatgattacctctaagaaatgaaacggagaaaggagggctttctttcatgttttact

SEQ ID NO: 898368 - DNA, 120 bp, Artificial Sequence
  ENSG00000283045_1 (sequence is synthesized)
tgttacagtgtggcctaaacttttaacaatacccattttacatttgtattatttgtgtttagtagtatattttaataaagggggccacaatatactaaaaaattaaagacattgcttgca

SEQ ID NO: 898369 - DNA, 120 bp, Artificial Sequence
  ENSG00000283045_2 (sequence is synthesized)
gttattacaaaaattgttaaaaaaaattttttttaagttctccctatgagctcagtctaataaaatgtctcaagaaaagcattttacaaaaaaatgcccttaatgggcataattttaaca

SEQ ID NO: 898370 - DNA, 120 bp, Artificial Sequence
  ENSG00000283045_3 (sequence is synthesized)
cccagctattctggaggctgaggcagcaggactgcttgggcccaagtttgaaaacagcctgggcaacacaggctgttaaagaaaagaaagaaaagaaaagaaatggaaaaaatggagaaa

SEQ ID NO: 898371 - DNA, 120 bp, Artificial Sequence
  ENSG00000283045_4 (sequence is synthesized)
agaaagaaaagaaaagaaatggaaaaaatggagaaaggggaatgggcaagagcaagaatgtgaaagaactgagtctttaccttggttaacttgaataaaataaaaactgtcttgtatgaa

SEQ ID NO: 898372 - DNA, 120 bp, Artificial Sequence
  ENSG00000283044_0 (sequence is synthesized)
ccatatgtgcctactgaatatttaaaatatggctagtgtgactgggagctgaagtttccattttatttagacttaactagctcaaatttaaatagccacatgtaacttatggcttggtat

SEQ ID NO: 898373 - DNA, 120 bp, Artificial Sequence
  ENSG00000283044_1 (sequence is synthesized)
tggcgtatttatacctcaaatctctggaactgggtagcagaagacattgcctggggactatataattcagctctgatggggatatacaatgacaaacagaggtaaagttaacctctacct

SEQ ID NO: 898374 - DNA, 120 bp, Artificial Sequence
  ENSG00000283044_2 (sequence is synthesized)
gtggttcaggaggaggagcgccccctgccttctgtccctaacctgctcagaacatcattgacaatgagctgtccatgcttgagaagatctgcagagccatgaaaataaagagaacttcac

SEQ ID NO: 898375 - DNA, 89 bp, Artificial Sequence
  ENSG00000149656_0 (sequence is synthesized)
ccaggattcaatgaagattgcagacttaagccatttttgatacagatactgaaacaattactttctaagagcaaacttgaaggtatgga

SEQ ID NO: 898376 - DNA, 64 bp, Artificial Sequence
  ENSG00000149656_1 (sequence is synthesized)
agtggtgggtctcatatctcaatgtgggcttttactaactcccgatgcctcagtttcctcatca

SEQ ID NO: 898377 - DNA, 120 bp, Artificial Sequence
  ENSG00000257004_0 (sequence is synthesized)
agggtttcctgaccagtgagaccacagagggctggatctgaattcagagagtcaaattggctgtacatggtcagtatcctgacctggcaaggtgttccttaacctcccctctggatcccc

SEQ ID NO: 898378 - DNA, 120 bp, Artificial Sequence
  ENSG00000257004_1 (sequence is synthesized)
ttagcacacatctgggacaatggagcgttcagcaccacggacagcattacaccctcttcaagtgcttgttaaagccatttgtctatttcactctcaagtaaataaaaatattttttaaaa

SEQ ID NO: 898379 - DNA, 120 bp, Artificial Sequence
  ENSG00000250057_0 (sequence is synthesized)
ccccgattggccaccgtgctcacagcccactgcattgtcgcctctgacgggtgcagatggtgcacagaggccaccactctgccacacatgctgggagatgtagttcttagaatatttaaa

SEQ ID NO: 898380 - DNA, 120 bp, Artificial Sequence
  ENSG00000250057_1 (sequence is synthesized)
tgcctaagggactgagctgagcttgtaagaagagcacgcctgcttgctaatgattacagcggtagcagaattccatctagggctggataccaaggccagtaatgcctgtaatctcagcac

SEQ ID NO: 898381 - DNA, 83 bp, Artificial Sequence
  ENSG00000250057_2 (sequence is synthesized)
tttgagagacccaccctgggcaacacagcaagaccctgccactccattattttttaaaataaaaaataaataaataaaaattt

SEQ ID NO: 898382 - DNA, 120 bp, Artificial Sequence
  ENSG00000286474_0 (sequence is synthesized)
gctgctttttactgtgacagtgcaacactgaattccaatgcaaagtcacacagtgatttttcttttcattccccaagtattcagattctctcttcatgccatgtggtggctgccagagag

SEQ ID NO: 898383 - DNA, 120 bp, Artificial Sequence
  ENSG00000286474_1 (sequence is synthesized)
aaaagtggtgtcagcaattcaagactgtgtttccttactctcttcagtgtctccttccttgatatgatgctaaaaccaggttccattaagtccagtttgataactgcagtattcaaaact

SEQ ID NO: 898384 - DNA, 120 bp, Artificial Sequence
  ENSG00000286474_2 (sequence is synthesized)
tccttgtctttgctatgttttcatcagagagaggtactttggaatgatatcatcacaggaggaacatggaagttctacagcacatctctttggagagtatctaggcatggagattttaat

SEQ ID NO: 898385 - DNA, 120 bp, Artificial Sequence
  ENSG00000286474_3 (sequence is synthesized)
gacccagagcagtagaagacagagttgaattatttcattgtcctcaaacatcatgcataggtgtctactggagacatcacataccaagtggctttgcttgatcaatgcctgaaaccagga

SEQ ID NO: 898386 - DNA, 120 bp, Artificial Sequence
  ENSG00000286474_4 (sequence is synthesized)
catgccaaccagtattgctcaacacttgcaggcatggaaatgagatgatgagagatggataacacccacacacagactttggttctatataaaacttcaagtgtttagatttgacttcag

SEQ ID NO: 898387 - DNA, 120 bp, Artificial Sequence
  ENSG00000286474_5 (sequence is synthesized)
agaaaagagtgttgggttaaattaagtctcagccactccagcagcaaagagttttaaatttatggtaagccctcttctaccttatctagcaggtatgaagtcaatgtaactaaaattgtc

SEQ ID NO: 898388 - DNA, 120 bp, Artificial Sequence
  ENSG00000286474_6 (sequence is synthesized)
acttatttgtcttgcttctcttagtcatagtgggtaagcaatcactttcttccatatttttcttcgatacctatagtagctaaaaaaaggtaagttacttttgatggttcagtaaatgac

SEQ ID NO: 898389 - DNA, 120 bp, Artificial Sequence
  ENSG00000286474_7 (sequence is synthesized)
actcaaatttaccctgcccacatctattctgaatgtccctgattctgcttctcaagagagtatggacttggctgagaatccgtattgatgctgcttagattcattaaattcacagtaatc

SEQ ID NO: 898390 - DNA, 120 bp, Artificial Sequence
  ENSG00000286474_8 (sequence is synthesized)
tcttctccaaccttcagaagatgctcaaaaacctggctgatgaggtcctccaatttctaacattgttaatagtctactctaaactacttaagaattcaaccatagccaataattttcctt

SEQ ID NO: 898391 - DNA, 120 bp, Artificial Sequence
  ENSG00000286474_9 (sequence is synthesized)
tatttgagagaaataatagccccaaaggctgggtctttaagaagttttaaattacatttcttcctctgaatctcttgcaagctcttgtggctgtactctggccccaggggctttcaaaga

SEQ ID NO: 898392 - DNA, 120 bp, Artificial Sequence
  ENSG00000286474_10 (sequence is synthesized)
ttttgcttgtgactccacagtaaggtatattcaatagataccaaaaataataaaattataaaacagcatctttactatgagtggtacactctaacatttttcttttctattctattccat

SEQ ID NO: 898393 - DNA, 120 bp, Artificial Sequence
  ENSG00000286474_11 (sequence is synthesized)
tctaatgatttttatatcatttaaaaatattggttatgactagactgacaataatgagtgtctccaggaaaatcctggcttatctttgttaattccacataattatttgtaccatttatg

SEQ ID NO: 898394 - DNA, 120 bp, Artificial Sequence
  ENSG00000286474_12 (sequence is synthesized)
tttctctgtaaaatgtttcatgttgtataataaattatttggttatcccagttaaaattcactaaattgatttctcagcatactaacagttgtaattcaaatatttaggtatttgtcttc

SEQ ID NO: 898395 - DNA, 120 bp, Artificial Sequence
  ENSG00000257000_0 (sequence is synthesized)
tatataaaaaggtcactttattttgccttttgtttggtatgctatcaatgccctttaaaatcctactattcaagtacaaatgctgatgtttacaaagtatttacaattttagtcttgttc

SEQ ID NO: 898396 - DNA, 120 bp, Artificial Sequence
  ENSG00000257000_1 (sequence is synthesized)
ctttctatcttaaaacacaacagctaactggttacaacagttaacaaaataataataataaagaactaaactctggcagacactgtggaagcccacgccttatctttagaaagtccattg

SEQ ID NO: 898397 - DNA, 120 bp, Artificial Sequence
  ENSG00000257000_2 (sequence is synthesized)
cggcagacggcttctgtggcgtgcaaagcactacatgctcacaaagaaattctaaatggctttcagaacacagtactatggctctaggggacgggtgcgggtggggactgaaaggtgaaa

SEQ ID NO: 898398 - DNA, 120 bp, Artificial Sequence
  ENSG00000257000_3 (sequence is synthesized)
tgatttagaggaagccatgttgtcactttttccatgagccacgtagtacagagaacgcggcactccataaggaccatttgtcctgcagtgtgggatgcattttaataaaatgattacact

SEQ ID NO: 898399 - DNA, 120 bp, Artificial Sequence
  ENSG00000224721_0 (sequence is synthesized)
accagacggaagcgatgcgggagggcatgcccaggatgaaaacctgggccacagagcagatgagctggcccaccacggtgaccggaaagagatgcggcttcaggctgcccagcttcaccc

SEQ ID NO: 898400 - DNA, 120 bp, Artificial Sequence
  ENSG00000224721_1 (sequence is synthesized)
aggcccccaggcagttgagagccgagccagtgagagcaatggtgcgcaggccgaacttctccagcagccaagccactggcaggagcagagggatgtaagtcagcatgtagcacatggaca

SEQ ID NO: 898401 - DNA, 120 bp, Artificial Sequence
  ENSG00000224721_2 (sequence is synthesized)
gccagtcaatggcaaaggcactgacaccgtagaagtgcatgaagatgttattgatggagccgtactggatccactgaaaggagttgcacatggagtagcagctaaacaccaggaccacgg

SEQ ID NO: 898402 - DNA, 120 bp, Artificial Sequence
  ENSG00000224721_3 (sequence is synthesized)
cccaacggcgcctgctcaccttgatcacgctgaggtcctcagggcccgagctactggggtgagccaagccactgggttgggctaaggcactggggtgggccgaactgctggggtggacag

SEQ ID NO: 898403 - DNA, 120 bp, Artificial Sequence
  ENSG00000224721_4 (sequence is synthesized)
agacgctggggttgatggagacgctgggatggaccgagacgctgggatggaccgagacgctggggtccgcttggagtgcggactccggcacaggggtgtcatcgctctcttcctggttgg

SEQ ID NO: 898404 - DNA, 120 bp, Artificial Sequence
  ENSG00000224721_5 (sequence is synthesized)
gaccttcattcaccatcgccacagtctcctctggaatcctggagaagtggtgaggactccggcagtcttaagggacagtggcctctgctggtctcttagagttgaaaggacacttgccta

SEQ ID NO: 898405 - DNA, 120 bp, Artificial Sequence
  ENSG00000224721_6 (sequence is synthesized)
ttccagaagaaacagagactagaggctgcgtaaaagcctcaagtggggcttcctgtgctcacctccaagctcctgctcccacttttgcttggggctctctgttgccacccgcggcgatcg

SEQ ID NO: 898406 - DNA, 120 bp, Artificial Sequence
  ENSG00000224721_7 (sequence is synthesized)
ctgtcccaaggccggccgcacacgccgcagccggctccggaccgctcctgccttgggtctccccacgaggcgttccttgtgcaggaaaagttctctccttgcgcagccacttcgcccgca

SEQ ID NO: 898407 - DNA, 120 bp, Artificial Sequence
  ENSG00000224721_8 (sequence is synthesized)
agtgtctcttgccttctcgagcccggtcctccgggcagagcagttgtttcgccacagcttgcgggatgcattcctcccccacgccccgggcgccatggaaaccgcccggttaacccccac

SEQ ID NO: 898408 - DNA, 120 bp, Artificial Sequence
  ENSG00000224721_9 (sequence is synthesized)
cctttgcactgcccctcatattcatttgccacccgctatcagcggaccctgcaagaagatccgccttcccgaagtaatgcccaaaatagagcctctccggtgcctgtccgcatgccctgc

SEQ ID NO: 898409 - DNA, 120 bp, Artificial Sequence
  ENSG00000224721_10 (sequence is synthesized)
gcgcgtgcaccaaagcccggcgccacctaagtgttctggggaattcaagagggattccccaactttctcccccttggcttaggctcccagccctttgctgaactaaagagagatttgtag

SEQ ID NO: 898410 - DNA, 120 bp, Artificial Sequence
  ENSG00000224721_11 (sequence is synthesized)
atttcccgggctggttgcgctcctgggttaaaggggagttacagaaaactcgctttactcgcttctttccctgcggacgtggttttgtcttggggaggttagatttgaacctgttatgtg

SEQ ID NO: 898411 - DNA, 120 bp, Artificial Sequence
  ENSG00000224721_12 (sequence is synthesized)
gggctatttttcctgatggattctgggcgaagaccctagggtgcgggggagggaaaggagagtttgaagaagccgaagaagctgtccgcggttgtgtgatggaacgcttagcacagagct

SEQ ID NO: 898412 - DNA, 120 bp, Artificial Sequence
  ENSG00000224721_13 (sequence is synthesized)
ggctccgggcttggtcttggaagcggtctttgaactcaagcagccctagtctgccacctgccggtcctagcccatttcaaagggcaaaccctcgactcgttgcactgacctctgtccttg

SEQ ID NO: 898413 - DNA, 120 bp, Artificial Sequence
  ENSG00000224721_14 (sequence is synthesized)
gcgagggatcctgataaggaaactgaggcctggagaggcgggtgtgttactcagcgtcctatagtgaaatagcatcagaacaagcagcaataaaatgggtgctccttccacgtggccttt

SEQ ID NO: 898414 - DNA, 120 bp, Artificial Sequence
  ENSG00000224721_15 (sequence is synthesized)
cccatgagctcttctggggcagcccttcagcttgatttctagctgtctcaggacttgtggatatttttgtatattttggagtgtttagtgagataaactatgtaacacacgctctcaata

SEQ ID NO: 898415 - DNA, 120 bp, Artificial Sequence
  ENSG00000224721_16 (sequence is synthesized)
cgtatctgtagaattgagttgtactgcatatcaccatgaaattttacaaaactggagacaaagaggagatccaacaggatttcagagattttaaaaaatcagaaaaagttaaaaaaaaaa

SEQ ID NO: 898416 - DNA, 120 bp, Artificial Sequence
  ENSG00000257002_0 (sequence is synthesized)
cgaagtctggaaagttggcagggtctctctgggctgcccaggaaggtgacccagggtcctgggaagccaggtactgccagaagaggatggctggggcccagagcacaaaggaaaccagcc

SEQ ID NO: 898417 - DNA, 120 bp, Artificial Sequence
  ENSG00000257002_1 (sequence is synthesized)
aggccaggccgatcatcagagctgcccggcggggtgtgcgcttggcacggtagctcaggggccgagtcacggagaagtagcggtcaaagctgatgagcagcagattcatgacggaggcat

SEQ ID NO: 898418 - DNA, 120 bp, Artificial Sequence
  ENSG00000257002_2 (sequence is synthesized)
tgctggccacatagtccagggccagccagaggtcacaagccagcgtgcccagagcccagtggcccatgagcaggtcctgctatccccagtttgcaaaaggcctaacctgaggcttcaaga

SEQ ID NO: 898419 - DNA, 120 bp, Artificial Sequence
  ENSG00000257002_3 (sequence is synthesized)
gcaaccaggatttggatccaggccgtctgcctccgagaccaacctcttgaaccctactcctgcccttgaggggttgcgggggtttgccagcctccttgcccacctcagctagcttactca

SEQ ID NO: 898420 - DNA, 120 bp, Artificial Sequence
  ENSG00000257002_4 (sequence is synthesized)
agcccaactttgaatcagttaacgatgagcaatcggtccttctttcagaatctggcctcctttgtgtgcgcggcagtgtctgtcgtatatctgtgtgatgtgtgataacagtgctgtggg

SEQ ID NO: 898421 - DNA, 120 bp, Artificial Sequence
  ENSG00000257002_5 (sequence is synthesized)
aagagggtgggtctactggagctctttaaagggcagggtaagggctgcgtctgtctcattcaatgctttatcccagggcttggcagatagtagttgctcaataaatacctgtggaataaa

SEQ ID NO: 898422 - DNA, 120 bp, Artificial Sequence
  ENSG00000257009_0 (sequence is synthesized)
actaagctcccacacaacccaaagggctggtttcactcccactgtggcccaccccctacaacagcaccaagtctgttttcaggcagtgggcgaacagggctgagaacttgccccaggcta

SEQ ID NO: 898423 - DNA, 120 bp, Artificial Sequence
  ENSG00000257009_1 (sequence is synthesized)
cccacttaccagctgcaaaaccaagtaggacgtttgttcttcccaggcctgtggagtctgcacactgaattcatatctttctccaagtcctggccaggagacttctcaatcagttcaaac

SEQ ID NO: 898424 - DNA, 120 bp, Artificial Sequence
  ENSG00000257009_2 (sequence is synthesized)
gactgccccccgccccaaggaccctgtgaggcagggcagaaatggcttgccaggggacccagtgagtccacagggcttttcccgctgcttcctctaccctgtattttgtttggctctcta

SEQ ID NO: 898425 - DNA, 120 bp, Artificial Sequence
  ENSG00000257009_3 (sequence is synthesized)
aattgattcaactccagtgcttcctccaaaggtttagataatccttaccagcagaagggaagacaccaacatccaaatgacatagaacactgggccttttccttctactcaagacagtga

SEQ ID NO: 898426 - DNA, 120 bp, Artificial Sequence
  ENSG00000257009_4 (sequence is synthesized)
ttgattcaactccaggtttagataatccttaccagcagaagggaagacaccaacatccaaatgacatagaacactgggccttttccttctactcaagacagtgagatgggaaaactgaat

SEQ ID NO: 898427 - DNA, 120 bp, Artificial Sequence
  ENSG00000179452_0 (sequence is synthesized)
atggtcaggccctctgggctgttatataattttccaggagacagtggagtgaagcagacctcagcgtcccagaggtgtgctgccacgacagtgtgctttccttgcttggaagtcttggaa

SEQ ID NO: 898428 - DNA, 120 bp, Artificial Sequence
  ENSG00000179452_1 (sequence is synthesized)
aagattttccaggcaaaacccagatctgctttagtgacttcagaagaaaaagatctgagggaggatgagaagccgatagccaatggttatgaggatgagggtcgctatccaaaggattga

SEQ ID NO: 898429 - DNA, 120 bp, Artificial Sequence
  ENSG00000286471_0 (sequence is synthesized)
gggtggcggacgaggggggatggagaagaacaaaacccagtggccacatccttgaactcttttgtgtgtttagaacaatgtccagttaaaatcaaacaatattgctgctaaatgcgtcta

SEQ ID NO: 898430 - DNA, 120 bp, Artificial Sequence
  ENSG00000286471_1 (sequence is synthesized)
aaatagtccttgctattcagatgggcatgaattggttctgattgctgtttttaagatgtggcctgactgtcaagccttcagagaacaggcagcctcttctgggggaagccttcaaccctg

SEQ ID NO: 898431 - DNA, 120 bp, Artificial Sequence
  ENSG00000286471_2 (sequence is synthesized)
tgcatcccacaatctggagacactgttggctgactgtgacttaccaccagacaaatgcccaccagaggacagtctccttggcatctgtgtaacctcaaagcccagcacggtgtccaacac

SEQ ID NO: 898432 - DNA, 120 bp, Artificial Sequence
  ENSG00000286471_3 (sequence is synthesized)
tcagtggtttctacaatgcatgtttaactgagcagagctgaactagtgctcccagggaactgactgatggaagtctgtcttaaaagctgagctctataattttgcagctgtttgcccttg

SEQ ID NO: 898433 - DNA, 120 bp, Artificial Sequence
  ENSG00000286471_4 (sequence is synthesized)
gagacgtcatttaacttctctgtctgggactctggcaatataaggaaagtgccataatattaatctgaacaagtgcccaggcaactcttaagtttaacagcagtatcatatcgccattta

SEQ ID NO: 898434 - DNA, 120 bp, Artificial Sequence
  ENSG00000286471_5 (sequence is synthesized)
gtgtgcacacttcattctcttatatacctgagagagattattttaaaatctctcatgttaatcaaaccacatttcctgatctagataaaaaaggtttcagagtttaattacacaaaaagt

SEQ ID NO: 898435 - DNA, 120 bp, Artificial Sequence
  ENSG00000286471_6 (sequence is synthesized)
aggtaatgttgcatgaagatttacaaagaagccaagattttttttttctttttaaagtatgactaggtaataatagatataagcatatttttctcattcctaatacatgttttatttgga

SEQ ID NO: 898436 - DNA, 120 bp, Artificial Sequence
  ENSG00000286471_7 (sequence is synthesized)
tggtgtgctgtgatatttgaggatttgggacacactcttttagtgtaggttgcaagaaaactgtgaaacacagacgccaacagtaggtgaagtcagaagatcttctgtgttaatttctga

SEQ ID NO: 898437 - DNA, 120 bp, Artificial Sequence
  ENSG00000286471_8 (sequence is synthesized)
cattctgccactggccatgtgaggagcaattcccagccaggggaaggactccaagtccccaaatctttcttaaaattttagattgagaattgacagaaaacatataaactcagataaata

SEQ ID NO: 898438 - DNA, 120 bp, Artificial Sequence
  ENSG00000286471_9 (sequence is synthesized)
ggcaaaggtattgaacagactattcataactgtacttatgaccacaataaaaatagaagcaatataaatttgggtaaaataattagatatgtatttggggcctatgaaatcacaaactac

SEQ ID NO: 898439 - DNA, 120 bp, Artificial Sequence
  ENSG00000286471_10 (sequence is synthesized)
atctaaaatttaattagaatgataggtgatttttgttttcttatttgcatttgtcacattttaaaaaatactgcataggtattacttttataaccacccaatagtatttgagaatatgct

SEQ ID NO: 898440 - DNA, 120 bp, Artificial Sequence
  ENSG00000286471_11 (sequence is synthesized)
ctaaaacaaatgagcccagttcattttattcatgttcaggaagctaaagtcagccagtggaaacagtgcagtgaggtggctgtgactggttttatttgtacttgccacttactctgcaga

SEQ ID NO: 898441 - DNA, 120 bp, Artificial Sequence
  ENSG00000286471_12 (sequence is synthesized)
taccatggattggcaggcatagctcttattttatcagatagaagagaaatgggaaatgacacagaattcccacacatgggaagggggcattttttaattgagcagatactatatcctgta

SEQ ID NO: 898442 - DNA, 120 bp, Artificial Sequence
  ENSG00000286471_13 (sequence is synthesized)
tgttatgctcagtactttacacctatatctcatgccatccttaaatgacacagagtggggccttccaactggaaagaatgctgcagtacgatggctgataagcagaaaacaacatacaac

SEQ ID NO: 898443 - DNA, 120 bp, Artificial Sequence
  ENSG00000286471_14 (sequence is synthesized)
aaagcttggcattaaaattactttcagaagatatggtaaaactgctttttttgggtcttggattgttagtagagcctcaaagtttaataaccaagacccaggtgcctaatttgccccact

SEQ ID NO: 898444 - DNA, 120 bp, Artificial Sequence
  ENSG00000286471_15 (sequence is synthesized)
gggtcctgtcactgactcactggatgaccttagtgaaatcgttttccatctgtgagtgtgtttccttgctgtgaagatgaaactaaaaataaatactgccttcatcatgggttatggtaa

SEQ ID NO: 898445 - DNA, 120 bp, Artificial Sequence
  ENSG00000286471_16 (sequence is synthesized)
ggactagctgagtaatgtttactaagaaattgcaactttttcaagcaaaagggggagaacaaaatgcctgtttcatcatataggaaacctgtttgggagttttgtgaccctaaagtgata

SEQ ID NO: 898446 - DNA, 120 bp, Artificial Sequence
  ENSG00000255714_0 (sequence is synthesized)
agagagctatctcatccaagctacctcatccaaggtcatgcccccatctctgggcagcctgcatccaactactaattaacagagggtatacagacccagcgtttttgctgagacaacttc

SEQ ID NO: 898447 - DNA, 120 bp, Artificial Sequence
  ENSG00000255714_1 (sequence is synthesized)
agtgacaagtatgaaggatcaccgcattttcagaactccccataactttggctgaggtttctgttgagactacattgcagctgattttcttttttcaatcctgcttccttcccttccccc

SEQ ID NO: 898448 - DNA, 120 bp, Artificial Sequence
  ENSG00000255714_2 (sequence is synthesized)
gtaactacattctggccaatgacatggccatgacactcatggaacacaaaccatctatttgtctaccacaaaatgcacccaagtgtctcaaagtgcccttctggttacaaaatgagacac

SEQ ID NO: 898449 - DNA, 120 bp, Artificial Sequence
  ENSG00000255714_3 (sequence is synthesized)
tgcttcaggaccttggagagcgcccttccaggttaacacaaggtcaatatctccaggacctccctgagatccacgggatggcattttctcttcttgacattagccagaaaaaaacaaaac

SEQ ID NO: 898450 - DNA, 120 bp, Artificial Sequence
  ENSG00000273711_0 (sequence is synthesized)
atacaaaagtatattggcagtgtgtagacaatcataagccaaaacattcagaaacaataatcttcagttttactgttctgcgagggttgagtacaattaataaaacaaacttttgaggta

SEQ ID NO: 898451 - DNA, 120 bp, Artificial Sequence
  ENSG00000273711_1 (sequence is synthesized)
tctgcgagggttgagtacaattaataaaacaaacttttgaggtacatcagtagttcctgaacattcatgtttacaaacatttgttaatttgcccagtcctgtcattttctgaaactgtct

SEQ ID NO: 898452 - DNA, 65 bp, Artificial Sequence
  ENSG00000273711_2 (sequence is synthesized)
tttgctcagctcacggcaacctccccctcccaggttcaaatgattctccagcctcagcctcctga

SEQ ID NO: 898453 - DNA, 120 bp, Artificial Sequence
  ENSG00000273711_3 (sequence is synthesized)
tcccaaagtgctaggattacaggcttgagacatcaggcccggctgtcaatctttttaatcacctacaagtgatgtttacatctgtttgccctctcaatctttacaacttgacagtatgtg

SEQ ID NO: 898454 - DNA, 120 bp, Artificial Sequence
  ENSG00000273711_4 (sequence is synthesized)
atctttacaacttgacagtatgtgcctgctaacctaaaataaacatatgcttttctcaatatatatggagtttttaggctatacagtaaattatttggcaaatacaaagagatgatcctc

SEQ ID NO: 898455 - DNA, 120 bp, Artificial Sequence
  ENSG00000273711_5 (sequence is synthesized)
tggagtaaatcttgtcaacttaaccaacctaagttatttatcttcccatactaatcccaacccaaaaccgctggtctcctatcccaaaaactgttacacaagctccgaaacccccaatcc

SEQ ID NO: 898456 - DNA, 120 bp, Artificial Sequence
  ENSG00000273711_6 (sequence is synthesized)
tgcccccagtccctatgtacacatcataccattaagtctcttttcagtctacaatgtgaaaaaaaggccatctcaattctatttttacaccaagtttcagtttaagaatcatgtaaaaca

SEQ ID NO: 898457 - DNA, 120 bp, Artificial Sequence
  ENSG00000273711_7 (sequence is synthesized)
tttccagttcaacaaatctttactcagtgcctctcaagcattctattttattttaagcattctattttaaattaataaaagttattaatattaattttaaaaaacctattgtgtatgatt

SEQ ID NO: 898458 - DNA, 120 bp, Artificial Sequence
  ENSG00000273711_8 (sequence is synthesized)
tactaaaagttattaatttttaaaaacctattgtgtatgatccattaatgattgtatcaaataccctatgcaactaaaaataacacctatgatcacatttaaatcaagagctatgtatag

SEQ ID NO: 898459 - DNA, 120 bp, Artificial Sequence
  ENSG00000273711_9 (sequence is synthesized)
tctaaggattttttaacatatctttgaaaatatgcaaaatggaaaagaaatctatgattgccttgatgacatttacagcaattacaaagagatttcttctgaaatgcaaactatctgctt

SEQ ID NO: 898460 - DNA, 120 bp, Artificial Sequence
  ENSG00000273711_10 (sequence is synthesized)
tccaatgttacctcctgtcatcatggactggaatgcagctggaaaaagagaaagtaggttatctgaaaagataaatgtcactatcatacttgtttccaaaaggtacaacatataaaatta

SEQ ID NO: 898461 - DNA, 120 bp, Artificial Sequence
  ENSG00000273711_11 (sequence is synthesized)
tgttaaataactttttcaatgattttgaatattaagcatagaagaaaatggtcatgaaaagaaatctcaagtaaaaagttacacacaaactaacccaattaacatcttaaaaaaatgttt

SEQ ID NO: 898462 - DNA, 120 bp, Artificial Sequence
  ENSG00000273711_12 (sequence is synthesized)
tgcccatactggaaagatttaattggtatctaactggtatgcacatcaatgttcattgtttacagtatctgaagactagaggcaaaaaaaaatgggaataaaatgtgagtgaaggccggg

SEQ ID NO: 898463 - DNA, 83 bp, Artificial Sequence
  ENSG00000273711_13 (sequence is synthesized)
aatacaaaaatcagctgggggctaaggtgggagcatcacctgaacctgggaggtagaggctgcagtgagccatgatcgcacca

SEQ ID NO: 898464 - DNA, 74 bp, Artificial Sequence
  ENSG00000273711_14 (sequence is synthesized)
ctgcactccagcccgggtgacagagcatggccctgtctcaaaaattaaaaaaagggctaggcactcacacctgt

SEQ ID NO: 898465 - DNA, 120 bp, Artificial Sequence
  ENSG00000238290_0 (sequence is synthesized)
gggccgaagaagccctggagggggagaggggagccgctctcgactgggcttgcggcgtgggagggacagtgagggacacttagggactgtgtggggcagtgaaggatagtgtgggatgat

SEQ ID NO: 898466 - DNA, 120 bp, Artificial Sequence
  ENSG00000238290_1 (sequence is synthesized)
gagggaccgtgtggaccggtgagcgactgtgtgggacagtgcgggacgatgagagacggtgtgggacggtgagggacagtgcgggacgatgagggacagtgagggactgtgtaggacagt

SEQ ID NO: 898467 - DNA, 120 bp, Artificial Sequence
  ENSG00000238290_2 (sequence is synthesized)
gagggacagtgtgggacggtgagggactgtgggacagtgagggactttgggactgtgagggactcggacagtgaaggatggcaagggacagtgtgggacagtatgggacagtggacagtg

SEQ ID NO: 898468 - DNA, 120 bp, Artificial Sequence
  ENSG00000238290_3 (sequence is synthesized)
aggcactgtgaggggcggtgagggacaatgaaggatgtcaagggacagtgtgggacagtggacggtgaggtactgtgaggggcggtgagggacagtgtgggactgtgagggatggcgagg

SEQ ID NO: 898469 - DNA, 120 bp, Artificial Sequence
  ENSG00000238290_4 (sequence is synthesized)
gacagagtaggacagcaagggaggatgaggggacagagtgggccggcgtggggcggtgaggctacgcggggggaacccagggctcctctgactgcgttggaatatggaggaaaggtcctg

SEQ ID NO: 898470 - DNA, 120 bp, Artificial Sequence
  ENSG00000238290_5 (sequence is synthesized)
ctcgaggttgagcccttcagggtcgctgtgggtttccaggaggagctccctcactactgacttagggggccctcggcttcccagtgtaagaagaagctgtctttggagtgagaacaaggg

SEQ ID NO: 898471 - DNA, 120 bp, Artificial Sequence
  ENSG00000238290_6 (sequence is synthesized)
tgaggttctggctcagaaaccttagaatcacagacactgttttcctgaaaacattgcttctttctctcatctcaaagaaatgccacaagtcgtgtgtttccccactgcgagcccttcgag

SEQ ID NO: 898472 - DNA, 120 bp, Artificial Sequence
  ENSG00000238290_7 (sequence is synthesized)
aacaatgtcatgttgatcgatggcagtgactcacaccagatctttccatgcctcctctgcaaggactcaagagagtcgagagcaaaaccgtgccatagttccataaggagggcaaagagc

SEQ ID NO: 898473 - DNA, 120 bp, Artificial Sequence
  ENSG00000238290_8 (sequence is synthesized)
agggcaaagagctttatccacgctgaggaacaggcggatcatgcggctacagcactggtctttaccttttaactgcttgattcgaaacattccagccaggaacagtggctcacacctgta

SEQ ID NO: 898474 - DNA, 74 bp, Artificial Sequence
  ENSG00000238290_9 (sequence is synthesized)
accagcctgggcaacctggtgtgtgtgcctgtggttccagccactcggcaggctgcggccagaggatcacttga

SEQ ID NO: 898475 - DNA, 90 bp, Artificial Sequence
  ENSG00000238290_10 (sequence is synthesized)
aaatacaaaaattagccaggcctggtgtgtgtgcctgtggttccagccactcggcaggctgcggccagaggatcacttgagcccaggaag

SEQ ID NO: 898476 - DNA, 120 bp, Artificial Sequence
  ENSG00000238290_11 (sequence is synthesized)
aaaagaaaagaaaagaaagaaaaaagagaaatagtccaagactagggagaaaaccttctttggggtcagtgtgaaccattctttcatttgttcagcaaatgcttactgaggagctactgt

SEQ ID NO: 898477 - DNA, 120 bp, Artificial Sequence
  ENSG00000238290_12 (sequence is synthesized)
aggagctactgtgtccctgaaattgcctccacctccaagaagacagtggtgagcaagtcagacaatacctctaatctcatggtatttataagtaaatgggccgttaaaattaccagatca

SEQ ID NO: 898478 - DNA, 120 bp, Artificial Sequence
  ENSG00000238290_13 (sequence is synthesized)
gaagtgctgtgttcagcaaatagaggctcatgggaaactcctaagaagggcttctgagctggacttgggggtcaggaaaggcagaatgagggggctgactcatccagactggggcggggt

SEQ ID NO: 898479 - DNA, 120 bp, Artificial Sequence
  ENSG00000238290_14 (sequence is synthesized)
tgccgggggtgcctcccacttactatctgtctccttctagactgacttctctgtcatcatgaatacacccctttaagacatacatttaagagaaaataagaggatgccttatttatttaa

SEQ ID NO: 898480 - DNA, 120 bp, Artificial Sequence
  ENSG00000238290_15 (sequence is synthesized)
aggtttgttacagttttactaacaaccacatacctaaaggaaagtcgcaagtagagctcaaaaacttttttctctggggcagtgaagagtcagttgccagccagaaggcccactgagcct

SEQ ID NO: 898481 - DNA, 87 bp, Artificial Sequence
  ENSG00000238290_16 (sequence is synthesized)
agtgaagagtcagttgccagccagaaggcccactgagcctgagcacttcagggtgtgcttcctacagataaggacatcctcctgcat

SEQ ID NO: 898482 - DNA, 120 bp, Artificial Sequence
  ENSG00000264000_0 (sequence is synthesized)
cttctggatcctcacacagctctgctgaagaaagtggctgtatctgcagcctttcttttctcacaagcctcttccttccacttggcaatacaaacgcaaaccggccccatccccaaggca

SEQ ID NO: 898483 - DNA, 120 bp, Artificial Sequence
  ENSG00000264000_1 (sequence is synthesized)
ataattagaattacttcaatgactgattaacaaattgttagccactgaggcctccttttaccatcctctgtcacccctcaaatcaaataggttttatttctctgctgttgcctggcaacg

SEQ ID NO: 898484 - DNA, 120 bp, Artificial Sequence
  ENSG00000264000_2 (sequence is synthesized)
gagatgtggcaagagatgtcagaggttaaggagcagactaaagtcattatggaaagcaagctcttatcagcattttccatctaactttgtaatctttgaaataaaatagttttcattgta

SEQ ID NO: 898485 - DNA, 120 bp, Artificial Sequence
  ENSG00000253656_0 (sequence is synthesized)
catatttcaatcagcagatggagaaaagaagattacccttcccaatgtgggtggaagtaacctagtcaactgaaggccagaccagaacttacatcattggctctcctgagtctccagctt

SEQ ID NO: 898486 - DNA, 120 bp, Artificial Sequence
  ENSG00000253656_1 (sequence is synthesized)
gccggctgctaatcttgggatttctccatgtcatgccctatctccaaatacagtcacattctgggaccgcagattatgaacacaggaatgttttgacactggagactgtggagggaactc

SEQ ID NO: 898487 - DNA, 120 bp, Artificial Sequence
  ENSG00000253656_2 (sequence is synthesized)
agcccagggtctgattggtgtcaggctctgtacatggacactgtggtggaggtaattacctgcagctctaggagcacccagagaacaaagtcattaactcattaggccagaaggagacta

SEQ ID NO: 898488 - DNA, 120 bp, Artificial Sequence
  ENSG00000253656_3 (sequence is synthesized)
ggaagactccacagagaaggctataaggaaacattgcacaggagcggcagggcaggaagcgtgctttatgaagatttacccggcagcaggtgtgaaattggcagaagagacaggaggatg

SEQ ID NO: 898489 - DNA, 120 bp, Artificial Sequence
  ENSG00000253656_4 (sequence is synthesized)
acgctgagaagtgaagggcttgaggcataaaacagttaacaaactgttgaagctgtcttggggagaggtaattaattctgctcagctgttagttggtgttctgactgtacacatttagaa

SEQ ID NO: 898490 - DNA, 120 bp, Artificial Sequence
  ENSG00000253656_5 (sequence is synthesized)
tgatgggctttgacaggcccaatgttgttttgcagtataaatggtaaaatagtcatttcatagaaaaatcaacacggaatctttttgcctaattgatccctaagctcctgacttttgcct

SEQ ID NO: 898491 - DNA, 120 bp, Artificial Sequence
  ENSG00000253656_6 (sequence is synthesized)
ctgcccccagcactgctccccttgaatcacgccctctccgcatcctctcctcaccccttgcttcactgcccaggcttctccctcttagggcaaataccatgaacatgtagttgttattag

SEQ ID NO: 898492 - DNA, 120 bp, Artificial Sequence
  ENSG00000253656_7 (sequence is synthesized)
ttgacattgtgtggctgaaggccagtgaataattacatccatctcatctcacctgtctcccatggcaccgaccagagacatcaggcacaggcaaccatctccagagtacatcagcccctc

SEQ ID NO: 898493 - DNA, 120 bp, Artificial Sequence
  ENSG00000253656_8 (sequence is synthesized)
tcagtgacacattttgtgctgagctgtgagaattgcttgggaaccaagagctgctggcagaagggctaactctcaacagcaggaaacttcccatggcagagggcccccgcaatggcaacc

SEQ ID NO: 898494 - DNA, 120 bp, Artificial Sequence
  ENSG00000253656_9 (sequence is synthesized)
ccgtgccttctgagctggagatgcctcgctgcctgaccacatggcaccatgagtctctagctcccaccaccaccccaaatcctcaccctcagggctcgggcccaggtgcacaggcctgag

SEQ ID NO: 898495 - DNA, 120 bp, Artificial Sequence
  ENSG00000253656_10 (sequence is synthesized)
agctggcagaaagggagttgtctacagccagaaggggattttcttcaccatcccacccaaacgttgtttggctgccgctgcctctgagcttttcagaaatgaaaaagagagatagggaag

SEQ ID NO: 898496 - DNA, 120 bp, Artificial Sequence
  ENSG00000253656_11 (sequence is synthesized)
tgggagccctggtgggctctggaacccttctgttttctcaagggcatggcagtaggtccaaaatgtcctctgggtttgaaaatgaaatgccggcacagagcagattcctgacaaatgtgg

SEQ ID NO: 898497 - DNA, 120 bp, Artificial Sequence
  ENSG00000253656_12 (sequence is synthesized)
cccagatgtttctgagcgatttatttttgctgatggaaaatggctgagctaataaccctcagaaacatttctgtagggagagttgaagcctattttgcctctgtgcttgtgttttgcttg

SEQ ID NO: 898498 - DNA, 120 bp, Artificial Sequence
  ENSG00000253656_13 (sequence is synthesized)
tggttttcttttacggaagaaattagatgtaggaaaaagcccaaaaaacaactctgtctataacagctgatgccaaaatcccatgcatagattgtgtgacctgatttctaccaattattg

SEQ ID NO: 898499 - DNA, 120 bp, Artificial Sequence
  ENSG00000253656_14 (sequence is synthesized)
acaattcagtgaggcccaagttcttctcatcaattacctcatttaatccctatgacaaggaggagaccaaggctcagagcaatgacatttcctacccagccagagccacacggcctgtga

SEQ ID NO: 898500 - DNA, 120 bp, Artificial Sequence
  ENSG00000253656_15 (sequence is synthesized)
cagcatggctgagaatcaaaccccaagctttgactctagatcaaaactctttccaccactatactcttatagggaaatgacaaggaaaatacaagggttaaaagagactctgagaggctg

SEQ ID NO: 898501 - DNA, 89 bp, Artificial Sequence
  ENSG00000253656_16 (sequence is synthesized)
caaggaaaatacaagggttaaaagagactctgagaggctggatgcagtggctcacacgtgtcaggccaggagttcgagaccagcctggc

SEQ ID NO: 898502 - DNA, 120 bp, Artificial Sequence
  ENSG00000217455_0 (sequence is synthesized)
gcggaatggagggatttaaaacgcccatccttttaaaaaacatgaaccgtttcaagtacagagtttgacagagggtagacggtacgaacttgctcccacaggcctagttacttgcctcgt

SEQ ID NO: 898503 - DNA, 120 bp, Artificial Sequence
  ENSG00000217455_1 (sequence is synthesized)
gcaaggcccctctctccccttcccacttggaatcatccttggaatcatctttgtctaggaagaggatttcactccgggtctttgagaacacctctcaggcctgaccctggccttgggaag

SEQ ID NO: 898504 - DNA, 120 bp, Artificial Sequence
  ENSG00000217455_2 (sequence is synthesized)
aagactcccagcctgagggtcttgttgagagttttaatgtcccctttagggacatctttgcttttctttctttcagaagaggaatcaattctggaccagaggatgtctccctgcctttgc

SEQ ID NO: 898505 - DNA, 120 bp, Artificial Sequence
  ENSG00000217455_3 (sequence is synthesized)
cgccgttgccttccaccgtgattgtgagtttcctgaggccttccctagccatgcttcctgtatagtctgtggaacgagcagattatggacggcagagctgtaccttgtgattgaacagaa

SEQ ID NO: 898506 - DNA, 120 bp, Artificial Sequence
  ENSG00000217455_4 (sequence is synthesized)
tctgatcaggaaccttggcctgaaagctcggcagactgaacgcttcagtgggatgcagctcatttgaagtcatccagacctcaagagctcctttctcctgacctttgacgttggctggtg

SEQ ID NO: 898507 - DNA, 120 bp, Artificial Sequence
  ENSG00000217455_5 (sequence is synthesized)
cctggtgtgcatcgtggggagttccccaaggacccagatgcctgccactgtgccatcagggaggtctggcctccaaaggcctgggcagatcctgggagagagggaaaaaaaaaaaaaaaa

SEQ ID NO: 898508 - DNA, 120 bp, Artificial Sequence
  ENSG00000217455_6 (sequence is synthesized)
acatccttctctggcaaggggaatgaggctgagaatgacctccatccgcaggacgagattctctaggaaacaagaaatcaaatctccggggactatccaggtgggaaatggaaataaatg

SEQ ID NO: 898509 - DNA, 120 bp, Artificial Sequence
  ENSG00000217455_7 (sequence is synthesized)
aagaggaatcaattctggaccagaggatgtctccctgcctttgccctgcctgcctccccccacatccttctctggcaaggggaatgaggctgagaatgacctccatccgcaggacgagag

SEQ ID NO: 898510 - DNA, 77 bp, Artificial Sequence
  ENSG00000217455_8 (sequence is synthesized)
aagaactcctgatggctgagagcccaggcaagtctgggaaaggaaggtgagcggacaggttctcgctctgtgacaaa

SEQ ID NO: 898511 - DNA, 120 bp, Artificial Sequence
  ENSG00000217455_9 (sequence is synthesized)
ctcctgggttcaagcaaacctcctgcctcagcctcccaaaagaggaatcaattctggaccagaggatgtctccctgcctttgccctgcctgcctccccccacatccttctctggcaaggg

SEQ ID NO: 898512 - DNA, 120 bp, Artificial Sequence
  ENSG00000217455_10 (sequence is synthesized)
ttcaccttctgtctgaattgtgccttgaatctgtttcgcgatgggtgcgaactgggtgagacacttgtcttagaaccgcagccctggcaactccacgccgcctgacctcgagccggtttc

SEQ ID NO: 898513 - DNA, 120 bp, Artificial Sequence
  ENSG00000217455_11 (sequence is synthesized)
catagcctgaatccttcctctcatttgcaaacaactttcttagtaaatgatgacaaagcagaatgcaatcccttctataagagatatgactcagaacaaattgtagccgcgttttcctca

SEQ ID NO: 898514 - DNA, 120 bp, Artificial Sequence
  ENSG00000217455_12 (sequence is synthesized)
gcggaatggagggatttaaaacgcccatccttttaaaaaacatgaaccgtttcaagtacagagtttgacagagggtagacgaagaggaatcaattctggaccagaggatgtctccctgcc

SEQ ID NO: 898515 - DNA, 120 bp, Artificial Sequence
  ENSG00000217455_13 (sequence is synthesized)
ggaagaaagcaaattggaccagctctgtagtagaaatgccggcaggaagcaacatcaattctctccttttctgagatttcccctgccagcattctgagtgatgataaatcactcatttct

SEQ ID NO: 898516 - DNA, 120 bp, Artificial Sequence
  ENSG00000217455_14 (sequence is synthesized)
gacacggtttatttttcaaagcatttttataagaagcatccagccatcacatttcaaacataattcaaatggggggaaaaaatcctgcaatgtttattattaattaaacaggattactgg

SEQ ID NO: 898517 - DNA, 120 bp, Artificial Sequence
  ENSG00000217455_15 (sequence is synthesized)
accgacttggtagaaacgggcagaggaaatgcaggcatcgtcccaaattccttacacccagcctgccagaccttcctgggaggggtttccagatgagactcgttttgctataaatccaaa

SEQ ID NO: 898518 - DNA, 120 bp, Artificial Sequence
  ENSG00000253652_0 (sequence is synthesized)
ctcaaacttttcaccaattctgacatctaaacaactaacgccagagacaggctctgtgggaccagcagctgcgacctcacctccggtcactggaacactgagctgttaaatgaaagacct

SEQ ID NO: 898519 - DNA, 120 bp, Artificial Sequence
  ENSG00000253652_1 (sequence is synthesized)
ctgaataagtcgtgggagccctcgggtcctgcagaccacaagggaggagcgactgatgttcactttggagacgcgggcttctgattgcacccttgccccaggccccgtgaactccaggaa

SEQ ID NO: 898520 - DNA, 120 bp, Artificial Sequence
  ENSG00000253652_2 (sequence is synthesized)
ttcagggtcttcagcatgttcaaacccacaggtgccttcggggaccaagaggcagagagatgggaggagcggctgggtggggcccgggcagagcggaggacacaggtgtgaatttgtgcg

SEQ ID NO: 898521 - DNA, 120 bp, Artificial Sequence
  ENSG00000253652_3 (sequence is synthesized)
cagccgctgctccctccggccagccgtggccaagtggacattcggacccagagcggccagatcttgtaatttccaagaaagccagaaacccagatttttatataaaatttctgaaatgtt

SEQ ID NO: 898522 - DNA, 120 bp, Artificial Sequence
  ENSG00000253659_0 (sequence is synthesized)
gatgtgtttgcttccccttccaccatgatggtgcatttcctgaggcctccccatccttgctgaatttagatggtacgtctctccttcatgtgctgcctggggttgaggagaagtggcata

SEQ ID NO: 898523 - DNA, 120 bp, Artificial Sequence
  ENSG00000253659_1 (sequence is synthesized)
tgtgctgcctggggttgaggagaagtggcatagagatacaagcctcctgggtgatgagaaagacagagaagcatttttcatagagagttgccaggattgctcagcatccagatcaaccat

SEQ ID NO: 898524 - DNA, 120 bp, Artificial Sequence
  ENSG00000253659_2 (sequence is synthesized)
agcgaagataatctttaattgtagaaacaagaagagaagcaaatatattactagtatccagaagctccttcacagttttcagataatgctaatgagctagttcctggtttgtatcacaaa

SEQ ID NO: 898525 - DNA, 120 bp, Artificial Sequence
  ENSG00000253659_3 (sequence is synthesized)
cttctcccaaattcttcccctaaacattccttcatggtggagctaattagactattgcagctccaccgttcattactgcttgtattttgtaaaaattagtgcatatgtcatgggcctagg

SEQ ID NO: 898526 - DNA, 120 bp, Artificial Sequence
  ENSG00000253659_4 (sequence is synthesized)
gatacatccattgcagggaaatgggagtagggcattcccagttttagctataattgaaaattattcttagggacgaaaatgccattgaataattctgccttttctcctccttgttctctc

SEQ ID NO: 898527 - DNA, 120 bp, Artificial Sequence
  ENSG00000253659_5 (sequence is synthesized)
gcttgtttcttctataagtggggaaaataacatctgttttatcagcctagcagtattgttgttaggattaaaatattataagcacatatatatgtatatctgtatgtgtctatgcatgca

SEQ ID NO: 898528 - DNA, 120 bp, Artificial Sequence
  ENSG00000253659_6 (sequence is synthesized)
tatgtataaagttattgcaggattttaataaatattaaccatgattattgctgttatttgatagccctatgactctggcatataatcagggctaaaatgttagaatatattcaatcctct

SEQ ID NO: 898529 - DNA, 120 bp, Artificial Sequence
  ENSG00000253659_7 (sequence is synthesized)
atgtctttggctttgtattctagtcctcatatttagggtaaaaatagatctgtgtggggtaaagtgaagagagaatgaatgagcattaaccttgttaatggctgatacaaagagatttca

SEQ ID NO: 898530 - DNA, 120 bp, Artificial Sequence
  ENSG00000253659_8 (sequence is synthesized)
gatataaacagaaagtcagtgagggcagtagtggtaattatactctgaaatggagaacagattttcatttatctctaaatttctgtcattttcatttgggagattcattgtataaacaac

SEQ ID NO: 898531 - DNA, 120 bp, Artificial Sequence
  ENSG00000253659_9 (sequence is synthesized)
ccaaagcccctaactatcttacaaaagaaagactgtagatgtttcaatgcagtaaccttgcctagctgctgtagcaactatccacaaggcagcaggattgcattctgtagccgccagttg

SEQ ID NO: 898532 - DNA, 120 bp, Artificial Sequence
  ENSG00000253659_10 (sequence is synthesized)
atgccaatgaataaaacatctctgaaaggaagaaataaatcatttctacttgtaagaataagtaaaaacagagataattactcttttgccagaaaatcaatattttgttcaaggatccct

SEQ ID NO: 898533 - DNA, 120 bp, Artificial Sequence
  ENSG00000253659_11 (sequence is synthesized)
gccttctctacttaaatgtgttttggtttgagggaatcaaacttttcccagttttgagggatgcttctgaggggcatatcctatggtgtggagacacgattatccatttacaaagagaga

SEQ ID NO: 898534 - DNA, 120 bp, Artificial Sequence
  ENSG00000253659_12 (sequence is synthesized)
tctttctctctctctctctctctctctttactaagtctggaaacccttagagtttctcttgaatatatcaagctaattatttttatttttattcactacctttcatgcatttcctacttc

SEQ ID NO: 898535 - DNA, 120 bp, Artificial Sequence
  ENSG00000253659_13 (sequence is synthesized)
cctacttccaataatccttttttattaagtctcccaatccaagtccaccctcactcaaaagtgaccttcccagagtagggtgtacaatgcggagtccacataagcatctctatacttcta

SEQ ID NO: 898536 - DNA, 120 bp, Artificial Sequence
  ENSG00000253659_14 (sequence is synthesized)
aaaaaacaagtaacaatgaagaaaataatcataaagtaaaaatccaaaaaaatagaataacagaaggttttcctcagaattaaaaataaacctatttttatgcagacataaaatgaaaaa

SEQ ID NO: 898537 - DNA, 120 bp, Artificial Sequence
  ENSG00000230749_0 (sequence is synthesized)
cagaaagagaaacaacactgggacttcacttatataggggggaagggtgggagggtgcagagcaggccagctacccaaatctctagacgccttgcaacaattcgcaacggaactgttctg

SEQ ID NO: 898538 - DNA, 120 bp, Artificial Sequence
  ENSG00000230749_1 (sequence is synthesized)
agccctgtttcatctcactcactctacacgttttcactttcattgcatttttgcaactcctttggaccaatccagagatacagccacaggagagagagaggcaccctgggagcaaacggt

SEQ ID NO: 898539 - DNA, 120 bp, Artificial Sequence
  ENSG00000230749_2 (sequence is synthesized)
ggtgttggggtgacagagagagagaaatccccacagcaattccaaataaaagtcgtccccacttagtaacgcatcggaagaagggcctggagggaagacaggagaggagagggtgcagca

SEQ ID NO: 898540 - DNA, 120 bp, Artificial Sequence
  ENSG00000230749_3 (sequence is synthesized)
agccaaggccctcagttgagagcaaaggcggtgcgaggtcccccacactccttacccagggagccgccggggtgcccctgatgctgatatgtccacaagctgccaacccagagggcccag

SEQ ID NO: 898541 - DNA, 120 bp, Artificial Sequence
  ENSG00000230749_4 (sequence is synthesized)
agcacataccagctggaggatgagtggaaagaaggaggagaaaagtccatatttatctgtttttataacctcggcctggtcttattttttctattaagtacaataaaatgggtgagcttg

SEQ ID NO: 898542 - DNA, 120 bp, Artificial Sequence
  ENSG00000230749_5 (sequence is synthesized)
cagtgaacaccacacaaagcaatgttcagtgaggtctagaagcgttcggccgaggaaaactgacaagacaggctaatgaaccgtacagacagggagaaaatagccagcatttgctagatt

SEQ ID NO: 898543 - DNA, 120 bp, Artificial Sequence
  ENSG00000230749_6 (sequence is synthesized)
tcaaactctcgctgtctttcttagaccacctatcttggatttattcctaataaaataagaaataagcagaccctacacttgtcttttcttgaagatagaagggggaaaaatgctccggaa

SEQ ID NO: 898544 - DNA, 120 bp, Artificial Sequence
  ENSG00000230749_7 (sequence is synthesized)
atcagaggcggtcactggcagttaacactcccattattatagagggtaaataaaataaagacaaaaattaaaagcgacaagaaacaggtcaagtttgctagcaaagcttttacaagctca

SEQ ID NO: 898545 - DNA, 120 bp, Artificial Sequence
  ENSG00000230749_8 (sequence is synthesized)
tctcttcaggtcgaatcccagagccagccttaatgaagcaataatagccacattattcaaaaattttcatttcgatggaaatgtatctaaaagggacttaatcatatgcaaataataaaa

SEQ ID NO: 898546 - DNA, 120 bp, Artificial Sequence
  ENSG00000230749_9 (sequence is synthesized)
ggaggtggtagtgacccagcaagcaatatgcatacagatttttttttttcccagggatgttgaaattgaaaagcgcatacctggtcagttagatttgctgatcttgttatatcttcactg

SEQ ID NO: 898547 - DNA, 120 bp, Artificial Sequence
  ENSG00000230749_10 (sequence is synthesized)
tctgattttgatcctccttctctatcgtctatcaccaaatcgataggcattttccctttcaaacagctaatataccggtggcagaaattgtcacataattcgtgtacctacattatgaca

SEQ ID NO: 898548 - DNA, 120 bp, Artificial Sequence
  ENSG00000230749_11 (sequence is synthesized)
gaaataaaaaaatgggaatataatcaggagtgcataaatgacattgacaagtgcaatccaccccccttgtgagatccaaacttccaaataggggaaacacagggcaattgtcctccagag

SEQ ID NO: 898549 - DNA, 120 bp, Artificial Sequence
  ENSG00000230749_12 (sequence is synthesized)
acccccagacgcatccagaattaggaataactttcttttcttgcaaaatagagatatcccagaaaattgacagtgacaagatgattcacaggctacaacatattcaacacccgtgttaaa

SEQ ID NO: 898550 - DNA, 120 bp, Artificial Sequence
  ENSG00000230749_13 (sequence is synthesized)
ttcatctgctcctggggctgtggtcattagagaggtgacctgcgtaggtgacatttaagaggtagcaaagaagagaaggaagaggatgagaagagacaacagaggtatgaacttgtgaaa

SEQ ID NO: 898551 - DNA, 120 bp, Artificial Sequence
  ENSG00000230749_14 (sequence is synthesized)
caacctcagagcagcattcgaaacatcagctgggatgcacagaattgcaactatttacacaaagccagcaagttattaagaatgaacacaaggctagggcgtttgtgatcccagttttag

SEQ ID NO: 898552 - DNA, 120 bp, Artificial Sequence
  ENSG00000230749_15 (sequence is synthesized)
ctcagaccgccgagtccacagcagctacaaccgtggtgttcttgattttattctgcagagtgagctctccacgtttgctttctggaggacccaggtgaccgctcacctccccttcctcct

SEQ ID NO: 898553 - DNA, 120 bp, Artificial Sequence
  ENSG00000230749_16 (sequence is synthesized)
ggagccctgaagtcggaggccctgagccatggacggtatctgaggatcggtttagcgtatctggccggagaaattggcaacatttgctacgaataaaacccaagcgtttccagcagccat

SEQ ID NO: 898554 - DNA, 120 bp, Artificial Sequence
  ENSG00000230749_17 (sequence is synthesized)
ggggagggctggttcctgcgggttcctcctaggcggccgcgcgaagcccaggctcgggggatctcggtggcaggcgctcagctaacttggggaaaggacgtccatggccgtggggccgac

SEQ ID NO: 898555 - DNA, 120 bp, Artificial Sequence
  ENSG00000230749_18 (sequence is synthesized)
tgtcaacgggctgcacctagggatcccaaccccaaggccctcggagagccgggaggctcctcctcagctccacgcacattcccctcccttcgctgatagcccccaccgccccccaaagaa

SEQ ID NO: 898556 - DNA, 120 bp, Artificial Sequence
  ENSG00000230749_19 (sequence is synthesized)
agttccttcaaatgttcctgcagtagagcctttcattttgtctctgcgaagtggcaaagcagctagtattgcgaggggcctagatgtcgcttgtctcagcccataaaaaagaaaaaaaaa

SEQ ID NO: 898557 - DNA, 120 bp, Artificial Sequence
  ENSG00000230741_0 (sequence is synthesized)
ctggcagcctcatccaacagttgagaagggtggaggtgtcaaacctgggtctgtgcccctccaccaccatgctgctgcttcaggaaagatgcctgcttggcctcatgtgaagacgcagat

SEQ ID NO: 898558 - DNA, 120 bp, Artificial Sequence
  ENSG00000230741_1 (sequence is synthesized)
gcagcacagtggctaaggacactggttctaacccattctgcctggatcatctcaggcttgcttattgctgactgcgtggctgatgtgatccatcttggatgttcagcaagcctctgttgg

SEQ ID NO: 898559 - DNA, 120 bp, Artificial Sequence
  ENSG00000230741_2 (sequence is synthesized)
cctcagcccctgtatgttaggagagggagtactggtcaacggagatgctccgaggacttccaaagtacaccttgccctagtgggatggactagggcagtcctggagaagaggccacctcc

SEQ ID NO: 898560 - DNA, 120 bp, Artificial Sequence
  ENSG00000230741_3 (sequence is synthesized)
agctctgaacttcatggtaccaataatgggatttggtggcatccacatcccaagctcacttgcagcccttgctgcagtgtataaagggtattatctagggaatattgtcatttaccaacc

SEQ ID NO: 898561 - DNA, 120 bp, Artificial Sequence
  ENSG00000230746_0 (sequence is synthesized)
gtgcattttaaagtgattgattttatgtggaacaaatttcactttaattataaaaagtgaataaacttttagaagctaaccttggaagaaggtagagactggaagggatcacaagaaagg

SEQ ID NO: 898562 - DNA, 120 bp, Artificial Sequence
  ENSG00000230746_1 (sequence is synthesized)
ggaagggatcacaagaaaggcttctgggatgttgaccgtgcagcataactgtctgacattggcatgccatttgtaaactgtcaaagtgatggttgggagtgtagcagtgaggacaaccag

SEQ ID NO: 898563 - DNA, 120 bp, Artificial Sequence
  ENSG00000230746_2 (sequence is synthesized)
ttggtttgggttgatttctctaagaagtacatgctgaaatgaagataagagtacaaaatatttatcggagagtagtaacacagaggagacacaggatttggcagaaacactaaaccatgg

SEQ ID NO: 898564 - DNA, 120 bp, Artificial Sequence
  ENSG00000230746_3 (sequence is synthesized)
gtccaaaggggagctctaaagtaaatatgagccattaagggagccccacactggatggaaatggccaagcctttttacaaccaccttctccttgagacactgcctgcaattcaccctggg

SEQ ID NO: 898565 - DNA, 120 bp, Artificial Sequence
  ENSG00000230746_4 (sequence is synthesized)
aaagcaaaacctcaactgtttctgcctcattcattctttgtcagtgccgtaagaagattgagatttcagcttgtaactgttgaagcaaaacctaaagtggttaataatgggagtttgtca

SEQ ID NO: 898566 - DNA, 120 bp, Artificial Sequence
  ENSG00000230746_5 (sequence is synthesized)
gtggttaataatgggagtttgtcacaactatcttaacacaaatataaaatatttgcatgaactgtaataaccttttatttataaattaaaaacttattgataaaatacagatttcaataa

SEQ ID NO: 898567 - DNA, 120 bp, Artificial Sequence
  ENSG00000230746_6 (sequence is synthesized)
ttcttaagtaattcagaatagatcatctttcattttagttcctacacttgatccttagaagaaaaagaaacctattttttttataatgcaaacactttagtttaacataaacaagaaaaa

SEQ ID NO: 898568 - DNA, 120 bp, Artificial Sequence
  ENSG00000230746_7 (sequence is synthesized)
agagggaagaatgagaagtgactacttcatggatacaaggttttctctgggggtgatgaaaatattttgacatctgataaaggtggtggtagtacagcactgtgaatgtaccaattgcca

SEQ ID NO: 898569 - DNA, 120 bp, Artificial Sequence
  ENSG00000230747_0 (sequence is synthesized)
ggcacatcgaggctctagtgaccgcattatgaattagtcctttccttttctcctcatgtgattgcagcgagcgctcgtcttgtttgtaaatcgtgctggcaagccccgttttaaccaact

SEQ ID NO: 898570 - DNA, 120 bp, Artificial Sequence
  ENSG00000230747_1 (sequence is synthesized)
acgaatttcatttcggaatgaaaaaggagacgcactttcggacagggcagcggttgccgccggtccttcctctgagctaccggtccctagaaggaagacctgccttcgaccgatctggaa

SEQ ID NO: 898571 - DNA, 120 bp, Artificial Sequence
  ENSG00000230747_2 (sequence is synthesized)
atgagtcccagctgcaagcccagggcggcggaagccccacgggccgagccgaagaaagacgaggcgggggacggggagcgtagtgccgcgtgccgggacccacaacccctttcccctggg

SEQ ID NO: 898572 - DNA, 120 bp, Artificial Sequence
  ENSG00000230747_3 (sequence is synthesized)
ggaaaaagctctcctttgccgctgcccatcccccagggcccaagcgatgcttcctaaccgcgtggacgcagcttgatgggggagaaagagctctgggagcagggcttagagcctcgtctc

SEQ ID NO: 898573 - DNA, 120 bp, Artificial Sequence
  ENSG00000230747_4 (sequence is synthesized)
gcctcctgccaactcggtccggcaaggttccgaacctccctgagcctcagcttcctaatctggcaaacatgacgacaaaagtccttctcttttaaggtttgcccacagcccagctgcatc

SEQ ID NO: 898574 - DNA, 120 bp, Artificial Sequence
  ENSG00000230747_5 (sequence is synthesized)
tgtgaacatgaatgctacttctacagaaacagagtggaatctccgaaatacctttgagaccctttcgtgtcaggtgggtgggccacagcctgatcatggaataaaagtcagccttaagga

SEQ ID NO: 898575 - DNA, 120 bp, Artificial Sequence
  ENSG00000280029_0 (sequence is synthesized)
cgcgtcagaaacacttcatacttgtacctctgggatagggtcctggtgtcgctcacgtccaccagatgcctggaaaggggtcctcgggcaccgagcagcgacccaatgaggcctccctgc

SEQ ID NO: 898576 - DNA, 120 bp, Artificial Sequence
  ENSG00000280029_1 (sequence is synthesized)
agaggaagaacgacgacaccaaggccaacgccaccaccagaatcgcggtcttgaatgctgaaaagagctgcaacggtctcaggagaattttcgcggatggggcttgtgaatgaagccatg

SEQ ID NO: 898577 - DNA, 120 bp, Artificial Sequence
  ENSG00000280029_2 (sequence is synthesized)
gtcagttccggagcgttatcgttgatatctaccacctgtattatgacagtgcattttccagaaagacctgccccatcagaggctttaatatccacctgatatgacacaattttttcaaaa

SEQ ID NO: 898578 - DNA, 120 bp, Artificial Sequence
  ENSG00000280029_3 (sequence is synthesized)
catttcatgggctttttccttttcctttttttgaagccttagcctgcagcgccaccatgcgttgtctttgcttcgaaacgaattgctacaattgatctattctctattctattaggagtt

SEQ ID NO: 898579 - DNA, 83 bp, Artificial Sequence
  ENSG00000280029_4 (sequence is synthesized)
accaggtagcccggctcggcggcccgcccggggcataacagcacgaagagtgagctgtcgttggcgtccagcaccagcacgcg

SEQ ID NO: 898580 - DNA, 84 bp, Artificial Sequence
  ENSG00000280029_5 (sequence is synthesized)
ctgctcagcgccggggagccgcggtctgtggctcccacgcggaactcgaacgcctgcagggcctcgtagtccagcgacctgagg

SEQ ID NO: 898581 - DNA, 120 bp, Artificial Sequence
  ENSG00000280029_6 (sequence is synthesized)
gggaggcgaggcgcaggtgtgggttctggggcggcagcagcgagtaggtgacctgggcgttggtgcctgagtctctgtctgtggcgctgacactgccgatgtgcagggcggggctgttgt

SEQ ID NO: 898582 - DNA, 120 bp, Artificial Sequence
  ENSG00000280029_7 (sequence is synthesized)
ggtgtaggaggtttgggtgaaggcgggggcgttgtcattgacgtcggagaccaggaccgttatgttgtgctcggttttcagcctgggtgtccccatgtcggtgacagtgatggtgatgtt

SEQ ID NO: 898583 - DNA, 120 bp, Artificial Sequence
  ENSG00000256064_0 (sequence is synthesized)
cgagtcttcatttgactgtaactttaatgagtgaagactgcaagcatggctcaggaagtgacctggggatggtgtagccgctgagaagttaatgctgtaggcgctcagaaaggacgtcct

SEQ ID NO: 898584 - DNA, 120 bp, Artificial Sequence
  ENSG00000256064_1 (sequence is synthesized)
taaaaccgaagcaccacgttcaagaggattctgttcttaggaatcaactctgaatatctcctctgtattctcccattttttgttattttggctactgagcctacaaagtgaggaaagtcc

SEQ ID NO: 898585 - DNA, 120 bp, Artificial Sequence
  ENSG00000256064_2 (sequence is synthesized)
agcgtgttttctttgtgtccagggaggaaaaataaaaacattagtaactctattgacaaagctttgccccttaaaaaggggagctcttttcttcaggtttccctgcaataaaaaaaatca

SEQ ID NO: 898586 - DNA, 120 bp, Artificial Sequence
  ENSG00000248690_0 (sequence is synthesized)
gcctacaagccttttttgctgttctgcaggaagctagaccaagaatgaagttaatgcatggattagggagaaacaaagtgaaacttagcaaaactgatccaggaccctgatgacacgtga

SEQ ID NO: 898587 - DNA, 120 bp, Artificial Sequence
  ENSG00000248690_1 (sequence is synthesized)
atggatctgattcacgattttggtatctgactgatgctgtcttcgtggaatgagttaggaaagagtccctcctcgtcaactgttgggaatacattcagcagggttggtatcattgcatgt

SEQ ID NO: 898588 - DNA, 120 bp, Artificial Sequence
  ENSG00000248690_2 (sequence is synthesized)
gattttttttgttgggaggggccaagatggctgaataggaacagctccaatctgcagctccaagcaagacgaatgcagaagaaatgcgtaaatggcgacagtagagccagccttcatgaa

SEQ ID NO: 898589 - DNA, 120 bp, Artificial Sequence
  ENSG00000248690_3 (sequence is synthesized)
tccagaaatgtgagccacattttgaggatagcagagtcactgcagaagcctggatccttgcataaccttgtcgagtgggaaaatctacccatacttgaccaaccacctaactgggggctc

SEQ ID NO: 898590 - DNA, 120 bp, Artificial Sequence
  ENSG00000248690_4 (sequence is synthesized)
tacatctgagagaaatgattttttatcttatttaagccactgtagttaggagtcagtttattacaggacattgcctggtgttccaacaaataaactaccttatttgtttcaataaataaa

SEQ ID NO: 898591 - DNA, 120 bp, Artificial Sequence
  ENSG00000248690_5 (sequence is synthesized)
agattccaatgtcactaacggttttctgagggagttggaaagagataagagagagaccttggggaacaattttaaagtggctcaatagcgatcgcagagccaaactcatacctacatcaa

SEQ ID NO: 898592 - DNA, 120 bp, Artificial Sequence
  ENSG00000248690_6 (sequence is synthesized)
tgtggtgcagagaatctctaagaatttttaatgctgaattggagcaaagaaacttcaaggaggaagcaaagtgaagaacacagatttcacagatgggatgcctggctcaaattccagctt

SEQ ID NO: 898593 - DNA, 120 bp, Artificial Sequence
  ENSG00000248690_7 (sequence is synthesized)
gaccgctggtagctgtgtgaccctcggcaagttacttgacctctctctactcagtgtcctcatctgtcagtgtaatatgaatcagaaaacatgaactcagactgatgctggaagccacct

SEQ ID NO: 898594 - DNA, 120 bp, Artificial Sequence
  ENSG00000248690_8 (sequence is synthesized)
aattctcagagtggaatgagcaacagattttcattagcgaaagctcctctagctgctgcatgaaatgatgtctagacagagaaatgcgtaaatggcgacagtagagccagccttcatgaa

SEQ ID NO: 898595 - DNA, 120 bp, Artificial Sequence
  ENSG00000248690_9 (sequence is synthesized)
ctataagcagaatcagcctcgttatgacgttgatgctataagcaacggactgaaagatacaaagagcaagcagacaggatgaaatgcgtaaatggcgacagtagagccagccttcatgaa

SEQ ID NO: 898596 - DNA, 120 bp, Artificial Sequence
  ENSG00000248690_10 (sequence is synthesized)
atcagctgccttgcaacagtgaatgataaagaaaatactatcataaaagggatacaatacatggtccgtgactgcaaaaccatattaaagttcctgttcattgacgtcatggttcacata

SEQ ID NO: 898597 - DNA, 120 bp, Artificial Sequence
  ENSG00000248690_11 (sequence is synthesized)
tggtgcatatgtataattggaaatctcagaattgcattttcatgaaagaagatgaagataccaaatgccttactaagagtatttatttgtttgtcagttatttgcatggaaatgtggtaa

SEQ ID NO: 898598 - DNA, 120 bp, Artificial Sequence
  ENSG00000248690_12 (sequence is synthesized)
agagagagcaatgcctgggactgggtgttagcattagtaagtcagagaaaaaccttctttgtaagaagttatatacgaagttgtcaactttaatttagcataaattaataactgaagact

SEQ ID NO: 898599 - DNA, 120 bp, Artificial Sequence
  ENSG00000248690_13 (sequence is synthesized)
gaaacaaaacacagatggcatagagtcaatctggagtcttctagaatcctttattaaaagaaaaaacccatgagagaaaagtaaagattggaggtctcaaatcacagtaattgtattact

SEQ ID NO: 898600 - DNA, 120 bp, Artificial Sequence
  ENSG00000248690_14 (sequence is synthesized)
caaatcacaaattcctccttaactcgacacttaactcgatggaattttcatgatgtcaaagcatgtagatagttggataattagaaatgagaataaagaacagcttaatgaataacagaa

SEQ ID NO: 898601 - DNA, 120 bp, Artificial Sequence
  ENSG00000248690_15 (sequence is synthesized)
gtttcaagtctctggttcaatgggctgctcgaagccaggactgggtaattctttccagacgtcttgacttctccttccccgccgttgttgcccttctgcctcctccaacttaagggggtc

SEQ ID NO: 898602 - DNA, 120 bp, Artificial Sequence
  ENSG00000248690_16 (sequence is synthesized)
ttaacaagtgagctggatcttctgaggggtggacttctttggaactcgacaggaccttgaagactgggttcttagtccttatcacatatatgggctataatgaataagtctaaacagaaa

SEQ ID NO: 898603 - DNA, 120 bp, Artificial Sequence
  ENSG00000248690_17 (sequence is synthesized)
agtcgaataaactggaaatgatgctttcatcacgtcgcacaagaaaaacacatttgttgtttctcgcctcttgtaattcatgacccataagacaaaagtaaaatgttctctgactgcaaa

SEQ ID NO: 898604 - DNA, 120 bp, Artificial Sequence
  ENSG00000248690_18 (sequence is synthesized)
tggatgtaaaaactgattatacagctacacatttctgtcatcctcccatctctaccccaaagaaagaggagctgtttggatcagaagatgacatcctttcacccatccctttcaggtttt

SEQ ID NO: 898605 - DNA, 120 bp, Artificial Sequence
  ENSG00000248690_19 (sequence is synthesized)
gacatcctaaaatgtaccttatggaacccatacctgttatgttttcacctgtacaaggcaacagagaaaacatggtagtttttacttgagtagatgtgacttagcaatatgttgttgctg

SEQ ID NO: 898606 - DNA, 120 bp, Artificial Sequence
  ENSG00000248690_20 (sequence is synthesized)
acctccatcccacagcacaaaacatatgtttatatgtctgacagacaaagtatccagaacaaggatttagtaccttcataatcctctgtatatgtggttctagaacttttggtaaagaaa

SEQ ID NO: 898607 - DNA, 120 bp, Artificial Sequence
  ENSG00000248690_21 (sequence is synthesized)
ttgagaacctcaaaaaaagtttatatgttatatgtatcaatatttaccacattagacattaaagctgacttaaaaagttaaaatacttaagtcatttgaagtaataataaatgcagttac

SEQ ID NO: 898608 - DNA, 120 bp, Artificial Sequence
  ENSG00000248690_22 (sequence is synthesized)
ataccaacttaataacattttgcgaaaatagctatttttcaaaacctaaagtgagaaaagtggcagttttccatttttgcaaatctctttgctgtctagctgatagaagacagctggatt

SEQ ID NO: 898609 - DNA, 120 bp, Artificial Sequence
  ENSG00000248690_23 (sequence is synthesized)
ctcctatttgcttttgcattcaattgttgttttgattgaagtatatgaaaaaaaatctggtgtcatacacatatataattgggaaatggaagagtatttacacaggcttttttagatatt

SEQ ID NO: 898610 - DNA, 120 bp, Artificial Sequence
  ENSG00000248690_24 (sequence is synthesized)
cttcctttatactacatcaaaacttgataagttgcaatgttgtgaattggcccagggcttggccctctgaagatttgctgaaaatcactgacatgaagtagattaataggataaaaggca

SEQ ID NO: 898611 - DNA, 120 bp, Artificial Sequence
  ENSG00000248690_25 (sequence is synthesized)
tatacatttatttaatgtgtatacacagcggcctttagaatgaagacccaaagatacagaagaaattgtctgtttttatgcttaagtttaacaaagaatgggcagccgtgtagagatagg

SEQ ID NO: 898612 - DNA, 120 bp, Artificial Sequence
  ENSG00000248690_26 (sequence is synthesized)
ataggacaaaaagggcataatctaatgctagctgactgagtgaggaagcccagcaaggcctgtcagtgtctcctcagtatgagtgaattttgtgtactctgataatacattaaaatctgt

SEQ ID NO: 898613 - DNA, 84 bp, Artificial Sequence
  ENSG00000248690_27 (sequence is synthesized)
gggcaattgctcctgagacccaacaggcagcaacggtcccaaggtctttctgcccccgataacagaaaatctcttttttggaag

SEQ ID NO: 898614 - DNA, 120 bp, Artificial Sequence
  ENSG00000248690_28 (sequence is synthesized)
tctgtcagcaaccagaagccaggcatgaagaaagatacaaaaaactacgagttttttcattttgcctcatatgctggataaatatggattatgtgaataaataaatgaccaggcatcctg

SEQ ID NO: 898615 - DNA, 61 bp, Artificial Sequence
  ENSG00000248690_29 (sequence is synthesized)
ctgcttcagcttcccaaatagctgggactacagggtctccaatatttgagaactgacacat

SEQ ID NO: 898616 - DNA, 120 bp, Artificial Sequence
  ENSG00000248690_30 (sequence is synthesized)
ttttttttcctcatccacatcctacctataagggaggaagcaaagtgaagaacacagatttcacagatgggatgcctggctcaaattccagcttgaccgctggtagctgtgtgaccctcg

SEQ ID NO: 898617 - DNA, 120 bp, Artificial Sequence
  ENSG00000248690_31 (sequence is synthesized)
aattgctcctgagacccaacaggcagcaacggtcccaagggtgagggagtgggcagggagaggctgatggggcttctacacgttccctcccgtagctgggctgctgcagctcgttcgccc

SEQ ID NO: 898618 - DNA, 120 bp, Artificial Sequence
  ENSG00000248690_32 (sequence is synthesized)
cagaggcgcgcggtgtccttgagtccaagtattcagcgcggacgtttgggggacggagggagaggcgctaggggaactggcacctaagactgtgtaataggacacaggtcttgcaagtcc

SEQ ID NO: 898619 - DNA, 120 bp, Artificial Sequence
  ENSG00000248690_33 (sequence is synthesized)
tcctccccaggcaccgcccctgtgctcccagcgcctctttgcagctttaattatcctttcagcgccgttcccccgcggctgcgtttccgtggtcagaggaaaaaggctctttcgcctccc

SEQ ID NO: 898620 - DNA, 120 bp, Artificial Sequence
  ENSG00000248690_34 (sequence is synthesized)
ggttctcaccctcatacagaccctcctttcagacccgccctcctgttcacagggacccatttcggagccctggctcacgctgggcgggaactgccgtgacgaattccccccaaggtgttg

SEQ ID NO: 898621 - DNA, 120 bp, Artificial Sequence
  ENSG00000248690_35 (sequence is synthesized)
attatccatcccaacccagcctctggcttccctcccacctccaccccagctcccacaggcccctcgccccgttcatcggctgggcgctcgagacggcgcccccagatctcccaccgggca

SEQ ID NO: 898622 - DNA, 120 bp, Artificial Sequence
  ENSG00000248690_36 (sequence is synthesized)
gtgtccccagctgcagctgaggagagaagcgccggcgtgcgcggtgccacgtcggaattggctctggggacgccgcagctgccgaagcgcagcgcgcggtccccacgcacgccctgcctc

SEQ ID NO: 898623 - DNA, 120 bp, Artificial Sequence
  ENSG00000248690_37 (sequence is synthesized)
ctgctgcatgaaatgatgtctagacagagccatttttagatcttccattggattgggaacgtgaaaatggcacagaaagagaaagaacatgccaagaagtgggggcactcaggcacttgc

SEQ ID NO: 898624 - DNA, 120 bp, Artificial Sequence
  ENSG00000248690_38 (sequence is synthesized)
caagttacttgacctctctctactcagtgtcctcatctgtcaggaattcaagtggagagactttcccaggtttctgtgctgtagccaagtcaaatgagccatgtcttcctaataaagtaa

SEQ ID NO: 898625 - DNA, 120 bp, Artificial Sequence
  ENSG00000248690_39 (sequence is synthesized)
cagatgaaagaagatcttcataagcaacatcaccatcttgtcacagcagccaaatggtggcatgtcatttcttccaggaaagtatatatactctgaatgtatcatgtttcagcattgctc

SEQ ID NO: 898626 - DNA, 120 bp, Artificial Sequence
  ENSG00000248690_40 (sequence is synthesized)
tgttataggcttgtatatctaattttgtcatcacacaagatctattgggctggattaaaattaaccaagatcataagacaaatgtgtaaaaacattaaatttttcatttacaatgagaaa

SEQ ID NO: 898627 - DNA, 120 bp, Artificial Sequence
  ENSG00000248690_41 (sequence is synthesized)
agagcgtggtgacaatttggcttgactacaactatgcctgaatgaagtacttttccttttgagaaaaaaggaatctacgagcatgaggactcccttttctccttttagtttattttttta

SEQ ID NO: 898628 - DNA, 120 bp, Artificial Sequence
  ENSG00000248690_42 (sequence is synthesized)
agtcatttattaattttccctttggtaaaaataattccagagtttgccttttcttttttcttttgaggggaaggggtaactttacaggcagtttccttagtcattctaggcagccagcca

SEQ ID NO: 898629 - DNA, 120 bp, Artificial Sequence
  ENSG00000248690_43 (sequence is synthesized)
atgaaatatagactaaacaacacagaggatattaattttacctcaccatacatgcacacagctagtgatgcataaagtcttcattccaagactgacattaaaagggttgtgcaactgcct

SEQ ID NO: 898630 - DNA, 120 bp, Artificial Sequence
  ENSG00000248690_44 (sequence is synthesized)
gaggggccaagatggctgaataggaacagctccaatctgcagctccaagcaagacgaatgcagaagatagcagattgtattcccatctcttcagatagagagttcttggagaaatttaaa

SEQ ID NO: 898631 - DNA, 120 bp, Artificial Sequence
  ENSG00000248690_45 (sequence is synthesized)
atatgcagtttagaatctgtaatggccccggttagtgcatacccgacttactggccttccaagtaggctcctggtaaaaagaaatgcgtaaatggcgacagtagagccagccttcatgaa

SEQ ID NO: 898632 - DNA, 120 bp, Artificial Sequence
  ENSG00000247699_0 (sequence is synthesized)
tgagtcagcgcctgcatctccaccaccatcatcatcgtcactgtcttcatcgcctctgggctggaccagcccctgcctgtgagctccctggagccagaggtgcaaagtctgcaatgacac

SEQ ID NO: 898633 - DNA, 120 bp, Artificial Sequence
  ENSG00000247699_1 (sequence is synthesized)
aaaaagccagcacgctgggaggggctctggagaccatctcattgttcattcatttgtctattcaatccattttattgactgctcactgtgtgccagacacatgggccctggagatacaga

SEQ ID NO: 898634 - DNA, 120 bp, Artificial Sequence
  ENSG00000247699_2 (sequence is synthesized)
agaaacacgtgaggtccctgccctccaggaattaagaagataaagtcaaaagtgctgtaaagaacaacaggatgatgggccagtatttgaagaggtcgttttcagatggggtgggcaggg

SEQ ID NO: 898635 - DNA, 120 bp, Artificial Sequence
  ENSG00000247699_3 (sequence is synthesized)
aaggcatgtctgagaaaggaatctttgtggacaccttaatgcttaggacatggggctgagaaaagcaggcagaggaatttcagataacgcctcagttggtaaaaagctagggggatggtg

SEQ ID NO: 898636 - DNA, 120 bp, Artificial Sequence
  ENSG00000247699_4 (sequence is synthesized)
caggcaaggaatagaaggaaggacagtgtggtgggagtttggtggtgagtgaaagaggggcctggggaccgtgcacacttgaaggctgtagccgggcatctggcttggattttgaggact

SEQ ID NO: 898637 - DNA, 120 bp, Artificial Sequence
  ENSG00000247699_5 (sequence is synthesized)
gaggggaccattacagggctttaggcatggggatggcacgatccaatttacatttttcatgtcattccatctgcttcctggagaacacatgataggaagaaggaacgtggaagcagggag

SEQ ID NO: 898638 - DNA, 120 bp, Artificial Sequence
  ENSG00000247699_6 (sequence is synthesized)
accagtgaggtggtaactccagaaacaaagaggtggcggctgatggggcgagtgggaggagcctgaccctggtggattttggaggcacagaaggcaaacctgctgggggattgtctgtgg

SEQ ID NO: 898639 - DNA, 120 bp, Artificial Sequence
  ENSG00000247699_7 (sequence is synthesized)
gggacagggagagcaaagactgggtgccttcctcttcctgccttcctcttcccgctttgcaccccttctggcctgaatcatctccctcaggtaactaagaggagggggcaaaggactcca

SEQ ID NO: 898640 - DNA, 120 bp, Artificial Sequence
  ENSG00000247699_8 (sequence is synthesized)
gactatgtagccagatatagccccaggtccccagggctatatcttgggtctgtgcagaaactagggacgtgggggccagaggtatttttagccttctagctctctccttctgtcttctgc

SEQ ID NO: 898641 - DNA, 120 bp, Artificial Sequence
  ENSG00000247699_9 (sequence is synthesized)
aatccctctccctacccccttcccccttcttctctccttctcccttccctctccagctccttcccccacctcctgctcctctttctctctctctcacacacacatacacacacacacaca

SEQ ID NO: 898642 - DNA, 120 bp, Artificial Sequence
  ENSG00000247699_10 (sequence is synthesized)
atcaggaggaagcctccagcagagacaagcggtctccagggacagagcagaggagctgacaggagtttccggagcagggggaggctgacttccctgccttccccattccttccagctccc

SEQ ID NO: 898643 - DNA, 120 bp, Artificial Sequence
  ENSG00000247699_11 (sequence is synthesized)
actgcctctcgcttcctgcagcatttctctccagacgcgcgcttctcaactggaggccactttgtcttcctgggacatttggcaatatctggaaacattgttggttgtcataactgagga

SEQ ID NO: 898644 - DNA, 120 bp, Artificial Sequence
  ENSG00000247699_12 (sequence is synthesized)
gggggcagggttggcatggagtgggtagagaccagagatgcacaggacagcccccataacaaagaatgatcggcgccaacagtgctgagagccctccctaggctctgccggcagagctgg

SEQ ID NO: 898645 - DNA, 120 bp, Artificial Sequence
  ENSG00000247699_13 (sequence is synthesized)
aagggactgtcctcttccttgtggtcccactatcaccacactggccacactgtccctgcattatctctattggtcttctcagccacactgtgaggtacatagtattattcacccaaggtc

SEQ ID NO: 898646 - DNA, 120 bp, Artificial Sequence
  ENSG00000247699_14 (sequence is synthesized)
atgcaggcagtaagaggcagagctgggattaagactgtgaagcctgtggtttaactggtctctctctactgaaggggttgtcacagcctgtgtcattgttattagcaatgggacacgctg

SEQ ID NO: 898647 - DNA, 120 bp, Artificial Sequence
  ENSG00000247699_15 (sequence is synthesized)
tctcaagtgaagtcttattcagaagtccaatgtaagtccactgtgtaagacagagagcgtagaactgcctagggtgaagcagtgtgggaggttatgaaccccctgggcccacccctcttc

SEQ ID NO: 898648 - DNA, 120 bp, Artificial Sequence
  ENSG00000247699_16 (sequence is synthesized)
ccaccttatggagcctccaaaagccatctgtctagccgggcagggcccctgtggagggctgcacaggttgtgcactgcaaaactctaggagaggccactcccatgggcttcttcgtgggg

SEQ ID NO: 898649 - DNA, 120 bp, Artificial Sequence
  ENSG00000247699_17 (sequence is synthesized)
cctgttgaggtaaggcagagctcctttagggaagggtggcaaatgggatttctcccattgcagacatgtgttgcttagcagacaaggtgtcacggtagcctaataaggtctggagtagga

SEQ ID NO: 898650 - DNA, 120 bp, Artificial Sequence
  ENSG00000247699_18 (sequence is synthesized)
taataaggtctggagtaggaaagcgggatgagagtggctgagtggccagcatctgccttcctggtcctaaaatatggagaatagaaaatagaattggaggccaggcgcggtggctcacgc

SEQ ID NO: 898651 - DNA, 120 bp, Artificial Sequence
  ENSG00000247699_19 (sequence is synthesized)
aagtcaaaagtgctgtaaagaacaacaggatgatggggagtggtgccctcgggtcccaagagggctgcagactgcaggcctccctgaagtgaagatgcagcaaagtggaagacagcacac

SEQ ID NO: 898652 - DNA, 120 bp, Artificial Sequence
  ENSG00000247699_20 (sequence is synthesized)
ggaaaccatgcagcagctccctctggggaagagaaagagggagccacgttgctctataccctgtggacttcttgcaatatgaaccttcatggacctaagaaaaataataataaaggaaaa

SEQ ID NO: 898653 - DNA, 120 bp, Artificial Sequence
  ENSG00000277631_0 (sequence is synthesized)
gggactggcagattattgcaaaagggcacggggcagagggactatgttgtgagcctgcgaaagaagtttgtgtggggactgtgggcagtgaacgcgttgggaacaatatggaaaactggg

SEQ ID NO: 898654 - DNA, 87 bp, Artificial Sequence
  ENSG00000277631_1 (sequence is synthesized)
gtgggcagtgaacgcgttgggaacaatatggaaaactgggagccgccttggaatctacagggccggagagaccgaggggctcactag

SEQ ID NO: 898655 - DNA, 120 bp, Artificial Sequence
  ENSG00000277631_2 (sequence is synthesized)
catgcatgagccaccacatccagcctacctaaaatattgaatgctgttaataaatctcctgaggccagcataagaaggtgatgggcaaaactaatgcagtaggagctgaaatcgaccagg

SEQ ID NO: 898656 - DNA, 120 bp, Artificial Sequence
  ENSG00000277631_3 (sequence is synthesized)
gggttcttatccaacagacagcagcaaaactctttgtgtatctgcgttcctttcaacaagtgtgacttcctccatggcatcattcgtgagcgtaacacagagctcagcaataacgtttct

SEQ ID NO: 898657 - DNA, 120 bp, Artificial Sequence
  ENSG00000277631_4 (sequence is synthesized)
ctctgagaggctcttcctaatagaactgctgcttcagtttagcttgaaaaagcccacacccagttcctaatgacaaacatctgaacaccgggtcttcccacgagcaagaccatgctatgc

SEQ ID NO: 898658 - DNA, 120 bp, Artificial Sequence
  ENSG00000277631_5 (sequence is synthesized)
ctcctgctcgctctgttctataagcaacccacagattgctccctgtgaagaggagcctgccaggggagcagcattccaccagaccctgatttagcaagatatttccgtatcattccccca

SEQ ID NO: 898659 - DNA, 120 bp, Artificial Sequence
  ENSG00000277631_6 (sequence is synthesized)
accagctggaagtcctccactgctcttgtgtaaaaatctaactcatctcgctgaatttcctgatttaaaagtctaattcatttcaccaaaagtgtgacagaaggaaaccaagtacaccat

SEQ ID NO: 898660 - DNA, 120 bp, Artificial Sequence
  ENSG00000277631_7 (sequence is synthesized)
ctctctcttaccaaaccgaagctattgcatgtgcattctgggggaaaaaatggtccaaatatgttatggagggggtgccagcccagtgtcatcctcttactattgccataggatcttggc

SEQ ID NO: 898661 - DNA, 120 bp, Artificial Sequence
  ENSG00000277631_8 (sequence is synthesized)
tgatggcatcagaggaaaaacaagtttatcgattactttcaaccattaagctcactcctccatgaaaaataagtcacaagtccaatgtctcttattaaaataagcactgcaaaatacaaa

SEQ ID NO: 898662 - DNA, 120 bp, Artificial Sequence
  ENSG00000277631_9 (sequence is synthesized)
gccttggaatctacagggccgggctgaagaaaagaagaatggtattcacgcagttcccattttacagatgaaaacaagaggactttttctgtgaagtcaagaaagtggttacaatggtac

SEQ ID NO: 898663 - DNA, 120 bp, Artificial Sequence
  ENSG00000277631_10 (sequence is synthesized)
gaagccgtcagttgaaacctgctgggactttttagccattctcttcaacataaagaatgggtgtttttggagggggtgagaggaatggggaaatgttgtcaaagagtacaacgttttagt

SEQ ID NO: 898664 - DNA, 120 bp, Artificial Sequence
  ENSG00000277631_11 (sequence is synthesized)
tgagacaggaagaatatattttgttgagatctacagcacagcatggtgactgtagttaacaatgaagtattgtctatttccaaattgctaagacaataaatttcaaatgttctcaccaca

SEQ ID NO: 898665 - DNA, 120 bp, Artificial Sequence
  ENSG00000277631_12 (sequence is synthesized)
tacattgtataaagtcccctggagccagggttaggaagcgcatctgttctttggtgttctgggatgaaggagaaaggaaaatgtgctgccagaagtgagtgggaaggagcccatgagata

SEQ ID NO: 898666 - DNA, 120 bp, Artificial Sequence
  ENSG00000277631_13 (sequence is synthesized)
aaggaagtaaatccatttgctgattgcaataataatggtaatacacgaagctatacatacatacatacatacatacatgcatgcatgcatgcaaattttcacattttttaaaaaaaagaa

SEQ ID NO: 898667 - DNA, 120 bp, Artificial Sequence
  ENSG00000277631_14 (sequence is synthesized)
cgagtggagggtcacatgaagaaaatggtcaaacagcaccacctacagcaagagctgagaagtgcagcggagccgggctgagtcaggaaagaaaagcaagctggggcctggctcagcgct

SEQ ID NO: 898668 - DNA, 120 bp, Artificial Sequence
  ENSG00000277631_15 (sequence is synthesized)
ctcccctctgctcctgtctgcacggaaagattaggatgacagtggcaggacgcctgtgcacctagtatgcatcacttgaagggaacacacagattccagtaaacagttggaaggaaatgt

SEQ ID NO: 898669 - DNA, 120 bp, Artificial Sequence
  ENSG00000277631_16 (sequence is synthesized)
taataccaggctctgctaaacaatatgaaatgactcctagatgagacaagcgactttcatcaaagtttcctgatacctgaaaagacagcccaggggatcctgcactacatctggtgtatg

SEQ ID NO: 898670 - DNA, 120 bp, Artificial Sequence
  ENSG00000277631_17 (sequence is synthesized)
aattaagcgggtttttttcccctttgtaatcaaggctcatacacaaacaaaatcacactttagaaacggcctatttcaacttgtaactagcttgctttcaggggctccaggtcaaaaaga

SEQ ID NO: 898671 - DNA, 120 bp, Artificial Sequence
  ENSG00000277631_18 (sequence is synthesized)
aatagagcacaaagacgctttctccttagggatcatacacaaattcactctgtccgtttctttcccacatggagcaacaaagccatcagacctctccatccacccattgggtccttcctg

SEQ ID NO: 898672 - DNA, 120 bp, Artificial Sequence
  ENSG00000277631_19 (sequence is synthesized)
attaaagtgagataaatcacagccctctctctccagatggcaggcgacaagagggggatgcttgcctcaagaagtcctccccatccctctgcattcatgcaagcccgagcggagagatgc

SEQ ID NO: 898673 - DNA, 120 bp, Artificial Sequence
  ENSG00000277631_20 (sequence is synthesized)
atgcaagcccgagcggagagatgcaagaaattatggatgcgttttaattccccagaccctgcaattaaaaatggaaattttttggccacgtgtattggctcacgcctgtaatcccagcac

SEQ ID NO: 898674 - DNA, 120 bp, Artificial Sequence
  ENSG00000277630_0 (sequence is synthesized)
gctttgcctggtgtttcttgcttggattggcgttttctccctcgcattcctttgctgggcctgactttttctctgctgggtttggcattcccttgactgggctgggtgtttccttcggag

SEQ ID NO: 898675 - DNA, 120 bp, Artificial Sequence
  ENSG00000277630_1 (sequence is synthesized)
tcccttgactgggctgggtgtttccttcggaggggggggcttggcctttcctggggtgggcctggggtccccctggtgggcgtgggctttccccgggtgggtgtgggttttccctgggtg

SEQ ID NO: 898676 - DNA, 120 bp, Artificial Sequence
  ENSG00000277630_2 (sequence is synthesized)
agttttggctgggattgacctttctcttcaaacagattggaaacccaaggtttcctgctagttggtgaaactggttggtagacgcgatctgttcgctactaccggcctcccctggctgtt

SEQ ID NO: 898677 - DNA, 120 bp, Artificial Sequence
  ENSG00000277630_3 (sequence is synthesized)
aaaagcagatggtggctgaggtttgttcaatgcccactgcctctactgtgaagaagccatttgatctcaggagcaagatgggcaagtggtgccaccaccgcttcccctgctgcaggggga

SEQ ID NO: 898678 - DNA, 120 bp, Artificial Sequence
  ENSG00000277630_4 (sequence is synthesized)
cagggggagcggcaagagcaacatgggcacttctggagaccacgacgactcctttatgaagatgctcaggagcaagatgggcaagtgttgccgccactgcttcccctgctgcagggggag

SEQ ID NO: 898679 - DNA, 90 bp, Artificial Sequence
  ENSG00000277630_5 (sequence is synthesized)
gaagatgcactgcttcccctgctgcagggggagcagcaagagcaacgtgggcgcttggggagactacgaccacagcgccttcatggagcc

SEQ ID NO: 898680 - DNA, 83 bp, Artificial Sequence
  ENSG00000277630_6 (sequence is synthesized)
tgcttcccctgctgcagggggagcagcaagagcaacgtgggcgcttggggagactacgaccacagcgccttcatggagccgag

SEQ ID NO: 898681 - DNA, 80 bp, Artificial Sequence
  ENSG00000277630_7 (sequence is synthesized)
ggaaaagaagtagtacaactcctgctggacagacgatgtcaacttaatgtccttgacaacaaaaaaaggacagctctgat

SEQ ID NO: 898682 - DNA, 80 bp, Artificial Sequence
  ENSG00000277630_8 (sequence is synthesized)
gatgaatgtgtgttaatgttgctggaacatggcgctgatcgaaatattccagatgagtatggaaataccgctctacacta

SEQ ID NO: 898683 - DNA, 120 bp, Artificial Sequence; identical to SEQ ID NO: 531848
  ENSG00000277630_9 (sequence is synthesized)

SEQ ID NO: 898684 - DNA, 69 bp, Artificial Sequence; identical to SEQ ID NO: 531849
  ENSG00000277630_10 (sequence is synthesized)

SEQ ID NO: 898685 - DNA, 120 bp, Artificial Sequence; identical to SEQ ID NO: 531850
  ENSG00000277630_11 (sequence is synthesized)

SEQ ID NO: 898686 - DNA, 120 bp, Artificial Sequence; identical to SEQ ID NO: 531851
  ENSG00000277630_12 (sequence is synthesized)

SEQ ID NO: 898687 - DNA, 120 bp, Artificial Sequence
  ENSG00000277630_13 (sequence is synthesized)
agtcataagaaagaagaagatctcttgcgtgaaaacagcgtgttgcaggaagaaattgccgtgctaagactggaactagatgaaacaaaacatcagaaccagctaagggaaaataaaatt

SEQ ID NO: 898688 - DNA, 120 bp, Artificial Sequence; identical to SEQ ID NO: 531853
  ENSG00000277630_14 (sequence is synthesized)

SEQ ID NO: 898689 - DNA, 68 bp, Artificial Sequence; identical to SEQ ID NO: 531856
  ENSG00000277630_15 (sequence is synthesized)

SEQ ID NO: 898690 - DNA, 120 bp, Artificial Sequence; identical to SEQ ID NO: 531857
  ENSG00000277630_16 (sequence is synthesized)

SEQ ID NO: 898691 - DNA, 71 bp, Artificial Sequence; identical to SEQ ID NO: 531858
  ENSG00000277630_17 (sequence is synthesized)

SEQ ID NO: 898692 - DNA, 120 bp, Artificial Sequence; identical to SEQ ID NO: 531859
  ENSG00000277630_18 (sequence is synthesized)

SEQ ID NO: 898693 - DNA, 120 bp, Artificial Sequence; identical to SEQ ID NO: 531860
  ENSG00000277630_19 (sequence is synthesized)

SEQ ID NO: 898694 - DNA, 120 bp, Artificial Sequence
  ENSG00000205890_0 (sequence is synthesized)
acgtgagaccaccaagttcactgcttcaagcagcttagagtccagagggcatggacacatgccggagccaggacaagaagagccaccagaaagaaggctaggcattaaggaacagcaagt

SEQ ID NO: 898695 - DNA, 120 bp, Artificial Sequence
  ENSG00000205890_1 (sequence is synthesized)
gctaggcattaaggaacagcaagtgcaaagttcctgagggaacaagcagacagagtctcactacgttgcccaggctgttctccaacactgggctagtgatcttcctgccttggcctccca

SEQ ID NO: 898696 - DNA, 120 bp, Artificial Sequence
  ENSG00000205890_2 (sequence is synthesized)
ctgcaaggctaggtcctcgggctcctcaggccctgggccccctcccaggaatgagtcccgccgctccagcacaaaggggaagaagccctcgtcgccgctgggagaggcgccccctgagag

SEQ ID NO: 898697 - DNA, 120 bp, Artificial Sequence
  ENSG00000205890_3 (sequence is synthesized)
cggcccggacgggaagctgggcccatctggagagctcatgtcacctgcagcatctgcggggacaggtggctgcgggacactctactctgcagcctgacaggggctcaccctccgcccagc

SEQ ID NO: 898698 - DNA, 120 bp, Artificial Sequence
  ENSG00000205890_4 (sequence is synthesized)
acctggccctccaggaattctccacctgctgccagcctgcccggtcctgcagccagggcttcctgggccacaaagggttaatgacctgtgttttggctacccagttccgttaatgtccct

SEQ ID NO: 898699 - DNA, 120 bp, Artificial Sequence
  ENSG00000205890_5 (sequence is synthesized)
ggggtaaactgaggcaggaagcagaaggaaatgacctgcccagcctttggcctctgccagacaatctctgtccccaggaaagctcattccagtgctccagggccacaggccacctctgct

SEQ ID NO: 898700 - DNA, 120 bp, Artificial Sequence
  ENSG00000205890_6 (sequence is synthesized)
ccctgtcccctctcttcccagaacccagcagtttggcttgtagcccctcgccatctgagacagttcccagaacccaggttctcagggactcagcagttggagttgggcccagcctcttct

SEQ ID NO: 898701 - DNA, 120 bp, Artificial Sequence
  ENSG00000205890_7 (sequence is synthesized)
ctcaggaatgcaggaccctaaggcttgggaactgaggtatcttcgcccccaggaatccagctccttcccctgccagaagcccagatcccagcccctgacctcccgggtctctcgccctca

SEQ ID NO: 898702 - DNA, 120 bp, Artificial Sequence
  ENSG00000205890_8 (sequence is synthesized)
ttctcctgctacctcctgagcaggtgctttgactccaccctccagactcagaggtccccacctccaatgtcccccaccaaggattcccaccccagtccccattttccacgggactcaggc

SEQ ID NO: 898703 - DNA, 120 bp, Artificial Sequence
  ENSG00000205890_9 (sequence is synthesized)
attcatgcccccacccctccggactcaggagccctgaccctcagccccccagtttcccagggccctggcgtggggcccaggacagggcgaggtaacaggttgtgccggccgcccggccgc

SEQ ID NO: 898704 - DNA, 120 bp, Artificial Sequence
  ENSG00000205890_10 (sequence is synthesized)
agcgcggctcggagtttctgtttacttcccggtccgcccctggggacgggagccctgggctcccctagggcggctcaggggctggggttcaggggctcgggtcagagggcccgacacaac

SEQ ID NO: 898705 - DNA, 120 bp, Artificial Sequence
  ENSG00000205890_11 (sequence is synthesized)
agctttaccagccccagccctccgggggctcaccacccactaggcacacacacccgtgctctccctcctcctctcgcccggtgtccatgtgcagccctgctcgcaggacgtgagtgtcac

SEQ ID NO: 898706 - DNA, 120 bp, Artificial Sequence
  ENSG00000205890_12 (sequence is synthesized)
gggccccgctcccccgcccccctccacgcgagagacagggacctggagaccgctccccctccccttccgcacctagctgcccaggtgttggggcctccagccccaggcgtcggaagccca

SEQ ID NO: 898707 - DNA, 120 bp, Artificial Sequence
  ENSG00000205890_13 (sequence is synthesized)
gaagcccagagaagcggctgggctcacccccgacggctgagttcctgccggcgcccccggttccccggcgatcccggttcccctgcccccgccccggctcccccaccttctccgccgacg

SEQ ID NO: 898708 - DNA, 120 bp, Artificial Sequence
  ENSG00000205890_14 (sequence is synthesized)
gccctccccaggctcgaggggcccggccctcggcgtcccccaggctctcacccgaagccgccgggctccctccgaggtccccgcggtctccggtcccctcttccggaggcggctccagag

SEQ ID NO: 898709 - DNA, 120 bp, Artificial Sequence
  ENSG00000205890_15 (sequence is synthesized)
agagatgggattttgctctgtcacgcaggctggagtgcagtggcaccatcactgcagtctcgtcctcccaggctcaagcgatcctcccaccacagcctcccccgtagctgggactgcagg

SEQ ID NO: 898710 - DNA, 86 bp, Artificial Sequence
  ENSG00000205890_16 (sequence is synthesized)
ggcctcccaaagtgctgggattacagagtgagccacctccccggctcaacttgttgactttcatgatgacctgatgacgaggaact

SEQ ID NO: 898711 - DNA, 120 bp, Artificial Sequence
  ENSG00000205890_17 (sequence is synthesized)
caacttgttgactttcatgatgacctgatgacgaggaactgctgtcatccccatcttacagatgaggaagctgaggctcggaggcggaggggggtcctccaccttgtttggggtcccctg

SEQ ID NO: 898712 - DNA, 120 bp, Artificial Sequence
  ENSG00000205890_18 (sequence is synthesized)
gtcagaactggaagactccagggctccctgggcctcgtgacaggggctcctggcctggagagcaggacagatggaaggctgggagcagtggcgtgctggtaagcgtttaacaacaggctc

SEQ ID NO: 898713 - DNA, 120 bp, Artificial Sequence
  ENSG00000205890_19 (sequence is synthesized)
cccggctaaaacaatagccctcgctcgttgcatttgccaatatccatgatgcaatacctgctcctcggctgacttccagctactcacctggcgtcacggagtgcagaggtagaaggggct

SEQ ID NO: 898714 - DNA, 120 bp, Artificial Sequence
  ENSG00000205890_20 (sequence is synthesized)
gtgcacatcagctctggctggctggtgtcagctgggtccgtgcacctctggctggggatcaggactcctgagtcttgggggactgggggctacttacttgggttctagaaaaataggagg

SEQ ID NO: 898715 - DNA, 120 bp, Artificial Sequence
  ENSG00000205890_21 (sequence is synthesized)
agggtgggggctgggactcctggcttgtgggaaaaggggagcaaggactccttggaggggtgacttaggaactgggactcctgggtcctggggctgggacagggttttctgccagcagag

SEQ ID NO: 898716 - DNA, 120 bp, Artificial Sequence
  ENSG00000205890_22 (sequence is synthesized)
agtaggggagccagagatttgtcttacagccacattgcccagcaagcctgacactttctcccactgcacctgtgggagcagcctggtagccactggaggactgaagacatcccagcctcc

SEQ ID NO: 898717 - DNA, 120 bp, Artificial Sequence
  ENSG00000205890_23 (sequence is synthesized)
cctgggtgctgctatgtgaccctctggaaatagaagctcagtgtcccctccaaatgccagtcaccctgggccccactcacacccacacgtagcacatcttgagcgcctcctgccaggctg

SEQ ID NO: 898718 - DNA, 120 bp, Artificial Sequence
  ENSG00000205890_24 (sequence is synthesized)
agctcatcccaggatgaagtgattacagccctactcccagaaggttcacagtccacctgggccatgggagggagcgtagacctataaaccagaaatgaaccaataaaacagtacagcaaa

SEQ ID NO: 898719 - DNA, 120 bp, Artificial Sequence
  ENSG00000281371_0 (sequence is synthesized)
gaattcattttcagaaataggcctgaattgcttgttaatttcattacaggaagtaactctaaaagccaattccacttccaaactataattaccatcatctgaatttaacagggaaagaca

SEQ ID NO: 898720 - DNA, 120 bp, Artificial Sequence
  ENSG00000281371_1 (sequence is synthesized)
tcttccaagacttcttttgggcggatgcttagttttagaatagccaactttaccctaacccatgtacaagacagttctccaggtggccttggactgacccagttctcccttcttccttgc

SEQ ID NO: 898721 - DNA, 120 bp, Artificial Sequence
  ENSG00000281371_2 (sequence is synthesized)
ttgtagttcttaagaataactgtagaatgcactgggaatgcaatatcctgatatggaggaactgcctgaaacaggttggccttgttgttgtccctcctagggaatgtaacatcttgattt

SEQ ID NO: 898722 - DNA, 120 bp, Artificial Sequence
  ENSG00000281371_3 (sequence is synthesized)
agggaactgtttgagacagcgaggttgtgttcctctttcccctggaaggaggatgtactttaaagctttgcccaatgagttatgtggctcctatggtatataacccaaggcaggctgtgg

SEQ ID NO: 898723 - DNA, 120 bp, Artificial Sequence
  ENSG00000281371_4 (sequence is synthesized)
tgcaagtggggcacgtacaatcaagactccatcagccccgccctgggcagctttcttgagccctgggggactggctcacaatggagccagggcctcttttgtcccttgcttcctgtctgt

SEQ ID NO: 898724 - DNA, 120 bp, Artificial Sequence
  ENSG00000281371_5 (sequence is synthesized)
aagtaataaatctgcttcatgtaatgtattgggtgtgagtgtgttctgtcacaatggaatcagacaggttggtaaccagtgtacactgaacctgcttggcaccatgtagccctgggaaag

SEQ ID NO: 898725 - DNA, 120 bp, Artificial Sequence
  ENSG00000281371_6 (sequence is synthesized)
gagaaaggcggtcacagcttgccctatatggtgatgccagcacactgtgcactgtactgtgcaacagaaaaaggtgcactgaggaggatcggctgcttcttcccattgttgcttctttag

SEQ ID NO: 898726 - DNA, 120 bp, Artificial Sequence
  ENSG00000281371_7 (sequence is synthesized)
acatatactgtaacaataggaaggaagtctttcaccaaccactaatactgtaaagaaagcattgtatcgatctagtattatttaatgaagacggacagcaattttaatacaatcttcttt

SEQ ID NO: 898727 - DNA, 120 bp, Artificial Sequence
  ENSG00000281371_8 (sequence is synthesized)
tccaagacctttgacagaccttaggcccattttccacctttatgtctaggaaagtataagtaaaacacttttgagggcataaaaaacacaagcttcttgttaaggtgtatcagtagccag

SEQ ID NO: 898728 - DNA, 120 bp, Artificial Sequence
  ENSG00000281371_9 (sequence is synthesized)
ggaaatctgctgtgcccctttgagggtcatctaactaaggcatggagaaagaaactgcctcaagtcagtttctatcacctctgcagggaagctggccatgcaaaccaggacatggttcaa

SEQ ID NO: 898729 - DNA, 120 bp, Artificial Sequence
  ENSG00000281371_10 (sequence is synthesized)
agtgaaaaagagtgtggttaataatcatgccagaacaccaggtataagatgtaagggcaagtcaggcattctgtacattgcttctcccttcagtttggaaaactcactgcagtagggttt

SEQ ID NO: 898730 - DNA, 66 bp, Artificial Sequence
  ENSG00000281371_11 (sequence is synthesized)
cttctcccttcagtttggaaaactcactgcagtagggttttgacttatcgtttcacaagacagcta

SEQ ID NO: 898731 - DNA, 78 bp, Artificial Sequence
  ENSG00000281371_12 (sequence is synthesized)
ccgggtgacagcgcgactctgtcgctaggaggaaagcctgtatgctttggaaaatgcatatcttgtgtgtttaccctt

SEQ ID NO: 898732 - DNA, 120 bp, Artificial Sequence
  ENSG00000281371_13 (sequence is synthesized)
tgtatgctttggaaaatgcatatcttgtgtgtttacccttttaaaggtaactatactttgaaacaggtgaactgcagaaagttaacaaagacttctttttttaccatgtttacctttcta

SEQ ID NO: 898733 - DNA, 120 bp, Artificial Sequence
  ENSG00000281376_0 (sequence is synthesized)
gtggtgaaatgaggccagtcaggtttcctcaactatcaacgtctccaacaatcacccaacacaacagaaagagatacagaagaagggctgttggggatctctgaccagaggccaaagaaa

SEQ ID NO: 898734 - DNA, 120 bp, Artificial Sequence
  ENSG00000281376_1 (sequence is synthesized)
agggacacacaaggggcttggttcttacccagccgccgttctcctggatccaaggctctaggtggtcattcaggtaagtggccatccaagctgcgatccgactcaccaatacctgcatct

SEQ ID NO: 898735 - DNA, 120 bp, Artificial Sequence
  ENSG00000281376_2 (sequence is synthesized)
ccttgtctacgctttccacgcacagtgccccgccgaaggagaaaaaggccacaatgcgaccccagtttaccccatcccggaagagttcattcactacctgttcaaagctctgatatgctg

SEQ ID NO: 898736 - DNA, 120 bp, Artificial Sequence
  ENSG00000281376_3 (sequence is synthesized)
tccctggggtgatgtggagctgggatgtcaggtcactgaatgcccgccggtaccgcagttcaaactcgtcgcctgcctccctcagcgcttgctttactgctgccatggggatcacctccc

SEQ ID NO: 898737 - DNA, 120 bp, Artificial Sequence
  ENSG00000281376_4 (sequence is synthesized)
gggcatccaaactgctgctgtggccagtggctccattcaccgcggggctgtctgccaggtgccaggatgggttgccattgatggcactgggggtctccatctccgattcagtcccttctg

SEQ ID NO: 898738 - DNA, 120 bp, Artificial Sequence
  ENSG00000281376_5 (sequence is synthesized)
gggcctcagtcctgttctcttccacatcactaaactgactccagctgtatcctttctgggaaagcttgtaggagagaaagtcaaccaccagctcccggttgctctgagacatttttataa

SEQ ID NO: 898739 - DNA, 120 bp, Artificial Sequence
  ENSG00000281376_6 (sequence is synthesized)
tagggatgggctcaaccagtccattgtccaaaacacctgctcactcactgagtctcgtctctggttagtgattctcttctaagatccaaagccaagataagattctgaagggagagaaag

SEQ ID NO: 898740 - DNA, 120 bp, Artificial Sequence
  ENSG00000281376_7 (sequence is synthesized)
ctgggtctaggttccaagatacttcacttaagtcaaatcgaaagcaccagtggactctgaatctcccaccagccttttctacccccgtcttctccgaaatgccttcctcggaaagtcact

SEQ ID NO: 898741 - DNA, 120 bp, Artificial Sequence
  ENSG00000281376_8 (sequence is synthesized)
ccctgggcagtcccccccgccccactcccgctcccccgcaccacctacattcaaatccgccttaggcaaaggcaggcaggtgcagcccccggaagatcttttgtatcacaggtcgggaga

SEQ ID NO: 898742 - DNA, 120 bp, Artificial Sequence
  ENSG00000281376_9 (sequence is synthesized)
ggaggtggctgcggggatgccggtaactcagccggcctcgcggtggctggcaaaaaaaccagctccggccggagggatcatgcgacccggcaggctgggagcccagaaggcgacacagga

SEQ ID NO: 898743 - DNA, 120 bp, Artificial Sequence
  ENSG00000281376_10 (sequence is synthesized)
attgcgaagctcaggaaccagccccctcgcttgcttcctcctccatcgcccggatcgagggcggccgctccgcagccgcggcctcctgccacccgggagcccagccccctctctcttgca

SEQ ID NO: 898744 - DNA, 120 bp, Artificial Sequence
  ENSG00000281376_11 (sequence is synthesized)
cgccccttggctctccgcctcctactgggagccaggagtactctcccggaggtggctggtatggatttagttggtttttgtttttcttttttctatttaagcaccagcccagggtgaggt

SEQ ID NO: 898745 - DNA, 120 bp, Artificial Sequence
  ENSG00000281376_12 (sequence is synthesized)
ggaggcgtccgaaaccctaaagggacttctcaatggggttcaaggtttcagtgagggacgcagggagggggaaactgcctcagatctgcaatctgactttgggaaggccacccccaggcc

SEQ ID NO: 898746 - DNA, 120 bp, Artificial Sequence
  ENSG00000281376_13 (sequence is synthesized)
tgtctgtgatgttgaaggccggagacccccaacaaatgccgctggtttgctctgaattccccaaaggcccagaacgtggcagttggggattgccgggtcctccattccccgcccggacac

SEQ ID NO: 898747 - DNA, 120 bp, Artificial Sequence
  ENSG00000281376_14 (sequence is synthesized)
aatggccgccggcgccctgcacaaagactgggtgagggtgaggcgctgggcctctcctcaggtcaggaagaggggtcgaggcctgctcgacggccccacagctgagaccacgttttcctg

SEQ ID NO: 898748 - DNA, 120 bp, Artificial Sequence
  ENSG00000235279_0 (sequence is synthesized)
tttttaacgagcagatatttataactgctaccaaaaccaggaatagtttactaaatatgggggtttgaagatattgtctttagctgggaaaagcttccaggctacaagagaggataaaga

SEQ ID NO: 898749 - DNA, 120 bp, Artificial Sequence
  ENSG00000235279_1 (sequence is synthesized)
acaaacacctatccagcactcacaatggacaggctgtcttccaagcaggaaaagattatggagcatatgctgtacatatgacctcatttaatcactatagagtatatgttcaatgtctgg

SEQ ID NO: 898750 - DNA, 120 bp, Artificial Sequence
  ENSG00000235279_2 (sequence is synthesized)
atgttttcaatgtctggattaattcagccgtccaggaaagaagtttgtgctttgctctccatggacaacatctagtaaaggagacttagtctcatcgttcttctctgaggaggcaggatt

SEQ ID NO: 898751 - DNA, 120 bp, Artificial Sequence
  ENSG00000224391_0 (sequence is synthesized)
agacgcaggggacgtgtcagacgtgcgacaggaagggctcagcgaggcgagagcgaagctgtgaggaaggaaggcagggtagagaccagaatcgaggaagatcggagtggaagaaaatgg

SEQ ID NO: 898752 - DNA, 120 bp, Artificial Sequence
  ENSG00000224391_1 (sequence is synthesized)
agctggtgtctcagtgaagacatgcccagagatgcccaaagatgcccaatggatgagctgctgcaacctgtctcagccatgggggatgggagaggaaagtggagaaaggacaaaaaaaaa

SEQ ID NO: 898753 - DNA, 120 bp, Artificial Sequence
  ENSG00000224391_2 (sequence is synthesized)
aaaaaacgagtagagagaaaagaagtgaatatgtaatgcaaaaattaaaattacctgataagtcaggacatgggaagttctgcctccctaatggggacccaggaagatgtaggaagagaa

SEQ ID NO: 898754 - DNA, 120 bp, Artificial Sequence
  ENSG00000224391_3 (sequence is synthesized)
gtaaagccactttctaaggacatggagaaattcagaacaccaagccgcccaggtttcctggctcccagtcttggcacacagtgctccaccttgctgggtaattcagccacctctgatggg

SEQ ID NO: 898755 - DNA, 120 bp, Artificial Sequence
  ENSG00000224391_4 (sequence is synthesized)
ggacagatgcttcactcctccacttcttggcagtacttcctacagcccctgggtgaacttctccagctggctgtgatcgacctccagagggcatgaccgtggctgagactcagcttttca

SEQ ID NO: 898756 - DNA, 120 bp, Artificial Sequence
  ENSG00000224391_5 (sequence is synthesized)
tgttcccagctctggcttagggagtcaccccaaggaagcagcagattaaggagaaatgtggacgcatccttcctgagtgttggttcccccagagagatgacagaccccatggccagcact

SEQ ID NO: 898757 - DNA, 120 bp, Artificial Sequence
  ENSG00000224391_6 (sequence is synthesized)
tcaacatatattgagctgtgggaattagaatctaggacaatttgggagaaaaaaggcttttgtctttaaggcgtttacagcttaaggagaggatatcatattccatagctgtgacaaatc

SEQ ID NO: 898758 - DNA, 120 bp, Artificial Sequence
  ENSG00000224391_7 (sequence is synthesized)
aaaaaattaaaagtagtctttccaaggatggtttcagtagtttagccctaaggagtgaggaatttgtttggttagacatactgaagatggagactatacttctgagaataagcctaaaga

SEQ ID NO: 898759 - DNA, 120 bp, Artificial Sequence
  ENSG00000224391_8 (sequence is synthesized)
ctgtgagtctcgaaagccaatttacacaccacgcagaaaactgacgggtctcaggaaaactaaaatgaggaaagccagcagaggcccaggcagacgtcaaattaatctctagaaacagag

SEQ ID NO: 898760 - DNA, 120 bp, Artificial Sequence
  ENSG00000273062_0 (sequence is synthesized)
tattttccagaaactagttcctcgctcgtggctcgcgtttcttccaaatcacctcaaaagcacggtgtttatgagcctacctaatccgatactgcaatggaattccggatatttgcagac

SEQ ID NO: 898761 - DNA, 120 bp, Artificial Sequence
  ENSG00000273062_1 (sequence is synthesized)
agatctcccggctttgcaagtgtttgatgagatacgttcggaatctccttttttttctagagcccggttccaggccgtagagcaagccgacctggggctgcggcccctgccccacacccg

SEQ ID NO: 898762 - DNA, 80 bp, Artificial Sequence
  ENSG00000273062_2 (sequence is synthesized)
ctccggggccggggctggcgggggccgctcgggctgcgggccgctctgcaacaggtcaccctgaccgcgactccgcgggt

SEQ ID NO: 898763 - DNA, 120 bp, Artificial Sequence
  ENSG00000273062_3 (sequence is synthesized)
tcgcgggcggccaactctgcggccaggcttctgggcgcagccgccagggccaggggagggggtgtggcccggcttctgctggtcctggctccgaggtccgggatcgggctcacctgaagg

SEQ ID NO: 898764 - DNA, 120 bp, Artificial Sequence
  ENSG00000273062_4 (sequence is synthesized)
aagactgaggcgccgctgggcgccagaacagagcgggcggaggctgggggcttccgccacccaagagggagagcgaggcgggttcaaggggtcgcagcgcccccggcttcaggacggcgc

SEQ ID NO: 898765 - DNA, 120 bp, Artificial Sequence
  ENSG00000273062_5 (sequence is synthesized)
gagcggggaccccacggccgctccgactctgagaacccgcggccgagggaggcgcgccgcccagcgcccttctccctcagcctcagccccagctccgcagccccctccctgcgcgcaggg

SEQ ID NO: 898766 - DNA, 80 bp, Artificial Sequence
  ENSG00000273062_6 (sequence is synthesized)
cctcagccccagctccgcagccccctccctgcgcgcagggcgagcagccccggggcccgcggccgggagagccacactcc

SEQ ID NO: 898767 - DNA, 120 bp, Artificial Sequence
  ENSG00000273062_7 (sequence is synthesized)
ccgccccgcggcctgagcccaccgacctgtgcagccgcggccgtcgcctcagaggacggaaagacgatgccggcctcacgcttcaccgccacggccgccgccgcctagagtagcactcgt

SEQ ID NO: 898768 - DNA, 120 bp, Artificial Sequence
  ENSG00000273062_8 (sequence is synthesized)
tctcattcagcgcccgcagcagccgccgccgccgccgccgctgccgctcgggggaggagagtgagctggaaccaccccgtccgcgccaggggtgggggacgagagcggacctggcggggg

SEQ ID NO: 898769 - DNA, 120 bp, Artificial Sequence
  ENSG00000273062_9 (sequence is synthesized)
caccaacggagcgcgctcgcgggggctctgagagctgcagccgtcagggtcttaacctcgcgcttcccgcccgcagcttttcggccccgcggagcccaactgccgccggtgatcggtgcc

SEQ ID NO: 898770 - DNA, 120 bp, Artificial Sequence
  ENSG00000273062_10 (sequence is synthesized)
cgcagcgcgcgcagccatccgcaaccccaccgcccggcgcctgctgaaaggaggggctcccaccggccaaacaacgggggggggaaggggtaggaggatggacaggtggggcgtccgcca

SEQ ID NO: 898771 - DNA, 120 bp, Artificial Sequence
  ENSG00000273062_11 (sequence is synthesized)
ccgcctggccacccgctcccggaacgcggccctctgtgaaatccgccgtgatgtctgtggccttcagcgccgggctcttcacctttaaggccagagaacaaagtctggaagcacttggcc

SEQ ID NO: 898772 - DNA, 120 bp, Artificial Sequence
  ENSG00000273062_12 (sequence is synthesized)
ccaagatcaaatatccagcccacgccagcggtgtttttagaagtcactgaggacaaatgagggggctcccaatgtggagagtcaccccactgtcttagataaggtcataaattatggtga

SEQ ID NO: 898773 - DNA, 120 bp, Artificial Sequence
  ENSG00000273062_13 (sequence is synthesized)
tcaacatcctcacacattaagattcgggaagtgttagaagtaggcctttgtaagatgttacgcagggtactacccttgacttaaggagcaaatgacagaaattgggcggaaaggtgttgt

SEQ ID NO: 898774 - DNA, 120 bp, Artificial Sequence
  ENSG00000273062_14 (sequence is synthesized)
ttcagagtctactaaatgggtggcctacttaaagctagcaccatttgatgcagtgtgactgttaacggaaggttttaagtgagccgcctttgtatctgctgtcattagaccatttggaaa

SEQ ID NO: 898775 - DNA, 120 bp, Artificial Sequence
  ENSG00000273062_15 (sequence is synthesized)
tggataattatttgatgatctgcagttctttctctaggcaatgtgcagtagaatgtggaaagaatactatgtaccagcattaagtgtaaaacatgaaaggaccaataattcactattccc

SEQ ID NO: 898776 - DNA, 120 bp, Artificial Sequence
  ENSG00000224397_0 (sequence is synthesized)
ggttccagctcctgttcccattgctggacagctgccacatctggcacccaatttaggaccccgcggggaggcccaagccccgggggtggcgggggatcctagaggaaagtggcaaggcca

SEQ ID NO: 898777 - DNA, 120 bp, Artificial Sequence
  ENSG00000224397_1 (sequence is synthesized)
ggaccctggagcagagccagaaaactgaggctctgagagatgaagctacttgccaaggtcacgcagcacagtcacatcctactgaacatcatcctgttctctgggtggaatgtcaccatc

SEQ ID NO: 898778 - DNA, 120 bp, Artificial Sequence
  ENSG00000224397_2 (sequence is synthesized)
ccagcagctcctgcaaacagacccccgacccaagcccttccttctgcctccactgccaccactgctgctcatctctgctggcacagaagtctcttccctggtcttccagaaatcccctct

SEQ ID NO: 898779 - DNA, 120 bp, Artificial Sequence
  ENSG00000224397_3 (sequence is synthesized)
ccacactcagccagagggagctattaaaactgtgggccagcccacatcagtccacagcaaagtcctctctaagggatctctgttgcttggagaataaaccctcggattccttccttggct

SEQ ID NO: 898780 - DNA, 120 bp, Artificial Sequence
  ENSG00000224397_4 (sequence is synthesized)
ggacaggagttggtgtgaagcttctctgagcctcagttccctcatctatggaataggagccagagttcctccctccagggtcagaaggcagctagctgataaggggagcagcacccacgg

SEQ ID NO: 898781 - DNA, 120 bp, Artificial Sequence
  ENSG00000224397_5 (sequence is synthesized)
tgaggtctgaccaacagccgcaaccatagtggcgctttgctgagtcttccttgagctccctgtgtgcctaacgcagagcttctcccctccccggggctttggaaaatctgctctgaaatg

SEQ ID NO: 898782 - DNA, 120 bp, Artificial Sequence
  ENSG00000224397_6 (sequence is synthesized)
tcttgtgtctacaggatgaattagccaaacgacaactccggtgtgagcagaacgggctcattgggtcaagacacaattccaccacagaacgggtttcacaaaggaccatgtcccatcaac

SEQ ID NO: 898783 - DNA, 120 bp, Artificial Sequence
  ENSG00000224397_7 (sequence is synthesized)
tcagcaatgaaaccatcgtggtctggaaacctgagatcaggacccacagaatgactggcggaatgacagaccaaatgtggaagatgttccaaccaggaatgaatcacttacttccaacgt

SEQ ID NO: 898784 - DNA, 120 bp, Artificial Sequence
  ENSG00000224397_8 (sequence is synthesized)
ctttctcactcgggagggcctttcctctgccccatcattctgagggtttctggaagatggagtcccgctctgttgcccatgctggagtgcagtgtcgcgatctgggttcgctgcaacctc

SEQ ID NO: 898785 - DNA, 120 bp, Artificial Sequence
  ENSG00000224397_9 (sequence is synthesized)
ttctcctgcctcagcctcctgagtagctacgattacagcccgagaggaaagccccatgctatccccatttcatagatgggaaaactgaggcttgaggacactttgcggcctccaagggct

SEQ ID NO: 898786 - DNA, 120 bp, Artificial Sequence
  ENSG00000224397_10 (sequence is synthesized)
ctttgcggcctccaagggctgttctcttcattcctccagcagagtggatatgagacggtgcagggtctggaatgtctgggcagaaggaagagctggagcaaaggcctggaggctggagag

SEQ ID NO: 898787 - DNA, 120 bp, Artificial Sequence
  ENSG00000224397_11 (sequence is synthesized)
cgctgtcggggggcaagtggggcagtgtcccactgcggggtttcatctcagctctgccatgtcttggctacgtgacctctgacaccctactgggcctctttgatcccagactcacctgta

SEQ ID NO: 898788 - DNA, 120 bp, Artificial Sequence
  ENSG00000224397_12 (sequence is synthesized)
ggaccagagcacgttcctggctgcagaggccacaagtcacgctgtctctgagaggtatggggacaggggcgcagaggaagaatgatcgcgagtcctcagccctgtttggctgacggggga

SEQ ID NO: 898789 - DNA, 120 bp, Artificial Sequence
  ENSG00000224397_13 (sequence is synthesized)
cagggatgggtgggaaagaggtacagcgtttttccaccttccccacccatcacccctgagattccaaatgaacatcgggaccaaccccgggagcccagcggatgttcaggtggaatgtca

SEQ ID NO: 898790 - DNA, 120 bp, Artificial Sequence
  ENSG00000224397_14 (sequence is synthesized)
tggggcagtgtgagatgacgggaccagagcacgttcctggctgcagaggccacaagtcacgctgtctctgagagtggaatgtcaccatcgcccaggtggggatttttgtgtgttttgttc

SEQ ID NO: 898791 - DNA, 120 bp, Artificial Sequence
  ENSG00000224397_15 (sequence is synthesized)
cccagccttcctcctcactcaccctccagccatgctggcttcctccttgctcctgaaacagcctgaggcccacactgccccgggccctttgcactggctgtttcctctgcctggaacact

SEQ ID NO: 898792 - DNA, 120 bp, Artificial Sequence
  ENSG00000224397_16 (sequence is synthesized)
tctcctaggcatccacagggctccctcccacaactccttcgggtgcccacatgggaagccatccctgaccacccccccgacttccttctgagcaaggtagggtctttctacctagtcatg

SEQ ID NO: 898793 - DNA, 120 bp, Artificial Sequence
  ENSG00000224397_17 (sequence is synthesized)
agggcagggatttttgtctgttgtgttctctgtgtgcccccagtgccatcccagtgcctggcagatggtaagtgctcgacacacattggctgactgcctgaatgaacaactctatgagcc

SEQ ID NO: 898794 - DNA, 120 bp, Artificial Sequence
  ENSG00000224397_18 (sequence is synthesized)
gatggcagataaggacactgaggtcctctggggtaggtgaccagcccaaggccacacagctggtctgagattaggccaggagaggagcccgggttggtcacatcctggagttggcgtctt

SEQ ID NO: 898795 - DNA, 120 bp, Artificial Sequence
  ENSG00000224397_19 (sequence is synthesized)
ggaaactgcatcaggagaataacaaagatgagacgcaggctctaacaagtggataccagtgactctcgccccgccagccccagccctgcagccttgggcccttccaggagtcatggtctg

SEQ ID NO: 898796 - DNA, 120 bp, Artificial Sequence
  ENSG00000224397_20 (sequence is synthesized)
cctgcctggggcattccaggcttcgacccaggtcctgcactttctattttgagcctcttagtcctgaggactgtgtgttcccagcaggcggcgcgggccagaggctgagcctgggtgtgg

SEQ ID NO: 898797 - DNA, 120 bp, Artificial Sequence
  ENSG00000224397_21 (sequence is synthesized)
ctgtcaccctatctggggccagagacccagattcccgggcccttaacctgttggctgctgagggctctggcataagccctgttccctgcttgattgtctccccttcaagcccctgccctg

SEQ ID NO: 898798 - DNA, 120 bp, Artificial Sequence
  ENSG00000224397_22 (sequence is synthesized)
gtatcgtatcggcccatctcaccttggattatatccctgtttggccccatttgaatcctggctctgcccctttccagcaatgtgaccttgggcaagtcacttcatctctctgggtctcag

SEQ ID NO: 898799 - DNA, 120 bp, Artificial Sequence
  ENSG00000224397_23 (sequence is synthesized)
tttcttcatctgggaaatggggacaataagagtacctgtctctggccatgtgtggtgactcatgcctgtaaccccagcgctttgggaagccgaggcgagagaattgcttgagaccaggag

SEQ ID NO: 898800 - DNA, 85 bp, Artificial Sequence
  ENSG00000224397_24 (sequence is synthesized)
tttgggaagccgaggcgagagaattgcttgagaccaggagtttgagatcagcattctaaaaaaattagccgggtgtggtggtgtg

SEQ ID NO: 898801 - DNA, 120 bp, Artificial Sequence
  ENSG00000224397_25 (sequence is synthesized)
tgaggctgcagtgagctatgattatgcccctgcacatcagcctgggtgatagattgaggccccatctctaaaaataacaatactaataataaataaaaatgaaaatgagtacctgtcttc

SEQ ID NO: 898802 - DNA, 120 bp, Artificial Sequence
  ENSG00000224397_26 (sequence is synthesized)
gaaaatgagtacctgtcttctggggttgcagaggagattcaatgtgatgaaattgatgagagtgccctgcagggagccggaaactcagggagcatcgataatgagtcccccaccatcagc

SEQ ID NO: 898803 - DNA, 120 bp, Artificial Sequence
  ENSG00000224397_27 (sequence is synthesized)
agctggcttaaatataaaaactgtcatggcctctggagaaatgacaagaattcgaaggagcttccctgcactggccaccctacaccctacacccttacttcctcccctcaacttgcctgg

SEQ ID NO: 898804 - DNA, 120 bp, Artificial Sequence
  ENSG00000224397_28 (sequence is synthesized)
atttatcgacccccactaccccactggttgccttctctccacctggcacatttcgtatgaatttgcttgttggttcttgcctatctccccagtagaacattagctccttcaggacaggga

SEQ ID NO: 898805 - DNA, 120 bp, Artificial Sequence
  ENSG00000224397_29 (sequence is synthesized)
cttttgtctaccttatgcacctagtgcaatgcctggcacacagtcggtgcttaataaatgtttcttaaaagaaccaataaatgaatagtgacctctccggggagaggagccctgagctca

SEQ ID NO: 898806 - DNA, 120 bp, Artificial Sequence
  ENSG00000224397_30 (sequence is synthesized)
ttaggtgcttgttggtgtcaggcccaggcccccctctcatcaagcagccaataaaactgccctggttggcgttctcatttcacagatggagagactgagcccagagagggagagtcacct

SEQ ID NO: 898807 - DNA, 120 bp, Artificial Sequence
  ENSG00000224397_31 (sequence is synthesized)
gtctgatgtcacacagaggtcagcatctgggctgggattccagcccaggaccatgtggggtggggggcagtggatcaatcttttcctggagggagtcaatggtgatggtgggaatgggtc

SEQ ID NO: 898808 - DNA, 120 bp, Artificial Sequence
  ENSG00000224397_32 (sequence is synthesized)
aggggtgctggcaaggagggtccaaggcccccaggagggagggaggcatgggagatgagtttgtccctcttgagttctgtctctctctgtgtctctctgtttctgcctctttctgtctcc

SEQ ID NO: 898809 - DNA, 120 bp, Artificial Sequence
  ENSG00000224397_33 (sequence is synthesized)
ttgtatttctcagtccctgtcttcgtctatacctctttctctcttccttgtgtatctgacccactgcccaggaggggatgcaggcagagacccctggcttgggtcctggagttggggccc

SEQ ID NO: 898810 - DNA, 120 bp, Artificial Sequence
  ENSG00000224397_34 (sequence is synthesized)
acgaggggattgacatctggggttgagctgggaatctgaagccagaccctgcagccagggacagcattccagtctcggctccacactccagggatagccttggaacgccaggcagttcag

SEQ ID NO: 898811 - DNA, 120 bp, Artificial Sequence
  ENSG00000224397_35 (sequence is synthesized)
agagcctgaggtctggtcttggagacctgggttccaatcccagctttgccacattccagccatgtggccttgggcccttagcctttgttcctgtaaaatgggaccactgagagcccgatc

SEQ ID NO: 898812 - DNA, 120 bp, Artificial Sequence
  ENSG00000224397_36 (sequence is synthesized)
tcagggttttatgaggaggaacgatgagagggctgtgctgggcttcctgaagccctgtgtggcctggaaagcactcaatagatgataactcagtgtaatgatttcttctagcagatgggg

SEQ ID NO: 898813 - DNA, 120 bp, Artificial Sequence
  ENSG00000224397_37 (sequence is synthesized)
aaagcgagagttaaagaggcccgatcatttcactcactcattcctcaaacgttattaagcacctgctatgcaccaggtgctttgttttgtatccattaactcagggttcagcaaactaca

SEQ ID NO: 898814 - DNA, 120 bp, Artificial Sequence
  ENSG00000224397_38 (sequence is synthesized)
gcctccaggccaaatctggttcacagcctgtttttataaataaagttttattggcacacagtatgcccattcatttacatattgtccacagctgcctttaccctacaactgcaatgttga

SEQ ID NO: 898815 - DNA, 120 bp, Artificial Sequence
  ENSG00000224397_39 (sequence is synthesized)
gcagttgtgagagagaccttaaaacccacaaagctgaacatatgaactctctggacatttacagtaaagtttgctaatccctggattagcccattacaaccctggaggaaggacatgtca

SEQ ID NO: 898816 - DNA, 120 bp, Artificial Sequence
  ENSG00000224397_40 (sequence is synthesized)
taagcttgattttatggattaggaactgaggtccgagcgcagtgtctgccacaaggttgggtctccatacgtaatatctgggtcttattcctcctcttctgccccatggggagctgccaa

SEQ ID NO: 898817 - DNA, 120 bp, Artificial Sequence
  ENSG00000224397_41 (sequence is synthesized)
ctcctgttccctttccctatcctgcatggatcataagtggataatttgaatcccgcagaggaaggaatgctgtttgaaggtcaggtcaatggaaagagtcctattttcaggtcaatttgg

SEQ ID NO: 898818 - DNA, 120 bp, Artificial Sequence
  ENSG00000224397_42 (sequence is synthesized)
accttgccaaagcctcttccttctggtgaccttagctgagaggtctgccactagcaggtgcttcatgaacagttgctgaacaagtggtgtgcatcatgctcccgctgtgaacttcagctt

SEQ ID NO: 898819 - DNA, 120 bp, Artificial Sequence
  ENSG00000224397_43 (sequence is synthesized)
gcttgaaggcggattcctccaggataccctggagctcctccccaggttggacctgctgctagcatgagagggaagaagggggacacagacaccaaagacagttctcgtcctcatctaaat

SEQ ID NO: 898820 - DNA, 120 bp, Artificial Sequence
  ENSG00000224397_44 (sequence is synthesized)
gctggcgacttccaagggcacctccccaaggcctcccctgagcctagactcaggggtctccacccacctgtctctgtccctgctgggatgaccaggagaagcctcaaacccaggttggcc

SEQ ID NO: 898821 - DNA, 120 bp, Artificial Sequence
  ENSG00000224397_45 (sequence is synthesized)
aggactccattcctgatctgccccccgaagccagtcctgcctctactgatggctcctgcatcctccaggtggtcccccaaacctgggagtctcccctgccttcttcttctcacttgctcc

SEQ ID NO: 898822 - DNA, 120 bp, Artificial Sequence
  ENSG00000224397_46 (sequence is synthesized)
cacatctgatcgctcatcacatcctgtcgactccaccttcaaggtagacccggagtctgccctcgtctccccacctccacggcccccgcttcggccacggccaccagcaccaccgcctgg

SEQ ID NO: 898823 - DNA, 120 bp, Artificial Sequence
  ENSG00000224397_47 (sequence is synthesized)
actggtgcagtcacttcctcctggcttccttttctccctcagcccctcacagtctgttctccacacacgaccagagggacctgtcagaagggacctataccttccagcacagaccctccc

SEQ ID NO: 898824 - DNA, 120 bp, Artificial Sequence
  ENSG00000224397_48 (sequence is synthesized)
agggatcccagctctctgagtgaaagctccctgtggcccgtgaggccgggtgcgaccctggccccccagcaaaccctccacttgtctgatgacctcgctgcctctctccctcgcgtactc

SEQ ID NO: 898825 - DNA, 120 bp, Artificial Sequence
  ENSG00000224397_49 (sequence is synthesized)
ctaaggttcagagaaggccctgggggtctcagactcatagcccagtgctctttctgctgacacgccctggtctctggggcagtttgttgcctgttcagcaacaaagagggtgtgcctcgt

SEQ ID NO: 898826 - DNA, 120 bp, Artificial Sequence
  ENSG00000224397_50 (sequence is synthesized)
taccctggtcaatgggtccgagagattacccttgtaggcagggctgtggccagggtgctcacctggcccccagcaggtcccatgggcactgtctggccgggcttcatggctgacattcca

SEQ ID NO: 898827 - DNA, 120 bp, Artificial Sequence
  ENSG00000224397_51 (sequence is synthesized)
agaggccctgtgaggtcctgcgaggccctgcgtgttggctcctatctcctctctgagctcacctctcccactcaccgccttgccctctgcccccttgcccagccacactggcctccctgc

SEQ ID NO: 898828 - DNA, 120 bp, Artificial Sequence
  ENSG00000224397_52 (sequence is synthesized)
tacgtgacaggctcctactctagcttttggaccctactgcacccctcccaccccagggacctctgcccctcctcttggggtcagctgggcagcctgccctgtactccctaaccccctcca

SEQ ID NO: 898829 - DNA, 120 bp, Artificial Sequence
  ENSG00000224397_53 (sequence is synthesized)
accccaggagtggggcttcttgatgccagcctccaagccctttatcacgtgtccatgggcagtgttctgaggtgtcagccctagaaaggttggctggatctgggtgcactgtggtgcccc

SEQ ID NO: 898830 - DNA, 120 bp, Artificial Sequence
  ENSG00000224397_54 (sequence is synthesized)
agtgcctggaacagtgttggctgcctggaacagtattggtgcacaatatgcagtaggcattcaattagtgcttgctgaatgagggagcctcagcgttttaaaatcagaccttgaaaacgt

SEQ ID NO: 898831 - DNA, 120 bp, Artificial Sequence
  ENSG00000224397_55 (sequence is synthesized)
catcctactgaacatcatcctgttctctgggtgtttctagaatcacctcccaaatatcccacttgcacccaaaaccttgtcttgggtcagcttctgggagccgacctaagccagcagcta

SEQ ID NO: 898832 - DNA, 120 bp, Artificial Sequence
  ENSG00000224397_56 (sequence is synthesized)
ctttggaatcagatggacctgagtgtgaatcccgcccctgccacttaacctgagtgtgaacttgggagcctgccccacctctcggaacctcagttcctccatctatgaaaagggaactta

SEQ ID NO: 898833 - DNA, 120 bp, Artificial Sequence
  ENSG00000224397_57 (sequence is synthesized)
cttcccagctgggccgcctgaccacccacttcctgtggggctccttgaggcctggagggtggagggggtctctgttcaacccccacccatgccctcttcccttctctccctcggcaggtc

SEQ ID NO: 898834 - DNA, 120 bp, Artificial Sequence
  ENSG00000249348_0 (sequence is synthesized)
ctggatctgcgggtcggtctcggcgggcggattactcctcgcccacaacctcgaggccccggggtcaaccgcgccctccgggccggcaacccagggtttagtcagattcctcctgaccca

SEQ ID NO: 898835 - DNA, 120 bp, Artificial Sequence
  ENSG00000249348_1 (sequence is synthesized)
ccgcttctgggaaagaggcgcctcccgtcaggaggatgctgagttcctcatgactggaccagtgagtgtccactccctggtccctggcgagagaggcgggacccccacgccctcctggcg

SEQ ID NO: 898836 - DNA, 120 bp, Artificial Sequence
  ENSG00000249348_2 (sequence is synthesized)
gccctcctggcgctctttgcagagatgttcctcaggcccaatccgggatttgggatgtctgtgcgtgctgtggagcagagagtttgcaacatggtctcactttgtcacccaggctggaat

SEQ ID NO: 898837 - DNA, 120 bp, Artificial Sequence
  ENSG00000249348_3 (sequence is synthesized)
ccaggctggaatgcattggcatgaacacgtctcactgcagcctcaacctcccaggctgaagtgaccctccaactctgctttcacagtagctgtgatatggtttggctgtgtccccaccca

SEQ ID NO: 898838 - DNA, 120 bp, Artificial Sequence
  ENSG00000249348_4 (sequence is synthesized)
aggagggatgttctcccttggaaccaggccaccattctatgaggaagccaagcagccacatgaaaaggccgtatgtagacattctaactgacaatactagctaaggttccagctactcac

SEQ ID NO: 898839 - DNA, 120 bp, Artificial Sequence
  ENSG00000249348_5 (sequence is synthesized)
cagcatcaactatcagacaaattcctatcattaatagaagaaactatatgccaagtgacagccagtgaagcagaacaacaggagaagacggcgaagccagaagcaaattatttcaatgga

SEQ ID NO: 898840 - DNA, 70 bp, Artificial Sequence
  ENSG00000249348_6 (sequence is synthesized)
ggagaagacggcgaagccagaagcaaattatttcaatggaagaaaaatcccctctccaggttgttttcat

SEQ ID NO: 898841 - DNA, 120 bp, Artificial Sequence
  ENSG00000249349_0 (sequence is synthesized)
acctcaacatttggaagttagaagtaatacaaaaatttgcttcagtatataatacatatgtttttcagattcctacaaagcataaaaattataactttcaaaggccgggtgcattggctc

SEQ ID NO: 898842 - DNA, 120 bp, Artificial Sequence
  ENSG00000249341_0 (sequence is synthesized)
tacatgtggagttctctaaactggttcagacagctggaccccattttgtgtttgttttttcaaacagattcttcgtgctctaaaccaaatccagctgacctcctgaagagcgctgatcct

SEQ ID NO: 898843 - DNA, 120 bp, Artificial Sequence
  ENSG00000249341_1 (sequence is synthesized)
gcactatacatgtggttcttctcctatgcctcccgacttgtcagagaatttcttgaggacatggatgactgtctggcagcgacagttccagtccagggacatccctgtgtggtttctgag

SEQ ID NO: 898844 - DNA, 120 bp, Artificial Sequence
  ENSG00000249341_2 (sequence is synthesized)
aaggatgaggagttcaagaagtgaaggctctgtcatacataaagagaaaacaatttcactgtgcaatccaggagagacaaagcagtgtagcatgtggcttcaggattctggccagcagag

SEQ ID NO: 898845 - DNA, 120 bp, Artificial Sequence
  ENSG00000249341_3 (sequence is synthesized)
atttccatctctctgccaggcaacctaagtacttcaggggactgtgaacccagctccagggccagggtggaatgattgggctaaggataattccttatcccagggaactcaggtcaaaac

SEQ ID NO: 898846 - DNA, 120 bp, Artificial Sequence
  ENSG00000249341_4 (sequence is synthesized)
caaccagggtgtggcatattcctgcagtagaatctggaatgggcttgtgacccagctcaggccagtgaaacatgaaggaaggcttggcggagaattctgaagaaggagcttctcagcttt

SEQ ID NO: 898847 - DNA, 120 bp, Artificial Sequence
  ENSG00000249341_5 (sequence is synthesized)
taagagaagctcaccataggaaactccctctctccctctggacttgttggtttaaagacgcaaaacctggagctgctacagacatttttcaccactgcaagtgaagacttctgccccata

SEQ ID NO: 898848 - DNA, 120 bp, Artificial Sequence
  ENSG00000249341_6 (sequence is synthesized)
aagatcactctgtctctggatgtcggttacacaaatcaatacatttccatgtgttaaagcaattcgacttggattttacatatatttttgaaactgaaaacattgtaatctatatatcta

SEQ ID NO: 898849 - DNA, 120 bp, Artificial Sequence
  ENSG00000249341_7 (sequence is synthesized)
cttagaaagatgtgaaatatccacctaataataatcatttggggttactaataaaaattatttttacttttcttcattgcttactttataatgagctgtttcattttttaaaacacaaaa

SEQ ID NO: 898850 - DNA, 120 bp, Artificial Sequence
  ENSG00000249341_8 (sequence is synthesized)
agttattattcttgcatattaaattgttaaacataaaagtaatatgtactcattggaaaaaaatccagacaccttctcttccaggtgacctaaatagaattagggagagagaaaaataat

SEQ ID NO: 898851 - DNA, 120 bp, Artificial Sequence
  ENSG00000249341_9 (sequence is synthesized)
gatctctgatcagaaaatataataaaaatgattttagaaagagtcaacatatttactctgcttagaagtttacacatataatctcatttaattttcacaacatattatgcagtaggaagc

SEQ ID NO: 898852 - DNA, 120 bp, Artificial Sequence
  ENSG00000249341_10 (sequence is synthesized)
atcattagctccattttatagacaaaaaaaatctcttgcattctgcaattgtctaaaattactttgaaaagagacagtttttaatagcatagttaaagataaaagatttataacatacac

SEQ ID NO: 898853 - DNA, 120 bp, Artificial Sequence
  ENSG00000249341_11 (sequence is synthesized)
atgatagagaaaattaatatagtcatgcattacttcatgatggaaatatgttctgagaaatgtgttgttatatgattttgttgctgtgtaaacatcacagagtgaacccacacatcctcg

SEQ ID NO: 898854 - DNA, 120 bp, Artificial Sequence
  ENSG00000249341_12 (sequence is synthesized)
aaggtatagcctaatgctcttaggttacaaagctgtacagcatgtaactctactgaatactgtggtcattataacaaattggtatctgtgtatctaaacattaaaaaggtacactacaaa

SEQ ID NO: 898855 - DNA, 120 bp, Artificial Sequence
  ENSG00000249341_13 (sequence is synthesized)
accactccagtcactttccaggcaagacagggctaccttcagcatctctagtgaaagtggtgaattagcacttcagaagtgagatggcatggacagaagcttctggggctgagctcacca

SEQ ID NO: 898856 - DNA, 120 bp, Artificial Sequence
  ENSG00000249341_14 (sequence is synthesized)
ttggaagcttctttccagcttcctgaaggtctctggaggtctcttcttaccggggaggatgatccctggtggctccctgctgacattcttcaaaactcggctatttccccagtgtcctgc

SEQ ID NO: 898857 - DNA, 120 bp, Artificial Sequence
  ENSG00000249341_15 (sequence is synthesized)
tgataaaacagaagaggaaatgatgaaactgtttgcagtggcctgtagtgaagtggctctttctgcccttgctgtgcgtctcactccaggacctcctgaagagcgctgatcctgcactat

SEQ ID NO: 898858 - DNA, 120 bp, Artificial Sequence
  ENSG00000249341_16 (sequence is synthesized)
acatgtggttcttctcctatgcctcccgacttgtcagagaatttcttgaggacatggatgactgtctggcagcgacagttccaggatgccagtgtctctacatcgtgacaactttgaatg

SEQ ID NO: 898859 - DNA, 120 bp, Artificial Sequence
  ENSG00000249341_17 (sequence is synthesized)
tgaccattgtatcacctactaagtccggcagaactagaaattatggctgaagttccagaaagttccagaaagcacatttggccttataatagataattactaactgcaagagctgtgcat

SEQ ID NO: 898860 - DNA, 120 bp, Artificial Sequence
  ENSG00000249341_18 (sequence is synthesized)
ttactaaatgatatgctctgccaaggagcgagttccccatcacagagagcagcagaagccatcatcaggaatgctgcgtgtggatttctgagttgagtatgcggttaaaacacaagacgc

SEQ ID NO: 898861 - DNA, 120 bp, Artificial Sequence
  ENSG00000249341_19 (sequence is synthesized)
catagtatttttaagtttttgatgaacctcacatacatgatctcattgattcttttttaaaaaatggaggtcactttttcttggcttaaacaaatgaaaataaatataaacaatatagac

SEQ ID NO: 898862 - DNA, 120 bp, Artificial Sequence
  ENSG00000249341_20 (sequence is synthesized)
ttctgaagaaggatggcagaataaaggcaaaataaagactctcctcctccaacatctaaaatatgaataaaaataataaaaatcagcaaaaaaaaaaaaacccacaaaaaaacagcaaca

SEQ ID NO: 898863 - DNA, 120 bp, Artificial Sequence
  ENSG00000249341_21 (sequence is synthesized)
gcaagaacacaaagaaatgggagcaacctaacgtcatagacttcaaaaaggggaggacaaaggaaggaaggagagattttagaaaagtagtttctctgtgctcactttggaagacttgga

SEQ ID NO: 898864 - DNA, 120 bp, Artificial Sequence
  ENSG00000249341_22 (sequence is synthesized)
ttaccaaaatattgaaaaattgaatcaaaagctattaatctgaaaagaaacaaattagcagggcatattgttttccttgaatgctttaggttatagaacaggttaataacaatatgaatt

SEQ ID NO: 898865 - DNA, 120 bp, Artificial Sequence
  ENSG00000249341_23 (sequence is synthesized)
caacatagtgggtcccaaagaggaaatgatgaaacaagagaatgatctggaaaagtgattttctactgtcctatagaaacaaattaaagaccaaaacaatattatttttttttaatgata

SEQ ID NO: 898866 - DNA, 72 bp, Artificial Sequence
  ENSG00000249341_24 (sequence is synthesized)
ttgatacataggtatacatgtgccacgttggtttgctgcaccccccgtcgcccaaccccacgacaggcccgg

SEQ ID NO: 898867 - DNA, 85 bp, Artificial Sequence
  ENSG00000249341_25 (sequence is synthesized)
attaggtatttctcctaatgttatcccttcccccgtcgcccaaccccacgacaggcccgttcattcaaaacgacattattataga

SEQ ID NO: 898868 - DNA, 120 bp, Artificial Sequence
  ENSG00000249343_0 (sequence is synthesized)
aatgcggtatagtgatcctcctagagagacacgtgtctccgaggagacatggcccctttcaaacagccacctcagttctcttttactgccctatcctttcgccgggtttctcctttcaac

SEQ ID NO: 898869 - DNA, 120 bp, Artificial Sequence
  ENSG00000249343_1 (sequence is synthesized)
cttgagagataactgacatgggcttaggatactcagtcattctggaattctgtatcagcactgaaacatgagtggggaaattctaagaaatttacttctctttttcttttcatattttcc

SEQ ID NO: 898870 - DNA, 120 bp, Artificial Sequence
  ENSG00000249343_2 (sequence is synthesized)
tcattccaaagtggaactaaatcgaggttccctagcaacccagggctctgtgaagattcattattctataaaatcccaccaccttacaaacacaaaatgttacaagttgcccagtcaccc

SEQ ID NO: 898871 - DNA, 120 bp, Artificial Sequence
  ENSG00000249343_3 (sequence is synthesized)
cggcttctgagatgaagaatattattgaagtcaaatctggtggctatcacactccatggaacttggggcaacatttaggtacctctacccaggaaagaatctctgagaaataggtggcag

SEQ ID NO: 898872 - DNA, 120 bp, Artificial Sequence
  ENSG00000249343_4 (sequence is synthesized)
tttctctagcagcataagaagaaccttgataagcatcatccttaagtcctgacagcagtggatgactagtcaggaacctgtccaggaggacattgacatggatctgccagctttctaaga

SEQ ID NO: 898873 - DNA, 120 bp, Artificial Sequence
  ENSG00000249343_5 (sequence is synthesized)
cttattaaagggtctgcccactcaaaaggagaaagtgcaaaagatgctcagcaaggaatatccagcacaataagcattgaagaaacaaatggcaacgcaagcttaaagaattccaagcca

SEQ ID NO: 898874 - DNA, 120 bp, Artificial Sequence
  ENSG00000249343_6 (sequence is synthesized)
ttatgaactgactcttcaaataagtgcttattttcacataaccagggagtttctggattaacttccatataagacatatttattaaaagatttgcacccctattgctggcactgggtgga

SEQ ID NO: 898875 - DNA, 120 bp, Artificial Sequence
  ENSG00000249343_7 (sequence is synthesized)
cctccccaaacgctctgcccttggtgctcttctgccggttattctcgtccatgaccccagagccagggagaatctcaccagtgcagcccagggcacttctgataacatctgagcagagtg

SEQ ID NO: 898876 - DNA, 120 bp, Artificial Sequence
  ENSG00000249343_8 (sequence is synthesized)
aaggagaagaaacgcacgaggcaggcatctcatttatggaagtgctcctctgggtcaagccctctgccaataattttcatgcataatggccctttcattctccccaaaaattcttcaagg

SEQ ID NO: 898877 - DNA, 120 bp, Artificial Sequence
  ENSG00000249343_9 (sequence is synthesized)
gagggtgataatcccaggatatggaaacaaggaaaagcagactacaagaagttaagtgacctccccaatgacccgctgctcataaatggtagtatcagaattaaaacccagatgaggctg

SEQ ID NO: 898878 - DNA, 120 bp, Artificial Sequence
  ENSG00000249343_10 (sequence is synthesized)
atttgagatccgagtatgattggggaaatatcctgaaatagtctatgatttgaagaaatggatagatggctagaataacatgctagatggtagtcaagttactaactgcagaattgattt

SEQ ID NO: 898879 - DNA, 120 bp, Artificial Sequence
  ENSG00000249343_11 (sequence is synthesized)
gataaaattctcatcgtgtctcctgacttaggagaaatattgggtctgatgaatgggtaaaattcccaggtgaaaagaatttggtctgtaagatttggcagcaccctgaggtttgccata

SEQ ID NO: 898880 - DNA, 120 bp, Artificial Sequence
  ENSG00000249343_12 (sequence is synthesized)
ttgaattcagctgtctgtggagaaattataccaaccacatggttagacagaaggaatacaatatattgcttaatttgtatctgaaagctaagcaacatggaaaaaaatcaagcatgctca

SEQ ID NO: 898881 - DNA, 120 bp, Artificial Sequence
  ENSG00000249343_13 (sequence is synthesized)
gtcacttccatgaggacaaacgaagacacttcaagggtagcaaacgcagtcagatgatacttcctgacagcatccaagagcaagtctcaccaccacatctgtcaataaaaaagaaaacaa

SEQ ID NO: 898882 - DNA, 120 bp, Artificial Sequence
  ENSG00000249343_14 (sequence is synthesized)
gagcaagtctcaccaccacatctgtcaataaaaaagaaaacaaggagctgccaatttgtctatttataggtgccaataaaatcctgcacagaactttagtcaacaagactatttcagaag

SEQ ID NO: 898883 - DNA, 120 bp, Artificial Sequence
  ENSG00000249343_15 (sequence is synthesized)
gggtggccaacagtgtggcctttcactggcaagggccacctttgtcatcacttaagaaagaaaacctgccaagttttctgtgaggccctcaataaatcttactgagtatttccatacaca

SEQ ID NO: 898884 - DNA, 120 bp, Artificial Sequence
  ENSG00000249343_16 (sequence is synthesized)
gatacacctcccatgccccacctctcacccaggacaggatcgaagtgttgggggagccacaacctgcttcacctagaaagaggacattgacatggatctgccagctttctaagactttcc

SEQ ID NO: 898885 - DNA, 120 bp, Artificial Sequence
  ENSG00000249343_17 (sequence is synthesized)
ccccccgaaggtgcgcaccatggagaatggcctggagtttcctggctgcatgtaagtgcaggaagacatgctaagggtaccaccgctctcagtagagcaagcacacttctctcgggctct

SEQ ID NO: 898886 - DNA, 120 bp, Artificial Sequence
  ENSG00000249343_18 (sequence is synthesized)
ttcctgaattcaagtaatcacacctcgcacaccaacccactgccaagaaagagcttttatttgactcaggaggtagagaaagtttcactgaaggatttctaaatttgttctctttctttc

SEQ ID NO: 898887 - DNA, 120 bp, Artificial Sequence
  ENSG00000249343_19 (sequence is synthesized)
ttccttccttttctttcttccttctttccttcctttctcttttctttcttttgttcattctctttcatttttctttctttttttctttctctttctttcccttgtccattcattcgcctt

SEQ ID NO: 898888 - DNA, 120 bp, Artificial Sequence
  ENSG00000249343_20 (sequence is synthesized)
tcctttctttatttttcttggcttttttctttcatttctttatattcccctctttcgctttctctgaatttttatgtctcttttttgttcttttttattccctttttaacccacttcctt

SEQ ID NO: 898889 - DNA, 120 bp, Artificial Sequence
  ENSG00000249343_21 (sequence is synthesized)
aacaacatctgtatctcgggtgaaattgctggaactgtcacattaagttccagagaatttctcatttgggaccttgcatatcacacatggctccaaggggctgatggattccttttatgt

SEQ ID NO: 898890 - DNA, 120 bp, Artificial Sequence
  ENSG00000249343_22 (sequence is synthesized)
cctctttactactaaagtttatagggaacatcttgcgtctctctcttttctctgctacattaaaaatgatcatctagctctccatatggccaaagtttgaggtcttgcttactggttagt

SEQ ID NO: 898891 - DNA, 120 bp, Artificial Sequence
  ENSG00000249343_23 (sequence is synthesized)
attgattagtacttattcataactggtataatatttttcctacagagtacaaattgcaatttgcagtatcagaccttagaaagctttggaccacataataaatgcaagatttgacaaaca

SEQ ID NO: 898892 - DNA, 120 bp, Artificial Sequence
  ENSG00000249343_24 (sequence is synthesized)
aataagagacattgacctgaatcttagagctgatgcaactgagtgtgtcacctcagtattcaaccagtagggggttgtttatggggagggcttcggcttgccaattagaagtcttggctg

SEQ ID NO: 898893 - DNA, 120 bp, Artificial Sequence
  ENSG00000249343_25 (sequence is synthesized)
attctagcactttcttggctgattctagcactttctgcaggttctctttctgcaggtcagttactttgtttgtaaaagtgtactccttcttagtagctatcaactccttcttggtagggt

SEQ ID NO: 898894 - DNA, 120 bp, Artificial Sequence
  ENSG00000249343_26 (sequence is synthesized)
tatttcttttacttctttgtattccttccactatacaaaatacaaacccttgtttatagctgattccccagtaaatttctgaaagaacaaatggatgaaagaaggatgatttatgatatg

SEQ ID NO: 898895 - DNA, 120 bp, Artificial Sequence
  ENSG00000249343_27 (sequence is synthesized)
tccatggttgctgaaagaatggggaaaaatgtaaaatcacctgaaaagttaatagataataaatgcaagaagttttatttgtaaaaagccaatagataataaataaaagaagttttatcc

SEQ ID NO: 898896 - DNA, 120 bp, Artificial Sequence
  ENSG00000249345_0 (sequence is synthesized)
agagaagcggaagggagagaatggaaatggccgcatgcagctcctctccctcagacagctcggggctcagcggaatgagcacagtctgcaggacaagtgcggaggacttcagtcccctct

SEQ ID NO: 898897 - DNA, 120 bp, Artificial Sequence
  ENSG00000249345_1 (sequence is synthesized)
actgtatattggctttaggactcaagttgtccctgaaatagaggaaggtgttttctagggtagtggtaattatcacagtcaaaaaagtaggcgagagcacttaggaaaactgtgcggaga

SEQ ID NO: 898898 - DNA, 120 bp, Artificial Sequence
  ENSG00000249345_2 (sequence is synthesized)
tcggctgctgatgtgtaaatactgctgaagctgcttattcaagattagaaaacctgagacccagacgggggaaactgctttccatggttaatcgtcaacaactggccaggatgggacaga

SEQ ID NO: 898899 - DNA, 120 bp, Artificial Sequence
  ENSG00000249345_3 (sequence is synthesized)
gcctgggctgcacctgagcttggcttcacataggagggattctggaacgcaggatcctgacaacgacctcaagcccctgtaaagcaacacattttttggcaagaatccctgggacagaga

SEQ ID NO: 898900 - DNA, 120 bp, Artificial Sequence
  ENSG00000249345_4 (sequence is synthesized)
aagaatttcttctcacttattattgagaatgttctcatgtcttgcaaggactcaccccaggacccagtaccttcaagcgttggctgtacggattaccagctcctgaattgcaggcctctt

SEQ ID NO: 898901 - DNA, 120 bp, Artificial Sequence
  ENSG00000249345_5 (sequence is synthesized)
ttccataaccagaaagacttgtaagtgcttctgtttccttccccataaactcctggaaaaagaacagaaactggagtctatgatttattggggagagaaaagaaaagaaaaaaaaaagaa

SEQ ID NO: 898902 - DNA, 120 bp, Artificial Sequence
  ENSG00000249345_6 (sequence is synthesized)
gtcttgcaaggctcactgcccagtagaagctgaaaagattcagtatgagtaaaagaagagatctgaaatttgcagcttgtcatagaaaggatgaattctgttggaaagatgggctgttct

SEQ ID NO: 898903 - DNA, 120 bp, Artificial Sequence
  ENSG00000249345_7 (sequence is synthesized)
ccatgtggtctctcatcctaagcaggccagccaaggcatattctcttgctgaggcagatgttcaagaaggaaaacagaagcacacaaagcctttggaagctggactcacaagtggcacat

SEQ ID NO: 898904 - DNA, 120 bp, Artificial Sequence
  ENSG00000249345_8 (sequence is synthesized)
tggtatgactaccgccttgactagtcataaggccacacttgattcaagattgaaggagttggaaaatattcatgtgttgagtgctacctgaagggaggagtgtgacttccactgtcctgt

SEQ ID NO: 898905 - DNA, 120 bp, Artificial Sequence
  ENSG00000249345_9 (sequence is synthesized)
gcaaatagagagggagggccatcttcaaacactgaggtgcaggtgctactagctggaagttggtagaagcaatgtaagtggtgaatggttgttataccagccgtgtctgctacatctact

SEQ ID NO: 898906 - DNA, 120 bp, Artificial Sequence
  ENSG00000249345_10 (sequence is synthesized)
attctctcttcctcaagacttctttttacttcctttactggatctacttcctatggactttaggcttcagcttagacataaatttctaaagaagtcttctctaacctcagacatcttgac

SEQ ID NO: 898907 - DNA, 120 bp, Artificial Sequence
  ENSG00000249345_11 (sequence is synthesized)
ttacatccctgatgcaatgtctcaggattgcttgtacatcttatgataatattcaccactctattgttgaattgcattcccacccagatgtaaggtgcatgaacactggggttctgccta

SEQ ID NO: 898908 - DNA, 120 bp, Artificial Sequence
  ENSG00000249345_12 (sequence is synthesized)
gggttctgcctatgtttttaaccactgagttccacagtgcctaacacatggcacatattcaataaatagtatgtattctgaacagaattttgtattttttgagaccgagtctcactctgt

SEQ ID NO: 898909 - DNA, 120 bp, Artificial Sequence
  ENSG00000249345_13 (sequence is synthesized)
cacctggccttctgaacagaatttaaccatgcctttgaacgcacatttaagcctgattttatgataagcctgagttaaatttcccatgagaccctgaataaagagtccacttcttctcag

SEQ ID NO: 898910 - DNA, 120 bp, Artificial Sequence
  ENSG00000249345_14 (sequence is synthesized)
cgtgacaaggcatttgacacacatgaattttgtaaagagtatctgccgcttgtcaggtacaaaaatcactttctgggacattcaaatggcaagtgtggagcaggcaaggaaatgaagcca

SEQ ID NO: 898911 - DNA, 120 bp, Artificial Sequence
  ENSG00000249345_15 (sequence is synthesized)
taataagatagagtttctcagctgagtaattgggtttctaaacacatgcatattttatgtctccttgtattaaatcattcatggaaaatatgtttctgttaaataaaatagtatatgaca

SEQ ID NO: 898912 - DNA, 120 bp, Artificial Sequence
  ENSG00000249345_16 (sequence is synthesized)
ggactctgccctttctaccccgcgctttccttcccggcttccgtatcatttaaagggaccgtgctcttcctttcccagcactccggcttgagtgttaaatggccagcaggaattatccac

SEQ ID NO: 898913 - DNA, 120 bp, Artificial Sequence
  ENSG00000249345_17 (sequence is synthesized)
tcccagtggatttgttacggtgagaaagcttcacttggagacaaagccaaaaccttcctcccaggctcccttggatgtagggggaagcaaactggctgtccaggcctctgagccacatct

SEQ ID NO: 898914 - DNA, 120 bp, Artificial Sequence
  ENSG00000249345_18 (sequence is synthesized)
acacacctcatgagagggcctgtgcaacattgccttagagatggagagcattgcttcagaatcagggaagcctaaatttcacccctggggctgccccttgtgatcttgaatggctcctga

SEQ ID NO: 898915 - DNA, 120 bp, Artificial Sequence
  ENSG00000249345_19 (sequence is synthesized)
caagaggctgctggggaggctcctgctccctgcctttcgggactgccgtggattgcccattgatgggtcaaaatccagctacctggtaattcaatgagtccctagtgtgcatccaataaa

SEQ ID NO: 898916 - DNA, 120 bp, Artificial Sequence
  ENSG00000249345_20 (sequence is synthesized)
ttatcttctgtttaaattagaacaaactgtttttaatctgtgtgctaagaatctcattaaatgcatcataaatttcaaaatcaaaaactaaataaaacatttatctatcgagtactaaaa

SEQ ID NO: 898917 - DNA, 120 bp, Artificial Sequence
  ENSG00000249345_21 (sequence is synthesized)
gatagcattgctctcatgggtgctgttcaccaaacacagggactcttcacctcatgggctaaggattgctggtgctggctggaactgagactaccatacacctaagaagtcaaagttgct

SEQ ID NO: 898918 - DNA, 120 bp, Artificial Sequence
  ENSG00000249345_22 (sequence is synthesized)
attcaaggggaagtgcaaacacaagatgagggaaactgatgtatttagtgtctacattttacaaatggatgcttttcataatatgaaaatactgcaccataagattgccagtcacaacag

SEQ ID NO: 898919 - DNA, 86 bp, Artificial Sequence
  ENSG00000249345_23 (sequence is synthesized)
ttctttctttctttttttttttttgagaccgagcctcactctgttttccaggttcccatctccacctcccaggttaaaaaaattct

SEQ ID NO: 898920 - DNA, 87 bp, Artificial Sequence
  ENSG00000249345_24 (sequence is synthesized)
gtggtccacatattcagtttttacctactgtttctctttctcacaaactaagccaaacatttggttccaactgatttcttcctcttc

SEQ ID NO: 898921 - DNA, 120 bp, Artificial Sequence
  ENSG00000249345_25 (sequence is synthesized)
ctaagccaaacatttggttccaactgatttcttcctcttctttctgacatagtcaatgaatttctaaagtaaaagaatggaatttcagctacaaaacaacataagaatggttttctttaa

SEQ ID NO: 898922 - DNA, 120 bp, Artificial Sequence
  ENSG00000249345_26 (sequence is synthesized)
aaagtgcacctatcactgttttggaattttttccctagtactgcttatttatctggccatcagaaacagtggcagatgcctacattttgataaaacattttagaaaatatgccagagact

SEQ ID NO: 898923 - DNA, 120 bp, Artificial Sequence
  ENSG00000249345_27 (sequence is synthesized)
gagagcaggagaaactgctgaaggagaacataatgttcatatttatctaaatgtgtttatttacattaatgtttttattggtagcagaatatggtgacatgcagactttttctaaaatgt

SEQ ID NO: 898924 - DNA, 120 bp, Artificial Sequence
  ENSG00000249345_28 (sequence is synthesized)
aatatgtaatgcttcgttcagggcgcaaaatttttcttacaatttctaccttatatatgattgagtgacactttggaaagatcactgctgtccaaatgttctctctacattttaatccaa

SEQ ID NO: 898925 - DNA, 120 bp, Artificial Sequence
  ENSG00000249345_29 (sequence is synthesized)
tacaaatatactgtattactttaaaacttttttccccaaaattgtatccattatgatcatgggcaaggatgatgtctaggatatgattctgagattgtataagtgatacgagatcgagga

SEQ ID NO: 898926 - DNA, 120 bp, Artificial Sequence
  ENSG00000249345_30 (sequence is synthesized)
aaacgttgtttaaagagaggtaaataaactgaaagcacaggcatgtaaaaggattatttgtgtgaaaactggaaccacaaagaatgatgataaaagagtgttgaggagggggagggggag

SEQ ID NO: 898927 - DNA, 120 bp, Artificial Sequence
  ENSG00000249345_31 (sequence is synthesized)
attgaaagctttatgacatgaggaaggaggacatttgtgtcatctaccaataagtaggacaaagatagacagtaatggtgaaatttgagtttcaaaacacagtgattagtaacattgcag

SEQ ID NO: 898928 - DNA, 120 bp, Artificial Sequence
  ENSG00000249345_32 (sequence is synthesized)
aagaaacaatgaaaaacaagcaggatgcctactttatgcctagagtcaagagtcaccacgaattggtggatgaatacgttagtttcatttctctattgtcaagggaagataactctcagg

SEQ ID NO: 898929 - DNA, 120 bp, Artificial Sequence
  ENSG00000249345_33 (sequence is synthesized)
tgtgtattctatgctccttccaaatgttcctcactgagtttaagctctgattgccccacagtggtgaccagcttgatagcactccttttaaaagcttcttcccttttctttctcactact

SEQ ID NO: 898930 - DNA, 120 bp, Artificial Sequence
  ENSG00000249345_34 (sequence is synthesized)
tcacattcctacagtgttttctgataatacggaccaaagaaattatttgcacttgaattctcatctcagtgtcatcctctagctgatgacatcatgagaaaactgcatcctccactttgc

SEQ ID NO: 898931 - DNA, 120 bp, Artificial Sequence
  ENSG00000249345_35 (sequence is synthesized)
tcagaagacttttttttttttttttttttaagattctaactccttttgtctgctctgtcacttttctgaactttaaaatctgtcaacttttagggaggaaacaaaacccgaaacatgaaa

SEQ ID NO: 898932 - DNA, 120 bp, Artificial Sequence
  ENSG00000249345_36 (sequence is synthesized)
agaaacggcagaactaaaagagcaccgtaacacctcctcttgggcttcagggccacaggcatccccacctaggtgccaccacaggccctgcaggaccagccagctggaccctgcacttgc

SEQ ID NO: 898933 - DNA, 120 bp, Artificial Sequence
  ENSG00000249345_37 (sequence is synthesized)
tcgctcacgtgctgcctcctgcaagggggtgagtgtggcaggccagctaaaccacacatccctgtcacgggtccagcaaaaaggccgaagatatttttgtattattatgaccacctgcta

SEQ ID NO: 898934 - DNA, 120 bp, Artificial Sequence
  ENSG00000249345_38 (sequence is synthesized)
ggcatatcattggtttccacttacagtggctatgttctacagcctctcctgactacaagggagatggagaaattgcatagtattgtcaccatcttgcaaaacgtcagcactttggaataa

SEQ ID NO: 898935 - DNA, 120 bp, Artificial Sequence
  ENSG00000249345_39 (sequence is synthesized)
ggaagaatgtagaacgacgtttcatgggtgataaaggcatcttctgggaaggaacaagttgcaactgaacacagcaggcatcttctttggaggtgcttctaagacatttacaccaggttc

SEQ ID NO: 898936 - DNA, 120 bp, Artificial Sequence
  ENSG00000249345_40 (sequence is synthesized)
cactctcctaggaggcagttaggaaggagtttgcaggataacacaagtgacttgctgcctttggtgtggaaaagcagctcagaggaacttcccctaggtcatcacctttgcgacctgcca

SEQ ID NO: 898937 - DNA, 120 bp, Artificial Sequence
  ENSG00000249345_41 (sequence is synthesized)
acatgtttagtggatgctatcttggttgggtgatcttcatatcctttgcctcttttttctggcattactctgcattgtatggggtggtgcccaattccagattgaatttcccaggtaatc

SEQ ID NO: 898938 - DNA, 120 bp, Artificial Sequence
  ENSG00000249345_42 (sequence is synthesized)
attatcagggaggagatagggaaaagccaggactttcatcttccaccctctctgccttatgggacatctttgtcaaaatgctcccagcatctcctacctgcctccagctctctgaaagag

SEQ ID NO: 898939 - DNA, 120 bp, Artificial Sequence
  ENSG00000249345_43 (sequence is synthesized)
gttcacttccattccaacttctcaaggccggccctgctcctggctgtaataacattgcatcttccctctgtttctccagctgagaggtggcagtggcttcctctggtggctggcagagtt

SEQ ID NO: 898940 - DNA, 120 bp, Artificial Sequence
  ENSG00000249345_44 (sequence is synthesized)
gattggatcttccttcacaagtttccaaggcttaatttgcttttcaaaatccatcaaagtgaatgtctttctttaaccctcgttggagagatgtgtcaaccataaactgcccgtaggagc

SEQ ID NO: 898941 - DNA, 120 bp, Artificial Sequence
  ENSG00000249345_45 (sequence is synthesized)
aatgtgatactgcttgattccacaaccatttgtgtgatttgggagcatggttttgcttgatgtgtacattcttaacatgatgaatagaattgcagaggtgacagaatagagagaaattgt

SEQ ID NO: 898942 - DNA, 120 bp, Artificial Sequence
  ENSG00000249345_46 (sequence is synthesized)
atagctacttgaaagcctgcccatgcatttatttccccagacagaccagcttcatgcctcctgactgatgcatctattacaaatgggaggcaggatggaggatacagagggtggaaaaaa

SEQ ID NO: 898943 - DNA, 120 bp, Artificial Sequence
  ENSG00000249345_47 (sequence is synthesized)
gagagcagtgaaatgttgattcaaaaagacaaaaaatgtaaaataaaaggattttgcattctaaaaatccacgtgaggcttctagggcaaatccattaggggaattttctcagtatgcac

SEQ ID NO: 898944 - DNA, 120 bp, Artificial Sequence
  ENSG00000249345_48 (sequence is synthesized)
tgccagaaattctgttttagcttgcctcttaagtggacattttgcttaaaaggcagaaaatatatttctaatcaaagggaaaccttatattcatgtctgcttttaaatgagagcctcaaa

SEQ ID NO: 898945 - DNA, 120 bp, Artificial Sequence
  ENSG00000249345_49 (sequence is synthesized)
atcgaaattgtttgcctgtactgtaggtctgaatgacacttcagctggggtatgctgacaagtgtttaataattggctctccagtgagaaaaacctctggtttacagtttgccattttct

SEQ ID NO: 898946 - DNA, 120 bp, Artificial Sequence
  ENSG00000249345_50 (sequence is synthesized)
ttggtgtaaatactttcacgctggccaatttcagacaactgccatgacagtgctgagcattgagttgggaagagatgcgcagcagcccagcattgtataagatcaccacccttcatacac

SEQ ID NO: 898947 - DNA, 120 bp, Artificial Sequence
  ENSG00000249345_51 (sequence is synthesized)
aatagatgcagaccaaatagaaacaaccttgatatcacagacgttaagaaaagttagtaaaaagtcttgaaattttatttaaaaataagtaataaaaattgttacttttgtttttaatgc

SEQ ID NO: 898948 - DNA, 120 bp, Artificial Sequence
  ENSG00000249345_52 (sequence is synthesized)
ggaacgcaggatcctgacaacgacctcaaggttagaatgaatgccaaagatgccttttttgtgtgtgcttttcttttttaaataaaatacaaattgcttatttcatctgtaaaatgggga

SEQ ID NO: 898949 - DNA, 120 bp, Artificial Sequence
  ENSG00000249345_53 (sequence is synthesized)
gtatctcacaaactcacaattgtggtatgaggactgaaatgatcacctggagtggcgatcctaacctccaactttccctaagaaagaattccattttgtgcataaaaattcatgcttgta

SEQ ID NO: 898950 - DNA, 120 bp, Artificial Sequence
  ENSG00000249345_54 (sequence is synthesized)
actagtgtgtttatccaaaatgagaccaagagaagattattttcctccaatagtgcaagctaataaataagacacattttaaagctgtttctaattaataaaagcattatatccattaaa

SEQ ID NO: 898951 - DNA, 120 bp, Artificial Sequence
  ENSG00000249345_55 (sequence is synthesized)
aacctccaagggaggacacggcgcctgtggaggtcatcattttgatcatttcgcaaggtagacgctggccaggatgatgacagagatgtagacctgatgcccagaatctcaggagtgtga

SEQ ID NO: 898952 - DNA, 120 bp, Artificial Sequence
  ENSG00000249345_56 (sequence is synthesized)
acgtcttgttttcccatcataaaacaggaaacgtcattcctggggaagaacacccaatgaacaggcacctccttagagagatggtgcatttttaactaggaagaaaggaaacatatgttc

SEQ ID NO: 898953 - DNA, 120 bp, Artificial Sequence
  ENSG00000249345_57 (sequence is synthesized)
aatgtaaggacaacctttacaaatgggaagaagagagatcttggctgattttacctctgtaattatggcaaagggacaattgaatgggtggaaagtgaacatgcagtccttcctttggag

SEQ ID NO: 898954 - DNA, 120 bp, Artificial Sequence
  ENSG00000249345_58 (sequence is synthesized)
taaggttattaattttggttttacctctgtatctcatttatgcaaggttcaggaaatattctgtgatgatagctgtattagattcctaggggctacataataaagtaccattaccatcaa

SEQ ID NO: 898955 - DNA, 120 bp, Artificial Sequence
  ENSG00000249346_0 (sequence is synthesized)
acgaggcagcaaatccgaacaggcaaaggcctcactctccagtgcagtctgggaggactgatcagggaagaacagatcagggtgaagaacagaaaggtgagctctgatcctggaacttct

SEQ ID NO: 898956 - DNA, 120 bp, Artificial Sequence
  ENSG00000249346_1 (sequence is synthesized)
tccctgcgctctgccagctcccacctcgccaccaccctgggttctggaaccacgccaagcagggcagaaaccgaagtgcttttggaagtccacagggattcccacacccaccacagccca

SEQ ID NO: 898957 - DNA, 120 bp, Artificial Sequence
  ENSG00000249346_2 (sequence is synthesized)
atttcatctgcccacagttgctccctgaactcagtggctctgccgcagcagggagatggtctgaaggacaggcgtgggggcagaagaagaccccaaggcatctccccaagatgaccacag

SEQ ID NO: 898958 - DNA, 120 bp, Artificial Sequence
  ENSG00000249346_3 (sequence is synthesized)
ttgtccctgaagaagcagtcacagcaagctcacttcacaggaaccaagctgtgggctgatcctacagacttgaaaagacaactcaaaaagattgtctgtggggtcagaaacagctctgga

SEQ ID NO: 898959 - DNA, 120 bp, Artificial Sequence
  ENSG00000249346_4 (sequence is synthesized)
tattttcacttctgtcaattagatcaaagccctgcccagaagctttgagcgccgctgtcaagtcccattcctcccctaaaccatccaggttccatctgccttgaagccaaaggatcttct

SEQ ID NO: 898960 - DNA, 120 bp, Artificial Sequence
  ENSG00000249346_5 (sequence is synthesized)
tagattcctcaagaaaaattcaggccccgagtttctccaccagcactctcctctccccgaaggagtgggtgggctgcatttctcttcatattctattccattccagaccgtcttggacta

SEQ ID NO: 898961 - DNA, 120 bp, Artificial Sequence
  ENSG00000249346_6 (sequence is synthesized)
ccagcctgtccgccacccctcggggccctccctcctactctgcccttgcccgctgaggtcccaagctgaggagatgagccgagcagtaaaaagagaggaggtttggaaaagcaatgtcct

SEQ ID NO: 898962 - DNA, 120 bp, Artificial Sequence
  ENSG00000249346_7 (sequence is synthesized)
ctcagtctttaataggtggcccccctgggaacctgctggaagtggaagttaataagctgaaggtggtcacaaccaatctctgccacactcgcaccctaccccaccccaaatcattccttt

SEQ ID NO: 898963 - DNA, 120 bp, Artificial Sequence
  ENSG00000249346_8 (sequence is synthesized)
taattaatagtggaagacctttttaaaaatgtaacatgaattggctatttcttgaggcaaacaaaaggtggctctgaagcgatatatttgtactcgtataaattcattaaaatagaaagc

SEQ ID NO: 898964 - DNA, 120 bp, Artificial Sequence
  ENSG00000249346_9 (sequence is synthesized)
gcgggacggttactctgttcctgaggtaccccccgaggtgggtgtatggggacctccgcctccctagacttctaggccaggggcgaggatcaccttagagggtttccccagacgtccctg

SEQ ID NO: 898965 - DNA, 120 bp, Artificial Sequence
  ENSG00000249346_10 (sequence is synthesized)
atttcacatgtcctgtcctgctggcaggctgcgccttctttctgcgctttggggaatggtgccttcacgcactttgtaaagggtctggaactgagctgaagagaagtgattgagggctat

SEQ ID NO: 898966 - DNA, 120 bp, Artificial Sequence
  ENSG00000249346_11 (sequence is synthesized)
tgtggaaagtctccgctaattcaggtttcttcacccaccagattgtctgtggggtcagaaacagctctggaggggtctgcagaaattactttcccaagtctttgggctggaaggaacgaa

SEQ ID NO: 898967 - DNA, 120 bp, Artificial Sequence
  ENSG00000249346_12 (sequence is synthesized)
cagtcacagcaagctcacttcacaggaaccaagctgtgggctgatcctacagacttgaaaagacaactcaaaaaggttggctgtgataggtgtccctggccacgtcagtggagcacccag

SEQ ID NO: 898968 - DNA, 120 bp, Artificial Sequence
  ENSG00000249346_13 (sequence is synthesized)
attctggtgatggaggtggccatgaccatgtctggttttcaaaggcagctttgtaagaacagaaaccagcagctccccaacatctggccctatctgctgtgcaaaccacagggaccagga

SEQ ID NO: 898969 - DNA, 120 bp, Artificial Sequence
  ENSG00000249346_14 (sequence is synthesized)
cctttccggggtgccagtggcatcctctggaaccagcttctcagtggaatttcagatgctattcctggtcaattgcctttgctatgtgctatcctttaataaattctgtttctcctcata

SEQ ID NO: 898970 - DNA, 120 bp, Artificial Sequence
  ENSG00000249346_15 (sequence is synthesized)
cccagtccatctacatgcagaaatggtccctccaaagccctctacgacaattattctcacagatcgtcatgataaactgtaagggaatatactaagaaagagggaagaagagaggaggag

SEQ ID NO: 898971 - DNA, 120 bp, Artificial Sequence
  ENSG00000249346_16 (sequence is synthesized)
tccatttttaattagtggttggaaatagagtaaaaattagagggccttaggtttaaaacacagatgtgcattgtgatcgtctgaaggaagagctgttgacagagaaaacaaggtggtgaa

SEQ ID NO: 898972 - DNA, 120 bp, Artificial Sequence
  ENSG00000249346_17 (sequence is synthesized)
ctatgcccttggcctgtgacagttaggtgagggttgctcaccgcagaagacagaccggtagagcccagcaggaaagagggtatcaggctggaagaagtgcagtttggccctggcggagtg

SEQ ID NO: 898973 - DNA, 120 bp, Artificial Sequence
  ENSG00000249346_18 (sequence is synthesized)
gtggagtggctggagcgactgcaggaggaggatagatctggaagcaggtctgggctatactttggcctcagccagggagccagagaaggaaggcttgggttcgaggggggaaatcattct

SEQ ID NO: 898974 - DNA, 120 bp, Artificial Sequence
  ENSG00000249346_19 (sequence is synthesized)
cccaaattgctttctcagaagcgccaattcagatcacctgaagacagggtctgggccccattacagcatggttcccaaatgggagtgtgcttggaagccttggtgattaaagggtgctga

SEQ ID NO: 898975 - DNA, 71 bp, Artificial Sequence
  ENSG00000249346_20 (sequence is synthesized)
accctgagaacatgtgttcaaggtggtcggggtacagcttggttttatatgttttaggaaggcatgagact

SEQ ID NO: 898976 - DNA, 120 bp, Artificial Sequence
  ENSG00000249346_21 (sequence is synthesized)
gtacagcttggttttatatgttttaggaaggcatgagactcaatcaaagacattttaaaaatacattggtttggttcagaaaggtgagacaactcaaagtgggggcttccaggctatagg

SEQ ID NO: 898977 - DNA, 120 bp, Artificial Sequence
  ENSG00000249346_22 (sequence is synthesized)
ttttctgactgacaattggttgggtttatctggagacctgggattaatggaaaggaaggttcatgttaagatacagaactgtggggaccaagttttattgtgcagaggaatctctcagat

SEQ ID NO: 898978 - DNA, 120 bp, Artificial Sequence
  ENSG00000249346_23 (sequence is synthesized)
tcttagttgattatctcctggatctgggaaggaaggaaggaaaacaaaggggaaaggaaatatttcctatagaatatggatttttcccacaagagactttgcaggacaatttcgagatat

SEQ ID NO: 898979 - DNA, 120 bp, Artificial Sequence
  ENSG00000249346_24 (sequence is synthesized)
gagactttgcaggacaatttcgagatatggcaaggagatttattttggggtaaaacattttgattttcttccttgttatgccacagtcagattggaaagtcagtcatgatatacagggtc

SEQ ID NO: 898980 - DNA, 120 bp, Artificial Sequence
  ENSG00000249346_25 (sequence is synthesized)
agataaaatccgtctgatgagaatgtatggttggtagggcatgactccccagaccccttagataggaatctgggcaagataaaaaatcggagcttagtcctcaagggaaggggcagcagc

SEQ ID NO: 898981 - DNA, 120 bp, Artificial Sequence
  ENSG00000249346_26 (sequence is synthesized)
gctgttggcgggctcaccaagcatcagtactggatcaccaggcttgggagagtaggggtgtcaaggccccaagagcagggagggccttggccccactaggggggcatcagaaagcaggga

SEQ ID NO: 898982 - DNA, 120 bp, Artificial Sequence
  ENSG00000249346_27 (sequence is synthesized)
gcacttgtagttcaccatgattcccctcaaagccctgggccagcctcctgcagggaaggcgggcaggaagtcttccccataggggcaggcttgcttttttggccagccatcctcttcata

SEQ ID NO: 898983 - DNA, 120 bp, Artificial Sequence
  ENSG00000249346_28 (sequence is synthesized)
tgaaaaacagcatcttgtcatttctagatgtttctactttggttgactctttaatttttctgcagttaaaagccttaaaacagcaaggaagcaggggacaggaggggagcccagatctct

SEQ ID NO: 898984 - DNA, 120 bp, Artificial Sequence
  ENSG00000249346_29 (sequence is synthesized)
cccaaagaaaaggagaaagactgaatccttgaggcctgccgtacaaaggagtggtgggttggaggagggtaggcagagactagggtggtctgggactttaagtacaaggccccgtggatt

SEQ ID NO: 898985 - DNA, 120 bp, Artificial Sequence
  ENSG00000249346_30 (sequence is synthesized)
tcattggggggcaagccatgtgcaacagggaagctcaggaaccggggggtttcgcacagaggtctggtgctgtgaggtacagggaaagaattagtggatctggaccagtggaacattggt

SEQ ID NO: 898986 - DNA, 120 bp, Artificial Sequence
  ENSG00000249346_31 (sequence is synthesized)
ttagtgtaatctctgatttgtgttgagtgaatttgagtatagtccaaccaccacccccctaccccaactaaaccatgtgcccctcaggagctgggactcttctattttctattccttata

SEQ ID NO: 898987 - DNA, 120 bp, Artificial Sequence
  ENSG00000249346_32 (sequence is synthesized)
gcaggctcagtgcctgacacactacgttgaattttattttaaacatttcatttacattaaatggtatatttgcaagttcattcttccagacctcagtttattcttttatctagtcatttt

SEQ ID NO: 898988 - DNA, 120 bp, Artificial Sequence
  ENSG00000249346_33 (sequence is synthesized)
aaagggattctctcagaccctccactagctaagagaaccgaacttttcttccagaattgtcaggaaatgggacttactgacttagtgagctacttattttatctagaattaactgtgtct

SEQ ID NO: 898989 - DNA, 120 bp, Artificial Sequence
  ENSG00000249346_34 (sequence is synthesized)
aataaaatatatatgcactttgggaatggatgaggtgctacacaaatgaaagatggtattattcatcatacagtgtttttgattataatagattattctctgccaaaacccagaagggcc

SEQ ID NO: 898990 - DNA, 120 bp, Artificial Sequence
  ENSG00000249346_35 (sequence is synthesized)
aagtcgaggtaggttgctgaaaggggaggaagtctaaatagcagaatcagacttttccataagtttgcagtggcgtatggacaacactcaggcaaccagccctcggcacagcaacagggg

SEQ ID NO: 898991 - DNA, 120 bp, Artificial Sequence
  ENSG00000249346_36 (sequence is synthesized)
acccacctcctaagttggggctgagtaaagacatattcccggggcaaggctttgccaaggcaggcctcttctgaaacataagtcccatctttctcccggccccgccaccccacctcagat

SEQ ID NO: 898992 - DNA, 120 bp, Artificial Sequence
  ENSG00000249346_37 (sequence is synthesized)
gtgctgtctagaagctgcacatctggggccgttcaaactcctggctcgaatcactggaatcatctgagcaggataattttacattaatgattaaaaattgctcttctagatatagccttg

SEQ ID NO: 898993 - DNA, 120 bp, Artificial Sequence
  ENSG00000249346_38 (sequence is synthesized)
cctcagggtagccattaagaacattacttcgtaatttaagaagctcaatgtagggcgctttgggcatttgcaaagagggaactgtactcatatcttgataaattgcaaaatgtctcccac

SEQ ID NO: 898994 - DNA, 120 bp, Artificial Sequence
  ENSG00000249346_39 (sequence is synthesized)
agcaaatccgaacaggcaaaggcctcactctccagtgcagtctgggaggactgatcagggaagaacagatcagggtgaagaacagaaagaccccaaggcatctccccaagatgaccacag

SEQ ID NO: 898995 - DNA, 120 bp, Artificial Sequence
  ENSG00000249346_40 (sequence is synthesized)
agacgcagggtgtagtctcctgcgagtccatcttgatttggaaggctgcgggaggaggtggccgagaccccttccctagaccgcgaggcaggacggaggcagccgttaggaacggcccca

SEQ ID NO: 898996 - DNA, 120 bp, Artificial Sequence
  ENSG00000249346_41 (sequence is synthesized)
aggctgcccctgccaaccccgaggggggaagactgtgctctgaggtcctcggggatggttgttgcgggcctcggcctccctagattccttcccatctccccaacagcaatcctcccaggg

SEQ ID NO: 898997 - DNA, 120 bp, Artificial Sequence
  ENSG00000257829_0 (sequence is synthesized)
gcgcagccgcgacctgggtgagtggctttgctgcgagcccacgcgccctttgcccagaggctcccagacccgcccagcgggaggaggggacggaccccactacttacagacattcaccga

SEQ ID NO: 898998 - DNA, 120 bp, Artificial Sequence
  ENSG00000257829_1 (sequence is synthesized)
gccgacgccctcgcacagcctgcagggagagaaggcgagagggccaagggcctgactgtccacaaaaaaaaaggagcttcgagtgagaccaactgaccaactaggggaaagaaaccaagg

SEQ ID NO: 898999 - DNA, 120 bp, Artificial Sequence
  ENSG00000257829_2 (sequence is synthesized)
gagtgttgtccttctgggagcaggagctgtatagctgccctccagctgtatcgctggcctccagccataggaaggctgagtgaccaatgggtcttctccactccccccacctctgaagca

SEQ ID NO: 899000 - DNA, 120 bp, Artificial Sequence
  ENSG00000257829_3 (sequence is synthesized)
agcaaacaagcaaaaatcctgaaagcaaggcataactgccccaagggataagtccttgctctctgcctaactcattcccacctgccacaatggaataccactttgggatgctcattggca

SEQ ID NO: 899001 - DNA, 120 bp, Artificial Sequence
  ENSG00000257829_4 (sequence is synthesized)
ctataatagaaaagcatgagttgatagtgtcatctatctgaagctgtccttatgggatacatctgaactcccaggtctagatggggccagggccagactaggaaaaagagaaggaatcct

SEQ ID NO: 899002 - DNA, 120 bp, Artificial Sequence
  ENSG00000241596_0 (sequence is synthesized)
gtggcctcagccgctgagaccctggggaccgcagggcgtggcgcggcctccgcccgctgcacggagagccccccagaggcagcgacacggcgcttggggtccgcggggctcctcctccaa

SEQ ID NO: 899003 - DNA, 120 bp, Artificial Sequence
  ENSG00000241596_1 (sequence is synthesized)
cttggggtccgcggggctcctcctccaactccgcagacctccggggaggcctcttgctccccgaacacccgggagttcgctttcatttttaacgaatctccacaatctcttgtttgggag

SEQ ID NO: 899004 - DNA, 120 bp, Artificial Sequence
  ENSG00000241596_2 (sequence is synthesized)
ggcgatgcgccgggctctctccttcgcccttcttggcccgctcgccttcagctcccacccgcagcagcaaccgcagcctgcttccggggactgagcagccctgggtcagccaagtgtcct

SEQ ID NO: 899005 - DNA, 120 bp, Artificial Sequence
  ENSG00000241596_3 (sequence is synthesized)
cccagctgcagctcattgcactcccttgcagctgggagtgcagctggcatgctgctagctcactggtctggcccttccactggaacccagcaagttttctgtgctttttttcaccactct

SEQ ID NO: 899006 - DNA, 120 bp, Artificial Sequence
  ENSG00000241593_0 (sequence is synthesized)
gcggagctcccatttaggggtcacaggatcaagagaaacgtgccacaagctggaggctgtgcaaaactggcagcaaacatctctggggagagccctgcacacagccaccccaacctctgg

SEQ ID NO: 899007 - DNA, 120 bp, Artificial Sequence
  ENSG00000241593_1 (sequence is synthesized)
caccaccactctgatcagacagcagccatcaacatctagtcgagaccctccactagcaaagagattatgactcactgaaggctcagatgatcatgaataattttcagaaataaagtactt

SEQ ID NO: 899008 - DNA, 82 bp, Artificial Sequence
  ENSG00000241593_2 (sequence is synthesized)
gctcagatgatcatgaataattttcagaaataaagtacttttaaattatctcagttcactgaaacctccgcctcctggattc

SEQ ID NO: 899009 - DNA, 120 bp, Artificial Sequence
  ENSG00000241593_3 (sequence is synthesized)
gcagctacaatgccaccaggtgatcggaatttttcagctccattaaaatcttatgagaccatcactgaatatgtggtccgtcattgaccaaaacatcatgatgcagctcatgactatagt

SEQ ID NO: 899010 - DNA, 120 bp, Artificial Sequence
  ENSG00000241593_4 (sequence is synthesized)
cagtatcttagccaatggcatgtcttatagatagatacaaatagtgcagccttttgccgaagaaatgatatcttgtttcctttgccaggagctgtgtgcttgcaacagtaatataaatgt

SEQ ID NO: 899011 - DNA, 120 bp, Artificial Sequence
  ENSG00000241593_5 (sequence is synthesized)
gcagcccacattaggtactcaaacaacttgtcatttgtttgaaaaggagccctttatttgactagaagaaacaggagccaaatgagcttgattccttctcatgccagccagcaatgcaat

SEQ ID NO: 899012 - DNA, 120 bp, Artificial Sequence
  ENSG00000241593_6 (sequence is synthesized)
tacaggaatggggactggggaaggacaaattgatcagtcacccatgcacataggtgcaggggctatgtacttgaagtggttggttgtggttgggaccctgccttggtctgttaattacat

SEQ ID NO: 899013 - DNA, 120 bp, Artificial Sequence
  ENSG00000241593_7 (sequence is synthesized)
attgcaaaatgggatctcataagtgactgtaattcattggtaatttcttgagaaattacaatttttgacaggaaagttttttttctttgtgtcccctgataaattctcctggtttgtaaa

SEQ ID NO: 899014 - DNA, 120 bp, Artificial Sequence
  ENSG00000241593_8 (sequence is synthesized)
tgaagctcagtgcctgctcgcaatcctggctgtgcctacagtgttttactcaacaagttctggataatctctcctgagcttgtcaatgataccagaggtggaatggatggtggtacagag

SEQ ID NO: 899015 - DNA, 120 bp, Artificial Sequence
  ENSG00000241593_9 (sequence is synthesized)
gaagcccattcagtatcttagccaatggcatgtcttatagactaagattcagctctcttcagactaagatcacagcttgggtgtgatttgatcctgcttcaagctggcaaagcctcagaa

SEQ ID NO: 899016 - DNA, 120 bp, Artificial Sequence
  ENSG00000226686_0 (sequence is synthesized)
ctgctctgctaataattaggttcccacctctcaagatcattaggagcttcttttccaattcctctgttttgcatgcattggaaggtggattttcacatctcaagccagctaagagtatgg

SEQ ID NO: 899017 - DNA, 120 bp, Artificial Sequence
  ENSG00000226686_1 (sequence is synthesized)
catcagcctgagtctcttaaaggcctttatacacatatgtctacacatagggatttggatgatctcgggatcccacatcctcgctgtcccctgtccccccacaacatcccacaccaatac

SEQ ID NO: 899018 - DNA, 120 bp, Artificial Sequence
  ENSG00000226686_2 (sequence is synthesized)
ctttctgaagttttctagtccctcctttttgtttgtggtccttaaagcccagccccatgcctgactttggttcccagtgagcattgtacatttgtggatattaaatctttggcaaagtca

SEQ ID NO: 899019 - DNA, 120 bp, Artificial Sequence
  ENSG00000226686_3 (sequence is synthesized)
aggcgcacggcgggtatagtggttccgcaaccttgggatgttcggctgagcgcctgcctaacatgggagcgcctgcctaaccctcctgactggagggtcagcggcggggagtcctggcct

SEQ ID NO: 899020 - DNA, 120 bp, Artificial Sequence
  ENSG00000226686_4 (sequence is synthesized)
tcaatcggccatcgccacggcagaaactggggcccgggctgcgtccaggcccttccccgtccgtccacaggtctcatgggcgcccggactggggctgatgtagtttcccgacctctgaca

SEQ ID NO: 899021 - DNA, 120 bp, Artificial Sequence
  ENSG00000226686_5 (sequence is synthesized)
cataggatctggagattaaagctgctctgctaataattaggttcccacctctcaagatcattaggagcttcttttccaattcctctgttttgcatgcattggaaggatctggagctcagg

SEQ ID NO: 899022 - DNA, 120 bp, Artificial Sequence
  ENSG00000226686_6 (sequence is synthesized)
tactgaagaagaaactctaggagtgagacccaacaatctgtgtttaacaagtccccaggcccctggatcctcctggaatccctgatccctgttgctccctggcggagttttctagtccct

SEQ ID NO: 899023 - DNA, 120 bp, Artificial Sequence
  ENSG00000226686_7 (sequence is synthesized)
aagcatttggtatatgcctgggaatccaacagctgctatttagattcagagccagcctttatttatcagctttctgatgctgaacccatcagtgaacttctctgtatatttgattcatca

SEQ ID NO: 899024 - DNA, 120 bp, Artificial Sequence
  ENSG00000226686_8 (sequence is synthesized)
taaggaaaatggtgacgccgagggtgactgatttccaggtttacatcggttgccccaggggaagtgcctggcccccatctggtccttgctgctctaactttgccctgttaattgaagaaa

SEQ ID NO: 899025 - DNA, 120 bp, Artificial Sequence
  ENSG00000226686_9 (sequence is synthesized)
tgtgtcactggtgtgggggttaccttcccactatgtctcccagaagacatgagggcacagactacagtgcctgtggacagaggagctgtggggatggaagtgtgattgcttcattcaaat

SEQ ID NO: 899026 - DNA, 120 bp, Artificial Sequence
  ENSG00000226686_10 (sequence is synthesized)
gcacgccccggtgcgtgtgcgtctcttctgatgcagctccccatgggcccctggatcctcctggaatccctgatccctgttgctccctggcggagttttctagtccctcttacttgaagc

SEQ ID NO: 899027 - DNA, 120 bp, Artificial Sequence
  ENSG00000226686_11 (sequence is synthesized)
atgtctttcagagcccggcaccacccaagttgggtatctgctacacctctatggtatttttttcacctcatatcataccttcctccctcactggacttcagtgtgggacctgcaggtctc

SEQ ID NO: 899028 - DNA, 120 bp, Artificial Sequence
  ENSG00000226686_12 (sequence is synthesized)
aggccttctgggaagtcccagcttttcttgaatgttctctctctctggccagctcaggctggagcagtgggtgttggtgccatcctgtggctataggtgataagccggctgttcttcact

SEQ ID NO: 899029 - DNA, 120 bp, Artificial Sequence
  ENSG00000226686_13 (sequence is synthesized)
gacctggtcttaccttgaaccctggagttctcacatgcatggatttaaatgctgtgtctttctaagggcacattatggccattttccttatctccctcccaaggggctgtttcctgtatt

SEQ ID NO: 899030 - DNA, 120 bp, Artificial Sequence
  ENSG00000226686_14 (sequence is synthesized)
cactacctccccggcccactgcaagcttgaacatttgatggtggacacccctccctgactttgtattatggtccagattttggatgaatctctatagagattgaacagataaggctcacc

SEQ ID NO: 899031 - DNA, 120 bp, Artificial Sequence
  ENSG00000226686_15 (sequence is synthesized)
tttcaatagttacaccaagaaaggcctaggtggtgacttaagctatggttttgggcagcacgagagtggtcaggtggacagtagggaagtctacatgtaacccaaacggaaaagagaaaa

SEQ ID NO: 899032 - DNA, 120 bp, Artificial Sequence
  ENSG00000226686_16 (sequence is synthesized)
ctactctcctgctgtgcatagatgggggcctgtccccctgctgaatctcctgggttcctgctgtcaacacctgaaggcccctggatcctcctggaatccctgatccctgttgctccctgg

SEQ ID NO: 899033 - DNA, 120 bp, Artificial Sequence
  ENSG00000226686_17 (sequence is synthesized)
atagtttttcatttttttcttgctggtttttatgtatcttctaaattgtatatatttatggggtataaaatgatgttgtgatttttcaatacagtgtggaatgagaatcaaattaaccta

SEQ ID NO: 899034 - DNA, 120 bp, Artificial Sequence
  ENSG00000226686_18 (sequence is synthesized)
gaattctgtggtctgcatgtccatgtttgtgacattctgggaagggtggcccaggctgtgatttgccatctactgcaggctatggatggtattcagaagggaggggagatgctgtgtgcg

SEQ ID NO: 899035 - DNA, 120 bp, Artificial Sequence
  ENSG00000226686_19 (sequence is synthesized)
tgttctgaagggtttcccactaaacagaccaaccctctccataactatttgatttttactttatctcctcgttgacttcacagtgtcagtgcagtttgtgtaaacatctctacggggtga

SEQ ID NO: 899036 - DNA, 120 bp, Artificial Sequence
  ENSG00000226686_20 (sequence is synthesized)
tgcatgcagataaatgtttatgtgaacatataaagtctgcatgtgtgggtgaacactccacatcaggtcattgtccatcattacatatctgtggtgtctggctcattcctctcattttct

SEQ ID NO: 899037 - DNA, 120 bp, Artificial Sequence
  ENSG00000226686_21 (sequence is synthesized)
ttacctcaagtacttgactttttttgtgatgagaaggctgtttatcactttcactcaccagctcctgctgtcttccatgctggggacaggaaaggctccacgcttgactttccctcctgt

SEQ ID NO: 899038 - DNA, 120 bp, Artificial Sequence
  ENSG00000226686_22 (sequence is synthesized)
gactttatgcacaaacttcacatgctcttcctgcctccttcatccccagaagcccccatctcagccccatctgattatttcctccctctctcatttcctgttatgctgttggttttctaa

SEQ ID NO: 899039 - DNA, 120 bp, Artificial Sequence
  ENSG00000226686_23 (sequence is synthesized)
cctgaagggtaacttcttactccttagttttttgccttaatttctaagtcataggctactttcaggctaaaagttttcctccagccatggttttagtctcattctataagtcttgctagg

SEQ ID NO: 899040 - DNA, 76 bp, Artificial Sequence
  ENSG00000226686_24 (sequence is synthesized)
ccagccatggttttagtctcattctataagtcttgctaggtagtttattcattggaatagtacagtggtgccatct

SEQ ID NO: 899041 - DNA, 71 bp, Artificial Sequence
  ENSG00000226686_25 (sequence is synthesized)
ctcctgagtagctgggattatgcatttcaccatgtcagccaggttggtctcgaactcttgacctcaagtga

SEQ ID NO: 899042 - DNA, 120 bp, Artificial Sequence
  ENSG00000226686_26 (sequence is synthesized)
ggcctcccaaaatactgggattacaggggtgagtcaccgcaccccaccccttggcactatatttaagtgatgatatttttggacactgaggtagcctcattccacaggtttagatctgaa

SEQ ID NO: 899043 - DNA, 120 bp, Artificial Sequence
  ENSG00000226686_27 (sequence is synthesized)
tcattccacaggtttagatctgaagcattttcactattgcttctttccatgtatttcctggtttgcaggtcagtttcttcttttaattcatcattgacacagtggtttatatggctttta

SEQ ID NO: 899044 - DNA, 120 bp, Artificial Sequence
  ENSG00000226686_28 (sequence is synthesized)
atttcaaaagattttttaaaatatctttttgccgatttttatctatgttaattttaactagacatgttccctggaaggacatcactagttttttttttttttttccctctgtttataatt

SEQ ID NO: 899045 - DNA, 120 bp, Artificial Sequence
  ENSG00000226686_29 (sequence is synthesized)
taggtggattttcacatctcaagccagctaagagtatgggaaataggactcgttaaagcacaggtatcacacaagtgattcagattcacgagggtaatccagatgaaggtatatcattgt

SEQ ID NO: 899046 - DNA, 120 bp, Artificial Sequence
  ENSG00000226686_30 (sequence is synthesized)
acctggcccgcatcactcaataactgtcacctttgatttattgatttacttgagatggagtttggttctgtccccgaggccggagtgcaatggcgtgatctctgctcactacaacctctg

SEQ ID NO: 899047 - DNA, 60 bp, Artificial Sequence
  ENSG00000226686_31 (sequence is synthesized)
ctcactacaacctctgcctcccaggttcagagtgattctcctgcctcagcctctttagcc

SEQ ID NO: 899048 - DNA, 120 bp, Artificial Sequence
  ENSG00000226686_32 (sequence is synthesized)
ggcctcccaaagtgctaggattacaggctggagctacggagcccagcctgtcaccttgatttaaatgaatgcagctttcttggtgtcttgatgtttgtgaatttctgtggagtttgatac

SEQ ID NO: 899049 - DNA, 120 bp, Artificial Sequence
  ENSG00000226686_33 (sequence is synthesized)
ctttcagagcccggcaccacccaagttgggtatctgctcctgctgtcttccatgctggggacaggaaaggctccacgcttgactttccctcctgttttcttatctgctgtcaacccctga

SEQ ID NO: 899050 - DNA, 120 bp, Artificial Sequence
  ENSG00000245870_0 (sequence is synthesized)
ccccacccccagcgcccaaacccggggcgggtgagcgcgacccttgcagcgaccccttgccgagccctgcccgcgcgattactaaggagacgcggcctccggcactgccgtccccgcgcc

SEQ ID NO: 899051 - DNA, 120 bp, Artificial Sequence
  ENSG00000245870_1 (sequence is synthesized)
gtttgaaaacggatccatcagcggggtatttggagattattcgcactgaattttctgcccgccaagaacgaataggattgccaagccacaccactttttggagcccgcttattcgcgcct

SEQ ID NO: 899052 - DNA, 120 bp, Artificial Sequence
  ENSG00000245870_2 (sequence is synthesized)
atccaccctctcctgtgccccaggttccctgagcacgggaatcctttccgggcatggccaagtttgttcggtggctcagagcgggaagggaagtgcagttcgacacctgtccagctgctc

SEQ ID NO: 899053 - DNA, 120 bp, Artificial Sequence
  ENSG00000245870_3 (sequence is synthesized)
cgcttggagatcaaaggccggctatgggctgagcgacagatttacgggacggtggtacagattaaggcgagaaccctgccggtcctggactcgagttcgcacccaaggaaagcgtacagg

SEQ ID NO: 899054 - DNA, 120 bp, Artificial Sequence
  ENSG00000245870_4 (sequence is synthesized)
tccctggaagcgggtggatgtcggagaggccgaggcagcctgcgctgtggccaggcaggcttggtgggctttagtctcagtatgtgttctttaaagtcttgacaggttattagtaaagga

SEQ ID NO: 899055 - DNA, 120 bp, Artificial Sequence
  ENSG00000245870_5 (sequence is synthesized)
aggggcaccccagggtcatgaagatgcttctcgctctggcccaagcatgctgaggctcgcttattcctcggccaggcccagtaaaacagctcaagcacagcctggagtcttcccgcatct

SEQ ID NO: 899056 - DNA, 120 bp, Artificial Sequence
  ENSG00000245870_6 (sequence is synthesized)
cgcgggagtagagtctggctttgggccccgcgtaccccgcagtcgtcggggaccagttcgaggccacgggaagggtttccgcggcagggcgcggagtaaagaggggaagaaggaatcctc

SEQ ID NO: 899057 - DNA, 120 bp, Artificial Sequence
  ENSG00000245870_7 (sequence is synthesized)
tccgcgtgatcagtagggcgggcttgtgatactctcacacccaggttccagctcagcccccaaactgctgccccaagaaaacaagttggggagtgtggatttagacataacaacgggtgt

SEQ ID NO: 899058 - DNA, 120 bp, Artificial Sequence
  ENSG00000245870_8 (sequence is synthesized)
gagctgatgtccttacaaccaaaaatattgagactagaaattcagctccgaatccacgaccctcagattgatgcttaatcgcaccctcgactccagaaaagctgccggggacagacatgg

SEQ ID NO: 899059 - DNA, 120 bp, Artificial Sequence
  ENSG00000245870_9 (sequence is synthesized)
acaggttttgccaagggttcattaaaatagtctgcactggaataaccggggtgcaagagatcacgtcttcactcagggctttggggatcccctcgtcgccccaggtcagtgggtggggag

SEQ ID NO: 899060 - DNA, 120 bp, Artificial Sequence
  ENSG00000245870_10 (sequence is synthesized)
gagggcaaacttctgtcttttgtttgtgggtgagggatgcgaattgtggcagcagccgagaaaaggggggaaattaattgcagccaattaataattaatcccctttaaacagctttatta

SEQ ID NO: 899061 - DNA, 120 bp, Artificial Sequence
  ENSG00000245870_11 (sequence is synthesized)
tctcttctgggcgacagagatttgtctgataaccccctgaagaccaaatgtcaagtttaaccaaatagttattgctttatcaacccgagtctgcaaataaattaatcaaaagcaaatctg

SEQ ID NO: 899062 - DNA, 120 bp, Artificial Sequence
  ENSG00000245870_12 (sequence is synthesized)
tcctttgtgcggctcatttgctggtaatggatggatatgaagatttgccgatattattgtctgtcattcaatctaacaaagtgaacatttattgcatatatattaaaaattatcccggaa

SEQ ID NO: 899063 - DNA, 120 bp, Artificial Sequence
  ENSG00000245870_13 (sequence is synthesized)
tcatcatgtataaaatggtgcagtaggatgcaaaatttccacttgtttataagtgtatcgccgagaaatgtataaaataatcgagaccggcggaggcaggtcagagccgtctggaatgcg

SEQ ID NO: 899064 - DNA, 90 bp, Artificial Sequence
  ENSG00000245870_14 (sequence is synthesized)
tagatgggtatggtggcgcgtgcctgtctgctactcgggaggctgaggcaggagaaccttagccaccgcactccagcctgggcgacagcg

SEQ ID NO: 899065 - DNA, 120 bp, Artificial Sequence
  ENSG00000245870_15 (sequence is synthesized)
agtatggttttcacattatcactctcaatgccattggaggtaggtccaagctggtgtctctttgattagtctccctaaacccatctattcatttactagccattagttattctttaattg

SEQ ID NO: 899066 - DNA, 120 bp, Artificial Sequence
  ENSG00000245870_16 (sequence is synthesized)
agtccaaaaatgtttgtgaggagatagtcccatatgagattaaaagaaagaaagaaaacaaaacaacaaacaaacaaacaaaacagaaaatcaggtgtagtggacactgaagagtttctg

SEQ ID NO: 899067 - DNA, 120 bp, Artificial Sequence
  ENSG00000245870_17 (sequence is synthesized)
gtccgcctttagcgatggtttgggaacccgggcgctggaaaggcgcgggtgcggagggcggctgagccgcgcggctgcggcaccgtgggcgcgagacccctgcggagaggagcgcgcgga

SEQ ID NO: 899068 - DNA, 120 bp, Artificial Sequence
  ENSG00000245870_18 (sequence is synthesized)
gagggcgcgcgccgccccgcgctccctccctccccggtaattgatggaggctgccgaaaaaagataattagttttatgtatataatatttgatcatgaaaatattctttgccttattttg

SEQ ID NO: 899069 - DNA, 120 bp, Artificial Sequence
  ENSG00000245870_19 (sequence is synthesized)
gtataggagatctgtaatatatgttaaaatagttaattttttattatctctttgtttggcggcagcccggcctatccgaaattaccggagcatcaactgaaaatgtaggcaatgtaagca

SEQ ID NO: 899070 - DNA, 120 bp, Artificial Sequence
  ENSG00000245870_20 (sequence is synthesized)
actgcaattttccataaaaaccctgaatttgggtcagaaagtgggcaaagtagataaagatcattcgagctgtcttataagatgataaatagatatcctttcaggccaacaatgccaaag

SEQ ID NO: 899071 - DNA, 120 bp, Artificial Sequence
  ENSG00000245870_21 (sequence is synthesized)
tgcagttttgtgattcccttccatgggttctgaatgcagtgagtcgaaacgatttctacatgttttcccatggtttaggaggtgtctttacatacttgtcaatagtagcctgaccttttt

SEQ ID NO: 899072 - DNA, 120 bp, Artificial Sequence
  ENSG00000245870_22 (sequence is synthesized)
ccccatggagttgctaagtgtgttttgtttgttgctttgagtacttttttcttgttgtttgtgtgtgtgttgcacaaaatacacaagaaaataaaggttttttttcttttattgctcaaa

SEQ ID NO: 899073 - DNA, 120 bp, Artificial Sequence
  ENSG00000271778_0 (sequence is synthesized)
tttatgtggattgtctgtctcatgcttgtttcaccagggtagttacaactagggtggcataatttgactgattcaagaactacttcaatataaatcaaaataagagagtctaaattctaa

SEQ ID NO: 899074 - DNA, 120 bp, Artificial Sequence
  ENSG00000271778_1 (sequence is synthesized)
gtaattttttaacaggacaagattatttataattatgagtccatggtaatgagtgaggaatatttatttttagacagtgttagagcaaatatggacaaaaacgcgcctagttcaactatg

SEQ ID NO: 899075 - DNA, 120 bp, Artificial Sequence
  ENSG00000271778_2 (sequence is synthesized)
aaaatacataatatttattttgcacgtgccaaatgtgtattaatttatgaacatttattgtgtttaccttgtgtgtgcatggtaagcccagaagtcatggaaagacaaaatctgcatggg

SEQ ID NO: 899076 - DNA, 120 bp, Artificial Sequence
  ENSG00000271778_3 (sequence is synthesized)
ccaaaggtataaatttgtattgcctttctttgactagctaatgtgtttcttgctactgttcttaagatattgtatgtgggtttatatttgttttcaaaaataaatggaaagtttgacaag

SEQ ID NO: 899077 - DNA, 120 bp, Artificial Sequence
  ENSG00000271776_0 (sequence is synthesized)
gcacgcgcgccgggtgccccggcctaaggccgttgacctcgggttctccccggcacagtcgaatccacgccagggccctcaggccggtagctgtcctgcagtccgagcggagctgcgacc

SEQ ID NO: 899078 - DNA, 120 bp, Artificial Sequence
  ENSG00000271776_1 (sequence is synthesized)
tcgggcagctggaagcctgtgggctgctgcttctccaggcaggcggcggagggatgcaggcaggatgagcggcggtcccttcgccgccacccggagaaccgcggctggtgcccttgaagg

SEQ ID NO: 899079 - DNA, 120 bp, Artificial Sequence
  ENSG00000271776_2 (sequence is synthesized)
ccctgggatgcctgggttgggtgggtgagtgaacgagaaccctgagtgagtgaggggagggcgggtcccctcctggcttcaaattcaacccaatcagctctgccgatggtttgaaactgc

SEQ ID NO: 899080 - DNA, 120 bp, Artificial Sequence
  ENSG00000271776_3 (sequence is synthesized)
acacgccgacccacccgccccgaagtctgaaagttatgccctggagacctgcgagctgcggagtgcagctggagagggagctgccccacgaggaggcctccagaataactcccggagtcg

SEQ ID NO: 899081 - DNA, 120 bp, Artificial Sequence
  ENSG00000271776_4 (sequence is synthesized)
gaacagcgctgggctgctgaagtttgcagcctccggatccgcgccccgccctgcagatccaccggatttcggggagggaatcggggggctgcccgtcctcccgtaaagctgacttgacaa

SEQ ID NO: 899082 - DNA, 120 bp, Artificial Sequence
  ENSG00000271776_5 (sequence is synthesized)
caattacgaaagtttttaattagctccttgttataattcattttatttccagaactctccgaccataaattattcaaagagtaagccaacccgagcggggcggccgcgcgccttccccac

SEQ ID NO: 899083 - DNA, 120 bp, Artificial Sequence
  ENSG00000271776_6 (sequence is synthesized)
gcgcgccgggctggctctggccgctcagctcacccgatgccccgtgagccagccccgcgccagaagccgcggtggcaggaaggtttgatcaaacattaaataacgtaatgtttgcgacaa

SEQ ID NO: 899084 - DNA, 120 bp, Artificial Sequence
  ENSG00000271776_7 (sequence is synthesized)
ggcttatctcacaagtggaaaagaggacctcgcgagaattagaattcggctgctattttaaaaaatcaattaagcttgcggtcttttttgaaacagctcgaaaggactgcgtggctatca

SEQ ID NO: 899085 - DNA, 120 bp, Artificial Sequence
  ENSG00000271776_8 (sequence is synthesized)
tcgtggcgctaagactgagatggcaataacaccgatggcagaactgtaccagtattaattgtcatcacctttatcatcccgctggccaccaaggccgttcgaatggggtgggaaaggcta

SEQ ID NO: 899086 - DNA, 120 bp, Artificial Sequence
  ENSG00000271776_9 (sequence is synthesized)
gttttagccaggatcagaagccccagttccaacttcacggacgaaaaactgcgaaagcctatcaacttgaaagatgagtagggatacttcacgcaggtgccaggtgctatcaggagaggc

SEQ ID NO: 899087 - DNA, 120 bp, Artificial Sequence
  ENSG00000271776_10 (sequence is synthesized)
cggggcggcggggcagaggcagagggcagggatcgctgagtgagtcctgcgggcttggggcgccctgttctctcacgtgcgctgccacgtgtaggaggaactggaccgaagtagtctcag

SEQ ID NO: 899088 - DNA, 120 bp, Artificial Sequence
  ENSG00000271776_11 (sequence is synthesized)
tatcacaagaaaacaaaaatcgatacaatcacggcagtgggtgcctacagtttatttatgaaactgtaatcgaagttgagagcaatttcagaacacgcattaaacaaaaattattcagaa

SEQ ID NO: 899089 - DNA, 120 bp, Artificial Sequence
  ENSG00000271776_12 (sequence is synthesized)
gttagttgatgggtcttgaggacataatttttttagacctacagaaggaacacgacctggagctagaactggggaaaagaggaaatttaagacaaatggatggcataaatgtggcagatg

SEQ ID NO: 899090 - DNA, 120 bp, Artificial Sequence
  ENSG00000271776_13 (sequence is synthesized)
ctttaatgcttatttgtcttttgcttttcctattccacccccgccgccgcctggatttcctgagaagctgaaatgcaaacggagcccaattttcccactctctcaaacttattttgagat

SEQ ID NO: 899091 - DNA, 120 bp, Artificial Sequence
  ENSG00000271776_14 (sequence is synthesized)
agaatccgagacacacattttatcatattcaccccaaaactggtggaggaatccgcttagagtgaacttctcttcagaactagaaaactttgaaaggccaaactatcactcattgacacc

SEQ ID NO: 899092 - DNA, 120 bp, Artificial Sequence
  ENSG00000271776_15 (sequence is synthesized)
cacttcaatgatagtttggcctcttcaggaggtccctttttgtttttttttcatggattgacagttaaaggcgtcttagaatagtcttactactccttcaagccatatatagattcgctt

SEQ ID NO: 899093 - DNA, 120 bp, Artificial Sequence
  ENSG00000271776_16 (sequence is synthesized)
accagaaagcaaagcatttttttttgttttgcacagtttcctactacataaaataggaaattcattttcatgatgttttattaacataatactcttatttttatgtggtaaaggttttat

SEQ ID NO: 899094 - DNA, 120 bp, Artificial Sequence
  ENSG00000271776_17 (sequence is synthesized)
ttaaagcaaattcttaaattcttaatacctacattgatcattattatataatacacatgtgtttgcctgcaacatttctgcttgaggcagactttaaaaaaaaccctttgtaaatctttt

SEQ ID NO: 899095 - DNA, 120 bp, Artificial Sequence
  ENSG00000271776_18 (sequence is synthesized)
catttgttctgtcctgtttttccaacaatgaaatccagtcatacttttctataaaataacggtttttttacaaatgcattttatttaaaactgatgatgtttcaagtcaataacagcaaa

SEQ ID NO: 899096 - DNA, 120 bp, Artificial Sequence
  ENSG00000271776_19 (sequence is synthesized)
aacaaatcaactttttatggaagagttctatgtttaaaaatacctctagtgctttttttttttaacattaacaactgtttaaaatcgcagcttttaaaatgtactattctttttgaacat

SEQ ID NO: 899097 - DNA, 120 bp, Artificial Sequence
  ENSG00000271776_20 (sequence is synthesized)
caagtgttttccttcacagatttgccggtgaaattaaaaagatttggctaaaataagatgacttcagatgatataatctcaactcttaagaaactttgtacatttggcatctgatctagt

SEQ ID NO: 899098 - DNA, 120 bp, Artificial Sequence
  ENSG00000271776_21 (sequence is synthesized)
cccaagtcaccaagaaatagaggctctctagtcactgtggagcagtaggtggcacactaaatgttttaaaatgtattaccctccaaagaaaagccattcagttactaggtgtttttaggg

SEQ ID NO: 899099 - DNA, 120 bp, Artificial Sequence
  ENSG00000271776_22 (sequence is synthesized)
tagaatatcacatctaaacctccaaattcctctgtccctgaccctaaatttaaatgttttttgggtgcctggttatttattggttttcaccactctggatcaagtgctgtggtttaagag

SEQ ID NO: 899100 - DNA, 120 bp, Artificial Sequence
  ENSG00000271776_23 (sequence is synthesized)
tttctgcagttaaaaaataataacttttataaacacaggcaactaatatagaattcattttatttagagcaccacttttcatgagttatctgaaagtgaattctgattcagcaaaaaaat

SEQ ID NO: 899101 - DNA, 120 bp, Artificial Sequence
  ENSG00000271776_24 (sequence is synthesized)
acatcattctcaatctctcccctttttgtcccccttcaacaccctaccctccccccatttctttgtgttttctttttgtttggttgtttgttgaaaggttctaccaggacctggcccagt

SEQ ID NO: 899102 - DNA, 120 bp, Artificial Sequence
  ENSG00000271776_25 (sequence is synthesized)
ataaacacaaaaacgcacccaaatcataaaactgctcttctttcagttatgttttatttgtaagtgtactgggacacatccccctgttgtattttggcgcatagaattggttctgataga

SEQ ID NO: 899103 - DNA, 120 bp, Artificial Sequence
  ENSG00000271776_26 (sequence is synthesized)
agtaagggaggagaaaggtaaaagagaaaaaacataaccaaggagaaagctcagcagacatacatggacaggtagatcaatccgtgagacatttcaggatgaacactggcagtctgttac

SEQ ID NO: 899104 - DNA, 120 bp, Artificial Sequence
  ENSG00000271776_27 (sequence is synthesized)
cactgtgtgaatgtgtgcattaaataaaatatttacaataatcttttttcctttttctttgaatacaagaatatgacaaaaatgttttcagtggaaacaggcagtagactgtgaaatcgc

SEQ ID NO: 899105 - DNA, 120 bp, Artificial Sequence
  ENSG00000271776_28 (sequence is synthesized)
actagccacaaaacggtctaccagaaagctagcccagtttagtgctcagtttcaaatgcatagaatgtttgccctgcaaacaatgatatacaacataattaaataaataatgcctaacca

SEQ ID NO: 899106 - DNA, 120 bp, Artificial Sequence
  ENSG00000271774_0 (sequence is synthesized)
ttggcagtcttctcagagccagggtgtcaggaggagttcaatgagttcaatgtcagaagcaggatggtgcaacgaagaagggttcagtgtgaggggatccaggctggaaagtggaaacta

SEQ ID NO: 899107 - DNA, 120 bp, Artificial Sequence
  ENSG00000271774_1 (sequence is synthesized)
aggcattcgtcctgcagagctattcttcatccacgtctgttacaaactgtgaatggtgttcgggtgacttgctgtgcgttttgcttaggtggagttttaccgcatgtttgctcacaaatg

SEQ ID NO: 899108 - DNA, 120 bp, Artificial Sequence
  ENSG00000271774_2 (sequence is synthesized)
tccgacagcacaacttacacttgaatttagagtctgtgtcctcttcggcagctattgtttctggagacctctgagccgacgatacccgggagatctcttgctccaccttgctttgctggt

SEQ ID NO: 899109 - DNA, 120 bp, Artificial Sequence
  ENSG00000271774_3 (sequence is synthesized)
tgacaagcgggtcatgtccttcatttggaaacccaggtgagattctaagtgactgatgtaggtagaaggggttctgaactgggaggcacagtcactgcaataaaagatggggtggccttt

SEQ ID NO: 899110 - DNA, 120 bp, Artificial Sequence
  ENSG00000271774_4 (sequence is synthesized)
gtccatgtttttcagaaattttgtcccgcccgttttcctaagctggtacttgacgttggccagccagtgactgatagtggtcattgagagtcccgtaaacttagagatttgcatacgctc

SEQ ID NO: 899111 - DNA, 120 bp, Artificial Sequence
  ENSG00000271774_5 (sequence is synthesized)
ttgtgggcccagatcagacagcaggtatttgccctctgatgtctggaagaggctcgaggcaaactgggcttgtagaatcagaagatgctgaggattccagttggactgccggccttttct

SEQ ID NO: 899112 - DNA, 79 bp, Artificial Sequence
  ENSG00000271771_0 (sequence is synthesized)
ccaccatgcccggctaatttttgttttctcagctcctgacctcaagtgatccacccgccgcggcctcccaaagtgctgg

SEQ ID NO: 899113 - DNA, 120 bp, Artificial Sequence
  ENSG00000271771_1 (sequence is synthesized)
agcctgctctttttcaggtggccaaggcaattttcaaacgtgatgtgatttctcttattttttacaaacatacaaaccttgcctatatggaattagtgtctatatttcagaaaaattaag

SEQ ID NO: 899114 - DNA, 120 bp, Artificial Sequence
  ENSG00000271771_2 (sequence is synthesized)
tttcttgtaaagtgattttacttaccaggtggtcatttatgcataaatttacatcttttcatataataattatgtagtttcctagagccaatttaatttctcttaaaataatttattttg

SEQ ID NO: 899115 - DNA, 120 bp, Artificial Sequence
  ENSG00000271771_3 (sequence is synthesized)
agatgaccattatctgatttcatatgtggaaattcatagaatgcagaaattccaaacctgaatttcctaaatatttttcataagaccttctatataaatgattctgacccatttagggaa

SEQ ID NO: 899116 - DNA, 120 bp, Artificial Sequence
  ENSG00000276278_0 (sequence is synthesized)
tctcaaaaataataataataataatgttcttagtatacaaaagctacccgacaggattctagctcggcatatatcaaataaaaaataaaagaagagggaaacaagtgcatagaataattc

SEQ ID NO: 899117 - DNA, 120 bp, Artificial Sequence
  ENSG00000276278_1 (sequence is synthesized)
aataattcagaaattatggggctatgtacctgttgggccaaaggcacaaacccaccctgctgtgtgcaggactgttttactcttgatgagacagaagttaccatccaccatgggttggca

SEQ ID NO: 899118 - DNA, 120 bp, Artificial Sequence
  ENSG00000276278_2 (sequence is synthesized)
gctagggctctcggacttcactacactctccaggacaaaaccccacgagaacaaatgtgttcccctggtagctgatctaccacaggacagtaggcagagacaaaagcaagcactgaaatg

SEQ ID NO: 899119 - DNA, 120 bp, Artificial Sequence
  ENSG00000276278_3 (sequence is synthesized)
tcctcggtttacccctttcctgaaggccctgtccaactcttaccaatggaaaggacactgggacactggctccaggctgtacttcctcaagtttctgtgctcctgacactttctggaaat

SEQ ID NO: 899120 - DNA, 120 bp, Artificial Sequence
  ENSG00000276278_4 (sequence is synthesized)
gggtgactcagaactggagaagcccctccatcttgacctgaaatcaaagcccaagacaccaaagccagaagagcagattctaactgacagcttggggtgccctggaacactaacagcttg

SEQ ID NO: 899121 - DNA, 120 bp, Artificial Sequence
  ENSG00000276278_5 (sequence is synthesized)
gggtgaaggcaccttagcccaacaacgtggcagcaaaacaacaaaacaaccagaaccacaccaatgatttccagtatttctctgaggactcggcccacgttgtgggccatgctgtcttcc

SEQ ID NO: 899122 - DNA, 120 bp, Artificial Sequence
  ENSG00000276278_6 (sequence is synthesized)
attccacatggagaaacatttccccccattttaccaaagaggaaactgaggcacagaggaatcatgagagggggccaatcaagtcacccaatgtaagggaaaaagacccaactttccaga

SEQ ID NO: 899123 - DNA, 120 bp, Artificial Sequence
  ENSG00000276278_7 (sequence is synthesized)
ccttccacgcctatgccctgttcttgaatgtatacgggacttgactcagaccactaaaatgacagtgtcctggaaatgaggatgagcaaggggaagactctggcaaaaccccccagaatg

SEQ ID NO: 899124 - DNA, 120 bp, Artificial Sequence
  ENSG00000276278_8 (sequence is synthesized)
tttaggaagcacagctctttgaaagggaatcactgttggggcagtgtggcaactcccactccaggccagtccctcactttcactctttgccacttcaataaagtttctctttcatgtgag

SEQ ID NO: 899125 - DNA, 120 bp, Artificial Sequence
  ENSG00000276272_0 (sequence is synthesized)
ggggtctgcaagtgcccctcagcaggaacagcttgggtcccgtggatgacattattgatggtggcagaaggcaggctcctgggtggaaaggtgcaggtccagtgaagtaccacctttaag

SEQ ID NO: 899126 - DNA, 120 bp, Artificial Sequence
  ENSG00000276272_1 (sequence is synthesized)
ccagggacagcctgaagcctgggtgccggactgtcacttctgggtggagtccatcgcccagaatgagaactcatgatgcttattctgggccatccatggcccaatcagcatgcacttcct

SEQ ID NO: 899127 - DNA, 120 bp, Artificial Sequence
  ENSG00000276272_2 (sequence is synthesized)
cccttctgaagcccatgaaaaccttggactcagccactcacagagacattgaatcgacctgcatgtggaaaggagctactcactgccagtctcctgagggctgctgtgtcgctcaatgaa

SEQ ID NO: 899128 - DNA, 120 bp, Artificial Sequence
  ENSG00000276272_3 (sequence is synthesized)
gctcctctctgccctgccctccagttgtctgtgtacctcattcttcctggatatggacaagaactcaggacccaaggaatggtggaactgaaagagctgtaacacaaacagggctgaaac

SEQ ID NO: 899129 - DNA, 120 bp, Artificial Sequence
  ENSG00000276272_4 (sequence is synthesized)
acgcctgccgcccccccccgcccggccctgtcactccactgcttgccactatgtgggcgactagaagaagagaagagctgtggctctttgagaagcccagacccaggggctcccagagcc

SEQ ID NO: 899130 - DNA, 120 bp, Artificial Sequence
  ENSG00000276272_5 (sequence is synthesized)
agctcccaggtgccaccgcattccctggtgcctgcagtggaagctgcttgcagtatgtctggtccagccacaacctcacatggagccggtgcctggagctccctgtctgctgcagccggc

SEQ ID NO: 899131 - DNA, 120 bp, Artificial Sequence
  ENSG00000276272_6 (sequence is synthesized)
atgcctggctgtgcacagtgtggccagaccccatgctcacacaccccttgctgctgcacatctggttcacccatggcaggcatggaatccaggccagtagcacaagcagagcacagcctg

SEQ ID NO: 899132 - DNA, 90 bp, Artificial Sequence
  ENSG00000276272_7 (sequence is synthesized)
catggaatccaggccagtagcacaagcagagcacagcctgccaggccaagtgggtggaacaaacacagtgagcccgagcaacacttgcag

SEQ ID NO: 899133 - DNA, 120 bp, Artificial Sequence
  ENSG00000276272_8 (sequence is synthesized)
aaactggcacagctttgtactatgctgctcagatagaactggtcagacaaggccaatgggtcagaggtagttctctctgctagaggtgagtctcgctgaagagccatagcttagaacctg

SEQ ID NO: 899134 - DNA, 120 bp, Artificial Sequence
  ENSG00000276272_9 (sequence is synthesized)
gggctgggagttttgtgctataagaaaattggataggaatagaagggatgaattctaattttttggcaagctgtatatgtggtgttcagaatccaaaataaacatcacctgatatccaca

SEQ ID NO: 899135 - DNA, 120 bp, Artificial Sequence
  ENSG00000233461_0 (sequence is synthesized)
gtagttcctccgccggagcgggacctccggtgccccgggccagggatgtgagaaagaagcgagccctcgagtttcctcggggcatgtgggaaggtttttttcaggatccaggcagaacct

SEQ ID NO: 899136 - DNA, 120 bp, Artificial Sequence
  ENSG00000233461_1 (sequence is synthesized)
tacagagctgggagttttttaactttccattcctggcagtgacgccaggagctttaagtgatggaaatatgcgagtcaatcagtggatggtgttagtactgttttctcttatgaagatca

SEQ ID NO: 899137 - DNA, 120 bp, Artificial Sequence
  ENSG00000233461_2 (sequence is synthesized)
agcctgcccttcgggtctacttccaccttttccccctgcccgtctcccaccgtctccctcctctccactggctctcagaagccggacagcctgtgttcaacttgcctccacggagtggtt

SEQ ID NO: 899138 - DNA, 120 bp, Artificial Sequence
  ENSG00000233461_3 (sequence is synthesized)
gtgtgaccttgatgaagcacgcaacttctctgcctcagtttccttatctgtaacatagggatagaatagtacccgccttgtagggttatttgaggatgaaaggagttaagtctcgtgaaa

SEQ ID NO: 899139 - DNA, 120 bp, Artificial Sequence
  ENSG00000233461_4 (sequence is synthesized)
atgatagacaggaacaaaggaacagtaaatggagtaacttggctagaatatggcagtaactacaaggcatgttctgctctggcacgaaggtaaccaccactcatacctctccagccctgt

SEQ ID NO: 899140 - DNA, 120 bp, Artificial Sequence
  ENSG00000233461_5 (sequence is synthesized)
gaatacgtcaattgactaagcagattccttgaggataaagtaggctcctggggaccttgcttgttgggctacttgctttgtggatgttaaacagataattctcatgagtttgagtgacgt

SEQ ID NO: 899141 - DNA, 120 bp, Artificial Sequence
  ENSG00000233461_6 (sequence is synthesized)
ctgatctaccagtattccccctactctgattagaaatgacttgaccatgccaaaaagaataaaagacagctctgatacaaatgtagccattttaatgtgactccctctagatccaaggaa

SEQ ID NO: 899142 - DNA, 120 bp, Artificial Sequence
  ENSG00000233461_7 (sequence is synthesized)
gccagtacttacgaacattttcagagtcaatacttactgtactgtaccatagtcgaggaaaagggtatttttcctaactctcctggagtagcacatcccaagatctcaactttccaaaac

SEQ ID NO: 899143 - DNA, 120 bp, Artificial Sequence
  ENSG00000233461_8 (sequence is synthesized)
ctggatcaactatatttcttttctttctccagccaccactcccctagcctgttcaactacagctatgttacctgaactgctttccactctttcccataaatgtaatgattagaacactaa

SEQ ID NO: 899144 - DNA, 120 bp, Artificial Sequence
  ENSG00000233461_9 (sequence is synthesized)
ggaccaccacccgccaccgccgcgcgagcgtactattgcggccgccctctgctgcgcctgaagagagaggcgactctacaagcctcacagcatgcactgttactaaaaagacgatgcgtc

SEQ ID NO: 899145 - DNA, 65 bp, Artificial Sequence
  ENSG00000233461_10 (sequence is synthesized)
aggaacagtaaatggagtaacttggctagaatatggcagtaactacaaggcatgttctgctctgg

SEQ ID NO: 899146 - DNA, 120 bp, Artificial Sequence
  ENSG00000233461_11 (sequence is synthesized)
gcaagaaggtagttatctacaagccaggaagagagtcctcaccaaaacacaaccatgctggtaccctgatcttcaacttccagtcttgagctgttgagaaaataaacttttattgtttaa

SEQ ID NO: 899147 - DNA, 120 bp, Artificial Sequence
  ENSG00000233461_12 (sequence is synthesized)
ccagcacttatttgcatatgcatttaccccaggcctccccaggtgttccaacttgtagctactcctttgtcaggaaatagatttcaacttctgtaacaacctgcatccctacctggtctc

SEQ ID NO: 899148 - DNA, 120 bp, Artificial Sequence
  ENSG00000233461_13 (sequence is synthesized)
cttgttttattgcttcagatgcaaacacatagttttggtacttggcaaaacagttttttgtttgttttttaaaggaagacaaccaccccaagtcagggagaggaaggtaaagatttttag

SEQ ID NO: 899149 - DNA, 89 bp, Artificial Sequence
  ENSG00000233461_14 (sequence is synthesized)
acacggtttcactgtcacccaggctgcagtccacggctcactcactacagcctcgacctcctcgggctcaagtgatcctcccacctcag

SEQ ID NO: 899150 - DNA, 90 bp, Artificial Sequence
  ENSG00000233461_15 (sequence is synthesized)
tgttgggactacaggcacatgctactatgcacggctaattttttttttctctccattttgtggagacggggtttcgccatgttgcccagg

SEQ ID NO: 899151 - DNA, 120 bp, Artificial Sequence
  ENSG00000233461_16 (sequence is synthesized)
ggcgactctacaagcctcacagcatgcactgttactaaaaagacgatgcgtcctcctggacctgagatctgtgtgatcgtgggaaagcgacgaaaaacacaacccacctgaggcaccaga

SEQ ID NO: 899152 - DNA, 120 bp, Artificial Sequence
  ENSG00000233461_17 (sequence is synthesized)
aactcactcctgagtgcatctgcatgatgaacccagcaatccccaccatggagcaaaggatccatccagtcaacccaaagaatcgtgaaaaataataaattgttgttttaaagttcttca

SEQ ID NO: 899153 - DNA, 120 bp, Artificial Sequence
  ENSG00000233461_18 (sequence is synthesized)
taatacactggtctcccactttcaagtttgattaactttcagctatttttcacatagcaggcagagtgattccattaaaacatatatcagataatgtcactgcactaagtaaactctaca

SEQ ID NO: 899154 - DNA, 120 bp, Artificial Sequence
  ENSG00000233461_19 (sequence is synthesized)
aggactctcatctccctcagagtaaaggtcacagttgttacaaggccctacgtaatgtggccctcaccaccactccattacctttttcttatctactatttgctaactttgctttgtcct

SEQ ID NO: 899155 - DNA, 120 bp, Artificial Sequence
  ENSG00000233461_20 (sequence is synthesized)
cttttctgttctgaaacaggctaggcatggtcctgcctcaaggcctttgcaccacctactctgtctgcttggattgttcttcccacagatttcttgctcccttcttccttcatgaagaaa

SEQ ID NO: 899156 - DNA, 120 bp, Artificial Sequence
  ENSG00000233461_21 (sequence is synthesized)
tgtcatgaaatgtccttccttcatgaaatgtcaccttctcatttgaggccttctgtagtaccccaaagaatggtccccaaagatgtccacatccttatgcccagaacctgtgaatgtgtt

SEQ ID NO: 899157 - DNA, 120 bp, Artificial Sequence
  ENSG00000233461_22 (sequence is synthesized)
atcttaatggcaaaagtgactttgcaaatgtgattatatttaaggatcttaaggaggagattatcctggattatccaggagggcccaatgtaatcacaagggcccttataagtgaaaggg

SEQ ID NO: 899158 - DNA, 120 bp, Artificial Sequence
  ENSG00000233461_23 (sequence is synthesized)
gagaaggagatgtcataatgaaaacagatccaagtgatgagattgctggctggggtggaggtggaggggggtacaatccaaggaatgcaagaagcctctaaaagctaggaaatgtcagga

SEQ ID NO: 899159 - DNA, 120 bp, Artificial Sequence
  ENSG00000233461_24 (sequence is synthesized)
cacaaattctcccctagaacctgaggaagaaacccaggtttatggacactgattttaacccaataagtcccttttctgactgctgacctccaaaactgtaagataataaatttgtgttat

SEQ ID NO: 899160 - DNA, 120 bp, Artificial Sequence
  ENSG00000233461_25 (sequence is synthesized)
tttaagccaactgagtttgagataatttagttatggcagcaataggaaactagcacaccttcctagccatcctatctaaaatggcaacccatgtccttcctggcacttcctatctccctt

SEQ ID NO: 899161 - DNA, 120 bp, Artificial Sequence
  ENSG00000233461_26 (sequence is synthesized)
ccatgttttttttaaatcatatatacaatatattttactgttttacctattgtcttttccaccagaaagtaaactccacgtaaataaggattgtctgttttattctttgcagtatctcca

SEQ ID NO: 899162 - DNA, 120 bp, Artificial Sequence
  ENSG00000233461_27 (sequence is synthesized)
taaggattgtctgttttattctttgcagtatctccactgcctaggatagcatctgcacatactgcacactcagtacacatttgtcgaatgaggtcaggcgcggtggttcacacctgtaat

SEQ ID NO: 899163 - DNA, 120 bp, Artificial Sequence
  ENSG00000233461_28 (sequence is synthesized)
gaaaaaaatacatatttgttgaatgaacaagtgaatgaacaaatgttatgcaaatatattatccctatctgtagcttgccttttaattttgttatagtaactttggttgaaaggaagttc

SEQ ID NO: 899164 - DNA, 120 bp, Artificial Sequence
  ENSG00000233461_29 (sequence is synthesized)
ggaagttctaaaatctttaatataatcaaatgtatcaatcttttcaacttgtatattttatgccttgtttaatcaactctgtcttatatcaaaattataaaagtattaccctgtattttc

SEQ ID NO: 899165 - DNA, 120 bp, Artificial Sequence
  ENSG00000233461_30 (sequence is synthesized)
acctgagatctgtgtgatcgtgggaaagcgacgaaaaacgaacaaaggaacagtaaatggagtaacttggctagaatatggcagtaactacaaggcatgttctgctctggcacgaagaat

SEQ ID NO: 899166 - DNA, 120 bp, Artificial Sequence
  ENSG00000233461_31 (sequence is synthesized)
gccaccacgtgaggagtctgattacccattcgcaagtgatgcctaaacagcccctgttccttccagacaacccacctgaggcaccagacacatgagtgaagccatcttggacatcccagt

SEQ ID NO: 899167 - DNA, 89 bp, Artificial Sequence
  ENSG00000233461_32 (sequence is synthesized)
agcctcccaaaatgctgagattacagacaacccacctgaggcaccagacacatgagtgaagccatcttggacatcccagtcacagccaa

SEQ ID NO: 899168 - DNA, 120 bp, Artificial Sequence
  ENSG00000233464_0 (sequence is synthesized)
caggcaaatacacctcaataaaatattggaatgaaattgaaaaaatagacaaatgcagattgaatttcttcccacaaccaaatgacgtgaatacaaaggggaaaacaacagcaaaggcat

SEQ ID NO: 899169 - DNA, 120 bp, Artificial Sequence
  ENSG00000233464_1 (sequence is synthesized)
acagtgacaaggaggtggtctcatttccccagaccttgagtctgggctggcattgagatctacattgatcaataatatgacagaagtgattttaagtgacatctgaggctgggccttaag

SEQ ID NO: 899170 - DNA, 120 bp, Artificial Sequence
  ENSG00000233464_2 (sequence is synthesized)
aggacttgagattccactttggctatattggaattcaactctgctctgagacctctacacaaggaaactggtctaagatcctcgtgaataagaagtcacttggaggatagattctaaacc

SEQ ID NO: 899171 - DNA, 120 bp, Artificial Sequence
  ENSG00000233464_3 (sequence is synthesized)
taagaaataaaagtacaaattggtgtgatgaaggtatattcctatttttggggattgggaggctttacttatttttaaaaactctattgaggtaaagagttaagctgtaacatacttcat

SEQ ID NO: 899172 - DNA, 120 bp, Artificial Sequence
  ENSG00000233464_4 (sequence is synthesized)
tgatttcctcacccttttcggctctgttttactatatcccctaatttgttggttgtgctaatatttgtagaaagaggtcttgtatttgctgcatcataatgacatttgtacttttttgac

SEQ ID NO: 899173 - DNA, 120 bp, Artificial Sequence
  ENSG00000233464_5 (sequence is synthesized)
tggtttaagtacaaatgaatgaaataaccatttttcctttagttgactttaccctgatttcacctagtgtttcaatgagtaaaaatacagctaaaagaaaagaaaagaaaagaaaaaaag

SEQ ID NO: 899174 - DNA, 120 bp, Artificial Sequence
  ENSG00000278384_0 (sequence is synthesized)
ctgggacctcccctctccttgcggcatgctgggctttcccttagaaaaccccatgtcatttccttcaatggaacatgaatcagcttcacccacagtgtctgcatgtctctgtccatagca

SEQ ID NO: 899175 - DNA, 120 bp, Artificial Sequence
  ENSG00000278384_1 (sequence is synthesized)
aacgtttttattaccttaaaatatagatctttaccttaactagccaagacctaggaccctttttccaagctcttttagatgaagtaataaatgcaaatattagagatgtgtatatgtgta

SEQ ID NO: 899176 - DNA, 120 bp, Artificial Sequence
  ENSG00000278384_2 (sequence is synthesized)
taaatatatggagaaaagatgttgcctagttgtacaaattagctttaatacaactcctgatttaaattatttaattgtgagaagggcgattctaactcaacacaccaacgaaataaaagc

SEQ ID NO: 899177 - DNA, 120 bp, Artificial Sequence
  ENSG00000278384_3 (sequence is synthesized)
cttatccctctgctccgccaaaatatcccatttagagcctgcgtgtgtgtgtacacacacgtgtgcactcatccccacctgaccgtatcaaattattatttaaactagatatttttactt

SEQ ID NO: 899178 - DNA, 120 bp, Artificial Sequence
  ENSG00000278384_4 (sequence is synthesized)
tgttgcatagtagtaatggtttctggaatgaaaaaataaaaaacaggagaataaaactgtttaaatgtatctccgggtgaacgctgtggccactgcacggaccccgtcgatggcgcccag

SEQ ID NO: 899179 - DNA, 120 bp, Artificial Sequence
  ENSG00000278384_5 (sequence is synthesized)
tacctgcgtctcaggaagaggttctggcggggcctccgcctgaggccgcgcccctgggacctgtcccgcgtccacgtgaatgcggagcgcagcattcaccatcccctccctgaaacagcg

SEQ ID NO: 899180 - DNA, 120 bp, Artificial Sequence
  ENSG00000278384_6 (sequence is synthesized)
gtccccgaggtgctccacaggcagggccgagctgggcaagggggagcccagcccctgcacgggccgccctgagcagcggggacgcaggaagagctcgctggctccaccagcccctacccc

SEQ ID NO: 899181 - DNA, 120 bp, Artificial Sequence
  ENSG00000278384_7 (sequence is synthesized)
agatgcgggacctcagaccagcaaggacctggagcccccaccccacggttgccaggaggcggacaggggcggctcctggggggctaccacctcgaggccgttccgccagaacttgagcga

SEQ ID NO: 899182 - DNA, 120 bp, Artificial Sequence
  ENSG00000278384_8 (sequence is synthesized)
cttgggaaggcacagtgtcctgcccttgaagaggaacctgtgtcctggaggcagcagcctgggagctcctcctctgaggacaccgcagaggcgagtgactctggcggcgcagcgctggct

SEQ ID NO: 899183 - DNA, 120 bp, Artificial Sequence
  ENSG00000278384_9 (sequence is synthesized)
ttcccgtccgcagaggagagctgtggggctgggtgagctggaccagggagcacagctggctgctctcggcctccgatggggagtggacagcttagggggttgcccccgtgccagccagcc

SEQ ID NO: 899184 - DNA, 120 bp, Artificial Sequence
  ENSG00000278384_10 (sequence is synthesized)
tgctggccactctgggcttcatcacaccctcacctgcctgcgcaggcacctagcactgcaggctggagcttctggccatgctggtcaacttccccaacgagcctctgctgcctgggaaca

SEQ ID NO: 899185 - DNA, 120 bp, Artificial Sequence
  ENSG00000278384_11 (sequence is synthesized)
gcaaggccagagctacaccgccctgcacttggcagccatgtaccttggagatggtgaagctgctagtgggaacataggacgccgatgttgacatcagggactacactgggaaaagggcct

SEQ ID NO: 899186 - DNA, 120 bp, Artificial Sequence
  ENSG00000278384_12 (sequence is synthesized)
aagagattgagaccctgatgggagtcctggacaaggacgatggggagagcaccgccagcagcgggggtgagtactggaagatttaaaagctgccccctccatctcaccacctacaaactc

SEQ ID NO: 899187 - DNA, 120 bp, Artificial Sequence
  ENSG00000278384_13 (sequence is synthesized)
tcacacgtcctggaagatggggggaccctctccaccatcaccacttggctgaaggtggtccagacgtgaagccaaggattccaaggcgcacagcctcgggcaggactaatggacttaaaa

SEQ ID NO: 899188 - DNA, 120 bp, Artificial Sequence
  ENSG00000278384_14 (sequence is synthesized)
aacacaggctcaacaaaatccacttcacaacccagatggttcatatcacaccctctttcaaggacccagagcagccactggaagagaaggagtaggaacgctctcttaaagtccacttat

SEQ ID NO: 899189 - DNA, 120 bp, Artificial Sequence
  ENSG00000278384_15 (sequence is synthesized)
cctattccttcaaattaagaccaaagtccaatgtatttaggtaaaaaataatttcttttagaaaatgctaaggtttgtcttctgaaatttaataacagaaacaaaaaaagaacactagat

SEQ ID NO: 899190 - DNA, 120 bp, Artificial Sequence
  ENSG00000278384_16 (sequence is synthesized)
gtaatgaagtgagaccagaaaagacaaactaaactatccttactaggttggaatggatggggtggagttcctatcaggctagcattctggggaaagctgtattttttttttttggcggtg

SEQ ID NO: 899191 - DNA, 88 bp, Artificial Sequence
  ENSG00000278384_17 (sequence is synthesized)
gtggcgccatctccgctcactgcaagctcagcccctcgggtttatgccattctccagccccagcctccccacggctaatttttttgta

SEQ ID NO: 899192 - DNA, 120 bp, Artificial Sequence
  ENSG00000278384_18 (sequence is synthesized)
ctacaggcgtccgccaccacacacggctaatttttttgtatttttagttgagacggtgtttcaccgtgttctccaggatggtctcgattcctgaattcgtgatccgcccgcctctgcctc

SEQ ID NO: 899193 - DNA, 120 bp, Artificial Sequence
  ENSG00000278384_19 (sequence is synthesized)
acaggcgtgagccactgcgcctggccggatttctttttaagagattcatcataccttgacctgtgccccatttccctcctccacctgtctgacctggcattcctatttcgggagaccaga

SEQ ID NO: 899194 - DNA, 120 bp, Artificial Sequence
  ENSG00000278384_20 (sequence is synthesized)
atttcgggagaccagaagtggggggaagagaagggatgactgtttctttgctttcaccattcctgcatgccatgcaaaggaaggaatattgcgcttttaaatatccgttttattaagtaa

SEQ ID NO: 899195 - DNA, 120 bp, Artificial Sequence
  ENSG00000278384_21 (sequence is synthesized)
gtggttactctttcaaagacaaaaaaaatgcaaattgttacaaaactggcagtatttgtaagtgcaagcactacacgctgccttgttcttttaccaattgcatttgcattttaaggtact

SEQ ID NO: 899196 - DNA, 120 bp, Artificial Sequence
  ENSG00000278384_22 (sequence is synthesized)
acttgtacagccatggtggagaacagtttggaggttcctctaaacactgaaaatagaggtgccacatgatccagcaatcccactgttggatatataccccagaaataagaaatgagtata

SEQ ID NO: 899197 - DNA, 83 bp, Artificial Sequence
  ENSG00000278384_23 (sequence is synthesized)
cactgttggatatataccccagaaataagaaatgagtatatcgaagaaattatctgcactcccatgttggttgcaccactgtt

SEQ ID NO: 899198 - DNA, 79 bp, Artificial Sequence
  ENSG00000278384_24 (sequence is synthesized)
tcaacagattaatgtattaaagaaaatgtggtagatacacacagtggagtattattcagccggaactggatatcattat

SEQ ID NO: 899199 - DNA, 120 bp, Artificial Sequence
  ENSG00000278385_0 (sequence is synthesized)
ttgccaggagctccgttggcgctgcaaccatcttgacttggaatcaaccaccctataggccacgctgtagccttagatactctaactcgtgaaattttcatcgaccgtcgtccatagggc

SEQ ID NO: 899200 - DNA, 120 bp, Artificial Sequence
  ENSG00000278385_1 (sequence is synthesized)
aaggcacgcttctgccctctgtgggacagagttgtcgatgattataggtgcggatacccgcttcagcctgtgttaatcggggatgcagccccccacccttcctgccgtggttctacccag

SEQ ID NO: 899201 - DNA, 120 bp, Artificial Sequence
  ENSG00000278385_2 (sequence is synthesized)
cctgctgcggacgcctgagccaggtgcgtcacccccacctgggctgaccaggccaggacttcgtcgtccgcgggacgctggggggcgcctgccgactggcaccggcggctagctccgcac

SEQ ID NO: 899202 - DNA, 120 bp, Artificial Sequence
  ENSG00000278385_3 (sequence is synthesized)
gaatgggaaatcccgggctccgctcgccaacctgttactgctgcagaacgccaggaagctcagcctgatcccacagattagggtaaaatatcccggggggccgaagtggaaaccggagtt

SEQ ID NO: 899203 - DNA, 120 bp, Artificial Sequence
  ENSG00000278385_4 (sequence is synthesized)
gcgtcattgctcccacccgatatcaccttggcagcgaccgcggctgaccacgttcccggcctgtcgcgaatctcacccaagggagctgagtctcagcttccctggtccctggtcccgagt

SEQ ID NO: 899204 - DNA, 120 bp, Artificial Sequence
  ENSG00000278385_5 (sequence is synthesized)
tccgccttccccccccgccccgtggcatcggcgtgaggggaaaagataaagactacctcctgagacctggaattgtggatggctgcggaaaactcaccacaggaaattttggcttaaagt

SEQ ID NO: 899205 - DNA, 120 bp, Artificial Sequence
  ENSG00000278385_6 (sequence is synthesized)
tattctctgcttcccttgactgtgtgataggcaccgctctatctgctagaggacaggtgaaaaagatggggttccctcttcttagaactcactgtgcagtgggagaatgtataaataaat

SEQ ID NO: 899206 - DNA, 120 bp, Artificial Sequence
  ENSG00000278385_7 (sequence is synthesized)
cctttagccagggaagatattgctattcgcctcttacagaggaggaaaccatggctcagagggacaaggtgaaagggtgggaaattgaggcatagaaagtttaagtgatatgcccaacat

SEQ ID NO: 899207 - DNA, 120 bp, Artificial Sequence
  ENSG00000278385_8 (sequence is synthesized)
gactcagctaatcaatgaaggactagtgctagagcccagcaaatctgctggtgcaatggtctctgaaccatttctgagacagctatgctggactacatcataaccagcccctcacaactc

SEQ ID NO: 899208 - DNA, 120 bp, Artificial Sequence
  ENSG00000278385_9 (sequence is synthesized)
aataatagggttaaaagaaatagactgagattaaatagaaggaagaaccttccaacagtgaagtttgttaagcactgcaacagttcattatggaggtatcatggcaactttctgggaaga

SEQ ID NO: 899209 - DNA, 120 bp, Artificial Sequence
  ENSG00000278385_10 (sequence is synthesized)
cttaaacaaaagacagaagagaggcatagcgtttgattgaacttgggaatggaccatttattctgagaaacagatgaagtgcccctttagaggtcctgccagtctgatggatggattctc

SEQ ID NO: 899210 - DNA, 120 bp, Artificial Sequence
  ENSG00000278385_11 (sequence is synthesized)
tacctgtaatgaaagtaataggaaggatccccttgcccaaagcatcgtgggaaagctagcggtgattcttgtgggaagaaaagcataagaggaaatttccaaccaccaataccttgggac

SEQ ID NO: 899211 - DNA, 120 bp, Artificial Sequence
  ENSG00000278385_12 (sequence is synthesized)
attctctgcaagtcccatgagcctctgaaagaggttgaacactcagaagtcacttttgtggtgcttgactggcctgacatcttgcaaataaaccttatcaaaagatggtggaagatgcgt

SEQ ID NO: 899212 - DNA, 120 bp, Artificial Sequence
  ENSG00000278385_13 (sequence is synthesized)
actaagtattccgtagtaactgagagttagtcttttttcacagcctttgttggaggagaggtacttgtaattcacatgtgtaaactgctttataatttaaaaattctttggaatatctta

SEQ ID NO: 899213 - DNA, 120 bp, Artificial Sequence
  ENSG00000232335_0 (sequence is synthesized)
tgcagttcctcatcagaaggaagtacttcatcaattacgtcctcttcatattcatcaatttcttccccatcatactcatcttcgcttcccacatcacttcctgacacctctgcctcatcc

SEQ ID NO: 899214 - DNA, 120 bp, Artificial Sequence
  ENSG00000232335_1 (sequence is synthesized)
tccagatcgcttcaggagttcttcttcatcatcatcttcatggtcttccagtgccagatcattaccagagtcactgtgttcatcctacaaaatcagcatcatatccaaattaagcagaat

SEQ ID NO: 899215 - DNA, 120 bp, Artificial Sequence
  ENSG00000232335_2 (sequence is synthesized)
gaaattgtttctgataagatgccaaacttagaattctcaagaactgaggggaaaaaaacacttgagggcagcaatacatggagctcagttatgattactttgttcccttcatactcacct

SEQ ID NO: 899216 - DNA, 120 bp, Artificial Sequence
  ENSG00000232335_3 (sequence is synthesized)
catcactatcaaactcattatcatttgaaacaagccgaaagtctccaaattcctcctcctcgtcttcctcttccctaaaatgtaaatcaatgaatcaataaataagttgttgaaagcaaa

SEQ ID NO: 899217 - DNA, 120 bp, Artificial Sequence
  ENSG00000235100_0 (sequence is synthesized)
ctgccactgcacttagtcctgcgactcccctaaggacgggccgaggaatggcgggctagccacttcccagtcctgtccctacggggcagaaaaaggctcggcatcccgggatccggaggg

SEQ ID NO: 899218 - DNA, 120 bp, Artificial Sequence
  ENSG00000235100_1 (sequence is synthesized)
tcacttccctcgctgcatccccattgtgcaactgccagtctaaaaattgatataggttaatctcctggagaaactagaggcagccagggaggatgctgttgaaccagttaggaggctgtt

SEQ ID NO: 899219 - DNA, 120 bp, Artificial Sequence
  ENSG00000235100_2 (sequence is synthesized)
gcaagagatcccaggaaaagataatgataatgtggacttggaagatggcagaggagttgcagaaaagtatccagattttaaagatgtccagctccaacctggtttcataggcagtggtaa

SEQ ID NO: 899220 - DNA, 120 bp, Artificial Sequence
  ENSG00000235100_3 (sequence is synthesized)
tactggaacaacctcttctccaagattctcaggcaatcaaaggccctgagaagagaagatcagaataaagattggtttcctcattgatgtgaattttgtcacaaccaccatctttggaat

SEQ ID NO: 899221 - DNA, 120 bp, Artificial Sequence
  ENSG00000235100_4 (sequence is synthesized)
tcagatgttactatggtcagtttgggtttaaataacacttctgttttctctatgttacactcctaaggttgttaggatcctatgagcctatttaattgttttctttaaatgatggcatat

SEQ ID NO: 899222 - DNA, 120 bp, Artificial Sequence
  ENSG00000235100_5 (sequence is synthesized)
ctaaaaattatctttatactttgagaatattgttggattatcttaaaagcctccattcctttgttaagtaatccatttttgttttactttgttttcttttcagaagtattaagatatttc

SEQ ID NO: 899223 - DNA, 120 bp, Artificial Sequence
  ENSG00000235100_6 (sequence is synthesized)
tctttagttttctgaaactttaccattaactgtcaaggtatgatctggagtctttcagtttgtgtttgtatttattttaaatagctcatgggccctttcactggcagttttatttctttg

SEQ ID NO: 899224 - DNA, 120 bp, Artificial Sequence
  ENSG00000235100_7 (sequence is synthesized)
gccactgcactccagcctgggtgacaagtaagactctgtatcaaaaaaaaaaaagtattttattctgttattcttcgtatattccctctcttgtccattcccaccattctctccttctgg

SEQ ID NO: 899225 - DNA, 120 bp, Artificial Sequence
  ENSG00000235100_8 (sequence is synthesized)
ccttctggaactcctctgcaattttcatcaaatttgtggtgattcttggttgcgtccttaggtttacatttttagtacctgctgatctgcctgtctgtctgtctgtgagtgcttatctgt

SEQ ID NO: 899226 - DNA, 120 bp, Artificial Sequence
  ENSG00000235100_9 (sequence is synthesized)
gtattgtgttctgcttcctgtggttacagaggcgaggtaggacataccaccaagctaagggggtcatcagctcatcttctgggcatgggaacccccactttcttttggtggtatatgccc

SEQ ID NO: 899227 - DNA, 120 bp, Artificial Sequence
  ENSG00000235100_10 (sequence is synthesized)
actgagtactcccggcttgtaatacacaagtgttctcattcaccgggtattgcttttgctgcttgctgcatagcacaagtggaaggatgaagggaggaacagcctaattgttcctactat

SEQ ID NO: 899228 - DNA, 120 bp, Artificial Sequence
  ENSG00000235100_11 (sequence is synthesized)
tgtaacattacaaaaatcacactgaatattgattcgggactgcctcttggtccccatatctgctttgcccaagcttggaaaggaagaaacctgggcaaatatgtatttgtttatattatc

SEQ ID NO: 899229 - DNA, 120 bp, Artificial Sequence
  ENSG00000235100_12 (sequence is synthesized)
aacttgatccaatacttctgtagaagtgttcaaacatttttaacagatatactacttttcaaacaaaatgttatgtagaggatcaatatattaggtaagagcaaaactgatctgcttgaa

SEQ ID NO: 899230 - DNA, 120 bp, Artificial Sequence
  ENSG00000235100_13 (sequence is synthesized)
gcagaggaggcagccctgaacatgaaccgctggtctcccctctgttcactgcagctcctgagaccctccatggaatcctagaactctgcagggcagtttaaaaaccactgataggttctt

SEQ ID NO: 899231 - DNA, 120 bp, Artificial Sequence
  ENSG00000235100_14 (sequence is synthesized)
aagaagtggtagttatcattattattactatgaaaatgttgcccctcatccttccctagcccaaggccagctataagccccgataccagcttctgccgtttgtcctgccagtcccatctt

SEQ ID NO: 899232 - DNA, 61 bp, Artificial Sequence
  ENSG00000235100_15 (sequence is synthesized)
cgataccagcttctgccgtttgtcctgccagtcccatcttgcagagagaatgatagaaaag

SEQ ID NO: 899233 - DNA, 120 bp, Artificial Sequence
  ENSG00000235100_16 (sequence is synthesized)
cagcatgtggggaaacttctttattctgctatccaaatataaaatatatacagaagtagctcctttgtcccttaaccttagtaagcaaatttgattaagcatttgaacgctatagaggtg

SEQ ID NO: 899234 - DNA, 120 bp, Artificial Sequence
  ENSG00000235100_17 (sequence is synthesized)
caaggtgggagaaattctgcctctgctacttggcagctctatgatattgggcaagccattcataccacatttatattccttatatccaaaatggacataataataccttcttacttatct

SEQ ID NO: 899235 - DNA, 120 bp, Artificial Sequence
  ENSG00000235100_18 (sequence is synthesized)
cactgggttattagaatgatcatagtgtttaggtggttggttgtttcaaggaggtaataatgtatgtgaaaataattggtatatggaaaagcattaaataatagtgctgaaacattatac

SEQ ID NO: 899236 - DNA, 120 bp, Artificial Sequence
  ENSG00000235100_19 (sequence is synthesized)
agcttaatgagttttgacaaatgtatacagatatatgactactaccacaatcatgatatagaatatatcaatggctccccaaatttcctcatgcccctttgcatttttatactttaaaag

SEQ ID NO: 899237 - DNA, 120 bp, Artificial Sequence
  ENSG00000235100_20 (sequence is synthesized)
tcaatatatacccaagagtggttaaaacataccttcccaaaaacttgtgcgtaaatattcttagtagcattatgtatgatagccccaaagtggaaacaacccaaatagccatcaactgat

SEQ ID NO: 899238 - DNA, 120 bp, Artificial Sequence
  ENSG00000235100_21 (sequence is synthesized)
aaatggataaataaaatatatattcatgcagtggaatataattcagccacgaaaggaatgaagtaccaatgtctgctacaacatggatgaaccttgaaaacactatgttaagtaaaagaa

SEQ ID NO: 899239 - DNA, 120 bp, Artificial Sequence
  ENSG00000235100_22 (sequence is synthesized)
gccagtcacaaaagaccacacattgtatgactccatttttatgaaaggtctggaataggcaaatctatagagacagaaagtagtgtttgcctcacattgggggctagggaataatgatga

SEQ ID NO: 899240 - DNA, 120 bp, Artificial Sequence
  ENSG00000235100_23 (sequence is synthesized)
atgactgctaatggatgtggaatttcttttgggggtaatgaaaatgttctaaaattgattgtggtgatggttgcaaaactctgtgaatataataaaaccattgagttaataccatttaaa

SEQ ID NO: 899241 - DNA, 120 bp, Artificial Sequence
  ENSG00000278383_0 (sequence is synthesized)
caccttctcatacctgcactgaaccagctttgtcatcctgccagtaacctcacttatgagttaaataaaatcctaacatatgctcccattacattaaacattcacactttcagaagtcag

SEQ ID NO: 899242 - DNA, 120 bp, Artificial Sequence
  ENSG00000278383_1 (sequence is synthesized)
cccccaaattcatatgttgatgccttaacccccaatgtgatggtatttggaggtggagttgttgggagataaacaggtttagttgagatcgtggggtgagcccatgagaggacacagtaa

SEQ ID NO: 899243 - DNA, 120 bp, Artificial Sequence
  ENSG00000278383_2 (sequence is synthesized)
ggaggcggcagcctgtgagccaggatggggaccctcacaatgaagcaaaggtgccagcaccttcatcttggaattcccagattctagaactgtacgaaataaatgtctgttgtttaagcc

SEQ ID NO: 899244 - DNA, 120 bp, Artificial Sequence
  ENSG00000278389_0 (sequence is synthesized)
tggtgaccttataagaggaagaaagagagacggctctctctccatgtggttggaccaaagaaagaccatctgcaagcctggagaaaagccctcaccagaagcggaatgctaccagacctt

SEQ ID NO: 899245 - DNA, 120 bp, Artificial Sequence
  ENSG00000278389_1 (sequence is synthesized)
agctgactaatacagttgggtacccagccctggaaccaagaggtggagtcagccctgttcaaactgtgggaactgtgggaaggggtgtctctcccccaaggaaagtcatgttgctgcggc

SEQ ID NO: 899246 - DNA, 120 bp, Artificial Sequence
  ENSG00000278389_2 (sequence is synthesized)
tggaaaaagatggatgagatgttttgacatgcagagatgacagctggccacctcttttggataactctcttaacctatctttgcttctatctcccgatctataaaatggagtgctaccaa

SEQ ID NO: 899247 - DNA, 120 bp, Artificial Sequence
  ENSG00000287318_0 (sequence is synthesized)
acttttttttttttttttacttctttggggtcagtggtaacattccctttgttatatctgattgtttttatttggatcttcttttttctttattagtccacttaggggtctatctatcta

SEQ ID NO: 899248 - DNA, 120 bp, Artificial Sequence
  ENSG00000287318_1 (sequence is synthesized)
tgttattctttcaaaaaaaaaacctcctggattcattgatttttttttgtatggtttttcacatatcagttttttcagttcagctctgatttcatcttttccttgtcttctgctagtttt

SEQ ID NO: 899249 - DNA, 120 bp, Artificial Sequence
  ENSG00000287318_2 (sequence is synthesized)
agagctgatttgcccttgtttctttcattcttttaggtatgttaagttgttaatttgagatctttctaacttgttgattaagcatttagcttcgtaaacttccctcttaacactgcttta

SEQ ID NO: 899250 - DNA, 120 bp, Artificial Sequence
  ENSG00000287318_3 (sequence is synthesized)
gctatttttcagactctgggatgttgatccttcattttgaatgtatgtctcctggcattctacatgaaacattatagaccattgcttttacctagttgcctaactacttgtgctctctga

SEQ ID NO: 899251 - DNA, 120 bp, Artificial Sequence
  ENSG00000287318_4 (sequence is synthesized)
ggctttggataatgtatgttttcagaaactaaaactttagattaagaatcactctgtacattataaataccgatttaggagaggtttcccagtctactcacatcataacattatttgaaa

SEQ ID NO: 899252 - DNA, 120 bp, Artificial Sequence
  ENSG00000287318_5 (sequence is synthesized)
tggagtttgaactcaatgacaaaacataatggtgctattcatagacacacacacacactcatacacacacagtggaattcttcttttaactcatttttatctatgttttggaggttcata

SEQ ID NO: 899253 - DNA, 120 bp, Artificial Sequence
  ENSG00000287318_6 (sequence is synthesized)
gcattatttactattactcttttttacttgttagtgcacttgaatacaggttattatgatacctaatggtagcaatttattttatttctttgtatttctcttcttcctgtacttcagatt

SEQ ID NO: 899254 - DNA, 120 bp, Artificial Sequence
  ENSG00000287318_7 (sequence is synthesized)
tctcaaattcacttaaagcatggctttttaatatagacatttttcagtgttacataaggtcttgaggttaggccatctttttaatttttttgtaaaacaggatttttgagaatttcaaat

SEQ ID NO: 899255 - DNA, 120 bp, Artificial Sequence
  ENSG00000287318_8 (sequence is synthesized)
tttttcctcacattagaaaatgtaggaaccaaaaatgacaaatagcatggaagagagctaggaggaaaattaaaatatgtctggacagactgaacacaggctctcaagtcagaaaatctg

SEQ ID NO: 899256 - DNA, 120 bp, Artificial Sequence
  ENSG00000287318_9 (sequence is synthesized)
tgatacatacatgagaggttcagtccacatctaatcaatcactgttgctgagagggaaataactttttgaagagtttcatgctgaaggaggaaagctggttacttctggtgccattaaaa

SEQ ID NO: 899257 - DNA, 120 bp, Artificial Sequence
  ENSG00000287318_10 (sequence is synthesized)
gttcaatggtagagacaaatcactgtttgaggactatttactggacttgttaatctgtccaggattctgattgtcagaagcctaattatttcttgagtccttgatcatgatgttaatgat

SEQ ID NO: 899258 - DNA, 120 bp, Artificial Sequence
  ENSG00000287318_11 (sequence is synthesized)
cctgatatatttcctgaatatttaaccattttcccctcatcagttattctgagaagagtcctaagccctttccactgttttatatactcagtttcatctagtttgcagtatttttgacta

SEQ ID NO: 899259 - DNA, 120 bp, Artificial Sequence
  ENSG00000287318_12 (sequence is synthesized)
ttataacatatgcctataaacacatttaatttttaaatgactttacagcacttgaccattatttgaaagcccattgcttatacaaagtggctcctatgcttggcttataatttaatgatt

SEQ ID NO: 899260 - DNA, 120 bp, Artificial Sequence
  ENSG00000287318_13 (sequence is synthesized)
gagtaagcatcttttttgggttcaaaatctggtcttaaatgacattaaaaatttaatataattaactgttcacagagatttgcatttcttcaagcaaaaagagtgttgcaagagagactt

SEQ ID NO: 899261 - DNA, 120 bp, Artificial Sequence
  ENSG00000287318_14 (sequence is synthesized)
ggtggcttggtaggaaaagctgcatgtaagctaatggctcaaatgcagtattcctgacctcaactgaggatgctgcattctttgccctgtttcttctctcaagtgatgccagcccttaga

SEQ ID NO: 899262 - DNA, 120 bp, Artificial Sequence
  ENSG00000287318_15 (sequence is synthesized)
aaatggctgtggaaataaccccacttgattcctcatgatcctttgtgctgtctactgcaggctgtcacctcaatttctatttcttccataactgaggtaaagaagagttaagaatttttg

SEQ ID NO: 899263 - DNA, 120 bp, Artificial Sequence
  ENSG00000287318_16 (sequence is synthesized)
tgtgtagctattgacagtcacttcacagattaaaggatgtccttaatataaagtaaagctaaatatcagagacgacaaaaggtccatttattgaagttgaaggtatgctctagtaacaag

SEQ ID NO: 899264 - DNA, 120 bp, Artificial Sequence
  ENSG00000287318_17 (sequence is synthesized)
tggtagaaagtacagcaagctgaaactcaatagatgacttctgatagtgataccaccattggagttgggtaatcttcaataaactggagtgctttttttgtcctccagaatccttgccgt

SEQ ID NO: 899265 - DNA, 120 bp, Artificial Sequence
  ENSG00000287318_18 (sequence is synthesized)
atatggagatggacaagagataatttctgaggtagttgtattttatgccttttagacaataaaaaatacgcgtttgttgccaagaagttgtaaatcatatgaaagtttaatgatcaaaat

SEQ ID NO: 899266 - DNA, 120 bp, Artificial Sequence
  ENSG00000287318_19 (sequence is synthesized)
aaaccattttactttaattcactcaaagacaaatgaatttatatcttattcaggcttacagttggaagttataaatttaaaggtgataaatgcacataccctaaacttaaaatctttcag

SEQ ID NO: 899267 - DNA, 120 bp, Artificial Sequence
  ENSG00000287318_20 (sequence is synthesized)
tctttcagcttttataatatttaatgcatgctcttattataaaattattacatactagatcataactttttaaagttattttcccattaagagcatctttacaatacttacacaagatat

SEQ ID NO: 899268 - DNA, 120 bp, Artificial Sequence
  ENSG00000287318_21 (sequence is synthesized)
tcaaaaggtaaacacatattttgaaagttctgttttgattattgtattaattagggaatttagttgagaaaatgacagctgattatttacatggtgtgcagtgattacgtgggattaatt

SEQ ID NO: 899269 - DNA, 120 bp, Artificial Sequence
  ENSG00000287318_22 (sequence is synthesized)
gtccttgtgtgccccattgctagcctgaagattctgattttagcagagaagatgaagatggaagggtaggatttttgagggctttaaagtaattgagagatatgcaagttcacgatttta

SEQ ID NO: 899270 - DNA, 120 bp, Artificial Sequence
  ENSG00000287318_23 (sequence is synthesized)
tagaaaaaggctacaaactaaatttcatgtatagatttattagtatctccttgtatgacattgagcaaatcacttcaactttttgagtttcgttttcccatttgtaaactaaaggagtag

SEQ ID NO: 899271 - DNA, 120 bp, Artificial Sequence
  ENSG00000287318_24 (sequence is synthesized)
gatttgctgattacatattttctttagctctaaagtcctatgaatacgtgcatctttgagccagacatgaatttcccatcactaataactatgtggttaaattcccataggaaaactctg

SEQ ID NO: 899272 - DNA, 120 bp, Artificial Sequence
  ENSG00000287318_25 (sequence is synthesized)
ttcactctcttttactttcatcatttgttgttctgccaaaaaaaagagatctatattaagcctcaaagaatgcactcattttgatttttagaaaaatcccttaaattaaaataaaactac

SEQ ID NO: 899273 - DNA, 120 bp, Artificial Sequence
  ENSG00000287318_26 (sequence is synthesized)
attttccaattttactctttctgttcataaatttatggcaataaccatccaattttttttataccagtgtggccatttaaaattatgaaatgcagttgatcagtgctttacctacttagt

SEQ ID NO: 899274 - DNA, 120 bp, Artificial Sequence
  ENSG00000287318_27 (sequence is synthesized)
taaaggaagatttttaacaggttaactcacttagagattaagtgtcatgacaaagatttgtgaatgtatttctttggagagaactgtttctcttcagtgggtctctacccaccaaaactt

SEQ ID NO: 899275 - DNA, 120 bp, Artificial Sequence
  ENSG00000287318_28 (sequence is synthesized)
ccatactacacaactctagcaggtgctatatgtagcttagtctagctgtattacgctctttctatttttcttctatctatcttttccaaagggcaacttattgtggtaatcgtcattact

SEQ ID NO: 899276 - DNA, 120 bp, Artificial Sequence
  ENSG00000287318_29 (sequence is synthesized)
tgatgatgtgaggctgaattttgaaagataagatcattatatgcttaccttttttgataattatttaaacatatatgtcttaagtcttgaaaagcttatgtattattttcaatacacaca

SEQ ID NO: 899277 - DNA, 120 bp, Artificial Sequence
  ENSG00000287318_30 (sequence is synthesized)
aacatataccaatctattagtgatgtatattttttctcaagattaaattcactagaggatgggaaactataaaaatatttaatagcagtggcatttaataaaatatggctttttaaattg

SEQ ID NO: 899278 - DNA, 120 bp, Artificial Sequence
  ENSG00000268006_0 (sequence is synthesized)
gtgtgggctcggcggtcctgcgggcctctccggcgcgggggagtcctgggaagacgcgcgagccacaacttcagggggcgtggcgggaacgggagcccctaccgaatggggtggcagaag

SEQ ID NO: 899279 - DNA, 120 bp, Artificial Sequence
  ENSG00000268006_1 (sequence is synthesized)
aacgaaggcgacaccaagctggccccttgcgggggtcgggacggcgggagacctcatccggagccctgggcccgcagagccaggagaccgcgccaaaatacatcagggaagaggggagga

SEQ ID NO: 899280 - DNA, 120 bp, Artificial Sequence
  ENSG00000268006_2 (sequence is synthesized)
cggaataatgggcctggggacaaaggaacccactgaaagggaacccactgagggtacggattgcacccgagcctgagacagctgaaggtttgcagtcggtgacgtggcgaggtgggcaag

SEQ ID NO: 899281 - DNA, 120 bp, Artificial Sequence
  ENSG00000268006_3 (sequence is synthesized)
ggactccaactcccagcgggccccgcgcggcctgggcggggccagctgtccctggaggctccgcccattagccccggcgcccaggctccgcccgccgtccctggcgactccaagcttctc

SEQ ID NO: 899282 - DNA, 120 bp, Artificial Sequence
  ENSG00000268006_4 (sequence is synthesized)
gccactcacgtcgctccccggccttccgtggattcgctcattcgctctgctaaaatggaatgactacttactagtagttgtataagatttttccctcgatttttgttccttaaacgtggg

SEQ ID NO: 899283 - DNA, 120 bp, Artificial Sequence
  ENSG00000268006_5 (sequence is synthesized)
taatacctaaccctagagtggttatggggatcgagcccgaggggctgtgcttgactgcttggcgcagtcactactcaaatgttagcttttctttaaaaacaacaacaaaaatctgttatg

SEQ ID NO: 899284 - DNA, 120 bp, Artificial Sequence
  ENSG00000268006_6 (sequence is synthesized)
agtaccctgtccagttctgtgctcggcgacgaccgaatcagaccacgtccctcacaggccccacggtccactggggagagacataatcacaggctgtgctaagtgttaactagcgcacat

SEQ ID NO: 899285 - DNA, 120 bp, Artificial Sequence
  ENSG00000268006_7 (sequence is synthesized)
ccacagggcgatgggatatgaccatagcgaggtaaagttagcaagcaagggaagtcaagaaaacgacctgtgagcaacctgccattccagatggctggaaaagtgtgcaaagaggacaga

SEQ ID NO: 899286 - DNA, 120 bp, Artificial Sequence
  ENSG00000268006_8 (sequence is synthesized)
acagcaaagacaaatcctgaaagtagaaggaataaaagggagccagtgtgggcggagtcgagtgaaggtagagaggagaaatagacacagctgtaggaggttagagacggagtccctact

SEQ ID NO: 899287 - DNA, 120 bp, Artificial Sequence
  ENSG00000268006_9 (sequence is synthesized)
tctgtttcggatgttgactaaacaatgtagatagatattgatgtcatagcctggagagagaaattcgggagtcatcagtgtttgaatggagactggatgagctcacaaagagactgggac

SEQ ID NO: 899288 - DNA, 120 bp, Artificial Sequence
  ENSG00000268006_10 (sequence is synthesized)
actcatccctttagcagtcacgacaatgagaagcaaccagcaaaggacacggaggagtggccagtgaaatggcagaagaacccgtaggcctgtccatgttttcctgcccaggggctcccg

SEQ ID NO: 899289 - DNA, 120 bp, Artificial Sequence
  ENSG00000268006_11 (sequence is synthesized)
agggctgactggagcccagccttaaaccccaaatccaacctgcattgtggccaaacggagtcagtgctccctgaacacaaactgcaagttagttatcaacaggtacctccaatgccctgt

SEQ ID NO: 899290 - DNA, 120 bp, Artificial Sequence
  ENSG00000268006_12 (sequence is synthesized)
caatcacccatgtgaggacaacctggcagcaggaaggagaaaaaacaggagctgctttaatctcccggaatcctcacttctccccattcttgttggtccaaaccatcaagatctcttgcc

SEQ ID NO: 899291 - DNA, 120 bp, Artificial Sequence
  ENSG00000268006_13 (sequence is synthesized)
tggcttcccagtgcctttagaattaaatccaaacttggtactgtggcccctgctgccgccccccaaaaaatctctctcccatccttcctgttctctacctgttaatgccttcccatccct

SEQ ID NO: 899292 - DNA, 120 bp, Artificial Sequence
  ENSG00000268006_14 (sequence is synthesized)
cagaacccatcaggacacacgtgagtttgaatgccctgaattgtataagcatggagagcggtataccagggtgtactccagagtgagcaaaatgggaactcatgtcagaaagtgaaatga

SEQ ID NO: 899293 - DNA, 120 bp, Artificial Sequence
  ENSG00000268006_15 (sequence is synthesized)
aaatgtaggctgaaattctatcagtaatactgcaacaaaactctctgaaaccatctcacttaactcggtccaccaacttgaaagacactttccttttcatctgtgaagcccactgctggg

SEQ ID NO: 899294 - DNA, 120 bp, Artificial Sequence
  ENSG00000268006_16 (sequence is synthesized)
gctagcaggctactattatgactaagcaattccacttccatctctcaagctgtttacttcctgaaagagaagctggatgccacattgcaactgcaaggtgccctgtgaagaggcctgcaa

SEQ ID NO: 899295 - DNA, 120 bp, Artificial Sequence
  ENSG00000268006_17 (sequence is synthesized)
cggcgagaaaacaagggagacctccagccaacagctaggaactgaggctctcggccccatcacctgtgaggaactgaatcctgccaacaggcatgtgagtgggctggaagtgggccctcc

SEQ ID NO: 899296 - DNA, 120 bp, Artificial Sequence
  ENSG00000268006_18 (sequence is synthesized)
tcacggagccttccgatgactgcacagccccagccaccagctcgaccgcaaccccgagagcctgggagccagcagctcagccaagcctggattcttgacccccagcaacggttcgtaacg

SEQ ID NO: 899297 - DNA, 120 bp, Artificial Sequence
  ENSG00000268006_19 (sequence is synthesized)
gaaaacagctgttcacaagcgtgggtactcccaaacacagatattcaggacaactactggagatagttgtagaatctcaccatcttcacacagacttgtatttaggaaccagcgccgtat

SEQ ID NO: 899298 - DNA, 120 bp, Artificial Sequence
  ENSG00000268006_20 (sequence is synthesized)
tgcactgtagttcaattactatttatggtctgcattcacacaagaaacatctgccaacaaaggcaaactggacaatgtctgttccttctcatgagtctggattccgagagcctttggggg

SEQ ID NO: 899299 - DNA, 120 bp, Artificial Sequence
  ENSG00000268006_21 (sequence is synthesized)
aatttggtcttcaaccccaggacgtaggtgaatacagtccgggccacctctttcatttctgaaagccgactgcagcacaggaaagagtaaaggttttttttccttgccggtggattcccc

SEQ ID NO: 899300 - DNA, 120 bp, Artificial Sequence
  ENSG00000268006_22 (sequence is synthesized)
aggaccaagcatacaccatcatacattcaagtagctgtttgtggacatccttgcggagaaatattcagtgttcagaacggtcataaccttgaccagaagtctttgactaaccttctcagg

SEQ ID NO: 899301 - DNA, 120 bp, Artificial Sequence
  ENSG00000268006_23 (sequence is synthesized)
ggaacccactgtggcttttgcctgatttaaaatgaaccaagttggttaacttgaacagttcagatttcttccacaaccaagtcacagagcttctgtgaaatctctcaggtcaagtcacca

SEQ ID NO: 899302 - DNA, 120 bp, Artificial Sequence
  ENSG00000268006_24 (sequence is synthesized)
tcaactcactcgtgactgaagtccaggagcggaagtgtcgagagcatcgcggtgtgttctgttcagttgctcagaacaagtcaactcctgatgatggatgcaacgacccaacttccgtgt

SEQ ID NO: 899303 - DNA, 120 bp, Artificial Sequence
  ENSG00000268006_25 (sequence is synthesized)
ccttgccaaatgctgtcgccttggatcaaggtgtcctgccaagtccccctgtcatgacgctgtctgtagttgtgcttcggaactctggccagtctatgtgaaacttttctctcaatatac

SEQ ID NO: 899304 - DNA, 120 bp, Artificial Sequence
  ENSG00000268006_26 (sequence is synthesized)
gagcgcggcgcgaaccaccgggtgctccacgggggaacccggccccgggcgggaccacccttcgggccacaggggacaccccggagcggcgggggctgcggacaaaggcgtctgcctgat

SEQ ID NO: 899305 - DNA, 120 bp, Artificial Sequence
  ENSG00000268006_27 (sequence is synthesized)
gcgggggctgcggacaaaggcgtctgcctgatacatgctttgcaaactctagtttcactcttgcagcccagactggtgtgcaatggtgtgttcttggctcactgcaacctccacctcctg

SEQ ID NO: 899306 - DNA, 120 bp, Artificial Sequence
  ENSG00000268006_28 (sequence is synthesized)
acaggcatgagccaccgcacccagcccttctcatatttctagagaagctggatgccacattgcaactgcaaggtgccctgtgaagaggcctgcaacggcgagaaaacaagggagacctcc

SEQ ID NO: 899307 - DNA, 120 bp, Artificial Sequence
  ENSG00000268006_29 (sequence is synthesized)
tggtaatagtttatgagcagcgaaagaaaaggccacaatcaatttgactctttcaagcaactggacttgtaaatcccccgagttatctccaactcactgtgcaacgcaaatgcccgttag

SEQ ID NO: 899308 - DNA, 120 bp, Artificial Sequence
  ENSG00000268006_30 (sequence is synthesized)
acttaaataacggtctcaacagtcatgtgtttctgtgcaggacacgtcactctgctcctttataaacttgccatctgctgtagctctgaatgcccaggtcattcttctcacgtgattccg

SEQ ID NO: 899309 - DNA, 120 bp, Artificial Sequence
  ENSG00000268006_31 (sequence is synthesized)
gaacggcgtaccactgccgcgccacttctgttaattcgcttttcaaaacaaaccctattgacatttgagtccctttttcagttcgttgaggatggcatctcgagtctgttctgtgtactg

SEQ ID NO: 899310 - DNA, 120 bp, Artificial Sequence
  ENSG00000268006_32 (sequence is synthesized)
gtcgtagctcttactatgctttgattcatagtggcgtttcaggttgtattctttcaacacagacacgatttgtttgcatattaaacacataggcatgctcttcacttccacaaagaaata

SEQ ID NO: 899311 - DNA, 120 bp, Artificial Sequence
  ENSG00000287026_0 (sequence is synthesized)
gaaaaatgttaacatacttaataaaaaagaacacttcagagtcaattagaaatgtacctaattgtctctataacataaaaagttacttagaatttctgatactttatcagttttaggaga

SEQ ID NO: 899312 - DNA, 120 bp, Artificial Sequence
  ENSG00000287026_1 (sequence is synthesized)
gagtaataaaatgactttcctttttctgtgtgtgttagataagttaaagcatgcaaaacttgtttcagtattgcctggcatatgccaactatttgataatagttattataaaaaattgtt

SEQ ID NO: 899313 - DNA, 120 bp, Artificial Sequence
  ENSG00000287026_2 (sequence is synthesized)
ttatttcctggttgattgtaagctctttattgtgatccataaagtcctgtatgagccagcccctccctatcttataacactctaccttttggggactttgcaccagctgcgttttgttgc

SEQ ID NO: 899314 - DNA, 120 bp, Artificial Sequence
  ENSG00000287026_3 (sequence is synthesized)
ttagagctttcctccccgatgtccctatattactggctcctgcccatcattcaaatcttagctcagtggttacctttccagacaggtctttcctggtcactgcatctaagtaggcctact

SEQ ID NO: 899315 - DNA, 120 bp, Artificial Sequence
  ENSG00000287026_4 (sequence is synthesized)
aatccatccctggtcactaactattatggaatttgaaattcaaacctgtgtttttctcctagtgttttatcactgtgtagtcaactgacttgtgtcttctcccccagaaaaaaagatacg

SEQ ID NO: 899316 - DNA, 120 bp, Artificial Sequence
  ENSG00000287026_5 (sequence is synthesized)
ttctggttctaagccccagtacctattaatgtaaccatacttgactgaaaataaggtatttgcaggtataatcaagttaaaatgaggtagtactatactagggtaggccctaaatccagt

SEQ ID NO: 899317 - DNA, 120 bp, Artificial Sequence
  ENSG00000287026_6 (sequence is synthesized)
gacaggcgtcttcataagaaaaagaagagagatatttagacacagagacatgcaggatacaaacagagaacagagacataaaaacaagagattagaatcatgaggccacagccaagcaat

SEQ ID NO: 899318 - DNA, 120 bp, Artificial Sequence
  ENSG00000287026_7 (sequence is synthesized)
gcctgggaccactagatgcaggaataggcgaggaaagattctcccctagagccagcgaagagagcacagtcctgctgacaccttgatttcagacttctgaccatcagaaccgtgacggaa

SEQ ID NO: 899319 - DNA, 120 bp, Artificial Sequence
  ENSG00000287026_8 (sequence is synthesized)
taaatttctgttgttttgagccacccagtttgtggtaatttgttacggaagccccaggaaactaatacacatggcttgaaactaacttgtttatttttgatgttctgtttattatctgtc

SEQ ID NO: 899320 - DNA, 120 bp, Artificial Sequence
  ENSG00000287026_9 (sequence is synthesized)
tgactttaggagtatgtttaccttgtgcaagcagaagtcaattgtcttcttcaccactttaattccagggactggaatgatgctgcctagagcacagtagttcagttcctttctgttgct

SEQ ID NO: 899321 - DNA, 120 bp, Artificial Sequence
  ENSG00000287026_10 (sequence is synthesized)
aaatgcatacctcccaagttacaacatacaaagtcaaagaaaggacaaggaacaagccttttcctatcgtgagtgtgagtgtcattctcagtgcttctgctacagccagatttcttgctc

SEQ ID NO: 899322 - DNA, 120 bp, Artificial Sequence
  ENSG00000287026_11 (sequence is synthesized)
ccctgtgtttctgcagtctcttgggcataagccatgggttgaagcagccaactctatgattattcaactctttaacttaaaacattggcacttagtgagttagtgagcgatggtcctgca

SEQ ID NO: 899323 - DNA, 120 bp, Artificial Sequence
  ENSG00000287026_12 (sequence is synthesized)
ctaacacaaaattgaaaaacaaagcactgataagttataattatgttattcttttctttgtgccatattcctatatcttatttgtatttaattacattgtatgtctacttagtagataac

SEQ ID NO: 899324 - DNA, 120 bp, Artificial Sequence
  ENSG00000287026_13 (sequence is synthesized)
atactattttttcaattgaaaccatgatttttatatgtttcactggaaatgtttggaaaattatgagcccttggacttcattgaactgtaagttttatccttccgtttcttttctttgac

SEQ ID NO: 899325 - DNA, 120 bp, Artificial Sequence
  ENSG00000287026_14 (sequence is synthesized)
ccatttattttggcaagaaaaacatttattatacttgaaaaggcttccttcatcatggttcaaacatgaggctcaggttttttgaaccatgtaagaacagtgcataccagagactgtatc

SEQ ID NO: 899326 - DNA, 120 bp, Artificial Sequence
  ENSG00000287026_15 (sequence is synthesized)
tgagtacttggtacatatttgctagtgggttgctatttgttgattaaataaatgagggaaatattgagagtctgtgacaactgtatcttaaactttgcatcagatataaccagacaatac

SEQ ID NO: 899327 - DNA, 120 bp, Artificial Sequence
  ENSG00000287026_16 (sequence is synthesized)
cagaattattacattgattacggaagtagaatctgacctccgtctagttcaggatgcctttgcagctgttaaagaaaagacaaagtatctgcttcaggactcttttcccggctttggaga

SEQ ID NO: 899328 - DNA, 120 bp, Artificial Sequence
  ENSG00000287026_17 (sequence is synthesized)
aaggactccagtgaggttaagagctgatttagagttacagtagtatatccatcaatacagtgctccagtcccacaggatactcagaaaacatttttactgattgtttctaacctttactt

SEQ ID NO: 899329 - DNA, 120 bp, Artificial Sequence
  ENSG00000287026_18 (sequence is synthesized)
tctgtctcttaggcatttcgaaatgaacaacaaagcaacaagtcttacgcttacaatcttcatttggcatgtttagaagtttggactgctaacaaatgtctgttaagcattaccccaacc

SEQ ID NO: 899330 - DNA, 120 bp, Artificial Sequence
  ENSG00000287026_19 (sequence is synthesized)
tgttttaaaagatgtcacagcattcatgactatggaactgtgttcacaccagatgacaagaatctgttagcaacctgttatgtagttttcagcctcttagggtataatgggtataaatac

SEQ ID NO: 899331 - DNA, 120 bp, Artificial Sequence
  ENSG00000287025_0 (sequence is synthesized)
ttctctaaatgcagcatggaaggtgattgcattattgacgctgcctactctgcacggggcaaacaagcaaaattcagcagaaagcttgccttgtcatcacaagttctcagaatgtgatcc

SEQ ID NO: 899332 - DNA, 120 bp, Artificial Sequence
  ENSG00000287025_1 (sequence is synthesized)
cagtgaggttccaccaccttccacagctgagtggaagcccatatgttattgaaaagagaaaaagaaaagaagaagattaattcagttgtcaagtatgtttatcactgtggctcgtcacat

SEQ ID NO: 899333 - DNA, 120 bp, Artificial Sequence
  ENSG00000287025_2 (sequence is synthesized)
tccattccgatggcgtgatgaaggcacagattgttgtcttagttgcgcaacctgaagagtttgctggatttatgggtagatcatggacagatctagagttcaaggtaaaagtagaggaat

SEQ ID NO: 899334 - DNA, 120 bp, Artificial Sequence
  ENSG00000287025_3 (sequence is synthesized)
atttaaatctctagcagtctggctgtttccttttgcgagaagccacaactgggagagatgagcagttctgaggctgcatttgcagttctatgcctattggtgtagaggatgaatgatttt

SEQ ID NO: 899335 - DNA, 120 bp, Artificial Sequence
  ENSG00000287025_4 (sequence is synthesized)
agcttgatgtatcatataagcctacctttgttctgacaacatttgtgagcttgatttacaaattttacaggctacacagacatggatgaggcatcatttttataattactaaattttcgt

SEQ ID NO: 899336 - DNA, 120 bp, Artificial Sequence
  ENSG00000287025_5 (sequence is synthesized)
tctcatggataaagggtacagcaattggagagtacactcactagtaaagaacttagaggtaatctatttatgaagcttatttgaatatgaagcacttttattcatggtaaattgtcttcc

SEQ ID NO: 899337 - DNA, 120 bp, Artificial Sequence
  ENSG00000287025_6 (sequence is synthesized)
acaagttttgtataaatagaattataaattaacacaggatgctataaatattagataagttacaaatagaaatgcaaatgcagtgtcaaaaatttttaatggaagaatacctacttggga

SEQ ID NO: 899338 - DNA, 120 bp, Artificial Sequence
  ENSG00000287025_7 (sequence is synthesized)
acctacttgggattattctactaagattgtcttttaaattttaaactattgaaatgtttgccgaagtattttcctttgtttcactttaaaatacaatataatttctaatatttagtaaat

SEQ ID NO: 899339 - DNA, 120 bp, Artificial Sequence
  ENSG00000287025_8 (sequence is synthesized)
ctgctatattatactttattgataagataaaatataatgcataaattattaatgagttgtatctagtatagctatgtgcagatatgagactatacattgtaaataacaatgtgcgcatgt

SEQ ID NO: 899340 - DNA, 120 bp, Artificial Sequence
  ENSG00000287025_9 (sequence is synthesized)
gtatatatgtattgcaacagacgtattatatgctgtaattattgaaattgtatatttatatgcaaattatatgtgataaatatacaaatacagatattcggtgagcaaatttacaatcaa

SEQ ID NO: 899341 - DNA, 120 bp, Artificial Sequence
  ENSG00000287025_10 (sequence is synthesized)
gtcagttttccagggttgaatagccaggtcacaaaagaaaaagtcactccagttactctcaaaagatttctaatagtggctttatttgtaataccatcaccagatataattcagagcctt

SEQ ID NO: 899342 - DNA, 120 bp, Artificial Sequence
  ENSG00000287025_11 (sequence is synthesized)
tgcccatcctagaaatagaaacattaacatgacttttcaaagtattgccatgtgattaaaagaatcatatggataatcaactgacctgttgtttttggctatcgtagccacctaacagtg

SEQ ID NO: 899343 - DNA, 120 bp, Artificial Sequence
  ENSG00000287025_12 (sequence is synthesized)
tgaaagtttcaagtgattacaaacaaatttatgaaatagtttagacatatcctcaaaactggtcaatttagaaaccataagtagaaaataccttttagctagatatagtagattatatga

SEQ ID NO: 899344 - DNA, 120 bp, Artificial Sequence
  ENSG00000287025_13 (sequence is synthesized)
gtcagtatttttacaaacagcatgctggcatctctggtccaaggggacctactatgccatgttgtcaaattatgcattagctcttgaattctcatgagtgcataagtatcataaggtttt

SEQ ID NO: 899345 - DNA, 120 bp, Artificial Sequence
  ENSG00000287025_14 (sequence is synthesized)
ctagcatgtgcatgaatgccttaagtaatggactgccaactgctttctgagggaaactactgcattttaaaagagatttaattttagagaataaaaaattttgaatacccaagtatttct

SEQ ID NO: 899346 - DNA, 120 bp, Artificial Sequence
  ENSG00000287025_15 (sequence is synthesized)
ttctgtgaattccttccactggtactctgtatatttttaacatcgtacagtggtaaacattatgactacatacaattaattaactgatatttttcagtataatatgcacatttgacttta

SEQ ID NO: 899347 - DNA, 120 bp, Artificial Sequence
  ENSG00000287025_16 (sequence is synthesized)
attgggaatgttattgactgttgccttaactgtgtcaaacttatcctcatgtgatatatctgcttatgtttgtgaggaaaaacttgtatgctatgaaaagtgactttctcctgatgttaa

SEQ ID NO: 899348 - DNA, 120 bp, Artificial Sequence
  ENSG00000287024_0 (sequence is synthesized)
gggcccggctggcactgccctgcgccgccgcccgtcagtcccggtaccccgccaggaaatgtcttcttcctgggaagacggccgctgtctgcggcagtgggtggcagagtctgaaaccaa

SEQ ID NO: 899349 - DNA, 120 bp, Artificial Sequence
  ENSG00000287024_1 (sequence is synthesized)
agctcgtacaacaagaagatagcaatctgcaaaccagaaagtgggccctcacaagaactagatgatgatggtgtcctggcttcaaactcccagcttccagaactgtgagaaataaatttc

SEQ ID NO: 899350 - DNA, 120 bp, Artificial Sequence
  ENSG00000287023_0 (sequence is synthesized)
gctgttctatttgcacagagtgctggtgctactttgcatgttgagcgtcgacaagaaaatgacacaaagcaacttgccagccataactttacacttagttccatacatatttggagttag

SEQ ID NO: 899351 - DNA, 120 bp, Artificial Sequence
  ENSG00000287023_1 (sequence is synthesized)
ccgatggcgtttcagcaagcacatattttataggatgcctttaatcataagccacagcttttaatttttgttcctcttgccatgttatagatatggctgatgacatcttcctccttgtgg

SEQ ID NO: 899352 - DNA, 120 bp, Artificial Sequence
  ENSG00000287023_2 (sequence is synthesized)
tagataaagaaaaagcacaagaaaaatcatttccaggctgtggtctcacagtgacttgtggagcaagcctataaataagaatggtggataaagattgcgaatttgcacagctataaagct

SEQ ID NO: 899353 - DNA, 120 bp, Artificial Sequence
  ENSG00000287023_3 (sequence is synthesized)
tactaattaaagactacaaacacaaagagagcaagccttgtgatgactgcacaataacgaggattcagatacaacgtggtcgccacctgacgcccacctccacaaaaagccattctcaaa

SEQ ID NO: 899354 - DNA, 120 bp, Artificial Sequence
  ENSG00000287023_4 (sequence is synthesized)
tcagccatgaagctgctctgaagacacaggaactgcatagctccctactgggaatgtcaagggctgtgaaaggtctaaggttttatcctacttgcaaccaacaagctatgcagccacagt

SEQ ID NO: 899355 - DNA, 120 bp, Artificial Sequence
  ENSG00000287023_5 (sequence is synthesized)
tttatggatgctgtcaaaagacatgacactcctgggttatttgcaacttacctggctaagctgaactccagaatttggactagaggcttcaggatgctggtgcagttcaagtctggtcca

SEQ ID NO: 899356 - DNA, 120 bp, Artificial Sequence
  ENSG00000287023_6 (sequence is synthesized)
catgtctcctcctccttcgagggtcattgactactttgtgtatcttcttttcatgacagttcatatgagtgcaagatggctcgatagacttgcacacaagtttaaagatttttgtataca

SEQ ID NO: 899357 - DNA, 120 bp, Artificial Sequence
  ENSG00000287023_7 (sequence is synthesized)
cctcattccattgttaaagcaagttgcatggtcaaatctaacatctctggacaaggacatgcattcataccactctactgcactgcaagctcacgcagaggagcagatcataaaacgtga

SEQ ID NO: 899358 - DNA, 120 bp, Artificial Sequence
  ENSG00000287023_8 (sequence is synthesized)
ttgatgcatgatgatgataatgaccaacctaccatcatggacatgaccgtatgttgatactaagcctcttagtaaaatgagctaaagaaaccagaactatctgccttcagctcagctgtc

SEQ ID NO: 899359 - DNA, 120 bp, Artificial Sequence
  ENSG00000287022_0 (sequence is synthesized)
tggggtggcagggtgagaaaggcagagatggcagcagtaagagggaagaatatcattatttctttttccatatttacctgtactatgtttctcagaagctgaagtgctgtcagtattctg

SEQ ID NO: 899360 - DNA, 120 bp, Artificial Sequence
  ENSG00000287022_1 (sequence is synthesized)
gtaggcttgaaagatctggcacaagagaaagctcaatctgtttacctgtgagtgttcttcaaacatgagggcaagcaaaagtcccttctgcctcattctctgcagccatggcccagcatg

SEQ ID NO: 899361 - DNA, 120 bp, Artificial Sequence
  ENSG00000287022_2 (sequence is synthesized)
tgtagtcacatgcattttctcattctgtttgacctgtcagctggacctgaaacaggccatccccattttgcatgattcagatgtgcacaaatcccagttactatggtttacttaataaca

SEQ ID NO: 899362 - DNA, 120 bp, Artificial Sequence
  ENSG00000287022_3 (sequence is synthesized)
tgagtctcccctgcaacacaattcaaatttcagttaccagtggatattaactgtgagtaactgcatgaaattcaaacttcactgatagttcttcaaaccacaaccactgtgtaaataaga

SEQ ID NO: 899363 - DNA, 120 bp, Artificial Sequence
  ENSG00000287022_4 (sequence is synthesized)
aatgcacattgtgttatgcagaataatgccccccaccccaaagttcacatcctaattcctaaaatctgtgaactattatattacatggcaaaagggaccttgttgatgtgattaagttag

SEQ ID NO: 899364 - DNA, 120 bp, Artificial Sequence
  ENSG00000287022_5 (sequence is synthesized)
agatcttgaggtgggggattatcctggattatctgaatggttccattgtaatcaccagggtctttataagagggaagcagatggtcagagtcagggaagatgtgacaacagaaacagaga

SEQ ID NO: 899365 - DNA, 120 bp, Artificial Sequence
  ENSG00000287022_6 (sequence is synthesized)
aacagagaaagatttgaagatgctacactgctggctttaaagttggaagaaggggccatgagccaaggaatgcaggaaccctcaaaaaattggaaaaggccaaaatcaacagccaatttg

SEQ ID NO: 899366 - DNA, 120 bp, Artificial Sequence
  ENSG00000287022_7 (sequence is synthesized)
caagacacctgaaactttttcataagccagatgccgaggaagagattctgggaggatcccgaggacccctcggttgcagccatgtcgagactgacgctgaggaggaccccaactgtcaca

SEQ ID NO: 899367 - DNA, 88 bp, Artificial Sequence
  ENSG00000287022_8 (sequence is synthesized)
agctgtcacagctggctcacaatgagtaatttaatggtagctatgatagcggtatcaccattgctgtgagtattccttcaacaagggc

SEQ ID NO: 899368 - DNA, 78 bp, Artificial Sequence
  ENSG00000287022_9 (sequence is synthesized)
cttggctggcaataatgcctagatgtaatcactctatgatgcagttgcacatgctttctgatctcagtatttatcata

SEQ ID NO: 899369 - DNA, 75 bp, Artificial Sequence
  ENSG00000287022_10 (sequence is synthesized)
aacttggctggcaataatgcctagatgtaatcactctatgatgcagttgcacatgctttctgatctcagtattta

SEQ ID NO: 899370 - DNA, 120 bp, Artificial Sequence
  ENSG00000287022_11 (sequence is synthesized)
gcaagaatattttattaatgactaaaggtttagcagaaacaatttaacatatgtatcatactcatctgtaagactatgcttttggaaaactcagccttaattaaaagtcataatttttaa

SEQ ID NO: 899371 - DNA, 120 bp, Artificial Sequence
  ENSG00000287022_12 (sequence is synthesized)
tttcttatttgtttgaaaaaattttcatcattttgaatttatatttccacagtccaagattatttcttctgtttcagacttttcttatgtgaaatagaagagttttgttttgttttccgt

SEQ ID NO: 899372 - DNA, 120 bp, Artificial Sequence
  ENSG00000287022_13 (sequence is synthesized)
ttggtttagcctgaaaaaagatgtaaaattgcaaatacctcaaaactacatgcccaagtaaggatgtgtataattgacagtctttcaatgtttgccagtcacacatctaaagggttactt

SEQ ID NO: 899373 - DNA, 120 bp, Artificial Sequence
  ENSG00000287022_14 (sequence is synthesized)
actatttctgctctattaagaaaagaactatatatctagttcattgaattttcacaaagaatgataatagattttttttcatctgtctatataagaaggggccctattctggcaaaagtc

SEQ ID NO: 899374 - DNA, 120 bp, Artificial Sequence
  ENSG00000287022_15 (sequence is synthesized)
tgaattcatgccactaaaaaatgacaaaagggtaaatgaagttttatttttgataataatacctgaagggaatttcatttttcttcagtgaattttaaaaatctaaaaatcctttaaaac

SEQ ID NO: 899375 - DNA, 120 bp, Artificial Sequence
  ENSG00000268001_0 (sequence is synthesized)
actttgtcgtactccttccttgctgactaagaggaacagaacacagagcagcctggcggtgtcctaccaacaagcctccgtttctccttcctgtacactagggctcctgaaactcacctg

SEQ ID NO: 899376 - DNA, 74 bp, Artificial Sequence
  ENSG00000268001_1 (sequence is synthesized)
tttctccttcctgtacactagggctcctgaaactcacctgatgaagtctccgtctgtcacccaggctggagtgt

SEQ ID NO: 899377 - DNA, 60 bp, Artificial Sequence
  ENSG00000268001_2 (sequence is synthesized)
gcatcaggatggtctccgtctcttgacctcgagatcagcccgcctcggcctcccaaagtg

SEQ ID NO: 899378 - DNA, 120 bp, Artificial Sequence
  ENSG00000268001_3 (sequence is synthesized)
acaggcgtgagccactgtgcccggccttggtttctaaatactattttgaagtatctgtggagaaatggttacttcgagggctggggcaggaatatataagataacattggaacaaattct

SEQ ID NO: 899379 - DNA, 120 bp, Artificial Sequence
  ENSG00000268001_4 (sequence is synthesized)
ggaacaaattctgacgccagaacatgaagaaatatttgaaaaaggatggggcatattgactgaacacagaagacaaacatgcatgacctcagcctaatcgtgagaaaacatcaaagaaat

SEQ ID NO: 899380 - DNA, 120 bp, Artificial Sequence
  ENSG00000268001_5 (sequence is synthesized)
ccaaattgataaacattctgtaaaataattggccatgctcagcaaaagtgtcacaatcacaaaagacaagggaagaataagaaacggtcacagcctggaggaatctaaggacataacaac

SEQ ID NO: 899381 - DNA, 120 bp, Artificial Sequence
  ENSG00000268001_6 (sequence is synthesized)
tgagtgcaatgtgagatcctcgattcgatcttggagaagaaagaggacgttaagagaaatattgacaaaattcaaataaggtctgcacattaggtaatggtaagatacgttgacatcaat

SEQ ID NO: 899382 - DNA, 120 bp, Artificial Sequence
  ENSG00000268001_7 (sequence is synthesized)
gtctgcacattaggtaatggtaagatacgttgacatcaatttcctggttggatacttgtattacatatactattatgtatataattattatattacaattacatatacagttgtatatta

SEQ ID NO: 899383 - DNA, 120 bp, Artificial Sequence
  ENSG00000268001_8 (sequence is synthesized)
caattatatatatagctaacatcaggataggctggttgaggatttatatgaatctttgctaattttgcatgtttaaaattatttcaacataaaaaaattatatgggtcatgtagtttttt

SEQ ID NO: 899384 - DNA, 120 bp, Artificial Sequence
  ENSG00000268001_9 (sequence is synthesized)
gtgcagtttaattctaggcaccatagtttctgttttaatgggtgtattttcttctttcaaggaattgggatagtctgttgtattaaaaacctattcatttttgtacattaagattcttct

SEQ ID NO: 899385 - DNA, 85 bp, Artificial Sequence
  ENSG00000268001_10 (sequence is synthesized)
tattaaaaacctattcatttttgtacattaagattcttctggccaggcgcaatggctcaagcctataatcccagcacttgggaac

SEQ ID NO: 899386 - DNA, 120 bp, Artificial Sequence
  ENSG00000268001_11 (sequence is synthesized)
gggagactccatctcaaaaaaaaaaaaagattatttctctaacttactggtttatcttttatagcttatttcaggtgatttgttgtgtttgtctatagagtaaaataacatgtctaatga

SEQ ID NO: 899387 - DNA, 120 bp, Artificial Sequence
  ENSG00000268001_12 (sequence is synthesized)
ctatagagtaaaataacatgtctaatgagttataatttaatgtccttccattcaatcactgtatttcaaatttattccaatattttggaataagcttccaatattttaacttaaataggg

SEQ ID NO: 899388 - DNA, 120 bp, Artificial Sequence
  ENSG00000268001_13 (sequence is synthesized)
aaggtcatacttggtattttcctgacctcagctggaatgccttcatagtgttcacatgaacacatttggcctgagagagacttattatgccgagaatgtgtgtaaccctttttacttagg

SEQ ID NO: 899389 - DNA, 120 bp, Artificial Sequence
  ENSG00000268001_14 (sequence is synthesized)
aattgtgggtggagtttttccccccgcccaagaatgattgttaatttccgtccatcattttcctttgattgttcttcatctcgaaaacaaataataaaataataaaataaataaataaaa

SEQ ID NO: 899390 - DNA, 120 bp, Artificial Sequence
  ENSG00000231829_0 (sequence is synthesized)
ttttggctcctcctgcttgggtttcccagccatcaatccacccatctggcacaggattgactcctggtggaacccaactcagtgatctgtgcagtgtggtgttttccaaactggccaagg

SEQ ID NO: 899391 - DNA, 120 bp, Artificial Sequence
  ENSG00000231829_1 (sequence is synthesized)
catccttctggaggcatcacctccagaatctacttgaagtggatgacactgacttccatgaactgttttccttttgctgagggtgatggcttccaactccatccatgtccctgcagagga

SEQ ID NO: 899392 - DNA, 78 bp, Artificial Sequence
  ENSG00000231829_2 (sequence is synthesized)
tgtctgttcactctgatgatggttccgtttgctgtgtggaagctcttaagttggattaaattccagtcgtcaatttct

SEQ ID NO: 899393 - DNA, 120 bp, Artificial Sequence
  ENSG00000231829_3 (sequence is synthesized)
cctgaatgttgacatggaatgttatttggtcaggaagtctggattatggaaatgcagattctataataaagcctggctctccattccaagatggctgaataggaacagatctggtctgca

SEQ ID NO: 899394 - DNA, 78 bp, Artificial Sequence
  ENSG00000231829_4 (sequence is synthesized)
acagatctggtctgcagctcccagtagcctccactggtgatacccaggaaaaatctggagtggacctccagcaaactc

SEQ ID NO: 899395 - DNA, 79 bp, Artificial Sequence
  ENSG00000231829_5 (sequence is synthesized)
tgactgttagaaggaaaactaactacaccaaaaccccatctgtgggtcactaacatcaaagaccaaaggtagataaaac

SEQ ID NO: 899396 - DNA, 74 bp, Artificial Sequence
  ENSG00000231829_6 (sequence is synthesized)
aaagctgaaaattctaaaaaccagagcacttcttctctaaaggatcacagctcctcaccagtgtaggcttcaga

SEQ ID NO: 899397 - DNA, 81 bp, Artificial Sequence
  ENSG00000231829_7 (sequence is synthesized)
tgtaggcttcagaaggtcagaaataatgaaaaacttatctgagctaaaggagcatgttcaaacccattgcaaggaagctaa

SEQ ID NO: 899398 - DNA, 120 bp, Artificial Sequence
  ENSG00000231829_8 (sequence is synthesized)
tagacaaatggctaactaaaataaacagtgaagagaagaccttaaatgacctgatagagatgaaaaccatggcacaagaacttcatgatgtatgcacaagcttcaatagccaattccatc

SEQ ID NO: 899399 - DNA, 88 bp, Artificial Sequence
  ENSG00000231829_9 (sequence is synthesized)
tgtctctgttgaattggtgtacctgaaagcagtggggagaatggaaccaagttggaaaaccctcttcaggatattatccaggagaact

SEQ ID NO: 899400 - DNA, 89 bp, Artificial Sequence
  ENSG00000231829_10 (sequence is synthesized)
tgagaagagcaaacccaagaaggaaaaaatgttaagggcagccggagagaaaggtcaggtcacccacaaagggaagcccatcagactaa

SEQ ID NO: 899401 - DNA, 78 bp, Artificial Sequence
  ENSG00000231829_11 (sequence is synthesized)
ctaacagcagatctctctgcagttcttaaagaaaagaactttcaacccagaacttcatatccagccaaactaaccttc

SEQ ID NO: 899402 - DNA, 80 bp, Artificial Sequence
  ENSG00000231829_12 (sequence is synthesized)
aagaccattgatgctatgaagaaactgcaatgaacaggcaaaataaccagcaaacattataatgacgggatactaaatgc

SEQ ID NO: 899403 - DNA, 120 bp, Artificial Sequence
  ENSG00000287029_0 (sequence is synthesized)
gctgggagacgcggccgggctgcagtcgccgttccctctgctgccgccgccgctgcagcagacagaggacgccccgtggcggctggaagcctgtgtgagtagcggcgcccgggagagcgg

SEQ ID NO: 899404 - DNA, 120 bp, Artificial Sequence
  ENSG00000287029_1 (sequence is synthesized)
ggatctgctgaggggcgctggagactccgcggctggaggcgcgcgggcgtgcgcacgcgcgcctgcgagtgaacgaggcatgaacagcaatttactggagtgctcaaaagtgcttttaat

SEQ ID NO: 899405 - DNA, 120 bp, Artificial Sequence
  ENSG00000287029_2 (sequence is synthesized)
gtaggacttgttgaatattctccagattgacaactacaaagccaccgagtaggaaatgtctcaggattcccatcatccattttttggaggagaatttatcctctgcctttcttggaagcc

SEQ ID NO: 899406 - DNA, 120 bp, Artificial Sequence
  ENSG00000287029_3 (sequence is synthesized)
tcctccagccccaaatgtgccattgctctgggattttgcacaccaccaagtggatactgggaggagccaggtttgagccatctccagaggctgcctgttaaagtgaatggcccccagcaa

SEQ ID NO: 899407 - DNA, 120 bp, Artificial Sequence
  ENSG00000287029_4 (sequence is synthesized)
gcagaaggagactgtgggtcatcactagaggacagaacctgaggaggctggtaagaggtcatttggaaagtgtctcatagagaatggtgcagattagcattccttggtggggaggcattt

SEQ ID NO: 899408 - DNA, 120 bp, Artificial Sequence
  ENSG00000287029_5 (sequence is synthesized)
aaataatctgcaaatacaacccaacagagactacattttaatgaccattgagacagaaccacaaacagcaaaagctaagtaaaaaggccttttctcttgctttcagccctcctcttcccc

SEQ ID NO: 899409 - DNA, 120 bp, Artificial Sequence
  ENSG00000287029_6 (sequence is synthesized)
actggaggggaggaggggatgtggtattgggacctggagtttagaagaagacagcagtagaaacagcctgcacttcctactcctggtacccaaacaaagccagaagtcaggcttcagtta

SEQ ID NO: 899410 - DNA, 120 bp, Artificial Sequence
  ENSG00000287029_7 (sequence is synthesized)
agaggagagaagctttagtttaaattaaaaaattaaagtaagacttatgtgtacctaaagataagactgtagctgtagttgaaaattaccagaaatgctatggaatctccctgagatgtt

SEQ ID NO: 899411 - DNA, 120 bp, Artificial Sequence
  ENSG00000287029_8 (sequence is synthesized)
gccaagtggtagggaggatacacctagcagggcatgggtgaagacagtggtttgctgattgtatcctaaagagaatgtgcttatgtgctttgtcccttccagtctggctgccctctgaag

SEQ ID NO: 899412 - DNA, 120 bp, Artificial Sequence
  ENSG00000287029_9 (sequence is synthesized)
cctccctgtcctccttcctccccagtcacaactattacctgaagccattctgcactaggctcccactgcctccctggaggctgcatttgactcctccctgctcccaggcctccctttctt

SEQ ID NO: 899413 - DNA, 120 bp, Artificial Sequence
  ENSG00000287029_10 (sequence is synthesized)
gggaaacctctctctctctcctacttttttcaaattccacttgttcctgcaaatattttttcccttatgtatcctctataaacagtgtaagttcttctatgggcttacattttattttta

SEQ ID NO: 899414 - DNA, 120 bp, Artificial Sequence
  ENSG00000287029_11 (sequence is synthesized)
gaaacaaaagccagaaggggcaaaggctactttactttctacacctgaagtagtggctattgacatgaatatggaaagggcaaaggacaaataaaatggtgaggaaaaaatataaattat

SEQ ID NO: 899415 - DNA, 120 bp, Artificial Sequence
  ENSG00000287029_12 (sequence is synthesized)
atatcaaagccatatgctgttctgctttgatttctaatggaacttagtcaatcttgagctgattgggttttgctgttggacacagaacatgaatgtaacttaaatgaatcacagcatatt

SEQ ID NO: 899416 - DNA, 120 bp, Artificial Sequence
  ENSG00000287029_13 (sequence is synthesized)
ttatacagcatatgcttgccttcttccctgtgctttatgtgggctgtgtaagaggggaagcagagaactcaccatatttataattaaataattagcctaatagctcttacatatctgcct

SEQ ID NO: 899417 - DNA, 120 bp, Artificial Sequence
  ENSG00000287029_14 (sequence is synthesized)
tccatgctcaactggaagctccatgactgccgaaactatgtctgtcttttcactgtggatctgaatttcttctccacaggtacgttcttgttatatgaatgagtgaatctgtcaaagtgt

SEQ ID NO: 899418 - DNA, 120 bp, Artificial Sequence
  ENSG00000287029_15 (sequence is synthesized)
taggtatgttgggaggtgtaggtcaggagtgtggcagccaggaccaggctactattcagcctctttgtgtgaagagcaggggatttgggaggggtgagtagatctggactaagtcgtctc

SEQ ID NO: 899419 - DNA, 120 bp, Artificial Sequence
  ENSG00000287029_16 (sequence is synthesized)
gccatagctttgagggttataagatatattatgataggttttgttcaagcacttgtcaaaacaaaaaattaccaggccatttcttttcactttcaagaggcatgttaaaatggcatcaac

SEQ ID NO: 899420 - DNA, 120 bp, Artificial Sequence
  ENSG00000287029_17 (sequence is synthesized)
ccattagtagcatttatacctataaacaatagaaacatctcaacttagtgtctgcctttaagagaaaaattttaaaaattaaattgccacttcttcatatttatttagcatattcacagg

SEQ ID NO: 899421 - DNA, 120 bp, Artificial Sequence
  ENSG00000287029_18 (sequence is synthesized)
ctaaaaaagaaataattgcaggtctcttaaaggccttatggcttactccagagtcagtagtttccagtttaacttggactaatgggttggtcagctaaggattgctttggagagggactt

SEQ ID NO: 899422 - DNA, 120 bp, Artificial Sequence
  ENSG00000287029_19 (sequence is synthesized)
actttaatgattacagacaacactgattcttaaagacttcatgttctgaaaagcattataatgatggaatgattataaataataatattcataggacactttataaagaatcctgccata

SEQ ID NO: 899423 - DNA, 120 bp, Artificial Sequence
  ENSG00000287029_20 (sequence is synthesized)
gttatgatttcatgtctaaaccaacgcagggagtagcacatgaaccaatggtgtagatcctcagagacatgtttccctgcttcccgactcccacccagcctctgagtctccatacagctt

SEQ ID NO: 899424 - DNA, 120 bp, Artificial Sequence
  ENSG00000287029_21 (sequence is synthesized)
ggactcaaagattctcttttattccttctccatgatagttagacccccgtgctcagtttcgtggttgttccagcacgcaaaggctatggtttgaaatatcccagcctttcctttctattt

SEQ ID NO: 899425 - DNA, 120 bp, Artificial Sequence
  ENSG00000287029_22 (sequence is synthesized)
catccatatcctgcccatcgtctcaaagatagctcatcttgttcactccttgaaaatttgtgaaacatatttggtatttcattatattaactctttcagtgctgctgaactgtttcatct

SEQ ID NO: 899426 - DNA, 120 bp, Artificial Sequence
  ENSG00000287029_23 (sequence is synthesized)
gcttcaggtattagtggcaggaaggagaggaccatgccttgcacattatgttgcagagattcccttagtagatgtacacttgttgaataaatggtccagaatcataccaattggaatact

SEQ ID NO: 899427 - DNA, 120 bp, Artificial Sequence
  ENSG00000287029_24 (sequence is synthesized)
ttcttaaatcaagttacatgtttgtatggtgccctagaaaatgtctagcacttcttaggtgttcaataaatattaatactgcacttgtaacctgagatgttgaatttggttttaaaataa

SEQ ID NO: 899428 - DNA, 120 bp, Artificial Sequence
  ENSG00000287029_25 (sequence is synthesized)
gccaacaaagtaagcaagctacttcccaggtatgttaccttttataacttctatgtttacaactctactaccatattgagagaataactgtttaacatgatgaccctgtggtaaaaatcc

SEQ ID NO: 899429 - DNA, 120 bp, Artificial Sequence
  ENSG00000287029_26 (sequence is synthesized)
aaactcattaaaaaagaaaagtttgagtttcaagtcagttacaagtaaaatcaaataaaggaagaaaggaaggaaagcatgagggagggaaggagagagggagggaggaaagaagaaaaa

SEQ ID NO: 899430 - DNA, 120 bp, Artificial Sequence
  ENSG00000287029_27 (sequence is synthesized)
aagaaaaattaaaatgcatttgacatattgaatgtattaattcaattgccaaccattcttttgcagtgcctcctaatcctggacaacagaacattgctggacaaccatggcaaagctgag

SEQ ID NO: 899431 - DNA, 120 bp, Artificial Sequence
  ENSG00000287029_28 (sequence is synthesized)
ctcagtgggctcaccatggatttactctgatctgcattacttagatcattaatgtcaatcccttttttcccagtagctttatgtctgttcacatcatttcattctcaattgcactagctc

SEQ ID NO: 899432 - DNA, 120 bp, Artificial Sequence
  ENSG00000287029_29 (sequence is synthesized)
tgtgcttttacccttagctgttatcctcaccctctatctaaacaagagctcctttgatttccttcctcctcactttaaaattttcttttgcctttgatcgttctcttatttttctcatcc

SEQ ID NO: 899433 - DNA, 120 bp, Artificial Sequence
  ENSG00000287029_30 (sequence is synthesized)
tgtctcaggaatgctctttcttcccaaggctatgccttcctctctgtatggatcctgtcccctcctggctttccaggactactgcatgaattaccttctattttcttgcatcttcagtgt

SEQ ID NO: 899434 - DNA, 120 bp, Artificial Sequence
  ENSG00000287029_31 (sequence is synthesized)
cacccttttcatgagctctgcaacagtcctattgcccaagctctagaaaatccccctcttaaattattgtatttctagcctttcatttactatctcatttctcaaaagtgcaataaacat

SEQ ID NO: 899435 - DNA, 120 bp, Artificial Sequence
  ENSG00000287315_0 (sequence is synthesized)
acctgaaagggctgcctagaggtggtgagctccctgtccctggaggcaagcaagtcctctcagactgggagtggtgggcctgccccacctggcctgcaggccccaggctctggggtgcag

SEQ ID NO: 899436 - DNA, 120 bp, Artificial Sequence
  ENSG00000287315_1 (sequence is synthesized)
gggtgaggacatgcgaacctttatgtccaggtggagaacgccatggctgtgcaggtagtgcagcccctccaccagctgctggatgtagaccttgacctgcggcaagggccgctattcagg

SEQ ID NO: 899437 - DNA, 120 bp, Artificial Sequence
  ENSG00000287315_2 (sequence is synthesized)
cgggagcccagccccagcctccctctccactttaagcccagcctcctcctggcttcggcagctgatatgcaaagcgctcctgggccccgtgtgcccctaagccaggagatccctcaaagg

SEQ ID NO: 899438 - DNA, 120 bp, Artificial Sequence
  ENSG00000287315_3 (sequence is synthesized)
cggtccagcagctcctcggatgagcacctgggatcccatcaaggaaaagcaggcttgggaggctgaaacctgcctgtccccagaaacccacactcacagtgaggcagccagaaggagtgc

SEQ ID NO: 899439 - DNA, 120 bp, Artificial Sequence
  ENSG00000287315_4 (sequence is synthesized)
agcttcctccggtggctttgcttctctgagtccggctcattgtcccctaaggagtgggaagcggctggtatgggcaaaggtgaccaccctgatccccatggaacccaatgctgtggtgtt

SEQ ID NO: 899440 - DNA, 120 bp, Artificial Sequence
  ENSG00000287315_5 (sequence is synthesized)
gacgggagctgctccatggacccaagactatggaaccacactcacccagggacagggtcctatggacaccaagttcaccgccacttgcctctccccagtggagggttctggcccctctga

SEQ ID NO: 899441 - DNA, 120 bp, Artificial Sequence
  ENSG00000287315_6 (sequence is synthesized)
ggagacacgacaccagccctcgatcactgcggggggaagggtgacaggccagaagaatgagaagagaccacttcccagggtgacagggatgctgtgccccttctcctgggccaggccctg

SEQ ID NO: 899442 - DNA, 120 bp, Artificial Sequence
  ENSG00000287315_7 (sequence is synthesized)
cacccagccagccccgtgataggtgcacggagcaaatgtacaccaagaccccccgcgagctcagcctcgtcctccccgggaaccttcgggagagtgtcgccacctccagggagcagccag

SEQ ID NO: 899443 - DNA, 120 bp, Artificial Sequence
  ENSG00000287315_8 (sequence is synthesized)
gcctggatacccaccccaggccctggctctgccactgatcacaaccccccaccagggctggcctctcctcaaacctgggcacagcctagtgccaagcccttgctgaggacccctgctgca

SEQ ID NO: 899444 - DNA, 120 bp, Artificial Sequence
  ENSG00000287315_9 (sequence is synthesized)
tccccagtcgccagccaggagaggacacccgggctgctctctacactgccagggcaccctcctctccaccctcctcactccaaggcagtcagcaggacccctgagccagcctcggggctg

SEQ ID NO: 899445 - DNA, 120 bp, Artificial Sequence
  ENSG00000287315_10 (sequence is synthesized)
gagggcttcgggttttacgctaatggtgctgggatcgtccggccagagacaatgaagttgacccctgatgctgagatcctgagccccacggggtcaccacatccccacgtctgccatgac

SEQ ID NO: 899446 - DNA, 120 bp, Artificial Sequence
  ENSG00000287315_11 (sequence is synthesized)
aacagtcccagctgcccagggctggggaaggcctgcctggcaccccgcataccaggaaggagcatgattggctgttctggccatgccatgtgccccttcctgaggctcctgccaggctga

SEQ ID NO: 899447 - DNA, 120 bp, Artificial Sequence
  ENSG00000287315_12 (sequence is synthesized)
caggaaacagcccagagctgaggtctttgagccggtcattccaacattgcaagcaccacccagtcctcctggctgaagttgagtgaggcacgtaatcttccaggtcagccagtgtcagca

SEQ ID NO: 899448 - DNA, 120 bp, Artificial Sequence
  ENSG00000287315_13 (sequence is synthesized)
tgcggccgttgtgcgtgaggatcttggggtcacgatccccaaggctgtgtgtgtcctgggactcctccgtcacaaaggcgtctccgtcttccccctcttcctctcccgcctcctccatgg

SEQ ID NO: 899449 - DNA, 120 bp, Artificial Sequence
  ENSG00000287315_14 (sequence is synthesized)
tgccctcctcctccaggctgcccatgccagaagcagcccagtccacactgcctctggcatccacgcggaagacaaggggctctctgacgccgaccatggctgtgccctgggcccaggcct

SEQ ID NO: 899450 - DNA, 120 bp, Artificial Sequence
  ENSG00000287315_15 (sequence is synthesized)
cctgggccagcagcttgttgttggagttgttggaattggggtcccctccgggggtcgcaccgggcagtgtgaagagatgccccgatgagctcctgggcacctctgtggtgggagacacac

SEQ ID NO: 899451 - DNA, 120 bp, Artificial Sequence
  ENSG00000287315_16 (sequence is synthesized)
cctgcgggcccatcttcttcacccggacttcaatggtctcctccacctccacccacttgggctggggccccgagagtccgggcagagctggagagtgggcctcggcctccgtcacataca

SEQ ID NO: 899452 - DNA, 120 bp, Artificial Sequence
  ENSG00000287315_17 (sequence is synthesized)
gtgtgggcaccacgggcttctggcctggttctgcctccggcctgcggggctggccagcacctggcaggtacagcaggtcgggggccagtaggcctggcctcagcgggctggcagagcagc

SEQ ID NO: 899453 - DNA, 120 bp, Artificial Sequence
  ENSG00000287315_18 (sequence is synthesized)
gggaaggtgagcgggagggggacttgctgggggaccgtcgttggccacgtgggctcttcaccacagtggtgatggtctcttctctgggggagggaggagagggcccgagaaaagatgggc

SEQ ID NO: 899454 - DNA, 120 bp, Artificial Sequence
  ENSG00000287315_19 (sequence is synthesized)
acagcgcccaggattgccagggcagcgtgagagctcaggttattgtaccagcaagccagcagtgagagtgcacaaagaactcttacacatgcatgtgagcccaacctacagagtccccca

SEQ ID NO: 899455 - DNA, 120 bp, Artificial Sequence
  ENSG00000287315_20 (sequence is synthesized)
gcacaaggtcccatgtggccaatctgtctctggtgtgcagatctgaaaacaagaggtgaggtacgtggggaggcccgtgccgcactgcataggcaagcgcctccaaaaaccgggtcacat

SEQ ID NO: 899456 - DNA, 120 bp, Artificial Sequence
  ENSG00000287315_21 (sequence is synthesized)
cctgattgcagtggccccggtgcccgtctcccctccaggtccatcccacctttgtgctttgtatcacgggggatggtgcgtggccaactctcagagggcagggcctgcacaccctgaaaa

SEQ ID NO: 899457 - DNA, 120 bp, Artificial Sequence
  ENSG00000287315_22 (sequence is synthesized)
tcctcagccagggacgggctggacagcttatgccgtgggggtggggtgggggctgagctcagacctgttctcctggcctttgggtctgaaagtgtgaggcccagaaaggctttaggcagg

SEQ ID NO: 899458 - DNA, 120 bp, Artificial Sequence
  ENSG00000287315_23 (sequence is synthesized)
ccaagggagaaacctggctgatacgtggccccagacttggcttggccatgatgagccgtgtgacatcagacaagcccctcctcctgcctggctccatctcccaaaatgggatgggggagg

SEQ ID NO: 899459 - DNA, 120 bp, Artificial Sequence
  ENSG00000287315_24 (sequence is synthesized)
agtgacggaggcagaatgcaaggttggctgtacgtggctgtgcgtggggcactggctgggaactttgcaagctctcttgtctgactctgcagtaacctgggagagggtctgatcccactt

SEQ ID NO: 899460 - DNA, 120 bp, Artificial Sequence
  ENSG00000287315_25 (sequence is synthesized)
tataggggacagagagggtcaaagaggctgaaaatctgcctggggccaagagggagaagcagagcagtcagcccaggtcctcctctggtgcccggtgcccctgaccttgctgagcactga

SEQ ID NO: 899461 - DNA, 120 bp, Artificial Sequence
  ENSG00000287315_26 (sequence is synthesized)
gagcaaactgagttaacacgtagggaagcagaacgtgctgagtaacacacaacacataccagttccctgcctgttactcattttgccctcagccttgcacttccctcaggctcaagacaa

SEQ ID NO: 899462 - DNA, 120 bp, Artificial Sequence
  ENSG00000287315_27 (sequence is synthesized)
gggatgtggcatgtatgaggtgacaaagtcgtcaccaagtgagctactgccagctgtctgctttgtccaaagtactgtctctctctcatttagttttgctttcatctaactcagggctcc

SEQ ID NO: 899463 - DNA, 120 bp, Artificial Sequence
  ENSG00000287315_28 (sequence is synthesized)
atctggaagcagttgctcccaggcatgagcccagagatgtgtgaccaccccttggggtgcacagcaatgacaggtcctgcctcctccagccctcagctattaaggagggagtgatatatt

SEQ ID NO: 899464 - DNA, 120 bp, Artificial Sequence
  ENSG00000287315_29 (sequence is synthesized)
ccacttaactgatggggaagctgaggctcagagatgtggcccacttgtgcccacaggcctgatttcctgcctcacacccaggctctagggcagtaggcttgttgctgacagcctgggcct

SEQ ID NO: 899465 - DNA, 120 bp, Artificial Sequence
  ENSG00000287315_30 (sequence is synthesized)
aaccccatctgctcacctcatgttgcctgatctgctgatgcagggtggtaagttgagtgcagcccaacaggtggatggggactcctaaatatcccccaaatgctggactcactgccaccc

SEQ ID NO: 899466 - DNA, 120 bp, Artificial Sequence
  ENSG00000287315_31 (sequence is synthesized)
ccacaaggacacatgggcatcctgtactgagactgcaagcacagcatatggggtctgtctccaagccctgtttccttctcaggcctactgcctccccagtgcctctgcctgtgtggtcca

SEQ ID NO: 899467 - DNA, 120 bp, Artificial Sequence
  ENSG00000287315_32 (sequence is synthesized)
cccttgggttcagcgctatgcctatgcagttggctccctccaatcctcaagctgagtgggtaaattacgctttgcagagtgagggttgccaccttcctaagcctggaacagactggactt

SEQ ID NO: 899468 - DNA, 120 bp, Artificial Sequence
  ENSG00000287315_33 (sequence is synthesized)
gtatgcttgtaaatcacctggtcctcctttccctaggcgtgagtcgcctctgaagctttgccagtggggcattctggctccatctctgctcctccattttcttatccataaaatgtagat

SEQ ID NO: 899469 - DNA, 120 bp, Artificial Sequence
  ENSG00000287315_34 (sequence is synthesized)
aataatagtgctcccaaagggacaaaatgtagacctactctatgtgaggctctggcaccgttgcatacctccaggagtggggtgctcaccagcatccaggcagccccatctattgtgggg

SEQ ID NO: 899470 - DNA, 120 bp, Artificial Sequence
  ENSG00000287315_35 (sequence is synthesized)
tggcatcataggagcaacttgttttaggggaggagggagaaagccaaggaagggttaacccaggatctcaacaaatgtctggcaatgggattttcccacaatacggccaactgaaggccc

SEQ ID NO: 899471 - DNA, 120 bp, Artificial Sequence
  ENSG00000287315_36 (sequence is synthesized)
cttgagaactaagagttttcccatcctggagcttctcagccatctggccttaggaaaccacagtctttcctgcctcctggcttttgcaagctcttccatcactcccgcctgcacacacct

SEQ ID NO: 899472 - DNA, 120 bp, Artificial Sequence
  ENSG00000287315_37 (sequence is synthesized)
tctattggaagtcctctcagattattcaggtcaaaaccaactctacatttatgggttcacccagttctggtcctcttgtgttacctcagcagcagcagcatgtgtgattttcctaaatcc

SEQ ID NO: 899473 - DNA, 120 bp, Artificial Sequence
  ENSG00000287315_38 (sequence is synthesized)
ttgaggcactgaaggatgaagaaaaggacagtgggtgtggcactggggaagtggcttccagtcattagccacccagagctaacctcctctcttccctgaacttcagtttccccatcttcc

SEQ ID NO: 899474 - DNA, 120 bp, Artificial Sequence
  ENSG00000287315_39 (sequence is synthesized)
aaatgtgaaaatcgggcttggggacctctaagggccctaaggctgtgctgtccactatgaatgcactatgtaaattaaattcaaatgaacaaaaattaaaatttaaaatttgtccttcaa

SEQ ID NO: 899475 - DNA, 120 bp, Artificial Sequence
  ENSG00000254038_0 (sequence is synthesized)
ttaatactggcattgctcttgggagccaaggagtcctagatgactgaattctgctgtgaggtctgtagctcagggagaagatgagacaagtggacttggaaagaacaatcttcctcgaaa

SEQ ID NO: 899476 - DNA, 120 bp, Artificial Sequence
  ENSG00000254038_1 (sequence is synthesized)
aagtcctcagggtgcaaagaagagaaatgcaataaaatgataatgaggaggcccaggacccgcacaagggcaccactgcaagtagatacttcgaggaaacttcctgatgcttgtccagcc

SEQ ID NO: 899477 - DNA, 120 bp, Artificial Sequence
  ENSG00000254038_2 (sequence is synthesized)
agcaatatgtgtggagacagcccagcaaaagctgagagattgtgtgtccagagacatgttccaggaatggaaacagagagtggaggagtttcttctctcctcccgtctcccgctagagtg

SEQ ID NO: 899478 - DNA, 120 bp, Artificial Sequence
  ENSG00000254038_3 (sequence is synthesized)
ggcggtccctttggtgtcatcgcactgtcttcatagcctactgcgctccaggcctgtgcgcccatggcggtcttggaccacgagtgagccatgagccctcccaagccccaaggccaggtc

SEQ ID NO: 899479 - DNA, 120 bp, Artificial Sequence
  ENSG00000254038_4 (sequence is synthesized)
tgaagcgggctgatgtgtgcccctggctttgttgcccagatcctcaccacaatcccagcatcccaccactctactgcgagaagagacaagggaggagatgcacacctcagagaaggagca

SEQ ID NO: 899480 - DNA, 120 bp, Artificial Sequence
  ENSG00000254039_0 (sequence is synthesized)
ggccatcttccctccccattaaggagacagctgtctttgcgggcatccaggagactggacagagagaagacaaaaaataaacatcactgagtgccagccttcagggtccggctggattgg

SEQ ID NO: 899481 - DNA, 120 bp, Artificial Sequence
  ENSG00000254039_1 (sequence is synthesized)
cttgcccccttggattgaagaattggctcagggtgctgcctctgacataggttgcaaagagtgattctgccccatgccaaaccctttcgcgatgattgtctcatgtgacgcttacaattc

SEQ ID NO: 899482 - DNA, 120 bp, Artificial Sequence
  ENSG00000254039_2 (sequence is synthesized)
tgggagccaggcaggacagatagagtgatcatctccattttatggatgaggaaattgatccccaagagttgaagtgacttgcccaaggacatggtgagtaaggagtctggacttcccgca

SEQ ID NO: 899483 - DNA, 120 bp, Artificial Sequence
  ENSG00000231971_0 (sequence is synthesized)
gctctgatcctaataatccttttgatactctgttctaatttactaagaagagtcaccaattttgtttctgtggtttggtatgaaataaggtggcagaaacagcactctccaaatatccat

SEQ ID NO: 899484 - DNA, 120 bp, Artificial Sequence
  ENSG00000231971_1 (sequence is synthesized)
gcactcctgacatttttcagcagcccacattactaattctggctgagggattgggagcagaagagacacgtgtcatctctgagttgaggctgttaagagctggtgcaactttccattctt

SEQ ID NO: 899485 - DNA, 120 bp, Artificial Sequence
  ENSG00000231971_2 (sequence is synthesized)
ctgaatcacaggatgaaggcgaatccctgccagcctccatccatctctggggtgcttagcagaatcctcagctcacaagatgaataaatgcagactaaatgatgcacaaataatcttcac

SEQ ID NO: 899486 - DNA, 120 bp, Artificial Sequence
  ENSG00000231971_3 (sequence is synthesized)
acacaaccatcaacacatggaaagactgcaggacggccagatcccaagctaacaaacaggggaagatgatgtttcaaatgatcatctgaatgctgggtttccaccttccaccaggaagtc

SEQ ID NO: 899487 - DNA, 120 bp, Artificial Sequence
  ENSG00000231971_4 (sequence is synthesized)
atatggttgttcaacagtttcgtatctgccaaacctgagaaaattcttcataaaatttcagagcttttgagcctctttgaagtggcaatatccacaggggacccgatgtgctcagctaac

SEQ ID NO: 899488 - DNA, 120 bp, Artificial Sequence
  ENSG00000231971_5 (sequence is synthesized)
attatgatacaaacagaaaatgtaacagtggagtgcagaaaatacaaaaaaaaggaaaaaataaatagaaaatcttcaaagaggcaatctgtttaaatcttcaagaactggaaacagtaa

SEQ ID NO: 899489 - DNA, 120 bp, Artificial Sequence
  ENSG00000231971_6 (sequence is synthesized)
ctcatcaaatctacaacttgggaggaggtccgatgaaatccctggaagctcacattttttataaatgaagagttaattaccggtgggaacaatgagaacctctgtggttcttcctgatgc

SEQ ID NO: 899490 - DNA, 120 bp, Artificial Sequence
  ENSG00000231971_7 (sequence is synthesized)
ttggatcctcccagacctctgtttccagtctccttctccacaacctggcctatgcgatgcaagtggtctaactgatctccgcctagggaaggatccttcggcaacttgccgacaagagaa

SEQ ID NO: 899491 - DNA, 120 bp, Artificial Sequence
  ENSG00000231971_8 (sequence is synthesized)
gcagcgatgcccgaggcaggtccaaaggagcactgactgcgtgggattgattacactggaggaacaaaaggtcctgtggctacacaagtttgaaaagcagaaggtacaatcattgtattt

SEQ ID NO: 899492 - DNA, 120 bp, Artificial Sequence
  ENSG00000231971_9 (sequence is synthesized)
ctggcagacttttcaaagactttaatatatgaatccctcatatgaatctcctggaggattatataataggcagatctcccagccattttcactgaacagttcttagaattggtatccttg

SEQ ID NO: 899493 - DNA, 120 bp, Artificial Sequence
  ENSG00000231971_10 (sequence is synthesized)
aaaaatttcacctaaccactcaatatggtagccactagtcctgggtggctattgagcacctgaaatttgcctagtctgaattaagacacattctaagaataaagcacactgtatttcaaa

SEQ ID NO: 899494 - DNA, 120 bp, Artificial Sequence
  ENSG00000231971_11 (sequence is synthesized)
ggcagtacaaaaataaaaaagaatgtaagctgtctcaataataatttttgtattgaatacgtgttgaaatgatgttatttttgatatattgagtgaaataaattgtattgctaaaatgaa

SEQ ID NO: 899495 - DNA, 120 bp, Artificial Sequence
  ENSG00000231971_12 (sequence is synthesized)
catggaaagactgcaggacggccagatcccaagctaacaaacaggggaagatgatgtttcaaatgatcatctgaatgctgggtttccaccttccaccaggaagtcatatgaaaaagaaaa

SEQ ID NO: 899496 - DNA, 120 bp, Artificial Sequence
  ENSG00000231971_13 (sequence is synthesized)
actccctcattagcatctcatcctaaggacaccttctacctccttgtcctctaagcaatgcttttcaaaccctacagaccagtgcctgcatcagaataatgaggaagggcttttggaata

SEQ ID NO: 899497 - DNA, 62 bp, Artificial Sequence
  ENSG00000231971_14 (sequence is synthesized)
gagaagagaggtccaaactgaaatctgaggagcctcaacattcagaactcaaacacctgagg

SEQ ID NO: 899498 - DNA, 63 bp, Artificial Sequence
  ENSG00000231971_15 (sequence is synthesized)
gaccagcctggccaacatggccaaaccttcctactctggaggctgaggcagaagaatctcttg

SEQ ID NO: 899499 - DNA, 120 bp, Artificial Sequence
  ENSG00000231971_16 (sequence is synthesized)
agaaaaagaaaagaactcggtggagcacaagtagctgagtaatgccccagaagccggcatcattgttggacagctcagatgttcaggatgtttcattttgagcctacctcattggaattt

SEQ ID NO: 899500 - DNA, 120 bp, Artificial Sequence
  ENSG00000231971_17 (sequence is synthesized)
gagcaagtctgttccttcaagtagatgaaaagctccctgcatgtcttccattggacttctcccctttagcttaaaaatatccacagtcctgaaacatggctcagaagcagatattaccca

SEQ ID NO: 899501 - DNA, 120 bp, Artificial Sequence
  ENSG00000231971_18 (sequence is synthesized)
cactgtgaagaatctgatagtcgaactgaatgaagccaagtccagtctttacggaaaaatttacacaacacttccagcagtgacctgagaagctacgtattgacacggcgctaccacggg

SEQ ID NO: 899502 - DNA, 120 bp, Artificial Sequence
  ENSG00000231971_19 (sequence is synthesized)
ggagttgaacaatgagaatacatggacacgggcagtgacctgagaagctacgtattgacacggcgctaccacgggtggaggagcctgcattgctgaatcacaggatgaaggcgaatccct

SEQ ID NO: 899503 - DNA, 120 bp, Artificial Sequence
  ENSG00000231971_20 (sequence is synthesized)
ccggatcctgaaatatatcttttgatagaaatgactctggtactttccgcaacttactttctatggagcactttcctgaaacaagatttgtgtttaaatattcctccttctacaaagtat

SEQ ID NO: 899504 - DNA, 120 bp, Artificial Sequence
  ENSG00000231971_21 (sequence is synthesized)
taaacagtagtaagttctgcaacgttgacaatggaaacctggcaatgtgcccttgtttgactattaaggaattgcttccaagtaccacagggccttgaagaccaaaataacacaattacc

SEQ ID NO: 899505 - DNA, 120 bp, Artificial Sequence
  ENSG00000231971_22 (sequence is synthesized)
tggaaggtgaacaatggcaacttatcaggctaatatttatgctaacaattgtcacaaccataatggaggaaaaaaatattttaaggacaagaatgtcacttgagaataagtgaacacccc

SEQ ID NO: 899506 - DNA, 120 bp, Artificial Sequence
  ENSG00000231971_23 (sequence is synthesized)
ctgtgacctggcatttcttggaagaaaggaaggtgctgtgacatgcccctgtcattctgaggtcctctggaaagggctgtcgttcacagttgcctgggcaaggctgagcaggacgcacgt

SEQ ID NO: 899507 - DNA, 120 bp, Artificial Sequence
  ENSG00000231971_24 (sequence is synthesized)
ttggtgactcaaaacatgccgttaagagtaactagggtggaacgatgcatagccaccatttcaattatgttgggctatcaaaactttcttaggcaaaagattaaacatgtttttcaccaa

SEQ ID NO: 899508 - DNA, 120 bp, Artificial Sequence
  ENSG00000231971_25 (sequence is synthesized)
gaaggtgaacaatggcaacttatcaggtgtggtaaacacttttttcccaagaagatcctttattccttctgaatgcacatcaagaaggagtgaatacataaatcacatatttgttaataa

SEQ ID NO: 899509 - DNA, 120 bp, Artificial Sequence
  ENSG00000254034_0 (sequence is synthesized)
tttctctgcttgggcagaactcatctatttgtacttctccaacaaatacatatgcatccattatttccagagaagagaggaagggaagtacaggacagtgattcttagcagcagatgtgt

SEQ ID NO: 899510 - DNA, 120 bp, Artificial Sequence
  ENSG00000254034_1 (sequence is synthesized)
aaggggcctcagactgtttctcgtgtgcgagttatcaactgcaaggaaaccagaatggtgagaaaggaaccaaggcatcaatggatagcacagttagcttaaaatggcaatcattttata

SEQ ID NO: 899511 - DNA, 120 bp, Artificial Sequence
  ENSG00000254034_2 (sequence is synthesized)
ctttagaggatccaggaaccttctaaaatggtatatacaattctgtgtgtgcctgtgtaaacttttcttttttcttttttttctttgagacagctctgttgcccaggctggagtgcagtg

SEQ ID NO: 899512 - DNA, 120 bp, Artificial Sequence
  ENSG00000254034_3 (sequence is synthesized)
acaagagcgaaactccgtctcaaacaaaacaaaacatataacacagagcaaactctagaaacattatctctgaaccttggccattagcatcttcttcctttgaatgttaaatgaccacta

SEQ ID NO: 899513 - DNA, 120 bp, Artificial Sequence
  ENSG00000254034_4 (sequence is synthesized)
aaatgaccactaacaaacaaacagaggcagtgctacagtacgaatgtcgaatgtcaccgagttggaaccattgtaagatacctcatgatcaggtcagactggatgtttgtaattttagct

SEQ ID NO: 899514 - DNA, 120 bp, Artificial Sequence
  ENSG00000254034_5 (sequence is synthesized)
cttaactcagagacatttctcgttgattcccagggctactgtgatgaagcaggcttaaaaggcttttagtgacactccaaaccaagctgacacctcaaacaactccatttcaccactaaa

SEQ ID NO: 899515 - DNA, 120 bp, Artificial Sequence
  ENSG00000254034_6 (sequence is synthesized)
gggcaaatgtatagattactggtgtcaatgaccactcaatgagtgctgcaaacgggaacattttgttcaaatacacacacaaagaaaaagccatcttgtccaagtaccaacttaaaatac

SEQ ID NO: 899516 - DNA, 120 bp, Artificial Sequence
  ENSG00000254034_7 (sequence is synthesized)
cttacaaagttgaaagtcacaaacaagtgattcttcttcttggtcactttgcaagccggggacccctagccagcaacacccaactcgggcctcactcagccacattggtgtgctgaggtc

SEQ ID NO: 899517 - DNA, 120 bp, Artificial Sequence
  ENSG00000254034_8 (sequence is synthesized)
agtaatacatggctttttggcagatgatgttttgctccagttttctttcactccttggctaaggaacttaatactcaatttcaacagcctgggtcactcactgcctttggaacatctccc

SEQ ID NO: 899518 - DNA, 120 bp, Artificial Sequence
  ENSG00000254034_9 (sequence is synthesized)
ggacatctctcccttcccctataccaagttgtccctttaatatgtgccctggggcatctaatactttctatctcagcactgatcactccaaactgaaagtactatttacttgtctgtgtc

SEQ ID NO: 899519 - DNA, 120 bp, Artificial Sequence
  ENSG00000254034_10 (sequence is synthesized)
ccccacaggactctgaagctccgtgaaggcaagaactttgtttccctgttgcctagcaaaatgcctggcatacagcatttactaaacaaacatttgctgaacagatgaatatataaaaag

SEQ ID NO: 899520 - DNA, 120 bp, Artificial Sequence
  ENSG00000254034_11 (sequence is synthesized)
aggaggcgggagggcatgggcagggcaaggcagcatgcatatgccaaatgaatgtacttggccaggatggagagtgtactttgggccggagaaaggagttgagtaaagagagtgcaattg

SEQ ID NO: 899521 - DNA, 120 bp, Artificial Sequence
  ENSG00000254034_12 (sequence is synthesized)
gtaaagggccaaaaaggtcaggatcatgcccactgacagagcaggcagtgagaagccaacagtctgaagcagcaaatgacattctggtaacagcaattacaggagatttcaccaaaggag

SEQ ID NO: 899522 - DNA, 120 bp, Artificial Sequence
  ENSG00000254034_13 (sequence is synthesized)
gtgggtgagatcaaacagacagagaacatttttaaggcccatatagcagtccagacaggagaaacaaattataatgtcatggcaggtgaggagatggaagcagcagatccacttgacgga

SEQ ID NO: 899523 - DNA, 120 bp, Artificial Sequence
  ENSG00000254034_14 (sequence is synthesized)
tcacctgcaccctggagaaaagttctgcatgtacacatcttctccccctattataacatctgtaaatttcatgtttctcctatagcctagttaactctgttccccaaagtaggggtttag

SEQ ID NO: 899524 - DNA, 120 bp, Artificial Sequence
  ENSG00000254034_15 (sequence is synthesized)
gaaatatcactaactatgtgaggtaatgaatgaacaactaaacaaatgcacataaatggtatacgttacttctgagagaaggaaatattctgcagagagaagctgtacagccagataaga

SEQ ID NO: 899525 - DNA, 120 bp, Artificial Sequence
  ENSG00000254034_16 (sequence is synthesized)
caaacaagatagcaagcgtggaaagaaacaggtggagggccagtaaattgtccagtctccccctccttgcttcatggaaccaacctccaactgatccatggactattagtagctcagcct

SEQ ID NO: 899526 - DNA, 120 bp, Artificial Sequence
  ENSG00000254034_17 (sequence is synthesized)
acctgccaccctagcccccaaatatattaggtttaacttttactgtagagcttccagatcagagcatagtattgcagaaacagcaaaacatttggggaaattcagggggaagaaatcatt

SEQ ID NO: 899527 - DNA, 120 bp, Artificial Sequence
  ENSG00000254034_18 (sequence is synthesized)
aaaacatttggggaaattcagggggaagaaatcattacaaaaaaacaaaacaaacctacatagcaactgccttagttcttaaaaatttgattcggctgggcacggtggctcacgcctata

SEQ ID NO: 899528 - DNA, 120 bp, Artificial Sequence
  ENSG00000254034_19 (sequence is synthesized)
gaccttcaaagggaaaaggatcatgaagtacaggtgtgggaattgtgccagctctaggagacattctcataggccaatcaccgccttccaatcccatggataagaaggaattcccacagt

SEQ ID NO: 899529 - DNA, 120 bp, Artificial Sequence
  ENSG00000254035_0 (sequence is synthesized)
cttcagctgggttaatccccaaagaaccagtgtttcctagaaagagcagttcattccataccttgctcttgtagtcctaatggccatgtcgacatacccagctgtgacaagatgaaggac

SEQ ID NO: 899530 - DNA, 120 bp, Artificial Sequence
  ENSG00000254035_1 (sequence is synthesized)
cacgatttgggactcttcagggacagacttggccacctggtgatgtgccaccttcagcagctctgtcttcacacgtccagcctgcgcctgcttcatgtagtacacaagactgctctggta

SEQ ID NO: 899531 - DNA, 120 bp, Artificial Sequence
  ENSG00000254035_2 (sequence is synthesized)
tgaagatgtaatgggtggagcctcagcagccatcttgtgactatgagaccataagcaggaagacccaaggcaaccacagggaatggtggaacaaaggaatggacagagcccagggctttg

SEQ ID NO: 899532 - DNA, 120 bp, Artificial Sequence
  ENSG00000254035_3 (sequence is synthesized)
agagcgcattcactcactgccccatgcctaaagtcaccaactctcagacctcctgtcttgtgatgagatgcctttatcgctaaaactactctcagtccaggctgccacctgcacccagat

SEQ ID NO: 899533 - DNA, 120 bp, Artificial Sequence
  ENSG00000254035_4 (sequence is synthesized)
gcaacgtagctgaaataaaaggcgtgatggtatatatccccctaaggctaagaggccctagcagccagggctcagcctttccagggtctgtgtttcataaaatagccctgaaggatgtca

SEQ ID NO: 899534 - DNA, 120 bp, Artificial Sequence
  ENSG00000254033_0 (sequence is synthesized)
ggaagcatgagaaggatacagtacgtttcctctgaagtcgaaagagaagaacatcaacaggattactcacagaagttgctctgcaacctctaagtttgggaacctgataaatataaagtg

SEQ ID NO: 899535 - DNA, 120 bp, Artificial Sequence
  ENSG00000254033_1 (sequence is synthesized)
ctgacttcaagaatgaagccgcggaccttcacggatggaacaccaggctatagtttcaggaagccagacttgacccagacttgaccttgcaaaaaatagcaaccccttcagaactggtaa

SEQ ID NO: 899536 - DNA, 120 bp, Artificial Sequence
  ENSG00000254033_2 (sequence is synthesized)
agcaatgagaaagaattgctcagaacttcatggagctgagccattcacccatcctggaacatccaccttcctctggaattatttttttaatgttttcttccttcttgtttaatccactaa

SEQ ID NO: 899537 - DNA, 120 bp, Artificial Sequence
  ENSG00000272954_0 (sequence is synthesized)
aggatagaaaggaaatctcaggataagtttgttggcctcatttgaagaaaagtaccttatagaagagccataagaatgacgtggctttcattcactcagcagatacattgggaccatctc

SEQ ID NO: 899538 - DNA, 120 bp, Artificial Sequence
  ENSG00000272954_1 (sequence is synthesized)
gaacccagcctgggggatggaggactgcctggaggtggaggccagacctgaatgagtcacacaggctaagtggggagtcaagaggtgcaggcagttaggccaccacacctggccgctcat

SEQ ID NO: 899539 - DNA, 120 bp, Artificial Sequence
  ENSG00000272954_2 (sequence is synthesized)
ctttttcagcattgaataatattccattgcctggatatgccacattttatcattcgcccaatgaaggatatcctggttgcctccaagttttgcaattatgaataaagcagtataaacatc

SEQ ID NO: 899540 - DNA, 120 bp, Artificial Sequence
  ENSG00000272953_0 (sequence is synthesized)
gtccgcgtttggagctgggcgtgcgggtctcagtggcggcctcggcattcggggcggcgggaggcgcccggtgcatccccgggacggccaggagcaaagacggagaggagaggggggtta

SEQ ID NO: 899541 - DNA, 120 bp, Artificial Sequence
  ENSG00000272953_1 (sequence is synthesized)
gagaaaggaggtattgtgtctgtgtgccttaggggaggaggggactgcaggaatcgaataaacgcagtcgagctgcgcggggctgctggaagcccaggcgggggaagggggccgtgtgtg

SEQ ID NO: 899542 - DNA, 120 bp, Artificial Sequence
  ENSG00000272953_2 (sequence is synthesized)
ggtcttgtgtgttcctagttaagccctcccacgcccgaggccccatcgcttcctctccaccctctttacccaccaatattccaagcccagatcctaattccccaccgcattaccccgccc

SEQ ID NO: 899543 - DNA, 120 bp, Artificial Sequence
  ENSG00000272953_3 (sequence is synthesized)
tggatttggggaatgtttttctttattttaatatagctcaaggaaaaaatacgtatatcttgagagatttggggtggggaaaacaaaagccttgcggagtagaaaaaacaaaggcttatt

SEQ ID NO: 899544 - DNA, 120 bp, Artificial Sequence
  ENSG00000272953_4 (sequence is synthesized)
tttataaatgtttaatgttttcaccccctggatgctccgagacgccgtaattgtgacggcggggtacgtgtgccataaatcatttagttgctaataaaaattctgcctgtttgccctgga

SEQ ID NO: 899545 - DNA, 120 bp, Artificial Sequence
  ENSG00000268112_0 (sequence is synthesized)
cgttctccgtttgccgtgctgtcttggggggcagcatctcggggtccaccatgcagatgctggatgggtcaggcagtggtggggggaccttgagggggtcaggcaaagggtcgtggcgag

SEQ ID NO: 899546 - DNA, 120 bp, Artificial Sequence
  ENSG00000272950_0 (sequence is synthesized)
ccgccatggtgttccagggaaaccagcttccgagctgtacttcagagccctctgcaaacagtgctacctagacaaggtggggtcagaggctctcagataagcagaacttgcagggcttgt

SEQ ID NO: 899547 - DNA, 120 bp, Artificial Sequence
  ENSG00000272950_1 (sequence is synthesized)
gacaggtatataacctagtccttaagccctgtgggattttacagcgctctgacggagtaactcgatggctaaacacggggagtaaagacagaaccatcccagcactcagggctccaccct

SEQ ID NO: 899548 - DNA, 120 bp, Artificial Sequence
  ENSG00000272950_2 (sequence is synthesized)
agctgccttcacacagccaagagcataattccattaatatgccattttatagcccctcagtcatttcagatacaaactcagttactttcacatctattttaaacccacaaacaattcctc

SEQ ID NO: 899549 - DNA, 120 bp, Artificial Sequence
  ENSG00000272950_3 (sequence is synthesized)
attggggatgaaatataaacaacaacaaaacccgctccagttatttagaaaatcagacactctattcttggcaaaggagatctacttaaaatacataaataaataaacatctaaaaataa

SEQ ID NO: 899550 - DNA, 120 bp, Artificial Sequence
  ENSG00000272958_0 (sequence is synthesized)
aaactccatctcaaaaaaaaaattataatatacatatacaatggagtattacacagctgtgaaaaagaacgaggaagctatttatgtactgatgtataaagctctctaaggtgtgctgtt

SEQ ID NO: 899551 - DNA, 120 bp, Artificial Sequence
  ENSG00000272958_1 (sequence is synthesized)
catgtatccaaaaattgagaggaagcatatatatatatatctgattttgccactgtaagcatttaaaacaccagtggaatatccaagaaattaagaagaggggttacctattggaggaga

SEQ ID NO: 899552 - DNA, 120 bp, Artificial Sequence
  ENSG00000272958_2 (sequence is synthesized)
gaaccaggtagatatatggcaggtgtgggagggagagctctcactaaatatttttatgctttaaatatttttaaccgtatgtgtattacctattcaataataaatgcacccatttgttag

SEQ ID NO: 899553 - DNA, 120 bp, Artificial Sequence
  ENSG00000241479_0 (sequence is synthesized)
gattggtgagtaactctgcatagctggaatataggcataaaagagaaggcaagaaatgaagctgaaatgggatatgtgcccttgactaatgaaggttcctccttaatctgcgaagtttct

SEQ ID NO: 899554 - DNA, 120 bp, Artificial Sequence
  ENSG00000241479_1 (sequence is synthesized)
gcaaagcttgctgagagacacccacagagtggaaaccaggcagaagagaagactcacatgcccacctcaccggccaaagaacccttgagagcaacagcacaacggatgtcagagccagga

SEQ ID NO: 899555 - DNA, 120 bp, Artificial Sequence
  ENSG00000241479_2 (sequence is synthesized)
atcgtgaaaacaacttactgaagcttggagttggaacaattctagcttattgaggagctcttcaaattagaaggcaacatgttccactgatgagaaaaccggcaaagacaggttaggcag

SEQ ID NO: 899556 - DNA, 120 bp, Artificial Sequence
  ENSG00000241479_3 (sequence is synthesized)
aagaaaagagagatgagacaacggactgtgccaacaaactaaaattttacctgctgctatggataaaatagctttctttttagaaatactcatgttaataaactcctacatgcgacataa

SEQ ID NO: 899557 - DNA, 120 bp, Artificial Sequence
  ENSG00000269667_0 (sequence is synthesized)
agatgaggaaatcgcccgaggatggatccgacttgtggtttcaatggagccctcattcttctcttcacttaccctctccgtgaggaggaagccagtgcacatcaagcgtttcctgtgtag

SEQ ID NO: 899558 - DNA, 120 bp, Artificial Sequence
  ENSG00000269667_1 (sequence is synthesized)
tgcactggtgagggccagtggtgccacaccaatgtcccaattcaccttgggaacgtccttgagcgcatttctttttgtctgtagaagtaaaagagtagaactgaatgccgaagccagcaa

SEQ ID NO: 899559 - DNA, 120 bp, Artificial Sequence
  ENSG00000269667_2 (sequence is synthesized)
gctgttggaaccttggaaacgcagagggcatgaaggctgagtccggggtcctacagtcagaggctcgcattcaaatcttgcctctgcctgtaattgccgtgggaccctagcaggtgactt

SEQ ID NO: 899560 - DNA, 120 bp, Artificial Sequence
  ENSG00000269667_3 (sequence is synthesized)
agccatgccctgcctgggtttacctacctgtaaagagcccttgtaaggatgaaagtaggtggcacagaccaagcatctgtacctggcagaccagtccttaataaacaggaattattgtta

SEQ ID NO: 899561 - DNA, 120 bp, Artificial Sequence
  ENSG00000234275_0 (sequence is synthesized)
ggcgaccaccaccgaggatgggaaaggatgacattggaagggaatttgcagccctcctgatctccagatgaagagcttatggatatgaaaaggctttcccaaagaagccatggagtagaa

SEQ ID NO: 899562 - DNA, 120 bp, Artificial Sequence
  ENSG00000234275_1 (sequence is synthesized)
tccaggtctcccagttcgtgatcagtcttccatctccctggtgggccagagatatttcaagttggcagagtcaagcatgagcaaggagatggtgtggggcagagtgtgaaccatatattc

SEQ ID NO: 899563 - DNA, 120 bp, Artificial Sequence
  ENSG00000234275_2 (sequence is synthesized)
agcttccatggatactgaaagatcagctgacacgtgccttcaaggctaaaatgaatgtggatatcaatagtgatgagaagaaatggtctaaaataaagaaacagcatgtgcaaaagtgaa

SEQ ID NO: 899564 - DNA, 120 bp, Artificial Sequence
  ENSG00000234275_3 (sequence is synthesized)
gattatgatgctatgtcagttaccttcaggacccaattgtagccacttcagctggcccaggctttcccgaaatgtgaagacagcaaactcccactcttcctcctgcagactggtggcaaa

SEQ ID NO: 899565 - DNA, 120 bp, Artificial Sequence
  ENSG00000234275_4 (sequence is synthesized)
aacacaaagtccacttgagaccatgaagtccaaggatcttttcttattcctggaatatactaggaaaaatacaggtagaaacatcacaaagaaatgtcacaataaattaaattgcttcaa

SEQ ID NO: 899566 - DNA, 120 bp, Artificial Sequence
  ENSG00000234275_5 (sequence is synthesized)
ggcaaagggagaggactgcaaatagaagagaactgtaggattctgcaatggaagaagataccaaagcccagctgcagcagaactaacacatctactcccaacattgagccctccacttgc

SEQ ID NO: 899567 - DNA, 120 bp, Artificial Sequence
  ENSG00000234275_6 (sequence is synthesized)
agttacctcatttgatcctgatgacaacccttgggtaggtattgtggttacctccattctatctctggaagaactaagaatggaggttaagtaactttcctgaggctccttagctaagtc

SEQ ID NO: 899568 - DNA, 120 bp, Artificial Sequence
  ENSG00000234275_7 (sequence is synthesized)
tctaggactggaatggagccaggcagcctgactcaagagccccactgagtgctcctccacagaggacacagcttctgcacccctgcagggagaggccccaaccacaggattgatatgggg

SEQ ID NO: 899569 - DNA, 120 bp, Artificial Sequence
  ENSG00000234275_8 (sequence is synthesized)
aaaagtggccttatttggcttttaatgaattactctacctcccttgatttcaaaataaaggagaaggcttagatcttgagaatccatttggattcagtgtaagaataaccatagtttgta

SEQ ID NO: 899570 - DNA, 120 bp, Artificial Sequence
  ENSG00000234275_9 (sequence is synthesized)
tcctggctgggctgcttaccaggttcaagataaaaagaaacaacaatgaatccaacaaatcaacaaagcacaaagtccaacaacaaaaaaacaaacaaagaaaagaaaaagaagggcaaa

SEQ ID NO: 899571 - DNA, 120 bp, Artificial Sequence
  ENSG00000234275_10 (sequence is synthesized)
atgccagcctgtttgtgctggagatggtgatggtgatgatttcttgtctgggtggaagcaggctcagcgaggcccagggacacttccctttgcccgcccacccatgtatttgagcagaaa

SEQ ID NO: 899572 - DNA, 120 bp, Artificial Sequence
  ENSG00000234275_11 (sequence is synthesized)
aggtactcttgctaagacagccctgcttctctgcaggtttcctcttacacatggattctattcattcaccgtttattgagctctgtgccaggcactgtgctagatgccggagctcctgcg

SEQ ID NO: 899573 - DNA, 120 bp, Artificial Sequence
  ENSG00000234275_12 (sequence is synthesized)
tgcaatcaacgcctgaagataaaagccacagcactcaaataacaatcctcgttagagtgacaaacagactgcagctcagggaagtctaacgttttaattctcggaaacaaccccttcctg

SEQ ID NO: 899574 - DNA, 120 bp, Artificial Sequence
  ENSG00000234275_13 (sequence is synthesized)
cttttacatcatggaaaaccatgccatacttgattgctcaataaacatcctgaagactggaaaaaattatgaaaaagaaaagaatgtcttctcagtggagagagagaggcgtcatttatc

SEQ ID NO: 899575 - DNA, 120 bp, Artificial Sequence
  ENSG00000234275_14 (sequence is synthesized)
tgttggataattcaagatttcaagatgaaagtcacactgccctccaggagcttccactctagcagagggtgggagatagaccagcagttacagtgcagtgtgctgaggactgagacaaca

SEQ ID NO: 899576 - DNA, 120 bp, Artificial Sequence
  ENSG00000234275_15 (sequence is synthesized)
atcatggctacaaggatcacaaccagctctgccacttgccctgtcggttcatcatttgcaactgtacccagtgcttccagcttgggcctctgcatctgccagcctagggggttgggatct

SEQ ID NO: 899577 - DNA, 120 bp, Artificial Sequence
  ENSG00000234275_16 (sequence is synthesized)
ttttaattcatggacagtgttaggtctggtaagagtggaccctcccttccaagaattctgcttcaacacaaagtttagaaataaggctgccaaaaaaaacagatctttccctaacacaga

SEQ ID NO: 899578 - DNA, 120 bp, Artificial Sequence
  ENSG00000234275_17 (sequence is synthesized)
aatcagaagtttaacctaagaaaacagtgataagaactcataattctcttaataatgaatataccactattgaggcatgcagtttactgatttagaacaggtgcctggaacagactagaa

SEQ ID NO: 899579 - DNA, 120 bp, Artificial Sequence
  ENSG00000234275_18 (sequence is synthesized)
gaacttgaaatgagaaagtcttgattaaaccctgaaagtgtgcatggatttcttacacacaaagaaggcatcagggcactgtttctaggtctggggagaataaaagtggcctatttttca

SEQ ID NO: 899580 - DNA, 120 bp, Artificial Sequence
  ENSG00000234277_0 (sequence is synthesized)
gtggagtagggtgggcctctaatccaacaagactggtgtccttaaaagaagagggaaatatggacacagacatagacacagaggaagatgatgtgaagacacacagggaaaacatcatgt

SEQ ID NO: 899581 - DNA, 120 bp, Artificial Sequence
  ENSG00000234277_1 (sequence is synthesized)
aaagacaggcttggagtggtgcacctacaagccaacacagaatcacagcatctcagagttggaaggaattcttcatatgaccacattgattttttttttcctgttggtcggcatcagatt

SEQ ID NO: 899582 - DNA, 120 bp, Artificial Sequence
  ENSG00000234277_2 (sequence is synthesized)
tgtgaaggcccctggaagattggatggtgcctgcctatacggagggcggatcttcccctcctcgtccactcagactcacatgcaagtctcctctagaaacacccttgcagacacacccca

SEQ ID NO: 899583 - DNA, 120 bp, Artificial Sequence
  ENSG00000234277_3 (sequence is synthesized)
ttttgtggataagaaaaatgagaaccagagcgatcaagggcttgctcaaaagtactcaaccagttaatgtcagagctggcacctgaactcaggcctctacaactctaaatgttttcaatg

SEQ ID NO: 899584 - DNA, 120 bp, Artificial Sequence
  ENSG00000234277_4 (sequence is synthesized)
atagcagaattgcctctaatggcaaaacattgtagaatcatattgatgtttcagattatattgccagtcgtacttcgttgagctatgcttggtaatgccactgccatcttggaaagaaaa

SEQ ID NO: 899585 - DNA, 120 bp, Artificial Sequence
  ENSG00000234277_5 (sequence is synthesized)
tagatgctgaagttccccatagatgctgaacactcagaaagtgccaatagttgcatcgatttgattgtatctgctacctcattccctctgaaacacctgcaaataaaggaaaataactaa

SEQ ID NO: 899586 - DNA, 120 bp, Artificial Sequence
  ENSG00000234277_6 (sequence is synthesized)
gatgaaaaaaaaaacacacgcatttcctaatgaagaggcagccagatgcagcctctgagccctgactgcacagtgtgacagtcactcaacccaacacagctctcttgcctttgctgcaac

SEQ ID NO: 899587 - DNA, 120 bp, Artificial Sequence
  ENSG00000234277_7 (sequence is synthesized)
ctcaacaccctgcgtcctgccaaatctcttcccatttcatcagtccatctatgctggtgtccagccattccagcccaccatggcatttaaaaatctttccagctctctgtggaagatctg

SEQ ID NO: 899588 - DNA, 120 bp, Artificial Sequence
  ENSG00000234277_8 (sequence is synthesized)
agacttgagaaagagactgttgctcagggctggacaggaaggaagtatgcattcctggctcccagaacagaacagcaatgtgggtgacccttcgtcccctccccaaggcgtccccttggg

SEQ ID NO: 899589 - DNA, 120 bp, Artificial Sequence
  ENSG00000234277_9 (sequence is synthesized)
ccgacacaaaaatagattctatcctccttggttcgtctccacctccctcgggaaagaagacacaggcttcgagtgagtcaacagtattatcggggcttgactgtctttcaggaatgacca

SEQ ID NO: 899590 - DNA, 120 bp, Artificial Sequence
  ENSG00000234277_10 (sequence is synthesized)
gatgttgggaagaggataatgtgccatttcctttaacaaatagtccgggcatctgtgcatttccttttgagccagctcttcaggagactgtgctgctgtgacagggaaggacgaatcacc

SEQ ID NO: 899591 - DNA, 120 bp, Artificial Sequence
  ENSG00000234277_11 (sequence is synthesized)
cagccctccattaagaaaatatttctgtcctttgtatgcatgagtgacaccacgagaagacagcatagggagtggttacaagcaaagaatttagagacaaaataaatgctctaagggaaa

SEQ ID NO: 899592 - DNA, 120 bp, Artificial Sequence
  ENSG00000234277_12 (sequence is synthesized)
aagacaagtagccaaggaacgctgggagagggcttggaggaagcaaattgttcatccattcccccaaatcagtggttctcagtagaaaaccaacatgagtaacatttgcctgggaacttg

SEQ ID NO: 899593 - DNA, 120 bp, Artificial Sequence
  ENSG00000234277_13 (sequence is synthesized)
tctaccaccccagccctactgaaactccaggggtgaagcccagcaatctcctttgacaagccttccaggagattctgatgtgagctcaagattgagaactactgatccagatagatctta

SEQ ID NO: 899594 - DNA, 120 bp, Artificial Sequence
  ENSG00000234277_14 (sequence is synthesized)
gctggtcctagggcttcccagaaagcatttttaaaaaagcagagattctcctccacaggaggcctacatgctgccacctctgtggccaccatgtctctagtgatccctgaagagttccag

SEQ ID NO: 899595 - DNA, 120 bp, Artificial Sequence
  ENSG00000234277_15 (sequence is synthesized)
catattctgcgagtactcaacaccagcatcggtgggcggtggaaaaaaagcctttgccatcactgccatttaggctgtgggtcgaagatatgctcatgcggtgttgaggaaagcagactt

SEQ ID NO: 899596 - DNA, 120 bp, Artificial Sequence
  ENSG00000234277_16 (sequence is synthesized)
tgaccacaccaagagggcaggagaactcactgaggatgaggtggaacgtgtgatcaccattatacaggatccatgccagtacaagatcccggactggttcttgaacagacagaaggatgt

SEQ ID NO: 899597 - DNA, 120 bp, Artificial Sequence
  ENSG00000234277_17 (sequence is synthesized)
aaagtctggaaaatacagccagatcccagccaatggacaacaagttctgtgaccacctggagtgattgaagaagtttcaggcccatagagggctgcgccacctctggggccttcgtgtct

SEQ ID NO: 899598 - DNA, 120 bp, Artificial Sequence
  ENSG00000234277_18 (sequence is synthesized)
tgaggccagcacagcaagaccactggctgccatggctgtactacgggtgtgtccaagaaggaataagtctgtaggccttgtctgttaataaatagtttatataccaaaaaaaaaaaaaaa

SEQ ID NO: 899599 - DNA, 120 bp, Artificial Sequence
  ENSG00000234277_19 (sequence is synthesized)
aagcaagctcagataaatgactaggaagcaggaagatgcatctgatggcttctctgcatgaagaccaaataaaaggaaccttgtacgtggactctttttaaaaattaaaatttattttgt

SEQ ID NO: 899600 - DNA, 120 bp, Artificial Sequence
  ENSG00000234277_20 (sequence is synthesized)
ttcttgcatctaatatagaaataattcatattcattgtggaagatctgtgggaaaaaaaatagaaagaaaaaaagactcacctgtcatctaccaaacaccaatagacacaattgaaatga

SEQ ID NO: 899601 - DNA, 120 bp, Artificial Sequence
  ENSG00000274659_0 (sequence is synthesized)
tggaggattttagctgcggatctagatccattagaaggtggtgacatccatttggtcggttatgactaacccttagaagaatagcatagcgcagcacagcacaacagaaactatcagaat

SEQ ID NO: 899602 - DNA, 120 bp, Artificial Sequence
  ENSG00000274659_1 (sequence is synthesized)
gcatcaaatgtcacaaaggctctcctaccaggatgacaaaaatcggcaactgatgctcccagaggaggacaagagggacatccggcaatctccaaagaggggtttcctccgctctgcctc

SEQ ID NO: 899603 - DNA, 120 bp, Artificial Sequence
  ENSG00000274659_2 (sequence is synthesized)
actaggtcaaagagcctccttccacctggaatgtctgaagtgacagaaggaccgagggggagacatctctcagaagacagtcctgcccttgcatctggttcatcatcaggtagctcacac

SEQ ID NO: 899604 - DNA, 120 bp, Artificial Sequence
  ENSG00000274659_3 (sequence is synthesized)
ttttggacaggccactgtcacctgccagcaggccagacagtccccagggtgatggacaaatcctgaagacatcagtgggtcttccctgtctcgatggctggcacgtccaggagtccagga

SEQ ID NO: 899605 - DNA, 120 bp, Artificial Sequence
  ENSG00000274659_4 (sequence is synthesized)
gaaacaggtctttccatgcccaagttggtacctttttgggtgagaacactctgaaaatgaagactctgtaagttattttgagccacacaagatcagagatagccatgtccaagcatattt

SEQ ID NO: 899606 - DNA, 120 bp, Artificial Sequence
  ENSG00000274659_5 (sequence is synthesized)
gtgtctgtccacaattgcaggcttttattcatttatttccataataaaagtcgtgagctacatgaagggtccaaggagacaattctccatagagcctatttctacaaaggaattactcat

SEQ ID NO: 899607 - DNA, 120 bp, Artificial Sequence
  ENSG00000274659_6 (sequence is synthesized)
agcaagagtgctatgtacagaagtcatccaaagggacgtgtaaagtaaccaacctttggatggttactttacaccatcctttacaataggcctgacaatacacacccaccactcctaaag

SEQ ID NO: 899608 - DNA, 120 bp, Artificial Sequence
  ENSG00000274659_7 (sequence is synthesized)
gcaaagaaatagaacaaatgtttaggagaaggatagagtggaaccctggtcgtcggggtttttaacctcatcaaaccatcatagaaaaggtggcaaaggaggatgacggcatctctgtcc

SEQ ID NO: 899609 - DNA, 120 bp, Artificial Sequence
  ENSG00000274659_8 (sequence is synthesized)
ctagaggcctagaataattaaaatatatttagaaacaattcagcaaagaggccacaaaaggggcctgctgattcccagaagacctctttaaatcccaagggaggaaactacttgctgatg

SEQ ID NO: 899610 - DNA, 120 bp, Artificial Sequence
  ENSG00000274659_9 (sequence is synthesized)
gagcctgggccaattttgttttttaaacaagatctgcctctgaggcaaatgtcagcacagagaggactgggagaatggaggcaagaaaagggcatagtttgactccctctgtgtctcttc

SEQ ID NO: 899611 - DNA, 120 bp, Artificial Sequence
  ENSG00000274659_10 (sequence is synthesized)
ccagttcatggagggacgtgttcagctcactcacctacagtgaccagtgtggtggagccgctgacatctcaaagatctatttgggaaggtgagaagagtactcgttccatctgggggtgt

SEQ ID NO: 899612 - DNA, 120 bp, Artificial Sequence
  ENSG00000274659_11 (sequence is synthesized)
tgtcccagccacctcagcctagctggtgggatgtgggggtgtctgccgccctgtcccccctctgctgatgtccctcccctcaggctgtccaggtgccacctgacacaggctgctgtgcaa

SEQ ID NO: 899613 - DNA, 120 bp, Artificial Sequence
  ENSG00000274659_12 (sequence is synthesized)
aggcaggcggggaagcccaaacctcactcccagggaggcctcagccgccagagtccaggttctccagaggctacgatttgaagaggttgagggggaagataggagggaaagaagagtcct

SEQ ID NO: 899614 - DNA, 120 bp, Artificial Sequence
  ENSG00000274659_13 (sequence is synthesized)
acctttccctgtaactaagcaaagctccctcttcccactgccctccccagccccagctccctgtcctccccaacacctagtgagaaagacggtgcgtggaagggagtcccatgggcagat

SEQ ID NO: 899615 - DNA, 120 bp, Artificial Sequence
  ENSG00000274659_14 (sequence is synthesized)
gcttacacggcctctttgcgaagcttcttctgggtttaacttcattcatcaatttatttttatgtcaaagcaatgaaacgtttctttctggagccagataccaatataacaggtgaacgg

SEQ ID NO: 899616 - DNA, 120 bp, Artificial Sequence
  ENSG00000274659_15 (sequence is synthesized)
gtttctgccacatctctacattgacgggggatgcttgaaccacctccccaggacacacaccgttaaggcccaagggctggggttgagctctagataagggaattgcctacacctggaagg

SEQ ID NO: 899617 - DNA, 120 bp, Artificial Sequence
  ENSG00000274659_16 (sequence is synthesized)
gtggacactgcgtagacaaacatggagggagaaccagagtgacttccttgtgtaaaaaattgactttcttgggggagacgaaaacccagaaataatacaaggtcaacacatgcaatacta

SEQ ID NO: 899618 - DNA, 120 bp, Artificial Sequence
  ENSG00000274659_17 (sequence is synthesized)
aattcaatacttacatgctagcaataaataactggaaattttaaatgttgcaaaaattacatttataatacttctgaaaaatgaaattcttaggtatacaagattgtctactctgaaaac

SEQ ID NO: 899619 - DNA, 120 bp, Artificial Sequence
  ENSG00000274659_18 (sequence is synthesized)
ttaaaaagtgctataaacaaaatcaaagaaggtctaaataaatgaagagatattcacggatgggaagattcaacatagtaaaaatttcaattctccccagattgatctgtaacttaaata

SEQ ID NO: 899620 - DNA, 120 bp, Artificial Sequence
  ENSG00000274659_19 (sequence is synthesized)
caaatccatcaaaatcctagcataggatattttgtctatatagacaaactgatttttaaatttatatgcaaaagtgaaggtaaaaagatgaatttagtttcatttagatgaaaatactgt

SEQ ID NO: 899621 - DNA, 120 bp, Artificial Sequence
  ENSG00000274659_20 (sequence is synthesized)
gctacagtattttaagtcctactttaatgcaagagtaatcacaatcatgtggtttattgaaggaatggacacagagaccaatggaacagaatacagagtacagaaatgaatctacacaaa

SEQ ID NO: 899622 - DNA, 120 bp, Artificial Sequence
  ENSG00000274659_21 (sequence is synthesized)
tatggccaagtgatttctgacaaaggtgcaaaagtaactcaatagagaaagggcattttttccacaaatgctatgggaataatggaattttcatgtgcaaaatttgaacctcaacctgaa

SEQ ID NO: 899623 - DNA, 120 bp, Artificial Sequence
  ENSG00000274659_22 (sequence is synthesized)
attcctcctaatatcaaaattagttccaaagggtcacagatttaaatgtaacatgcaagactataaaacttttagaagaaaacataggagaaatattcaacatctagttcttagacatga

SEQ ID NO: 899624 - DNA, 120 bp, Artificial Sequence
  ENSG00000274659_23 (sequence is synthesized)
caccaaaataacaattcatatgtggaaaaacttataacatggacttcatcaaaatgtgggactcttgatctgtgaaggatcctattaagaggatgaaaagacatgctacagactgagtga

SEQ ID NO: 899625 - DNA, 120 bp, Artificial Sequence
  ENSG00000274659_24 (sequence is synthesized)
gtgaaaacatctgcaagccatatagcagacaaaagacttatatccagaatccatgaagaactctcaaaactcaacacattttaaaaaaaaacaatctcggccgggcgcggtggctcatgc

SEQ ID NO: 899626 - DNA, 120 bp, Artificial Sequence
  ENSG00000274659_25 (sequence is synthesized)
gttcagctcactcacctacagtgaccagtgtggtggagccgctgacatctcaaagatctatttgggaagatctcactctgacgcccaggctggagtgctgtggtgtgatctcactcacta

SEQ ID NO: 899627 - DNA, 62 bp, Artificial Sequence
  ENSG00000274659_26 (sequence is synthesized)
ggactacaggcatgctccaccatgcctggctaatttttttattataaggtatacacatgcca

SEQ ID NO: 899628 - DNA, 120 bp, Artificial Sequence
  ENSG00000274659_27 (sequence is synthesized)
taacctgtcatctacattaggtatttctcataatggtatcccttctttagctcccccacccccagactggcccggtgtgtgatgttcctctccccgtgtccatgtgttctcattgttcaa

SEQ ID NO: 899629 - DNA, 120 bp, Artificial Sequence
  ENSG00000274654_0 (sequence is synthesized)
tacaatcaaagttaagctcacaggctcagtggcattcatgatcattagtgtgtcacatgttacttttaaacagctgccacagtttttagtttttttctctcattgtattagtatctaggc

SEQ ID NO: 899630 - DNA, 120 bp, Artificial Sequence
  ENSG00000274654_1 (sequence is synthesized)
agtcaggatcaggttaactgtcaggatcaggtttctcttgtcaagtccacaatcttggatggagcttctagatagccaagtaatagatggtgatgcctgtcccagaacagacaccaagct

SEQ ID NO: 899631 - DNA, 120 bp, Artificial Sequence
  ENSG00000274654_2 (sequence is synthesized)
ccatccatctgccctccacactctttcctcccattctgccagaggagccctaggatgaaggggcttaggcatgggaagaatgctctgggagaacagatgagactgaaggatgggaaggag

SEQ ID NO: 899632 - DNA, 120 bp, Artificial Sequence
  ENSG00000274654_3 (sequence is synthesized)
aaggaagagatctgccatttgtgactcttcttaaggtcacagcaagaagccagtggggtcatggacagctaccatgggacagctactccccagcagctctgcctccttttctgcctcaag

SEQ ID NO: 899633 - DNA, 120 bp, Artificial Sequence
  ENSG00000274654_4 (sequence is synthesized)
gaagcagggagaaatgtccagagcacggaaatagctcttcccagccaagcaccactccccagcaagcgtccccacctggtttgctttcatggctggcatttgacacagcctgatttatag

SEQ ID NO: 899634 - DNA, 120 bp, Artificial Sequence
  ENSG00000274654_5 (sequence is synthesized)
aaactgagaaagtgaccgttctcaaattccctcttaacttgggatgcctcaaattcaattaaaaggagatgaacacagagtgggaagaacttggagaaataataaattcatatgaatgag

SEQ ID NO: 899635 - DNA, 120 bp, Artificial Sequence
  ENSG00000274653_0 (sequence is synthesized)
ggtacaggtcctgttgcctgtgggggttggggaagactgtgagggcagtcacgggctgagagctctgtccccaaacccagttccagattcgtcccagagtttatcaccaggctcctccat

SEQ ID NO: 899636 - DNA, 120 bp, Artificial Sequence
  ENSG00000274653_1 (sequence is synthesized)
ccacctgcccagtcctgctgagcgagcttcagctaaaggctcagcccacagcagagcactccaggccccggggctccgcctttggctacatactccacatgctcctggccatcccagcac

SEQ ID NO: 899637 - DNA, 120 bp, Artificial Sequence
  ENSG00000274653_2 (sequence is synthesized)
atcccagaaaccttccaggtcattttctccaggaagctttccacagctgcagcatcagccctcctctagcactaaatgtctttgtcaccccaaagcagtagctccccagggcagggcctg

SEQ ID NO: 899638 - DNA, 120 bp, Artificial Sequence
  ENSG00000274653_3 (sequence is synthesized)
ccttatcggtctcactggatttcatggttcttggggaaggcttggaagccagctgtgcctcagccctttctcctgtctctgcatccaaaagaataaaatctgtaccctagatctgctctt

SEQ ID NO: 899639 - DNA, 120 bp, Artificial Sequence
  ENSG00000260563_0 (sequence is synthesized)
tctggcaaggtcggaatgattttgcgatgagcaccgcctggattctgcggtgaaagcgactgtgtgcgcgctcacggcctcgcctgtccctgcatcagcccatctcgtcaggcagatcaa

SEQ ID NO: 899640 - DNA, 76 bp, Artificial Sequence
  ENSG00000260563_1 (sequence is synthesized)
cgcctgtccctgcatcagcccatctcgtcaggcagatcaacatgaagctgtaaaacggatgacttaggccgggcgt

SEQ ID NO: 899641 - DNA, 120 bp, Artificial Sequence
  ENSG00000260563_2 (sequence is synthesized)
gagactccgtctcaaaataaataaataaaacatatgacttaggtatatacgcatggggggaatcctcgtaaggcaagaacgtgctgcacattctggggactgggacaggataagcacacg

SEQ ID NO: 899642 - DNA, 120 bp, Artificial Sequence
  ENSG00000260563_3 (sequence is synthesized)
gtgctgcacattctggggactgggacaggataagcacacgagtagatctaagtcactggaaatacctggttttgctgttggaggggggcttgcaggtgctcgttatattattacgctgtt

SEQ ID NO: 899643 - DNA, 120 bp, Artificial Sequence
  ENSG00000260563_4 (sequence is synthesized)
taatgaagtgcacaaacttaattatacattggctgaggttatttgttttaaaggcagtacttgctctatggcccaggctggagtgcagtgcgtgatcatggctcactgtaacctcaaatt

SEQ ID NO: 899644 - DNA, 83 bp, Artificial Sequence
  ENSG00000260563_5 (sequence is synthesized)
gcttttgctgagttttaacaaatacagtagtgtaaccgaagatgccatcaagacaaatagaacacgtccctcaccccagaaaa

SEQ ID NO: 899645 - DNA, 120 bp, Artificial Sequence
  ENSG00000260563_6 (sequence is synthesized)
gccatcaagacaaatagaacacgtccctcaccccagaaaattctcttatgcccctttccattctatgtccactgctaccatgccacctgtgctgatttctccactatgcttccgcctgtt

SEQ ID NO: 899646 - DNA, 120 bp, Artificial Sequence
  ENSG00000260563_7 (sequence is synthesized)
ctaagagttcatactaatggatcattgggtacatgtccttgtgtaaggcgtctttcccttagcgtcatgtttctggagattcttctgtgttgtttcatgtctcaggagtttgttcttttg

SEQ ID NO: 899647 - DNA, 120 bp, Artificial Sequence
  ENSG00000260563_8 (sequence is synthesized)
attgccaagcagtccagtgtaaacacaccggtgtgtttatctgctgtattcatggacacttggagctgtgtctggctattggcgatcacgaataaagttgctgttgactttctttttgaa

SEQ ID NO: 899648 - DNA, 120 bp, Artificial Sequence
  ENSG00000260565_0 (sequence is synthesized)
ggctaatttttgtgtttttagtagagaccggggaaggtatgggccctcttttgagaaaaatgcagagtgacactgaattttgtaactacatcaggaggctcttgaaccttctgcagctca

SEQ ID NO: 899649 - DNA, 120 bp, Artificial Sequence
  ENSG00000260565_1 (sequence is synthesized)
actacatcaggaggctcttgaaccttctgcagctcactcgtggagtttgtagagatgcgtaataatccgaagtgttaaggaagaaggttctgttgagaaaaagttggagggctgaaaggg

SEQ ID NO: 899650 - DNA, 120 bp, Artificial Sequence
  ENSG00000260565_2 (sequence is synthesized)
atgcctttcgctatttcgacatgtgtggctgtaccccagagtgccctggctaacacgcaaaaccatgaattaggcggcttggcgaggctcagtggaggctggggccgagagtcatgtcaa

SEQ ID NO: 899651 - DNA, 120 bp, Artificial Sequence
  ENSG00000260565_3 (sequence is synthesized)
agtttgtggggttaacctgcacccagtgacagtcatggcgaagtttgtgaggttaactcgcacccagtaacgctgttccaatgcaaggtgtgtatttggtgtcatccacgggaagaggaa

SEQ ID NO: 899652 - DNA, 120 bp, Artificial Sequence
  ENSG00000260565_4 (sequence is synthesized)
acagcaaattttctcatggccttggcagttccacatgatggacatttcatatctgcagttttcttcgcatgagatggcttttttgcacaaaaacactggaatccagtgagcaagaatgat

SEQ ID NO: 899653 - DNA, 120 bp, Artificial Sequence
  ENSG00000260565_5 (sequence is synthesized)
agaatgcaagatggatttccacatgaggaagtgtcacgaacaagcgttttgcatctctgtcagctggattcccccatgtatggctgaactctgtgaccccggggcctgtttcagcctcct

SEQ ID NO: 899654 - DNA, 120 bp, Artificial Sequence
  ENSG00000260565_6 (sequence is synthesized)
gtgaccccggggcctgtttcagcctcctgctgtcagaaagcagctgtttgggaagaggctgtgattcggccttgtttgagggccgatactctgaatggggagagacccaccgaccctgtg

SEQ ID NO: 899655 - DNA, 120 bp, Artificial Sequence
  ENSG00000260565_7 (sequence is synthesized)
cgtggggctctccctcgctgtgtgaagttgcaccctgagtgcgggatcagcggaggagttcaacgagagattcctgaggattgcagtctataaacttggtggaaaagaactacagcctgt

SEQ ID NO: 899656 - DNA, 120 bp, Artificial Sequence
  ENSG00000260565_8 (sequence is synthesized)
gtgggtcccctcccgacaattaaaattgcaccataactccaaagatgaaacgctcccagaaagaaaaggcaaagacccatcggaaacaaaagagcaactttcaccgcctgatacatacac

SEQ ID NO: 899657 - DNA, 120 bp, Artificial Sequence
  ENSG00000260565_9 (sequence is synthesized)
ttgagacaaaatctcgccgtgtgacctacaacacctctcgttcaaccccacctacttggggtcgaatacagattttatctcatcaaacagaaaaattcttaacagaaaaaggaatcccaa

SEQ ID NO: 899658 - DNA, 120 bp, Artificial Sequence
  ENSG00000260565_10 (sequence is synthesized)
aaatgactggtaatataattctggctgcctttatggtagtcagtgcagcgtctgcagatgcctctaaggagtccgaaaccaagtccgaagtcaacaacaagcaatgatggcgatggcgat

SEQ ID NO: 899659 - DNA, 63 bp, Artificial Sequence
  ENSG00000260565_11 (sequence is synthesized)
aagtccgaagtcaacaacaagcaatgatggcgatggcgattctagttaataaaaaggggggag

SEQ ID NO: 899660 - DNA, 120 bp, Artificial Sequence
  ENSG00000260565_12 (sequence is synthesized)
ctgggaagacacccgttaccaggcggatcgtggcccagccgtagcaaaaggtgtcaaggaacaccttttgcaaaaggtgtcaacacccgctacttagcagactgggaaaggggggcggtc

SEQ ID NO: 899661 - DNA, 64 bp, Artificial Sequence
  ENSG00000260565_13 (sequence is synthesized)
agcgcagtcagacattcagggccactaccggtctccgcacattggtggtagtggtcccccgggc

SEQ ID NO: 899662 - DNA, 120 bp, Artificial Sequence
  ENSG00000260565_14 (sequence is synthesized)
tgtctgtaatggtagaggcagccctgatactggattttcacctgaggatggatagatcttcagggttcaagtgggtttgcatctggactttagggtggccctgtaggccctgtgtgagaa

SEQ ID NO: 899663 - DNA, 120 bp, Artificial Sequence
  ENSG00000260565_15 (sequence is synthesized)
gcccccttcccagtgaactttcccttgtgtgcccgcgtggacagccaacagggggagcagtgcgagcgtgaaggcagacagtggcctggcccagtctgatgggagagacccaccgaccct

SEQ ID NO: 899664 - DNA, 120 bp, Artificial Sequence
  ENSG00000260565_16 (sequence is synthesized)
ggggggcggggcgtcgcgggcacagcgtgagggccgccgttgctggagttcagcttagggaaggaggactctgaggaggccccgagcggcggagcgcttcgggggaggcgcccgcgcaga

SEQ ID NO: 899665 - DNA, 120 bp, Artificial Sequence
  ENSG00000260565_17 (sequence is synthesized)
cgcgaggcccatagccaggaccaccacctagctgattcttgatgacattggtcgggaaaactcgcctttcacggcccggccaaggggcatttgggtgcttttgctgcccgtggctgtgct

SEQ ID NO: 899666 - DNA, 120 bp, Artificial Sequence
  ENSG00000260565_18 (sequence is synthesized)
cagcgttgtgggaagcccctgggaggccgaatgtgcaggatcaccgaggggaaagtgagcttgacagtctggggacgacggtttaaaaatttatgccttgcatgcgatgtgcagtgggtg

SEQ ID NO: 899667 - DNA, 120 bp, Artificial Sequence
  ENSG00000260565_19 (sequence is synthesized)
atggaagaacgtctacatggctttaaaattggatttaaaaggcaaatattttaaatgaaggaaaacccaagaagtttacttgattccttatcttccaggatgcgacttttgtttatttat

SEQ ID NO: 899668 - DNA, 120 bp, Artificial Sequence
  ENSG00000260565_20 (sequence is synthesized)
attgggcatatgttccttttccccttctaattcggtctgtctcctggagggactctccagtagaagtttacactaataatagtgcattcatgccgatccctaatgatgatcggtttccag

SEQ ID NO: 899669 - DNA, 120 bp, Artificial Sequence
  ENSG00000260565_21 (sequence is synthesized)
ctcaaccggaagaagaaggtatgcactttaatctgtcaattggctataaatatccaccattatgtattgggaagtcgcctggttgtttagcttattcttaacagaattggatgtggactg

SEQ ID NO: 899670 - DNA, 120 bp, Artificial Sequence
  ENSG00000260565_22 (sequence is synthesized)
ctaactcttttcaacttctcactgtcaaacgtaccccacatgaggcatggagagttcctctcactaccaaaactaataaaacaaaaggactgccggactgtccaaagaaacctacaaatg

SEQ ID NO: 899671 - DNA, 120 bp, Artificial Sequence
  ENSG00000260565_23 (sequence is synthesized)
ggccttttatagtgacttcaattttatgggataattgtaatgctcccaaggctgttgtactccaaactctagccatgggtattgttattgattgggctccaaaaggacattattggcaag

SEQ ID NO: 899672 - DNA, 120 bp, Artificial Sequence
  ENSG00000260565_24 (sequence is synthesized)
attgctccagcaaaaataccttatgctcggagtttatttattccttagattatatagagcatgggtggcagtcttacacgatgagacaacgggtgtctccttacccatttaaatggatgg

SEQ ID NO: 899673 - DNA, 120 bp, Artificial Sequence
  ENSG00000260565_25 (sequence is synthesized)
acacaggtattgctcctcctagaccaaaaattattcatcccttttttaccccagaacatcctgaactatggaaattagctgcagctttgtcgggaataaagatatggaacactacctatc

SEQ ID NO: 899674 - DNA, 120 bp, Artificial Sequence
  ENSG00000260565_26 (sequence is synthesized)
agctccttcgtactaaaaccaaaacacccacattcaacatcacccttatttctgaatgggtgatacccattaggagctgtgtcaaacccccttacatgctgttggttggaaatataatta

SEQ ID NO: 899675 - DNA, 120 bp, Artificial Sequence
  ENSG00000260565_27 (sequence is synthesized)
tgatgcctgatgcacaaactatagaatgtcataactgtaagctgttcacttgcattgatgcaacttttaatcccactacaagtattctcttggtaagggctagggagggggtatggatac

SEQ ID NO: 899676 - DNA, 120 bp, Artificial Sequence
  ENSG00000260565_28 (sequence is synthesized)
cagtttctctacatcgtccatgggagtcttccccctctattcacatagtcaatgaagttcttaaagacatcctcaaaagaacaaagagatttatttttactcttattgcagtccttgcag

SEQ ID NO: 899677 - DNA, 120 bp, Artificial Sequence
  ENSG00000260565_29 (sequence is synthesized)
gactacttgcggttactgcaacagcagcaactgctggagttgccatccgcagttctgttcaaactgctcactatgttgaagcatgccagaaaaattcctccagactttggaattctcagg

SEQ ID NO: 899678 - DNA, 120 bp, Artificial Sequence
  ENSG00000260565_30 (sequence is synthesized)
cgcaaattgatcaaaaattagctaatcagattaatgatctccgccaaagtgtaacctggctgggagatagagttatgaacttgcaacaccgtatgcaattacagtgtgattggaatactt

SEQ ID NO: 899679 - DNA, 120 bp, Artificial Sequence
  ENSG00000260565_31 (sequence is synthesized)
ctgattattgcataacgccttatgcttataatcaagatcaacatagctgggaaaatgtctcaagacatttaaaagcctgggatgataacttaaccttggatatttcacaacttaaagagc

SEQ ID NO: 899680 - DNA, 120 bp, Artificial Sequence
  ENSG00000260565_32 (sequence is synthesized)
aaatctttgaggcttcacaagcccatttatccacagttcctggctcacacatttttgaaggcataactaaacaattacctgattttaatcccttcaaatggctcaaacccgtcagaggat

SEQ ID NO: 899681 - DNA, 60 bp, Artificial Sequence
  ENSG00000260565_33 (sequence is synthesized)
ggcctgacatcagtcaggcttgcccgtagttatccggatttccatcctgtacacctggct

SEQ ID NO: 899682 - DNA, 120 bp, Artificial Sequence
  ENSG00000260565_34 (sequence is synthesized)
cgcttccctaggtactttcacacctcattgcgaggtacgtgttgttcccattttacaggtgcagaagctgagctgcagaggcgttaggtacctgcctcataagtggtagagactccagtg

SEQ ID NO: 899683 - DNA, 120 bp, Artificial Sequence
  ENSG00000260565_35 (sequence is synthesized)
tcaccctgcccctcacgttcggagcccccgagggagggtctgccgggcagctcagcccagcactctgtaaggaaatcttcagtgccactgcccaggatgtcttcccggggattgggcctg

SEQ ID NO: 899684 - DNA, 120 bp, Artificial Sequence
  ENSG00000260565_36 (sequence is synthesized)
aatgtcttgaccatgccgtgctggaggtaggaggggtgtcttcatatggaagaactgtacatatttctttggcagatggctgaactctgtgaccccggggcctgtttcagcctcctgctg

SEQ ID NO: 899685 - DNA, 120 bp, Artificial Sequence
  ENSG00000260565_37 (sequence is synthesized)
gtagaattgggggactaggcagagtggcctcctgccctccctggggtggttctgtcttttgcaaaggtggctgcatccttaggggaaggtgaggggagaagcagggagcatggagagaag

SEQ ID NO: 899686 - DNA, 120 bp, Artificial Sequence
  ENSG00000260565_38 (sequence is synthesized)
tggctttcgattttctctctccttttggggagttcctccttatgtggctggtctggtgcatagtgtgatgtattcctgtacgcaacgttgccctgacagccagtccaagctgagtctaga

SEQ ID NO: 899687 - DNA, 69 bp, Artificial Sequence
  ENSG00000260565_39 (sequence is synthesized)
aaaaccaggccatacacttctgttatgcccggacagggccacaagagggctccttggtctagcggtgac

SEQ ID NO: 899688 - DNA, 120 bp, Artificial Sequence
  ENSG00000260565_40 (sequence is synthesized)
gcgtctgggaagacgcccgttacccggcggatcgtggcccagtggtagcaaaaggtgtcaaggaacaacactcactacttagcagaccgggaaaggggcggggggggggtctccctttcc

SEQ ID NO: 899689 - DNA, 64 bp, Artificial Sequence
  ENSG00000260565_41 (sequence is synthesized)
agcagaccgggaaaggggcggggggggggtctccctttccccgggggagtttagatagttatcc

SEQ ID NO: 899690 - DNA, 120 bp, Artificial Sequence
  ENSG00000260565_42 (sequence is synthesized)
tcacccccaccctgactccagttcatgaactggtcaaaggaagagccatgccagcaaacgtctacactgtacatgctttttattacaagactacggagcataggaggaaaattcatcatc

SEQ ID NO: 899691 - DNA, 120 bp, Artificial Sequence
  ENSG00000260565_43 (sequence is synthesized)
catagccaggaccaccacctagctgaggaaccgccctgggcttccacctggaacggggtccttggcgcctccgcctgcgagagaagcagaaggtgcaagttcttgctgaaagcacctgat

SEQ ID NO: 899692 - DNA, 80 bp, Artificial Sequence
  ENSG00000260565_44 (sequence is synthesized)
tgcttggctgcggcggggagaccgggcctgggttgcgtcgggcggcggcctggccgggggcgctgacagacgcgcggagg

SEQ ID NO: 899693 - DNA, 120 bp, Artificial Sequence
  ENSG00000260565_45 (sequence is synthesized)
gggaggtgtcacccggcccagcggggtggaagtgcctggaaagtttgttttcggcttggcgcagcctggagccgagcctccagggttacctttcggttctgtctgtagaggaaccgccct

SEQ ID NO: 899694 - DNA, 120 bp, Artificial Sequence
  ENSG00000260565_46 (sequence is synthesized)
atttgggtgcttttgctgcccgtggctgtgctcagcgttgtgggaagcccctgggaggccgaatgtgcaggatcaccgaggggaaagtgagcttgacagttttcttcgcatgagatggct

SEQ ID NO: 899695 - DNA, 120 bp, Artificial Sequence
  ENSG00000260565_47 (sequence is synthesized)
agggaaggaggactctgaggaggccccgagcggcggagcgcttcgggggaggcgcccgcgcagacgcgaggcccatagccaggaccaccacctagctgtctggggacgacggtttaaaaa

SEQ ID NO: 899696 - DNA, 120 bp, Artificial Sequence
  ENSG00000260565_48 (sequence is synthesized)
tatattattcattacacagatgatattctttgtgcagcaccttcacgctctgtattaatatcttgtttttctgcattacagcaagtggtcacagcagctggcttggttatcgccccagaa

SEQ ID NO: 899697 - DNA, 120 bp, Artificial Sequence
  ENSG00000260565_49 (sequence is synthesized)
aaaattcacacttcatctccttatcactatttagagatgcagctagaggataaggtcattaagcctcaaaaagttcaactcagacgagactctttaaaaactctaaatgatttccaaaaa

SEQ ID NO: 899698 - DNA, 120 bp, Artificial Sequence
  ENSG00000260565_50 (sequence is synthesized)
ttatttggagatattaattggattcgtccctccctacgcattcctacttatgctgtgtctaatctttttgcaatattacggggcaatcctgatttacgcagtaaaaggtctttgactcct

SEQ ID NO: 899699 - DNA, 120 bp, Artificial Sequence
  ENSG00000260565_51 (sequence is synthesized)
gaggcagattctaaattacgacttataaaaaaatgcattcaacagtctcaggttaccagagtaaatccacatttaccttttgaagtactaatttttcccactgaacattcaccaacagga

SEQ ID NO: 899700 - DNA, 120 bp, Artificial Sequence
  ENSG00000260565_52 (sequence is synthesized)
ctcattattcagggacataatttaattgaattgtgttttctcccacacagctctttacgtacactaactatctagatcaaatttctaccttaattggtcaggctcgttctcgtctccttc

SEQ ID NO: 899701 - DNA, 120 bp, Artificial Sequence
  ENSG00000260565_53 (sequence is synthesized)
gtctttcaggaacagagcctcaaaaaatcgttgttccccttacccgattacaagttcaacaggctttgctacttgcattgcttggcaagtgcatttggcacgtttcccaggtataattga

SEQ ID NO: 899702 - DNA, 120 bp, Artificial Sequence
  ENSG00000260565_54 (sequence is synthesized)
taatcactatcctcatgtaaaattatttcagttccttaaactcacgtcttggattttacgtaacattactagaaacaccccattacctgaagctgtcactgttttcactgatgcttcctc

SEQ ID NO: 899703 - DNA, 120 bp, Artificial Sequence
  ENSG00000260565_55 (sequence is synthesized)
taatggccgagcagcatatacaggacccagagaacgtgttcttaacacaggggctatttcagcacaacgagctgaactgcctgctgttatggctgtccttgaagattttcctgagccagt

SEQ ID NO: 899704 - DNA, 120 bp, Artificial Sequence
  ENSG00000260565_56 (sequence is synthesized)
taacattttctctgactcagcgtatgtcgtacatgttgctcgcaacattgaaactgccttaatcaaatttctgcctgatgataacctattccttctttttcaaaagtttcagtctgtgct

SEQ ID NO: 899705 - DNA, 120 bp, Artificial Sequence
  ENSG00000260565_57 (sequence is synthesized)
cagagcaaggtcttctcctttctacagtactcacattcgggcccacacacccctccccggacccctctcggcagcaaatgccagagctgatacattagttactcccgtttttacagatgc

SEQ ID NO: 899706 - DNA, 120 bp, Artificial Sequence
  ENSG00000260565_58 (sequence is synthesized)
agaaaattttcatgctttaactcacgtcaatgctgcgggactccgaaacaagttcccccttacatggaagcaagctaaaactactgtgcgtcactgtcctacttgtcaagtgttaatttt

SEQ ID NO: 899707 - DNA, 120 bp, Artificial Sequence
  ENSG00000260565_59 (sequence is synthesized)
accaccactgtcttcaggagttaaccctagaggactttcacagaatgctctttggcaaatggatgtgactcattatcctccttttggcaagctttcttttatacatgtaactattgatac

SEQ ID NO: 899708 - DNA, 120 bp, Artificial Sequence
  ENSG00000260565_60 (sequence is synthesized)
cttttctcattttatttgggccacttgtgaaacgggcgaaagtacagctcatggtaaacgacatgtgccttcctgtttctcggttatgggctgttctgagaaactaaaaactgataacgg

SEQ ID NO: 899709 - DNA, 120 bp, Artificial Sequence
  ENSG00000260565_61 (sequence is synthesized)
ccccgcctacactagtgctgcttttaaaaagtttcctcagacatgggcaattactcacacaacgggcattccctataactctggagaacaggccttggttgaacgagccaataaaacact

SEQ ID NO: 899710 - DNA, 120 bp, Artificial Sequence
  ENSG00000260565_62 (sequence is synthesized)
caaagatcaacttcgtaaacaggatactaaatcaaagggagatgctattactcctcatgcccaattaaatctggctcttttcacactaaatttcttaaacttaacaagaaatcaaccttt

SEQ ID NO: 899711 - DNA, 120 bp, Artificial Sequence
  ENSG00000260565_63 (sequence is synthesized)
cacagccgcagaacaacatttcactggaaataaatttgatccacaaaaaggaatgcgggtatggtggaaggacgtaaaaactaacacatgggaattaggcacggtcataacttggggtag

SEQ ID NO: 899712 - DNA, 120 bp, Artificial Sequence
  ENSG00000260565_64 (sequence is synthesized)
ccagtacaaagtatttggcttatttaaattttataaaaactcttcttaaagaaggaggtgttaaagtttctactgaaaagttaattgaactatttgaggttgtagatcttctttgccctt

SEQ ID NO: 899713 - DNA, 120 bp, Artificial Sequence
  ENSG00000260565_65 (sequence is synthesized)
ggtttccgactgagggaactctagaacttaaagattgggttgagattggcaaacaattcaaaattgctcataaagggggacattttatcccacccaccatttggtcaatctgggcttcgg

SEQ ID NO: 899714 - DNA, 120 bp, Artificial Sequence
  ENSG00000260565_66 (sequence is synthesized)
ttcactctgtcttagactccttacagactcaggaggacaatatggagactgatccctctttcctctcctctgagggaggtcgaggaagcgctcagctctctttcccctgaggatactaca

SEQ ID NO: 899715 - DNA, 120 bp, Artificial Sequence
  ENSG00000260565_67 (sequence is synthesized)
caaattgagaacgtaatttcaaaggaggacttccactctgacatgcctgcaccacttccacctacaccagaggctactgcacccccattgccgctttatgatgatcttttaactgaccta

SEQ ID NO: 899716 - DNA, 120 bp, Artificial Sequence
  ENSG00000260565_68 (sequence is synthesized)
aatatactaatctcccccaatcagcaaaactcagctgaaacatatcaacagccattgcagccagaccctcctgtctctcctcactgtttcaacgctgccgctgtgcaaatagcagatgag

SEQ ID NO: 899717 - DNA, 120 bp, Artificial Sequence
  ENSG00000260565_69 (sequence is synthesized)
accaggcagcctgtaaacgagtctataaattatgtttctatgcagcccggtacagaggctccgctatatgaacagctcagaaaagaggcttccaattctcggcccggtaatgaggccctc

SEQ ID NO: 899718 - DNA, 120 bp, Artificial Sequence
  ENSG00000260565_70 (sequence is synthesized)
aatcctatttctcctaatcggactcagttagagtcacagactcccttgaagccctttcctataaatcagactcgagtagagtcacagtctcccttgaagcctggttcctttcctgcaaat

SEQ ID NO: 899719 - DNA, 120 bp, Artificial Sequence
  ENSG00000260565_71 (sequence is synthesized)
cggactcagagtcacaggctcccttgaagcctggtccctttcctataaatcagacttgggtagagtcacaggctcccttgaagcctggttcctttcctgcaaatcggactcagagtcaca

SEQ ID NO: 899720 - DNA, 120 bp, Artificial Sequence
  ENSG00000260565_72 (sequence is synthesized)
gactcccttgaagcctggttcacacttgccgtggcagcctggttttcaggcccatgaaagacctgctcagcaggtaatctgctgtcaccctggctttcagttttttgactctccttctat

SEQ ID NO: 899721 - DNA, 120 bp, Artificial Sequence
  ENSG00000260565_73 (sequence is synthesized)
tcaaaattctacctctttttctgctcctggtccggtcgcaactgctgttgccaatactaccattgccgctcataagcaacaaattacatacatccctgaagatgacactccgcttatgag

SEQ ID NO: 899722 - DNA, 120 bp, Artificial Sequence
  ENSG00000260565_74 (sequence is synthesized)
ggctatagttcaagcaagggaatatggggatcctgaaacttggcaatttcctgtaattttacaacctccagtacctgccaccccagcagtacaaaaccacccacagcctgttgttgatcc

SEQ ID NO: 899723 - DNA, 120 bp, Artificial Sequence
  ENSG00000260565_75 (sequence is synthesized)
tgcccagcaggcggctgaccccgcagctcaacaagatcaagaggctgataatcaagcccctcagcccgaaactcaggctgctcaggtaaataatcagcctccgcagttgcctgctcctgg

SEQ ID NO: 899724 - DNA, 120 bp, Artificial Sequence
  ENSG00000260565_76 (sequence is synthesized)
ggcacagccaatacctggcattcccgctgttcaggtggtaattcagcctgaccccatccatccaggccaggttcagctacgccctgctacatgggaaagtttttcttttaaattcctcaa

SEQ ID NO: 899725 - DNA, 120 bp, Artificial Sequence
  ENSG00000260565_77 (sequence is synthesized)
agattttaaagaatcagtgaaacaatatggcaccaactctccttttgtccgttccacattaaaagccttaggagaagataaacgtttggtaccctatgattgggaaattttggcaaaatc

SEQ ID NO: 899726 - DNA, 120 bp, Artificial Sequence
  ENSG00000260565_78 (sequence is synthesized)
aagtcttatctaaatcccaatatttacagttcaggacttggtgggttgatgctgtccaggaacgcatttgtcttagggcactaatcctcctgttaacgttatggctgaccagttactggg

SEQ ID NO: 899727 - DNA, 120 bp, Artificial Sequence
  ENSG00000260565_79 (sequence is synthesized)
aatgggtcaatgggccgcaatccgacaccaaactatactaaatgatgaggttattgaacaactgcgaaaattgttgcttagatgcttgggacaaaattcaagatgatggtaaagtatgcc

SEQ ID NO: 899728 - DNA, 120 bp, Artificial Sequence
  ENSG00000260565_80 (sequence is synthesized)
catctttcacagccgtcagacagggacaacatgagccctacccagactttattactcgtcttcaagacgcagcagaaaaggctattcctgatagccacggccaaagacttgttgtagaac

SEQ ID NO: 899729 - DNA, 120 bp, Artificial Sequence
  ENSG00000260565_81 (sequence is synthesized)
ttatggcttatgaacaagcaaatccagatggtcaggcggctgtttgccccgccaaaggtaaaattccaccgggtggtgatatactcacctcctacattaaagcctgtgaaggggtgggag

SEQ ID NO: 899730 - DNA, 120 bp, Artificial Sequence
  ENSG00000260565_82 (sequence is synthesized)
gaactctccatacagcaacgattatggcacaagctatggcctctattcgaatgcctggacaattctctggccaatgcttcatatgcggccagaagggacatgcagaaagaaattgccctc

SEQ ID NO: 899731 - DNA, 120 bp, Artificial Sequence
  ENSG00000260565_83 (sequence is synthesized)
gctggagttcagcttagggaaggaggactctgaggaggccccgagcggcggagcgcttcgggggaggcgcccgcgcagacgcgaggcccatagccaggaccaccacctagctggaaaaga

SEQ ID NO: 899732 - DNA, 120 bp, Artificial Sequence
  ENSG00000231170_0 (sequence is synthesized)
tttctaaaggccgtcttgaagaaaattaaaccagaaagatcaagaaaggctggagcagtggaaagagaactatgcacaaggatgaggagaataattgtgattgtgggacagggccccagg

SEQ ID NO: 899733 - DNA, 120 bp, Artificial Sequence
  ENSG00000231170_1 (sequence is synthesized)
agagaggtatagcagactggccttggaaagcctgcagctgcatcaggaaggcaaagcatgcttggaaaaaatgctgactgaacagtccctggaaagtaatacagtggaggaggaccccca

SEQ ID NO: 899734 - DNA, 120 bp, Artificial Sequence
  ENSG00000231170_2 (sequence is synthesized)
tgattacattctgcgagaggagttcctaagcattgcagcatgaaaaacagtgcttaaaagcttaagcaatatttttcaaaatattgacctatctcagtaggaactgagataggcaacaaa

SEQ ID NO: 899735 - DNA, 120 bp, Artificial Sequence
  ENSG00000231170_3 (sequence is synthesized)
tctgactgacagaatacatttcaaactttcaaaattgtgtcttcctcttactgtgggtccttacccctgaacaaagttcatcacacctggcttcacgttgcagggtatatttttttgatg

SEQ ID NO: 899736 - DNA, 120 bp, Artificial Sequence
  ENSG00000231170_4 (sequence is synthesized)
cctgccttatctggcttccagtcatgccctggaatttgagtgtctctcaaatgtaaaaatcaaaaagtatattgtaaaaatgtctatactatgcaaagtaatatacagattcaatgcaat

SEQ ID NO: 899737 - DNA, 120 bp, Artificial Sequence
  ENSG00000231170_5 (sequence is synthesized)
aaaacaatcttgaacaaaaagaacaaagctggaagcattacactatttgatttcaaaatgtactgcaaagctatagcaatcaaaacaacatggtactggcacaaaaacagaaatatggac

SEQ ID NO: 899738 - DNA, 120 bp, Artificial Sequence
  ENSG00000231170_6 (sequence is synthesized)
caatgaaattgaacagagagcccagaaataaattcacccatttacagttaactgatcttcaacaaaagtgccaagatcatacaactgagaaaggacagtctcttcaataaatggtgctgg

SEQ ID NO: 899739 - DNA, 120 bp, Artificial Sequence
  ENSG00000231170_7 (sequence is synthesized)
aaaaacttgatatccacatgcagaagaatgaaattggacccttatttcatcccatatacaaaaatcaacataaaatggattaaagacttaaatgtaagaccagaaactataaaactatta

SEQ ID NO: 899740 - DNA, 120 bp, Artificial Sequence
  ENSG00000231170_8 (sequence is synthesized)
gaagaaaacctagagacattgacattggtcttggcaaagattttttggatatgaccccaaaagcacaggcagcaaaagcaaaactagacaaatggaattacatcaaaccaaaaaaatagc

SEQ ID NO: 899741 - DNA, 120 bp, Artificial Sequence
  ENSG00000231170_9 (sequence is synthesized)
ttcacagcaaaagaagcaatcaacagagtgaagagaaaacctatgcaatgggagaaaatatatgtaaatcatacatgaaataaggaactaatatccaaaatatataagaaattcaaacat

SEQ ID NO: 899742 - DNA, 120 bp, Artificial Sequence
  ENSG00000231170_10 (sequence is synthesized)
atcacagaatggcctggcacggtgaccacggagtgccctggcaccggtgcccgcggctgtgacggaaaaagggtgggaagaacagggaagaggaagcagaaacaggttatctgttcactc

SEQ ID NO: 899743 - DNA, 120 bp, Artificial Sequence
  ENSG00000231170_11 (sequence is synthesized)
aatgacctgatggagctgaaaaccatggcgagaacttcctgccttcgatttctcacaagctcgggcataccacgaggcttggagactcaaaacctgaagagcctgcaatcagatttctcc

SEQ ID NO: 899744 - DNA, 120 bp, Artificial Sequence
  ENSG00000231170_12 (sequence is synthesized)
gcctgcaatcagatttctcccttactattcctgctcattgtcttctgtggactaatactgaacatgaaactttgcttacagttttgtggcctgttcctttcctctgattgctgatcattg

SEQ ID NO: 899745 - DNA, 120 bp, Artificial Sequence
  ENSG00000231170_13 (sequence is synthesized)
catgaatttcctgagattatcactgaataggacctttctttttcctgtatcctctactacacacactgagttcaaatagaattattttacttggaaaactccaggttttgctaagttcca

SEQ ID NO: 899746 - DNA, 120 bp, Artificial Sequence
  ENSG00000231170_14 (sequence is synthesized)
gccttggtttgtgtagcactggttggctgccttagactaattttttgggggtgtcagatagtaaaaggagcacaatcaagcaccaggtcatctgaaagacaaattttagacgtcactttc

SEQ ID NO: 899747 - DNA, 120 bp, Artificial Sequence
  ENSG00000231170_15 (sequence is synthesized)
ttttgtgattttgttgcttaacccagtgcaggggcagtcaaagctgtatcaccattgcattcactgtctaggtaaaaatgggaaaattcagtcagttatactaatattccttactacttg

SEQ ID NO: 899748 - DNA, 120 bp, Artificial Sequence
  ENSG00000231170_16 (sequence is synthesized)
atacccagatgtcatactaaaatttctgcatttgtttgaaaatactagtttaagcaattacatgttatgcaagtggttagtccttccctctccagcttggctgccaccagtaataatgga

SEQ ID NO: 899749 - DNA, 120 bp, Artificial Sequence
  ENSG00000231170_17 (sequence is synthesized)
tcataacatcttctcctgtgtgatctgatgcggccttgggattcgtcccaacgcaggactccagagatcagtggatcagtgaattatgtttgggagatgcaacccctgttgttactgggc

SEQ ID NO: 899750 - DNA, 120 bp, Artificial Sequence
  ENSG00000231170_18 (sequence is synthesized)
tgggggcccaagcagctgctggtggggtgttctgccctgcagcagcaccctacctccaccctcccctttacatttagaagaactgtcctttagtgagactgtcaatggaaaacatgaaaa

SEQ ID NO: 899751 - DNA, 120 bp, Artificial Sequence
  ENSG00000231170_19 (sequence is synthesized)
tcattcatttaatccaacattttcaatcgcagaggaaaaacaagcagaagagttaagtcaccagagtcatacagctggtaggaaaaatgggttctctaaatctcagtttaaacagaaatc

SEQ ID NO: 899752 - DNA, 120 bp, Artificial Sequence
  ENSG00000231170_20 (sequence is synthesized)
cttgtcacactcttctggggattgagaagcgtaagatttttttttttttttttaattgcctttctgaaactttagaagaatacctatttgccctgttggccaaaaccaggcaactgtgtg

SEQ ID NO: 899753 - DNA, 120 bp, Artificial Sequence
  ENSG00000231170_21 (sequence is synthesized)
aaacagttgaatgctaaaacaaactaaacagatgctggaaactcaaccgtttgtttcttgaacaaaattgattttacctgatgtcctcttgagctcagttagactttgccagagagaaaa

SEQ ID NO: 899754 - DNA, 120 bp, Artificial Sequence
  ENSG00000231170_22 (sequence is synthesized)
acacacagctttcatttctaaaggccgtcttgaagaaaattaaaccagaaagatcaagaaagagaaaggtgtctaatggtctagtctaccaacttcactatgctgatttatgaaagaatt

SEQ ID NO: 899755 - DNA, 120 bp, Artificial Sequence
  ENSG00000231170_23 (sequence is synthesized)
gctgaaacccagtgaataatagcatttgcccttctttctcaaaaaagcagcatttgctttcttctggcaaggaataattaagctaatttctccatgaaccttggaaaaagtggcaacgaa

SEQ ID NO: 899756 - DNA, 120 bp, Artificial Sequence
  ENSG00000231170_24 (sequence is synthesized)
caaacatcttatcagctacaaattcatttgaggcagttccaggtcagccacaggcaatttttctcattaaaatactgtttaaactgttgtatccagatgacacaggagacatatcagaca

SEQ ID NO: 899757 - DNA, 120 bp, Artificial Sequence
  ENSG00000231170_25 (sequence is synthesized)
aacaacacctgcaagaagaattggtgaagtattgacttttcatcaatcaaaaagtttactaagcagatgaaaataatttgccttcacagtgacattttcctgacgtcttgctagtactta

SEQ ID NO: 899758 - DNA, 120 bp, Artificial Sequence
  ENSG00000231170_26 (sequence is synthesized)
aaggcattgttttttctttaacacccaaactttaattaccagaaaaggttagcatcaaaacaaaggacatgttggtaatttagaggccatatcagaaaaataaattcattttggtttgaa

SEQ ID NO: 899759 - DNA, 120 bp, Artificial Sequence
  ENSG00000231170_27 (sequence is synthesized)
gtcttgaagaaaattaaaccagaaagatcaagaaaggcactccttgatgaaataagtaagaaagcttgtcaagagccatcactcttgctcatgggacaagagaaggcactgacctgtgcc

SEQ ID NO: 899760 - DNA, 120 bp, Artificial Sequence
  ENSG00000231170_28 (sequence is synthesized)
caccagcaccccatcactgagccaacaccaccttcaggaagacagtctccagcagggcttcccccaattcccctagctgctttgcctctgctactccggtaagcacctgcagggaggcag

SEQ ID NO: 899761 - DNA, 120 bp, Artificial Sequence
  ENSG00000231170_29 (sequence is synthesized)
gcaccccagcacccactagcattctgcaacagctgttgcaccttggctcccccagtacagtggattccaaacctcaaggagtcaaagaacagatggggcccaatacaaattccccagaat

SEQ ID NO: 899762 - DNA, 120 bp, Artificial Sequence
  ENSG00000231170_30 (sequence is synthesized)
tacaacatgccgtccaggagttgagagctgagtgttgaccttctaaaatctcccagaaacaaagccaggtggctgaatccaccttatattatagtcaaaccctcaaggtcatcaaatcat

SEQ ID NO: 899763 - DNA, 120 bp, Artificial Sequence
  ENSG00000231170_31 (sequence is synthesized)
caaataggataaaagaaaaaaaaatccaaaggtcagcaacatccaagattgaagacagataagctcacaaagatgagaaagagtcagcacaggaaaactgaaaactcgaaaaaccagagt

SEQ ID NO: 899764 - DNA, 120 bp, Artificial Sequence
  ENSG00000231170_32 (sequence is synthesized)
gccctctttcctacgaacagccacatcacctctccagcaaaggttctgaactgagctgagatggccaaaatgacagaaatagaattcagaatatggataagaatgaagatcattgagcta

SEQ ID NO: 899765 - DNA, 120 bp, Artificial Sequence
  ENSG00000231170_33 (sequence is synthesized)
caggagtatgttgaaacccaatgcaaggaagtgaaaaatcatgataaaacaatgccagagctgacagacaataatggacagtatagaaaagactgtaactggcctgatagagtcaaaaaa

SEQ ID NO: 899766 - DNA, 120 bp, Artificial Sequence
  ENSG00000231170_34 (sequence is synthesized)
tataatacaagaatttcataatgcaatcacaactattaatagcagaatataacaagtggatgaatgaatcagagcttaaagaatggctttctgaaataagacaatcagacaagaatagag

SEQ ID NO: 899767 - DNA, 120 bp, Artificial Sequence
  ENSG00000231170_35 (sequence is synthesized)
aactcacttgtgtccctgaaggagatggggagaatagaaccaacttggagacatatttcaggctattatccatgagaaattccccagcctagattgagaggccaacattcaaattcagga

SEQ ID NO: 899768 - DNA, 120 bp, Artificial Sequence
  ENSG00000231170_36 (sequence is synthesized)
aattcagagaactccagtaagatacttcacaacaaaatgatccacaagacacataatcatcaaattcttcaagattgaagtgaaagaaaaaatattaaaggcagcaagagagaaaggtta

SEQ ID NO: 899769 - DNA, 120 bp, Artificial Sequence
  ENSG00000231170_37 (sequence is synthesized)
caaagggaagcccatcagactaacagtgggcctctcagctgaaaccctacaagtctgaagaaatcagaggccaacgttcaacattgttaaggaaaacaaattccatcccagaatttcata

SEQ ID NO: 899770 - DNA, 120 bp, Artificial Sequence
  ENSG00000231170_38 (sequence is synthesized)
ttcataagcaaaggagaaataagatcatctgtagacaagcaaatgctgagcaaatttggtaccaccagacctgccctgcaaaagttcctgaaggaagcaccaactatggaaaggaaagac

SEQ ID NO: 899771 - DNA, 120 bp, Artificial Sequence
  ENSG00000231170_39 (sequence is synthesized)
gcaccaactatggaaaggaaagactattaccagccactataaaaacacactgaagtacacaggccagtgacactataaagcatccacacatacaagtttgcaaaataacccgctaacact

SEQ ID NO: 899772 - DNA, 120 bp, Artificial Sequence
  ENSG00000231170_40 (sequence is synthesized)
atgatgacaggatcaaatccacagatatcaatactaaccttgaatgtaaatggactaaatgcccccaagtgaaagacagagtgtggcaagctggataaagaaccaagacccattggtatg

SEQ ID NO: 899773 - DNA, 120 bp, Artificial Sequence
  ENSG00000231170_41 (sequence is synthesized)
ctgtcttcaagacacccatctcatatgcagtgacatatataggctcaaaataaagagatgaagaaaaatctaccaagaaaatggaaaacaaaagaaagcaggggttgcaatcccagtttc

SEQ ID NO: 899774 - DNA, 83 bp, Artificial Sequence
  ENSG00000231170_42 (sequence is synthesized)
atggaaaacaaaagaaagcaggggttgcaatcccagtttctgacaaaacagactttaaaccaacaaacatccaaaaagacaaa

SEQ ID NO: 899775 - DNA, 120 bp, Artificial Sequence
  ENSG00000231170_43 (sequence is synthesized)
gagcacccagattaataaagcaagggtttagagaccttcaaagagcattgtacccccacacaaaaatagtgggagaatataacacctcactgaaaatattaaagagattatcaaaacaga

SEQ ID NO: 899776 - DNA, 120 bp, Artificial Sequence
  ENSG00000231170_44 (sequence is synthesized)
actcactgtgttcttgcgtgagtctcctggctgttaggaattctgctgctcaagtggaaaaaacagattgcaaagtacttcatagatcaccctgtactgagtatggcaaactgatcaaca

SEQ ID NO: 899777 - DNA, 120 bp, Artificial Sequence
  ENSG00000231170_45 (sequence is synthesized)
gcctacttactgctacatttatattatttaaaataactgccaggatgttgtggctgtgaactgggaagcctgccatgctattattttgaaaagtgctgtgcaaacagtgttcctctcaga

SEQ ID NO: 899778 - DNA, 120 bp, Artificial Sequence
  ENSG00000231170_46 (sequence is synthesized)
agtggatcatgaaatcagtttaatgagtcacgaacagcattaaaatgaaatagaatcaagggaaaaaagcatctttgtggtaagggcagttttttttttttttttttttttggtgtcaaa

SEQ ID NO: 899779 - DNA, 120 bp, Artificial Sequence
  ENSG00000231170_47 (sequence is synthesized)
tttttgtttcaggtctatctgaatgatgatgtaagaagaccactgttctagattttaagaacaaaagctttgctgccttgaacccccaaataattgctcaaattcaaactggttgttagc

SEQ ID NO: 899780 - DNA, 120 bp, Artificial Sequence
  ENSG00000231170_48 (sequence is synthesized)
gccgcggtcatcacagaatggcctggcacggtgaccacggagtgccctggcaccggtgcccgcggctgtgacggaaaaagggtgggaagaacagggaagaggaagcagaaacagagaaag

SEQ ID NO: 899781 - DNA, 120 bp, Artificial Sequence
  ENSG00000231170_49 (sequence is synthesized)
acagaatggcctggcacggtgaccacggagtgccctggcaccggtgcccgcggctgtgacggaaaaagggtgggaagaacagggaagaggaagcagaaacaggcactccttgatgaaata

SEQ ID NO: 899782 - DNA, 120 bp, Artificial Sequence
  ENSG00000231170_50 (sequence is synthesized)
attttttgtcttgtctccttctccccctttggccacatccccctcccccacatgaccacgctttcctgtgttcatggtcattctgttaacaatgtatagatttggagatttctttctagt

SEQ ID NO: 899783 - DNA, 120 bp, Artificial Sequence
  ENSG00000231170_51 (sequence is synthesized)
tttataagtttttctaagttttatacgtcttatcactaagtgcaactattcagtttaaaaaaagaaggagtattttgtagcagagaagtatgagttgaggacgtaggaatcctgttttac

SEQ ID NO: 899784 - DNA, 120 bp, Artificial Sequence
  ENSG00000231170_52 (sequence is synthesized)
atttcttttgctatttactcactgaaagcccttgggggaaaattatttcatctccctacatctcagcttccatactgacaaaaattttattgttctagatgacctctagggtgcattcca

SEQ ID NO: 899785 - DNA, 120 bp, Artificial Sequence
  ENSG00000231170_53 (sequence is synthesized)
cttttcaaatctccttggttgctcattattgattttaaaattctcacagaatgagtctgaataattgttgcatttcccttattgaggaagtatctttgattagagttcatttagcataaa

SEQ ID NO: 899786 - DNA, 120 bp, Artificial Sequence
  ENSG00000231170_54 (sequence is synthesized)
agagtcaacaaggggaagtttagtaggtgaagggtcactgctgccgagcagcaataactttccatgcctcagctcccaggcatctagtttctgttcatggaaatagagctcactagggga

SEQ ID NO: 899787 - DNA, 120 bp, Artificial Sequence
  ENSG00000231171_0 (sequence is synthesized)
cagctagaatgatggattgtcatcactggggcacgggaaaggggttgagcaagtcaatgtatgttttccagagcctacagaatgtgtctgattctctgaagtatattttttctaaatgcc

SEQ ID NO: 899788 - DNA, 120 bp, Artificial Sequence
  ENSG00000231171_1 (sequence is synthesized)
aggcatcatgtcaacagggacaagatggttcacctaatcaataaagactacatccagccagataaggacacaaccaggtatactcttccactaacagtccttaccagaggactctgtgac

SEQ ID NO: 899789 - DNA, 120 bp, Artificial Sequence
  ENSG00000231171_2 (sequence is synthesized)
gacgccaccaattcaaaaccactgtgttaacagacaccatattgctgtcacttgtgataagcacctagtatctgctgctgaaggctctgcctacatcacagactcttgatggacagatgg

SEQ ID NO: 899790 - DNA, 120 bp, Artificial Sequence
  ENSG00000231171_3 (sequence is synthesized)
atgacccagacccaggacaggatactctttttgtccacgtctctccctggactggttaaattaactctttttctgtccccttttacttaatgttaaatgttactttgtttgttgtgatat

SEQ ID NO: 899791 - DNA, 120 bp, Artificial Sequence
  ENSG00000231171_4 (sequence is synthesized)
gtttagtctatgacatttacaaattgattaagtatactatttatttatggtttgcaatgttgaccgacttgtggagtggcttgagcctgtggctgtgactactgagtgaacaggacggat

SEQ ID NO: 899792 - DNA, 120 bp, Artificial Sequence
  ENSG00000231171_5 (sequence is synthesized)
gtgcgtggaaatggccggctcaagcagccgagacagagcagagtgtgagagagctaatggaagtaagctgctgaagaaaccgtattcacctgcctatggcccgtgagtgttcttgaagct

SEQ ID NO: 899793 - DNA, 120 bp, Artificial Sequence
  ENSG00000231171_6 (sequence is synthesized)
atctggcgttcatccacccactcccctcggacctcagcatgggctggaacctcaccctagacctaacagatgctctcatgagcactcttcaaactcagaaatttcccttacgtcatcacg

SEQ ID NO: 899794 - DNA, 120 bp, Artificial Sequence
  ENSG00000231171_7 (sequence is synthesized)
agccgaagatttctaattaaattcctcccgagttcattctgcttcctgccacactgtgaaaaaggtgcctttcttctggtttgccttctaccatgactgcaagtttcctgaggcctcccc

SEQ ID NO: 899795 - DNA, 120 bp, Artificial Sequence
  ENSG00000231171_8 (sequence is synthesized)
agccatgcagaactaacatttggataccacttacctctgagacagttcttttggaaattataaatatatttctttccggggatcaaaagaatccacatcaacatgaaagatgaagtgttg

SEQ ID NO: 899796 - DNA, 120 bp, Artificial Sequence
  ENSG00000231171_9 (sequence is synthesized)
gaagaagttataaagcaaaactgacttgagtaaccaccagcccaacattcgggactttgtggggattgctatggctctgccggacttacaagcaatagtgatgcagaacctgtcattagc

SEQ ID NO: 899797 - DNA, 120 bp, Artificial Sequence
  ENSG00000231171_10 (sequence is synthesized)
atgtgtaatgcttgtcaaaaaataatctcccaagaaatgttttaattttcactggtcagtgcactaccaatactagttttggcatggcggataataaataacaaacctttgtttcgaata

SEQ ID NO: 899798 - DNA, 120 bp, Artificial Sequence
  ENSG00000231171_11 (sequence is synthesized)
aaaagtacgggatttctcattttagttcagttctcaaagctttgtagatagaggcctgaaatgaaatatttgaatttttaaaaatattcttcttgtctggctgtgtaaatgattgcaatc

SEQ ID NO: 899799 - DNA, 120 bp, Artificial Sequence
  ENSG00000231171_12 (sequence is synthesized)
aatcagattttctttgttcaagaaaaaaaacatgaaattacaatatgaatatttttcacatgtaattttagttatacagtgggcaatgactgacagcttaacaatgtcccactgtggcaa

SEQ ID NO: 899800 - DNA, 120 bp, Artificial Sequence
  ENSG00000231171_13 (sequence is synthesized)
gagtaatgtgttattttgggaaaaatatttttacttaagaaaagttaacttgcaataagttgattttaaaagtctccttggaaaataattttgaaggtcacaaaagtatatttggagtct

SEQ ID NO: 899801 - DNA, 120 bp, Artificial Sequence
  ENSG00000231171_14 (sequence is synthesized)
tggagtctattattttacaattttataaactaattttaaaaaatgtattaagaccttacctgttacaaaaacagaaatctgcagcaaaaataaaatgatctatttcatggttgtttataa

SEQ ID NO: 899802 - DNA, 120 bp, Artificial Sequence
  ENSG00000231172_0 (sequence is synthesized)
acatgtttgcttccccttccaccatgatcctaaggcctccccagccatacagaacttccccaaactacaaacacaaaggaagctcccatggaatcggatgatggcactgtacgaatcaag

SEQ ID NO: 899803 - DNA, 120 bp, Artificial Sequence
  ENSG00000231172_1 (sequence is synthesized)
atcggatgatggcactgtacgaatcaagatgcagctagcaataaaaacagaagacaccaacaccagcagtccagagacctccagtataacataaagtgttcatagtatcctgaggattcc

SEQ ID NO: 899804 - DNA, 120 bp, Artificial Sequence
  ENSG00000231172_2 (sequence is synthesized)
agtcacacaggctcaaacctgaggatcaccccggatccttcctctccgttgtccggaaaaatcctacctcctatcctttctaaccctccatcccactgtcactcctctaattcagaaatt

SEQ ID NO: 899805 - DNA, 120 bp, Artificial Sequence
  ENSG00000231172_3 (sequence is synthesized)
tctctcctttcttcccccatgcaccccaatctcatatagtggtgtgatatgatttggctctgtgtccccaaccaaagctcatcttgtagttcccataatccccatgtgttatgggaggga

SEQ ID NO: 899806 - DNA, 120 bp, Artificial Sequence
  ENSG00000231172_4 (sequence is synthesized)
tttctttcgtaaattgcccagtctctagtatgtctttatcaacagtgtgaaaacggactaatacatggtgccaggctgagcatttggaaacagtgttctaacaatgccactcatctgttc

SEQ ID NO: 899807 - DNA, 120 bp, Artificial Sequence
  ENSG00000231172_5 (sequence is synthesized)
caaaattgccaaaggatccacactgcctagagtgaaattcaaatgtgagcctgtaaatcaaagcgcttcatgagttcttcccaacctacctttccatcacagcccaacatcaggcaaaca

SEQ ID NO: 899808 - DNA, 120 bp, Artificial Sequence
  ENSG00000231172_6 (sequence is synthesized)
gaaccactgtcttctccgttcatttcccacttggttctacttctgggttttgctctgtttggcatgtgttttcctgcatcactgcatttccgagtcttacccatccttcaaagttcatgt

SEQ ID NO: 899809 - DNA, 120 bp, Artificial Sequence
  ENSG00000231172_7 (sequence is synthesized)
cacatcacctcctgcaagaacattctctgatcctctcctgcgtgcataatcactccctcttttggactcctgcaaccctgtgtgccactctttcgcactgagtaaaagtatgtgcatttc

SEQ ID NO: 899810 - DNA, 120 bp, Artificial Sequence
  ENSG00000231173_0 (sequence is synthesized)
gggtgcggtggcgactcccacggcggatggctgggtcgagagcacatctttattttctctctagatcattcttcttcctattttgatttgagaaagggaacgtgagaattaggtcaacca

SEQ ID NO: 899811 - DNA, 120 bp, Artificial Sequence
  ENSG00000231173_1 (sequence is synthesized)
gttgaaaggctcagggtgctcgcccacatcagtgagggaggtgcagctgatgaaggaagtgctgggtgcagaaggggatgctctgaaatggtggcttctgtttgcagtttcaaagctcag

SEQ ID NO: 899812 - DNA, 120 bp, Artificial Sequence
  ENSG00000231175_0 (sequence is synthesized)
ggtgactatacttctctctttcaccagtctttaatttgcaaaaaggattattaatatcaaaacctgcaattacgtttgtaccaacctaatatttaaacgacatcacttaatctgcattta

SEQ ID NO: 899813 - DNA, 120 bp, Artificial Sequence
  ENSG00000231175_1 (sequence is synthesized)
tcaagaagtactcagcatttcaaggccttctcctcgacaatgccgcagaaactactcatcaaattaagcaatgaattccacatagatatagccaaaggttgcaatccttgtgtggccctg

SEQ ID NO: 899814 - DNA, 120 bp, Artificial Sequence
  ENSG00000231175_2 (sequence is synthesized)
cctggaagccttctctcattcagagctagtagatacaggaagaagagtgaaggaagaggaggagtgaaaataggcatggaagcctctaagcctccaggtactgggagcagagagagaggt

SEQ ID NO: 899815 - DNA, 120 bp, Artificial Sequence
  ENSG00000231175_3 (sequence is synthesized)
caattatacaaacacggaaagaccagaaacagactggaagaaaatatttgcaaaacatgtgtcaggaaaaggttgtgtatcctatatatataactaatttttgaactcatttgtaagata

SEQ ID NO: 899816 - DNA, 120 bp, Artificial Sequence
  ENSG00000231175_4 (sequence is synthesized)
cctatatatataactaatttttgaactcatttgtaagataatcaacctgattaaaaagaaatgtgcaaaaatgtgagcagcatttcaccaaatatggtgtgtgtgtgtgtgtgtgtgtgt

SEQ ID NO: 899817 - DNA, 120 bp, Artificial Sequence
  ENSG00000231175_5 (sequence is synthesized)
cccaacattgttaatcatttgagaaatacaaactaaaccataagaatacaccatcacatagttgttaagatggctaaaattacaaagtttgctaatacccagggttgttaaaagtgtgga

SEQ ID NO: 899818 - DNA, 120 bp, Artificial Sequence
  ENSG00000231175_6 (sequence is synthesized)
tcaactggacctctcattcattgttggtgggaatataaaatgctacaatcaactgggaaataaatagttcagcagtttcctattaagttaaagatacacttataaacagtcagtgattca

SEQ ID NO: 899819 - DNA, 120 bp, Artificial Sequence
  ENSG00000231175_7 (sequence is synthesized)
actcccagatatttacccagcagatatgaaaaatatccatacaaagcttatatccgcacaaaacttacactccccataatggaaaaaaaggatctctgctttagatctagttgttagaga

SEQ ID NO: 899820 - DNA, 120 bp, Artificial Sequence
  ENSG00000231175_8 (sequence is synthesized)
aagtctgtataagaatgctttaacttaaagcttgattggaaggaagaagaaagccatgccaaatctaggaaaaatattaaacactaaacaagtagctggcacaaaagctctaagatagta

SEQ ID NO: 899821 - DNA, 120 bp, Artificial Sequence
  ENSG00000231175_9 (sequence is synthesized)
tatggcaggcagtgaaattttcaagaaatatggaagccataccaaagaaaattctaaagcccagttgtagaattaaaaatcaaccatcagtattttccaacaacagtgtaactaaaaata

SEQ ID NO: 899822 - DNA, 120 bp, Artificial Sequence
  ENSG00000231175_10 (sequence is synthesized)
ttataagcaacagacaacagtattctgacttcacaaatatccagattgtgtgtttatattataattccttctctatgtataccatgtaaaacctccatgtatcttaaaagacagtgatgt

SEQ ID NO: 899823 - DNA, 120 bp, Artificial Sequence
  ENSG00000231175_11 (sequence is synthesized)
tgtaaaacctccatgtatcttaaaagacagtgatgttaatatcaatactggcagaaataacttgactggtatataattaattgtccaatctacctgggcctggtggctcacacctgtaat

SEQ ID NO: 899824 - DNA, 120 bp, Artificial Sequence
  ENSG00000231175_12 (sequence is synthesized)
tgagcccaggaattcaagaccagtctgggcaacatgactaaaccccgtttctacaaaaattacaaaaattagcctagctcggcatggtggtgcatgcttgtagttccagctactcaggag

SEQ ID NO: 899825 - DNA, 120 bp, Artificial Sequence
  ENSG00000231175_13 (sequence is synthesized)
attgaggtggaaaaatcaactgagcccaggaagttgaagctataatgagtcatgattgctctactgtacttcaccttgaacaacagagtgataacctgtctcaaaaaaaaaattggtcaa

SEQ ID NO: 899826 - DNA, 120 bp, Artificial Sequence
  ENSG00000231175_14 (sequence is synthesized)
tctaatgccacattatattttgctttatatttggggtatattttatttcatagtttattatttttcccttcatgagttctaatagttttctcctcgacctaaggttaatccacttttacc

SEQ ID NO: 899827 - DNA, 120 bp, Artificial Sequence
  ENSG00000231175_15 (sequence is synthesized)
atatgcttatcatctagtgcatagaacctccctgtttgtcaaagcactctaattgttgctttttattcatttcagaatgaatgttttctatatgcctgctgcaatgcatatcttttcctg

SEQ ID NO: 899828 - DNA, 120 bp, Artificial Sequence
  ENSG00000231175_16 (sequence is synthesized)
ttacttattttccttgaactcatggattagagtttctcttctatattttttgtttgcaattttcttccttatttgttataattcaccttcaattaacttgtttggctaaagtatatgaaa

SEQ ID NO: 899829 - DNA, 120 bp, Artificial Sequence
  ENSG00000231175_17 (sequence is synthesized)
acaaaacctttggaattcttgcacatgcaaaactgttactatgatgctctcacatatgtttgtataatgtgtataattgcttactatacatattaattaaagattcaaaattgctttcta

SEQ ID NO: 899830 - DNA, 120 bp, Artificial Sequence
  ENSG00000231177_0 (sequence is synthesized)
tgagtagggggcctgcagtgtgctgtgacgcctgggaaggggattctaagccatttcccatcagccgtttactaagtagcctggggatcttgttaaaatgcagatcctgatagattaggg

SEQ ID NO: 899831 - DNA, 120 bp, Artificial Sequence
  ENSG00000231177_1 (sequence is synthesized)
ctggggtgctgcccaagattctacatttctaagagtccctggatgacggtggcattcacagaccacagcttctatgtgagggagagcagttgggtttctgtctgcctgccgcacctgatc

SEQ ID NO: 899832 - DNA, 120 bp, Artificial Sequence
  ENSG00000231177_2 (sequence is synthesized)
agtagttagtgcctgcatgtgtggcggccagaattttacttggggagacgctcggctcctagcaccctctgtggtaggggttttccagagtgtgggcattaccccaactgtctctgcaga

SEQ ID NO: 899833 - DNA, 120 bp, Artificial Sequence
  ENSG00000231177_3 (sequence is synthesized)
cggcttcctgcatgtttcccacaagcgctcagatggctgaattggcaagtctgtggtgctgctctttggggccacctcgttctttgcctttccctccccttagcgatgtgtcccatccgt

SEQ ID NO: 899834 - DNA, 120 bp, Artificial Sequence
  ENSG00000231177_4 (sequence is synthesized)
tgcctacagtcaagtcagtccacatgtttaggctaaggtgggcatgaccgagtggccttcccccgggaagaccagtgtcgtaactggaattaagttgtggaacataagagtcaaggctcg

SEQ ID NO: 899835 - DNA, 120 bp, Artificial Sequence
  ENSG00000231177_5 (sequence is synthesized)
tgtgaactggagttgagggaatgtttggggatcccacctggtatcagtaagggaaccatggcgacggccagccttgcccatgtgaggcatttgctttgtcaggccttctcagtagtggag

SEQ ID NO: 899836 - DNA, 120 bp, Artificial Sequence
  ENSG00000231177_6 (sequence is synthesized)
aagggaggaaggagaatgcagctctttcagtgctgtctagcagtgcccaagagccgtgattgggcacctcacttaacgtctaacttcagattcactcttgggcattcctgtcttcctctc

SEQ ID NO: 899837 - DNA, 120 bp, Artificial Sequence
  ENSG00000231177_7 (sequence is synthesized)
caatcttgaatggatgttggcttcgataatgtcatcctgaagtttctttgtccacacagccctggctggttgttaataagctgttaatgcagccttgcactcaggaagccctgatgttta

SEQ ID NO: 899838 - DNA, 120 bp, Artificial Sequence
  ENSG00000231177_8 (sequence is synthesized)
aaggaactgtgtctttgttcttcctctcttccctctttctcttagtcccactttatctcttctttctcttcctctccctcctccttttcccctctccctcctactctccccctttctctc

SEQ ID NO: 899839 - DNA, 120 bp, Artificial Sequence
  ENSG00000231177_9 (sequence is synthesized)
ctccttctctaagaaacccagtcttaattccacacaatgcatgcacatgcagtagcttctctgcttgagtgagctggtgtgattaggttttctaaacatgcacattggccttgctacttg

SEQ ID NO: 899840 - DNA, 120 bp, Artificial Sequence
  ENSG00000231177_10 (sequence is synthesized)
tccttttattcccttcccacagaccataaaccaagaattatttttatttgtattattttgatttttttaaagtaaaatattaacttttcctctttgaaataaattcccatttggaacatc

SEQ ID NO: 899841 - DNA, 120 bp, Artificial Sequence
  ENSG00000231178_0 (sequence is synthesized)
gaagggatgaagtggcaggagaaatgaagtcttcctaactctggcctcctgctgctacacaagccaggccaatgatgtggcaagtccaaggggcacatggcttttcagtgtcattgtttg

SEQ ID NO: 899842 - DNA, 120 bp, Artificial Sequence
  ENSG00000231178_1 (sequence is synthesized)
aggaggccatgagtggtttagctggtggcctctgcttctttttcttttgagtgcttctgaatacatgactgtgctctgaatacagagctaccactgcggggtaaaccaagccacagctgt

SEQ ID NO: 899843 - DNA, 120 bp, Artificial Sequence
  ENSG00000231178_2 (sequence is synthesized)
cctcttccaaggttagggtcgctgctcagcaggagctgatgtgctacaaggaatgatgatcttctactgcagggatggtgatggccggttgaagtgttgactgagcttggagccaggtgc

SEQ ID NO: 899844 - DNA, 120 bp, Artificial Sequence
  ENSG00000231178_3 (sequence is synthesized)
acggtggctgctaggcgccttcactccatcctggaacagcaggagaaagtgcctcatgaagttcggaagaaataaagggaacctaagcatgttgcagggctgctttatctcacaaaaagc

SEQ ID NO: 899845 - DNA, 120 bp, Artificial Sequence
  ENSG00000231178_4 (sequence is synthesized)
acatcaacagcatctgctcttcaacaggacaacagaaccaggcctcctgactgcccctccctgcgctccgggcctgcagaaggcgcctgatgtgacttcgcattattttgaagctggaaa

SEQ ID NO: 899846 - DNA, 120 bp, Artificial Sequence
  ENSG00000231178_5 (sequence is synthesized)
agaggttttgccttctgagggctgttaaaattgactacgctatatgaaatcaacatgctggaacataataatgaggacaatgaggcattcagggaaatcatcaatatcaacagacaacag

SEQ ID NO: 899847 - DNA, 120 bp, Artificial Sequence
  ENSG00000231178_6 (sequence is synthesized)
aatattatcctaagatgttgttgtaggttacattgtgcctcacagaaagatgtattgaagtcctaatccccagtttctgtgagtgtggccttatttggaaatagagtctctgcagatgta

SEQ ID NO: 899848 - DNA, 120 bp, Artificial Sequence
  ENSG00000231178_7 (sequence is synthesized)
atcaagttaagacaaggtcatcgtgaattaggtgtccaatgattgatgtccttatgagaagagagggagatttgaatacagacacagagacacaaacggagggaagaaggctggtgactg

SEQ ID NO: 899849 - DNA, 120 bp, Artificial Sequence
  ENSG00000231178_8 (sequence is synthesized)
agtcctcgtcccccatctcctatgcctgcacagaggagaactctttgtaaacatcaagtgtcatgaccatcagcccctggaaaacatctggtctgccttcactagaggaccattttcaat

SEQ ID NO: 899850 - DNA, 120 bp, Artificial Sequence
  ENSG00000231178_9 (sequence is synthesized)
tactttggggataagaagattggccctgatggaaagtgaattgctcatgagatccagtcaatgaaagaaaaaaagaaaactgtactttagctcaggaactagaataaagtttccaaaaaa

SEQ ID NO: 899851 - DNA, 120 bp, Artificial Sequence
  ENSG00000231178_10 (sequence is synthesized)
actttcagtaattccttttgccagcaagacatggatattttgcagaagtgttggctcgactataggtgtcacagatgaggctctgagtatgccaagatttgagccagcctgcctgggagc

SEQ ID NO: 899852 - DNA, 120 bp, Artificial Sequence
  ENSG00000231178_11 (sequence is synthesized)
ccctcacagctattgaggaggaaggctctgaccagtacagtccttgcaaagagggagtgagcatgctggctctctgcgggccaggtttggctctcaacatgtcctgtttcgcttaaacaa

SEQ ID NO: 899853 - DNA, 120 bp, Artificial Sequence
  ENSG00000254204_0 (sequence is synthesized)
tcatttcagaaacacattttataagatttcctgcctggagattcatacagcagagtagcatattaaagtctctgaaacatcttgcagtaaagaaacctatttaacttttttaaactcagt

SEQ ID NO: 899854 - DNA, 120 bp, Artificial Sequence
  ENSG00000254204_1 (sequence is synthesized)
aattgaagttctgcccctcgggtggcagcctccagaaataaattgagagatgaatatattagaagcaaaaacaactgcaaaggcccagcaatcaattaaaagggcctgaactgggtgaga

SEQ ID NO: 899855 - DNA, 120 bp, Artificial Sequence
  ENSG00000254204_2 (sequence is synthesized)
agctgtaacaaagtgccacaggctgagcggcctaagcaacagaaatgtactttcctgcggttctggaggccagaagtacaaggccaaggtgtggagggtgaggctggcagcatataagct

SEQ ID NO: 899856 - DNA, 120 bp, Artificial Sequence
  ENSG00000230881_0 (sequence is synthesized)
cgccacaggctgccctttatcaggggagcaagtgaccaacttccctgcctgttctgaggctgcaagacggtccactgctggtgggtctggcagggctgacttatggagtaatttctccca

SEQ ID NO: 899857 - DNA, 120 bp, Artificial Sequence
  ENSG00000230881_1 (sequence is synthesized)
tgcctggggtcagggcaggacagaggctatggggaggggttgagtgtcttgcccaaagtcacaaggcagctcaaaagtggtgacgcaaggactggaccccagatctgacttgtgtgccct

SEQ ID NO: 899858 - DNA, 81 bp, Artificial Sequence
  ENSG00000273388_0 (sequence is synthesized)
cagccacgtggaactatgccctgaccttccgggaaaccctcggtgagaggcccacagcctcgcttctagggtcaccactgc

SEQ ID NO: 899859 - DNA, 120 bp, Artificial Sequence
  ENSG00000273388_1 (sequence is synthesized)
ggtgagaggcccacagcctcgcttctagggtcaccactgcttcttccagtctagccaaacagctcctagtacagctcagagcaccctgcaaggagggcacgtgttaaatcgaggagcaca

SEQ ID NO: 899860 - DNA, 120 bp, Artificial Sequence
  ENSG00000273388_2 (sequence is synthesized)
gtgggttcactatgaagcttgtgaaataagcttcagggcccgcatttgcatgggccacagagagtctgggagctgcagaaggttcaagggaagaggagccatcacaagcagaatattcta

SEQ ID NO: 899861 - DNA, 120 bp, Artificial Sequence
  ENSG00000273388_3 (sequence is synthesized)
gaaggcatttctggcaaatggcccaaagaggcctcaggagaaaagaacttgagtcttcaaggtaacctgcgacttttttgtctcattttaaatatcaactttcatgcctaatttttataa

SEQ ID NO: 899862 - DNA, 120 bp, Artificial Sequence
  ENSG00000263435_0 (sequence is synthesized)
aaggcagggaggaaagtgacattgttgagccctgtgcccggtgaagtacgcatgtgagctcatccaatctgcagccactccaggaggagggcatcattatcctcaataaacagatgagca

SEQ ID NO: 899863 - DNA, 120 bp, Artificial Sequence
  ENSG00000263435_1 (sequence is synthesized)
cccaaggagaaagggtggttcacatccaatgattgatccatggaaagacattgaggcctgagcccctttccccagtctggaacaactctgaaggctcattccatttcacatttcccatgg

SEQ ID NO: 899864 - DNA, 120 bp, Artificial Sequence
  ENSG00000273384_0 (sequence is synthesized)
gggaaaatggataataatgaagcccacagattttcactccagaactgactttgctgcagaggagtgaggagagctgcctggcaacgcaacgcatcgctgtgcataaactttgtttacagc

SEQ ID NO: 899865 - DNA, 120 bp, Artificial Sequence
  ENSG00000273384_1 (sequence is synthesized)
caaggctggagtaaaggaacagatggcaagaaaatcggatttaaagaaaggaaggatgtgcttgcatctgggagctcggtaaatctcttggcttctggtgtgcgtacaagggtgacgtct

SEQ ID NO: 899866 - DNA, 120 bp, Artificial Sequence
  ENSG00000273384_2 (sequence is synthesized)
tcatccctcccacaggaaatgtgttttcccagggatttgtatgttccctaaccttttatggaaagcagtttcttgatcatccatgtgattgtgtatctaaaatttcaagaatatttaagc

SEQ ID NO: 899867 - DNA, 120 bp, Artificial Sequence
  ENSG00000273384_3 (sequence is synthesized)
tgttaatcctgcttgtctgtagaagatgggtttatatttctatgatcttggaaatatttacaatgagcatgtataacaaggagaaataagcataaacatttatgcctgccacattcgtaa

SEQ ID NO: 899868 - DNA, 120 bp, Artificial Sequence
  ENSG00000263438_0 (sequence is synthesized)
ggctctcaagcaaggtccacttgcagtgaaataaaccagaggtttgaatcatggcttgatacgaaattattggaaagaatatggcgatgacatccacaatgccggataaagaaaatattt

SEQ ID NO: 899869 - DNA, 120 bp, Artificial Sequence
  ENSG00000263438_1 (sequence is synthesized)
agaagatgagattcctgtgtttctggctttcataactttttagatttcctttctactggaaaacttttaactttgaaaaccgcaagtaatatttttcttcctgaaacctctgcagtggta

SEQ ID NO: 899870 - DNA, 120 bp, Artificial Sequence
  ENSG00000263438_2 (sequence is synthesized)
caaggcagcatggtttcatgcagaggatctaaactggggaccatgtgctgggctgcaaaagggctgtgcagtgcctaaaatgttatgcaaaattttataaaggtaggtcatgtattgctc

SEQ ID NO: 899871 - DNA, 120 bp, Artificial Sequence
  ENSG00000263438_3 (sequence is synthesized)
cattgatgctgcccttattcatgatgattaaagcctttgggaggtattccttcagaataatggacaacttcgataagtactggtaagaaaataagtagaaactctaaatttgaagtcttc

SEQ ID NO: 899872 - DNA, 120 bp, Artificial Sequence
  ENSG00000263438_4 (sequence is synthesized)
gttctaatggctctcaagcaaggtccacttgcagtgaaataaaccagaggtttgaatcatggcttgatacgaaattattggaaagaatatggcgatgacatccacaatgccggtaagaag

SEQ ID NO: 899873 - DNA, 120 bp, Artificial Sequence
  ENSG00000263438_5 (sequence is synthesized)
acgaaattacaagcaggatgaaaaatttgttcaatgaaacacagctattaagtggctgacctaataagtgttatgtataagtgactcatccattgtagcttctgggactcaactttagga

SEQ ID NO: 899874 - DNA, 120 bp, Artificial Sequence
  ENSG00000263438_6 (sequence is synthesized)
tcatcgtcatatgcagcctggagctagccatatttgaagagctaggaaggaggcacagtgattgacaatctcctttctcctcaactagaatgtcatttccttttttaaaactaatttaaa

SEQ ID NO: 899875 - DNA, 120 bp, Artificial Sequence
  ENSG00000263438_7 (sequence is synthesized)
tcccatctacattcaattgcttgtctaaaataaaacccaactcctctcttaaagactttaaaaatattatatagcagagttcatcctttctttcttcagagaaagcatcatgaaaacatg

SEQ ID NO: 899876 - DNA, 120 bp, Artificial Sequence
  ENSG00000263438_8 (sequence is synthesized)
ttttcaggacattaataacttgatattcacaaccaacctttaaatttggaaacaaggaattcataactacgttgtatatatatgaagaaagtaagcctcagagaatttcaagagcccgtc

SEQ ID NO: 899877 - DNA, 120 bp, Artificial Sequence
  ENSG00000263438_9 (sequence is synthesized)
caggatagtctgcttcagagccatggttctcaaagtatatcagatctccagagtaggtctgcagtgggagccaaaattttgcatttctaacttggtcccaggtgatacttgtgctggcgc

SEQ ID NO: 899878 - DNA, 120 bp, Artificial Sequence
  ENSG00000263438_10 (sequence is synthesized)
tagacatgtagaaattttatatttttatagataaactcattggattatctgtttttcatcttggaacacactatcaacattttctttagaagatatgcaggacaggtggctttcagtggg

SEQ ID NO: 899879 - DNA, 120 bp, Artificial Sequence
  ENSG00000263438_11 (sequence is synthesized)
aagaaagtgtcctaactaaaaacctcaaggaagatagggcatgtggaaataaagaccatccaaatgagaacaaacataagctatgtattcagagcttgctacagcaagggcatccatgcc

SEQ ID NO: 899880 - DNA, 120 bp, Artificial Sequence
  ENSG00000263438_12 (sequence is synthesized)
accacttcaacttgtcagaggctgaaaggcagacaaagcagtggggaagctttagagtggagaaaaggaaaggtgttaggcatgttttaattgaggtcattgtcatgatagcactggagt

SEQ ID NO: 899881 - DNA, 120 bp, Artificial Sequence
  ENSG00000263438_13 (sequence is synthesized)
caatggaggtaggctagcaaaaagtgagacatcttatgtgatgggtttggggatcacatttagctttctctggttggttctgaattggaaaaaagaaaaaaaaaagatgaaaaataagga

SEQ ID NO: 899882 - DNA, 120 bp, Artificial Sequence
  ENSG00000263438_14 (sequence is synthesized)
ggctggcagttgttgaccaaatcgtgaccattctggaccaatcttaagagattgtaactggtttcctgcaatggttgctgcagagtctgtgggccagagttctgtttattacacatagaa

SEQ ID NO: 899883 - DNA, 120 bp, Artificial Sequence
  ENSG00000263438_15 (sequence is synthesized)
tgacggttatctgtttctaattcagtttctcaagagcttacaaggatgtcagcaaaagcaagccatctctgactccacagtcaacttatccactaggcagacatgacctactgtcaaaag

SEQ ID NO: 899884 - DNA, 120 bp, Artificial Sequence
  ENSG00000263438_16 (sequence is synthesized)
cccatgatacttttagggacctataagaacattttaatttcttttaaaatcagaaaaaaaaatgaacttacagatttttaaatgtttgaatgcataatgtcaatatatttattccaagtc

SEQ ID NO: 899885 - DNA, 120 bp, Artificial Sequence
  ENSG00000263438_17 (sequence is synthesized)
cctttgggaggtattccttcagaataatttggtgttgttttcttcagtcaagaggtccacagagctgtctttcattctgtaggtttatcagcaactgatgcttaaaacctattaggcact

SEQ ID NO: 899886 - DNA, 120 bp, Artificial Sequence
  ENSG00000263438_18 (sequence is synthesized)
gcaaaaaaagagtgcacaccttctacttattaaaaaaaaaaacaaactgtaaaacagcatcatgcaggttcttcaggagagattccagaggaaggcattgttgtggtagaagatgacagt

SEQ ID NO: 899887 - DNA, 120 bp, Artificial Sequence
  ENSG00000263438_19 (sequence is synthesized)
tccacaggtgttactagccatgaagatcttccagtgagacaagatgtggaggtggaagacagtgatattgatgattctgatcctgttgttataaataaagtttcggttccacaaaagaaa

SEQ ID NO: 899888 - DNA, 120 bp, Artificial Sequence
  ENSG00000263438_20 (sequence is synthesized)
atgtacaggagacgttttgaccgttttcccacaaacttgacctatccacaggctttttcatctctgttttggcatttacataggtaagaataaataaatatatctctgtgcaatcatcaa

SEQ ID NO: 899889 - DNA, 120 bp, Artificial Sequence
  ENSG00000263438_21 (sequence is synthesized)
tcttactatcttctattaaatattatttataataaaagctgtaggctaattcagaaataagactcccatcaaaatgcatgtaaatatattaagcaagttaagaaaggctgtagactagga

SEQ ID NO: 899890 - DNA, 120 bp, Artificial Sequence
  ENSG00000263438_22 (sequence is synthesized)
aaatgactattccactaagaagttttgaagtggaacagagacactgctttttgagaaatatcaccagggctactcatcaagatgtttccagatcacatgctttatattgttgtatgaaac

SEQ ID NO: 899891 - DNA, 120 bp, Artificial Sequence
  ENSG00000263438_23 (sequence is synthesized)
ctgagagagcagaactggtgaaatccatcaaccaagatgaaaaattattgcaactttgaaaacagaaatggctgtaaaaattaaaactgatgagactcggagtttaagaaacccaaggcc

SEQ ID NO: 899892 - DNA, 120 bp, Artificial Sequence
  ENSG00000263438_24 (sequence is synthesized)
acaaatccccccatgagacagacttccttgaggacaaggactatcttccatttctgtgtaccatgtgcctgtaatagtgttggaaacagagtaggcactcaataaatatttgtcaaacta

SEQ ID NO: 899893 - DNA, 120 bp, Artificial Sequence
  ENSG00000263438_25 (sequence is synthesized)
agaggtttgaatcatggcttgatacgaaattattggaaagaatatggcgatgacatccacaatgccggaattatttgacctacttcttctatcatgcgctgaggataaagaaaatattta

SEQ ID NO: 899894 - DNA, 120 bp, Artificial Sequence
  ENSG00000263438_26 (sequence is synthesized)
ttcctgtgtttctggctttcatacaaaagcctcgactcaggaaccttctgggggactgggaacctttgggaccctgaactggaaccggaactggagctggagctagagacatagccacag

SEQ ID NO: 899895 - DNA, 120 bp, Artificial Sequence
  ENSG00000263438_27 (sequence is synthesized)
cagagccatggttctcaaagtatatcagatctccagagtaggataaagaaaatatttagaagatgagattcctgtgtttctggctttcatctttttgctttgaaaagtggacccagtgct

SEQ ID NO: 899896 - DNA, 120 bp, Artificial Sequence
  ENSG00000263438_28 (sequence is synthesized)
tatggctgcatcaccattttcattaccagttcaagaacagaagctaaaccactaacagtggcaacctaactcaatcttgttgtacaattacagaaatgatttccttgcttttaaagcctt

SEQ ID NO: 899897 - DNA, 120 bp, Artificial Sequence
  ENSG00000263438_29 (sequence is synthesized)
tataagtcaggaatttttaaaactggcattcaaatagatttctaattagtacaatgtagccccatctcagttcagttatgtcagccccatgtctatattgggcatctgaacagcatttaa

SEQ ID NO: 899898 - DNA, 120 bp, Artificial Sequence
  ENSG00000263438_30 (sequence is synthesized)
gaaagtttcattgcttaattttgaaaacactatatatgacaatatctatgttctcccaaatttgcttacctatgactcaatgcatggacaaagccaacaaaataaacaaaatgccattaa

SEQ ID NO: 899899 - DNA, 120 bp, Artificial Sequence
  ENSG00000263438_31 (sequence is synthesized)
aagcaaggtccacttgcagtgaaataaaccagaggtttgaatcatggcttgatacgaaattattggaaagaatatggcgatgacatccacaatgccgtttactggtcattcctgccatga

SEQ ID NO: 899900 - DNA, 120 bp, Artificial Sequence
  ENSG00000273381_0 (sequence is synthesized)
gggtttgctgatttatagtttaagaaactgaggcagcaggattcatgctgggcattctgtgttctgggttccaatgtttaacggctataccatcaagggcacggagccagtcttggtaga

SEQ ID NO: 899901 - DNA, 120 bp, Artificial Sequence
  ENSG00000273381_1 (sequence is synthesized)
tgtgaatgatgcttggatctgtcaagatgctagtagtgattggtgtatgtcctcacaactcagttccccctaaaaccagcaactggagtataagtgtgaagactcatggtttgatagcaa

SEQ ID NO: 899902 - DNA, 63 bp, Artificial Sequence
  ENSG00000273381_2 (sequence is synthesized)
aactggagtataagtgtgaagactcatggtttgatagcaatgcttgtcaaaaagggggcaaga

SEQ ID NO: 899903 - DNA, 120 bp, Artificial Sequence
  ENSG00000273381_3 (sequence is synthesized)
gggcgacagagcaagactccatctctaaaataaaataaaaaacaaaaagggggcaagatgtgctccctgtgggtcaagagtgtcccagacagcttttgggaagggtgacaggtgtgttgc

SEQ ID NO: 899904 - DNA, 120 bp, Artificial Sequence
  ENSG00000273381_4 (sequence is synthesized)
aagggtgacaggtgtgttgctctatttggccctggtcagactcatctggattgttgtattcagtactcagcattgcaatttcaggtggtcatagattcactctgtagttttctgtaaagc

SEQ ID NO: 899905 - DNA, 120 bp, Artificial Sequence
  ENSG00000273381_5 (sequence is synthesized)
acacaggagctctttggccaagtttcagctccaccgaagtcagcgatgagaccgtggacaaagtgcctcatgtccctgagcccatttcttcatttgtagaagaatccagtagttcaggat

SEQ ID NO: 899906 - DNA, 120 bp, Artificial Sequence
  ENSG00000273381_6 (sequence is synthesized)
ggttttgaagacccagtcacattggatgtgatctgtataaaagtgctttatgtggtggtcgtgttttatttgtttcatatttcagaagacgggaaggtgggtctcgcaaccatggctggt

SEQ ID NO: 899907 - DNA, 120 bp, Artificial Sequence
  ENSG00000273381_7 (sequence is synthesized)
ttggaggcatgtacaagaacctgggctcttcactcaggaaaagagaagtctagggaaacatggtagctgcctccagtagaactgcaatatgaaacaggtcttcagaggcttccagggcga

SEQ ID NO: 899908 - DNA, 120 bp, Artificial Sequence
  ENSG00000273381_8 (sequence is synthesized)
ggggaaaccatgcagggctcctccccacctccccacttctgcttgttgctctgcgcttgtccagagacaagagatgttgactaaagtctatgcagggaagttacttacaccctcctaggt

SEQ ID NO: 899909 - DNA, 120 bp, Artificial Sequence
  ENSG00000273381_9 (sequence is synthesized)
ccaaaagctgcccactgcctctggagtgttagagcagaaagtgggcaggcatgggcagggccattgctgcgggaagttaagaggcaccagaggacagttcttccaacttagacggttttt

SEQ ID NO: 899910 - DNA, 120 bp, Artificial Sequence
  ENSG00000273381_10 (sequence is synthesized)
gtgaagtgaaagcagactgcaggcctccagcactggcgcagactctgactggtgcaggcctctaacactggcatggatttagcagatgagaaagatgggtctccttacaaatactggtca

SEQ ID NO: 899911 - DNA, 120 bp, Artificial Sequence
  ENSG00000273381_11 (sequence is synthesized)
ctagtgagttgggccttgagagacagagaaaacaggtatctgcctaaggtgtgtctggttaactatattggcccttgaggtaatctacaatttaaggagttttagttcctctaacatttt

SEQ ID NO: 899912 - DNA, 120 bp, Artificial Sequence
  ENSG00000273381_12 (sequence is synthesized)
aagaaatcattctcatgtttgagtgccatgtttatagtaccaattttgggggccagggtgggaagattgccctgagcaaagctgtccattttcccatcatctagttggttttcatggagc

SEQ ID NO: 899913 - DNA, 120 bp, Artificial Sequence
  ENSG00000273381_13 (sequence is synthesized)
ggcccacctgctccccacctcaggagatactggaggactctagccctgcggtggctgtggtcaggccaagggcaggccaggcttccttcctaggcttcagttcattcccccatcttgctg

SEQ ID NO: 899914 - DNA, 120 bp, Artificial Sequence
  ENSG00000273381_14 (sequence is synthesized)
ccaaggtacctttagatgttttggtcccctaaagcatttaaacagactgtcgtgtaaaatgctgtctgaacaaagtctcccatgaacccacggcacagtgtgtacctgaacctcccaaga

SEQ ID NO: 899915 - DNA, 120 bp, Artificial Sequence
  ENSG00000273381_15 (sequence is synthesized)
gaaatagtaaaatcaccacatcatcaagttgcagctcagggactacgtagctttagtggtgatgtttgcaggaaaaggtttcagagaaatttgaaaattggcaggtgcactttcttgacc

SEQ ID NO: 899916 - DNA, 120 bp, Artificial Sequence
  ENSG00000273381_16 (sequence is synthesized)
gtgttgaatgaaacctttgtgcagtttacagaaagtgaagaactgtttggcaagagagagaagttcgagctcctaatagcctcggctgcattgagtaacatttcttttgagttgtctatt

SEQ ID NO: 899917 - DNA, 120 bp, Artificial Sequence
  ENSG00000273381_17 (sequence is synthesized)
aacactttcctgaaacatgctttttatgacgcctagaacttgtgtaagagtgactgtaatttgagttatttaaaaatgtaagtacaagaaatgtgtcacacgccataagagctaggaaat

SEQ ID NO: 899918 - DNA, 120 bp, Artificial Sequence
  ENSG00000273381_18 (sequence is synthesized)
gacagctcacattcatcttggtggaaggaaactctaattattggaagatgtgattggagtatttgttcttaatacctacggtggctctgttatatgcttgcctaacaccagtattggctt

SEQ ID NO: 899919 - DNA, 120 bp, Artificial Sequence
  ENSG00000273381_19 (sequence is synthesized)
gcaaataacactgaaaagctcctttcttttcctctggtctttgtgggaaggcatggtatgagtcgagattgctaaaccactcttctgagaggactcagagagagtgtttatcctagacta

SEQ ID NO: 899920 - DNA, 120 bp, Artificial Sequence
  ENSG00000273381_20 (sequence is synthesized)
tccatggccctggtacttctgagttcagttgtggtgtgatctcattagtccaggctcagaatggctcggtaacctcaaaactccaagccctcggtgcttgctttgcttccctagacttgc

SEQ ID NO: 899921 - DNA, 120 bp, Artificial Sequence
  ENSG00000273381_21 (sequence is synthesized)
agcttatgtacgcccacatgtgcttcatgcgtattaaaaatgcttgcatgtgtagataggaagatatatgttgactgtcctgaaaaacttgacatacctaacatttaaaattgttttgag

SEQ ID NO: 899922 - DNA, 120 bp, Artificial Sequence
  ENSG00000273381_22 (sequence is synthesized)
tttcccccggggataaactagtcttcaaatgtaaacgtgatgagcagcgtaggggctatggtaccagagaaaagagccgaatctcggccctggtccagccctacctctcgtgctctgtca

SEQ ID NO: 899923 - DNA, 120 bp, Artificial Sequence
  ENSG00000273381_23 (sequence is synthesized)
cctgcagcagaggtggagtgggggccatgtctgtgagcgggacctcatcttgtctattcctcagacccacccaagggcagggattcccaaaactgctggtacctgtaagaggtattgtat

SEQ ID NO: 899924 - DNA, 120 bp, Artificial Sequence
  ENSG00000273381_24 (sequence is synthesized)
tcttggactccattccataacctctcatcaggattctgggtttggaactctagaatcaatgttgaggaaaaatagaacttggcgattttatttttctagatataattcacataccataaa

SEQ ID NO: 899925 - DNA, 120 bp, Artificial Sequence
  ENSG00000273381_25 (sequence is synthesized)
agccactctttaaattgtacaattcagtggttttttagtatattcagagttgtacagccatgaccactagctaattcagaatattttcattgcctcccaacaagcctagtactcatgagt

SEQ ID NO: 899926 - DNA, 79 bp, Artificial Sequence
  ENSG00000273381_26 (sequence is synthesized)
atattttcattgcctcccaacaagcctagtactcatgagtagtcactcccttgcccattccctccacccccaagcccca

SEQ ID NO: 899927 - DNA, 120 bp, Artificial Sequence
  ENSG00000273381_27 (sequence is synthesized)
cttttgtatctgtttttttttcatttagcataaaaattttcaagatttgtccacagtgtagtgtgtctcagtacttctttcctttttatcactgaaaatacttcattgtatgtatatgtc

SEQ ID NO: 899928 - DNA, 120 bp, Artificial Sequence
  ENSG00000273381_28 (sequence is synthesized)
atattttgttatctactcatcaattgatgaatacttgtattgtttccactttggctgttacaaataatgctgttatgaacatgtgtgtacaagtatttgtgtgggtacatgttatttctc

SEQ ID NO: 899929 - DNA, 120 bp, Artificial Sequence
  ENSG00000273381_29 (sequence is synthesized)
ttgggcatacctacagatggaattactggatcatatgacaactttatgtttaactttttgaaaaactacaaaaccaacaagctgtaccattttgtaatcccaccagcaatgaatagggtt

SEQ ID NO: 899930 - DNA, 120 bp, Artificial Sequence
  ENSG00000273381_30 (sequence is synthesized)
ctaatttttccacatcttcatcaatatttgttattgatctttttgattatagccaatctagtgagtgtgaactggtatcttattgtaattgtgattttgatttgcaattccctaatgatg

SEQ ID NO: 899931 - DNA, 120 bp, Artificial Sequence
  ENSG00000273381_31 (sequence is synthesized)
ttgaacagatgttcatataattgttggccatttatatagtctttagagatatatctgttttgcccatttctaactgagcaaaacagacaaaaattgagttgtgaatgttctttatgtata

SEQ ID NO: 899932 - DNA, 120 bp, Artificial Sequence
  ENSG00000273381_32 (sequence is synthesized)
ctgtatacaagccccttaacagatatatgatttgcaaatcttttctgttctgtaggttgtttctccatgttcttgttggtatgcttggaagcataaaagtttttattctggtggagtcca

SEQ ID NO: 899933 - DNA, 120 bp, Artificial Sequence
  ENSG00000273382_0 (sequence is synthesized)
gacctgggtagggggtccgggttcagtggtaatagcggcggagatgggggagcgcccgcttgacacttcccgatccgggccgaggtgactggaagaagccgtagtacgcaggagcaaggg

SEQ ID NO: 899934 - DNA, 120 bp, Artificial Sequence
  ENSG00000273382_1 (sequence is synthesized)
ccgagaggcgagcgccgaacgctatcaggagtggctagccgattgtcgagctcgggaaactgcgtgtttacgtagggtaagaagaacgctatctcgaaggcttcgtacttggccgtggta

SEQ ID NO: 899935 - DNA, 120 bp, Artificial Sequence
  ENSG00000273382_2 (sequence is synthesized)
actaagtcttttctgcgtgcccctgcgggcgtagggctggggctggcccgcgtcagtgtgtttgaaaaggtaaaggcttgtagttttgtagtttattttgcgccgtggcggctgctgtgt

SEQ ID NO: 899936 - DNA, 120 bp, Artificial Sequence
  ENSG00000273382_3 (sequence is synthesized)
gtaagcagcagcctacctatgaggttttcatcgtcctgggcttccacttgagagaactccagcaccgcgggtgaagaagccgcacctgcggcctccgtgactgcccttgagctgctcttc

SEQ ID NO: 899937 - DNA, 120 bp, Artificial Sequence
  ENSG00000273382_4 (sequence is synthesized)
gagctgctcttccttactccggatggaaatctagtcagactgcgtctgaacgttgcaaatgaaatgaggaaccttgtaacaaaaacaagtcgcggccgggcgcggtggttcacgcctgta

SEQ ID NO: 899938 - DNA, 68 bp, Artificial Sequence
  ENSG00000273382_5 (sequence is synthesized)
tgggaggccgagccaggcggatcacctgaggtatacaaaattagccgggcgcggtggctcatgcctgt

SEQ ID NO: 899939 - DNA, 120 bp, Artificial Sequence
  ENSG00000273382_6 (sequence is synthesized)
caacaacaacaacaacaacaaaaaccaagtcgcatctttcagatcctaaagcaccacgtcgtcggaaaacattcaaagggttgcccgtttgcttgtgtgaatttttcttttccttaaact

SEQ ID NO: 899940 - DNA, 120 bp, Artificial Sequence
  ENSG00000273382_7 (sequence is synthesized)
ttgcttgtgtgaatttttcttttccttaaactatcaggagaatctcgattctcctgcatttaattaatgctgggatcacttcagccactttaaccagaaatcggcgatatctagacaccg

SEQ ID NO: 899941 - DNA, 120 bp, Artificial Sequence
  ENSG00000273382_8 (sequence is synthesized)
cttctctgaggacactttgacaacgtgacaaaagacattgccagtctaatgatgggggtggggtggaggagacaaaagtacagattcagatttgcatactgaaatccttaattgcacaca

SEQ ID NO: 899942 - DNA, 120 bp, Artificial Sequence
  ENSG00000273382_9 (sequence is synthesized)
actcggcccgctttattagagttcgggcggaagtgcgacaccgagtcctccaaggctaactggagggttaaattatacggttactaatccgccgtgcttgtcaagggcctaaagggactc

SEQ ID NO: 899943 - DNA, 120 bp, Artificial Sequence
  ENSG00000273382_10 (sequence is synthesized)
tctgctgcagtgccatctgctggctgcagcctgcttggttacccagagggaaaactgccaaagcatcctctggaagctggcctggaaagacaagccaaagtctagtgcaggacagatgcc

SEQ ID NO: 899944 - DNA, 120 bp, Artificial Sequence
  ENSG00000273382_11 (sequence is synthesized)
ttgagaaaatatacatacatgcagaaagaaaaaaaaaaaaagacggcgtatatacgggacaaaacctaggacaaggccaggcagccactcagattatatatatgtttgcacattcacaca

SEQ ID NO: 899945 - DNA, 120 bp, Artificial Sequence
  ENSG00000273382_12 (sequence is synthesized)
cagacaaattcccctgcccaaaagaactgttcaggaccactcaaaaacaaaacagaacaaaagctctattgtttaggccttcgaatccttcatcaaccattgtctaaaacagcagcagct

SEQ ID NO: 899946 - DNA, 76 bp, Artificial Sequence
  ENSG00000273382_13 (sequence is synthesized)
tgggcgacagagcgagactccatttcaaataataataataataataataactgcccccctttggccgggcgcggtt

SEQ ID NO: 899947 - DNA, 62 bp, Artificial Sequence
  ENSG00000273382_14 (sequence is synthesized)
ctgccatagcacgctagcctgggcaacagtgaaactacgtctcaaaaaaaacaaagaaaaga

SEQ ID NO: 899948 - DNA, 120 bp, Artificial Sequence
  ENSG00000273382_15 (sequence is synthesized)
gcaacagtgaaactacgtctcaaaaaaaacaaagaaaagaaaaaaaattgcccctcttgtaatcctacagccatcaccttagtaattttgctatatcggtagtctttaagtatcaattat

SEQ ID NO: 899949 - DNA, 120 bp, Artificial Sequence
  ENSG00000273382_16 (sequence is synthesized)
gtcctcacaacaatgaaaacttacatttttataacattttgacattttcaaagcaaacacaccttgtcatatgatcttatttaaccctcacaactgcctgattacccctgttttagaaat

SEQ ID NO: 899950 - DNA, 120 bp, Artificial Sequence
  ENSG00000273382_17 (sequence is synthesized)
aaaccaaggtttagggtaaggactgccaagtattacactggcacaataattccagccttctgaaatcaggactagaaaattttcctccataccacactggtgtttcctttgacagcaacc

SEQ ID NO: 899951 - DNA, 120 bp, Artificial Sequence
  ENSG00000273382_18 (sequence is synthesized)
actacctactgaataatgcctaagtccttagcctgctactcaaggccttccaatagtattttccactgttccctatatgggctttaagctttgtctataaagactatgttcttcagttac

SEQ ID NO: 899952 - DNA, 120 bp, Artificial Sequence
  ENSG00000258975_0 (sequence is synthesized)
agaaccttgggggatcctgaaggaagaggggaaaccaggaaaacagaggaagttaacttaggaggggtaagggaagaagaatgcaagattgacgttgcagaagccagaggccagggctaa

SEQ ID NO: 899953 - DNA, 120 bp, Artificial Sequence
  ENSG00000258975_1 (sequence is synthesized)
gacacatgtcaatgccattctacaaaaatgacacttgaccctggaactcagcttggccaaacctgcctccgatccaaattgtgttctcggttataacttcatcaatggcgtttctccaag

SEQ ID NO: 899954 - DNA, 120 bp, Artificial Sequence
  ENSG00000258975_2 (sequence is synthesized)
gccaaagtcaaacctctgccagaggaagatgtaaatattcagagcaaaatattgcatacctggcccacatgagtcacttatgaggaagagggagttagttctaagaataataattatctt

SEQ ID NO: 899955 - DNA, 120 bp, Artificial Sequence
  ENSG00000230229_0 (sequence is synthesized)
ctgtgcagaggaaccaaagatggataccacatgtggctttggggaggactagtgtaaagtctaccaatgtccaaggcatggccttggtagaaagaggaccactactgctactcactgacc

SEQ ID NO: 899956 - DNA, 120 bp, Artificial Sequence
  ENSG00000230229_1 (sequence is synthesized)
caggatcttctagccttcaaaaaccctttataacccccaaacagcaccttcatcctgtcatccaggctcaaggagaaaccacagagcttgcaggaagaagaggccatgtgagtagagagt

SEQ ID NO: 899957 - DNA, 120 bp, Artificial Sequence
  ENSG00000230229_2 (sequence is synthesized)
gagaactcggctgcctatgagcccatacgaagaagcctcaggatgaaagctacctgaccaacaccttgattttggactcttctagaacatgggaaataaatttttgttgttttataagct

SEQ ID NO: 899958 - DNA, 120 bp, Artificial Sequence
  ENSG00000230226_0 (sequence is synthesized)
atggggcacagccaggccatcaccccggggccaccgtcgcaggcaggtggaggctggcagcccagaggcagacaggggcttggaggcagggtggggagcaaggccaaggccgctctctgg

SEQ ID NO: 899959 - DNA, 120 bp, Artificial Sequence
  ENSG00000230226_1 (sequence is synthesized)
atgacctcagccctggcctggccccagagcaggttggttcactgctgggccctgtggacttgttctcatgctttgtcagtgtcgatgtcgaaagcccaaagtgtttcccaagtcctgcta

SEQ ID NO: 899960 - DNA, 120 bp, Artificial Sequence
  ENSG00000230226_2 (sequence is synthesized)
ccttggtaagactcaaccctcaatctcagtctcccctgcagatctctgtggggcttggtctgaactttcgttaggtgagtgtggagtaggcattattgtacattgtagtcctttctcctc

SEQ ID NO: 899961 - DNA, 120 bp, Artificial Sequence
  ENSG00000230223_0 (sequence is synthesized)
gcggggcccgggggcggaggaagaggcgggatgcgccctctgcacccctagagccagaagacgctaggtgggctgcgcgctctgccaggcgaaggctggagcgcagacggcaaagccgcg

SEQ ID NO: 899962 - DNA, 120 bp, Artificial Sequence
  ENSG00000230223_1 (sequence is synthesized)
cgtttcagccgtggtcgggtccgcaggacctgggcgtggggacaccaccaggcaggagcagaggcaggactgggacgccaaaagctgagaatcctcgatgcccgcgcgagagccccgtgt

SEQ ID NO: 899963 - DNA, 120 bp, Artificial Sequence
  ENSG00000230223_2 (sequence is synthesized)
tatggcgagttctggaggctgggaagttcaagaccaatgcacgagaatttggtctaaagagaatcttcttgctctgaacacacatagtagaaggcagaagggcaagagagagaacaaagt

SEQ ID NO: 899964 - DNA, 120 bp, Artificial Sequence
  ENSG00000230223_3 (sequence is synthesized)
ctgtgtctccacatggcagaagagcagaggagacagaacctactcctctatggcaaccaccccatcaatgacaaaaatcctagaaggatgtatgtataggaagttgaagtgttgagaaga

SEQ ID NO: 899965 - DNA, 120 bp, Artificial Sequence
  ENSG00000230223_4 (sequence is synthesized)
gaatggctcagagtcaagcgggaacaagattcaaacttcagagagagagggaagaaaaacatttaaatatatctggcataatccaagactatttacgacaagtgttctgtgtttctaata

SEQ ID NO: 899966 - DNA, 120 bp, Artificial Sequence
  ENSG00000230223_5 (sequence is synthesized)
ataaaacagacttcacctcggagtacctgcagaactgggaccccaatgaccagggagaatgaagaacaacttgttgaaggtatagagaaggcagcaaatcatacaagaaggtccatccca

SEQ ID NO: 899967 - DNA, 120 bp, Artificial Sequence
  ENSG00000230223_6 (sequence is synthesized)
aaccagagatagtatagataaatctctcatgttaactatggaaaaaataaaggaagatgacgtattttaatagaagggaaattgcgcttattgggagtaagaacactgaattgactgaat

SEQ ID NO: 899968 - DNA, 120 bp, Artificial Sequence
  ENSG00000230223_7 (sequence is synthesized)
tccacattcttccctgctcttcccaatacatgtgtaagaatatccaagggcacacacataccataagcaggaatggtgtcctaaggaaagtcaatatagagagtaagaagtatatctgtc

SEQ ID NO: 899969 - DNA, 120 bp, Artificial Sequence
  ENSG00000230223_8 (sequence is synthesized)
acaatgtgtacatgtatacatcctaaatatttgtacaattaatttacttctcttcatttccaacactcctagtctatgctatgaacatctcttacctaaaatgctacagatgtcccctaa

SEQ ID NO: 899970 - DNA, 120 bp, Artificial Sequence
  ENSG00000230223_9 (sequence is synthesized)
atttttccataaatcagttttttcctctccaagctgtaagcagaaatgcatttttaaattgcatatatgaccgtgacacgtatctgtctcagtttatagaacaggtctctaacagggcca

SEQ ID NO: 899971 - DNA, 120 bp, Artificial Sequence
  ENSG00000230223_10 (sequence is synthesized)
gcagcttccagtcacttctgtcccttaccttttctccagtctcattttacatatttttttacatgctctctatattcctgtaattaaatattactttcccctcaatgcctttggactgct

SEQ ID NO: 899972 - DNA, 120 bp, Artificial Sequence
  ENSG00000230223_11 (sequence is synthesized)
tctttcctccacattaaatactttttaccacttccctcagttcagttcattctcctccgtgtttagagctcagctcagatatccttttctcatggagacattctctggccaacccagact

SEQ ID NO: 899973 - DNA, 120 bp, Artificial Sequence
  ENSG00000230223_12 (sequence is synthesized)
agatcattttcccttgctgtatactttcatacctccctctgtctttccttcataacactttggtaagtgtgtacaactgcatccttgtttttatttaatttcctctcactgccatgttct

SEQ ID NO: 899974 - DNA, 120 bp, Artificial Sequence
  ENSG00000230223_13 (sequence is synthesized)
gtaaactcaatgcaagctgagtctgcctatttatttcactatgcgacacctaactcctaacaaagtattaaacaaaataggtgccaaaatatctgttaagccattgtgtgaatgtataaa

SEQ ID NO: 899975 - DNA, 120 bp, Artificial Sequence
  ENSG00000230223_14 (sequence is synthesized)
atccttcacctgttgcctggctagagttgtctggctccactttgagctcttgcagaaccagccctttttcgtgtggtccaggaaagtccatgcctggcaccacctcctcctctagtgact

SEQ ID NO: 899976 - DNA, 120 bp, Artificial Sequence
  ENSG00000230223_15 (sequence is synthesized)
ccacgtagaagagagtcctggctggctgctgagtgccctgcccaggagccccttgctgcagcctcgtggcaactggaagcagggtgccattcagcggattgaaggaagaggaggaagagg

SEQ ID NO: 899977 - DNA, 120 bp, Artificial Sequence
  ENSG00000230223_16 (sequence is synthesized)
acggggaggacgatgaagaggaagaggaggaaggcttcttccagaaagtgctcacaccgcttctctcttggcttttgagcaggcgactctggctgggtccccagtgctcaaagctgccac

SEQ ID NO: 899978 - DNA, 120 bp, Artificial Sequence
  ENSG00000230223_17 (sequence is synthesized)
tgccgtcctgttgcaggcagcctccccccgccgggccgccggtggaaggagacgggtggctgaagagtttccagcggagtcgcagaatgtgcttcacatcgaagtcttttcgcccagagc

SEQ ID NO: 899979 - DNA, 85 bp, Artificial Sequence
  ENSG00000230223_18 (sequence is synthesized)
gagagattaactctgttggctgaagccctattcccaattccttggctagaccctgggtccttcatgttagaaaacctggcttctg

SEQ ID NO: 899980 - DNA, 120 bp, Artificial Sequence
  ENSG00000230223_19 (sequence is synthesized)
taaatctgttgaaacccaaaatttgcctccgtttaatggcttaggtgagtctgtcattatatagatggagcatatgttactctcttcagtgttttcttcactgccaatcctgtttcaaat

SEQ ID NO: 899981 - DNA, 120 bp, Artificial Sequence
  ENSG00000230223_20 (sequence is synthesized)
tgtatgagtgatcgaaattgagcccgctgacattctaatcaagagaaaagaagtatatatggtgcccaattacctgaatcaaattgatttactcatttattcttccttatgtttcaaaaa

SEQ ID NO: 899982 - DNA, 120 bp, Artificial Sequence
  ENSG00000230223_21 (sequence is synthesized)
taaagatgtcattaatccagattttaaatatcagaatgtattatataacatttcagtagtaaaccaacaaatatctgagacaggtctctaccaagttagaggtttattttgccaaggtta

SEQ ID NO: 899983 - DNA, 120 bp, Artificial Sequence
  ENSG00000230223_22 (sequence is synthesized)
aggaccatggcctgtgacacagcctcgggaggtcctgagaacatgtgcccaagatgatacagcctcgggaggttctaagaacatgtgcccaagatggctgggatacagtttgattttata

SEQ ID NO: 899984 - DNA, 120 bp, Artificial Sequence
  ENSG00000230223_23 (sequence is synthesized)
cattttatggagacagaaattacaggcaaaacataatacatgtaaagcatatattcatttggcccagaaaggtggaacatcttgaagcggtggcttccaggtcatagatggattcagatt

SEQ ID NO: 899985 - DNA, 120 bp, Artificial Sequence
  ENSG00000230223_24 (sequence is synthesized)
agctctgtctgaagagttgaagtcagcttgagttaaggtaagactggaagagagttgtggaagccaaggttcttatcatgtgaaggaagcctccaggtagcaggcttcagatagaataga

SEQ ID NO: 899986 - DNA, 120 bp, Artificial Sequence
  ENSG00000230223_25 (sequence is synthesized)
gggtgaatgtctcttatctgaccttagaagatgtcagactcttattgaaatcttttatggatcaggaaaagacctgcaaagggaaggggattctctacagagtataaaatttccccacaa

SEQ ID NO: 899987 - DNA, 120 bp, Artificial Sequence
  ENSG00000230223_26 (sequence is synthesized)
aagatggctttgcagggccatttcaaaatatgtcagtgaaatacactttgttgtaaaatactttgatttcctttagggcctgttatccatcaagagtcgggttggacttggcatcttatt

SEQ ID NO: 899988 - DNA, 120 bp, Artificial Sequence
  ENSG00000230223_27 (sequence is synthesized)
aatacaacgaatctcttctgtcagtcttaggatctctcttttaatgttaatattgttcagttttgttgaaactccaaaagagaaaggatatgaggcatgttcaacaccacctgtctcatt

SEQ ID NO: 899989 - DNA, 120 bp, Artificial Sequence
  ENSG00000230223_28 (sequence is synthesized)
gtggcctgaattaatttttcaggtttcttaagaatctcctaggctgagagatgggtccactcaataagatggaagggggtataattttaatttagattcataaataaaaagaaaaattat

SEQ ID NO: 899990 - DNA, 120 bp, Artificial Sequence
  ENSG00000230223_29 (sequence is synthesized)
ttttctacattcctttttctctaataatatttttattttgttttaccatttgaaattctatggtcaaaaatttcgtaaactaaaatttctcctgagattcattttagaagaattttctag

SEQ ID NO: 899991 - DNA, 120 bp, Artificial Sequence
  ENSG00000230223_30 (sequence is synthesized)
gcaagtgtttttagtctctatcaagaatttgtagctgtttttattatttaagaaaacaagcaaatgaaaatatgtgatctttaagggccaatataatattttattctatcaataggctta

SEQ ID NO: 899992 - DNA, 120 bp, Artificial Sequence
  ENSG00000230223_31 (sequence is synthesized)
tgcagaactgattttggtaaagattacagcagggtatagttttagaatttctgtctcaaatgcaagttggaataacattctataatttgcttttaacacacacacttaatgaatgtaaat

SEQ ID NO: 899993 - DNA, 120 bp, Artificial Sequence
  ENSG00000230223_32 (sequence is synthesized)
atgaatctcaactaataaaagaatgaaaagaacatatttttcttagatgcttttcttcagaaacatgaaaaaccctcacactagtttttggtctgaattagagatagtctatttaatgtt

SEQ ID NO: 899994 - DNA, 120 bp, Artificial Sequence
  ENSG00000271093_0 (sequence is synthesized)
ggccagcccaaggccacccccttggtcactctgttcccgtcctcctctgaggagctccaagccaaaaggccacactgctgtgtctcatgagtggcttctacccgggagctgtgacggtgg

SEQ ID NO: 899995 - DNA, 120 bp, Artificial Sequence
  ENSG00000271093_1 (sequence is synthesized)
cacagccagaagcgacctgagcctgacacccgaccagtggaggtcctgcagcagctacagctgtaaggtcacacacaagagagcactgtggagaagacagtggcccctgaagaatgttct

SEQ ID NO: 899996 - DNA, 120 bp, Artificial Sequence
  ENSG00000259712_0 (sequence is synthesized)
ggcccctgaactccccctcgggctccctctgctcgccggacctctctgggatgtgaccaccctggctgcgatgtggtaactaaagacagcaaatactgaagcaggaaagagaaggtcctt

SEQ ID NO: 899997 - DNA, 120 bp, Artificial Sequence
  ENSG00000259712_1 (sequence is synthesized)
ctaacaggagagacataatggctgactggaccgggggagggatagtaagagtgacagtaacaagccgttaagagtctggatatagtttgaagaaagagcccacaggatctgtgctaacag

SEQ ID NO: 899998 - DNA, 120 bp, Artificial Sequence
  ENSG00000259712_2 (sequence is synthesized)
actgaaaaatggaggtactggtttgctaacatgagtaaaaacaacgtatgaggaagaaatatcaggggcccagttctgggtaggttaactttgttattagacatctgagtggagatattg

SEQ ID NO: 899999 - DNA, 120 bp, Artificial Sequence
  ENSG00000259712_3 (sequence is synthesized)
agttaaggaacctggaattcagacgagaggtcagggctgaagatataaattcaggagtcatcataaattcaggagtcatcatcagatatagataattcttaaaggaatgaaaaagaatga

SEQ ID NO: 900000 - DNA, 120 bp, Artificial Sequence
  ENSG00000259712_4 (sequence is synthesized)
gactacccagggactaagtgaagctagagaagcagggagcccaaggactgaatctgggatacttccaacacgaggagaaagagaactggcaagggtgactggaaagaggccagggaagaa

SEQ ID NO: 900001 - DNA, 88 bp, Artificial Sequence
  ENSG00000259713_0 (sequence is synthesized)
ctactcaggaggctgaggaaggaactcatgagccaagatcgtgctgttgcactccagcctgggcaagagcgaaactctgtctcaaaaa

SEQ ID NO: 900002 - DNA, 120 bp, Artificial Sequence
  ENSG00000259713_1 (sequence is synthesized)
tgtctcaaaaaaataaataaataaaaagaagaacaatatatatttttaacctgtttagaggaacatttcagaaatgagaggatttatagccagtaataagaacaaaagactttaaattgt

SEQ ID NO: 900003 - DNA, 120 bp, Artificial Sequence
  ENSG00000259713_2 (sequence is synthesized)
taaattgtgtctgtatgtttttcagtagcattttttatttaccacataggcctgtagcagtttgtggtgccggagaacaaatgttaactgtgcactttgtatgtcctttggagggatgca

SEQ ID NO: 900004 - DNA, 120 bp, Artificial Sequence
  ENSG00000248572_0 (sequence is synthesized)
tcatatgctgaggttgctaagatctatggcaagaatgaatcttctatctgtgaaactgtgaagaaggaaaatgaaatttatgctagttctgctgcatatatagggttcagtattatctgc

SEQ ID NO: 900005 - DNA, 120 bp, Artificial Sequence
  ENSG00000248572_1 (sequence is synthesized)
agtttcagcctacctattctcccagagggcatgcattctatggagacagagctgaatgtgtgccatcagaagaccaaaatcaagcgacattttaaaaagaaaacagactcttctgggaaa

SEQ ID NO: 900006 - DNA, 120 bp, Artificial Sequence
  ENSG00000248572_2 (sequence is synthesized)
cctggatggggcaacccagccatggatatatgcctccaatcagcataaatgcccattgcttgataaagtcaacacacgtgtaagatggaaattctgtttcttgaagggaactcctcagag

SEQ ID NO: 900007 - DNA, 120 bp, Artificial Sequence
  ENSG00000248572_3 (sequence is synthesized)
aaaaggaccacaagcaaattgctgctgctacaaaatgataccataatgagaatggaaataatcctggattctctgctcatttcgacaagtaaaataaggcacatatttttcaatggataa

SEQ ID NO: 900008 - DNA, 120 bp, Artificial Sequence
  ENSG00000248572_4 (sequence is synthesized)
gaaaaagcaaacagaagttagtccagcatggaagtcacatgctttgggattgtagcattgtgttctcctgtaggaggtgatccattgtcatttatcggaatccatcttcactcaaaagga

SEQ ID NO: 900009 - DNA, 120 bp, Artificial Sequence
  ENSG00000248572_5 (sequence is synthesized)
tgtaaatcctttgagggcagaaaccatattttagatttcttcatatcctttcccttcctccatgtcactaacacttcatgtactcaacaaaggtcaacacctttgagaggagtgacagga

SEQ ID NO: 900010 - DNA, 120 bp, Artificial Sequence
  ENSG00000248572_6 (sequence is synthesized)
gacactcccacagtgctgaactatgtcctgcccttgctcaacatggtgggactctgcctcccaatccaaagaccccgaaaactgccaccaatcctgtccttttcccccaaatgaagctag

SEQ ID NO: 900011 - DNA, 120 bp, Artificial Sequence
  ENSG00000248572_7 (sequence is synthesized)
aagtaagaatggaaagagatctaaacaccatccagcccaatcttgtcatttcacaagcatggaaaccgaggccacagaaaagaattgacttaaaatcaagatcatgcatcccattagagg

SEQ ID NO: 900012 - DNA, 120 bp, Artificial Sequence
  ENSG00000248572_8 (sequence is synthesized)
ttgtttccgttttgacactttttgtaacctatttctttgaaacctgagttcactcagtttggggaaacatagggtacggaagaagaaggggaaaaggaatatggaatcacaaggatttag

SEQ ID NO: 900013 - DNA, 120 bp, Artificial Sequence
  ENSG00000248572_9 (sequence is synthesized)
agtcaaagtaattttaactttcatagagagaccgcagggatcagctaacacaacaagcccattttacagaggagtcaactaaggctcaaagaatccatgagactcgcccagagaagcagc

SEQ ID NO: 900014 - DNA, 120 bp, Artificial Sequence
  ENSG00000248572_10 (sequence is synthesized)
tcattagtggcagagttgatctagaattctgggctcctgctgctgcaacccagtcctctttgcagcatcccaaactccctctctcataataatccaggataatagtcatttcccattttt

SEQ ID NO: 900015 - DNA, 120 bp, Artificial Sequence
  ENSG00000248572_11 (sequence is synthesized)
aataagaaggaaatgagcacagagagaaccagtcacagcatgatggaagaaacctggaactaaagcctcactacttctctttcctgactgccccgccacctcagatcccaaatccacagc

SEQ ID NO: 900016 - DNA, 120 bp, Artificial Sequence
  ENSG00000248572_12 (sequence is synthesized)
ttacaggaagtttttaccaatgttatttctaagtgagcacagaatgtacggtccaagccagtgataagaattctccctgtagcctggggttattgtaattaaagtgcataacttatctct

SEQ ID NO: 900017 - DNA, 120 bp, Artificial Sequence
  ENSG00000259711_0 (sequence is synthesized)
agtcaccgtcttcttctctgccccttcaaatttgcgcattgatctcttctttggatttgattaaattatgaacgttccatctcagaccgtgcgggtggcgggcggcccagaagtgcccgc

SEQ ID NO: 900018 - DNA, 120 bp, Artificial Sequence
  ENSG00000259711_1 (sequence is synthesized)
atggaatacatccggtttcctgatgtattttcctccaaatacatcatttggaggaaagccaactccaatgcgtagtgctcattttggacttgataaataaactttcattgtctttaagtc

SEQ ID NO: 900019 - DNA, 120 bp, Artificial Sequence
  ENSG00000259717_0 (sequence is synthesized)
tgagcccctccggtcgtcaagccttgcttgaaatgcgtaaatgcggaaaggtgaagtggctgacccggctcacaccactttaagtagcggagtggggttcctagccaggcctatgggact

SEQ ID NO: 900020 - DNA, 120 bp, Artificial Sequence
  ENSG00000259717_1 (sequence is synthesized)
cccactggagcctttccccctctggggctggggctggacccacaggctgccggagcaggcagaaggggaggggcccaaggcccagactccagggcctcgtctggatcatcaacccggctt

SEQ ID NO: 900021 - DNA, 120 bp, Artificial Sequence
  ENSG00000259717_2 (sequence is synthesized)
ttcagcgcaggcctccgtttccaggcctgtctccccatccacaccgtctctcaggggtcgtgcaaccaacagcaccctccacctgcagaaatcgtcacctggcaaaacggaaactctacc

SEQ ID NO: 900022 - DNA, 120 bp, Artificial Sequence
  ENSG00000259717_3 (sequence is synthesized)
cactatgcactaactcctctttccctctcctccgggccctggcaaccgccattctacctttcgtctctgtggtcttgactattctatgtactgcaaataaatagagtcacacagcgttta

SEQ ID NO: 900023 - DNA, 120 bp, Artificial Sequence
  ENSG00000259717_4 (sequence is synthesized)
ggaggcaggggacgggggcttcctgaaggaggccccctaaggggaagggggctacaaggctggccagagtgctggccgcgcggctgtgcacagggccttgagcccctccggtcgtcaagc

SEQ ID NO: 900024 - DNA, 120 bp, Artificial Sequence
  ENSG00000248576_0 (sequence is synthesized)
agtgcccacagaaatgggcttgaggatggaccacaagaactgctcaaagcacctggactagtaacaagagatgacaagctgaggcctacgatgatttaggctgaggataccatctgcctg

SEQ ID NO: 900025 - DNA, 120 bp, Artificial Sequence
  ENSG00000248576_1 (sequence is synthesized)
cagagccagcagcattggcatccctggaagcgtggtaccaatgcattcttggacctcaactcagacctattcaatccaactctccagtttagcaagatccccaggtgatttttatgtaca

SEQ ID NO: 900026 - DNA, 120 bp, Artificial Sequence
  ENSG00000248576_2 (sequence is synthesized)
ttaaagtttgaaagcaatactctaaagaaccagaaatgccagaccagggtccaacagggaaactgaatgcctaagacattcattcattcatttacccattcaataaatacttaataagca

SEQ ID NO: 900027 - DNA, 120 bp, Artificial Sequence
  ENSG00000259715_0 (sequence is synthesized)
tatgctttgcacagtggctggcatacaggaaacgtttaatatatggtagctactataaactcggttatttccgtgtagctttccatgtctacatggagggagaaaatgagcagatgtcca

SEQ ID NO: 900028 - DNA, 120 bp, Artificial Sequence
  ENSG00000259715_1 (sequence is synthesized)
ttataatttagctattacagttttcactctaaagtaaaaaaggcatttagatttatatgtcttctgggagtttggttcttctgactcccttcatctgtgagaccataggtacttttatgt

SEQ ID NO: 900029 - DNA, 63 bp, Artificial Sequence
  ENSG00000259715_2 (sequence is synthesized)
attattagaaaaagaaaaaaaagtatcgcttcaactcaggaggcagaggttgcggtgagccaa

SEQ ID NO: 900030 - DNA, 120 bp, Artificial Sequence
  ENSG00000259719_0 (sequence is synthesized)
cctttcaaaagcaacagccaaagcagatgcaagggagatgcattggtgctcataaattcaaggagctgaaatggcaacagctgtggcaatttcaggatttcagcaggtaatcaaaagaat

SEQ ID NO: 900031 - DNA, 120 bp, Artificial Sequence
  ENSG00000259719_1 (sequence is synthesized)
tggcagagagaaaacaaagtaaggaaatcaaatataaattcccagtgctcctaatatctcttggaaagaaaatggacacctctgttaacaaagttatgatgatttctacctcggtacaca

SEQ ID NO: 900032 - DNA, 120 bp, Artificial Sequence
  ENSG00000259719_2 (sequence is synthesized)
ttttcgaacttctcagagaggaaccagctcacctagcggtcctttgagagcattagcactcacaccccatacaactagaactcatgacactggcaaatggtgtttctagagtgctttgca

SEQ ID NO: 900033 - DNA, 120 bp, Artificial Sequence
  ENSG00000259719_3 (sequence is synthesized)
ttgcccgacatgttctcaccctgttttctccccaatccttacaattctccaaatgcaagtgcaaactggggtgctgtcaagcagcctggtgcttaaagggcagagccaggatggacccag

SEQ ID NO: 900034 - DNA, 120 bp, Artificial Sequence
  ENSG00000259719_4 (sequence is synthesized)
attctggtttccaccatgtgcctgatggataccatgcggatgtggagcaggaaacactgggtgcaaatccccaccaggaactgttcatcctgaaaaaaacctgctgcacattgccctggt

SEQ ID NO: 900035 - DNA, 120 bp, Artificial Sequence
  ENSG00000259719_5 (sequence is synthesized)
cacctcaacgaaaaatgggtcaaaatcaaagttgatgatcagtcatatgatcttcagcagccctggaagggtgtgagttctcggcatcccatgcaggagctctgaatgtacaagaggtgc

SEQ ID NO: 900036 - DNA, 120 bp, Artificial Sequence
  ENSG00000259719_6 (sequence is synthesized)
tgaggagggagcatgcgccgaataccactgccttctttctgtgtccaagcaagttatgactggaatggaaagtatagccacccggggctgtcagtacccctacctactcaattgcagaca

SEQ ID NO: 900037 - DNA, 120 bp, Artificial Sequence
  ENSG00000259719_7 (sequence is synthesized)
tgttgatacagaacatgatcatcgaattccagtgaagccacagtgatgggagtccagcaagagtaaaagcaagtagaaggaagaagcccagaaaaaccaaagcgcctaaggcccatgaaa

SEQ ID NO: 900038 - DNA, 120 bp, Artificial Sequence
  ENSG00000259719_8 (sequence is synthesized)
gctgtaatgactccttaccatgaagatgctaaaggttaagatgcaagaacacgagtgtcaagttctggttccagactacatgctcgtggccactacactctgctgctgcctcatattcta

SEQ ID NO: 900039 - DNA, 120 bp, Artificial Sequence
  ENSG00000259719_9 (sequence is synthesized)
tatgccttgtacactgtaactccactgaagtgctggtggtggtggcgtgtgtgtgtgagagggagagagagaactggggcatcgggaggcccctagccctcacacctaccagcccagcca

SEQ ID NO: 900040 - DNA, 120 bp, Artificial Sequence
  ENSG00000259719_10 (sequence is synthesized)
ctgtgcagaatgcagggatgagttgtttcatttcaggtgttcactctgctttttgcagaacatattgtcccttgaaggatattaatacaggaaatgaataaagagtggcttcaaaacaaa

SEQ ID NO: 900041 - DNA, 120 bp, Artificial Sequence
  ENSG00000259719_11 (sequence is synthesized)
tcttcactagctatcaacaagaaatgtaaatgctgtgactttacccagttaagcacagcagattttcctgctttcaactctaatccttgagcagcaggagtaccctttcccatctcacaa

SEQ ID NO: 900042 - DNA, 120 bp, Artificial Sequence
  ENSG00000259719_12 (sequence is synthesized)
catttgactttctcagatatatttattctatgttatatactgcagttcacctatgtattttggggttaatttatcactggttgaataacatcgttcaatagacttatgaaaagatgggca

SEQ ID NO: 900043 - DNA, 120 bp, Artificial Sequence
  ENSG00000259719_13 (sequence is synthesized)
ttttcagttgtgccaatttaggtgaggcttatggacagtgtttcttccaaaatgttcccaagtctaaaggaccatgattctcaaattctctgtaaagtataactaggtctctttctcacc

SEQ ID NO: 900044 - DNA, 120 bp, Artificial Sequence
  ENSG00000259719_14 (sequence is synthesized)
gcaagttgtaagtgttagcatagtggctacgagcacagactcaagccagtctgcctaggttcaaatcccagctctgccacttgcgggctttgtgacctaggacaagtttctttactgttt

SEQ ID NO: 900045 - DNA, 120 bp, Artificial Sequence
  ENSG00000259719_15 (sequence is synthesized)
tactgtcccagtttctgcatctgtataacattgctagtaatacccactgcaaatgattttatgagaattaatttactcactgtttgggaagtacttagaataatgcctagcaatagtaag

SEQ ID NO: 900046 - DNA, 120 bp, Artificial Sequence
  ENSG00000259719_16 (sequence is synthesized)
cactcagtaaatgtcttttatatagagcatgtatctatctcttcaataacaagcacctgtgcaacagtcagaacaccacaaaatagcactataaagacagtaaaaaatatccctttgttt

SEQ ID NO: 900047 - DNA, 120 bp, Artificial Sequence
  ENSG00000259719_17 (sequence is synthesized)
ttttttaacatgtctttgtattaattagagctctgccagctgcaaattcagaaatccaatttctgaactagcctaaggggacacaaaaggaacttattgcctcttgggattgggaagttc

SEQ ID NO: 900048 - DNA, 120 bp, Artificial Sequence
  ENSG00000259719_18 (sequence is synthesized)
agtgtgcctctgatttcaggaacagctgaatccaagagctcagactctgtccccatcactgctgctgtctctctccctttgtctcttgactgtgctcacataattatacctgcagtcttt

SEQ ID NO: 900049 - DNA, 120 bp, Artificial Sequence
  ENSG00000259719_19 (sequence is synthesized)
taattatacctgcagtctttcacatgacaggaaaggtgaccaccaccagccccttgcttatacccaactaatacctatatattagttggtcttacactgctataaagacatacctgagac

SEQ ID NO: 900050 - DNA, 120 bp, Artificial Sequence
  ENSG00000259719_20 (sequence is synthesized)
tgagtttcctgaggccttcccagccatgcggaaccctaaaggaagccaaaagattgaacacccctgtcgtagatggtaatgagtcctggatgaaaaagcctgcacccagctctcttcctg

SEQ ID NO: 900051 - DNA, 120 bp, Artificial Sequence
  ENSG00000259719_21 (sequence is synthesized)
ctctaagttgcagggaaggctgaagcttctagcaatgggaaggaggaggtggccttcagtatggactggcattcactgagatattgcttgcaccatctgctctttggacatcacaccttt

SEQ ID NO: 900052 - DNA, 120 bp, Artificial Sequence
  ENSG00000259719_22 (sequence is synthesized)
agcccagtgtctttgtttcctctttggtatcagattagcatgtccatgtactctgtgtatccctcatcccaaccaaaagctccttcagatccactggggccctttatatcactcccttga

SEQ ID NO: 900053 - DNA, 120 bp, Artificial Sequence
  ENSG00000259719_23 (sequence is synthesized)
tatatccagaagtaaggcaaacttcccttctgtgtgtgtgcaggagagttagacaaatgtgaaagccctctttggccccatcgtctcccctgttttgttgctgcaccgtgctgtctggac

SEQ ID NO: 900054 - DNA, 120 bp, Artificial Sequence
  ENSG00000259719_24 (sequence is synthesized)
tgtctttaagagaaccagccaggtgagtactgtattcttaaaaatctattgtcttactgtaaagctacagtaatcaaggcagtgtggcatctggtgaaaaaaacagacaaagagacaaat

SEQ ID NO: 900055 - DNA, 120 bp, Artificial Sequence
  ENSG00000259719_25 (sequence is synthesized)
gaaacagaatagagagtccagaaacggacctgcatgattggtcacctgatttttggcaaagtaacaaaggcaattcaatggagaaaatgtggtgcttttttgttttgttttgtttgtttt

SEQ ID NO: 900056 - DNA, 120 bp, Artificial Sequence
  ENSG00000259719_26 (sequence is synthesized)
ttcaacaaatgttgctagaacaactggaacatctacatgcaaaaataaaaataaaaataaaatttaaaaaagacccatctagataaagcccttacactcttcacaaaaattaactaaaaa

SEQ ID NO: 900057 - DNA, 120 bp, Artificial Sequence
  ENSG00000259719_27 (sequence is synthesized)
ttacttcctcttcaccttccaccatgattgtgagtttcctgaggccttcccagccatgcggaaccgtgtgctcagcctcctcctgtgatgtatctggatttcatcctccatggtgaaagg

SEQ ID NO: 900058 - DNA, 120 bp, Artificial Sequence
  ENSG00000259719_28 (sequence is synthesized)
gtgcactcttcatgcagaaagacaaaacttgtggattttctattccattgggtccaaacaagaagaacggtctgttgctattattttaggattcaactcaatagctgataaatttgattt

SEQ ID NO: 900059 - DNA, 120 bp, Artificial Sequence
  ENSG00000259719_29 (sequence is synthesized)
ctttcacactcggcaaagacttgaaacattgtagccccagaatgggaagtctcttctccgaacttatgaacatgtaactcttcagttctccctcaactttattaagcatattgagtttca

SEQ ID NO: 900060 - DNA, 120 bp, Artificial Sequence
  ENSG00000259719_30 (sequence is synthesized)
aaagacattcctactctccttcttcaatatcttctctttttaaacgttactttattttttaaatgtattatgcagtttttaagactttcaaaaagggataaggaaaaccaaaccaatacc

SEQ ID NO: 900061 - DNA, 120 bp, Artificial Sequence
  ENSG00000259719_31 (sequence is synthesized)
tacgtatctatcaagcagctcaagaaatacaacattaggagcagttaaatccactatttatgctcactgccttctagatagagtctgttacttcccagaggtcaattcctgagagcctag

SEQ ID NO: 900062 - DNA, 120 bp, Artificial Sequence
  ENSG00000259719_32 (sequence is synthesized)
ggacctgggcattgtctttgccatctttgtgaggccctggagattccctttatgtctctggcttctatgttgtcgaagtctaggttgacctcgtgatttttgaggctgtgggttagcctt

SEQ ID NO: 900063 - DNA, 120 bp, Artificial Sequence
  ENSG00000259719_33 (sequence is synthesized)
gcaatgtctggaacttggctatgggttttgaatgcttttccttgggccttgtcgtcagatggaagcgcacatagcttcccatggccacctcttccaggatgttcaatgagaagtcccaaa

SEQ ID NO: 900064 - DNA, 120 bp, Artificial Sequence
  ENSG00000212978_0 (sequence is synthesized)
ctgctgtcggaaaatgtccagaggcaccatccctgctatgaagagggaatgccagtacaacagccacaaggggtcttcctgtggccctcaaacaaaaaatcactgcattacatcagcagg

SEQ ID NO: 900065 - DNA, 63 bp, Artificial Sequence
  ENSG00000212978_1 (sequence is synthesized)
actgcattggagagaaaggcgccgggacagaaaagcctgagataaaccacctgtcattcttgg

SEQ ID NO: 900066 - DNA, 120 bp, Artificial Sequence
  ENSG00000212978_2 (sequence is synthesized)
ttccggaaaggatgctgcgccagtcatgtttccgcactctgtgagacgttgaaatctccagaagttgcccaaggttttcaagctgaacacaggagaaatgactctggatctctgaggact

SEQ ID NO: 900067 - DNA, 120 bp, Artificial Sequence
  ENSG00000212978_3 (sequence is synthesized)
gttttcctcaataaggagctgcaatcttggctccaccaccctccctccaaaacatctcgtgtgtctggtatctggttatattgtggcctgacagagaagtttctttcggggccagtgaat

SEQ ID NO: 900068 - DNA, 120 bp, Artificial Sequence
  ENSG00000212978_4 (sequence is synthesized)
gggcgacagagcgagactccgtctctctctctctcacgctctctctctatatatatattccatagactgcattggagagaaaggcgccgggacagaaaagcctgagataaaccacctgtc

SEQ ID NO: 900069 - DNA, 120 bp, Artificial Sequence
  ENSG00000212978_5 (sequence is synthesized)
atactttaatactttaaatttccctctttatagtaggttgaaatgtcagtatctcttaagaacaatggctgaaccaaatgtttcctcaaaactcacattttttcccaccatttcagaagc

SEQ ID NO: 900070 - DNA, 120 bp, Artificial Sequence
  ENSG00000212978_6 (sequence is synthesized)
tgcctcaggactaagctttgatttttttttttttttttaatctggcccaaattcctatctaaggggcctggggagtcatgcccaacaaaccataaattctcatcagatgagttttattta

SEQ ID NO: 900071 - DNA, 89 bp, Artificial Sequence
  ENSG00000212978_7 (sequence is synthesized)
cccaacaaaccataaattctcatcagatgagttttatttaaccctatatatggtgacttgctttccagtctgactctggcatgacatgt

SEQ ID NO: 900072 - DNA, 87 bp, Artificial Sequence
  ENSG00000212978_8 (sequence is synthesized)
catgtttctttgccatattttgaaatggtcctgcaaagctgtgctttgtgggggaaaatatgcatctgtaaagaatctctattaaca

SEQ ID NO: 900073 - DNA, 120 bp, Artificial Sequence
  ENSG00000212978_9 (sequence is synthesized)
tctgaataggaaacatttgtcatctatcatctctaagggtagccattataagacttcaaaagaaccttttgaagtattataatcttttatcttaacctgaacatgtgcttcctattgatc

SEQ ID NO: 900074 - DNA, 120 bp, Artificial Sequence
  ENSG00000212978_10 (sequence is synthesized)
acaattgtgaactcaaccatttgtcaattagaaaatgtttaaattggctgggcacagtgtctcatgcctctaatcccagcactttggaagaccaaggcgggcagattgcctgacctcagg

SEQ ID NO: 900075 - DNA, 76 bp, Artificial Sequence
  ENSG00000212978_11 (sequence is synthesized)
ctactaaaatacaaaaatttagccgggcaaggagaattgcttgaacccggcgggcagaggttgcagtaagcagaga

SEQ ID NO: 900076 - DNA, 90 bp, Artificial Sequence
  ENSG00000212978_12 (sequence is synthesized)
aagtgagactccatcacagaaaaaaaaaagaaaatgtttacctttacctatagcctggaaatccctgctttgagttgctccatctttctg

SEQ ID NO: 900077 - DNA, 120 bp, Artificial Sequence
  ENSG00000212978_13 (sequence is synthesized)
aaaatgtttacctttacctatagcctggaaatccctgctttgagttgctccatctttctgaaccaaaccaatgttatttcttaaacgtatttcattgatgtctcatgcctccctaaaatg

SEQ ID NO: 900078 - DNA, 84 bp, Artificial Sequence
  ENSG00000212978_14 (sequence is synthesized)
cgtgtcacgggtcatacattttacagagttgactcttagtcaacatgtccatacctgatgagatgcttcatcaaaattctagtg

SEQ ID NO: 900079 - DNA, 120 bp, Artificial Sequence
  ENSG00000212978_15 (sequence is synthesized)
atgtccatacctgatgagatgcttcatcaaaattctagtggactggctagttcagaaaatggaccagccaggtttgcttaaatgcacccctgcacaactatctcactcctgcttggagcc

SEQ ID NO: 900080 - DNA, 120 bp, Artificial Sequence
  ENSG00000212978_16 (sequence is synthesized)
actcctgcttggagccggctagatcaggagacctgtccctaaactaatgtactccatgtcttaagtctttttgttttgttttgtttttgtttttgacagagtctcagtctgtcacccagg

SEQ ID NO: 900081 - DNA, 78 bp, Artificial Sequence
  ENSG00000212978_17 (sequence is synthesized)
tgtgcaccaccatgccctgctaatttttgtgttttaagtagagatggggtctcaccctgttggccaggctggtctcaa

SEQ ID NO: 900082 - DNA, 120 bp, Artificial Sequence
  ENSG00000212978_18 (sequence is synthesized)
tgtgtcttggtcttttttactaatattgattataaaatggatgaaactttggataaaatttctgcgttagaatttctttttatatctgtcctaaagcttgtaactacttgctcatgattt

SEQ ID NO: 900083 - DNA, 120 bp, Artificial Sequence
  ENSG00000212978_19 (sequence is synthesized)
tttgtgtatgtttagcaatgtgcatgtcattgatggcctttgtaaagtatgttcaattgagttgtggagacagaggtgcaattggagtaggttgtaagaataaaaaggagtaggcaaaaa

SEQ ID NO: 900084 - DNA, 84 bp, Artificial Sequence
  ENSG00000258044_0 (sequence is synthesized)
actccagggctcagtatgggccactgtgcccagccctatgaagaatatcttcaaagtatataaaatactgctttttcaaaatag

SEQ ID NO: 900085 - DNA, 120 bp, Artificial Sequence
  ENSG00000258044_1 (sequence is synthesized)
atatcttcaaagtatataaaatactgctttttcaaaataggtacaacctcttcatcttcacaacaacgaataatgtagctgggacaagtatcagaatgattctcactgtacagatgaaga

SEQ ID NO: 900086 - DNA, 120 bp, Artificial Sequence
  ENSG00000258044_2 (sequence is synthesized)
tctaggtctctactagtgtgtcattttgtctttatcaaaaataaaaataaattcagatggaattagggtaaaaaaaattcttgtgtccattaatagcagaaatagctttgttattcattt

SEQ ID NO: 900087 - DNA, 120 bp, Artificial Sequence
  ENSG00000258044_3 (sequence is synthesized)
aaatctttataatgacagttatattaatctaaaaacttgtctgctaaccattgtattaatttggtaagagaaattccaaccagaaaagcattctagtcaatatttaaagaaagaacaata

SEQ ID NO: 900088 - DNA, 120 bp, Artificial Sequence
  ENSG00000258044_4 (sequence is synthesized)
aaagcattctagtcaatatttaaagaaagaacaatattagatacattctagtaaagcaattattttaataaattaagaaagcaaataaaaacctttgtatttaaggtctgtatcacataa

SEQ ID NO: 900089 - DNA, 120 bp, Artificial Sequence
  ENSG00000258048_0 (sequence is synthesized)
tgcttggcgcgcatcttctcgcgtttcgccttccactcctccaggaagtctgtggtgctgccgccgaggccgctgctggtccggtagccaccggtcgccatattcccaaaggggccggtc

SEQ ID NO: 900090 - DNA, 120 bp, Artificial Sequence
  ENSG00000258048_1 (sequence is synthesized)
agcagccggcggggctgaggtgttaagatttgggttttagaccctcttctggctcactaaaacctggattcaggaagaaagagaagcaccagatatagacagttcacaaattgggtaatc

SEQ ID NO: 900091 - DNA, 120 bp, Artificial Sequence
  ENSG00000272167_0 (sequence is synthesized)
tgactgtccctagcctctgcagtacataataaaagcctgacatagcaggctgcctgccttctgtgtcctgcagatactcatcataagtgtcaggacataccaaggttagcggtcactgga

SEQ ID NO: 900092 - DNA, 120 bp, Artificial Sequence
  ENSG00000272167_1 (sequence is synthesized)
agtgtgctcgctggcccaaaccttgccaaacgctcttggcagctgaatgaatgtcacagagaatagaaggggaattacaaaggttaaaaagaagacagcctctcctattttctggagaca

SEQ ID NO: 900093 - DNA, 120 bp, Artificial Sequence
  ENSG00000272167_2 (sequence is synthesized)
gagaagctcatttttcacacctctgaaccgtccgtaagctcattcatcagcctcttgcgggggacctaaaccttgccccttgctcagttctccatggacactcctccctcctcaatcccc

SEQ ID NO: 900094 - DNA, 120 bp, Artificial Sequence
  ENSG00000272167_3 (sequence is synthesized)
tttaaaaattggccctctggcctcatttcatcactgaaatgatcttcactgaaatggacagaaaacaaaccaggcatcgacttctttccctggccacccaccccccaacccgtaaccaaa

SEQ ID NO: 900095 - DNA, 120 bp, Artificial Sequence
  ENSG00000272167_4 (sequence is synthesized)
ggctccaatggcctatcaagcctatcaatagattacaaacttttcaagggaaatcatctttatagctgatcttttaagctaattttttttttcaaacttgcttcgatggagaaatggaaa

SEQ ID NO: 900096 - DNA, 120 bp, Artificial Sequence
  ENSG00000272167_5 (sequence is synthesized)
aggacacgtgtactggcaggcatggctagcgaatgggaaagtacaatcctgcctagtattttggtgaattagtttgtgtgtgggttttccttcttcttcctcctccatttttttttatac

SEQ ID NO: 900097 - DNA, 120 bp, Artificial Sequence
  ENSG00000272167_6 (sequence is synthesized)
tataaaagggcaataaaatgctgactgtaagaagacaatgtcaaggagaaaagggtactggtattttggatactcttcactgctcgccttggagagagagttattcttgtcacaaaccct

SEQ ID NO: 900098 - DNA, 120 bp, Artificial Sequence
  ENSG00000272167_7 (sequence is synthesized)
tttgtctgcatctgctgactgcttgcctgtagccagcagcatactttaactgttttgtcacctcctaacatcacatgcatcagctgttgggcttttgttacgggtattgtagaactaatc

SEQ ID NO: 900099 - DNA, 120 bp, Artificial Sequence
  ENSG00000272167_8 (sequence is synthesized)
gattcacaaaatcaaataaataaataactccccagccaccccccagcctctccccacacccagaaacaaaacccctcgatctagccccagatgcctccaagtcaactgcattcaagaggc

SEQ ID NO: 900100 - DNA, 120 bp, Artificial Sequence
  ENSG00000272167_9 (sequence is synthesized)
tgacttgagccttcaagcaattgtttcagggaactcgaaagaacagtgctctctcaattttcacaccgtggaattcatatacagtagtagagttaaatatatctaatgctgaagcagctc

SEQ ID NO: 900101 - DNA, 120 bp, Artificial Sequence
  ENSG00000272167_10 (sequence is synthesized)
tgaaaaattggagaaagttactttttgtccctgtgggcctttaaaaatatataggtaatgccatcaaaaatacatagtgaagagctgccttgtcaaactgcttttattgtttccatccgt

SEQ ID NO: 900102 - DNA, 120 bp, Artificial Sequence
  ENSG00000272167_11 (sequence is synthesized)
attttcttcccttccactcatctgaaaggggtcaaaggtagatgcttgtgcatttagtttatcctaagagtctcttttgtgctctatataagagcacaaaagaagaaccaaactttgctg

SEQ ID NO: 900103 - DNA, 120 bp, Artificial Sequence
  ENSG00000272167_12 (sequence is synthesized)
ggttagaaaaactgcatctgcatcattagctccttaacggtataatgatgtaccaatcatacatagcgaggtatttttctagatgacttcgaagtgtctttggagaagttaaaaagagaa

SEQ ID NO: 900104 - DNA, 120 bp, Artificial Sequence
  ENSG00000272167_13 (sequence is synthesized)
tgggcatctgcacacgtgtgtgcacacacacgtacacaaaaatcttagggaaggagacaaatagttgaagtactttcccgagcattcattcaccctagagtgcacatgattcctctaaac

SEQ ID NO: 900105 - DNA, 120 bp, Artificial Sequence
  ENSG00000272167_14 (sequence is synthesized)
aaactctcccatccctgctgtttgttaagtaaatatcgatcaaggagagactcatctcctgacagcagtggcacaagctggggacttacactgcagacagagtggacttaaatggataaa

SEQ ID NO: 900106 - DNA, 120 bp, Artificial Sequence
  ENSG00000272167_15 (sequence is synthesized)
ctcagatgctttagtaactcctcatagagattatcagatgaaaagccaagaacagatacgttattgctgctcctcttcactgtctcactcacactaaactctcctgccagaggctgaaaa

SEQ ID NO: 900107 - DNA, 120 bp, Artificial Sequence
  ENSG00000272163_0 (sequence is synthesized)
ctccttgttctgctcggccgcctcggtgagcttggcgtagcggcatttgaaccactcttcggcctggtgcatattctggtctgagtggctttcgagctgggagcggatttccttcagcgc

SEQ ID NO: 900108 - DNA, 120 bp, Artificial Sequence
  ENSG00000272163_1 (sequence is synthesized)
cgtcgagatgtctgtcttcaggtagtctttgcgctccaccgtgatgtgcgatgcctggatctgggccagaaggtcggccacctcctcctcgtggttgctccgcaggaaggccacctcatc

SEQ ID NO: 900109 - DNA, 120 bp, Artificial Sequence
  ENSG00000272163_2 (sequence is synthesized)
ctgcagcgactgcaccttcttgtccagctccaccttgaccagcgacgcctcctcgatgtctttgcgcagcgcgcggatggccgcctcagtgtcgtcgcgcaaccgcgcctcctcctcaaa

SEQ ID NO: 900110 - DNA, 120 bp, Artificial Sequence
  ENSG00000272163_3 (sequence is synthesized)
gcgctccttgagccggtggatgtcttcctccaggtggtccgagtccagctgcacctgagccttctcgtggttcaccatctccagggtggcgcgcagctcgcggatctcctggtcgtacgc

SEQ ID NO: 900111 - DNA, 120 bp, Artificial Sequence
  ENSG00000272163_4 (sequence is synthesized)
gtcgcccagctgggcgtgcgaggcctgcttctgccgcagcgcctggatctccgcctcaatctccttattctgctgctccaggtagtgcaccttctctatgtagccggcaaagcggtcgtt

SEQ ID NO: 900112 - DNA, 120 bp, Artificial Sequence
  ENSG00000272163_5 (sequence is synthesized)
cagcccctgcagctgctccttctcgttggagcgggacagcttgtagtcgccgccgggtccggagccgccgttgagcagggacgaggactggctgaagtcaaggctgctctcggcggagct

SEQ ID NO: 900113 - DNA, 120 bp, Artificial Sequence
  ENSG00000272163_6 (sequence is synthesized)
gagcatggccgagctgtaagcgaggcgcggggcgagcatgctgcgcttataggaggaggacacggtgctgggcgagccgcgggaccacgactgcgagcggaagccactggacggggagcc

SEQ ID NO: 900114 - DNA, 120 bp, Artificial Sequence
  ENSG00000272163_7 (sequence is synthesized)
gctgacgcggctgaagctcgagcgggtctcggttacccgccggtaggcggacgggttgcccagcgagtccaacgtgtagctcatcttggaggccttggggcgtgtggctgtcacagcgtt

SEQ ID NO: 900115 - DNA, 120 bp, Artificial Sequence
  ENSG00000272163_8 (sequence is synthesized)
cgtgtggctgtcacagcgttctgccggcctcgccgcagcccatttatagccgcggcgctggtcccgggccagggccccgccccgtggaggcggcggccgaggaggcggggactgcgggca

SEQ ID NO: 900116 - DNA, 120 bp, Artificial Sequence
  ENSG00000272163_9 (sequence is synthesized)
gggggcggctgaacggtgattcagcgcccgctccacgtgggcccaggccgcatgggaacctggacttttctgccctgggcccagcccctcccccaggtcccctttcagtcccaggctact

SEQ ID NO: 900117 - DNA, 120 bp, Artificial Sequence
  ENSG00000272163_10 (sequence is synthesized)
acctcccgattgcgtttcgcacccttggtgcgaatatcgccagcgccctttctttgtcactgtcccgccgttcaggcagcgcttccccgaccccgtggtccccttgttctttagccttct

SEQ ID NO: 900118 - DNA, 120 bp, Artificial Sequence
  ENSG00000272163_11 (sequence is synthesized)
accctcttatcctcaaggctttctcttattttgccctttccctgatacttttttctttacccatcttctgtgcttaatttcatccccttcttttttggcccctcttctccttcctactct

SEQ ID NO: 900119 - DNA, 120 bp, Artificial Sequence
  ENSG00000272163_12 (sequence is synthesized)
ggcctttagtccagttcaccctgcccttctctcagccccttcctcggagatccttttcttccaatctttccttctccccgtctcctccctccttccccttgcattccctcttttcccctc

SEQ ID NO: 900120 - DNA, 120 bp, Artificial Sequence
  ENSG00000272163_13 (sequence is synthesized)
ccccaccctcatcttttcttgcctccctccccttcccccaccccttgtcttaaagcagctggagatgagcgccgaggagctgggtctagaagacaaaacaaaacaaaaaaaaagactttg

SEQ ID NO: 900121 - DNA, 120 bp, Artificial Sequence
  ENSG00000272163_14 (sequence is synthesized)
cggaacggtctgcctgaaggcttcgggaaggggacaaagagaacaggccggggtagttatttgtataaaaagtgggatatggcgtttttaacgtttgggggacgtccgcagcttccgcag

SEQ ID NO: 900122 - DNA, 120 bp, Artificial Sequence
  ENSG00000272163_15 (sequence is synthesized)
gggcagaaggtaaggcgcttgtgctcgctatggcgccggcagcaccaaggacagcgcccaggtcggcgagtgggaggtgcagccacccggggggcttgtcacccagcctggcctgtcagg

SEQ ID NO: 900123 - DNA, 120 bp, Artificial Sequence
  ENSG00000272163_16 (sequence is synthesized)
ttggcagggggcagggggttcccttccccctcttctctccgagtaaatacaatttaaacctgcctgtagtgactatctttgcaggagcgaagctggaatcacaggctaagacttccctgc

SEQ ID NO: 900124 - DNA, 120 bp, Artificial Sequence
  ENSG00000272163_17 (sequence is synthesized)
aatgcagggttggcacaatggacagatcgcagattttgaaaacaaccaaaattcattaaagtcagttaacagaaatatatacttgtagcccagtttgagttttctaacatatggtggtat

SEQ ID NO: 900125 - DNA, 120 bp, Artificial Sequence
  ENSG00000272163_18 (sequence is synthesized)
aggaaatgaagagatacagggcctgaaatgtgaaggtcaaatactccttggaaaggagaatttgaaatctgttgggatgaaaagtccagggaaatatagtttttcttaagtttggacaca

SEQ ID NO: 900126 - DNA, 120 bp, Artificial Sequence
  ENSG00000272163_19 (sequence is synthesized)
gacaattgccttgtcatctttcggttcagtattccctatgtgtaactgcaatgattgaaaaggcatctgaattaactttaaattgatttaaaagttgcggaacagagtcaccacaacctt

SEQ ID NO: 900127 - DNA, 120 bp, Artificial Sequence
  ENSG00000272163_20 (sequence is synthesized)
gaataaaatcagatgttttcccttcatttaaaatgtaatatatttttcgctttagattttaatgattgatttggaatagattttctatatcattaaacatgtttatgcaaacaagaactc

SEQ ID NO: 900128 - DNA, 120 bp, Artificial Sequence
  ENSG00000272161_0 (sequence is synthesized)
gggcagccggtgccagggccgtcatggccagcgcgtgagggacaggagtgagggaccagcacccgcatgaaggtgcagtcccaggcacgcagtgggtgcccagacgcacccccagtccac

SEQ ID NO: 900129 - DNA, 120 bp, Artificial Sequence
  ENSG00000272161_1 (sequence is synthesized)
cgcccagggctcctgcaccacctccccatgtgcggtccctgtggacactggcctcgggcctgctcgccgtctgtggggcaccgatgcctgcaaatctgcaccacctcctccctaggccga

SEQ ID NO: 900130 - DNA, 120 bp, Artificial Sequence
  ENSG00000272161_2 (sequence is synthesized)
cttgctggctctgcccgttctctcaaagccctgggggttctgtaaaagctctcaggattcctgtaatcctgcctcctttctcttaggctggcagcctggcagactagttcttctcggtgc

SEQ ID NO: 900131 - DNA, 120 bp, Artificial Sequence
  ENSG00000272161_3 (sequence is synthesized)
tgaattatgtaccccgcttccccaactcgcccgcactcctgtgtcttacgtgggtcctggggtccggcaaagcctgttctccccactcgaaatgaagtcatttcaaagtcttgtctttca

SEQ ID NO: 900132 - DNA, 120 bp, Artificial Sequence
  ENSG00000265995_0 (sequence is synthesized)
tccaccaagagctgatttaggcaaaatctccagaaaaacataaagcttcaataatgaataaaaaagaccagaggatgcaaaattccacaggaatgtcagattttatacaacctcatagag

SEQ ID NO: 900133 - DNA, 120 bp, Artificial Sequence
  ENSG00000265995_1 (sequence is synthesized)
tgaagggatgaaataccctctgactctgaagacactaatgtattaatctgtggaataagaaagaacataccagaggcctcatctgatgcaacacagtgcttaccctcctcggaatcgatc

SEQ ID NO: 900134 - DNA, 120 bp, Artificial Sequence
  ENSG00000265994_0 (sequence is synthesized)
catttggatctccaatcattatttatcatctgagagattcagatttctccctcagtctacttttggacgttcacaatgtctgcattttggagtcagaagagaaagccatgaggagaggaa

SEQ ID NO: 900135 - DNA, 120 bp, Artificial Sequence
  ENSG00000265994_1 (sequence is synthesized)
gtgagagactaaggtgaatagtaccttcaaggatctccaaggctccatacaaagtagtgcatggctttcagattcttcaccagagcaagggtattaaacaaaagggccccaggtgtcccc

SEQ ID NO: 900136 - DNA, 120 bp, Artificial Sequence
  ENSG00000265994_2 (sequence is synthesized)
ctgtaagctacccaattagggttattaatttgtaaaattattttagggatttaattatgttatctttcttcagagttcatttgtattccctaatttctgtaaaggtctgctgaatattta

SEQ ID NO: 900137 - DNA, 120 bp, Artificial Sequence
  ENSG00000265994_3 (sequence is synthesized)
cgagtagctgggactacaggcgcctaattttccataaaatgtataccaccaaaaagaaaaattctgactgcagggaagcagtacactctgtagaccccggagaaaaataaatcaccatga

SEQ ID NO: 900138 - DNA, 120 bp, Artificial Sequence
  ENSG00000265994_4 (sequence is synthesized)
actctgtagaccccggagaaaaataaatcaccatgagatttgacaacaatcaatttttcactgcacgctaatcaagcagatagaaagaaggccatgatttctccctcagtctacttttgg

SEQ ID NO: 900139 - DNA, 120 bp, Artificial Sequence
  ENSG00000265994_5 (sequence is synthesized)
ggtatgttttacctggattctcctctcaccacggagcaacatagccattgaaggacacaaagaccaagcagaaaagcatggcaaagtgaaggcagctttctacctattgcctaatataat

SEQ ID NO: 900140 - DNA, 120 bp, Artificial Sequence
  ENSG00000265994_6 (sequence is synthesized)
gttatccattgtggagtttaatcagttggcaaaaataaactgttaccttttactcctcataacaaggggagcatttacgtgctccaattcagttaataaaaaacacctgatccactgaaa

SEQ ID NO: 900141 - DNA, 120 bp, Artificial Sequence
  ENSG00000265992_0 (sequence is synthesized)
gccccaatcccttatttccacgccccaatctcttatctctgcgccccaatcccttatttccgcgccccaaccctttctctgcttttctggaggggaagaaacccccaccccttctccgtg

SEQ ID NO: 900142 - DNA, 74 bp, Artificial Sequence
  ENSG00000265992_1 (sequence is synthesized)
ttcttctcccttagcatgtattcttaagaacttaaaatctcttcaattctcacctgacctaaaatctaagcgtc

SEQ ID NO: 900143 - DNA, 73 bp, Artificial Sequence
  ENSG00000265992_2 (sequence is synthesized)
cagaaaatggcactttcaatttttccaccctacaagatctaaataattcttggcgtaaaatgggcaaatggtg

SEQ ID NO: 900144 - DNA, 63 bp, Artificial Sequence
  ENSG00000265992_3 (sequence is synthesized)
tccggcttacagtttcattccgtgactagccctccccgacctgcccagcaatttattcttaaa

SEQ ID NO: 900145 - DNA, 75 bp, Artificial Sequence
  ENSG00000265992_4 (sequence is synthesized)
cccctcctcacacctgctccggcttacagtttcattccgtgactagccctccccgcatagtcaaggttaatgctc

SEQ ID NO: 900146 - DNA, 77 bp, Artificial Sequence
  ENSG00000265992_5 (sequence is synthesized)
cacaagaacttccaaacgcctgaactgtagcagccagacgtttctccagaacctcctcccccaggagcccgcagccc

SEQ ID NO: 900147 - DNA, 120 bp, Artificial Sequence
  ENSG00000265992_6 (sequence is synthesized)
ctggcccaaggttctctgactgactccttcttggcttactggctgaagactgacgctgcctgatcgcctcagaagccccgcagaccatcatggacgccgagctttagcccgcctgcaccc

SEQ ID NO: 900148 - DNA, 89 bp, Artificial Sequence
  ENSG00000265992_7 (sequence is synthesized)
gggaagacatacaaaaacaaggcctctgaggtaggtactactgagacagccaggtgggaaggactccttggcaaaactccaaccagcct

SEQ ID NO: 900149 - DNA, 120 bp, Artificial Sequence
  ENSG00000265992_8 (sequence is synthesized)
ccaggtgggaaggactccttggcaaaactccaaccagcctgtacactgggaggaatgtgcactgggatggagccatagaagtttgtgtcgtttgcagtggggaggagcctggtccctcct

SEQ ID NO: 900150 - DNA, 120 bp, Artificial Sequence
  ENSG00000265992_9 (sequence is synthesized)
cttcctgtgaggaacctggaattcaatctgtgaggaacttcttgaaagacccatcaattcttcaatagaaagcatcaaaggacaatttacaccctaagactgaacccctgacctcaaaat

SEQ ID NO: 900151 - DNA, 120 bp, Artificial Sequence
  ENSG00000265992_10 (sequence is synthesized)
ctttcccttgctatgttcaccaacctcaacagaaatattaggattcttacctgatcctagccaagccccctccctcatctcccattaaagggtccatcttcaaccaaacttaagtctcaa

SEQ ID NO: 900152 - DNA, 120 bp, Artificial Sequence
  ENSG00000265992_11 (sequence is synthesized)
taaatatctggacattgtccttccaactctgggaagctgctaagactctgtccttactgcagaagaaaaaacagccttgtaccctggtcttctcaacaggttgttctggagatgttctgg

SEQ ID NO: 900153 - DNA, 120 bp, Artificial Sequence
  ENSG00000265992_12 (sequence is synthesized)
ggagactgcattaaacacagcttcgcaccattgaataaactcagcaacaagccaatgcataaaagtaatctatgcttcaggtcacagaagcttcaaggggaaaaaaacagaatactctag

SEQ ID NO: 900154 - DNA, 120 bp, Artificial Sequence
  ENSG00000265992_13 (sequence is synthesized)
ggccattgttcacaaactcatctgaaaacatcctggaaaaattttcccaaacacatggaaagaaagagaggaaaaaagaagatatctgaataatgtggactagaataaagagctgccagg

SEQ ID NO: 900155 - DNA, 120 bp, Artificial Sequence
  ENSG00000265992_14 (sequence is synthesized)
agctgtttatttaaaaacagtactttcttctctggctgagtccctggtattctctgctgcaatctgtagctgtagaattttgaagaatgcaattaaattcaaatggtttgatgagtaata

SEQ ID NO: 900156 - DNA, 120 bp, Artificial Sequence
  ENSG00000260312_0 (sequence is synthesized)
cacaaacctctctgcagaatgcttgggggaaatcagctgcggggggcgcacagaacccactgatcagagtcatccccagagattgatgcttacggagatgaaaagccctcaaccattgtc

SEQ ID NO: 900157 - DNA, 120 bp, Artificial Sequence
  ENSG00000260312_1 (sequence is synthesized)
gcttgtgtggtcaaaatgggatgtggatgtgaaatttatcctgtgctgtgcaaagtaccacagagtgagtcaccttcctcaccagtagtgttagaaagaggctgtgaaagttgtcagaat

SEQ ID NO: 900158 - DNA, 120 bp, Artificial Sequence
  ENSG00000260310_0 (sequence is synthesized)
cagccttccaggtcagtgagggcacagcaaaggccacttctttgtcatagtaaactccgccagacgggaccaggaagggaagtctgtcgagatgaaaatatataaatgtccttccaggcc

SEQ ID NO: 900159 - DNA, 120 bp, Artificial Sequence
  ENSG00000260310_1 (sequence is synthesized)
attgaattcctggggccctcatcttccttggcaagctgggcttctgttgatctaaaagggactgaggatgaagaagagacttctccggttcctgctctttagggacaggctagatgacat

SEQ ID NO: 900160 - DNA, 120 bp, Artificial Sequence
  ENSG00000260310_2 (sequence is synthesized)
cagcttctagaagcttcctggaactctgggtccagagctgagggaggggtcaccagggtgatatttgacaccatgattgtcctgagaaatctaggatgcaaaatcgccatcaccatgcag

SEQ ID NO: 900161 - DNA, 120 bp, Artificial Sequence
  ENSG00000260311_0 (sequence is synthesized)
taaatagaaagacatttaatgtgcatgatcataaaatctcaatattgtcaagatataatttctccccaatttgagttataggcaagagagtcacatcatctaggtgattggccaaacata

SEQ ID NO: 900162 - DNA, 120 bp, Artificial Sequence
  ENSG00000260311_1 (sequence is synthesized)
tgtcacaatcccttccattgacagctcccaaaaaaggagttacatcacctaggtgctcagctctgagatgtgtcacaacattgcccaatacaggcaggccacaggcgggagagtcacatt

SEQ ID NO: 900163 - DNA, 120 bp, Artificial Sequence
  ENSG00000260311_2 (sequence is synthesized)
tcctgggtgcttggcccagtggtatgtcacatttccttatgtaggaagggcacacgtagcaagagagagtcacattacctaggtactgtgctagagctatcagtctctgtgtcgttcaat

SEQ ID NO: 900164 - DNA, 120 bp, Artificial Sequence; identical to SEQ ID NO: 830810
  ENSG00000260311_3 (sequence is synthesized)

SEQ ID NO: 900165 - DNA, 120 bp, Artificial Sequence
  ENSG00000260311_4 (sequence is synthesized)
tgtcttaggctttggcctctccccttcaagcacaatgagatcataacctctcttttgacttctcactatgcccagcactggaacaaagctcctgactccacaccctcacctttccaccct

SEQ ID NO: 900166 - DNA, 120 bp, Artificial Sequence
  ENSG00000260311_5 (sequence is synthesized)
tgtgccttcactgggcagacaagagatgagaagacctgaactctgggacagtctggggagaaaagaatccaaaaagggttgaggcggcaagggctgagctcccacgggtgccccggccca

SEQ ID NO: 900167 - DNA, 120 bp, Artificial Sequence
  ENSG00000260311_6 (sequence is synthesized)
aaggtgcaggtccaggctgttttccaggtggcattcagtgcaggttcttcaatgccactggaaggcatgaaaaacccactgtagctgctgctgcttccttttcttaagctgtgaaaatgc

SEQ ID NO: 900168 - DNA, 120 bp, Artificial Sequence
  ENSG00000260311_7 (sequence is synthesized)
aaacactttttcaaggttttcagatatgcccaggtacccccaactgaaaaggaggataatggcattgttcatcatggcttattgtcttgcccaggcaggagccagcccctgactcgccaa

SEQ ID NO: 900169 - DNA, 120 bp, Artificial Sequence
  ENSG00000260311_8 (sequence is synthesized)
tccagctgccccaggctggaggtgatcctttcgagcctcctccctgcaactccactcctcttttttctcttcctcaaccaccggcatacttttggtcatcctccttgttgtcacaatggg

SEQ ID NO: 900170 - DNA, 120 bp, Artificial Sequence
  ENSG00000260311_9 (sequence is synthesized)
ggcgtgatgccataaagacctgggaaccccaatgatctcaggtcccgcaggggtcaggtgagcatataggaagtccagaaggacagtcatctgccacctccagttgaaaaagaacaaaac

SEQ ID NO: 900171 - DNA, 120 bp, Artificial Sequence
  ENSG00000260311_10 (sequence is synthesized)
cactccagaaatgagtcaagaacccagcgaaggccacaggtctagcccacaaccacctaggtatgtggggtcctccaaggctcacgcttgtgtcctgcaggctggagcccatgcgagggt

SEQ ID NO: 900172 - DNA, 120 bp, Artificial Sequence
  ENSG00000260311_11 (sequence is synthesized)
ctgcagtctttgttccggatggggaactactgcttcagctggttacccaggtgtccccgatggggaaaggaaggaaatggtgagaatcttcagcacaacggatcacatcaccctggcaga

SEQ ID NO: 900173 - DNA, 120 bp, Artificial Sequence
  ENSG00000260311_12 (sequence is synthesized)
gaccagtccggcctgcgcatggcaccagcagccgcaggctagaggcagtcatgtcaggcctcctccatacagcatctctcctgcttttttttcaaacggtcctaatcacttaatttggtc

SEQ ID NO: 900174 - DNA, 120 bp, Artificial Sequence
  ENSG00000260311_13 (sequence is synthesized)
atcttccctgtcacaatggggcacctggcgctatagacacttgggaaacacacagatctggggtcctacagtgtccaggtgaagacgccgggagtcagagaggaaagtcttttgaagcct

SEQ ID NO: 900175 - DNA, 87 bp, Artificial Sequence
  ENSG00000260311_14 (sequence is synthesized)
gaagacgccgggagtcagagaggaaagtcttttgaagcctccaaaaggaatgcacaggaccccacttgaagaggtggagtgcccagt

SEQ ID NO: 900176 - DNA, 120 bp, Artificial Sequence
  ENSG00000260311_15 (sequence is synthesized)
ctcatcacccagtgattccaaaagaaaggatctacaatggcatgactaagttccagaaacaaataaacaaaatactgagggaagcccgttggtcactttgattcttcaaaggtgacaatt

SEQ ID NO: 900177 - DNA, 120 bp, Artificial Sequence
  ENSG00000260311_16 (sequence is synthesized)
gtccctccctgaaatcttgtgagtgcatgaacaggctattctaatgtaaatgaaattcacactaaaactgattgaaagatgattctgtttccaaggtactttgtattctcaaattgcacc

SEQ ID NO: 900178 - DNA, 120 bp, Artificial Sequence
  ENSG00000260311_17 (sequence is synthesized)
tgcttaccctggccccctcaaaatggaagagtgatgactatttgtcttcgtagcactgtggggacacagagccttaaatggaagagtgtcaaaagcaacattccataaagggctgtcact

SEQ ID NO: 900179 - DNA, 120 bp, Artificial Sequence
  ENSG00000260311_18 (sequence is synthesized)
tccaattttcaagcaaggttggaaaccaaccatgatgtatgaaacactgttggccaaagtgcacaattagtaatacaaaatgaataatataaactattgtaaatatgtgtggacatcgtg

SEQ ID NO: 900180 - DNA, 120 bp, Artificial Sequence
  ENSG00000260311_19 (sequence is synthesized)
gcaatttggacatcaaaaaacactgccaaattcagaaagaggaagctgtaaactcatggctgttaggaagcttaacttctgtgtactagaacctatcaaaattaaatttctccatgtcaa

SEQ ID NO: 900181 - DNA, 66 bp, Artificial Sequence
  ENSG00000260316_0 (sequence is synthesized)
cacgcagcagagacaggcgtccccacgggcagtgcaaaggtcaccaccacacagcagagacaggcg

SEQ ID NO: 900182 - DNA, 65 bp, Artificial Sequence
  ENSG00000260316_1 (sequence is synthesized)
cacacagcagagacgcacgggcagtgcaaaggtcaccaccacacagcagagataggcgtcctgtg

SEQ ID NO: 900183 - DNA, 64 bp, Artificial Sequence
  ENSG00000260316_2 (sequence is synthesized)
caccacgcagcagagacaggcgtccccacgggcagtgcaaaggtcaccaccacacagcagagat

SEQ ID NO: 900184 - DNA, 120 bp, Artificial Sequence
  ENSG00000260316_3 (sequence is synthesized)
gtcctgtgggcagtgcagaggtcaccacactgagccagactgtcctcggccttccctgggttgagcaccggatgaaaaccatgtgctttgagccctggaaagacaatcagcccagccaga

SEQ ID NO: 900185 - DNA, 120 bp, Artificial Sequence
  ENSG00000260316_4 (sequence is synthesized)
aatcagcccagccagagccagagcctgaaacaggcagcccccagggcgcagctgcaggaagccgcatcctctcgtgggctccagcaaggcgggggacgctgtgttccctcagtggcttct

SEQ ID NO: 900186 - DNA, 120 bp, Artificial Sequence
  ENSG00000260316_5 (sequence is synthesized)
tggtgccccttgatgtccaggagtgtgaggtgaggtgagggctctgagctgggaagctgacaagtcagggagaatgccaggccagacgcatcggcctgcgggggctggagcagagcctgg

SEQ ID NO: 900187 - DNA, 120 bp, Artificial Sequence
  ENSG00000260316_6 (sequence is synthesized)
cactcactgtacttgctccgtctcactccggctgctgcgctggcccagggctgtccaccccaggcgtgtggcagagcaagcctggctcccagagctcccctcaggccctggagcggcagg

SEQ ID NO: 900188 - DNA, 120 bp, Artificial Sequence
  ENSG00000260316_7 (sequence is synthesized)
cagtgggcatcctcagcccaacccatgtccgtgccatgcacaggatagctgagcttgccgctgccacagggtgtcagcgggttggggcaacagacagggccccagtgctggtggccaggc

SEQ ID NO: 900189 - DNA, 120 bp, Artificial Sequence
  ENSG00000260316_8 (sequence is synthesized)
tggctgtatgtgtgggttggctgccacctgactgcactgaaacaagaaccacccccaccccaccccccactgctctccacccggttcggggccggccctggctgggcttcgtggatcctc

SEQ ID NO: 900190 - DNA, 120 bp, Artificial Sequence
  ENSG00000260316_9 (sequence is synthesized)
aggttgtgcgggtcatggcttcctggggctgggccagagccatcatggagtcagcacggttccttgcagacacaggcggggcaggcggcgcctctccaccttccttgcctcaagctgcgg

SEQ ID NO: 900191 - DNA, 120 bp, Artificial Sequence
  ENSG00000260316_10 (sequence is synthesized)
ggacagcaccaaaaagccacgtggacccagatggcctcgccggacttcctgactcagggctgtctccagcctacatcccaccggggctgcacgcacagacggcttctcctggagccctgg

SEQ ID NO: 900192 - DNA, 120 bp, Artificial Sequence
  ENSG00000260316_11 (sequence is synthesized)
agcatttcccccgtgtttcggccaggttttctgctttaaatgagtttatttcagtcgtgtcaaagtgaaggtctctttcactcaggacgtgatcaatggcgtggccatcaagtcacagcg

SEQ ID NO: 900193 - DNA, 120 bp, Artificial Sequence
  ENSG00000260316_12 (sequence is synthesized)
ttgaaggcaacagatggcctttaatgacgctattttaaaaaataatttcccctttctttccccatcctggttttgtgaggacagagcatcggcatctcagggcgggggtgggtctgccta

SEQ ID NO: 900194 - DNA, 120 bp, Artificial Sequence
  ENSG00000260316_13 (sequence is synthesized)
ctgtgtcccggcacctctgtgccacctgcacaggggcagagggtgggttttccgtgacgccccctggagccaaaccaccgttgatcacttcctcctgatgaactgggctgtgttggggtg

SEQ ID NO: 900195 - DNA, 120 bp, Artificial Sequence
  ENSG00000260316_14 (sequence is synthesized)
cagaggtctcggttgcgtatgttctgggaattgagccagggtccttgttgctgggaattctcagacctggacaatatcagtagaggagaccacttgatttttagtttgacccctggagaa

SEQ ID NO: 900196 - DNA, 120 bp, Artificial Sequence
  ENSG00000260316_15 (sequence is synthesized)
ttgaaaagctggaaatctgttttctgtaccttccccctcccaaccctcccccgactccctacctggcttctgtctggagaggacgtctgcatggctgtcctggggtggctgcaggtgtgc

SEQ ID NO: 900197 - DNA, 120 bp, Artificial Sequence
  ENSG00000260316_16 (sequence is synthesized)
agatgctcaccgccactgtctccccattcctgctggagcccactttggtgtgagtgtttgcctggcagaggcatcgcaggcccacgggaggataaagagaagccagagaactcataattc

SEQ ID NO: 900198 - DNA, 67 bp, Artificial Sequence
  ENSG00000260316_17 (sequence is synthesized)
cccacgggaggataaagagaagccagagaactcataattccaaaagctggcaaagttaaaacgtgat

SEQ ID NO: 900199 - DNA, 61 bp, Artificial Sequence
  ENSG00000260316_18 (sequence is synthesized)
ttagcaggtatgctggcgggcgcctgtaattccagttattcaggaggctgaggcaggagaa

SEQ ID NO: 900200 - DNA, 120 bp, Artificial Sequence
  ENSG00000260316_19 (sequence is synthesized)
aataaaagaaaagaaaaaagaaaagaaaataataaaataaataaaataagatgtccaaactcacacctgtgcagcttacggctctgcgaggctcacacctgtgtggctcatggctctgga

SEQ ID NO: 900201 - DNA, 120 bp, Artificial Sequence
  ENSG00000260316_20 (sequence is synthesized)
tggagggctcacacctggctacagcacccagaggtagggccttctgatgctccttgtgtgcaaactgtcttggtcctcattaacacaagaagaaaaagcaacggctgaaatgtggaatac

SEQ ID NO: 900202 - DNA, 120 bp, Artificial Sequence
  ENSG00000260316_21 (sequence is synthesized)
gtaagcccacagtgtgaaccattttggggtcagaatcgagcaaaggccaggaagccatagccaggctgtgtgattgcaggcaccgtggaaactccagtaactaagatggcaccatgaaga

SEQ ID NO: 900203 - DNA, 120 bp, Artificial Sequence
  ENSG00000260316_22 (sequence is synthesized)
gctgcctgggatgttacagaagccttaggccagtcagtgtgacaacttagatgagatggacaaaacccttgaagaagggtgcgggggagtgccgggtgcagtgacttctttactcaagga

SEQ ID NO: 900204 - DNA, 120 bp, Artificial Sequence
  ENSG00000260316_23 (sequence is synthesized)
aagccaggatttgggacgcgtgtcggagctgagccccacatctctctttacacccagacctgctcaccttttgtgggattcaggcccgagtgtgcggcatcgtgcagtggagcctccgac

SEQ ID NO: 900205 - DNA, 120 bp, Artificial Sequence
  ENSG00000260316_24 (sequence is synthesized)
cctcacgggcacggcacatccggcgtccagggcgtgtgcctcccacgtgtgtgctgccaccccaagcctcgtggggtcggaaggaaggtgccaggggctcaacaggtttgcgccttcgtc

SEQ ID NO: 900206 - DNA, 120 bp, Artificial Sequence
  ENSG00000260316_25 (sequence is synthesized)
atctgctcttttcccacaggcccaggactgtctgcaaagcgctttacgccgagcatgcttcacccccgagcctgccagagggtccgcagcccatgggaggtgtgggtcatgggcggcgct

SEQ ID NO: 900207 - DNA, 120 bp, Artificial Sequence
  ENSG00000260316_26 (sequence is synthesized)
gaaaggcagacgtggagcggtgctgccgacatcaagacctgactttgaagtccacaggctgctgcttggcatcagagccactgatgaaatcacattaaacgtaatggaattggtatcggc

SEQ ID NO: 900208 - DNA, 120 bp, Artificial Sequence
  ENSG00000260316_27 (sequence is synthesized)
atgcagccctgtgaggccaggatcaggcagatgtgctgccgtttccctgacaggcccgccctggtcctgggcagccacactccagaacgagagtaattatcctaattgctttattgcatc

SEQ ID NO: 900209 - DNA, 120 bp, Artificial Sequence
  ENSG00000260316_28 (sequence is synthesized)
agtgtgggggcagctcgggtagctcagaggaaaaggggcttctttcagggcccatcggcttcagggcgacatgctccacccggaaggggcagacctctgactccggcacggaggcgtcgt

SEQ ID NO: 900210 - DNA, 120 bp, Artificial Sequence
  ENSG00000260316_29 (sequence is synthesized)
gggaatttttagaaaatgatatctatggcatcctgatctctggcccccagctgcagccccctgtgaggccgaggcccagaccggagtccctgaaagcgctttgtgcctccgacctccggc

SEQ ID NO: 900211 - DNA, 120 bp, Artificial Sequence
  ENSG00000260316_30 (sequence is synthesized)
gtttttggcagagctggggcaggagccggggtgctcctcgcggctgaagcgcatcagcctccagggcgagggtgtctcagatccccgcacagcccgtcacacagcccctgggacaatcac

SEQ ID NO: 900212 - DNA, 120 bp, Artificial Sequence
  ENSG00000260316_31 (sequence is synthesized)
acaggacagtgctctcctgtgatcttcaaaggatctcctgggttgtgggggtgcaaaataaaactctgctacaaagagcattagtaattcctcttcccaaccgcacagttcagctcaagc

SEQ ID NO: 900213 - DNA, 120 bp, Artificial Sequence
  ENSG00000260317_0 (sequence is synthesized)
tatctacctactttctgctgtataggttatttttttgcatagtcaaatcatgtttgttttcttcataatttctgcttttggtgtcttttatagaaaggacttccccaatccaaaattatt

SEQ ID NO: 900214 - DNA, 120 bp, Artificial Sequence
  ENSG00000260317_1 (sequence is synthesized)
aaagtgatcatctgttttcctttcagtatttcccttgaagtaaaccaatctccaagctgtttgtaagattgtttggcaatttatttagaagaaatctatgtcagaggatccaaatttaat

SEQ ID NO: 900215 - DNA, 120 bp, Artificial Sequence
  ENSG00000260317_2 (sequence is synthesized)
atgcttttgctttgatttcagtaccaaaaagttagataattttgctatgacattatcttctcccttacaagttttgatatctgaatttataatgttcaaacttaagcccacttttcaaca

SEQ ID NO: 900216 - DNA, 120 bp, Artificial Sequence
  ENSG00000260317_3 (sequence is synthesized)
gattcagttacctttgaaactgtgtatcatgtttattaattgaagagaagcccatgagctgtagaagaaagctcctattactagggattagttaggtattactatctaaataactagctc

SEQ ID NO: 900217 - DNA, 120 bp, Artificial Sequence
  ENSG00000260317_4 (sequence is synthesized)
accatcataaatgatttcttaaatggtgtcttattaattccccatgagagagataatttaattcagaaattgcctgttgcatagcctatctgcgcacttgtgacccacaaatggatgatc

SEQ ID NO: 900218 - DNA, 120 bp, Artificial Sequence
  ENSG00000260317_5 (sequence is synthesized)
tatatgttgctttgtggaacaactggataaaatttcaatcttctaaaagactcactaaataaattttttatctggtcatataattgagagttatagtccaccaaatgagctctattggtt

SEQ ID NO: 900219 - DNA, 120 bp, Artificial Sequence
  ENSG00000260317_6 (sequence is synthesized)
tacagctgggaattggccataaaaacttcataatatcttttaaaaaaatattttctatctgattccacagagatattttggtctgcagcctttattttctgctcctttcttttctgcttt

SEQ ID NO: 900220 - DNA, 120 bp, Artificial Sequence
  ENSG00000260317_7 (sequence is synthesized)
tgagtagcttgtgaatttactttcacttacatttcttgctatgagttttctgattagaaatgtaaagccataagattttaaatttaagtggttagaaaaagcagtgtacaaaattgacag

SEQ ID NO: 900221 - DNA, 120 bp, Artificial Sequence
  ENSG00000260317_8 (sequence is synthesized)
aggttataaatgttgtgaacaagaagagaagtatatattcacagaaagaaacctggacagatcataatgtttgcagtgattattcctgagtggtgggagcatggatgattttcagtttct

SEQ ID NO: 900222 - DNA, 120 bp, Artificial Sequence
  ENSG00000260317_9 (sequence is synthesized)
ttgtattttggttattttcaaatgttcagcaatgagctcaattacttttacataattacagaatatttggagtcaaacattcacctatttcccttttactaaaacttattggaattaaca

SEQ ID NO: 900223 - DNA, 120 bp, Artificial Sequence
  ENSG00000260317_10 (sequence is synthesized)
tcatttgatatagtgactatttctgagttaagaaaacataattaagaccgcaaaattacaataattattaagccactggcttattccatagcactgtataaacacagcatagaataagaa

SEQ ID NO: 900224 - DNA, 120 bp, Artificial Sequence
  ENSG00000260317_11 (sequence is synthesized)
gatgaagatcccagaatgtggaaacaaaaagctgacaagtgattgaggaatggtgagaagacacaggttctgaggactgctggacagcctttcctgtttttaaagaaaagctctcttatc

SEQ ID NO: 900225 - DNA, 120 bp, Artificial Sequence
  ENSG00000260317_12 (sequence is synthesized)
atgagagaagagtcatgaaaaccaaaaggtttctgcatttaattcgttatttagagggctgaatttatgctttgacttactctttgattacaagcactggtggttatattttatctattt

SEQ ID NO: 900226 - DNA, 120 bp, Artificial Sequence
  ENSG00000260317_13 (sequence is synthesized)
tgtggaaatgagttagcacatgtagaaaactgccctgaaaggggctgaaatgaagccattaagaccgaagtgtactttttaaaactccaaacgtcatgatttatttcttgatcttggtga

SEQ ID NO: 900227 - DNA, 120 bp, Artificial Sequence
  ENSG00000260317_14 (sequence is synthesized)
tacttatatgggtgtgttcactttgtaaacattcatcaaactctatacttaccacttgtgtacttttctgtatgtgtgttatacttcaattaaaaagtttacttgaaagaaaaaatccca

SEQ ID NO: 900228 - DNA, 120 bp, Artificial Sequence
  ENSG00000249623_0 (sequence is synthesized)
ctaataatgcgcaatgcatcacctatctcaaaagaggctccccaaaccctcggatttattaggactaactggccggtctcttactctccagacaaaatttctactttttctctctcaagt

SEQ ID NO: 900229 - DNA, 120 bp, Artificial Sequence
  ENSG00000249623_1 (sequence is synthesized)
cagctcctttgcttgaaacctccaggagggctctgacaaaccaggagtcaggggggagttcacatcaaatcaccttcagaagctgtcaacagtcccagagaactaccttagtggacggaa

SEQ ID NO: 900230 - DNA, 120 bp, Artificial Sequence
  ENSG00000249623_2 (sequence is synthesized)
agaaggatgcggaaaaaggagagatgatgcagccttgctttacgtttgcaaattggataaataaggaaaatatttaattctttaaaaaaatgttaaataaatgggagcttttcaacttga

SEQ ID NO: 900231 - DNA, 120 bp, Artificial Sequence
  ENSG00000249621_0 (sequence is synthesized)
actacatccagtgcccaagatttgtaaccacgttaatctgttagaagcctagatgtgtgactggagatgcctcctgtccattcaatctgactccaatgtggttctgcagcactggacaaa

SEQ ID NO: 900232 - DNA, 120 bp, Artificial Sequence
  ENSG00000249621_1 (sequence is synthesized)
gatgggagattgaaacaggagcccctgcgatgggggaacagagccagggagcaggggttggacaggtaagcctccatataccaagcccttcaactcctggagttacagttatccctcctt

SEQ ID NO: 900233 - DNA, 120 bp, Artificial Sequence
  ENSG00000249621_2 (sequence is synthesized)
tcaagaacccaggtttgagaaaacaaccttgtgaaccttctattggagcagcaataaagatctgagctaagtgtcgagggaggctgaggaggtggtcactaagtctgtcttaggcatccc

SEQ ID NO: 900234 - DNA, 120 bp, Artificial Sequence
  ENSG00000249621_3 (sequence is synthesized)
agggtctcctcagagtccaagcctgaagtccactgcaggggtcaccagccacctgtggccacattggaatgtggccattctgaattgaggtaagtaaaaaacatacaccaaatttcaaag

SEQ ID NO: 900235 - DNA, 120 bp, Artificial Sequence
  ENSG00000236318_0 (sequence is synthesized)
tggtaaagaatggaacatcttttacgtcaaactactgaagttgtgggcaaaattacaagcgatgattatgcaggataggagcttctaaaatatatatttcagaaataaggaaaatgcttt

SEQ ID NO: 900236 - DNA, 120 bp, Artificial Sequence
  ENSG00000236318_1 (sequence is synthesized)
cagaaaaactgagttcaagaagaaagggtgagcgaaaataaagtggtaaatgtcacaatgatgcaagaggtgggttccgacggccttgggcagctccgcccctatggatttgcaagctcc

SEQ ID NO: 900237 - DNA, 120 bp, Artificial Sequence
  ENSG00000236318_2 (sequence is synthesized)
tggaaagaagtctatggattatactcaacctacactccagttaaaggaacatctacacacagaggaaatgaataacatgaagtgaagtcttcatctccattcccaacagtccccattcta

SEQ ID NO: 900238 - DNA, 120 bp, Artificial Sequence
  ENSG00000236318_3 (sequence is synthesized)
cttgcagaaaggttgcttacactgaaaatcagtttattttcccctggtgcaaagaacagtcgtttctccaaaactgaagctggaaattatctgaaatatcaggtcctccggaaaagggac

SEQ ID NO: 900239 - DNA, 120 bp, Artificial Sequence
  ENSG00000236318_4 (sequence is synthesized)
gtgaagccccctttgtaatttctgcattagcgtgctctcctggcaagcaggaaacctcatcagagaagtcagccaaggaaagtctttaaatggaaattgtgcaaacgaggagcaaatgca

SEQ ID NO: 900240 - DNA, 120 bp, Artificial Sequence
  ENSG00000236318_5 (sequence is synthesized)
ttaaaaagttgctgacgggcatgaaatgctttgatgtgaagacggaaaactccaagcaggaaggattttaacattttgaatctgattgactctgtggtttctcagcacagttattccatg

SEQ ID NO: 900241 - DNA, 120 bp, Artificial Sequence
  ENSG00000236318_6 (sequence is synthesized)
cagctgcagaggggatcgtggtgaatttcaatgaaaatccatttgaatcttgaggttcagatcttaaaaaagcaaaggacatgagagaagtaatattgttgcttgaaatttcattgctta

SEQ ID NO: 900242 - DNA, 120 bp, Artificial Sequence
  ENSG00000236318_7 (sequence is synthesized)
tatctaaaagaaactcctatttttaagagaaatgttgaatctttgcaacgtggtagacgctcccacaaaactttctcctgaaataggagataaatgttggaaagaggcaatgtattgagt

SEQ ID NO: 900243 - DNA, 120 bp, Artificial Sequence
  ENSG00000236318_8 (sequence is synthesized)
atgctgatagaggtggagttcagagacaggcaagcatacataagagtcaggatgtttttcagtattatctttacaaatgagtttcttacagtggtcaatgacaaaccaatttcattcaaa

SEQ ID NO: 900244 - DNA, 120 bp, Artificial Sequence
  ENSG00000236318_9 (sequence is synthesized)
gcttgcttcaataggcaatggtttgatgccaatatgttagctatttactttgaccaccgtatgcattaaaaagaagaaaaattaagaatactcaagcagaacctccaacttagatagcac

SEQ ID NO: 900245 - DNA, 120 bp, Artificial Sequence
  ENSG00000236318_10 (sequence is synthesized)
tttccacaaaaagtaatggagggatagactgaagttaaatgggatcaggtatgtgatgagatctcagaagtgtttgcacaataatgcagatactcattttaaacagagtcataaggattg

SEQ ID NO: 900246 - DNA, 120 bp, Artificial Sequence
  ENSG00000236318_11 (sequence is synthesized)
gaactaataaaaataatagaataaaataccgatcaagaatgtgtcctcctgcgtatctgggttttgaattctggctccacagaacttgtcagatatatgacattaaacaagatacttcaa

SEQ ID NO: 900247 - DNA, 120 bp, Artificial Sequence
  ENSG00000236318_12 (sequence is synthesized)
gggcaaaacggggttacaggaaggtgaagagtagacagagacttccttttccaacagtattggcagagtaaatatcctgaaaatctatcctgctacaaagcacctaaaagtagtagatac

SEQ ID NO: 900248 - DNA, 120 bp, Artificial Sequence
  ENSG00000236318_13 (sequence is synthesized)
aaaatgaaaaacacatttaaatgcatgcctgtgttggaaagagtaagggaaaccattggagttatcagaggctaaatgttctgggaaggaccaattcagagaattgtaagcagtgaaatc

SEQ ID NO: 900249 - DNA, 120 bp, Artificial Sequence
  ENSG00000236318_14 (sequence is synthesized)
tggtttagcatgctggagctggttttctgcttggtagccctacaactttggcccaactacttggcctctgggactcagattcctcctctttaaaatggtgctaataatagcacccaccct

SEQ ID NO: 900250 - DNA, 120 bp, Artificial Sequence
  ENSG00000233145_0 (sequence is synthesized)
cataaggaggtcaggagcatagggtagattgttgggaggcttaaatatggctaaggagacccacacaccagtgaagcctaaagaaaatatgaaacaaccaattctaagcacgaaaaagcc

SEQ ID NO: 900251 - DNA, 120 bp, Artificial Sequence
  ENSG00000233145_1 (sequence is synthesized)
taccccaagaaccaaagagaagaaggaaaagaagaactcttctcaacaaaagaccaacaaaaatggcaaggtggagaagaaaatcataaaggttaaaaaaccccttcaaaggatttcaag

SEQ ID NO: 900252 - DNA, 120 bp, Artificial Sequence
  ENSG00000233145_2 (sequence is synthesized)
aaatcggaagagcaagcacaaaagacaacagaaaatgaaaatcagaagagcaagcccagaagccgctggcaaaagcaaaccatcccaagtaaccatctctgctgccagtaaatgcagagc

SEQ ID NO: 900253 - DNA, 120 bp, Artificial Sequence
  ENSG00000233145_3 (sequence is synthesized)
ctggatcagaaacgtacaactagcaacagcaactctggggaatcaccaatcacataaaggccaaagctgagaccaatagtgttccacccatgctgatgaatgcaataaaatcagcacaat

SEQ ID NO: 900254 - DNA, 120 bp, Artificial Sequence
  ENSG00000233144_0 (sequence is synthesized)
gctgccttttagagtctcagggaccatctttggaataagatggaaaaatcctccttgaagctgaagaactgtcttctgagcaactggcacaaggaatacgtagaggcacattctacatgg

SEQ ID NO: 900255 - DNA, 120 bp, Artificial Sequence
  ENSG00000233144_1 (sequence is synthesized)
gactgataacatctgacaatttctcggatttcctgatttgttcttgtgcacaaaatctcaatcaatacacgttcctgagttcctgctccctacatgaaatgaagggaagattatacaaag

SEQ ID NO: 900256 - DNA, 120 bp, Artificial Sequence
  ENSG00000233144_2 (sequence is synthesized)
aaaaatgaaatttctgcaagtaattaaatcttcgtcaaatatttctttgttctgtagaactaaaaactatatattcagatggatgatgtgaaataaagaattgctttaattaccactgta

SEQ ID NO: 900257 - DNA, 120 bp, Artificial Sequence
  ENSG00000236311_0 (sequence is synthesized)
gaccaagactcggagtagttcatgaagagagagaagaggggaacaaggcgaggcttaaaaggaaaagggaaaacaggaagcgaccattcccagagacggacagacagacaaacccaagga

SEQ ID NO: 900258 - DNA, 120 bp, Artificial Sequence
  ENSG00000236311_1 (sequence is synthesized)
gggtgaagtcaactgtcttcccggcctgttgggagccctcccctcactttgaactgggccaaaggagtccagcccacaaggcgtctgaggaagggatgtctctgcccaactggagaatct

SEQ ID NO: 900259 - DNA, 120 bp, Artificial Sequence
  ENSG00000236311_2 (sequence is synthesized)
cctcaagggctcagctgcgaaacacctgtcactcaaccaggagatttactccaaatttcaagtccagctttttagaaagtagaagactgtctactccccaggtatggagcccaggccctg

SEQ ID NO: 900260 - DNA, 120 bp, Artificial Sequence
  ENSG00000236311_3 (sequence is synthesized)
gctttcttgactccactcactacaagctgcttccttaagcctaaacttggctcttgcctcacaggactatcttgcaggaacctagcaacccaccttgccccatcctgaggcagaggaggc

SEQ ID NO: 900261 - DNA, 120 bp, Artificial Sequence
  ENSG00000236311_4 (sequence is synthesized)
agagatcacagacagcattctctccattacctacagacggagaattaaagcgcagagaagctgcgagggacaattgtggtgatcatgacaagacagccctcgggatctgaatccacatcc

SEQ ID NO: 900262 - DNA, 120 bp, Artificial Sequence
  ENSG00000236311_5 (sequence is synthesized)
accttgatgggttgagaggactagaaaccagagaacacccccatctctaatgccgcaagaggcccctgatgcaggatcttgcaggaataagaaggctccatggaacgggacgaggcagga

SEQ ID NO: 900263 - DNA, 120 bp, Artificial Sequence
  ENSG00000236311_6 (sequence is synthesized)
gcagagaggagccatgatacgttaactctcccagtcaccccactgatcaaaaccttaagacttgaggattctggttccttgtgctgggggtctccatctatccccactcaagcacaagaa

SEQ ID NO: 900264 - DNA, 120 bp, Artificial Sequence
  ENSG00000236311_7 (sequence is synthesized)
gtccctccatcggctttggtctcagataaggaagaaacattatgactgacagggcagaatgggtggctgccctgagcaagggggcgggagcccaggaaaggaaacccttgaacctttgct

SEQ ID NO: 900265 - DNA, 120 bp, Artificial Sequence
  ENSG00000236311_8 (sequence is synthesized)
tggaaacaggctccttgttcctgctccccctccccagggctgcgtcatcctggaagcaaccacttgaaatgggtcctagggagcctgggagaggggctggcctagttccagcctccagcg

SEQ ID NO: 900266 - DNA, 120 bp, Artificial Sequence
  ENSG00000236311_9 (sequence is synthesized)
cctggcgcctcagacaggcccatgtccccagtcctcctccagcctagccccagctagggtcaggaggtgacagggagagttttcctctaggcccttctaagtcaggatccactcccaccc

SEQ ID NO: 900267 - DNA, 120 bp, Artificial Sequence
  ENSG00000236311_10 (sequence is synthesized)
caacacacacccagcatggcacccctccaattgctccatccctggggaaggcggggggcatgggcaagtcagcactctctcctttcccaagaggccatggggcctggggagggggcagag

SEQ ID NO: 900268 - DNA, 120 bp, Artificial Sequence
  ENSG00000236311_11 (sequence is synthesized)
cctactccctggggttacttgagggcagagcactggggagcctccccgagtggggcccccactcttccctttgccccggatgagtgttctctgacaccaggttccccgccccaccctcta

SEQ ID NO: 900269 - DNA, 120 bp, Artificial Sequence
  ENSG00000236311_12 (sequence is synthesized)
aacaaacagaagcatcaccctccccacccttctcaaacccagaaggatctggtgcccaggtcacctcagctggagaaatccagaatccgcctacggagaacactgaggaaccttggtgga

SEQ ID NO: 900270 - DNA, 120 bp, Artificial Sequence
  ENSG00000236311_13 (sequence is synthesized)
ggcaggggtcagaggggacagtgacatttgagggccttgggggaaagttagcctatgctgagctgaggctctggctaggggcccagtattggctttgctatttcctggctgtgagagctt

SEQ ID NO: 900271 - DNA, 120 bp, Artificial Sequence
  ENSG00000236311_14 (sequence is synthesized)
gagtgagtcttccaacctctttgaacttcaggttttcatctgtaaaatggggctgatcacagaatttgcttcatagggctctttgcgaacattaaagtagtaatgtatagaaaaccttta

SEQ ID NO: 900272 - DNA, 120 bp, Artificial Sequence
  ENSG00000266805_0 (sequence is synthesized)
ttcagcggccaggctggcagaaaattacattcttggagcaatggtgtgtgcccagagtgctttttcctcttggcttcttgactcagttttatttgggtatgacaagtgacccaattcata

SEQ ID NO: 900273 - DNA, 120 bp, Artificial Sequence
  ENSG00000266805_1 (sequence is synthesized)
tgatcaattttcatactatattttcctttgtaaactgtttgttcaactctgcccatttttttatgggttttttatctttttattattctaaataaaatcctttgtcagatacacacacac

SEQ ID NO: 900274 - DNA, 120 bp, Artificial Sequence
  ENSG00000266805_2 (sequence is synthesized)
cacacacacacacacacacacaaatgtagtcttcaagtctttggcttgactgttcattttctctttttttctttctctttccctacaagacaaggcttcccgctgtcacccaggctgaag

SEQ ID NO: 900275 - DNA, 78 bp, Artificial Sequence
  ENSG00000266805_3 (sequence is synthesized)
catgagtgactgtggttggcctgtttattttcttaatagtgtcttttgatgagcagaagtccaatttgtcagttttta

SEQ ID NO: 900276 - DNA, 120 bp, Artificial Sequence
  ENSG00000266805_4 (sequence is synthesized)
gtgtcttttgatgagcagaagtccaatttgtcagtttttaattttatagttagtgctttctggtaatgtctgggaagtttttaccctctcaaagccctcaaaaatatgtttttagaagtt

SEQ ID NO: 900277 - DNA, 120 bp, Artificial Sequence
  ENSG00000266805_5 (sequence is synthesized)
gtatagtttttagctattaagttttaggtctgtaatttatgatgaattatattttgtacatgatatgacatggagagtggagcttcaatttttttcatatgcttatctagcactatttgt

SEQ ID NO: 900278 - DNA, 120 bp, Artificial Sequence
  ENSG00000266805_6 (sequence is synthesized)
tgaaaaagattgtcccctcattgtattcctctggaacctttgttgaaaatcaattaactatacacgtgtgcatttctttttggaatttctatttgttcctccaatctattatctgttctt

SEQ ID NO: 900279 - DNA, 120 bp, Artificial Sequence
  ENSG00000266805_7 (sequence is synthesized)
actgcaacaccttactgtcctgattactgtagctgtttttcttctgtttttgtctatgcttgttggtgtttctgggtttcccagcttctatcattccaagtctatggtgtgagatagaag

SEQ ID NO: 900280 - DNA, 120 bp, Artificial Sequence
  ENSG00000266805_8 (sequence is synthesized)
aaaactctgagaactcaccaccatattcctcctatcctgaggtactgaaccggtctgcctccttctgtctacctttcagagtctttttttgtttcttcttcttcttcttctttttttctt

SEQ ID NO: 900281 - DNA, 120 bp, Artificial Sequence
  ENSG00000266805_9 (sequence is synthesized)
ttcaatctgatctgggaattttagttgtacgtaccaggaagaatagggataaataatctttactcaaattttcaataatttacaccaggtatcctcttgcctcagaaataagaatttctg

SEQ ID NO: 900282 - DNA, 120 bp, Artificial Sequence
  ENSG00000266805_10 (sequence is synthesized)
atttttgttgtttgttttcttgcctttgaatatttatacttaaattttattatggaccatttgaaacctctctcttctgcccttttcttcagtgaagtttaggcttgctatagctcccca

SEQ ID NO: 900283 - DNA, 120 bp, Artificial Sequence
  ENSG00000266805_11 (sequence is synthesized)
gtggtcaaacaatgtgtcctaatgcaaacatgttgttcttcctttcttactaaaccgtcatgcactcagactctcactccttcatgtctgcctttagtggctccacttatcttcagctct

SEQ ID NO: 900284 - DNA, 120 bp, Artificial Sequence
  ENSG00000266805_12 (sequence is synthesized)
agatgaattaacttgtcttagtctgtttagacttctataacaaaataccataacatgggtagcttataaacaacagaaatttattgcttttcattgcagactggaatgtccaagatcaag

SEQ ID NO: 900285 - DNA, 120 bp, Artificial Sequence
  ENSG00000266805_13 (sequence is synthesized)
atgctgacagatttagtgtctgctgagggcccactttctggttcatagacctggccttcttgctgtgttctcatgtggtgggtggaggtggtgaattcataagaggaggagggagtgtcc

SEQ ID NO: 900286 - DNA, 120 bp, Artificial Sequence
  ENSG00000266805_14 (sequence is synthesized)
agaggacactaatcccattaatgagaactccaccctcacgacctagtcacctcccaaaggccccccctcctaataccatcaccttggggattaagtttcaatatatgaattttgagggga

SEQ ID NO: 900287 - DNA, 120 bp, Artificial Sequence
  ENSG00000266805_15 (sequence is synthesized)
cacattcagtccatagcacaagtcaataaatatttctttagagtagcttttgtcagataatctattaaatactttatgaacaaaactgtctaattgtctttatcagtctagtatggaaac

SEQ ID NO: 900288 - DNA, 120 bp, Artificial Sequence
  ENSG00000266805_16 (sequence is synthesized)
aaaaataattgtgtaccaggagaacatggaaatgtagtatagtataacttacaaatgttgtaggggtgaatgatcaaaagccacctggcattttgctgctggtattcctgcccttactcc

SEQ ID NO: 900289 - DNA, 120 bp, Artificial Sequence
  ENSG00000266805_17 (sequence is synthesized)
tctcttagccccagttttgtcactttctggctttggaattggtaatgactcccacaccaggtctgaactcaacatgacatttagtgtctgagcccaccttatcttttaatgtcttttcca

SEQ ID NO: 900290 - DNA, 120 bp, Artificial Sequence
  ENSG00000266805_18 (sequence is synthesized)
ttacttcttagcaagaactgcccaggtcaggctggtcttcaccccattctcataataagtcccaaatgttcctgtgtgtctttaaccacactgttcctcctggcataaatgtatttattc

SEQ ID NO: 900291 - DNA, 120 bp, Artificial Sequence
  ENSG00000266805_19 (sequence is synthesized)
cctttctttgtgtgtatacgtgaagggtggttcagtgaaaaaaaagtgttttgagtcaaacagatcccagttttatctcttacttgctatgtgatttagggaaagttatttaagctctct

SEQ ID NO: 900292 - DNA, 120 bp, Artificial Sequence
  ENSG00000266805_20 (sequence is synthesized)
gagccttactttctctgtttataaacatggaaaaatactgcttttctcacagggttagctaaattaatgtatgtgaacgttccagaagccacaggaactcaaataaattgttgattccct

SEQ ID NO: 900293 - DNA, 120 bp, Artificial Sequence
  ENSG00000266805_21 (sequence is synthesized)
ttatttcctgaattagaacttaaggcttagggcaagattcatttcttctaatatttgtctcatcagcagtaaatatgttgagaacagaaaagataccaattagtttattaaataaacatt

SEQ ID NO: 900294 - DNA, 120 bp, Artificial Sequence
  ENSG00000266805_22 (sequence is synthesized)
tgactacttactgtgtgccataggtagtgttaaattttggagctcaccattagcaaggtgaacacatgcatatgtaattgaaatacagtatggtaagtgctgtgaagaggtatgttcagg

SEQ ID NO: 900295 - DNA, 120 bp, Artificial Sequence
  ENSG00000266805_23 (sequence is synthesized)
atgttctaggacacagaaaaggagtatttgtggcttatactggatggggtgggtcaccagggaggattcttggagaagtgttgctagtgcttgatttttttaaacagctttattgaggta

SEQ ID NO: 900296 - DNA, 120 bp, Artificial Sequence
  ENSG00000266805_24 (sequence is synthesized)
gaactcatataagatccactcactcgaagtgtataatttaatgatttttagccagtttatgggtttctgcaaccatcaccataatccaaatttagaatgtttccatcatctacaaaatca

SEQ ID NO: 900297 - DNA, 120 bp, Artificial Sequence
  ENSG00000266805_25 (sequence is synthesized)
tgcccaattgtaggcctagtgttaaaggatgagtatgaattagccacgcaaaaatattgagaggaaggctggattcctgggagagaatgagcaaagacagagaagcatacaataacatgg

SEQ ID NO: 900298 - DNA, 120 bp, Artificial Sequence
  ENSG00000266805_26 (sequence is synthesized)
tatccgtgtgggtgatatgtctataagcaattttttttttctggagtgtaaacctgtgcgcctgccccacaagttgtgttttagcttccatggacttgagctcagtttcctcatctctaa

SEQ ID NO: 900299 - DNA, 120 bp, Artificial Sequence
  ENSG00000266805_27 (sequence is synthesized)
tgtatagttcctgttaccttgttgaactctaggtccttttaaactctcaactcttagattgtcaaaacttcaattaataggaaaagggaatgcactttaaaaaactatagccaaggccgg

SEQ ID NO: 900300 - DNA, 120 bp, Artificial Sequence
  ENSG00000229867_0 (sequence is synthesized)
tagaacagcctgggctttgtctttgttcctctcagaacaagattcccctctgggatcattttctttctatctgaagtatatttttagaagttcttcagaaaagaactgttggaggatgtg

SEQ ID NO: 900301 - DNA, 120 bp, Artificial Sequence
  ENSG00000229867_1 (sequence is synthesized)
ggtgctgccccattggaacagaatctgcagttggcacctgattgttccctcagactggaatgcactccctgctccctgagcctgacagcatgaggtgggcccaggtcaaagccctcctcc

SEQ ID NO: 900302 - DNA, 120 bp, Artificial Sequence
  ENSG00000229867_2 (sequence is synthesized)
aagtcttttccagccagcttgcttgctccgttccctccaggccctgcatccaacactctccactgttcctcctggtccatacctgggagtcccatgatgcagcctgcatttaaggtgctg

SEQ ID NO: 900303 - DNA, 120 bp, Artificial Sequence
  ENSG00000229867_3 (sequence is synthesized)
tagtcaggtatggctgggcacctttaaactgtcctacagagcctggcacctgggctcgactcactggtggaagttctcacacatggagtctggcattctttcgccaagaaaatgcattaa

SEQ ID NO: 900304 - DNA, 120 bp, Artificial Sequence
  ENSG00000229867_4 (sequence is synthesized)
aaaccaaggtggcattaaaaaccaccttgtcttggtaagagctcctcgtggcaagaaacgtatgcagctctagctgttccgtggagccattatctagccccagaaaaacctgctgttgac

SEQ ID NO: 900305 - DNA, 120 bp, Artificial Sequence
  ENSG00000229867_5 (sequence is synthesized)
ttttctgagaaatcagttcttggaagcccttagaataaatacgataaaatttgagacatgcctgccttcctcagggccgggtacataagtgtgttactttcctccttctgagtccaattc

SEQ ID NO: 900306 - DNA, 120 bp, Artificial Sequence
  ENSG00000229867_6 (sequence is synthesized)
taaaagccaagtctctctccttcttggctccaaatagcaaaaagccatcaaccttttcctccttgccctctaggaaaccctgttaccatagcagaaagaacatgggtttcagatccatag

SEQ ID NO: 900307 - DNA, 120 bp, Artificial Sequence
  ENSG00000229867_7 (sequence is synthesized)
gaactgggttcaaatcccaacttaccagctatggaattttcagtaagatcattaatgtctttgagccacaatttcctgttctgtaaaatggaattttgcagtgatgcaggattagttatg

SEQ ID NO: 900308 - DNA, 120 bp, Artificial Sequence
  ENSG00000229867_8 (sequence is synthesized)
ataacatatcaaaaagagcatgctggcagcactcgatgaaaattagccatttatatttattgttacgatgggtattattcccccagaacctacctgcctgttaccatcccttgggccagc

SEQ ID NO: 900309 - DNA, 120 bp, Artificial Sequence
  ENSG00000229867_9 (sequence is synthesized)
ctgcagggtccaggcagagatgacattgaaggccttgaccactgtgcaagtggggaagagggaggccaggtactcagcattggactcacgatgctgaaggtgctcttgctctgtagggtt

SEQ ID NO: 900310 - DNA, 120 bp, Artificial Sequence
  ENSG00000229867_10 (sequence is synthesized)
ggaacacagccacaaagatgacctccggggagctcactgcctcctcttggaaagtcacttgggccgctgagggaaacagcctggctgtgcgtttggggttgcggctccccaccaccactt

SEQ ID NO: 900311 - DNA, 120 bp, Artificial Sequence
  ENSG00000229867_11 (sequence is synthesized)
tgaagccagagcccaccaggcgtgtggccagggagcgggcaaagtccccgctacccaggatgcccactttgggggcctcatcggggaccttggcaaggctactatcgctgtccaccaggt

SEQ ID NO: 900312 - DNA, 120 bp, Artificial Sequence
  ENSG00000229867_12 (sequence is synthesized)
ggaggctgatcagtggcttgtccatctcttctggcattttggtggctgcaagagaagtcaggaacctggtcagtggagggctcctggactgccccttctgccacctccctcctcttatac

SEQ ID NO: 900313 - DNA, 120 bp, Artificial Sequence
  ENSG00000229867_13 (sequence is synthesized)
atcgtaactacacggcagtcagacattcacccagcaggtgttcaccgagtgctaccacgtgtcagcaccaggggaacaagctgaacacaacacagccccttccctggggagagcacagac

SEQ ID NO: 900314 - DNA, 120 bp, Artificial Sequence
  ENSG00000229867_14 (sequence is synthesized)
tcaggaagagcagggatgacttctgccctccaccctttgtccctcctgctgaatgatttcctcgggaaaaactggcagagtgagagtgctgggaaagggaactctggaatttccatgacc

SEQ ID NO: 900315 - DNA, 120 bp, Artificial Sequence
  ENSG00000229867_15 (sequence is synthesized)
aatgtgatgcagtgccatacttcttttcaaaaggattaggcaatggacagtgtcactagccaggagtgaccatctaaccccaacctcaccatcgctgggtgtttgatgaccaggaagggt

SEQ ID NO: 900316 - DNA, 120 bp, Artificial Sequence
  ENSG00000229867_16 (sequence is synthesized)
gagcatgtccctatgcttgtctacattttgcatcttggagcagttcttcttatgctctccctgaagcatggtgaacagcttgagggcaggacctcatctcatctgaccttggacctcact

SEQ ID NO: 900317 - DNA, 120 bp, Artificial Sequence
  ENSG00000229867_17 (sequence is synthesized)
gtgtatcatagcctggcacggaggcagtgctcagtgtttgctgaatgaatgaatgaatgaacaccaaaccttgatctctgagggcaggactgagagacaagtgaatgggcccctaagata

SEQ ID NO: 900318 - DNA, 120 bp, Artificial Sequence
  ENSG00000229867_18 (sequence is synthesized)
gagtgggtgccctgtgatcttctttgctgagcccaagatatgagtggatgtggaggaaaccctgaactcgggccatcggtctacagtaaacttggatggaaaaattattatatattaatt

SEQ ID NO: 900319 - DNA, 120 bp, Artificial Sequence
  ENSG00000229867_19 (sequence is synthesized)
gtcaccaacttctaactaaaatttgctatttcctttaagtatgaaggtaggcaacataatttttcattaatactgaccaagatcatatcataaatttacctgtaaataatttatcctaat

SEQ ID NO: 900320 - DNA, 81 bp, Artificial Sequence
  ENSG00000229867_20 (sequence is synthesized)
gatcatatcataaatttacctgtaaataatttatcctaataccatttaaattgagcacaaatttaaaaccatgctcaggag

SEQ ID NO: 900321 - DNA, 120 bp, Artificial Sequence
  ENSG00000229867_21 (sequence is synthesized)
agacccaaaccccagagtcatccctgatcacccacaaaaccctggggccattccagcggcaattccatgcactccagcttcacatgtgccttcaggatctccttgctcctccactgctcc

SEQ ID NO: 900322 - DNA, 120 bp, Artificial Sequence
  ENSG00000229867_22 (sequence is synthesized)
cactgcctccagcctccactgcctcaaatctgggcatatgcacggcttcctcgctggccccagcagctagctgcctttgacctcctacagtctgttctcagccaaaaaccagagagaacc

SEQ ID NO: 900323 - DNA, 120 bp, Artificial Sequence
  ENSG00000229867_23 (sequence is synthesized)
acttaaaatgtcaggccgatcaacacctaaattcaaaccttcaccagctccctatttcactcggagcctaaggctgaagctcttcctctcaggcctcgcctgccaccccctccttgttca

SEQ ID NO: 900324 - DNA, 120 bp, Artificial Sequence
  ENSG00000229867_24 (sequence is synthesized)
gctttagccacatgggcctcctggctgctcctccaacgtaccaggcacacttctgcccaaggactatgccccgtggcctgcaacatcaccccagcaggccaccggcccctctcccctcct

SEQ ID NO: 900325 - DNA, 120 bp, Artificial Sequence
  ENSG00000229867_25 (sequence is synthesized)
tccagctctgctcacatagcactcactctgcaagtcctcctggaccatcttcaaacctgcacccccaccgcccacgcttgctttcctttgcgccttagcactcctgatcctctcaacgcc

SEQ ID NO: 900326 - DNA, 120 bp, Artificial Sequence
  ENSG00000229862_0 (sequence is synthesized)
ctgcttcctagggagggaggctggggcggcaaggcgggcgcgggtggtccttgccccgcgccagctcgccaggccacgtcgctggcgtttttccagcgctgggtcacctgcgggccggcg

SEQ ID NO: 900327 - DNA, 120 bp, Artificial Sequence
  ENSG00000229862_1 (sequence is synthesized)
ggttcccgcggcgaacagctgggtggtatggatacgccgctcgagcctccgcagcgtcaggtcgccagggtccgccctgccactcgccccaccttgagctacctctgaagaaaagatgat

SEQ ID NO: 900328 - DNA, 120 bp, Artificial Sequence
  ENSG00000229862_2 (sequence is synthesized)
acgtataagcctttaagcttagtaaacctttgggttctgtgcatttggccatcattccagttgtcagcattgtgcaggacaggtacttgaggtctgtttttgtgaaccagggacccgagg

SEQ ID NO: 900329 - DNA, 120 bp, Artificial Sequence
  ENSG00000229862_3 (sequence is synthesized)
cacagagcaagtaagtggatagaaacaaatgctgtaagaacaaataattgtatttaaaaatttatgattttcatttatttttcagaggaagcattaatgagtaggtagtaatttctgggt

SEQ ID NO: 900330 - DNA, 89 bp, Artificial Sequence
  ENSG00000229862_4 (sequence is synthesized)
ttttcttccgccttctgactgcggaaggaagggcctgggaggaagcagaaaacctcacgtggctcgggctacctctgaagaaaagatga

SEQ ID NO: 900331 - DNA, 120 bp, Artificial Sequence
  ENSG00000229862_5 (sequence is synthesized)
gaggccgagtcaggcggatcacctgagcagtgtaaagaaagtctgaagaatactccaggaaaattgaggaaactaaagctatttctactactggtctcataattgcaaagccagtgccta

SEQ ID NO: 900332 - DNA, 120 bp, Artificial Sequence
  ENSG00000224893_0 (sequence is synthesized)
attacaggcgtgagccaccgcgcccggtggaaaggacacttttttacagtatgagcactgaaacaaaaaggcaaagcaaggtctgttcaccttcagctgagaacgtgaggattggttcag

SEQ ID NO: 900333 - DNA, 120 bp, Artificial Sequence
  ENSG00000224893_1 (sequence is synthesized)
ggattggttcaggagtacatgcgcaggtttgtcatataagcaaattatgtggcacagaagtttggtgtatggattatttcatcacccaggccgtttctcagcgttggatgtgcaagcagt

SEQ ID NO: 900334 - DNA, 120 bp, Artificial Sequence
  ENSG00000224893_2 (sequence is synthesized)
tttgagagatgaagtcatgacttcaagacaaaaaaacaggtttgcttattttgctacaaaccaataagttcttcagccatgctgcaaatccactgtgtatccagttcccatctgcggccc

SEQ ID NO: 900335 - DNA, 120 bp, Artificial Sequence
  ENSG00000224893_3 (sequence is synthesized)
gcacatcatccccatgggacttgagagcaagaggatcccacgcaaatcatgttgcttgctatgctcctgctgcctggaatgcatatgtgatggctggaatgctagctctaattttggatc

SEQ ID NO: 900336 - DNA, 120 bp, Artificial Sequence
  ENSG00000224893_4 (sequence is synthesized)
atgaggaaaagtgccacaccattggagatgagggatgagctggaaggggtcctgtggcaggggatcatgtcctgggacataccaagagagcagcttctagaggactgattatcagagagg

SEQ ID NO: 900337 - DNA, 120 bp, Artificial Sequence
  ENSG00000224893_5 (sequence is synthesized)
aactggaatgtgaaaagacgtctaactaaccattattaatgattcacttgtaattttcactaatggatgacccacatgatttcctcttcaaagaatttgtccaaagccacccatttaaaa

SEQ ID NO: 900338 - DNA, 120 bp, Artificial Sequence
  ENSG00000224893_6 (sequence is synthesized)
aagaaaagaatggaggatggaatctcataagtgatcttaccatttacaaagcacagtgtgattaatcaattctcctttatattttagtgcctaccgtgtttcttaatttgatggagaagc

SEQ ID NO: 900339 - DNA, 120 bp, Artificial Sequence
  ENSG00000224893_7 (sequence is synthesized)
cttcttataaacactcttagaaaagctatatgtaattaactttcttctttgagcaaagggacttgtttctctgagatgtctataaaagataaagagttgatgtgggccacactcctgcct

SEQ ID NO: 900340 - DNA, 120 bp, Artificial Sequence
  ENSG00000224893_8 (sequence is synthesized)
ctgctttctcttagaggtctaagggtaattagtggacaaaagcagtcaattaagcaggtatcttcccagacaccatgtccactcttgatgactgttgaaaaccttagataaccccatcag

SEQ ID NO: 900341 - DNA, 120 bp, Artificial Sequence
  ENSG00000224893_9 (sequence is synthesized)
gaactgaggtaaggccatgaattgcctttagtttgagcatgggtgaatttaatctccttaacctagttagggattggaatctggctcaccttcaggttttatgaataaagttttattgga

SEQ ID NO: 900342 - DNA, 120 bp, Artificial Sequence
  ENSG00000224893_10 (sequence is synthesized)
acacagtcactcctattcgttttacatctaactgtggctgcttttgtgctaccatagcagagttaagtcactctaacagaaaatagatggctcacaaagccaaacatattttactccata

SEQ ID NO: 900343 - DNA, 120 bp, Artificial Sequence
  ENSG00000224893_11 (sequence is synthesized)
gccctttaaaatctgctaacctttgatatggtgacagcatgaaatttctttaagcacttgcccagtattatagattttttatgagcgaatgtgaatattaatgtaatgtaactcaggaaa

SEQ ID NO: 900344 - DNA, 120 bp, Artificial Sequence
  ENSG00000224893_12 (sequence is synthesized)
gaaatatgtcttgaacccacatttatataaaatcaattttgatagcaagcttattacttcacaaagaaaaaaagtctatccatgttttttctgctcaaaaaaaatgttggcagagaatgc

SEQ ID NO: 900345 - DNA, 120 bp, Artificial Sequence
  ENSG00000224893_13 (sequence is synthesized)
tattagagtcatataggtaaaacaaacttacaggtaaaacaagctaaatttaacttttgctctatgaagtttgccatgtttcaaggaatatagttagacccagaatgccttgatattttc

SEQ ID NO: 900346 - DNA, 120 bp, Artificial Sequence
  ENSG00000224893_14 (sequence is synthesized)
atagtaatgggccatgctctaatttggtgctatttccctatacttaattgaggagctaacagtcaattgtgagactaaaccttcaattaataaaagcagcatgggtcgatcctcaaaagg

SEQ ID NO: 900347 - DNA, 120 bp, Artificial Sequence
  ENSG00000224893_15 (sequence is synthesized)
aaagcccatttttcttgtcagtgtgagtcagcctcctctgtttttttatcttgatacaaaggtagaaataaccccaagtaagccaggaacactattcagatctcaaaacgtttgcttatt

SEQ ID NO: 900348 - DNA, 120 bp, Artificial Sequence
  ENSG00000224893_16 (sequence is synthesized)
gtgagtgctctcttttacaagatcaaaaaaatttcatgaatcattctaagctgtttactgggttggggtccactgttgtagaagtgtctgtcttggatgaggtctcatgatgagaaacta

SEQ ID NO: 900349 - DNA, 120 bp, Artificial Sequence
  ENSG00000224893_17 (sequence is synthesized)
tttaaccctaagatgtttcttactaagtgactcttagctacttatataatcagagacagccataagaatacagaaggaatgcacgaatatacccaccactgggaagttgtcatcagcttt

SEQ ID NO: 900350 - DNA, 120 bp, Artificial Sequence
  ENSG00000224893_18 (sequence is synthesized)
ctctcagatgagaaagggtctaaagaaactattatgacataatgaatgtgctgttctctgtgctctgaaagtgtatggggaggctaaacaattatctttgaggtttgttagtacctatga

SEQ ID NO: 900351 - DNA, 120 bp, Artificial Sequence
  ENSG00000224893_19 (sequence is synthesized)
attattcatcaatcttagagtttctaaaattattctcacagaattatcatctagtgggcaaagaggtcatcttgtctgatcacacccaaacagaattatccttaatactcatcacttaaa

SEQ ID NO: 900352 - DNA, 120 bp, Artificial Sequence
  ENSG00000224893_20 (sequence is synthesized)
caaaaacaattggaataaaaagacagaacactacactgtttatgtattgtgtccaatatttacacaccatagagagatatagattttacagaatctaaatatacaaaatacctaatggtt

SEQ ID NO: 900353 - DNA, 120 bp, Artificial Sequence
  ENSG00000224893_21 (sequence is synthesized)
taatttgattaaataacagtagtgaatatgcacacgaagtgagttccatgtgttaccaaattgcaattgactatgctttacatgttttaaaaatcatcacttttgatgaaacttgctctt

SEQ ID NO: 900354 - DNA, 120 bp, Artificial Sequence
  ENSG00000224893_22 (sequence is synthesized)
agattcagactagatgtctgtatagtcatcatttttaacactggcagcatagtaaagtcaactggggaactcttaaaagaaatgtatgtctagggccacaccaccgaagacaccgatttc

SEQ ID NO: 900355 - DNA, 120 bp, Artificial Sequence
  ENSG00000224893_23 (sequence is synthesized)
ctggcaattggtttgggagaaggcccagacatctgtatttttaaagttctgcggggtagtctaatgtcagccaaggttgaaaatcactgcttcacgtagtatagctagataagtgagata

SEQ ID NO: 900356 - DNA, 120 bp, Artificial Sequence
  ENSG00000224893_24 (sequence is synthesized)
gagaggtctccatgtgcagcttctattttgaaagtcagtcatgattcctcattttagcaagttctctttttctttacctcctctttccattcagaattgagttcaaatatttctttacag

SEQ ID NO: 900357 - DNA, 120 bp, Artificial Sequence
  ENSG00000224893_25 (sequence is synthesized)
ccatttgttttctaaggcgggtatagttgtcagtgaagactgcatctgagtgacgtttgactggtacagggtcttctgagatgttactgctaaggaacatgaggaaaaggaaatcaaaga

SEQ ID NO: 900358 - DNA, 120 bp, Artificial Sequence
  ENSG00000224893_26 (sequence is synthesized)
gttttcacaagaaatgataaatacacacatgttccaggtttcttggagccacataaaaagcaattcccacccaactaattttctatcataaaaagactaaaagaaaaatacaactaaacc

SEQ ID NO: 900359 - DNA, 120 bp, Artificial Sequence
  ENSG00000224893_27 (sequence is synthesized)
taaggatgaaggaaagcaaggaatcatctgccatattttggcatggcctgggactgttttatgacacattctgtacagctgagcaaataattcatccaaaaataaaaatttgggaatagc

SEQ ID NO: 900360 - DNA, 120 bp, Artificial Sequence
  ENSG00000224893_28 (sequence is synthesized)
tgaagttgtgctctgccattgggagaaattttttttttttttaaaaaaaacataattacttctttagaagctatgctaccctgagcaacgtcatctaaatatttgactgttggccatttg

SEQ ID NO: 900361 - DNA, 120 bp, Artificial Sequence
  ENSG00000224893_29 (sequence is synthesized)
gaattctccatttaatttgagcaggaagtaaaaagaatattctgtttgaccttaaaatttacctcagtctgtactatctctttttgattgttttactgagtcttgttcaatttgattgca

SEQ ID NO: 900362 - DNA, 120 bp, Artificial Sequence
  ENSG00000224893_30 (sequence is synthesized)
gattgctaaatgattgctacttgagaaaaatgtgtgtctggagtcaatgaatatgatattatgaaaaagtcttagtccatgggcttgatagatgttattgaagaatacaagttatttcat

SEQ ID NO: 900363 - DNA, 120 bp, Artificial Sequence
  ENSG00000224893_31 (sequence is synthesized)
aagaatacaagttatttcatttaactaaattaaacattatcaacgagttttcaatttcaaacaaagtaaataacttgttaagagtgaaaatacaatattcagattgaataatgataacat

SEQ ID NO: 900364 - DNA, 120 bp, Artificial Sequence
  ENSG00000224893_32 (sequence is synthesized)
tctctttacctaacacgttttcccataagagactcaaggtactttttggcagaaagttgacccaagagtttactgaagtcactggtgaaaactccatcagcatgcctggcatttctaaaa

SEQ ID NO: 900365 - DNA, 120 bp, Artificial Sequence
  ENSG00000224893_33 (sequence is synthesized)
caaggaagaaaaaaatagctattattttgtaaatggctttctagaatattattatggcttattaaataacaaaaaaattatgggcttattatgaaagcttctcattaaaactaaagttca

SEQ ID NO: 900366 - DNA, 120 bp, Artificial Sequence
  ENSG00000224893_34 (sequence is synthesized)
aaaggagatttcttaacaccctaacaaaagagatcttctagtcacttatatcaagatataccctatatttctagcccaagacactgaaaaattaaagaaacaggcatttctaggagcaca

SEQ ID NO: 900367 - DNA, 120 bp, Artificial Sequence
  ENSG00000224893_35 (sequence is synthesized)
tttcaatattcctccatggttgaatctttataactatttctttctaagaaatattggtgtaaaaatatgatctatttaaattagctgctatttgtacatggtgctttgtgtctgccccac

SEQ ID NO: 900368 - DNA, 120 bp, Artificial Sequence
  ENSG00000224893_36 (sequence is synthesized)
ttgtctctgactcagaagtcttgtatcttctattagcatccatgaaaccgtggcaggctaactcgttaaaataacccaaaatcaaattccaagtctgaaagacactagaatggcatatgg

SEQ ID NO: 900369 - DNA, 120 bp, Artificial Sequence
  ENSG00000224893_37 (sequence is synthesized)
atgtttttacaaagtagattgctacagggttcgtatagcccttagctctttgtttataaatacctttcgtctctaaaaagatccagggctccctggagaactggctaattctcgggcatg

SEQ ID NO: 900370 - DNA, 120 bp, Artificial Sequence
  ENSG00000224893_38 (sequence is synthesized)
gaatgaaaaaatacaagatgaacctggagaagctttctgtgtcagaaagtaagaacgtgctcaaagaatgatgggaccatgtgaaaaggacataggagtctgtttgaaaggcatcccact

SEQ ID NO: 900371 - DNA, 120 bp, Artificial Sequence
  ENSG00000224893_39 (sequence is synthesized)
ggccaaatataggataactctgaggataaaaatgtcagtaaagaattataacccactgaaataaaaaatgataaatggataaatgaaggcattatttataggacaatgacagctaataca

SEQ ID NO: 900372 - DNA, 120 bp, Artificial Sequence
  ENSG00000224893_40 (sequence is synthesized)
ttttaaaagaaaaatgagatacaagatcaacatttggcaaacaccataataattatttctggcaagaaacatccatgaaagctaaaaactaatggatgcaaattgatgagaaagataata

SEQ ID NO: 900373 - DNA, 120 bp, Artificial Sequence
  ENSG00000224893_41 (sequence is synthesized)
tttatataacctcaaagcatctccttcataaaatacttattagtgacaaagtgaagatggtgactctacaatggaggaacctagcagacagcatcttaaccaagggatcaagatggaaca

SEQ ID NO: 900374 - DNA, 120 bp, Artificial Sequence
  ENSG00000224893_42 (sequence is synthesized)
attgtgtactataatgttcattctcatatcaggcgctaagtacacaacatcacttttgtgctactctgcacaaaacccataactgaaatctaactctgaggaaacatcagataaaaacaa

SEQ ID NO: 900375 - DNA, 120 bp, Artificial Sequence
  ENSG00000224893_43 (sequence is synthesized)
aatgaacaatattctttgcaataagtgatctgtgctcttcaaaatgtgaaggtcataaaagacagttccaggtcaaaagagaccaaaggtgcacaataactaaataaaaaaagaacctta

SEQ ID NO: 900376 - DNA, 120 bp, Artificial Sequence
  ENSG00000224893_44 (sequence is synthesized)
agaggatcccacgcaaatcatgttgcttgctatgctgtttggagatgcggactggcttccttgttcctcagcttgcagatggcctactgtgcgatttcacctggtgatcatcctgctgcc

SEQ ID NO: 900377 - DNA, 120 bp, Artificial Sequence
  ENSG00000224893_45 (sequence is synthesized)
tgtcatataagcaaattatgtggcacagaagtttggtgtatggattatttcatcacccagaaacacataaaacagtggtcttctcctctgatgtgattttactaagtattccttcactct

SEQ ID NO: 900378 - DNA, 120 bp, Artificial Sequence
  ENSG00000224893_46 (sequence is synthesized)
gagaagataaaatttgaagtaagaagatatggaataatttttcattattcatttcaaactttcaaatgtaattgtctttcaagtttcttacacttaacctgaggcactttttctgcattt

SEQ ID NO: 900379 - DNA, 120 bp, Artificial Sequence
  ENSG00000224893_47 (sequence is synthesized)
ttgtaattgattatgagactcgctacttgtatcttcctttctgatttgtttattctaggatacttttacaagaaaaattaatcttcagtgtttaaaaataaaatatctcaacatttgcaa

SEQ ID NO: 900380 - DNA, 120 bp, Artificial Sequence
  ENSG00000224893_48 (sequence is synthesized)
aagagagcagaaaatcagctatatgaaaccacggctaaagagataaatggcctcagtactcaaatttgtataccacgcttatctgcaactgcagatcacctgaacgatagtgaatcaact

SEQ ID NO: 900381 - DNA, 120 bp, Artificial Sequence
  ENSG00000224893_49 (sequence is synthesized)
gattgggaagaattcatctaatgtaaactatgtggtcaacgatctaagggattatttgtgaagaagaaaatctgggttccaatttatactctgttctagctgatggtagaacctaaggaa

SEQ ID NO: 900382 - DNA, 120 bp, Artificial Sequence
  ENSG00000224893_50 (sequence is synthesized)
tggtccatttcccctagtaaattctcttgtatcactatagatgctttccgaaaatgctgatcacaatttaaaattttacctcttaagtgtctatttgattagtggctgaatccctccttc

SEQ ID NO: 900383 - DNA, 120 bp, Artificial Sequence
  ENSG00000224893_51 (sequence is synthesized)
agactgaagtccatgagaacagaaactctgttattttttggtctgcattgtatacacggcattcaacacagtaccagccacaatgtgaatgctcacttaccaaatacatgattgaatgaa

SEQ ID NO: 900384 - DNA, 120 bp, Artificial Sequence
  ENSG00000224893_52 (sequence is synthesized)
tccaggagctcaaatgttggaaaggagccagaattgttattgccccctgtgaatcaagcaggatgtacacagtcaaaagaagctgctcactagaagtttatctatattaaataacttata

SEQ ID NO: 900385 - DNA, 120 bp, Artificial Sequence
  ENSG00000224893_53 (sequence is synthesized)
caaaaggggcagttgctctgttgtgccaggaagaagatggaggtaaccccatgccttcattccagttatccaaagctctcaaagctgtagaagagaacttcaaagttctgttttattatt

SEQ ID NO: 900386 - DNA, 82 bp, Artificial Sequence
  ENSG00000224893_54 (sequence is synthesized)
cattaggtgtttctcctaatgctatctctccccttgccccccactccctgacaggcctcggtgtgtgatgccacccccaccc

SEQ ID NO: 900387 - DNA, 62 bp, Artificial Sequence
  ENSG00000224893_55 (sequence is synthesized)
actcccacttatgagtgaggacatgtggtatttggttttctgtacatgaactcattcttttt

SEQ ID NO: 900388 - DNA, 78 bp, Artificial Sequence
  ENSG00000224893_56 (sequence is synthesized)
tcttaatttagtctatcattgatgggcatttgggttgactccaagtctttcctattgtgaacagtgctgcaataaaca

SEQ ID NO: 900389 - DNA, 120 bp, Artificial Sequence
  ENSG00000224893_57 (sequence is synthesized)
aaaagagtatcacaaaatgggaagggtaagcgtttggagcagcaatccacgaagggctctgggcatccctgtgcatcattgctgggtgtgccaggaatgcaacaccctcgccacttttta

SEQ ID NO: 900390 - DNA, 60 bp, Artificial Sequence
  ENSG00000224893_58 (sequence is synthesized)
cccagtaatggtattgctgggtcaaatattatttctggttcaaatattatttcgggcaat

SEQ ID NO: 900391 - DNA, 120 bp, Artificial Sequence
  ENSG00000224893_59 (sequence is synthesized)
tgtttttatgtgaagaaacatgagtttaggggagagggcaggagacaaggtccccacccaggagataagtagacaaagtaagataaaggcccatgaatgagcctaaggcataggtgggtt

SEQ ID NO: 900392 - DNA, 120 bp, Artificial Sequence
  ENSG00000224893_60 (sequence is synthesized)
atagggagatgtgtctgtgtctcactaagaatgttctaaagatcaccctaaggaagccatccacatcagcagcagggaaacatctaaggtgatgacaccactagcagcagaaaagaagag

SEQ ID NO: 900393 - DNA, 120 bp, Artificial Sequence
  ENSG00000224893_61 (sequence is synthesized)
ccaggtctgtaaaacctgaagattctttagtttcccttttcttctctctgccataccccaagaaaagctagacccagaagagaaagggaagaaggtgtgtaaataagagaagtccacata

SEQ ID NO: 900394 - DNA, 120 bp, Artificial Sequence
  ENSG00000224893_62 (sequence is synthesized)
cttttaccttccccctcagtcttctcaaagaccctgatgtgagaggagaagaggaagatcagacattggctcttcctcacataggttccttcttgataggaaaagaagacagcgttagat

SEQ ID NO: 900395 - DNA, 120 bp, Artificial Sequence
  ENSG00000224893_63 (sequence is synthesized)
aaaatttgggatcacagcttcaaagatgccattatgtgatgggaaagaaatactagacagagtcttgttaagggcagtgattggagaaaaataaaaatgttcagttttgaccccattgag

SEQ ID NO: 900396 - DNA, 120 bp, Artificial Sequence
  ENSG00000224893_64 (sequence is synthesized)
ttatctactctgtaagccaggtgcacttacgtgagacgagatttaacacaatgtgaattttgctttttttcctcccttaaggctttcatactgcacttagcactttattaggattttagt

SEQ ID NO: 900397 - DNA, 120 bp, Artificial Sequence
  ENSG00000224893_65 (sequence is synthesized)
ttatggtatacacactaaatattaaatttatcgagacttggttgggcagatgccctataattcacacagtgccaggtaacatagacactgtaacaaaggcatatacgctgggcgcagtgg

SEQ ID NO: 900398 - DNA, 120 bp, Artificial Sequence
  ENSG00000224893_66 (sequence is synthesized)
cgacagagcgagacttcgtctcaaaaaaacacaaataaacaaaggcatatacgataaggcttcctttccaagcatttacaattggccgggggtaatatacaagcacttaagttatctaaa

SEQ ID NO: 900399 - DNA, 120 bp, Artificial Sequence
  ENSG00000224893_67 (sequence is synthesized)
aagttatctaaaaagacagaagtcaattaacaatataaattctgccaagatttatatgaaacattttaaagaaaatattgcatttgtgcaatgttagaaaaaattaaataccatatgtta

SEQ ID NO: 900400 - DNA, 120 bp, Artificial Sequence
  ENSG00000224893_68 (sequence is synthesized)
aaccttctcatattttcttcagccagctcctcctatatgttttctttaagtcgatattttatgtgttaggtccggtcattcgcttctaattgttgccattaattttacatgtgagagtgc

SEQ ID NO: 900401 - DNA, 120 bp, Artificial Sequence
  ENSG00000224893_69 (sequence is synthesized)
acagatgaaaagaatgagtgtttgacagcgtctacaaatggaaaatgtctttgtcaagagccaaactgaaaaggccaaagccctctagtttgctgtttctagcatctgaagtccagacac

SEQ ID NO: 900402 - DNA, 120 bp, Artificial Sequence
  ENSG00000224893_70 (sequence is synthesized)
aaacgactctgaccagtgcttgctgatgtgacatctgttttcatctgcgtttgctctgggagatgccctgttagccctttcctggactgccttgattctgataccttgcctggacaatct

SEQ ID NO: 900403 - DNA, 120 bp, Artificial Sequence
  ENSG00000229869_0 (sequence is synthesized)
gtttccgtgaggatggtgacgactccgaactatagcagcatactctacctacccctgatcagtttatggaagaaaaggaaaccaaacaaaatctagatttattacaagaagtccatgatg

SEQ ID NO: 900404 - DNA, 120 bp, Artificial Sequence
  ENSG00000229869_1 (sequence is synthesized)
cctctgtcctggaagtcggttctctttccaatggaacagcctctgcaaagtgtaccacacgatgagttaatatatctcacttttagaaagaaagatactgatatgccactgatgtggttt

SEQ ID NO: 900405 - DNA, 120 bp, Artificial Sequence
  ENSG00000229869_2 (sequence is synthesized)
ggatgtgcgtccctccacccccacccacagtcccatgctagaagtgtcactcatattcagctttgaatcagtggggaacccatacaggaagatcataataaatatggaaaattctgataa

SEQ ID NO: 900406 - DNA, 120 bp, Artificial Sequence
  ENSG00000260862_0 (sequence is synthesized)
gcccatccctggattgatgtagtagccagcagcaaggacatatgaagggtctggaagtggaaggctgccacccctgccctgctcccacttctgggcccccagggatcccctgacataaac

SEQ ID NO: 900407 - DNA, 120 bp, Artificial Sequence
  ENSG00000260862_1 (sequence is synthesized)
agtcctgcaggaggaaataataggtggacttgtccctgtgacacagtggagataataaggcccacccaggttcaagaaaagtggggcagcaggggaaggggatggactttacctcctagt

SEQ ID NO: 900408 - DNA, 120 bp, Artificial Sequence
  ENSG00000260862_2 (sequence is synthesized)
gagaagatgataaggtctggaagaggaggtatggcaaaaaatattgctgtggccgttactagaatatataatctgacgcagttacctaaagtgaaaagcgtgaaataaaggctgaagaga

SEQ ID NO: 900409 - DNA, 120 bp, Artificial Sequence
  ENSG00000260862_3 (sequence is synthesized)
tagggaaaaaaagtacatttaaaaaaaaagttgtttcatgaatttgaaaacaaaatgaaataaaaagcctattctaaaattcaaaagtcagagaaacaattgaacctaagtgtgtactca

SEQ ID NO: 900410 - DNA, 120 bp, Artificial Sequence
  ENSG00000260862_4 (sequence is synthesized)
agatgctggcataaccacttgataggaactacccctagttattttaaaacgcagttatttgactctgtccattaaagacaattgaaaaccaaaaaccaaaacaactgcaaagggaaatct

SEQ ID NO: 900411 - DNA, 120 bp, Artificial Sequence
  ENSG00000260862_5 (sequence is synthesized)
ctgcaaagggaaatcttaaagtattttcaataatactgcttttggaggtagtgttggtatatttattgttatataaaatatagtataatattgtgtgtattgaaagataaatgtatatgt

SEQ ID NO: 900412 - DNA, 120 bp, Artificial Sequence
  ENSG00000260862_6 (sequence is synthesized)
aatattgaagtatgggaggaagaagatgcagatataagaccagcgagattaatttaaaatgctagagaattggaagtgggattatacatatgaatttattaggtgttttatcttagaaat

SEQ ID NO: 900413 - DNA, 120 bp, Artificial Sequence
  ENSG00000260862_7 (sequence is synthesized)
tcatgtattctctttctactaaaaagccctagaaacagtgaccaacccaatagcaataaacttccttagcaaatagattatggtcactagtgatcattttctagcaaaagaaaccaagct

SEQ ID NO: 900414 - DNA, 120 bp, Artificial Sequence
  ENSG00000260862_8 (sequence is synthesized)
gtcttgagaaaatgattgagtttatatttgaggcaggaaataaacaagaagaatctgtaaaatcttgtcataccaagaagcagagaggctatgagatgtcattagggtcatgtcatttaa

SEQ ID NO: 900415 - DNA, 120 bp, Artificial Sequence
  ENSG00000260862_9 (sequence is synthesized)
agaagccagtatgagtagctcaaagatgagataatttgagcctcaaaacaaaataagtgatttcaatggatttaaatacactaaatctgtttaaatacataagttcataatgatagggga

SEQ ID NO: 900416 - DNA, 120 bp, Artificial Sequence
  ENSG00000260862_10 (sequence is synthesized)
aaacaaaattatttataggttaccttacaaagatgatagaaaccatctcattattttagaaacggaaaggaaaaaaaaacataaacaactatcctgcctttgttttcagaattccttgta

SEQ ID NO: 900417 - DNA, 120 bp, Artificial Sequence
  ENSG00000260862_11 (sequence is synthesized)
gaaataattaactagtggatgaagagagtttctctttctaggtaataagcaacgaaaaaatggcagaattagaatataatgaatttgcagttcttactaaattaatatatctaggcagta

SEQ ID NO: 900418 - DNA, 120 bp, Artificial Sequence
  ENSG00000260862_12 (sequence is synthesized)
accatcaataaaaagaaagaccatatgacatttgtatgtcctgaagtaagttcacaacgccatctagtcttgagccaaaaatactgcacctgaatctgatccagcctccaggatgtatct

SEQ ID NO: 900419 - DNA, 120 bp, Artificial Sequence
  ENSG00000260862_13 (sequence is synthesized)
atttataggaaacacagtggacaggcgaacatgttaaatgacaccacagagatgcaatctgcgaacttccactgtggaaacaatccaaatgattcaacacgatgttgcaaagacaaaaga

SEQ ID NO: 900420 - DNA, 120 bp, Artificial Sequence
  ENSG00000260862_14 (sequence is synthesized)
attatacatgaacaggaggctggatgaattaaaaaacataagagatgtatcaatcataatctttggttctaatttggattctgatttaaaaatagactgcaaaaaaatttgttagaataa

SEQ ID NO: 900421 - DNA, 120 bp, Artificial Sequence
  ENSG00000260862_15 (sequence is synthesized)
tatgaacaaagactagatgtttgctgccatttagaaattctcattagtatttgttcagttatgataatgcatgctgcttctgttaaaaaaatacttttaatcttttacagataccttcta

SEQ ID NO: 900422 - DNA, 120 bp, Artificial Sequence
  ENSG00000260862_16 (sequence is synthesized)
tcaggtgagctaatggtagccatgagtttaatattgaggttgagcgatggatacagagaagttcatcatacgaatctctccactttgatgttttcttgaactctccaatactaaaaattt

SEQ ID NO: 900423 - DNA, 120 bp, Artificial Sequence
  ENSG00000260862_17 (sequence is synthesized)
agccaaaaaaattaacaggggcaacgaactttcttctttttccaagggctttttatcgatgattttaagaaaatggtcagacagcgcaggcgtgttttaccttagtccttccaaagcagt

SEQ ID NO: 900424 - DNA, 120 bp, Artificial Sequence
  ENSG00000260862_18 (sequence is synthesized)
aaggtgcacccacttctcagccaccctccctgactttgttttcacaacccgaattcaccaggaaaataccaggagtctgctttgtattgtgccatcttttaaataatgcctcactttcta

SEQ ID NO: 900425 - DNA, 120 bp, Artificial Sequence
  ENSG00000260862_19 (sequence is synthesized)
gtagcaaagtacctcattctttttcttgatacttcaaaaaaacaaaatgaaacaagaacttctcattagctgaaagtgtttttatctagtgagaactgaaatcttcttggcttatttcct

SEQ ID NO: 900426 - DNA, 120 bp, Artificial Sequence
  ENSG00000260862_20 (sequence is synthesized)
ggcttatttcctcttagatctaaacaatattaacttttttttttttttttttcccaaacagagtctccctctgttgccccggctggagtgactgcagtggcacgatcttggctcactgca

SEQ ID NO: 900427 - DNA, 120 bp, Artificial Sequence
  ENSG00000260862_21 (sequence is synthesized)
atccacctgcctcagcctcccacagtgcgaggattacaggcgcaagccactgtgcccagccttaacaatttttttttgtttgtttttgaggcaaactctgactctgacaccaggctggag

SEQ ID NO: 900428 - DNA, 60 bp, Artificial Sequence
  ENSG00000260862_22 (sequence is synthesized)
caccctcccaagtagctgggactacacacgcaccccaccacaccgagctaattttttgta

SEQ ID NO: 900429 - DNA, 120 bp, Artificial Sequence
  ENSG00000260862_23 (sequence is synthesized)
tggaattacaggcttgagccaccgcgtctggcccaacaaatatttttaagatgcattgtctactaacaggagatgcctctgattctgaagtactttgcgataaacagccacacaatagcc

SEQ ID NO: 900430 - DNA, 120 bp, Artificial Sequence
  ENSG00000260862_24 (sequence is synthesized)
agccaaatgaaatcttgaaatcagagggttgctttctcatgaagttagactgcttgagaattgcagtggcttctatatggcaggtgcttaaattgtccaagttgaaattctaatttttat

SEQ ID NO: 900431 - DNA, 120 bp, Artificial Sequence
  ENSG00000260862_25 (sequence is synthesized)
aatgagtagggatgagtgcatgaaatggttgtgtgtttttttatttcctacatacaatatcgaattcaatcccaaacttgaagcattgatgtaattgaaacatgttggtaattttaaatc

SEQ ID NO: 900432 - DNA, 120 bp, Artificial Sequence
  ENSG00000260862_26 (sequence is synthesized)
gtgcagttctgtacatgatcagaatcctaatcattattaaaataggtgtttctattatatgcatatgtataaaaagtcctccaaaatgttaaattacctttctcatctcaggaatagagt

SEQ ID NO: 900433 - DNA, 120 bp, Artificial Sequence
  ENSG00000260862_27 (sequence is synthesized)
cccaatcacttccagattgaagcacttacggggggaaaaggcgaagggctccagtaattttaaattgcttcgtacaatgaagagtgcctgtaaattactgaatgtgggttcttctccgtg

SEQ ID NO: 900434 - DNA, 120 bp, Artificial Sequence
  ENSG00000260862_28 (sequence is synthesized)
tggatcacattaagggagcgtataacctttcataccgcctgactaggatgatggatgtggaaatacacagtttgggagccctgtctgcttgcctgttaagccattgactgttatatactc

SEQ ID NO: 900435 - DNA, 120 bp, Artificial Sequence
  ENSG00000260862_29 (sequence is synthesized)
ttgggcttgaaacaccttccaggctggaggggccagtattgcatttacttttatcccatttctgttttcacggctacccaagaggaaataatttgatttggggctgcagggggtagggtg

SEQ ID NO: 900436 - DNA, 120 bp, Artificial Sequence
  ENSG00000260862_30 (sequence is synthesized)
gaaaagtgcagtcggaagacagagaaaatcagcaagaagattactgaaagggaaagagggggaaaccaaccagctatatatttcctgcaacatgagttaatgaaattccgttccttctta

SEQ ID NO: 900437 - DNA, 120 bp, Artificial Sequence
  ENSG00000260867_0 (sequence is synthesized)
cccgtcctgaaggcctagagggtgccccctgtgccccgcggctccccagcacctgcttctcgtttcacatcttcaagtttgactgccctgacactgccatactgtaaggaagcttaaaac

SEQ ID NO: 900438 - DNA, 120 bp, Artificial Sequence
  ENSG00000260867_1 (sequence is synthesized)
atcattgtttggctgcaacagcatgagagatcccaaactagaactacccagctgagcccttcccaaattcttcagccacagaaagtatgagagacagtaaaatcagtgtttttattttaa

SEQ ID NO: 900439 - DNA, 120 bp, Artificial Sequence
  ENSG00000260868_0 (sequence is synthesized)
ctctggtctcctgactctggcagggggaacatttgcactgttcttgttccttaccccaggagctggcctattgcacaacctcaggaaacagcccctatgcaatcctggcccacagagcgg

SEQ ID NO: 900440 - DNA, 120 bp, Artificial Sequence
  ENSG00000260868_1 (sequence is synthesized)
acatgttctggtttttattcagcagcttttttatgaagtgtgttttcctttcccatcatgtcatctggaagcaattcctcccaacagctggatttgctttcacaattggtaaacaccgcg

SEQ ID NO: 900441 - DNA, 120 bp, Artificial Sequence
  ENSG00000260868_2 (sequence is synthesized)
aatggaaggccggggacgatgcggagctccccggaggagccttgtccccacccgcttggctcgcgttctgaagcttatcgcgggtgcctgcacaagcctcatcaaaatcgagggcgtcct

SEQ ID NO: 900442 - DNA, 120 bp, Artificial Sequence
  ENSG00000260868_3 (sequence is synthesized)
ccagcaggcgacccacattgcattccccgcttaagagggtcaacgtgttcttcgggggagaaattttctgaatgctttgcagataaaattgatcagatgcaggccagattgccagctgcc

SEQ ID NO: 900443 - DNA, 120 bp, Artificial Sequence
  ENSG00000260868_4 (sequence is synthesized)
ggggccgcgtgcgcctgtggaggccccaccagcgcggggcaccagcgcctcggggtccgggggaggcctctctctgcaccgccgccaccaaagccagtaagagagggcaaaaccccaaag

SEQ ID NO: 900444 - DNA, 120 bp, Artificial Sequence
  ENSG00000260868_5 (sequence is synthesized)
agcactgactgggccgtcaaggaagatgaatgtctccccaaaagtgctcctcggggacaagtttccacgcagatgcaaccgggaacgccggccaggctccggaaggcgaggccccagagc

SEQ ID NO: 900445 - DNA, 120 bp, Artificial Sequence
  ENSG00000260868_6 (sequence is synthesized)
gcagcggcctccaagcgcgggctcagcctgtcgcctccgcagccagggcccaggaggccgctcttccggggtcaccaacacggctcgttctgagcctagaggcccagggcacagtgtgag

SEQ ID NO: 900446 - DNA, 120 bp, Artificial Sequence
  ENSG00000260868_7 (sequence is synthesized)
ctaatgtggggaaaccagccgagcacgtggctgaactctcggagggagcacggggtgctggtgagcccccgctctgatgcacagagacgctgctggccaggctggggtgggttgcaaagg

SEQ ID NO: 900447 - DNA, 120 bp, Artificial Sequence
  ENSG00000260868_8 (sequence is synthesized)
cttccttccatgcaccaccaaccctgtgggcagccagggcctagctctcatgaaggggccttcccagggcaaagtgggcctctgactgcaacgttctctgggcagagataggcatccttc

SEQ ID NO: 900448 - DNA, 120 bp, Artificial Sequence
  ENSG00000260868_9 (sequence is synthesized)
ccactgcacaaacaaaaggagaccgtcaaggggagaggctcaccagaggaccctggtgagggcgacgcccaactcctcagcacaaggctgtgcttcttccatggagcccgtttgcctggg

SEQ ID NO: 900449 - DNA, 120 bp, Artificial Sequence
  ENSG00000260868_10 (sequence is synthesized)
cccagcgcgtgcggagtgcgttccttctcgctccctctgtcctgtgggccctcctctctctccctccagcctggtggaagctttattctcgtcgggggccagaggacagaaactacatca

SEQ ID NO: 900450 - DNA, 120 bp, Artificial Sequence
  ENSG00000260868_11 (sequence is synthesized)
tacattttcccgtgcgtcatgttatcttgcctggaattttgaaaatctgtgagtttctggtttttccatggcaaggctcattcctccagaccttagtcactctgctctggctgcctggac

SEQ ID NO: 900451 - DNA, 120 bp, Artificial Sequence
  ENSG00000260868_12 (sequence is synthesized)
tgctagagaggggcctcagggcgcacctggagaaattcactggggcccaggtcagagggatgggtgggtgagagcaaccccttccttaatagttcaaaatggccctctggcttaaagaga

SEQ ID NO: 900452 - DNA, 120 bp, Artificial Sequence
  ENSG00000260868_13 (sequence is synthesized)
ccgaagccacgtaacaaccaaatgcaatgtgtgggccgtgtttggatcctgattcaaacaaaccaactggaagaggagatttggggataatcaggaagatttgaattgggactgcgtagc

SEQ ID NO: 900453 - DNA, 120 bp, Artificial Sequence
  ENSG00000260868_14 (sequence is synthesized)
agaaaatagcaaagaattattgttaattttgatatgtgcgataatggtgtggtagttatagaagaaaacatgcttatcttttaaatggtgtatattaaagtatttaagggtgaaatataa

SEQ ID NO: 900454 - DNA, 120 bp, Artificial Sequence
  ENSG00000261198_0 (sequence is synthesized)
tctacacctcctgaggatgctgcgtagcaaagcagtgaaaaaacatggggttgaaacttaggaaaaaagacctttatataataaccagaatttttcacatggtagttctgtgatttggcg

SEQ ID NO: 900455 - DNA, 120 bp, Artificial Sequence
  ENSG00000261198_1 (sequence is synthesized)
aatgagagtcggatatccaaacctcattcgcttcccatagcctggatgtgaagcttcttgtacaaggactaccttgacaccccctgcttttggggggagcagttcttgacagacttccca

SEQ ID NO: 900456 - DNA, 120 bp, Artificial Sequence
  ENSG00000261198_2 (sequence is synthesized)
cacaggcttcatcaaagatgagttgcattccctctgtgggatctagaaggacgcagataaaaattaaggccaaatatgggcagggctggaataaaatctgataagacagaagaggggagg

SEQ ID NO: 900457 - DNA, 120 bp, Artificial Sequence
  ENSG00000261198_3 (sequence is synthesized)
agaggagagaagcgaagtgaattacaactaaaaggggaggcaaaggtaaacagatgtgcaagataaactctttgaagtggaacatttccaggctgaaaatcctttgctcggggacttaaa

SEQ ID NO: 900458 - DNA, 120 bp, Artificial Sequence
  ENSG00000235669_0 (sequence is synthesized)
agagatttccccttctctgtttcagatatgatcccaggggactgctattgtcatcttgaccctgtaaagacagtgaggctgaggacaaggccccccgaccaagagggcagcgctaagaga

SEQ ID NO: 900459 - DNA, 120 bp, Artificial Sequence
  ENSG00000235669_1 (sequence is synthesized)
aggagacagagccagatactgcagtgtctacaaccacgcttggagacacatcattgtgttctgtcacaccaaccagcctgcaccagagacacaggaatcttgatcttctggcagaaaact

SEQ ID NO: 900460 - DNA, 120 bp, Artificial Sequence
  ENSG00000235669_2 (sequence is synthesized)
cttccaaaacattcctatgtgacactgctcatgtataggtgctccaaaccaaatgtccagttgcttccaccattgtgcaaaaatgggagaccctgccgagcagcagatggccctcagcac

SEQ ID NO: 900461 - DNA, 120 bp, Artificial Sequence
  ENSG00000235669_3 (sequence is synthesized)
gaaaatacctggtgttcacattccccaaaagttgggcaaatgacagggtcacccagtgcacttcatggggtcagtggggagaaccagcatttcagcacaagttcacaaatcactgggtcc

SEQ ID NO: 900462 - DNA, 120 bp, Artificial Sequence
  ENSG00000235669_4 (sequence is synthesized)
cccttgtcaaacactgcaaatatgtagcatgctaagaaaaatctccttacctctcagactctgtatcactcagttcatctgagttgctacaatggacaataaaatctaataagttaaaat

SEQ ID NO: 900463 - DNA, 120 bp, Artificial Sequence
  ENSG00000235669_5 (sequence is synthesized)
gaggtatggaatgctcaggagaaaaacaacaaggactagtactcctcatctgagtaaataatttctctcacagggttaattttagctttgcaagttttttatttgagattatattttaaa

SEQ ID NO: 900464 - DNA, 120 bp, Artificial Sequence
  ENSG00000224765_0 (sequence is synthesized)
catcaaactcgccccaattctctctccacatccagagctctctccccaggttggaaggtccttccccagacacctgaagagatgggggaaggagaatcaatttggagagccaagtttgcc

SEQ ID NO: 900465 - DNA, 120 bp, Artificial Sequence
  ENSG00000224765_1 (sequence is synthesized)
tgacattttggagcacacatttacccaggaccccaagttccttgtagctgctaaatgctgtactagttctaaaatgtaaattagcttcaaggcaagtggagagaagccttagactattct

SEQ ID NO: 900466 - DNA, 120 bp, Artificial Sequence
  ENSG00000224765_2 (sequence is synthesized)
tagtgcctagatctggagcccccaccaaccctttgtccccaagttacatttccttagtccaggcctattccaccatttcatcttctttctcccttcctcgctgaggggcagaggccgcct

SEQ ID NO: 900467 - DNA, 120 bp, Artificial Sequence
  ENSG00000224765_3 (sequence is synthesized)
ttcttttgcccaagctgagagggagaattcctgatccctaggaaaaatgctgtctccactcccaaggaactttgtgtagtttaggaattgcattttgtaaaatcaaattgcctgttgcaa

SEQ ID NO: 900468 - DNA, 120 bp, Artificial Sequence
  ENSG00000224765_4 (sequence is synthesized)
ttcaagatgtttccatgaagaaaaatcccgccttcaacttctacgttattcatcctgcttttagaaatgacccttgccctgatctgaggtggaagaaataaaggtctggtaaagaaatga

SEQ ID NO: 900469 - DNA, 120 bp, Artificial Sequence
  ENSG00000224764_0 (sequence is synthesized)
agggtctgcacctggagactcccacctaagatgggggtttagatgagaccactctgggaggacacgcagccgagtgtggaggccccgaggaagatcagctctgaagacacaggcaggcaa

SEQ ID NO: 900470 - DNA, 120 bp, Artificial Sequence
  ENSG00000224764_1 (sequence is synthesized)
agggcagacctcgaaggagatggaggaggaatgacagagggcaagaagaatcaggtttactgtctgccaggctgccaaaccccaaccctcgccacatccgcagccaccacgtaaagtgac

SEQ ID NO: 900471 - DNA, 120 bp, Artificial Sequence
  ENSG00000224764_2 (sequence is synthesized)
acttcaaacgaaggatctgacccccggaaatggcctcatgctagttttttcctaaacagtcaccaggaaaatgacggaaggcaaatcgaaacgcatgccctgaaagacttagaacataac

SEQ ID NO: 900472 - DNA, 120 bp, Artificial Sequence
  ENSG00000224764_3 (sequence is synthesized)
catcacatctgggggacaagaagcccaccccaacttaatttaaaaaggaaacacagcagatgtcatcagttggcagggaggtgtcttgaaggaaagaaggaggggaatgagagggctgtg

SEQ ID NO: 900473 - DNA, 120 bp, Artificial Sequence
  ENSG00000235665_0 (sequence is synthesized)
aaagaacattggagtcactccctggctacacacactgaggtgctcaaaaagggccggtgtgccgcagtgagtgccagtttgaatgaaggaagcatgcgtggcctgaagcctcaccgtgtt

SEQ ID NO: 900474 - DNA, 120 bp, Artificial Sequence
  ENSG00000235665_1 (sequence is synthesized)
ccaggcgtccagttaagtgctctgcacataatatcacacattgcgctccacgataagaacaaattctcacatgggaaccgagcaaagtgtaatggatgttcccaggagctgcctatggga

SEQ ID NO: 900475 - DNA, 120 bp, Artificial Sequence
  ENSG00000235665_2 (sequence is synthesized)
ttcaagaaaactgtatgagaggagtaacatttgggctggaagcgaaaatacaagtaaacatatgtcaaatggggtctggaaagcaatcctccacagaaagaaagcagaatcttctgggca

SEQ ID NO: 900476 - DNA, 120 bp, Artificial Sequence
  ENSG00000235665_3 (sequence is synthesized)
tttctgagcaagtggacttccttcagctgagcacagtcctcaggagaagcggacaggtgcaaagtgttggaagccaacactcacagcagttgggggttggagtgctctggcttccaacag

SEQ ID NO: 900477 - DNA, 120 bp, Artificial Sequence
  ENSG00000235665_4 (sequence is synthesized)
cattgaaaccaacagcattgactacagcgagtttctcaatcttcagaacacatcccagcctccctgggggctgctaatgcacagattgccgtttcccactccaagagtttctgattccag

SEQ ID NO: 900478 - DNA, 120 bp, Artificial Sequence
  ENSG00000235665_5 (sequence is synthesized)
aggtctggggtagggctcgataatttgttcttctaaccacctaatgctgttggtccagtgaccacactttgagaaatgctgtactatgttttctcatatatttaaaaattctcacctcat

SEQ ID NO: 900479 - DNA, 120 bp, Artificial Sequence
  ENSG00000235665_6 (sequence is synthesized)
ttatggtttaaaacttctagaacaattctgaatagtttttgtaatagtgagcctcactttcctgtctctgcccttaatgggaatgtctctaatgattcacctttcatacggggacttgtt

SEQ ID NO: 900480 - DNA, 120 bp, Artificial Sequence
  ENSG00000235665_7 (sequence is synthesized)
gtggtttactgggcaattccttttggcaggttaaaaaaattccctctgtttcaagctaaagccatttaccaggaagagacgctaagttttatcagagggtttttccagtaactattgtga

SEQ ID NO: 900481 - DNA, 120 bp, Artificial Sequence
  ENSG00000235665_8 (sequence is synthesized)
taatcatggttttttttcctatttattacgatatcaaacatgaaacttatttgaagtcctggattaaacggtgcttgttttctataatgttttgttccttaaatgtactgacaaatttaa

SEQ ID NO: 900482 - DNA, 120 bp, Artificial Sequence
  ENSG00000235665_9 (sequence is synthesized)
cttccatcctttcttgatatcctttttatctcttggtttcaaaattacactagcgtcatagaatgagttggaaattagcccattattctccatgccatggagtgttttgcaaaacataag

SEQ ID NO: 900483 - DNA, 120 bp, Artificial Sequence
  ENSG00000235665_10 (sequence is synthesized)
aatgatcagttccttacatatttggtagaatttaccttataaaacacagtaggttttgtgtctcttctggagtccagatactgctatggactgaatgtttgtaccctctaagattcatta

SEQ ID NO: 900484 - DNA, 120 bp, Artificial Sequence
  ENSG00000235665_11 (sequence is synthesized)
ggttgaaatcctagcctcaaagtggtggtattaggaggtgggacttttgggaggtgatcaggccaagagggtggagccctcatgaatgggattagtgcccttatcaaataaggcaaaagg

SEQ ID NO: 900485 - DNA, 120 bp, Artificial Sequence
  ENSG00000235665_12 (sequence is synthesized)
agctctttaacctctcccaccatgtgaggacaaagtgaaaagacaccatctatgaaccaggaagcagggcctcaccggatgccaaacctgccagcacctggcccttggacttccagccac

SEQ ID NO: 900486 - DNA, 120 bp, Artificial Sequence
  ENSG00000235665_13 (sequence is synthesized)
cagaactgtgaagaagaaatttctattgcttataaatacccagtttacggcattctgttatagaagtgcctaataggctaaggcaaatactatatggtatttaggattgcttctgtatat

SEQ ID NO: 900487 - DNA, 120 bp, Artificial Sequence
  ENSG00000235665_14 (sequence is synthesized)
ttttaagacttttttattttggaataataataattcacagaaaatttacagagaaagtctccacatgcccctcaccccacttcccctaatgttaacataaccgtggtccatttgtcaaaa

SEQ ID NO: 900488 - DNA, 120 bp, Artificial Sequence
  ENSG00000235665_15 (sequence is synthesized)
ctaagaaatgaggattggtaccatactattgactgaattacagacattacttggattttgtcaattgttttactaatattctattatttctgtgtcagattccaatctggataacatgtt

SEQ ID NO: 900489 - DNA, 120 bp, Artificial Sequence
  ENSG00000235665_16 (sequence is synthesized)
gcatttgttcatcacgtctcctttgtttttcctgggctgtgacagtttcttattcttttcttgtattgcctggctttgaattttgaggaattctggttaagtattttgtaaactgtcact

SEQ ID NO: 900490 - DNA, 120 bp, Artificial Sequence
  ENSG00000235665_17 (sequence is synthesized)
aaattttgcttgtcagatgttttctcctgggttagactgggcttacaggttttggggaagaactctacaaaagggaaatgtctttctcatctcatctaataaatggatataggatatcaa

SEQ ID NO: 900491 - DNA, 120 bp, Artificial Sequence
  ENSG00000235665_18 (sequence is synthesized)
ctggaccaggagcatgtgctgggggcttgctttccgcaatcaggcactttttcaagttggtcctgaacggttctggactggatggcaggctgctgtgtgtgattgagaatgttgcctgtc

SEQ ID NO: 900492 - DNA, 120 bp, Artificial Sequence
  ENSG00000235665_19 (sequence is synthesized)
tgagccctgagatgagctgagggttcctcctccccagccagcaccagcctcacacagcccttgtaaatctgaaagtgctgttggtagcaaccagggatgggcagaggcagccctgtcctg

SEQ ID NO: 900493 - DNA, 120 bp, Artificial Sequence
  ENSG00000235665_20 (sequence is synthesized)
agggtgacatgaaagtgagagcaagctgaagctccagttggcttagtcttcaaaagtgtcactttcagattatatccctcagctttaaaatatccttctttgaagtccatcctgctctgc

SEQ ID NO: 900494 - DNA, 120 bp, Artificial Sequence
  ENSG00000235665_21 (sequence is synthesized)
ccactatttgtccccggtggtcacttcctcctctgtgctcccgtggcctgggattcacaccaggaaagaacgccacgaagaaggaatgacaagaaaatggaggcaaagaacattggagtc

SEQ ID NO: 900495 - DNA, 120 bp, Artificial Sequence
  ENSG00000235665_22 (sequence is synthesized)
agctcagcacagctgcttgggaagccagagtaatgaaggtcccaccatcctgaggctgctccaaaggcaacgtgtgtttttcctgggcacagcattacaacatagggtctggaaagcaat

SEQ ID NO: 900496 - DNA, 120 bp, Artificial Sequence
  ENSG00000235665_23 (sequence is synthesized)
aagtacatcttttcaccctcaagaaaggaaaagatcactctctggcctgagtcccaaggagtgaacaagtgcccagcgttaatgagagataacttcgcatcagtgcacatgctctgaaaa

SEQ ID NO: 900497 - DNA, 120 bp, Artificial Sequence
  ENSG00000235665_24 (sequence is synthesized)
tcagccaatccctgatagcctcacttgtgttgtgcttctgaaaaggagccagtcagcaacagcctcgctccagtaactacgcttctgaagatcagccaaccgatgacagctccagctcct

SEQ ID NO: 900498 - DNA, 120 bp, Artificial Sequence
  ENSG00000235665_25 (sequence is synthesized)
gaaagtcagcctgtcagtgacagcccctcacttacagacaacagccaatctgccggtcttcaccccggtgacagtgcttctgaaagtcagctaactccagtgaccaggggcacagctgac

SEQ ID NO: 900499 - DNA, 120 bp, Artificial Sequence
  ENSG00000235665_26 (sequence is synthesized)
gtgctgagtcccccacactctcacctctggaacccaccagcctctccaggatgggcttcttcaaacctcatccaagatcagctcaggcttgatttgggagagaccgttcctcccttacaa

SEQ ID NO: 900500 - DNA, 120 bp, Artificial Sequence
  ENSG00000235665_27 (sequence is synthesized)
tcattcagcccctattcacagttcagacttgccaaagatggacattaagatgctcaaatttaatcttttccatttttgtgacggttgctattatccatttttatttgtgtacttttgagt

SEQ ID NO: 900501 - DNA, 120 bp, Artificial Sequence
  ENSG00000235665_28 (sequence is synthesized)
gcccaaaatgttaaaaggcaaatgtgaatatcacgataaattttatgagcagtagacatttaccaaacaagtgtatgtctttttgaagctctttgtgtagtatgcaattgtgcattcaat

SEQ ID NO: 900502 - DNA, 120 bp, Artificial Sequence
  ENSG00000235665_29 (sequence is synthesized)
acgaaaaatggtggaaagtaagatataagtcagcaaatactaatagctaagcatgggagatgcatgatatcctttatcagtgccatagaaaataataatacatttttttgtgtaagagaa

SEQ ID NO: 900503 - DNA, 120 bp, Artificial Sequence
  ENSG00000235665_30 (sequence is synthesized)
attcaaatgaaactgatatatgagtggcagcagatcttgtgatggccttccacattgtctgtcagtcatccatctttcagcttaaaccactctgtgtccttctaccattcagaagcactg

SEQ ID NO: 900504 - DNA, 120 bp, Artificial Sequence
  ENSG00000235665_31 (sequence is synthesized)
tctaattccaaatttgcaaatttgcaaataaattttttaagtgccaggtgaaaatttacttgcataatttaaaaatgtaatagttccactaactattatagagattatcaaagatataaa

SEQ ID NO: 900505 - DNA, 120 bp, Artificial Sequence
  ENSG00000235665_32 (sequence is synthesized)
tgccccaccttttatggcaactgcaggtacaagtaatcaaaacgcagatcaaatttccctttgcttttgtaatattttttttctcatgtgaagacccttccaaaggcgatttcagaaaca

SEQ ID NO: 900506 - DNA, 120 bp, Artificial Sequence
  ENSG00000235665_33 (sequence is synthesized)
aaagcaaattttaggaaactcatatgtagggttgaagaagatgataaaatctgatgacaacatggtttgtttgtttgtttgtttgcttgtttgttttggccagaaaataatatttcaaga

SEQ ID NO: 900507 - DNA, 120 bp, Artificial Sequence
  ENSG00000235665_34 (sequence is synthesized)
agctgatcaggaaattcaatataatcctgaagtgtggaaaaaataagttataccatgaaacatggtttgtacttgaacaaatcaaatttgaagagcaattctcagagtgccaatgtttag

SEQ ID NO: 900508 - DNA, 120 bp, Artificial Sequence
  ENSG00000261190_0 (sequence is synthesized)
cagcccagtcccagaaggagcttgggaatacagcagcaggctttaaagcttgcctgtctttcgcctacgcttctggaatcctcaagttgtgttgacccacctgggaacactgctggttcc

SEQ ID NO: 900509 - DNA, 120 bp, Artificial Sequence
  ENSG00000261190_1 (sequence is synthesized)
tgttcacctgatgaaaaggaacatggagagatggttcttgaatctgaataggaggagatcgtgcctggacacactaggaagaatcttctgcattgatttgattaaaaaacaactatgtaa

SEQ ID NO: 900510 - DNA, 120 bp, Artificial Sequence
  ENSG00000261190_2 (sequence is synthesized)
ccttgtttctggagaagcattcttcccacatgggaaaggcaaggatggtgctgagcctgtctgcctctgtgttccctggacaactccattccagtgcaagattctcatggttgaattcat

SEQ ID NO: 900511 - DNA, 120 bp, Artificial Sequence
  ENSG00000261190_3 (sequence is synthesized)
attttaagtgctgtttgtggggttttgagcagttgccattctgaggaggagcagaggagcatggctttgccaaagtgtctcccaattatgagcaccatctgcaagagtccacttggaaaa

SEQ ID NO: 900512 - DNA, 120 bp, Artificial Sequence
  ENSG00000261190_4 (sequence is synthesized)
cataaggcttggcaatagtggcggccaaataatacttgcttagttctcccctccctctctattccattggtctattattgttgttgttgttaaaaattttccctccctcccctccgccac

SEQ ID NO: 900513 - DNA, 120 bp, Artificial Sequence
  ENSG00000261190_5 (sequence is synthesized)
tcccatctaatttgaagctcctcaagaatggaagctgtcttcttgttcatcagatggttatctaaatggacaggaagtttattctgcttaaggagaaattctactttcctgcagtctgtg

SEQ ID NO: 900514 - DNA, 120 bp, Artificial Sequence
  ENSG00000261190_6 (sequence is synthesized)
ggccctcgctcaccacccaggggtggtttctgggtgtggcaggcctagctaagggtttcccatcagcctatcctgtgcagggaatcacccatcacctgggctgtgcagaggctaaagtcc

SEQ ID NO: 900515 - DNA, 120 bp, Artificial Sequence
  ENSG00000261190_7 (sequence is synthesized)
cttcctgatcaatccatcactgcccagagcctgcctcactcctgaccccagcaggctgttaaaagggggcccatgtccctttggtctctaagtgtccactttgctattagcagagaacag

SEQ ID NO: 900516 - DNA, 120 bp, Artificial Sequence
  ENSG00000261190_8 (sequence is synthesized)
acattcagaggagaggggctccccaccacccccaggtggtgccaagtctgccctaggatgctaggagaagtctagagctaagcctctgtcctctctaacccattcctgccattacacagc

SEQ ID NO: 900517 - DNA, 120 bp, Artificial Sequence
  ENSG00000261190_9 (sequence is synthesized)
cctaaaatcattagggtcggagaagggaacccctgccctggccttgccttcagaagccccattgctttgaaacaacatgctagaaaaattttaaataccttcatctgtgcctgggatgag

SEQ ID NO: 900518 - DNA, 120 bp, Artificial Sequence
  ENSG00000261190_10 (sequence is synthesized)
tctggtggggtgtttgagccaagtgggaattcccatggacccggtccaggttcctcctgttcagggcactttctgaatgtctaattgcaaatattcacatgtggggtcaatctgccacct

SEQ ID NO: 900519 - DNA, 120 bp, Artificial Sequence
  ENSG00000261190_11 (sequence is synthesized)
taggacagtgtagctctggctacagagagtcccctgcagaccctgggcttagcgacacatgtaagccatgcaagtattctctaccattcatgtagagaatcagttcctaagaatggtggg

SEQ ID NO: 900520 - DNA, 120 bp, Artificial Sequence
  ENSG00000261190_12 (sequence is synthesized)
cccccaactccgacacctgggttggctaccccatcccctccataggttccacatcaggtgtcaggagcggtcacacatgtcttcttcacgggctccctagaccacggctctgtatcacca

SEQ ID NO: 900521 - DNA, 120 bp, Artificial Sequence
  ENSG00000261190_13 (sequence is synthesized)
cagggactcacatgtcctctcctgcctcaggagatgtgatagtcttgccctcccaggtcagtcctatggcacatgaggcaagggatgaacatggcttgcactaaagggacatctcatttg

SEQ ID NO: 900522 - DNA, 120 bp, Artificial Sequence
  ENSG00000261190_14 (sequence is synthesized)
tcttcctctggccatagaaactcacctatgctccctgtggtagttacatggaaggtagaggccaatcaacactaaaagcaatcacattctataaatgcagcaattgcaatctacagagtt

SEQ ID NO: 900523 - DNA, 120 bp, Artificial Sequence
  ENSG00000261190_15 (sequence is synthesized)
caaaagaagacacggtgggaagatgggttgttctactttttaacccattcaatttggaacagtaaatttaacacacagagaacattaatcatcatagtcttggtctgcatacattgggta

SEQ ID NO: 900524 - DNA, 120 bp, Artificial Sequence
  ENSG00000261190_16 (sequence is synthesized)
agacttggatttgtggtcattattaacaaagctcagtggcaacctcttagagtcattggaaggtgatgcagctgtgtaagtaatgctgtaatcagcattaatagttagagttaggagaca

SEQ ID NO: 900525 - DNA, 120 bp, Artificial Sequence
  ENSG00000261190_17 (sequence is synthesized)
gcagctgggtgaagatctatattgtttcaaagcaaacaggttaagaaggagccatggcagtgtaaggaataattgttgctatttttttttcttgcagcagaaatgtaaaattaacaagga

SEQ ID NO: 900526 - DNA, 120 bp, Artificial Sequence
  ENSG00000261190_18 (sequence is synthesized)
gcaagaaaagtcacagccttggggtttcagtgaagagacagcccaaatgctcttgaagtagtcagaaaagtctacaggtgtgactcccttatgccgctctctcctgccatttgggcaaca

SEQ ID NO: 900527 - DNA, 120 bp, Artificial Sequence
  ENSG00000261190_19 (sequence is synthesized)
agcccagtcccagaaggtaaaaccattcttaactatagtaaggaccatcacactcagctgacctaagagcctaacaacctgctctttgggggcagtaggacaatggggtaggaactccat

SEQ ID NO: 900528 - DNA, 120 bp, Artificial Sequence
  ENSG00000261190_20 (sequence is synthesized)
cttatccccaatttacaaatgaagaaatggaagtcaagacttttcccaaggccaccaaactggttaagtggcaagtacttaaggctcccaagttcagcaatgtttctaatagacttctgc

SEQ ID NO: 900529 - DNA, 120 bp, Artificial Sequence
  ENSG00000235660_0 (sequence is synthesized)
tattctcaacatgggatgtgcatctaagttatgaagcataacaattaaataacatccataaacccatgacctcatgcagtatgaaacatttctagtcctgtggaagctacaggactgctg

SEQ ID NO: 900530 - DNA, 120 bp, Artificial Sequence
  ENSG00000235660_1 (sequence is synthesized)
ctgcttctccacgccaatgacatggtgagagaatacagggggagctgaagacaaacaacataaacttatgtttgcaaagcaccttttactctgtgaaataaagtgagtgcaagcagtaaa

SEQ ID NO: 900531 - DNA, 120 bp, Artificial Sequence
  ENSG00000235660_2 (sequence is synthesized)
aggcctcgtgggccctcacagaaatggcagggcattgggacaagctgctccggctgcgcaggccgaaaggtccctcgagcatccagaaagctcgcctgacccttataggcgaggtgaggc

SEQ ID NO: 900532 - DNA, 120 bp, Artificial Sequence
  ENSG00000235660_3 (sequence is synthesized)
ccccaactcatatcctggggaaaccatggagggggaattcggtttccacaggcgaagtcaaccgaaacggcccgccatgttgaagcctgagcagagctcccgtcaggccccgccccccgg

SEQ ID NO: 900533 - DNA, 120 bp, Artificial Sequence
  ENSG00000235660_4 (sequence is synthesized)
caagagctggggaaggaagagctggctggtcagggaggatgcactggagagaaaaaccatcactcaattggctaggacattccaggacatcagggagaccacacaacagccagagtgtct

SEQ ID NO: 900534 - DNA, 120 bp, Artificial Sequence
  ENSG00000235660_5 (sequence is synthesized)
gggcacagaactgggctgaggctgagtattgctgaggcaataccgtttagaacataggcacgggtaaggatttcatgacaaaaacaccaaaagcaattgcaaccaaagcaaaaattgata

SEQ ID NO: 900535 - DNA, 90 bp, Artificial Sequence
  ENSG00000235660_6 (sequence is synthesized)
gtttagaacataggcacgggtaaggatttcatgacaaaaacaccaaaagcaattgcaaccgaacctaagagcttctgcatagcaaaagaa

SEQ ID NO: 900536 - DNA, 69 bp, Artificial Sequence
  ENSG00000235660_7 (sequence is synthesized)
agtaggcaaagaacataaacacacacttctcaaaagaaggcattcatgtggccaacaaacatatggaaa

SEQ ID NO: 900537 - DNA, 120 bp, Artificial Sequence
  ENSG00000235660_8 (sequence is synthesized)
agaacataaacacacacttctcaaaagaaggcattcatgtggccaacaaacatatggaaaaaaaaagcttaacatcactgatctttagagaaaggcaaatcaaaaccacaatgagatatc

SEQ ID NO: 900538 - DNA, 120 bp, Artificial Sequence
  ENSG00000235660_9 (sequence is synthesized)
gcaattattaagaagtccagaaacaacagatactggcaaggttgcagagaaaaaggaaagcttttacactgtcgatgggaatgtaaattagttcaacccttgtggaagacagtatggcaa

SEQ ID NO: 900539 - DNA, 76 bp, Artificial Sequence
  ENSG00000235660_10 (sequence is synthesized)
atgtaaattagttcaacccttgtggaagacagtatggcaattcctcaaagatctaaaggcaggaatagcatttgac

SEQ ID NO: 900540 - DNA, 75 bp, Artificial Sequence
  ENSG00000235660_11 (sequence is synthesized)
gcctatgaatgataaactggataaagaggaaggagatcatgtcctttgtagggacacagatggagctggaagctg

SEQ ID NO: 900541 - DNA, 120 bp, Artificial Sequence
  ENSG00000235660_12 (sequence is synthesized)
atcatgtcctttgtagggacacagatggagctggaagctgttatcttcagcaaactaatagaggaacagaaaacaaaacaacacatgttctcacttataagtgggcgctgaatgatgaga

SEQ ID NO: 900542 - DNA, 120 bp, Artificial Sequence
  ENSG00000235660_13 (sequence is synthesized)
tcacatggacacatggcagggaagaaaacacactgaggcctgttgcggggagggcctgatggggggagggagagcatcaggaagaacagataatggatgctgggcttaataccaaggtga

SEQ ID NO: 900543 - DNA, 78 bp, Artificial Sequence
  ENSG00000235660_14 (sequence is synthesized)
aatgtaacaaaactgcacatcctgcacatgtactccagaacttaaaataaaagttgaaggaaacaaaaacaaaaatga

SEQ ID NO: 900544 - DNA, 120 bp, Artificial Sequence
  ENSG00000235661_0 (sequence is synthesized)
acttgctgataacaacacagaaataacaagggcagactttctgcagtgtctcctgagcaattggttgtcattgtcctaaacagagcagctaggttaaaaagatttatccataatgtaacc

SEQ ID NO: 900545 - DNA, 120 bp, Artificial Sequence
  ENSG00000235661_1 (sequence is synthesized)
tcctggccctcagctatgggtggaagcagcactttctggtttgacctcctaataccacaaactccactttgccagaaaagtgacttcttgatgaatagtctgttcagataggccaatttg

SEQ ID NO: 900546 - DNA, 120 bp, Artificial Sequence
  ENSG00000235661_2 (sequence is synthesized)
gagtatattcatatttggccacctgctggagcgtcaatgaccaagaggagaccagatgagttttcaaagcagtcctcaaacacccaggacacacctcatcctttacctcgtgctttctgc

SEQ ID NO: 900547 - DNA, 120 bp, Artificial Sequence
  ENSG00000235661_3 (sequence is synthesized)
accaccatcattcctccatccaccaccaactcagctccttctctaaagtgccctctaatgggcagtggctttggtctctgtttggcaaattatgtccagagggttaacattaatttctct

SEQ ID NO: 900548 - DNA, 120 bp, Artificial Sequence
  ENSG00000235661_4 (sequence is synthesized)
ttctcctattcctccctcatgctagattcagtccatcactcagcctcctgtcaggaaaaccatagcaaatcctactttctgctaaaatgaagttacaagacacttttccagagtagtcac

SEQ ID NO: 900549 - DNA, 120 bp, Artificial Sequence
  ENSG00000235661_5 (sequence is synthesized)
actcaatgaagggacccagggtgtatctgagtgtgatgtaattgaaaccacatggaaagactagaaataccttgctcccagtcagatatagtgaaacagcttactcaagactggactaag

SEQ ID NO: 900550 - DNA, 120 bp, Artificial Sequence
  ENSG00000235661_6 (sequence is synthesized)
atttagaatataggggggctagggaggagaaagagaaagatcctcagaagtggattgtccctgaatacaggatgaaatcatctagatttttttctccaattaaatttgcatttcattcaa

SEQ ID NO: 900551 - DNA, 120 bp, Artificial Sequence
  ENSG00000261195_0 (sequence is synthesized)
gtgtttctgttcctgtggagtgcagctgaaatgaccgctactgctccttcacagtatatttacatgagcttcctgtggacatcagcaccatttaaaattaaggctggaacacagatgtgg

SEQ ID NO: 900552 - DNA, 120 bp, Artificial Sequence
  ENSG00000261195_1 (sequence is synthesized)
ggctggaagtggagcagccccttttagccatgaggcccaaagccacatgctaaggatggtgaagcaggggatagaaagagcctgtgtctttgctgacttccttaagccacggcaccagcc

SEQ ID NO: 900553 - DNA, 120 bp, Artificial Sequence
  ENSG00000261195_2 (sequence is synthesized)
ttcaatacaggcagctgaatgcgcccctaagggatagatacctagtaaaccacaagggaaaagacatcccagagtaatggggagaagataagctgagcctgccaatggggtggagcacca

SEQ ID NO: 900554 - DNA, 120 bp, Artificial Sequence
  ENSG00000261195_3 (sequence is synthesized)
gatatcctgtcttctatttccatttcaagtttgttcttgtaacccaaagaataccagtaaacttcttttagagaattgttatggaaatcgggtgataaaatctctgtcttcttttaaaat

SEQ ID NO: 900555 - DNA, 120 bp, Artificial Sequence
  ENSG00000261195_4 (sequence is synthesized)
gaggtgttcgttgccatgtggagagatccttcccaagaagaaagatgctacaaagtgtcctggaaatcctctttgcccatccagatccaccctccctagcctgctctgtacctcaggaag

SEQ ID NO: 900556 - DNA, 120 bp, Artificial Sequence
  ENSG00000261195_5 (sequence is synthesized)
ctgcttttcatggttcacataaaccaggctcctgtaccctccagataggtccatcctatgggtggtaccagcaggagaccagagagatgaaggagggaaaaaaagaacattaggggttga

SEQ ID NO: 900557 - DNA, 120 bp, Artificial Sequence
  ENSG00000261195_6 (sequence is synthesized)
gaacattaggggttgaattgtatcaccccaaaattcatatggtgaagtataaccccttcggaatgtaaccttattggaaatgtcagaggcacgtgaaccagagcaactccatcttgaata

SEQ ID NO: 900558 - DNA, 120 bp, Artificial Sequence
  ENSG00000261194_0 (sequence is synthesized)
cccttccttcaggtgaaagcagtgaatgttggttcttggtttgttgaaaagggtactgcctagacacaggaagtccccagatctgagagtcggctatgcagcagccatttcagatccgag

SEQ ID NO: 900559 - DNA, 120 bp, Artificial Sequence
  ENSG00000261194_1 (sequence is synthesized)
agtcagccatgcagcagccatttcagatccgagagtcggccatgcactagccatttcggatctgagagagtcgggcatgcagcagccattttggatctgagagagtcggccatgcagcag

SEQ ID NO: 900560 - DNA, 120 bp, Artificial Sequence
  ENSG00000261194_2 (sequence is synthesized)
ccattttggatctgagagagtccgccatgcagcagccattttggatctgagagagtcggccatgcagcagccattttggatctgagagtcagccatgcagctgccattttggatctgaga

SEQ ID NO: 900561 - DNA, 120 bp, Artificial Sequence
  ENSG00000261194_3 (sequence is synthesized)
gagtcggccatgcagcagccatttcggatccgagagtcggccatgcagcagccattttggatctgagagagtcggccatgcagcagccattttggatctgagagtcagccatgcagctgc

SEQ ID NO: 900562 - DNA, 120 bp, Artificial Sequence
  ENSG00000261194_4 (sequence is synthesized)
cattttggatctgagagagttggccatgcagcagcgtttcggatccgagagctggccatgcagcagccattaaggatccaagagtcggtcatgtagcagccatttcggatctgagagagt

SEQ ID NO: 900563 - DNA, 120 bp, Artificial Sequence
  ENSG00000261194_5 (sequence is synthesized)
cggccatgcagcagccgtttgggatctgagagtcggccatgcagcagccgtttgggatctgagagagtcggccatgcagcagccatttgtgcatgcttcccttctcccagccccacagga

SEQ ID NO: 900564 - DNA, 120 bp, Artificial Sequence
  ENSG00000261194_6 (sequence is synthesized)
gactgactctgcatcctgcctcctttcaaatgcatcctgtgccaacagtttctgaaaacggataaacaaattgacaacctcaaatgcaaagatgaaacatttctccagatcatcaggcac

SEQ ID NO: 900565 - DNA, 120 bp, Artificial Sequence
  ENSG00000261194_7 (sequence is synthesized)
atggtttactcaggcccagaggagtgagctgatataaagaagctgtgccacacagtcggatggggtccgaaggaaacaatagggctgagtgatgagtattgaagaagaaatctaaagaaa

SEQ ID NO: 900566 - DNA, 120 bp, Artificial Sequence
  ENSG00000261194_8 (sequence is synthesized)
gaatgtcttatcagctgaccgcaaagctgcctccttctacctggccacattgcttatctattgtactgcgtctctcttggatggaaacgatacaccaatcactcataagtgaataatttc

SEQ ID NO: 900567 - DNA, 120 bp, Artificial Sequence
  ENSG00000261194_9 (sequence is synthesized)
cttctaaatcacaggcctacacctgaggtggctgccacaggtgtaacctgtttagaccagcaattatatttactccatgatgacagaaaacaggaaagatgtatcatacagtgcatttgc

SEQ ID NO: 900568 - DNA, 120 bp, Artificial Sequence
  ENSG00000261194_10 (sequence is synthesized)
gctatttataaatagacctctttacattagcactacatatgactgtctcatccacttatcagcaatttaatatatcacagacaacatgggttaaaagcaaaataagtttcaaacactaac

SEQ ID NO: 900569 - DNA, 120 bp, Artificial Sequence
  ENSG00000261194_11 (sequence is synthesized)
ctcagtttactcataaatatttcacttctacaaaccttgtttattcaagctatggttctatacaaattggcaagtcattctttattttacttttctgtggttctagacccttctagacta

SEQ ID NO: 900570 - DNA, 120 bp, Artificial Sequence
  ENSG00000261194_12 (sequence is synthesized)
aagatctctgactttactgctgccttttctagatgttttcctgagtacacatgtgagcttattgttaacatcagtctctttccctttaagaactggtttttttctgatggctgtggtcta

SEQ ID NO: 900571 - DNA, 120 bp, Artificial Sequence
  ENSG00000261194_13 (sequence is synthesized)
agagagctcactctggatttctctctgttagttttctaacataacccacagtgataaatctattttatgttgggaataagggaatatttatacgtaaagtcaaacaaaattgaagtttac

SEQ ID NO: 900572 - DNA, 120 bp, Artificial Sequence
  ENSG00000261194_14 (sequence is synthesized)
ttatgcttttttgcactttgatattttctatatattctgccatgttccctaatattctctgttattctattttatttttaagaaaatgattggtctctaccctcacaatgattctgcaat

SEQ ID NO: 900573 - DNA, 120 bp, Artificial Sequence
  ENSG00000261194_15 (sequence is synthesized)
ccactgtgggaacatgacgcacagcctcgagccactgtgggagcttcctcatcagaagggaggggtaccagggggtgtggtgatgtggccctaggtgcgggaatttccaaaagggaagct

SEQ ID NO: 900574 - DNA, 120 bp, Artificial Sequence
  ENSG00000261194_16 (sequence is synthesized)
ctggtagcagcctctcatctatagtatcatattttcagtgtcatcgtaacgcagagaagtagaagattcaagactttggaaaacagccattttctctcaattacaagaataataacagta

SEQ ID NO: 900575 - DNA, 120 bp, Artificial Sequence
  ENSG00000261194_17 (sequence is synthesized)
tttgaaagatcctaaaagtggtgaagatggagtaagtgtttggtagggaatccctgccctggctgatcattatgtctgccttggctgtacatgtgatcttggtggcatttctggactatc

SEQ ID NO: 900576 - DNA, 120 bp, Artificial Sequence
  ENSG00000261194_18 (sequence is synthesized)
acccagagaggtgggttaagactggttaagaccgcagagtcagaccgcttggagttgaatcctgacaccaccgcattctagctgtgtgactttagaaagtcccttagcctctatgaaatt

SEQ ID NO: 900577 - DNA, 120 bp, Artificial Sequence
  ENSG00000261194_19 (sequence is synthesized)
tagtttgctcaatcagaaaaagagaataatgacactgttcatcttacagaattgttgcaaggattaaataaactatcagatggaaaggacttgtggtgatatctcgcacatggcaatgac

SEQ ID NO: 900578 - DNA, 120 bp, Artificial Sequence
  ENSG00000280224_0 (sequence is synthesized)
aagttggagacccaggaaagccagtagtataatttagtctgatctaaatcagactaaatcaccatcaccataataatcaccaccatcatcatcaccatcaccttaatcaccatcaccatc

SEQ ID NO: 900579 - DNA, 120 bp, Artificial Sequence
  ENSG00000280224_1 (sequence is synthesized)
atcatcaccatcatcactctcattatcactaccatcaccattatcattattccctcattatcatcaacaccatcaccattgttatcaccatcatcatcactatcatcactaccatcacta

SEQ ID NO: 900580 - DNA, 120 bp, Artificial Sequence
  ENSG00000280224_2 (sequence is synthesized)
tcactatcactatcaccatgatcactatcatcatcaccatcatcacccatcatcactattatcaccatcactatcaccaaaaccatgatcatcaccaccatcatgaccatcaccaccatc

SEQ ID NO: 900581 - DNA, 120 bp, Artificial Sequence
  ENSG00000280224_3 (sequence is synthesized)
atcttcaccattaccaccatcatcatcaccatcatcactctcattatcactaccatcaccattattatccccatcaccatcatcaccaccatcgccagtgttatcaccatcatcatcatc

SEQ ID NO: 900582 - DNA, 120 bp, Artificial Sequence
  ENSG00000280224_4 (sequence is synthesized)
ctatcatcaccatcactatcaccatcaccatgattatcaccatcactatcaccataaccacaatgaaccaccatcaccatgaccatcaccataatcatatcaccatcatcatcaccatta

SEQ ID NO: 900583 - DNA, 120 bp, Artificial Sequence
  ENSG00000280224_5 (sequence is synthesized)
tcaccatcaccatcatcaccatcattatcactatcatcaccattatcatcatcaccttcattatcatcatcactgttatcatcactaccatcacgatcaccattatcattatccccatca

SEQ ID NO: 900584 - DNA, 120 bp, Artificial Sequence
  ENSG00000280224_6 (sequence is synthesized)
tcatcaccaccatcaccattgttatcatcatcactatcactataattatcactatcaccatcatcatcatcaccatcaccatgactatcatcactgtcatgatcatcaccatcatctatc

SEQ ID NO: 900585 - DNA, 120 bp, Artificial Sequence
  ENSG00000280224_7 (sequence is synthesized)
atcactatcatcagataatgaattatcttttactgtctgtggacaattatcataggacaagatttctctatcttggcactattgacatctgaggtctggataattctttgttgtgggaag

SEQ ID NO: 900586 - DNA, 120 bp, Artificial Sequence
  ENSG00000280594_0 (sequence is synthesized)
ggctgcgtggataaaacccaaagggaatccagaatcaagctcggcctcgcaggagtttataacttttgtacttttccctcccttgtaacgaaaagctaatcgcaaacgtttctaggaaca

SEQ ID NO: 900587 - DNA, 120 bp, Artificial Sequence
  ENSG00000280594_1 (sequence is synthesized)
catttttctcctgatagacgttcccaaggtggagggcgcgagaagactggcccgtggggtgaggagccccggcccgacctcagcggcgccacaaagccatgaagaggggaaataattttc

SEQ ID NO: 900588 - DNA, 120 bp, Artificial Sequence
  ENSG00000280594_2 (sequence is synthesized)
caaggggctaagagttggactttctgaagccatcgaaacctgctgctaggctctcccgctggggttttgagagaggtaggtgaggagggatcaaacatctccacccgctcttgaaagaac

SEQ ID NO: 900589 - DNA, 120 bp, Artificial Sequence
  ENSG00000280594_3 (sequence is synthesized)
cgccttgagctgcgcccaacttctgcaatcccggttttccccaagttcaaggggaagggccctggcgcccaatgcccagcctccccgacaacatcctcgccagggtgcgcctgccccgcg

SEQ ID NO: 900590 - DNA, 120 bp, Artificial Sequence
  ENSG00000280594_4 (sequence is synthesized)
ggtccgctgtccccggcgggcggccctgggttcgaggacccggcttcccggaggcgcgactctccagcaaacaagcggagctccagaaaaaacaccgacgcgaagggggtggacagaggg

SEQ ID NO: 900591 - DNA, 120 bp, Artificial Sequence
  ENSG00000280594_5 (sequence is synthesized)
tgggaagccgcggggttgtcgcccacccggaggcggaatgtaacgcgctgtgggaaacgtggcaggagccctgaggcggcgtctttttcctcaggcgcccgccgagggtcccgcggaaag

SEQ ID NO: 900592 - DNA, 120 bp, Artificial Sequence
  ENSG00000280594_6 (sequence is synthesized)
gcccgcagccccgctctggcgccgagccggagcccatgcaacctggttccatcccctgcccctcccctgtccccggtgcgccgcccgccagcgagccttcgacgtggccgcaggggcgac

SEQ ID NO: 900593 - DNA, 120 bp, Artificial Sequence
  ENSG00000280594_7 (sequence is synthesized)
gacgtggccgcaggggcgacgggaccaccctcccccgatacccacagccccgccatgtctgcctttccccggcccggtctcctcaccgccgctgccgccgccgctcttcggccggagatt

SEQ ID NO: 900594 - DNA, 120 bp, Artificial Sequence
  ENSG00000280594_8 (sequence is synthesized)
cggcggcccagaccgtgtcctggccgggaactgagggctccgcctcaacgggcccgcgctgggcaacagggagcgcagcgagcctcgtccggcgcgtgcggctcccgcgtcgtcgggcgg

SEQ ID NO: 900595 - DNA, 120 bp, Artificial Sequence
  ENSG00000280594_9 (sequence is synthesized)
gagtgagcgcagccccaaagcggcgcgcagggggctcgcggcccggaagaggggaggggcgatgacccgggaaagggttggcgcgcgcgggatcggctcgcgcgcctgaggggcggtgcc

SEQ ID NO: 900596 - DNA, 120 bp, Artificial Sequence
  ENSG00000280594_10 (sequence is synthesized)
cgcgaggccacccccgagccccgggcctagccgcacgggaggcgacacaccctcgccctaccctgagcctggcgcagaccctcgaccgcgacggcgcggtccgcagaaccgcgggcttcc

SEQ ID NO: 900597 - DNA, 120 bp, Artificial Sequence
  ENSG00000280594_11 (sequence is synthesized)
ctccccggcaaaaagcggcgctgaaggcctgtgggacccccgcccggccgccctacgtgcgtcagcgccttcgggggtcgcgcgggcttggtcctttcggctgtctcggcctttttgttt

SEQ ID NO: 900598 - DNA, 120 bp, Artificial Sequence
  ENSG00000280594_12 (sequence is synthesized)
ccccctcaggtctctccacgctgcacttgacaccctcagggcggaatggcgagttctagacccagctctctagacccggggcttcatgggggacacggactcgacgggaaggggaacttg

SEQ ID NO: 900599 - DNA, 120 bp, Artificial Sequence
  ENSG00000280594_13 (sequence is synthesized)
gcatttatggacagatcctcatccttcttgctgtagtcaattacacgcacgttaaccgtgcagccgccctgctgtattttaggcggttgttggcactcctagttgggcccttccctggcc

SEQ ID NO: 900600 - DNA, 120 bp, Artificial Sequence
  ENSG00000280594_14 (sequence is synthesized)
cctcacagcagggcctgcctcctgtggacgcttgtgtgctgccctggcaccggccactgtgttttgcataaaggagaggctccaaagatgttggccaaaggaatgaagccttgagagtcc

SEQ ID NO: 900601 - DNA, 120 bp, Artificial Sequence
  ENSG00000280594_15 (sequence is synthesized)
aggctttctatttctgagacactctactcaaggacttcccagatgcaaagcttcatctttgagcaaatacaaatatggagagggaacattaactttctgaagaaaagaaggaacatcttt

SEQ ID NO: 900602 - DNA, 120 bp, Artificial Sequence
  ENSG00000280594_16 (sequence is synthesized)
tcaaccttttatattgagttaacaccatggtcttagttttgtgaaagcactttaatacatccaactagcgggaggaatacaagatattcctacctttttattattattattaaaagaggg

SEQ ID NO: 900603 - DNA, 120 bp, Artificial Sequence
  ENSG00000280594_17 (sequence is synthesized)
ctaaaccatgttgtaaactacttaagaactgaatgttcaagttgtacagtatattggccagattccttactgcccactaggcttgggagcatgttttcagctcagttttatgaatgtttt

SEQ ID NO: 900604 - DNA, 120 bp, Artificial Sequence
  ENSG00000280594_18 (sequence is synthesized)
aaatttgtattactgatctttgttatagccaattagcaattcaaaatggtaatttttttagcagtaataaatataccatcccccaaacagtacaataaactttatttgtaaaaaaaaaaa

SEQ ID NO: 900605 - DNA, 120 bp, Artificial Sequence
  ENSG00000280594_19 (sequence is synthesized)
tgctaggctctcccgctggggttttgagagaggtaaagaaattgagttccagaagagtaattgacacaattgccccatgtcacacaacacggtggtattgaaagagacaagaaggaaagt

SEQ ID NO: 900606 - DNA, 120 bp, Artificial Sequence
  ENSG00000280594_20 (sequence is synthesized)
ttcctaacttcaaactttgtgctttctccactatcccgtgagagaatttggactggctacaagcaaggggcacagggagagctctccctgaagttctgactgagggaattccttccaaaa

SEQ ID NO: 900607 - DNA, 120 bp, Artificial Sequence
  ENSG00000266088_0 (sequence is synthesized)
cattcctcagctttctctttccagaacaggattatgaaccgacaccatacagaggtatttgtaagaaagaaggtggatgccggaatcctttcttcaaacagaagcttaccagtaagtgca

SEQ ID NO: 900608 - DNA, 120 bp, Artificial Sequence
  ENSG00000266088_1 (sequence is synthesized)
gactaatacaacaggtaggtcaaggctaatccagttggagggggtgctgctataggactgggtgcaggggaaatatgaggattccctttaaggaatccctctccaccagagggacaggtg

SEQ ID NO: 900609 - DNA, 120 bp, Artificial Sequence
  ENSG00000266088_2 (sequence is synthesized)
tgtgcaaagctctctttgttgcagagagattggaactacagcaaaggtatgaacaggtgtcacggggacacagaagaaagagcagttactcttccggaaggttggagaagattttgtgaa

SEQ ID NO: 900610 - DNA, 120 bp, Artificial Sequence
  ENSG00000266088_3 (sequence is synthesized)
ggtggggatgtttgatttgaaccttgaagaacaagcagagacccaagaagtacagaagaggggaggtggaaatagcatgaacgaggtggggcatgcaaattcactttcaattgatacaat

SEQ ID NO: 900611 - DNA, 120 bp, Artificial Sequence
  ENSG00000266088_4 (sequence is synthesized)
ggtattgaatgaattgaaggctctgttaagggggcaactatctcccctccccattctcctatcagcccataaaacaggaactgacaacctcttggaagaattgggaaggaacttttcgat

SEQ ID NO: 900612 - DNA, 120 bp, Artificial Sequence
  ENSG00000266088_5 (sequence is synthesized)
tttctctgtacaatcttcactggttcctctctgtgagaggaggagggacctcttggattggtgtcgttgggaaaagggtatcaagtgtgcatggctcagcctgttcctggctctctctct

SEQ ID NO: 900613 - DNA, 120 bp, Artificial Sequence
  ENSG00000266088_6 (sequence is synthesized)
gggactgacctgactgcaagcagcatgttctctgtctgctcctgcctcctccaggcaatgagcaccagggcgggtccagcccttgcttgggaggacttcaatagtccagctgctctgccg

SEQ ID NO: 900614 - DNA, 120 bp, Artificial Sequence
  ENSG00000266088_7 (sequence is synthesized)
cgagtgggtgagtgagttcaagtcagaggagaagacacagaaagctcatttgggccttgggtcttagccacatcctccagtccatctggactagcaataaagctgacattttaatcccta

SEQ ID NO: 900615 - DNA, 120 bp, Artificial Sequence
  ENSG00000266088_8 (sequence is synthesized)
gttaagagggcaaatcaaagacactttaagatacatgaggactgaggaagtttacttcctatagactccttgtggtaatgctcctagaaaaaaagacagcaatagaggatgtgcagcagt

SEQ ID NO: 900616 - DNA, 120 bp, Artificial Sequence
  ENSG00000266088_9 (sequence is synthesized)
aaaacaaaggagaaaccaagaatgagaaaagcatggaatttttgtcagcttataagttagcttgcaaattcactttcaattgatacaatctttcacgtcagagctgcttcttgtaacaca

SEQ ID NO: 900617 - DNA, 120 bp, Artificial Sequence
  ENSG00000266088_10 (sequence is synthesized)
tgctgttaccgaaaaataccagcccacttcctgtggctttgatctgcagccttaattctaaactgccctgcctcagccaacagctatctgcagctcatttcctgctttctggccatctta

SEQ ID NO: 900618 - DNA, 120 bp, Artificial Sequence
  ENSG00000261738_0 (sequence is synthesized)
ctctttctgattgagtgtaagctgctatatgaagggatccacaagacgaataattaagggggacctctgatcaacagccagcaaggaactgaatccctcagacccacaactcacaagaaa

SEQ ID NO: 900619 - DNA, 120 bp, Artificial Sequence
  ENSG00000261738_1 (sequence is synthesized)
ctgaagctgaagcagattcttcctcagtcaagcttcaggtgcccagctgtattggtagaggagaccaaccacaccctccacagcacagcacctggagaggaactgctgccatgaccatag

SEQ ID NO: 900620 - DNA, 120 bp, Artificial Sequence
  ENSG00000261738_2 (sequence is synthesized)
aggacaccctctggatacaatgccagacttgatgtgggactgaccaacctatggaccccaggcaccaccacccagacctgctcagcacctgaaagggacctctgacccaagagttcggtc

SEQ ID NO: 900621 - DNA, 120 bp, Artificial Sequence
  ENSG00000261738_3 (sequence is synthesized)
aatgcatatgttggcagccagctgcacatcgcaccaaatatgaacttcaaatagaagaaagcctcatttggaagaaagctcatgcacagactgtaaatatttcagagcagattgtgtctc

SEQ ID NO: 900622 - DNA, 120 bp, Artificial Sequence
  ENSG00000261738_4 (sequence is synthesized)
gattaacatcaattttgcagcagccatggcttgtcctatgagagatgattctaccacaagaacccaaccacaaggacggctcctctttgaagtttttacagtcgatctctggatcagcca

SEQ ID NO: 900623 - DNA, 120 bp, Artificial Sequence
  ENSG00000261738_5 (sequence is synthesized)
gcgaagtcctgctcccaggatccagggagagaccatgggtgccctctagggcatggtacaaagggaggatttgttccagtagagaatagaataggccttttctttcaccttttggtttcc

SEQ ID NO: 900624 - DNA, 120 bp, Artificial Sequence
  ENSG00000261738_6 (sequence is synthesized)
aggtgctgaactacatgtaggagtcttggtagtaaaaccaagcttaatggttattgaaatagaactaccagagaggtggtagaagcacatgttttgtacaagttggttaactgccagcag

SEQ ID NO: 900625 - DNA, 120 bp, Artificial Sequence
  ENSG00000261738_7 (sequence is synthesized)
ctttgaatcgtgtaactgcttacaaaaaatttcacatggtccaggaataagaggaaacaaatgtatgaaaaacaaattcccagatacttacatttaaaataaaaagcaaactaacaataa

SEQ ID NO: 900626 - DNA, 120 bp, Artificial Sequence
  ENSG00000261738_8 (sequence is synthesized)
cagattcttcctcagtcaagcttcagaaagaaatcatgagtgaccactcagctcaaggcttctctgctgatgccatccagtgagtttcctggcagccatctttttatgaaagaatagagg

SEQ ID NO: 900627 - DNA, 120 bp, Artificial Sequence
  ENSG00000261738_9 (sequence is synthesized)
tcagcctgactgcacttccagatgattagagccacatcaggaagcagtaagtggcagggccatctcaaggaagagccaccagtctccagggagtttaggtcttagatgtgaagcctcaag

SEQ ID NO: 900628 - DNA, 120 bp, Artificial Sequence
  ENSG00000261738_10 (sequence is synthesized)
taatttgcagagattgtcttgcctgtataacacaccctgttgttgcttttatacagccaaactgacaggggtttgtgaatcagaatgatggctttgcattttagcttagggaaggacctg

SEQ ID NO: 900629 - DNA, 120 bp, Artificial Sequence
  ENSG00000261738_11 (sequence is synthesized)
actgcaatgttttcaagagagaaggggtgtgatcagagctgcactgcggaggctttactgaaggaagaacagggacagggtttgtctggtatgattagggactaggatggtgtacgtgga

SEQ ID NO: 900630 - DNA, 120 bp, Artificial Sequence
  ENSG00000261738_12 (sequence is synthesized)
acaactcctggtaagaccagggttgaagtgagaagtggaattgacacagagagcaggggcccgccctatccaagaggcagcagaatgcggggactgacagcaaacaagaacacatcagtg

SEQ ID NO: 900631 - DNA, 120 bp, Artificial Sequence
  ENSG00000261738_13 (sequence is synthesized)
gagtagaaaaggaaagtgtagaagagaggaaaaacaacgtggaagtgttctgatgggacggaagaagatcgggccaaggaaagaagaatgttgtgaagatgcaagcagccaatttgtgct

SEQ ID NO: 900632 - DNA, 120 bp, Artificial Sequence
  ENSG00000261738_14 (sequence is synthesized)
acatctctgagtttctatctgtcatttttcctttctatctgtcattttacctttcatacttataaaatggaattcataatcttctcagcctaccaagtgttagtgttctagggattcaga

SEQ ID NO: 900633 - DNA, 120 bp, Artificial Sequence
  ENSG00000261738_15 (sequence is synthesized)
taaaatatgtatgaaattactttgaattacctaaaacatgacatttattcattcaacaagtatttgttgaacatatacgtccttcctggtgctgtgtcaggtgctggtgaatatagctgt

SEQ ID NO: 900634 - DNA, 120 bp, Artificial Sequence
  ENSG00000261738_16 (sequence is synthesized)
ggtcatggcagactttacctctgctttcataactgtaacatgaaagtgttgctaccacagtcatgttattagaacgactactttaacatcgactactaatataaaatttgtagatgttta

SEQ ID NO: 900635 - DNA, 120 bp, Artificial Sequence
  ENSG00000261738_17 (sequence is synthesized)
aatgaaatcattatttgtgtaaccattaatatcctgtgtaatgttataatatttggggcacctttgtaattgttaaatgatttatttcattcccaggtgagtttgtagaaaataatacaa

SEQ ID NO: 900636 - DNA, 120 bp, Artificial Sequence
  ENSG00000261738_18 (sequence is synthesized)
tcactctcaattccattagtgtttttactttcagtttgattcacattgctcatcccagtctgacgtaagtcatcacctacaagaaccagacaaggaaaaacagaacaaacttgaaagaaa

SEQ ID NO: 900637 - DNA, 120 bp, Artificial Sequence
  ENSG00000261738_19 (sequence is synthesized)
ttcattttcttttagtaaagtactttataagaaaaacaatgaagggcagggaattagaatctactcaagcatctgctgtattctagacattttatgtccatcgtctccttcacacacctt

SEQ ID NO: 900638 - DNA, 120 bp, Artificial Sequence
  ENSG00000261738_20 (sequence is synthesized)
ggcactccacaatgcagaggttactatccccaatttgtagatggaggatgagaggcattgagagatgaagtgacttttcagactcagtcagttgctctctaaagccaatgctctttccac

SEQ ID NO: 900639 - DNA, 120 bp, Artificial Sequence
  ENSG00000261738_21 (sequence is synthesized)
tgtacctaacaattttgttgtatcaatctgtttaactacaacatgatattatttaatgtgactcagttcatatgctattggtcagtagggaattgatgtgaattttgttggtcttgtcag

SEQ ID NO: 900640 - DNA, 120 bp, Artificial Sequence
  ENSG00000261738_22 (sequence is synthesized)
caaacagtttatttttccagtatgacaatgttgtgacaagatcagaagccagctttctcaccattaaatcaaagtcttatcaatatatggagacttttatggaaagaaacctgaaattac

SEQ ID NO: 900641 - DNA, 120 bp, Artificial Sequence
  ENSG00000261738_23 (sequence is synthesized)
gcagaaatgccttccgcaagaagtggctagtatggtggcttcaagaacagtgacatttttcagtatgtccgttgttctaagacgttagtacatcacaattacctagaaaacttgttaaaa

SEQ ID NO: 900642 - DNA, 120 bp, Artificial Sequence
  ENSG00000261738_24 (sequence is synthesized)
cacagaagtctgggctccccctcttggccaacccccattcccagagggtttctgtttccatgggtctgaaataccacctaacgattggcatttctaacaaatttctgcatgaagctgctg

SEQ ID NO: 900643 - DNA, 120 bp, Artificial Sequence
  ENSG00000261738_25 (sequence is synthesized)
gtctgaggaccacactttgacaaccagtgcactacattaagctatctggagaagctgcaaatgcagatgaagaagctacaaatttttctatgtcaacaaaaattgactgatgagggtgac

SEQ ID NO: 900644 - DNA, 120 bp, Artificial Sequence
  ENSG00000261738_26 (sequence is synthesized)
cttcggatcatgtttttaatgtttatgaaactggtctcattatcagaagtaaatggcttcaagaacttcagcctgaggaagaaaacatgagtcctaggcatatcaggctacaaccatgtt

SEQ ID NO: 900645 - DNA, 120 bp, Artificial Sequence
  ENSG00000261738_27 (sequence is synthesized)
tggaatgaatctaggtgcaaatctcagtggagaattaactgtaccaatattttaattaggattactaatgttttgttacttcctgattacaaggttctataggttttgaatgatccactg

SEQ ID NO: 900646 - DNA, 120 bp, Artificial Sequence
  ENSG00000261738_28 (sequence is synthesized)
taatcctgtttcttttccataagtcgtgtagtttttagcatgtaattatgcagaccataaggtttttcaggaatactaatatggcattagattagaaatgctatattaaaaattcttatt

SEQ ID NO: 900647 - DNA, 120 bp, Artificial Sequence
  ENSG00000261738_29 (sequence is synthesized)
aaatctactgatagtaaccaaaaaatagaagattcagaagaactagcaaatgtggagagaacggatgaaatggaagcagtgtgaacctagtgaatacttgccaagctgtatctcccctga

SEQ ID NO: 900648 - DNA, 120 bp, Artificial Sequence
  ENSG00000261738_30 (sequence is synthesized)
atttgtcaaaacatcatctccagcatctgagctagaccaaccctcagtgctaacattgatgtgattaaagagtctgaactgggagcagaattccttcaggtattttgttaataaaataaa

SEQ ID NO: 900649 - DNA, 120 bp, Artificial Sequence
  ENSG00000261738_31 (sequence is synthesized)
tcagcacctgaaacattcacagccgtggagagagaactgttcactgctaccatccacacttctgggccccttcagcagcagggtgacaaggaagagggaaatcgacttggaaaagagggg

SEQ ID NO: 900650 - DNA, 120 bp, Artificial Sequence
  ENSG00000261738_32 (sequence is synthesized)
gaagctgaagcagattcttcctcagtcaagcttcagtggacgtgtgaaatcatgagttggatggacaaaatcactttctcatatgcttgagagatgtaaacggacctttcagatccagag

SEQ ID NO: 900651 - DNA, 120 bp, Artificial Sequence
  ENSG00000261738_33 (sequence is synthesized)
acagatctatcaaagtcatatttccgacacctgccactggtttcccttgcttttataacccaacagataatggggccatgtttaaaaggaatgggggtgatggtatagattcaggatcta

SEQ ID NO: 900652 - DNA, 120 bp, Artificial Sequence
  ENSG00000261738_34 (sequence is synthesized)
tcgttataatatctgtgttaacctgagtgttaggaatgggtcaccaggggagtttctgatatagcctgagaatgatgaagatgctggaaaaccggccccgtcacacaccaatgaagcacg

SEQ ID NO: 900653 - DNA, 120 bp, Artificial Sequence
  ENSG00000261738_35 (sequence is synthesized)
aatagctgtgcccatctctcagacaactggctgatgtcggcagcaggaactgaactgaacaaacagggaggagagtgactttgcttctcatcaaaggttacagaatgaagcctgcagctc

SEQ ID NO: 900654 - DNA, 120 bp, Artificial Sequence
  ENSG00000261738_36 (sequence is synthesized)
agctttccatgaagtcatctttatggatttggggttctgtggaactgattagtagctttaaatccccacttggctttgtctttgtaagaagaaaatacctaattgtgtctcagattcaca

SEQ ID NO: 900655 - DNA, 120 bp, Artificial Sequence
  ENSG00000261738_37 (sequence is synthesized)
gtgcacaagtgtgcacaccacacacatacagggcagggctggccacgcttttccacaaatccagtttccgaagaagaataatgagatgctccacggtcccctcagaagaagggttgctaa

SEQ ID NO: 900656 - DNA, 120 bp, Artificial Sequence
  ENSG00000261738_38 (sequence is synthesized)
aaagcaacaagactctagtgagtgaagtctctgagctggtgctgatctcggggaaggcgaatgtggatgaaagaacagggcattaaggcacagacacagagggaagaccttgtggaggct

SEQ ID NO: 900657 - DNA, 120 bp, Artificial Sequence
  ENSG00000261738_39 (sequence is synthesized)
tggaggaagacagccatctactatccaaagacagagacatcaggatgtaaccaaccctacaacaccttgatctgggacttccacccagcctgtggtgctggtcatgccagcctgagcaga

SEQ ID NO: 900658 - DNA, 120 bp, Artificial Sequence
  ENSG00000261738_40 (sequence is synthesized)
ctgtcacagccggcttttcctgactcccctttacagagggctcctacccttcctgccactccacagggctatagaaagattttttaaagatctatatgaagaataagaagttagtccctt

SEQ ID NO: 900659 - DNA, 120 bp, Artificial Sequence
  ENSG00000261738_41 (sequence is synthesized)
tcggacaaaaatcttcagtaaaattgatctgtgccccaggcacacaaagaagcaggaatctgggtattctcactgtcaatattccatatgtctagcccctggaaacctaaaacaagacca

SEQ ID NO: 900660 - DNA, 120 bp, Artificial Sequence
  ENSG00000261738_42 (sequence is synthesized)
gagaataccaaggaaggcagattatttggaagacatggatgccaaagtgcttctcaatccagtctcagaagccagagatgtcagtgggtgctgctgttttatttcctgtgaatcggagga

SEQ ID NO: 900661 - DNA, 120 bp, Artificial Sequence
  ENSG00000261738_43 (sequence is synthesized)
caatacctgagcttctgccagtttgaacaattataatggaggaaggagatgagggattagaaaaaacaaagctgacagatggcaatttgtgaagagttgaatcaacataaattatatctc

SEQ ID NO: 900662 - DNA, 120 bp, Artificial Sequence
  ENSG00000261738_44 (sequence is synthesized)
atcagtgagcagaggaaagagaggatgttttccagtgttcggctaaccactgagatggtgaacatgccagaggcacagcaagcaaaccactgggcaccctccagatctggatgcaagcac

SEQ ID NO: 900663 - DNA, 120 bp, Artificial Sequence
  ENSG00000261738_45 (sequence is synthesized)
agagctggagaaataccctttattggaaagccatatggattgcaaattgtggatagacatctatttgaaacaatacaataaatgaacatctgggattttggtaggtgtcagtcatagact

SEQ ID NO: 900664 - DNA, 120 bp, Artificial Sequence
  ENSG00000261738_46 (sequence is synthesized)
acagaaaaccagaacaaaattgctcataactaaatatgataatgcagaaagtatccaagactcgccagttcaaaacccacatttttaatagtgtatatggttaagtgtaaatgttttttt

SEQ ID NO: 900665 - DNA, 120 bp, Artificial Sequence
  ENSG00000261738_47 (sequence is synthesized)
ctgaggttagaaacagttcactgaaatcatataaaatgttcaagttatcaatttttttctgtagccttaaattttcattctttgaaattaagtaattaaacattaatgttaactttccaa

SEQ ID NO: 900666 - DNA, 120 bp, Artificial Sequence
  ENSG00000261738_48 (sequence is synthesized)
acttttgtaactatcaagggaaatagaaaagtcagcttgtcagactcaatacattgtaataacatataatataaaataacatagatatggatacacataaaaaattactttaagtcatga

SEQ ID NO: 900667 - DNA, 120 bp, Artificial Sequence
  ENSG00000261738_49 (sequence is synthesized)
ctgaagctgaagcagattcttcctcagtcaagcttcagctcatctcacacctggaagtctacatgaatgaactttccaccccactaataacctgatgaaacaagtgcaggtcaaaggaga

SEQ ID NO: 900668 - DNA, 120 bp, Artificial Sequence
  ENSG00000261738_50 (sequence is synthesized)
cccgttagctgagttccacagcccagtcaacaggagctcaacagtaagaatgagcaaagcgtgcaagttcttcagggaagtttacccaaacctgctgggcagctcaattatccctatctc

SEQ ID NO: 900669 - DNA, 120 bp, Artificial Sequence
  ENSG00000261738_51 (sequence is synthesized)
atatccactgggaattccaaggagctggtcctcaaaacatgccaggaggtacactaaggacctgctttgcagaaaggatctcattgagaatagcaaaaggaagttgggaaccattacagt

SEQ ID NO: 900670 - DNA, 120 bp, Artificial Sequence
  ENSG00000261738_52 (sequence is synthesized)
aagagttccatggcagaggcagcagcctagttcccctctatgtcttattatagcttcaagctcttgaaacttcaggagaaaaaaaaatatgtaagaatctccatcctaatggataagact

SEQ ID NO: 900671 - DNA, 120 bp, Artificial Sequence
  ENSG00000261738_53 (sequence is synthesized)
tctttcttcactttggtttccaatggaccctacttgactgctataacaatggcttttaagtcaagtctgaaggaagcaactgatccttcagaaagatgatggcactggtgtggagaaaag

SEQ ID NO: 900672 - DNA, 120 bp, Artificial Sequence
  ENSG00000261738_54 (sequence is synthesized)
ggaaagattatatactgaaggtggagatgtaaatgatacagcctgtatggaaaacaggatggaggtttctcgaagaactaaaaataaaactacacttcaatccagcaatcccactactgg

SEQ ID NO: 900673 - DNA, 120 bp, Artificial Sequence
  ENSG00000261738_55 (sequence is synthesized)
ctatttaaccaaagggaaaaacagttatataaaaaagatgcctgcacttgtgtgtttatcactgcataatttacaataacaaagatatggaatccacccaagtgtaagtgtccatcagca

SEQ ID NO: 900674 - DNA, 120 bp, Artificial Sequence
  ENSG00000261738_56 (sequence is synthesized)
cgtgattagataaaatgaacgtggtacgtatacaccatggaatactactcagccatcaaaaaaagtgaaatcatatcttttgcagcaacatggatggaactggtagccattgtcttaaag

SEQ ID NO: 900675 - DNA, 120 bp, Artificial Sequence
  ENSG00000261738_57 (sequence is synthesized)
taaatgtgaaggcaatggggattggcataggaataatggaaaacaaagttgatggttcacttcttcatctgaggaggctcactttgtggtcctgcagccagcaataaggaaaacaatgga

SEQ ID NO: 900676 - DNA, 120 bp, Artificial Sequence
  ENSG00000261738_58 (sequence is synthesized)
tgtggtcctgcagccagcaataaggaaaacaatggaagagcatagtggtgatttgctagtaaaaacatagctcctgagttaagtgtggtgacttacacctgtaatctcagtactttggga

SEQ ID NO: 900677 - DNA, 120 bp, Artificial Sequence
  ENSG00000261738_59 (sequence is synthesized)
agaattgcttgaggccaggcatttgagactgccatgtgcagcataatgagaccctatatctacaaaaattaaaaataaaaacattagccaagaatggtggcacacacctgtagtcccagc

SEQ ID NO: 900678 - DNA, 120 bp, Artificial Sequence
  ENSG00000261738_60 (sequence is synthesized)
gatcattggaacccaggaggtggaggctacagtgagtcatgatcatgccactaccctttagcctggacaacagaacgagaccaccatctcaaaaaatagataaataaaaataaaaataca

SEQ ID NO: 900679 - DNA, 120 bp, Artificial Sequence
  ENSG00000261738_61 (sequence is synthesized)
tccactactctccatttccaccacactctttctcctggtccatgtccttagtctccacgttggtctccgttttgttcactcttgccatcttccacacagcagccagttatcttttaaaaa

SEQ ID NO: 900680 - DNA, 120 bp, Artificial Sequence
  ENSG00000261738_62 (sequence is synthesized)
tacggctccgtttcactcactctccttcaaaggcttcccattgctcttagcataaaatccaaaatcttttaaatgtctgatgagtaatgtggacacatactttgttatctcaacagaggt

SEQ ID NO: 900681 - DNA, 120 bp, Artificial Sequence
  ENSG00000261738_63 (sequence is synthesized)
accttgagagagaaagggggcatcattgctgggactctctggggcacactgggctgggtggtccccccagggccttctgtgaccttgccccatctacctttccactttcttttgcttctc

SEQ ID NO: 900682 - DNA, 120 bp, Artificial Sequence
  ENSG00000261738_64 (sequence is synthesized)
cccgtaccagcaccactcatgatgctctaacaacattggccttctttctgttcctcaaatgtccaattgtctctgactgtagagcatctgcacatactgctcttcctgcctggaacactt

SEQ ID NO: 900683 - DNA, 120 bp, Artificial Sequence
  ENSG00000261738_65 (sequence is synthesized)
gtgctcctctcaggccagattctactcagcctcaggatgtgcttctgatccacagtgcaaactttctgatagcccaatctaacttaagtgtcctgttacaatctctcatggagcccttta

SEQ ID NO: 900684 - DNA, 120 bp, Artificial Sequence
  ENSG00000261738_66 (sequence is synthesized)
tttttttctctatagtagtttcacaattagtaattttgcgtttatttgtagtgttgtctgctgaatgtccatcttctcctctaggtggtgtgctccccaaggcagatattgtatctttgt

SEQ ID NO: 900685 - DNA, 120 bp, Artificial Sequence
  ENSG00000261738_67 (sequence is synthesized)
gttcaaactttactcctatgtcctggcagtatggaatgcacatggcaagcactcaagacacaagaaatatttattgaatgatggattgaataaatatatacctgggtgggtaagaagaga

SEQ ID NO: 900686 - DNA, 120 bp, Artificial Sequence
  ENSG00000261738_68 (sequence is synthesized)
caatacttatcaaaatgcataggatgagggcaatataaatgctatagacttctgctggacctgttcataggcttcagaatttccccaacaatatgtatctgttagcttaggctgagcata

SEQ ID NO: 900687 - DNA, 120 bp, Artificial Sequence
  ENSG00000261738_69 (sequence is synthesized)
ctacagtaacaaacatcctcagactctcagcagctgacacaataacggtttatttattgctcatgttacatgcctattgtaagtcagctgcatgtcttcttcatctgagacccaggctgt

SEQ ID NO: 900688 - DNA, 120 bp, Artificial Sequence
  ENSG00000261738_70 (sequence is synthesized)
tgtaagggtccccattccaacattgcttgtctcttcgcagagagaatgagagcatggccaaggatgagagagttcttgctctgctcagaaggagcacacctcatttctgcttctatttcg

SEQ ID NO: 900689 - DNA, 120 bp, Artificial Sequence
  ENSG00000261738_71 (sequence is synthesized)
ttggtcaaagcaagtaacatgatatcaacagggccaagatgtgtgatcctctcacagggagacatccacgtaaagatgcctatgggaaagggatcaatactttgaaatatcataatacat

SEQ ID NO: 900690 - DNA, 120 bp, Artificial Sequence
  ENSG00000261738_72 (sequence is synthesized)
aggtgttgcatgcttttggtagatgaactaaagggagttttcttgcttgcgtattttggtaaggtctgggagttaaacggaaaatatgactctaattttattcttgggaaaaccagggct

SEQ ID NO: 900691 - DNA, 120 bp, Artificial Sequence
  ENSG00000261738_73 (sequence is synthesized)
ctatgagctgaggcagtaccctgagactaaaaagcactgtgtctgagagagtgagtctccagactagtctgcagctgccttgctcctctgtgggctttaattcccttttcacccatgccc

SEQ ID NO: 900692 - DNA, 120 bp, Artificial Sequence
  ENSG00000261738_74 (sequence is synthesized)
ctgtcttcctctctctgggaagacttgtgattaaaccaacaagcacagatacatctttttcaaaagcaaataaatatcttttggaaaaaatctctcactgccttcaagtgcagtcacagc

SEQ ID NO: 900693 - DNA, 120 bp, Artificial Sequence
  ENSG00000261738_75 (sequence is synthesized)
acaaatttaagcatcaaaacaaactttttgttgtaaatatttactccactgtggacagagacttaggagtccatctgttctacgggattttcattttagtagaattttttgaaaccagat

SEQ ID NO: 900694 - DNA, 120 bp, Artificial Sequence
  ENSG00000261738_76 (sequence is synthesized)
cagcaaatcattgttactattggccacacacagaaatatgttgcttaaacagaactctatgttcaaatggcatctgttatgagccttgagcttgtctacacagagccacagaaggcagca

SEQ ID NO: 900695 - DNA, 120 bp, Artificial Sequence
  ENSG00000261738_77 (sequence is synthesized)
aagataagcggtggtgggaacctgagtcactgaccgtcaatcaagggactgcacctcctggaatactccctgctggttcgtaagctctggaaactcaggtgaaaacagcagatggaactg

SEQ ID NO: 900696 - DNA, 120 bp, Artificial Sequence
  ENSG00000261738_78 (sequence is synthesized)
gtgttgatattaagacactgctgcttccttccaattctttgccaatttctttttctttgccaaatttgtaaatgctcacttttagacgcagaatagcagaggaacaaacctggttatatt

SEQ ID NO: 900697 - DNA, 120 bp, Artificial Sequence
  ENSG00000261738_79 (sequence is synthesized)
ctttctcgctttgcatttgaaaactgtgaccttggcaagctgaagtggctgcatcctaaatctctatttcctcacctgtaaaataagcctaacagtattgtttgaagactaaatgagaga

SEQ ID NO: 900698 - DNA, 120 bp, Artificial Sequence
  ENSG00000261738_80 (sequence is synthesized)
gctcagtgaaacactagcacccttcaaggccgattgtggttggacaatgactcttcatttcccttgaaagaagatgaaagaatcacacattgaggtgcccataaaccacccccaagtact

SEQ ID NO: 900699 - DNA, 120 bp, Artificial Sequence
  ENSG00000261738_81 (sequence is synthesized)
ctttatctatgcaagagagagataaatgcaaatcaggagaaaacccagccttctgtttctagtggagaagttctgtatttaatgccttctacagaccattaacatcccatttttaaaaga

SEQ ID NO: 900700 - DNA, 120 bp, Artificial Sequence
  ENSG00000261738_82 (sequence is synthesized)
aaaagggaggttttactgggtgggttgatcattcactctcctgattcctgccttcaccaagttctccaaaatcaagactctaataagaaatttaactcagccttttttggcgggggtggg

SEQ ID NO: 900701 - DNA, 120 bp, Artificial Sequence
  ENSG00000261738_83 (sequence is synthesized)
acaataattcaattaacatctgctttcttaaaagcaaatgttaaaattgtacctgcagctttgaggcataatcggaacttctctttggaaatgggatgatatttaaagaacagaagtgtg

SEQ ID NO: 900702 - DNA, 120 bp, Artificial Sequence
  ENSG00000261738_84 (sequence is synthesized)
tgaccaggaatggcagggagtgcagctgagacaaagctgggggcatgtgacaaggtaaagagcctcttttaaaatgcctatggtcagcaaatgcacaagagacttatttttccttttgga

SEQ ID NO: 900703 - DNA, 120 bp, Artificial Sequence
  ENSG00000261738_85 (sequence is synthesized)
aatgaggctctgatcttcaattgaatccaagtgcctgcaaccccatttgacttacctctattgtgccaaaaaaataaaattagaattaaaactagatgaatgtaagtgcaaaatagactg

SEQ ID NO: 900704 - DNA, 120 bp, Artificial Sequence
  ENSG00000261738_86 (sequence is synthesized)
aaaaggcaggcattgtgtaatgacaattcagcaagcagtgaaacttcacagtcatgatcaccgaggggaacatcagagtcatgaaatcctgtcaatgttttttgttttttttttttttga

SEQ ID NO: 900705 - DNA, 77 bp, Artificial Sequence
  ENSG00000261738_87 (sequence is synthesized)
tcaattctcctgcctccacctcctgagtagctaggatcacaggtgtgcaccaccacgcctgctaatttttgtatttt

SEQ ID NO: 900706 - DNA, 85 bp, Artificial Sequence
  ENSG00000261738_88 (sequence is synthesized)
caatcaattctcctgcctccacctcctgagtagctaggatcacaggtgtgcaccaccacggacaccatgttggccaggctggtct

SEQ ID NO: 900707 - DNA, 120 bp, Artificial Sequence
  ENSG00000261738_89 (sequence is synthesized)
caaagtgttaggattacaagcgtgagccactgtgctgggaccctctcaatcttttggataagcctgtgccatgccacgcactacctatgaaaatctcagctatttctgaagctttagaga

SEQ ID NO: 900708 - DNA, 120 bp, Artificial Sequence
  ENSG00000261738_90 (sequence is synthesized)
agaagggtaaaatatctccttattttattgaactcttcgttttcagctttatctcaatgttgtgtttactatcagagaaataagttgcattttcaagaaatacccacaggtgggtggttg

SEQ ID NO: 900709 - DNA, 120 bp, Artificial Sequence
  ENSG00000261738_91 (sequence is synthesized)
tttctgtttgggaccagtcccacccaccagggaactgtggtgccagacaggacagaatttccgcattgccatccggttcttatcattagcaaatgagtaaagaaacgggagatcaaagcg

SEQ ID NO: 900710 - DNA, 120 bp, Artificial Sequence
  ENSG00000261738_92 (sequence is synthesized)
aatattcatccagtgctaaatgctttgaagaagactcttcccttgctgaaccccttggtatgaattagctaagtgatgaataaatacaaaatgtctacccgggagcgagagttaaagaaa

SEQ ID NO: 900711 - DNA, 120 bp, Artificial Sequence
  ENSG00000261738_93 (sequence is synthesized)
ttgaacaaaggaggtgcagatggatgtcatgatgactaacgtgcttaagtactcagcttatctgtgatgtcccctgaggtttcttagaactcacaatgactgtttcatatttgtacaaca

SEQ ID NO: 900712 - DNA, 120 bp, Artificial Sequence
  ENSG00000261738_94 (sequence is synthesized)
ccctggagtctcagacaacacatgatctctacctgccacttgcctaattctgttgacagaaactgctttcaatatgactgttgaaatttaaaggtgaaattggctattgaaactcaagat

SEQ ID NO: 900713 - DNA, 120 bp, Artificial Sequence
  ENSG00000261738_95 (sequence is synthesized)
atttaattactttgtttttactttatttgcataaaaacataatattatagttacttgtagtaagtataggttataaatattttatcccaactgttctttttccctccaactgctgaatct

SEQ ID NO: 900714 - DNA, 120 bp, Artificial Sequence
  ENSG00000261738_96 (sequence is synthesized)
agctacctatgtttagtctttacttaggctgctcttgcttccactgttgaggaaattacaccagctttatatccagagaaccttaaacctctcatctttccctgcttcccacactcattc

SEQ ID NO: 900715 - DNA, 120 bp, Artificial Sequence
  ENSG00000261738_97 (sequence is synthesized)
accaccattgtgtccaggaaagacacagtaacattctcccattttctttatacctctttacatatgtagttcttacttcgccttgccctttagaagtctgggtacataatatgtatgttt

SEQ ID NO: 900716 - DNA, 120 bp, Artificial Sequence
  ENSG00000261738_98 (sequence is synthesized)
gtcttcaaagaggcactatgctgtaatagtttatagtacgggttggaaacttttttctgtaaacacccaaattgtaaagattttagacttttcaggccctagtggtaacttctcaattct

SEQ ID NO: 900717 - DNA, 120 bp, Artificial Sequence
  ENSG00000261738_99 (sequence is synthesized)
gcaattgtattgtaaaatcagccatagacaatatggaatcagatagtcacggttgtgttccagtagaactttatttacatacacagcagctggccagatttgacctacaggttgtagttt

SEQ ID NO: 900718 - DNA, 120 bp, Artificial Sequence
  ENSG00000261738_100 (sequence is synthesized)
gctgactcttggtgcagagcatggactttggagccacatggcctcacttcctggctttgtgtacttgggcaagtcactaacctctctgcccattagttttcccatcatcatgggaagaat

SEQ ID NO: 900719 - DNA, 120 bp, Artificial Sequence
  ENSG00000261738_101 (sequence is synthesized)
aacacctgcttcacagggttgttttgaaggtgaaattatctgacacatgtaaagttggtaaagatttctctctggaatagtatgaaatcaacataaatgcttgctattgttacaagcaac

SEQ ID NO: 900720 - DNA, 120 bp, Artificial Sequence
  ENSG00000261738_102 (sequence is synthesized)
ttgaggggaaaaataatacgtattatttacttttctcttcctttgtgtttccacaatctcctcactctccacagcacatagtagagtccaagttgcagagatactcaataattatgtgtt

SEQ ID NO: 900721 - DNA, 120 bp, Artificial Sequence
  ENSG00000261738_103 (sequence is synthesized)
ttttgttttttgtgttttttttttttaacaaagaataactacttaatttctcttctttcccttccatctgatgaatatgtcctgtatagttattactttcttgctcttagagaaaaatta

SEQ ID NO: 900722 - DNA, 120 bp, Artificial Sequence
  ENSG00000261738_104 (sequence is synthesized)
tatagttattactttcttgctcttagagaaaaattatgttctagggagtatctatttggggcaacttgaatctatgtttcccagcttaaatttttaaaaaatatatattttgagctcctg

SEQ ID NO: 900723 - DNA, 120 bp, Artificial Sequence
  ENSG00000261738_105 (sequence is synthesized)
caaccaatatcctttttcccttctttatggtttagaactaaaattttttttttaactaatccttttccttcatgtgtagacctaaacttttaaagggggttttcctaaagagatcaaata

SEQ ID NO: 900724 - DNA, 120 bp, Artificial Sequence
  ENSG00000261738_106 (sequence is synthesized)
ttttgtcctttctgaatattttcctgggggacagatctaggacagccctctgattatcctcccttggtagtattcatactattgtatgatccttttactgtgagtataggtgggacctgt

SEQ ID NO: 900725 - DNA, 120 bp, Artificial Sequence
  ENSG00000261738_107 (sequence is synthesized)
ctgaagcagattcttcctcagtcaagcttcaggtgagattctagccctgcccaacaccttggttatagcctatgacagaccctggagcgggcaacacagctaagctgtacccagattcct

SEQ ID NO: 900726 - DNA, 120 bp, Artificial Sequence
  ENSG00000261738_108 (sequence is synthesized)
gactcacagaaactgtgaaataataaatgtgaattgttttaagctgctaaaattgtggcaatactgttatgcaaaaatagataactaacacaatatgaaactactggattataacagcaa

SEQ ID NO: 900727 - DNA, 120 bp, Artificial Sequence
  ENSG00000261738_109 (sequence is synthesized)
ttattcaaaataattataatggtttcttatcaatgatttggtttgtcaatcatcaaatgtatttaagaattgatttttaatgtcatcatgcttggcaacttggttcgccaccaatactat

SEQ ID NO: 900728 - DNA, 120 bp, Artificial Sequence
  ENSG00000261738_110 (sequence is synthesized)
ggtaattaataatctataataacacttccataatccagccttctggaaaattcagttccccaaaagaatcctaaatctggaaaacagcgtcagggaataaacaaattcaaatttttgtga

SEQ ID NO: 900729 - DNA, 120 bp, Artificial Sequence
  ENSG00000261738_111 (sequence is synthesized)
aataaaaagcacaactaagaaaaactgaagattacaatattgcaactgctctattgtaattgtgattgggtagctcatagcataaaagcaagaagttagttgtggttctaaaagaggaga

SEQ ID NO: 900730 - DNA, 120 bp, Artificial Sequence
  ENSG00000261738_112 (sequence is synthesized)
aatggtagctgggcttgatgggagtatacaccattgctcctattccatctaaacatggcctcatacataactatggtcagtgtttgggcaggggacattagcacagcaatgatcctctga

SEQ ID NO: 900731 - DNA, 120 bp, Artificial Sequence
  ENSG00000261738_113 (sequence is synthesized)
ataagtatactgtgacctaacagctttaatatatcctgacattttaagcactaacttcccagtgtgcagtgcattgaactctgtggaaaatagatcctagataactaagtaacaataagt

SEQ ID NO: 900732 - DNA, 120 bp, Artificial Sequence
  ENSG00000261738_114 (sequence is synthesized)
ccatcatcacagagaatttttctgcatgaattcctgccatggttatcaccaggctcatgagtgagatatcggaaggcacacaaacttccacggaccctattaaaaaatactctttcctga

SEQ ID NO: 900733 - DNA, 120 bp, Artificial Sequence
  ENSG00000261738_115 (sequence is synthesized)
aactgaatccctcagacccacaactcacaagaaactgaagctgaagcagattcttcctcagtcaagcttcagcctgagaatgatgaagatgctggaaaaccggccccgtcacacaccaat

SEQ ID NO: 900734 - DNA, 120 bp, Artificial Sequence
  ENSG00000261738_116 (sequence is synthesized)
acatctaggctattaaaacccactctaccaaactcggacagcatgacaattgtagttgattaatactgtggtgccattctgaataagcttccaatcttgtcctagtcaaattcattgctt

SEQ ID NO: 900735 - DNA, 120 bp, Artificial Sequence
  ENSG00000261738_117 (sequence is synthesized)
gctacatggctttcccggttaattctgaattcagcaaagagctccaatgggctgatgttgagcagaggtcagcggctgccagaactgtcatacttactactgtctccatgagccagactg

SEQ ID NO: 900736 - DNA, 120 bp, Artificial Sequence
  ENSG00000261738_118 (sequence is synthesized)
ggtttaacaaagcatggacagccctgtagaactgtgattggacaaaaaacgtacaatctaatgctaatagactgagtgaggaaacccagcaagggcctgtctgtctagattcttcttggc

SEQ ID NO: 900737 - DNA, 120 bp, Artificial Sequence
  ENSG00000261738_119 (sequence is synthesized)
ggcaatcagcaccccagtgttcttagcacgtcatgccccggtacagcctccattccacaagtggtggggctgggcagaagaaaagagctcttactactcatttccactgatctggaacat

SEQ ID NO: 900738 - DNA, 120 bp, Artificial Sequence
  ENSG00000261738_120 (sequence is synthesized)
agctgcagtaacagatagctggggcaagatgagaaacactgaagtcctgctcctcctgggaataaaggcctctctgactagaagctggtggggcaaggaagccctgtggtcttggctgca

SEQ ID NO: 900739 - DNA, 120 bp, Artificial Sequence
  ENSG00000261738_121 (sequence is synthesized)
gcagtctggagtggagtctctgctttatagggggaagagtggagtaagtagtcttggttcacataccacagactttcaaatttcttactgaattttcttgaatagatgcttcttcactgt

SEQ ID NO: 900740 - DNA, 120 bp, Artificial Sequence
  ENSG00000261737_0 (sequence is synthesized)
ggaggaagcggcgagggcgagccgcggggtctcggcgcctctgtatgcttgcacttaacgagaacccagagcgaacacgacccacatttctctttttgttttaagaggaaatataggagt

SEQ ID NO: 900741 - DNA, 120 bp, Artificial Sequence
  ENSG00000261737_1 (sequence is synthesized)
tacagcatagaattacaatatctggacattagaaataacaggtcccggtcacggtatggcaccgcgcgacacacttggtccctgaggcctggatgccgctcagcaaacgttcgcggaata

SEQ ID NO: 900742 - DNA, 120 bp, Artificial Sequence
  ENSG00000261737_2 (sequence is synthesized)
gggttgggtttactgtcccccaccgagccggttgctcattcattcagcataattgaatacctcctgtgtgccaggcactgaatcaagtgtcggagacaatgtcctgccctcaagctcctg

SEQ ID NO: 900743 - DNA, 120 bp, Artificial Sequence
  ENSG00000261737_3 (sequence is synthesized)
gccggttacttgacaaccttccgggacctcaacgctatgtgcctactgtgtgaaagcaaagtgccaggtggaggacacaaagatggcgagcgacacaggatagtccttaacaattaagcg

SEQ ID NO: 900744 - DNA, 120 bp, Artificial Sequence
  ENSG00000261737_4 (sequence is synthesized)
gactaattttaataacaaatgagaatatgatgtgacatccgttccaaatcctgtcgttccaagtaacttcttaagcatctttcacgatacagcctctgcttgaaaggaattaaaacaggt

SEQ ID NO: 900745 - DNA, 120 bp, Artificial Sequence
  ENSG00000261737_5 (sequence is synthesized)
acaagcatggaaggagacgttgctatcatatttcaagaataagaaaatgctgttttgtgtggttgtgcagcaggcaatgaaatgagcttacattcaagcttccgtgttttactgaaacaa

SEQ ID NO: 900746 - DNA, 120 bp, Artificial Sequence
  ENSG00000261737_6 (sequence is synthesized)
cagtcacagatgcagtagatgttaaaggttgaaagacgagtgcagtaaaagcattatgaggacaagaagaaaacgtaaatatttgtgttgtttcattctttgttgtggtggcagaaacag

SEQ ID NO: 900747 - DNA, 120 bp, Artificial Sequence
  ENSG00000261737_7 (sequence is synthesized)
ccccctctttctaaggtaactccaatataatgatctctcccagctttgaaatactccatgtctgtttcattttccagaaatatggaaaaatgaatatataataaaaaaccctatttctca

SEQ ID NO: 900748 - DNA, 120 bp, Artificial Sequence
  ENSG00000261736_0 (sequence is synthesized)
tcaggcctgtgattaggctgtgcaacttcctcgctgtgtggccttgggcaagtggcctacacccttgtgactcagtttcccccttgggttgctttgagaactaaatgagcggccaggcac

SEQ ID NO: 900749 - DNA, 80 bp, Artificial Sequence
  ENSG00000261736_1 (sequence is synthesized)
ccaacactttgggaggccaaggctggtctcgaactcctgatctcaactgatccgccctcctcagcctctcaaagatgtaa

SEQ ID NO: 900750 - DNA, 120 bp, Artificial Sequence
  ENSG00000261736_2 (sequence is synthesized)
caggctcccacggagaccttgtctctcaatttcctcctgcatcatttttcttttagtcacttgtccttctctgagcccttctttgctcactttttctttagagccaggatctcgctttgt

SEQ ID NO: 900751 - DNA, 79 bp, Artificial Sequence
  ENSG00000261736_3 (sequence is synthesized)
ctttgctcactttttctttagagccaggatctcgctttgtcacccaggctggagcatagtgactgatcctcttgccttg

SEQ ID NO: 900752 - DNA, 120 bp, Artificial Sequence
  ENSG00000261734_0 (sequence is synthesized)
tagcaacatcaatgactaaggttttggtcaatctctcaaaattgagtaaatgtccaaaaggggggaattgttaaggcaaactaaatatgtcctgagaaagcctccatccttctatatttg

SEQ ID NO: 900753 - DNA, 86 bp, Artificial Sequence
  ENSG00000261734_1 (sequence is synthesized)
tgaaaacctaacttaatagtatgtacctgtaacaatgactgagtgttggccaatcccagtagccatacttcaaccactcatagact

SEQ ID NO: 900754 - DNA, 120 bp, Artificial Sequence
  ENSG00000261734_2 (sequence is synthesized)
catagactgctgaatgttcaaactgtgttcagaaatgttgagctgtaaccattcttactgtttctgtacctcacttcagattcctgtatatcactttatcatttttgcctataaaattgt

SEQ ID NO: 900755 - DNA, 86 bp, Artificial Sequence
  ENSG00000261734_3 (sequence is synthesized)
cagattcctgtatatcactttatcatttttgcctataaaattgttctttccacaagatacccctggagtctctaatgaatcattca

SEQ ID NO: 900756 - DNA, 120 bp, Artificial Sequence
  ENSG00000261734_4 (sequence is synthesized)
ttttcttttatcccaggtctcacctctttataggagtggtataaaaaatttgtagtcattttttaaaagcaccatagcacccaattcataggtttttttttttttagagttttttttttc

SEQ ID NO: 900757 - DNA, 120 bp, Artificial Sequence
  ENSG00000261734_5 (sequence is synthesized)
ttttcctaattatcttacaaaaaagaagatatctggcactttataggaggaaaccagaggcaagtcctgtgttttactataaagtcaggtgcaggaatactaaccaattcctttatattt

SEQ ID NO: 900758 - DNA, 120 bp, Artificial Sequence
  ENSG00000261734_6 (sequence is synthesized)
cccaatattacccagttcattcgttggtacacagtaggttccagaaaaatgttaaggggaaaaattgattgctatgagaatttcacatgaattatgtttcttccaaggctccttgcagtc

SEQ ID NO: 900759 - DNA, 120 bp, Artificial Sequence
  ENSG00000261734_7 (sequence is synthesized)
aatcaggatggatgttgcattagtgttttctctgatgtaacagtcattaactacagctctattagctgttcatttgtggcatgaaatagatccaaatacagaggactgtatttgaactga

SEQ ID NO: 900760 - DNA, 120 bp, Artificial Sequence
  ENSG00000261734_8 (sequence is synthesized)
gccattgtttcatgaatattagaacacaaatcaatgcatattgactgggcttgtgtagatgaatgtgatagcattgccctcaacaaaatatggttcatttcttcagaacagtgtgtaaag

SEQ ID NO: 900761 - DNA, 120 bp, Artificial Sequence
  ENSG00000261734_9 (sequence is synthesized)
aagatattgaactctaggcactgagttaataagttcatttttatagatgcttgatgctgtatgaacagatactatactttctaaagcagctacttctgtgtggatggtggtgggtaagag

SEQ ID NO: 900762 - DNA, 120 bp, Artificial Sequence
  ENSG00000261734_10 (sequence is synthesized)
gccagagaaggatggtaactataggtaacactcttatggcactttaacgagcatctatcctctctattggcactcaaaagaaacttgtgaggcaggcactatcatcccaaatttataaac

SEQ ID NO: 900763 - DNA, 120 bp, Artificial Sequence
  ENSG00000261734_11 (sequence is synthesized)
aagcaaattgataccacaggttctatgcagtatgccaaaagtcactgtcttgcagtggtggaattggagatttaaattcctcagatatgattgcctctggagagtcacatctgatcctcc

SEQ ID NO: 900764 - DNA, 120 bp, Artificial Sequence
  ENSG00000261734_12 (sequence is synthesized)
tcagacaaataagtactctttctctgtgttctcgtgatatcttgaaatatatctatatccaccactttgtgttgtaattatcttcttatgtgtttatttctctccacttgagttcaagaa

SEQ ID NO: 900765 - DNA, 120 bp, Artificial Sequence
  ENSG00000261734_13 (sequence is synthesized)
aaaagaaaggtccttgtctcatatatgagcatccactaaggatttaacccaaagtgaccagtgaatgcttgcagaatgaaagaataaattattgaagatcctttaactctaaaaatctct

SEQ ID NO: 900766 - DNA, 120 bp, Artificial Sequence
  ENSG00000261734_14 (sequence is synthesized)
accaatccatgatgcattttaagaaaaaagtgttctgttagaatagggtgaagaaaagctgatatttgtgagtaggatgcaagggaaccatagacatagagacctgcaaatcatctgtgg

SEQ ID NO: 900767 - DNA, 120 bp, Artificial Sequence
  ENSG00000261734_15 (sequence is synthesized)
ccttgttttatcttattctctggaatatactgggaatagtaaggaggcatgtgtgcctgagcagaatgattaaggggaaaatattaggaattgaggtcaaagagttaatgaggtgggggt

SEQ ID NO: 900768 - DNA, 120 bp, Artificial Sequence
  ENSG00000261734_16 (sequence is synthesized)
aagatcatatatagccttgtaggacagttaagaaatcccgagtgacctgatcagagcagacaaagtgatccttttaaaacctacaaggaaaatagatgggggctgagcaagagtggaagt

SEQ ID NO: 900769 - DNA, 120 bp, Artificial Sequence
  ENSG00000261734_17 (sequence is synthesized)
agagagacctatcttgattgatttactgaagtgatcaagatgagaagcatggttccttggacgaaagtgagaagtggttggattttggatgtattttgaaagtagagccaagaggaccaa

SEQ ID NO: 900770 - DNA, 120 bp, Artificial Sequence
  ENSG00000261734_18 (sequence is synthesized)
ttagatatggggtgagagcgagagagaggagtgaaagttgaaaccagtatttttggcttgtgcacttaaaaggaaggaattaccattagttgagatgggaaaatgtacatagatgaagca

SEQ ID NO: 900771 - DNA, 120 bp, Artificial Sequence
  ENSG00000261731_0 (sequence is synthesized)
ccaaaacctcactttattccaatgtgaaatgaagacatgatggtttaaaaatgagaaaaagttcctgataagctgtgggggtgcttcacttgccagctcatgcccattccctctgaaaca

SEQ ID NO: 900772 - DNA, 120 bp, Artificial Sequence
  ENSG00000261731_1 (sequence is synthesized)
ggtagcaatctcctcccccagtccaggcttccacagcaggcacttgaggatctcggagctttccttctcgtggttctcaccaaaaaacaggggagagagcacaggcaggaaaggattagc

SEQ ID NO: 900773 - DNA, 120 bp, Artificial Sequence
  ENSG00000261731_2 (sequence is synthesized)
tgcccacagcctacaggcgcagctcaacccaccggccctgccacagcccacctgggccttatagatgttgtcaaattccttcttctgctacaagccggaccagaactcagctttgctctc

SEQ ID NO: 900774 - DNA, 120 bp, Artificial Sequence
  ENSG00000269504_0 (sequence is synthesized)
gctgaagccatgcccacacaagggaaagtgacttatcactgggcccagcacacaggtggatggtgactctaagaccaggattcaacacaactagaaggctttgactctaatacgagtcac

SEQ ID NO: 900775 - DNA, 120 bp, Artificial Sequence
  ENSG00000269504_1 (sequence is synthesized)
agaaggctctgcgactcttctattttctctaggttatgcaaatggaggtggattgtgacatatcatagggccaacacaacacacagtctacaggtggaattgggactctcatgcatggat

SEQ ID NO: 900776 - DNA, 120 bp, Artificial Sequence
  ENSG00000269504_2 (sequence is synthesized)
ggtggaattgggactctcatgcatggatccagttcatcattgatactgtgactcaggtgggattttgacatataactgcacccagcacacagtggtccattacattgatgacattatgct

SEQ ID NO: 900777 - DNA, 120 bp, Artificial Sequence
  ENSG00000269504_3 (sequence is synthesized)
gtctgactaaaatttagagaccttctagctcagtaaaacttccaggggtccagtggtccaaggcctgtcaagatagtccttctaaggtaaaagatgcagtggctcatgcctgtaatccca

SEQ ID NO: 900778 - DNA, 62 bp, Artificial Sequence
  ENSG00000269504_4 (sequence is synthesized)
aggtgggcagatcagttttaaaaaattagctagacgtggtggcaggcacctgtaatctcagc

SEQ ID NO: 900779 - DNA, 120 bp, Artificial Sequence
  ENSG00000269504_5 (sequence is synthesized)
attactggaccaagcacctaggccctgcatttattgtgtattgtgacatatggcttggtccaacacctaggtggtgtgactctctacttcttcctgtgccatgccaaagaagaggattgt

SEQ ID NO: 900780 - DNA, 120 bp, Artificial Sequence
  ENSG00000269504_6 (sequence is synthesized)
gacatatcactggatccagcacctaggtcttttcccacagggagcattgtgaaatatcactgggctcagcccccaggttatgtgacctttctgccttgccctgctcccaggaaatgttgt

SEQ ID NO: 900781 - DNA, 120 bp, Artificial Sequence
  ENSG00000269504_7 (sequence is synthesized)
gacatccctcatacagcacccagtcctcaggtggtgcagaaagagttccaacagagcccagcacacaggtgagactgtgccactcatatgcacacccagtcaacagtaaagattgtcatt

SEQ ID NO: 900782 - DNA, 120 bp, Artificial Sequence
  ENSG00000269504_8 (sequence is synthesized)
ctgtctcatgaaaacagccaatgattgagcttctgaatctcagacttggaggcagtcaaaagttagaaaattgactatcatacctggatctcattcacaggtgggtttgtgactctcaga

SEQ ID NO: 900783 - DNA, 120 bp, Artificial Sequence
  ENSG00000269504_9 (sequence is synthesized)
ttcaacacaactctgaggctgtgacttcattaaggagatacagtccacacgaggaattaagggtctcatggacagattagtctaccatctagattgtgactctttacgtaggcccaacat

SEQ ID NO: 900784 - DNA, 120 bp, Artificial Sequence
  ENSG00000269504_10 (sequence is synthesized)
tcctgcaggtgtgattgtgacatagattctgcctgtcatgtgactgatttaactctactccctgggcccagcccagagctgaaattataaaatttcattgaaagcagcaattaggtgatg

SEQ ID NO: 900785 - DNA, 120 bp, Artificial Sequence
  ENSG00000269504_11 (sequence is synthesized)
tagctgcatgctcctgccttagcattgccaaaagggagcattgtgacatattgcttggccttgcacccaggtgatgtgagtctcttctgccttcatgctgcccacaggcagcactgtcac

SEQ ID NO: 900786 - DNA, 120 bp, Artificial Sequence
  ENSG00000269504_12 (sequence is synthesized)
atatcacttggcaccacattcaggttatgtgactctcctgcctgtgccctgcccatatgggccattttgacatgtagctgagtctgatacccaggtgatgtaactctctggcctggccct

SEQ ID NO: 900787 - DNA, 120 bp, Artificial Sequence
  ENSG00000269504_13 (sequence is synthesized)
gcctactaggttttctgtgacatatctatgcaccaatcaactttgtgttttgataatcctcttctaccaatttctgctcaaaagaaggattttgacaaataattgggaccagcacctagc

SEQ ID NO: 900788 - DNA, 120 bp, Artificial Sequence
  ENSG00000269504_14 (sequence is synthesized)
tgaggttactctactcttctttcaaggtttggtttgcaggggatgttgtgacattgctaggctaacagacaggtgatattcttctgccttggctcttccaaaataaagcatttttacata

SEQ ID NO: 900789 - DNA, 120 bp, Artificial Sequence
  ENSG00000269504_15 (sequence is synthesized)
ctggccctgccaaaagtggggattgtaacatatcattaaacttagtaccaaggtgttatgactcaccttgtttgcctgggccctgcatatatttggtaatgtgacgtatggctgagacaa

SEQ ID NO: 900790 - DNA, 120 bp, Artificial Sequence
  ENSG00000269504_16 (sequence is synthesized)
acacctagggcatgagagccttgtgcctgggtcctgcccacaaggagccttttggcttatctctgcatccatgaactaggagatgtgactcttcttttctgtctgggttctgcaaaaaca

SEQ ID NO: 900791 - DNA, 120 bp, Artificial Sequence
  ENSG00000269504_17 (sequence is synthesized)
agtgattgtgacatatcatcaaacccagcaactagacgatgtgatttttcttccctgcttgagccctggatatgctgtgcattgtgatatatggctgggtccaacatcaaggagagattg

SEQ ID NO: 900792 - DNA, 120 bp, Artificial Sequence
  ENSG00000269504_18 (sequence is synthesized)
tgacatatctctggaaccagaaccttggtgatgtgactcttctctcctgctgaagccatgcccacacaagggaaagtgacttatcactgggcccagcacacagcgctattcacagggaaa

SEQ ID NO: 900793 - DNA, 120 bp, Artificial Sequence
  ENSG00000269504_19 (sequence is synthesized)
cacaggtgagattgtgactcttgtatgctcatcctgccaaaagttgagtgtcaccctcacacatggacagagacttctggtaaggtcttgaatcttgtacatggacacagtccacagctg

SEQ ID NO: 900794 - DNA, 120 bp, Artificial Sequence
  ENSG00000269504_20 (sequence is synthesized)
gaatgtcatatgtagatccagccacaggtgtgatgttgacctatttataaagttagctcacaggcacattgataactctcatacctggatccagccaataaaatatatgttgactattat

SEQ ID NO: 900795 - DNA, 120 bp, Artificial Sequence
  ENSG00000269504_21 (sequence is synthesized)
agctaggcttgagtaaactggtagggtcctgggtcttctacctgtatgagagtcacagaagattatgacacttatggaaattacataaagccctctggcaatgcaaagttttatcacggg

SEQ ID NO: 900796 - DNA, 120 bp, Artificial Sequence
  ENSG00000269504_22 (sequence is synthesized)
gccccacacgcaggtgagattgtgacttcaatatgcagacaaagctaacagttagtattgttaccttcacatataaacagagcccactggtgaggttctaaatctcacacaccaaaaaaa

SEQ ID NO: 900797 - DNA, 120 bp, Artificial Sequence
  ENSG00000269504_23 (sequence is synthesized)
aagggaaagtgacttatcactgggcccagcacacaggtgatgtaattattctgcctggtttttgtacccaggagccattgtaatctatctctgggcccatcatttaaatgatgtgactat

SEQ ID NO: 900798 - DNA, 120 bp, Artificial Sequence
  ENSG00000269504_24 (sequence is synthesized)
gactctgctgcctgtgccctcctttcagaacaggaatgtaacatatccctggccaagcacccaggtgacgtgactcttcttcctagtttctgccatgagaaaagattttgatatatctct

SEQ ID NO: 900799 - DNA, 120 bp, Artificial Sequence
  ENSG00000269504_25 (sequence is synthesized)
ggcctagcaccaaaatgatgtgactctcttgctcactgtctatgcacaggtgggatttgttcagctcacaggagcacagcccactgttgagattctgaatctcaaaaccaatgaaagttt

SEQ ID NO: 900800 - DNA, 120 bp, Artificial Sequence
  ENSG00000269504_26 (sequence is synthesized)
aagattcagcacccctgagacttgagaaaccgtgagtccactaaggagacacagtctagaggatggatggaaggtctcatacacagatcaagtccacagttgagattctgtgattgtgac

SEQ ID NO: 900801 - DNA, 120 bp, Artificial Sequence
  ENSG00000269504_27 (sequence is synthesized)
atacgcctctgtccagcacctgagttttttcactctcctgcctgggctcagcccacagattggattgtaacacatcgctgaacccaggatctaggttatttgcctcttctcttctgcctg

SEQ ID NO: 900802 - DNA, 120 bp, Artificial Sequence
  ENSG00000269504_28 (sequence is synthesized)
gggttatgtggctcttttgattatccccagctctacctgcaaggagcactgggaaatatatctttgggcccctcaattaggtgatgtgactcccctttctggactctttcctcaggaggt

SEQ ID NO: 900803 - DNA, 120 bp, Artificial Sequence
  ENSG00000269504_29 (sequence is synthesized)
ttatcatgaggttaatcaagtggtaactccaattgcagctgctgtaccagatgtagtttcattgcttgagcaaattaccacatctcctggtacctgtggtccattacattgatgacatta

SEQ ID NO: 900804 - DNA, 120 bp, Artificial Sequence
  ENSG00000269504_30 (sequence is synthesized)
ggtcagaggctactgaataagccctgtccataggtggccttgtgacatatgtctgcctctatcaccaaagtgatgtgacactttttctgcctgcatcctgcacatagagaagattgtgac

SEQ ID NO: 900805 - DNA, 120 bp, Artificial Sequence
  ENSG00000269504_31 (sequence is synthesized)
atgattcccatacctggaatcagctaataggggagatagtgtctcttgtattgtagcttagggaaaaaagtaacatcttgggcctcctctttgtatgaatgtcataaagaattaccaatc

SEQ ID NO: 900806 - DNA, 120 bp, Artificial Sequence
  ENSG00000269504_32 (sequence is synthesized)
gggcactgcatatcttgggtattgttatatatagctgggcatcattcctttaggatgggaggctccagcctgggccctgcccatgaggggccttgtaagatgtctcttcctccatcacct

SEQ ID NO: 900807 - DNA, 120 bp, Artificial Sequence
  ENSG00000269504_33 (sequence is synthesized)
aagagatgtgactctcttcttttgcctgcatcctgcccacagaaaatgttgtaatgtattgctggacccagtcaccagatgatgtgtctctcctgccaaggctgtgcccacagagagcat

SEQ ID NO: 900808 - DNA, 120 bp, Artificial Sequence
  ENSG00000269504_34 (sequence is synthesized)
tttgacatatcactgggctcagcacccaggtgaaatgactctgctgcctgtactctgctttaagaggggattgtaatatatctgtggctgagcacctaggtgagatgacttctgcgtggt

SEQ ID NO: 900809 - DNA, 120 bp, Artificial Sequence
  ENSG00000269504_35 (sequence is synthesized)
ttctgacctcaggaaagattgtgacatatctttgccgaaaacctacatgatgtgaatctgctgctcacttcctaccgacagtctccaaagttatcagaaacctgcatttaaaaatacctg

SEQ ID NO: 900810 - DNA, 120 bp, Artificial Sequence
  ENSG00000269504_36 (sequence is synthesized)
gcaaagttccatagcggaccataaatcacctcttgaagaggatcgaatcaagacaacaattgtctgagggattgagacaattctggaagcccagcacctaggtgatgtgactttcatctt

SEQ ID NO: 900811 - DNA, 120 bp, Artificial Sequence
  ENSG00000269504_37 (sequence is synthesized)
gagtgacaggagacgtgatcagatgctcggctgaatgaagaaagagtgaaagcctaagctccagccttttcaggcaggttttcctccctgagctgagccaggcccaacccaaaggttatt

SEQ ID NO: 900812 - DNA, 120 bp, Artificial Sequence
  ENSG00000269504_38 (sequence is synthesized)
tgcctcttctcttctgcctgggcactgccaaagaaaaaaggagattgtagcaattcactggacccagaacctagttgagggagcattgtgacatgccactgggctcagcacccaggtgat

SEQ ID NO: 900813 - DNA, 120 bp, Artificial Sequence
  ENSG00000269504_39 (sequence is synthesized)
gttcctctcctgcctggtcccttccatcagggaatattgtacaaatctctggccaagcacccagttgatgtgactctcctgctcactacctactcacaggttacatgtcccatgtcgcag

SEQ ID NO: 900814 - DNA, 120 bp, Artificial Sequence
  ENSG00000269504_40 (sequence is synthesized)
ctggaaccagaaccttggtgatgtgactcttctctcctgctgaagccatgcccacacaagggaaagtgacttatcactgggcccagcacacaggttatgcaaatggaggtggattgtgac

SEQ ID NO: 900815 - DNA, 90 bp, Artificial Sequence
  ENSG00000269504_41 (sequence is synthesized)
cagcctggatttgtttatatatatgtttatatgattatgtgtcattttcttgagtcattttattttaagtaaaagaaactgccttcagca

SEQ ID NO: 900816 - DNA, 120 bp, Artificial Sequence
  ENSG00000269504_42 (sequence is synthesized)
cagcacctaggatgcatatgccagatttccaggcccatcacctagatgatgagactctcctcttctttctgggaccaatacacagtgggaattgtgatgcatcgtttagctcagcagcta

SEQ ID NO: 900817 - DNA, 120 bp, Artificial Sequence
  ENSG00000269504_43 (sequence is synthesized)
catgatgtgaccctcttctcatgagattcctgcccacttgggagacatgacccaaaaagggattatgacatatctctgagcccaacacccaaatgttgtgactctcctgcctgggctgtg

SEQ ID NO: 900818 - DNA, 120 bp, Artificial Sequence
  ENSG00000269504_44 (sequence is synthesized)
cctagagaaaatataatatgtcactgggccctgcatgcaagtgatctgattctccagcctgggccttgcccacaggggagattgagacatattccaggttatgcaaatggaggtggattg

SEQ ID NO: 900819 - DNA, 120 bp, Artificial Sequence
  ENSG00000226619_0 (sequence is synthesized)
ctgggaggtatgatgccattggacagcattttacacacagtggaacttctttccaaatcggaatcaatcctctgaaagcctgccattgctttatgaagtaaacttatggaatattctaaa

SEQ ID NO: 900820 - DNA, 120 bp, Artificial Sequence
  ENSG00000269506_0 (sequence is synthesized)
ctaccttaatttgataatttcctcacaattaccagatttcattttttaaaacagaggagctatttatcttttcagtgtgataagtattctattatagaacattgtttgcctttgttcgga

SEQ ID NO: 900821 - DNA, 120 bp, Artificial Sequence
  ENSG00000269506_1 (sequence is synthesized)
ggtgcagagaagaaaacagtgattcatttggcaattctgacaaaatccaaagatgtatacaattacttcattcatttagaaaatattataggaactataatattctggacactatattaa

SEQ ID NO: 900822 - DNA, 120 bp, Artificial Sequence
  ENSG00000269506_2 (sequence is synthesized)
atagtaaagaaagatcaatagacacaacctctgccctcaagaacttatagcctgtggagatacatcaatgaagccttcaaaaatttcaaaacagaaagcttaatctttagaaataaatag

SEQ ID NO: 900823 - DNA, 120 bp, Artificial Sequence
  ENSG00000269506_3 (sequence is synthesized)
aatgtgtcttaaatattatgctgggtgggagaaagaagtaggaattataaagtttaacaaaattgttttattgacatgattctgtaatttggcaactcacattcaggtctcttactgcta

SEQ ID NO: 900824 - DNA, 120 bp, Artificial Sequence
  ENSG00000269506_4 (sequence is synthesized)
accacagcatctagcagcagtcctgaaatactgacacatttcaagacaattttttactaactctaccatttgaaagatcaataaacactaaggtgttcttgtgatgtctcttattcaaaa

SEQ ID NO: 900825 - DNA, 120 bp, Artificial Sequence
  ENSG00000269506_5 (sequence is synthesized)
gtcatattccatcccagtgtagttcccaaacattttcaagtcacatttctaaatctttaatcttccataacatatctggaatgaaaacaagcaaaaagtggtttccgacagccattgata

SEQ ID NO: 900826 - DNA, 120 bp, Artificial Sequence
  ENSG00000269506_6 (sequence is synthesized)
cagaagagagtacatgaagacacggtaaaattacaagagaataacattagaaacaaacctcagcaaaataacttggctctatgatagggcttgagttagaagtcaaagattatacatact

SEQ ID NO: 900827 - DNA, 120 bp, Artificial Sequence
  ENSG00000269506_7 (sequence is synthesized)
ctaggaaagccccaagtttgattctgatacaagaagggtagaaagtggagatgggagcaaataatgtctgttataatgacagattacctaggaaatattggcctaaaactacttttaaat

SEQ ID NO: 900828 - DNA, 120 bp, Artificial Sequence
  ENSG00000269506_8 (sequence is synthesized)
tctaacttttagactgacacatcctttagagttaccactgtgaaaaacgaaactcttcaataaatgatcaacatattttgcaaatatattttgaagcataaggaactccataattttaaa

SEQ ID NO: 900829 - DNA, 120 bp, Artificial Sequence
  ENSG00000269506_9 (sequence is synthesized)
atattaaccaatctggtcaagactacctaatagtctttttacagtattactgtttattttagaaactatttttcctcatcgtcaattatatgagaagtcaccatgaaagcaaaaaggaaa

SEQ ID NO: 900830 - DNA, 120 bp, Artificial Sequence
  ENSG00000269506_10 (sequence is synthesized)
tctacttttaattgaatggtgactgtaagccttttaggttacatgtacctaaatactatgcaataacaggaatttatcatttattttccttccttccaataccactttcctcaaaatatg

SEQ ID NO: 900831 - DNA, 120 bp, Artificial Sequence
  ENSG00000269506_11 (sequence is synthesized)
cttctgcacaagatttccccatattgctacctagaaatctaacaatgaagggaaatattatacttaaacagaagaatgtcagaaaagaatactgatcatgagagaagtataaaaagtaag

SEQ ID NO: 900832 - DNA, 120 bp, Artificial Sequence
  ENSG00000269506_12 (sequence is synthesized)
tctgatttgggggtcacgatgaaaacatttgtatttaaaaaaaggaaaatatttgcattaaaagccactttaaagcagactttaggcaaattaaacatgttgcatcctatgtcacaaaaa

SEQ ID NO: 900833 - DNA, 120 bp, Artificial Sequence
  ENSG00000266335_0 (sequence is synthesized)
ggagatgttcagctgtggattcagaccattccttactagattcttccccacctgttcttgtcaccctcccatgctcaccaggctgtgagcagagagaatgtgaacatctatttaagaaga

SEQ ID NO: 900834 - DNA, 120 bp, Artificial Sequence
  ENSG00000266335_1 (sequence is synthesized)
aaggcgtgagggaaagcatgaaaaatccaggataaaatcatcatcagggaaactcctatgatgctggaactggacaacagtgttttagatccctagtcatgcccattccttcctgtcctg

SEQ ID NO: 900835 - DNA, 120 bp, Artificial Sequence
  ENSG00000266335_2 (sequence is synthesized)
gaaacactcaaaacttccattagctgaggtgaagcctctagtggttcaggactgggttctacagcaagggttcttaactcagtccatgaatcttcccaggaagtctccaccaacaaaatt

SEQ ID NO: 900836 - DNA, 120 bp, Artificial Sequence
  ENSG00000266335_3 (sequence is synthesized)
caggaagtttgtgaatatcctgaaattttatgaaaagtgattggcttgtgtgaacatgctgtttaactgggaagggaatctttagctttcagtaaatgtataaggtcttacagtttgctc

SEQ ID NO: 900837 - DNA, 120 bp, Artificial Sequence
  ENSG00000266335_4 (sequence is synthesized)
tgagggtactactgctccacatttctcaactacaaaattgaggtaatggatcctgaatcactttagtcacgcagagtagcctgtctttctgatcacgatgagaaattcaaaactgagccc

SEQ ID NO: 900838 - DNA, 120 bp, Artificial Sequence
  ENSG00000262429_0 (sequence is synthesized)
gctggtgcagcgatgtttaatggcaattcgtataaaccaagcccatgcacaagtagaaagtgcccgtggagccggcaggaggcccccgccgcgctagagaaccacaagcccggccgtgca

SEQ ID NO: 900839 - DNA, 120 bp, Artificial Sequence
  ENSG00000262429_1 (sequence is synthesized)
cgaggagaggggtgtgggagcaaggcgtggggaggagggaggaggcctacagagggctccaacaaaggtgaacaggaaagctgccgacaggggctccccctgccccagaaagccctctcc

SEQ ID NO: 900840 - DNA, 120 bp, Artificial Sequence
  ENSG00000262429_2 (sequence is synthesized)
ctgttaagactgcacgaggcgcccccagggtggtgagaaaggcggtggccaggtcatgtggccagtcccggctggggaagcccttccagctcctggttctgcttcagttccctcatcctg

SEQ ID NO: 900841 - DNA, 60 bp, Artificial Sequence
  ENSG00000262420_0 (sequence is synthesized)
acacaatgcgtgactccgtctcaaaataaaaataatcgttagatcaatgagtgcgggaat

SEQ ID NO: 900842 - DNA, 120 bp, Artificial Sequence
  ENSG00000262420_1 (sequence is synthesized)
tcaaaataaaaataatcgttagatcaatgagtgcgggaattctaaaaggggtctggaactctcgcaaggttgtggatcactacacctgaagcttaaggggaatgaaatcggtgagaaatg

SEQ ID NO: 900843 - DNA, 120 bp, Artificial Sequence
  ENSG00000262420_2 (sequence is synthesized)
agggtcctacagcccgggccgaagtgacaggtccacccctagtgactccaacaggtgaggagcacccccgacccgcctccctcggcactaaagcgggacgatagggcgcagggctccacc

SEQ ID NO: 900844 - DNA, 120 bp, Artificial Sequence
  ENSG00000262420_3 (sequence is synthesized)
cggaagcctcgccataatgtccgcgggcgggccggggcgaggagaaggtgggaagccgtggccgcaggttccgggaggggtcagccgtcctgggcaaggtcaggcccgacttccccggct

SEQ ID NO: 900845 - DNA, 120 bp, Artificial Sequence
  ENSG00000262420_4 (sequence is synthesized)
gaggccgctgcgacccggccctgcaggctccaggcggcagagcaaggggagcgccctagcggggccccagggtccgggccgcctcacctgcaggtgaacttgagggcgaggagcagcgcg

SEQ ID NO: 900846 - DNA, 120 bp, Artificial Sequence
  ENSG00000262420_5 (sequence is synthesized)
acggccccgcagagcagctccggccgctggcgcgccatgaggaaggcgccacgcagcccgcgacggagccggcccgccgaggacgctgtggccagggtcgggctcgagctgaggcagtct

SEQ ID NO: 900847 - DNA, 120 bp, Artificial Sequence
  ENSG00000262420_6 (sequence is synthesized)
ctgaggcagtctgagcccgcggggccgccgccgccccctccctcgtcctcggcgtcctcgctgctgctgctgccgccgccgcggcctccgcattccgacattacatgctcccagtcgccg

SEQ ID NO: 900848 - DNA, 120 bp, Artificial Sequence
  ENSG00000262420_7 (sequence is synthesized)
agtcgccggctttataccgccgccgccgcctcgggcccgaaggcccggcccggcccgttgctccccaatcccgcagctcgccgcacccgctaacccggacgctccacgtcagccgcgccg

SEQ ID NO: 900849 - DNA, 120 bp, Artificial Sequence
  ENSG00000262420_8 (sequence is synthesized)
gggtccgccccacctcacaccccagagcacgcagctccgcccaccgctcacggagtccgggcgggcaccgacaccgcccaaatccccgcccccaacgggccacgccctgcaccctacgta

SEQ ID NO: 900850 - DNA, 120 bp, Artificial Sequence
  ENSG00000262420_9 (sequence is synthesized)
aatgcacggaagccttccccgcccgcagcccagtcttggccccaccggtcacgaccccgctcacggagtctgcgcaggcgccgtcgcggggcgtggagaagctgctcccttgggataagg

SEQ ID NO: 900851 - DNA, 120 bp, Artificial Sequence
  ENSG00000262420_10 (sequence is synthesized)
taacgacaataatcgtgtccaccattctcactacaggccccgaagcacgtaggtgccgttttttatcccaacttaactgaagaaaaaaaaaacacggccgggcgcggtggctcaagcctg

SEQ ID NO: 900852 - DNA, 83 bp, Artificial Sequence
  ENSG00000262420_11 (sequence is synthesized)
tggagatggcgccactgcactcccgtctgggggagagagagagagagactcttgtctcaaaaaaaaaaaaaggacttgtcctc

SEQ ID NO: 900853 - DNA, 120 bp, Artificial Sequence
  ENSG00000262420_12 (sequence is synthesized)
agagactcttgtctcaaaaaaaaaaaaaggacttgtcctccaatgtcaataacaacaaactagacaaataaaacttcgagggcattaaggcaatatggtgttatgccacaaacagaaggc

SEQ ID NO: 900854 - DNA, 120 bp, Artificial Sequence
  ENSG00000262420_13 (sequence is synthesized)
acagctaacggccagtagctgagacgccacctctgccacaggtcagctatgtgacccacgtgcaaatctcatcacttcctgtctggttctgcttctgtggatgtagaatggggcaatcaa

SEQ ID NO: 900855 - DNA, 120 bp, Artificial Sequence
  ENSG00000262420_14 (sequence is synthesized)
tggctgtcttgctcaattggccagacatttaatgtgtcaaccacccaggcccaacatgttgtgagttcatgtacaccgaccattttgctatttcttttctatatgtcacttttttttttt

SEQ ID NO: 900856 - DNA, 120 bp, Artificial Sequence
  ENSG00000262420_15 (sequence is synthesized)
cacccaggctggagtgcaatggcgcaatcatagcacactgaagccttgacaaccccagctcaagcgatccacccccgtcagcctcccaagtagtaggcaacacagatgtgtgcgactacg

SEQ ID NO: 900857 - DNA, 120 bp, Artificial Sequence
  ENSG00000262420_16 (sequence is synthesized)
cgatccacccccgtcagcctcccaagtagtaggcaacacagatgtgtgcgactacgcccagctaattttttttttttgtggagacaaggtctctccatgttgcctaggctggtcttgaac

SEQ ID NO: 900858 - DNA, 120 bp, Artificial Sequence
  ENSG00000262420_17 (sequence is synthesized)
cttcgacctcccaaagcgttaggattatgtaaaagcatgagtcactgcgcccacctgtcacatctttttgtttcttctatactgccttattttgtagaaagtagctattttctcgtataa

SEQ ID NO: 900859 - DNA, 120 bp, Artificial Sequence
  ENSG00000262420_18 (sequence is synthesized)
cattaattcctttatttttaacttgtccctcatctctgttttgtgttattattacccttattatctatgttacaaacccaaccatacagtgttaatcttgttttaaaaagctgagaaaaa

SEQ ID NO: 900860 - DNA, 120 bp, Artificial Sequence
  ENSG00000262420_19 (sequence is synthesized)
atatatagttacagagtttttttaaccttctaatttgccacttatacttctgttgattcctttgtgtagattagagttacacaatttattgctaaagaaaataaatatggtcaaaagtca

SEQ ID NO: 900861 - DNA, 120 bp, Artificial Sequence
  ENSG00000245573_0 (sequence is synthesized)
atgagcccaaggagggaaaccagaagagccccccaggctcaccagttgtttgttggctccctacaaacatgtcattcaagtggctaatcttacaacagcacaaattcatctaaccagaga

SEQ ID NO: 900862 - DNA, 120 bp, Artificial Sequence
  ENSG00000245573_1 (sequence is synthesized)
tactctattatagcaaagaagaaagataatttcattgagccatcctgttttacaggtaaggaaaccaaaggccatagaagacttgccttatgtcatgaagaaagtttatgttagaactca

SEQ ID NO: 900863 - DNA, 120 bp, Artificial Sequence
  ENSG00000245573_2 (sequence is synthesized)
gcctggggctaatgtcatgaaaacaatgtgtctggtaaggagaaaactgaaaaagtcagcattaaaaagacatttaagtccatttcaaatgcctcccatatgcagactccactttatctc

SEQ ID NO: 900864 - DNA, 120 bp, Artificial Sequence
  ENSG00000245573_3 (sequence is synthesized)
ctccagttctctaaaacccttcactccttggctttttctggctaatacacacatctagctaagaaagctcaacttttctttttactagagatgttctctctgtgtgtgtgtgtgtgtgtg

SEQ ID NO: 900865 - DNA, 120 bp, Artificial Sequence
  ENSG00000245573_4 (sequence is synthesized)
caagtctgcgtccttattgttttcttcattgggccgaactttctggtcctcatccaacagctcttctatcacgtgttcgaaagtgtcagccaatgatgtcaagcctcttgaacctgcctt

SEQ ID NO: 900866 - DNA, 120 bp, Artificial Sequence
  ENSG00000245573_5 (sequence is synthesized)
aaggtaccaaccatatatgcatacttaatagggtattttgtcaaaactatgcatgaaggtcatttgtttgagatgtcagaacattttcccgtgagaagatctcattgggcattgaaacag

SEQ ID NO: 900867 - DNA, 120 bp, Artificial Sequence
  ENSG00000245573_6 (sequence is synthesized)
aaccacatgctcttcagaccagcaaccgcgactaccaaatactcctctgtcaactctacttgacacccaacagaatcccttcaaagcctcgtggtctgacaccctatgctacgtgacttg

SEQ ID NO: 900868 - DNA, 120 bp, Artificial Sequence
  ENSG00000245573_7 (sequence is synthesized)
tgacccatccatttgtcatgttcttcgggaatgtggctaaggggctaagatgtgacttgaaaagaaaggtagaacaagatcatctcaaatttattatcaaggaatagttcagaaaacgac

SEQ ID NO: 900869 - DNA, 120 bp, Artificial Sequence
  ENSG00000245573_8 (sequence is synthesized)
ttcagaccacagagacagcagaacagatggtccggcatggatagagcatcagacactcacagactgtgccaacaagagccatcgagtcaaaacagccaaaggaaggagggtcatggaatg

SEQ ID NO: 900870 - DNA, 120 bp, Artificial Sequence
  ENSG00000245573_9 (sequence is synthesized)
ggttctctcacaccaaactgatgcccagaggccctcagcatgaataacaaaggcaaccagacccacaagccatactgagtggatacaaaacctatacctaggctgacatcccaaatgtgt

SEQ ID NO: 900871 - DNA, 120 bp, Artificial Sequence
  ENSG00000245573_10 (sequence is synthesized)
gtggcaagttagatgatgatggcacaaaagacagaacaccttgcttctggccattgtcagctcttggaagagagcacacttttagaggagcagctgcaaggagcctgagaacaaaactgg

SEQ ID NO: 900872 - DNA, 120 bp, Artificial Sequence
  ENSG00000245573_11 (sequence is synthesized)
aaatgtctgttatgaaagccttcacaggaaattctgcaagtggcaacgtgggtccattccgtgtgtgtcactagagctggcgcaagcccatggccatggtgaggcagcgtttccactgga

SEQ ID NO: 900873 - DNA, 120 bp, Artificial Sequence
  ENSG00000245573_12 (sequence is synthesized)
actaatctgatacctgcaccagctcttgcaactgtgcagtgttcccactgcaaactacggatgggagaggataaagaacttcaatctttaaaaaagagagacacattatcagccaacatg

SEQ ID NO: 900874 - DNA, 120 bp, Artificial Sequence
  ENSG00000245573_13 (sequence is synthesized)
tcggtgctggatgtattttcccaatgttgcataagaggaataccttcgagagtttggcctaggaatgtggcctgggactccgccaagcatctctctccagcaaaatgactgcaaatttct

SEQ ID NO: 900875 - DNA, 120 bp, Artificial Sequence
  ENSG00000245573_14 (sequence is synthesized)
cgaccttcagattctacatgatgtaaaagaagtttgtctgtgtttaaaaacacattcaagaaataagtgaacatgtgaaaagacagaaaaacttgttttaatttgggcatagtttcagtt

SEQ ID NO: 900876 - DNA, 120 bp, Artificial Sequence
  ENSG00000245573_15 (sequence is synthesized)
ttcaaaggcacatgaaggcagaaagaaagaatcacaaaatggaactactgatgatagcaactccaaaaccaagactgattagactaaatcccatgtggcaaaaattttatttagtaagtt

SEQ ID NO: 900877 - DNA, 120 bp, Artificial Sequence
  ENSG00000245573_16 (sequence is synthesized)
tccttctccctctctccctttagatatatgtgcatacacacacacgcacctttattttagtaattttttttttctgaaaaagaaagttttctgcacctgattgcttccatgaataacaca

SEQ ID NO: 900878 - DNA, 120 bp, Artificial Sequence
  ENSG00000245573_17 (sequence is synthesized)
aagcacaaacaatatgactttctttggttatcatgcaattttttctctgcttaccagaaattggcacaaatttaagatatactatattctactccctgaagcacagtcgctggcatctcc

SEQ ID NO: 900879 - DNA, 120 bp, Artificial Sequence
  ENSG00000245573_18 (sequence is synthesized)
actggcatttaaaaatttgaagacatttaaaagaaaatccacaagcttatagttgctgtctaaatcaactttaacatttcatatattcacaatttcataagtgaatcaaattacacataa

SEQ ID NO: 900880 - DNA, 120 bp, Artificial Sequence
  ENSG00000245573_19 (sequence is synthesized)
atgaagtttctgtctacatcactagtgataatctgaagcagccattaatcaatctattagtgcattcagcaacatttatcaaagtgcctccccagaactgttttggatgctgttgtgggc

SEQ ID NO: 900881 - DNA, 120 bp, Artificial Sequence
  ENSG00000245573_20 (sequence is synthesized)
gcatgcaaaaatgaactaaatatagatttttgtcatccaagaattttaagtcaatttgtaattattggttcctggttccataactttttttttttttttttttggtgctggctcagatgt

SEQ ID NO: 900882 - DNA, 120 bp, Artificial Sequence
  ENSG00000245573_21 (sequence is synthesized)
ataccttcatctattctaaggttaaggcaatccttataattttcttcctttttcttgtttgtttgttttttgtgtgtgtgtttaaaatcttgcttatatttgactttattttattctcac

SEQ ID NO: 900883 - DNA, 120 bp, Artificial Sequence
  ENSG00000245573_22 (sequence is synthesized)
atcttctgagtacattaaagttaaaggtagatcataaatcgaaaacattcttaaaggtctctctactcaaattatttggtgttattgtatctcagaaagtataatgaattgcctgtagca

SEQ ID NO: 900884 - DNA, 120 bp, Artificial Sequence
  ENSG00000245573_23 (sequence is synthesized)
aataaataaaatcagaacctttatactcaatggttcggtttggtacatatccatgaaaataataaatgttaaaaaggatgctagccgttgattcctggcatgctattctacatttggcta

SEQ ID NO: 900885 - DNA, 120 bp, Artificial Sequence
  ENSG00000245573_24 (sequence is synthesized)
cattacaacgttaaaaggatttagtgcatatatcaaattgtggatctgcttgttttaaaatttcatctgtaattccacatgcaacccccacccccatacacactcacaagatctgaatat

SEQ ID NO: 900886 - DNA, 120 bp, Artificial Sequence
  ENSG00000245573_25 (sequence is synthesized)
ggtaacaaggaaatcctagtaactgtagcgttggaaaaatggttcatatggaaataagccatttggctagtaaagctggtgattttgttctctaggtggcactattacttcaatttttgg

SEQ ID NO: 900887 - DNA, 120 bp, Artificial Sequence
  ENSG00000245573_26 (sequence is synthesized)
tgagttgcttaaattacttggaactgcccgtttattttctttgaattcccattttataaattttaattttatacaagctagttgtaattaaacgacaggttgccttctaggttttatttc

SEQ ID NO: 900888 - DNA, 120 bp, Artificial Sequence
  ENSG00000245573_27 (sequence is synthesized)
agtaagtcaatttgaagttcagtgattttttatcatataattttatgtttccttactatactgtcttagttttaagaaatcctcccttgcctgacctcctctctccaaaaatgcagaggc

SEQ ID NO: 900889 - DNA, 120 bp, Artificial Sequence
  ENSG00000245573_28 (sequence is synthesized)
atgtcaaaaacacagagggtcgtcataaagtttccgtcagaccaaaggaaccaagatgaaagcatgtttaagagctactaggttctgggagatttcaaaatcaggacattactaccatga

SEQ ID NO: 900890 - DNA, 120 bp, Artificial Sequence
  ENSG00000245573_29 (sequence is synthesized)
caaccaatgaaaagttctttcaagtgaacctttggggaaaactatataacgttccttactctctaggctctctggaaataaacttttactttattatggctgtcactaaagcttgtaaat

SEQ ID NO: 900891 - DNA, 120 bp, Artificial Sequence
  ENSG00000245573_30 (sequence is synthesized)
ttactttgcttccttccaatcgttctcctgtcccacactcagccccctaactcacttaatgcaacccatcctcaaacatcaatctataaatgagacatcagggcaatgagccacttctta

SEQ ID NO: 900892 - DNA, 120 bp, Artificial Sequence
  ENSG00000245573_31 (sequence is synthesized)
gcatctagtatatttgataagatttgtctcatcaagaggataagtgccctagagcttctacttgaacttaaatacttaatttaaatgaaagcttccacacttatctgaccagatactcaa

SEQ ID NO: 900893 - DNA, 120 bp, Artificial Sequence
  ENSG00000245573_32 (sequence is synthesized)
atttttctacagaaaagagaataccttcctgttccacttaaagaacacacacatttaccactccccctcctctcccctgcaaaaggttttcaatgtcagtacattagtgagctccatttt

SEQ ID NO: 900894 - DNA, 120 bp, Artificial Sequence
  ENSG00000245573_33 (sequence is synthesized)
gcatctgccatcaataatgattccatatagtcaataattgggttcatgacctttctaaatctttacagtgtaaatattctggaaatccagtgaggcacttaagtataaaattatttagga

SEQ ID NO: 900895 - DNA, 120 bp, Artificial Sequence
  ENSG00000245573_34 (sequence is synthesized)
ttaaataattctatgccttaagtagaagtttaagaggacgtttaggacacacatgactaagcctacaaataccaaagccactctatgtttcctaggtttaaataccacatgcaaataaca

SEQ ID NO: 900896 - DNA, 120 bp, Artificial Sequence
  ENSG00000245573_35 (sequence is synthesized)
tacggatttcatttgccagcatcatttattgcctaacattactccatactaaacagagtaaatggatgcagagtgtaaccagtaagtttgctcattcacttttgaagctcatctgtgcat

SEQ ID NO: 900897 - DNA, 120 bp, Artificial Sequence
  ENSG00000245573_36 (sequence is synthesized)
gagtgtgtcgccgcggccatcagggtaagggtacctggacttgcggctttttaggtcggcctggctccgctccttccgcggtgacgaggtcccccggcctcctagggttgggaagagctg

SEQ ID NO: 900898 - DNA, 120 bp, Artificial Sequence
  ENSG00000245573_37 (sequence is synthesized)
ctttcctgactctcgttccctgcctcaggcttcccttatcccaatcgcttcgaacccttggctcagcgtagaggagtcaagcctggattctagtcccaccttgcccattagcagctctgt

SEQ ID NO: 900899 - DNA, 120 bp, Artificial Sequence
  ENSG00000245573_38 (sequence is synthesized)
actctgggattcggtggcaattaaatgtgtaatgacatgttgtcagttctcaatttgtgacagcattgctttaaatttaaaaatccacggcttgaatcttccctccaaatctgttaaggg

SEQ ID NO: 900900 - DNA, 120 bp, Artificial Sequence
  ENSG00000245573_39 (sequence is synthesized)
gtggaaagtacaaagagcatgaaacatatctgggtgagggagagaacaaggtgctttggtgcaccacaaagtaacaattttataagcagctgattcttataaaatcttaagtaaatgaaa

SEQ ID NO: 900901 - DNA, 120 bp, Artificial Sequence
  ENSG00000245573_40 (sequence is synthesized)
ctagtatcgcgagatcaggaaggtggccgagtgtgtcgccgcggccatcaggcacttctccttcctgcccttgtatgaagaaggatgtgtttgcttccccttgtgccatgattgtaaatt

SEQ ID NO: 900902 - DNA, 120 bp, Artificial Sequence
  ENSG00000245573_41 (sequence is synthesized)
atgaaataaccatagtaaggaaaaggatggtcatcactcttctcacctggtggaactgtagggagaaagcagaaacaagacagaaaactgagatactctattatagcaaagaagaaagat

SEQ ID NO: 900903 - DNA, 120 bp, Artificial Sequence
  ENSG00000245573_42 (sequence is synthesized)
aataccccaggacctcccttccctccttggccattaatgagatgaaggcaattaactcacatagtataaatgaatcatttgaggtgatgactgcattttaggcaaatgatgactttcttg

SEQ ID NO: 900904 - DNA, 120 bp, Artificial Sequence
  ENSG00000245573_43 (sequence is synthesized)
gttccattggtttgcaagtaaaagttacacacattgaaaagacactgaaacagatttcctaaatgcttcattttctggatgcaccaatgttgacctactatacatgttaaatggttttaa

SEQ ID NO: 900905 - DNA, 120 bp, Artificial Sequence
  ENSG00000245573_44 (sequence is synthesized)
aatatcaccttaaaataaaggaaacttccagctactaactcagctctgaatgggctatgaaaggctccaaaggtatgtgaaaaattactgttattttgctttaaaaaatgtgatgtctaa

SEQ ID NO: 900906 - DNA, 120 bp, Artificial Sequence
  ENSG00000245573_45 (sequence is synthesized)
gagtgtctgcaatgttctaatgcttcaaaacatgtacgtaagccttgtttatctggaaatcatttctttctgcttatatcatttataaatagaaaatgttctgtaataacttaaaatagt

SEQ ID NO: 900907 - DNA, 120 bp, Artificial Sequence
  ENSG00000245573_46 (sequence is synthesized)
tccacatacataatgcttttagtgtcataatacttactactggtctatatttaccaacatttatcacattttacaaaatgaagtagaagaaaaaaaagacaacgactttatggccctgga

SEQ ID NO: 900908 - DNA, 120 bp, Artificial Sequence
  ENSG00000245573_47 (sequence is synthesized)
attccagtaatggtgaccaacatgttttaaattccagtaaaggttatggttacatttcaacaagtgtctctttccttttttttacctctcctgctaacccagaggtaaatttcccaaaaa

SEQ ID NO: 900909 - DNA, 120 bp, Artificial Sequence
  ENSG00000245573_48 (sequence is synthesized)
acctgcaccagctcttgcaactgtgcagtgttcccactgcaaactacggatggggtaaaagactgctcacctcctatttctcatctaatctcacacactctgtttgatgaggctatggag

SEQ ID NO: 900910 - DNA, 120 bp, Artificial Sequence
  ENSG00000245573_49 (sequence is synthesized)
aaacaggtcttctcatacactaaaggtgggagtacaaacaattcaagccctgtgcaggacaattaggcaatacctatcaaaattatacatgatttttcctgctgacccagcaattccact

SEQ ID NO: 900911 - DNA, 120 bp, Artificial Sequence
  ENSG00000245573_50 (sequence is synthesized)
tctgggaataattgacagatataggtgcatatgtacaaaatgatggaaagctctctggtatatattagtaagtgataaaacaaggtgtaaaatagtgtatatatggctactaccttttgt

SEQ ID NO: 900912 - DNA, 120 bp, Artificial Sequence
  ENSG00000245573_51 (sequence is synthesized)
ataatagtacatactcatatttacctgtatctatataaaacacactatcaaggattcacaagaaactaatacaaatgatcaccttatagatggtatgtattgggggatactgaggtgagc

SEQ ID NO: 900913 - DNA, 120 bp, Artificial Sequence
  ENSG00000245573_52 (sequence is synthesized)
agggtataagtggggcaagacttttcagtgtaaacttcttttaaattttattttgatttttgaataatgtaaattaactgtcaaataattaaattaaaaataaccaatttattaacaaaa

SEQ ID NO: 900914 - DNA, 120 bp, Artificial Sequence
  ENSG00000245573_53 (sequence is synthesized)
tcctgaggcctcctcagccctgcagaactggggttatagccatgtgactgatcttcgtccaagaatatgtaaagaaaaagtgttgagttggcttttagggctagagcaatgtatcttagg

SEQ ID NO: 900915 - DNA, 120 bp, Artificial Sequence
  ENSG00000245573_54 (sequence is synthesized)
actctattatagcaaagaagaaagataatttcattgagccatcctgttttacagtttcagtgacccactctgtaataaagaacttggaaagggaggttccaagatggccaaatatgaaca

SEQ ID NO: 900916 - DNA, 120 bp, Artificial Sequence
  ENSG00000245573_55 (sequence is synthesized)
tcgcgagatcaggaaggtggccgagtgtgtcgccgcggccatcaggatttttgagccacttctgaaattttcgcgaaccaagaagaattttagtacttggatttgactaacatttatcca

SEQ ID NO: 900917 - DNA, 120 bp, Artificial Sequence
  ENSG00000245573_56 (sequence is synthesized)
agcccttagtctgtactgatactgtggagactacagaagccaagaaatcccataatttgctgtcttcaagtgggagacccagaaaagatgctttagttccagtccaagcatgaagaacca

SEQ ID NO: 900918 - DNA, 120 bp, Artificial Sequence
  ENSG00000245573_57 (sequence is synthesized)
aggcctgagaaccagaagagcctctggtgcatagataaggaagaaaaaagttttggaaactacttctgagagggaaaaatatgcctgaaattaaccaacagccagcttgtacttaacata

SEQ ID NO: 900919 - DNA, 120 bp, Artificial Sequence
  ENSG00000245573_58 (sequence is synthesized)
caaaataaacaaaagaatcaactattgtgtaaggagagaaccccgaaatgttcctcgttaatcgaaattcaagagtattagcgtcgggaaagatctagagagtcaactccctcatattaa

SEQ ID NO: 900920 - DNA, 120 bp, Artificial Sequence
  ENSG00000245573_59 (sequence is synthesized)
agaagagaagatggattgctgtcctacattcaaaggaggccattaggagcatgaaccaagggaagctggttttccttctatgcctctgccaggttattaaatcaccaggcctcctaatca

SEQ ID NO: 900921 - DNA, 120 bp, Artificial Sequence
  ENSG00000245573_60 (sequence is synthesized)
agaattgctcttcgtgtggaagaactcctcttcacctgttgcttcctcatattatttcctgcctcagagatgtagaggaactgtaaaattagaataggatgtttgggtctagacaaatcc

SEQ ID NO: 900922 - DNA, 120 bp, Artificial Sequence
  ENSG00000245573_61 (sequence is synthesized)
cagtgaaagctaaattatggaaatttagtctttgtataacaaatgaaaaccctaagtaggctgccaaggtacaaaagctttcttaacccgagacattgcaaatacaacgtactaagtgaa

SEQ ID NO: 900923 - DNA, 120 bp, Artificial Sequence
  ENSG00000245573_62 (sequence is synthesized)
aaaaggagtgggtggggaacagtgggagtagaaggctgtctaaagggaagctaggaaaatggaaagtaatatggagaagcaacatgctccaagtggagtgttttactatttcattgcctg

SEQ ID NO: 900924 - DNA, 120 bp, Artificial Sequence
  ENSG00000245573_63 (sequence is synthesized)
ttgaactgtacacaaataggcactactacataaaatagctatttgaaacagttatgccattgcagggtagaacattactctcaagtaaaggcttctaactgtacaattaaagtctcaatc

SEQ ID NO: 900925 - DNA, 120 bp, Artificial Sequence
  ENSG00000245573_64 (sequence is synthesized)
ttctttttttaacagaatttctctgatgtactcagcaaagtaaaattttgaatagattattttatttgaagtgaatgatattgtcaaatgttaaagagtctgcattttaaaataatttaa

SEQ ID NO: 900926 - DNA, 120 bp, Artificial Sequence
  ENSG00000245573_65 (sequence is synthesized)
tcagatcagaacatagaaacccatctgtgagttccagagatctaacataaaccctacttttccttgtaggatgagttgcagattctattaaagtgtaagggttgacttttttaatgtcac

SEQ ID NO: 900927 - DNA, 120 bp, Artificial Sequence
  ENSG00000245573_66 (sequence is synthesized)
ttgtttcatcatcactctgtagtacatgtaaaggcacagattgatgtatttttctggcatcttcctgacgcacccttgccctatataaatcggtttgccaggatcttgttgcttaaatta

SEQ ID NO: 900928 - DNA, 120 bp, Artificial Sequence
  ENSG00000245573_67 (sequence is synthesized)
gcgattgcaaactcttggtcctgccaacacagccgattgtgccaaggttctcagcatctactggcacatgaactgttgccttttctttggctttctgcatgtacctggggccatcatcct

SEQ ID NO: 900929 - DNA, 120 bp, Artificial Sequence
  ENSG00000245573_68 (sequence is synthesized)
tccttcacaaagcagcagtctggcttagttgtccctgagaaagacttcaggattggttggactcaactctggccctcttcaggttgtgcatcctgcacaatgtattttcagccacacaat

SEQ ID NO: 900930 - DNA, 120 bp, Artificial Sequence
  ENSG00000245573_69 (sequence is synthesized)
gtattgttcaggatttgtcgtgcacatacttgcagattggcagagccaactgccagagatgagaaccttttaagttgttgtcaaacgtcataaaatgtgttccgtgattaattttgtggg

SEQ ID NO: 900931 - DNA, 120 bp, Artificial Sequence
  ENSG00000245573_70 (sequence is synthesized)
cacagattggtttttgcacagagtccaaaatttaggatatgtcacagtgactaaatggcaccggcatgctgaatgaatttggaatttgttttgtcaagtgtgggagcaggcacacagatg

SEQ ID NO: 900932 - DNA, 120 bp, Artificial Sequence
  ENSG00000245573_71 (sequence is synthesized)
ggctttgatccagtggtgctgcttggaattctcattatagcaatgatgtcacttgtcacgtggagtaagtgataatgctgccaaattgtggaaaaagcaaggcaaataggaaagtacaca

SEQ ID NO: 900933 - DNA, 120 bp, Artificial Sequence
  ENSG00000245573_72 (sequence is synthesized)
gaccaagagaaaggacttaggtagcacagtaagctttcactatcagatgaatggacataaacattgcttttgggctgccaaaaatatgcatagtaaaaatacaggcagaaaggaaaactt

SEQ ID NO: 900934 - DNA, 120 bp, Artificial Sequence
  ENSG00000245573_73 (sequence is synthesized)
ccaactgaaagggcccttaaagtagggcccctgtaatccaagaagtcttcacttcttagagaaaatcaagtaaagcaaacatgtccttgatttttatattaggctatgaaagaaatttct

SEQ ID NO: 900935 - DNA, 120 bp, Artificial Sequence
  ENSG00000245573_74 (sequence is synthesized)
gagctgcaatcaagagtctttctgcaatatctaaccaaaccaaagccaaagtattttgctttataaaaaaaacctttgtctatgaagaagatcagcagtcatgctgggaaattgaaaaaa

SEQ ID NO: 900936 - DNA, 120 bp, Artificial Sequence
  ENSG00000245573_75 (sequence is synthesized)
acaaaaaccttatagtggcaaagaagtacagtatactctcaccaagcatgcacatcagaattctctgtagggctttaaaaatatattcttgatgcagctacagcagtgcttagagggaaa

SEQ ID NO: 900937 - DNA, 120 bp, Artificial Sequence
  ENSG00000245573_76 (sequence is synthesized)
tcaactctacttgagtaagaacgctttcaattaaggcctaagtgtcaacatgcctttaaaaaaaatcgtggtgacacaaaatctttctttttagcacccaacagaatcccttcaaagcct

SEQ ID NO: 900938 - DNA, 120 bp, Artificial Sequence
  ENSG00000245573_77 (sequence is synthesized)
ggtaggccaagccaccttgtcctcggatgtttgcttctttcatgggggcagccttcatgcaaccaaagtatgaaataaccataagatactctattatagcaaagaagaaagataatttca

SEQ ID NO: 900939 - DNA, 120 bp, Artificial Sequence
  ENSG00000245573_78 (sequence is synthesized)
cttgcaactgtgcagtgttcccactgcaaactacggatgggaatgtctgcaatatctgctggctttatgtttcatatgataagcatatcgtctgtgccttcagacacattatcagccaac

SEQ ID NO: 900940 - DNA, 120 bp, Artificial Sequence
  ENSG00000245573_79 (sequence is synthesized)
atatctactcccatcattcaacaaacattttactgggtgccctatccagttaataaagttaggaaattaaataaaaggcatgcagattttcagatgatatgattgtctatgccaaaaatt

SEQ ID NO: 900941 - DNA, 120 bp, Artificial Sequence
  ENSG00000245573_80 (sequence is synthesized)
tcaaggaattcataagcaaattccaagtactaaaaagtgagtttaatgagattacagggtacagggttcaacacacaagaatcaaatgtatttctttatactagcaatgaataattggca

SEQ ID NO: 900942 - DNA, 120 bp, Artificial Sequence
  ENSG00000245573_81 (sequence is synthesized)
actaaacatttttaaaaaatttacattagctccaaaaaatgaaacacataggtgtaagtgaaacaaagcatgaacagggtctgtatgctgaaaattacaaaaacttagtgaaataaagca

SEQ ID NO: 900943 - DNA, 120 bp, Artificial Sequence
  ENSG00000245573_82 (sequence is synthesized)
acaaaaacttagtgaaataaagcaaaaaagacctaaataaatggagagatacacagttttatggattgaaagaattaacatagaaaaaatgtaactcagctgggcgcagtggctcatgcc

SEQ ID NO: 900944 - DNA, 120 bp, Artificial Sequence
  ENSG00000245573_83 (sequence is synthesized)
aatatgtaactctgcacaaattgatctatagatttaatgcaattccaagcaaacctcaggagtatttttacagatccagacaagctgattctaaaatttatatggaaagtcaagggaact

SEQ ID NO: 900945 - DNA, 120 bp, Artificial Sequence
  ENSG00000245573_84 (sequence is synthesized)
gtaataaccaaaacaattttgaagcagactagtaaagttggagaaatcacactatcagattttaagatttaatataaagctgtagcaatcaattcagtgtgatattggcaaaaggataga

SEQ ID NO: 900946 - DNA, 120 bp, Artificial Sequence
  ENSG00000245573_85 (sequence is synthesized)
catagatcagtggaacagagaagccagaagcagacccacacaaatatattctagttatttttcagaaagttgcaaaagcaatttcataaaggaatgatagccattcaacaaatggtgttg

SEQ ID NO: 900947 - DNA, 120 bp, Artificial Sequence
  ENSG00000245573_86 (sequence is synthesized)
gaacagccagacaatcatgggcaaaaaaatgaaccttcatcttaatttcaaatcttacataagaattaactaaaagatttacatgtaaaatacaaaattatacaaatttaaaggaaaaaa

SEQ ID NO: 900948 - DNA, 120 bp, Artificial Sequence
  ENSG00000245573_87 (sequence is synthesized)
ctctgagtttatcctacttttaaaaagctgagtggtgttttacacattttggaataggcagctagtgcttctttttctgcttttgaagtttcctgggaagtcccttaaaagcataccaca

SEQ ID NO: 900949 - DNA, 120 bp, Artificial Sequence
  ENSG00000245573_88 (sequence is synthesized)
aaattaatctcttcctgtttgccagagggttgctctactctaaatttggctctacatctacaagcatgctctaggaagccaattaaaatggatgaacaagcaaaatgaaaacatacctat

SEQ ID NO: 900950 - DNA, 120 bp, Artificial Sequence
  ENSG00000245573_89 (sequence is synthesized)
ggaccaacccaaggttaccgtcaggtggtgaaggacttcagaatcacttacctgaagcattgtgtttctcagcagcaaagagtagcatccccagccctgaccctaattttattcctactt

SEQ ID NO: 900951 - DNA, 120 bp, Artificial Sequence
  ENSG00000245573_90 (sequence is synthesized)
ctcagttctgaggcatggacttacaaaaagacacatacatgcaatggccatcatgatatccaaataagtaggaaaaggaactgtgtttctgcccatgaagttttactgaattcaaaggca

SEQ ID NO: 900952 - DNA, 120 bp, Artificial Sequence
  ENSG00000245573_91 (sequence is synthesized)
acctacctccagtcaataggtcagaatgcagaaatggctgaaaactctggtattgaaaagcaaatgttctccacttttgtaagaaataacattttcaaccactaagagactttattacca

SEQ ID NO: 900953 - DNA, 120 bp, Artificial Sequence
  ENSG00000245573_92 (sequence is synthesized)
tccctaaacacacaaaaaaatttcttttagatttactctcactttgcacgaatagcaaacatgcttagaactgcttagattgcacaatgttctcagattaggaagggaaaattggtttga

SEQ ID NO: 900954 - DNA, 120 bp, Artificial Sequence
  ENSG00000245573_93 (sequence is synthesized)
ataaaatacagatgtctattccgctaacaactaaatctttgtgaatgttctgagtcctgtaccatcaaagaaatagatcgtccatgggggtttctatttctggtagattgtacttacaca

SEQ ID NO: 900955 - DNA, 120 bp, Artificial Sequence
  ENSG00000245573_94 (sequence is synthesized)
ctgaatgaaaaagctttctcctaatattcccagtccaaataaaaacaacccaaggggcacctcttatttaggtcaataaaagtttgcaaatgtggaatactttagccatctacatcacac

SEQ ID NO: 900956 - DNA, 120 bp, Artificial Sequence
  ENSG00000245573_95 (sequence is synthesized)
tggtagagactttctgtgatcagctattttttaataccatatttaatcaaatctaagataccatcattgtgaaactcgacattttatatatcactaagaaagcaaaaatgcagcctgggt

SEQ ID NO: 900957 - DNA, 120 bp, Artificial Sequence
  ENSG00000225383_0 (sequence is synthesized)
ctcttttgcaatcatctttcctcccgacaacacccgtatttctttcctcttactctaattgaagaccagccacaggaaaatctctaggcacctcttcaagtgagatggcagaccacctca

SEQ ID NO: 900958 - DNA, 120 bp, Artificial Sequence
  ENSG00000225383_1 (sequence is synthesized)
aaataagggagagacaaagagaagagcagaagaacagaagaatggagtggcaaagagaagagaaggagtgactgaacattgacaagactttggttggggatggtcagagaggagattagc

SEQ ID NO: 900959 - DNA, 120 bp, Artificial Sequence
  ENSG00000225383_2 (sequence is synthesized)
tgctagacggccacactgcggagaaagatcattttcccactccatcccccttccagctccccatccatctcaccaagagccagctccaccactcaataaaaccttacattcatctttcaa

SEQ ID NO: 900960 - DNA, 120 bp, Artificial Sequence
  ENSG00000225383_3 (sequence is synthesized)
gaccttggcagagagcgccctgggaaatgcggatatagaaggtcaggagaacatctctcctggttatacagcattccaggactcctcatctgtttttaagagggaaatctgagttttcaa

SEQ ID NO: 900961 - DNA, 120 bp, Artificial Sequence
  ENSG00000225383_4 (sequence is synthesized)
ggaaagccgaatacagttgccaagttgccagtcaaagaaacaatgtcaacacctgctcatagagatggaattcctaacccggaatattgcccttgaattacaacgagaaaaagcacctct

SEQ ID NO: 900962 - DNA, 120 bp, Artificial Sequence
  ENSG00000225383_5 (sequence is synthesized)
attcatggatccaagcctacctatgtgaagtctggttgtagaggtgaggccatgtggaaggcagtttgcaaactctatcagccacctgtacaggtgatgatatggacaggagacagggac

SEQ ID NO: 900963 - DNA, 120 bp, Artificial Sequence
  ENSG00000225383_6 (sequence is synthesized)
tcctggttatacagcattccaggtgggctttcatgtggttgaggataatatcattagcaccaaaggtgaaaatccgtggaagctcatcttatttcagcagaagagtaggatgggccttgt

SEQ ID NO: 900964 - DNA, 120 bp, Artificial Sequence
  ENSG00000225383_7 (sequence is synthesized)
atttcttcatccccctctctacttccctgtgacctcctgcaaataaggtgaggctgtttattttctcacttgatttccattctttgagttgaatcacagattgcagcaaacttgtaatag

SEQ ID NO: 900965 - DNA, 120 bp, Artificial Sequence
  ENSG00000225383_8 (sequence is synthesized)
cagattgagaaatatagaactatttcaagggtttgtggtttataacttccttttaaaagaattaaccctttctaggaatttttttttttttttcaaatggatcacaaggtgtgacgcaag

SEQ ID NO: 900966 - DNA, 120 bp, Artificial Sequence
  ENSG00000225383_9 (sequence is synthesized)
atttctcatcatcctgatctgtattatggttggcttattgggtgccttcctgatgtggtagtccagggtcattttttattccctcttgtaaatacccaagaccagaaatctataggtata

SEQ ID NO: 900967 - DNA, 120 bp, Artificial Sequence
  ENSG00000225383_10 (sequence is synthesized)
gtgagtccaaaggagatttctcttcatgataacccttaacatgggcattatctcatgtaatgctacagaagcacgatgaggcatgtattgtccctgtgtcactgaggaaatgaaaacata

SEQ ID NO: 900968 - DNA, 120 bp, Artificial Sequence
  ENSG00000225383_11 (sequence is synthesized)
gccaaagtagccctgccggtagacagtggcgcaattgtgagcaattccagctcctgtgtggctgaccccggagccagtgctttaccagagattttccaccttggcctagaccttttgttt

SEQ ID NO: 900969 - DNA, 120 bp, Artificial Sequence
  ENSG00000225383_12 (sequence is synthesized)
tatttatttatttttccaattttggaggttccacttgcagaaaacattttttttaaattagtttttttctaattgacaaataaaaatgatatatatttatgatatacaacctgacatttt

SEQ ID NO: 900970 - DNA, 120 bp, Artificial Sequence
  ENSG00000225383_13 (sequence is synthesized)
gatatatgtatgcattgtggaatggctaaatcaagcccattagcatatctaatacctcacatactttgcattcttttgtggtgagaacacttaaattctacactctcagcaattttcaag

SEQ ID NO: 900971 - DNA, 120 bp, Artificial Sequence
  ENSG00000225383_14 (sequence is synthesized)
aacttctttctcctaactgaagttttgtatcctttgaccaacttctctccaatttcttcccccatccctcccatgctctagtaaccacccttcttctactctctgcttctaagagatatt

SEQ ID NO: 900972 - DNA, 120 bp, Artificial Sequence
  ENSG00000225383_15 (sequence is synthesized)
ccttcttctactctctgcttctaagagatatttttttgtggattccacatataagggagaccatgcagtgtttgtttttctgtgcctggcttacttcacttaacataatgtcctccaggt

SEQ ID NO: 900973 - DNA, 120 bp, Artificial Sequence
  ENSG00000225383_16 (sequence is synthesized)
ttctttttttaaggttaaatagtatttcctgtatatatatatcacattttaaaaatccatttatctgttgtttgacactgaggttgactccgtatcttggctattgtgaattgagctgaa

SEQ ID NO: 900974 - DNA, 120 bp, Artificial Sequence
  ENSG00000225383_17 (sequence is synthesized)
atgaacatgggagagcagatatctcttcaacatattgattttatttcctttggatatatagccagtagtgtgattgctagatcatatcataattctgtctgggctgggaacttttaaaat

SEQ ID NO: 900975 - DNA, 120 bp, Artificial Sequence
  ENSG00000225383_18 (sequence is synthesized)
cccaatgtccatggcacactccagatgatattgagatagaatctcagaagctggcacccaggtgtcagtattatttaaaacttccaggtgatgctgatgtaaagggtgggttcggtgcca

SEQ ID NO: 900976 - DNA, 120 bp, Artificial Sequence
  ENSG00000225383_19 (sequence is synthesized)
ctgcattacatggatccctgattgatcaccatgaagaatcaaggtgaggattggctgtaactcaaacttgagtgaaatgcatatggaattttatgcatattcatcttatatttgacagta

SEQ ID NO: 900977 - DNA, 120 bp, Artificial Sequence
  ENSG00000225383_20 (sequence is synthesized)
taggagaaggcagttacccagcaagggccccaccctcaaaacagaaatcctgtggccctaaatgggaacaggtattcctgtttttgtgcccaaaagttgccttttgccccatcacacctc

SEQ ID NO: 900978 - DNA, 120 bp, Artificial Sequence
  ENSG00000225383_21 (sequence is synthesized)
cctatcctgtacccacataaaccccaaactgctggctccacagggagagacaaagagaagagcagaagaacagaagaatggagtggcaaagagaagagaaggagtgactgaacattgaca

SEQ ID NO: 900979 - DNA, 120 bp, Artificial Sequence
  ENSG00000225383_22 (sequence is synthesized)
agtcggcctttgttagcacacagggctcacacccacagggacaaaggaatacccaaaggaaaaatctgtggctcagatagtctccatatcatagaccagggaatcacacctgaaacattg

SEQ ID NO: 900980 - DNA, 120 bp, Artificial Sequence
  ENSG00000225383_23 (sequence is synthesized)
atcttacagtcttttttggttttgtttttctttgaatggcagctttagattgttctggtttttgtgtgcttacaaacaggactcctcatctgtttttaagagggaaatctgagttttcaa

SEQ ID NO: 900981 - DNA, 120 bp, Artificial Sequence
  ENSG00000225383_24 (sequence is synthesized)
gggaaaatgtggagtgtcagtcaagaggcaacactaggaggcaaggaatctgcatttctttcagaccttggcagagagcgccctgggaaatgcggatatagaaggactcctcatctgttt

SEQ ID NO: 900982 - DNA, 120 bp, Artificial Sequence
  ENSG00000225383_25 (sequence is synthesized)
aagcaaacccaaccctctgagcctgtggtttccgcaagtactggggttagagtcatgagggaagtgtgggaaaatgtggagtgtcagtcaagaggcaacactaggaggcaaggaatctgc

SEQ ID NO: 900983 - DNA, 120 bp, Artificial Sequence
  ENSG00000225386_0 (sequence is synthesized)
ggggcacgacttggctcgcgttgctgcggcggccgctgcagaccctgctccaggcgccgtagccttgcaggaagagcagacaaagacaggagagaggcaaagcgccgcttgcccagagat

SEQ ID NO: 900984 - DNA, 120 bp, Artificial Sequence
  ENSG00000225386_1 (sequence is synthesized)
gcagtcggctcagtcaatagagggaaatcgcctccaaacccaggctgggaatgagggaggaggggcgaggcggctggggactagaaaaagcagcagggaattaacgtgacagtcagagcc

SEQ ID NO: 900985 - DNA, 120 bp, Artificial Sequence
  ENSG00000225386_2 (sequence is synthesized)
cagccagtgcctcgccggcgctgctctctcgcctcgcggttgcggggtccggaatggagagaggaggcgggggctgagcgttggctgccggagaccagctgaggagattttagaacacaa

SEQ ID NO: 900986 - DNA, 120 bp, Artificial Sequence
  ENSG00000225386_3 (sequence is synthesized)
acatagatacatgtggatagcagccaatacagagagagggagagagaaaaaggagggatcagaagctatatttgtaacttttgattagtgaactacagaaggaagcctaacactgcagga

SEQ ID NO: 900987 - DNA, 120 bp, Artificial Sequence
  ENSG00000225386_4 (sequence is synthesized)
ccatgaccttcacatctactttagtggcccctctgggtcagagatggatgaaatggaaatgcatttctctgagcccaggaattgagtttctgaaatctgaatcactggggtgcctgaaac

SEQ ID NO: 900988 - DNA, 120 bp, Artificial Sequence
  ENSG00000225386_5 (sequence is synthesized)
tctgctgtctaatggatgaatgggtcgaaaatgtgaagatatgattaccatgaatcctttgtacaaggtgatccagttaactactaataacaaaccatccttaaacttcttggcttaaga

SEQ ID NO: 900989 - DNA, 120 bp, Artificial Sequence
  ENSG00000225386_6 (sequence is synthesized)
taacagccatcatttatttagcctgaatctaaaatttggacaaggctcactgagtaatgcgcacctctgatccacttcccacatggctcgccatatacctgacaggctgtgttggctgtt

SEQ ID NO: 900990 - DNA, 120 bp, Artificial Sequence
  ENSG00000225386_7 (sequence is synthesized)
ggctattggttgagcatccgacaggagttgagaaccagggaccttagtttctctccatgcggggctctccctgtgcatcacaccataggttctcaaagacttcctcaccgcatagcggtt

SEQ ID NO: 900991 - DNA, 120 bp, Artificial Sequence
  ENSG00000225386_8 (sequence is synthesized)
gggttcaccaggagagctccaacaggggtcagaccctttccagataatgaaaacctgaacaatttagccttatcaattgtacaaattcatccagtcttcaaacagtatcataaattttag

SEQ ID NO: 900992 - DNA, 120 bp, Artificial Sequence
  ENSG00000225386_9 (sequence is synthesized)
cccagaacacaccaggcaaactgaaccagtgaactaacgaatcatttgaacgatttaggcaaatggatcaatttttcttttatatgttgagataatttcatcaacaattggagtcttagt

SEQ ID NO: 900993 - DNA, 120 bp, Artificial Sequence
  ENSG00000225386_10 (sequence is synthesized)
caattaaatgaattcacaatagtttctatattaaaaaaattaatgatgtcttcacatagggaagactaaatttctcatggtatttttaaaggcctctgcaatttaactctcttcccagtc

SEQ ID NO: 900994 - DNA, 120 bp, Artificial Sequence
  ENSG00000225386_11 (sequence is synthesized)
ctatctcatcacctcctctagtctctcatatttatccatcttacctgagccttgttttgacttgtattagggctgaatgttgagaagtctccctttcttactagactctaagttccttga

SEQ ID NO: 900995 - DNA, 120 bp, Artificial Sequence
  ENSG00000225386_12 (sequence is synthesized)
gagcagagactttttcagtttatgtccccacaaccctcagccctgagacatgcatgaagtatgtgcttgatatacctttactgaaaaaatgaataattcaacatcccttggctttctaat

SEQ ID NO: 900996 - DNA, 120 bp, Artificial Sequence
  ENSG00000225386_13 (sequence is synthesized)
tcaatcattcattttccaaaatggcaatattggtcatgagttacttcacagggaagctaattaattccctgaaactggaaaatgttttgaagttccacagtactttagaagcacacagga

SEQ ID NO: 900997 - DNA, 120 bp, Artificial Sequence
  ENSG00000225386_14 (sequence is synthesized)
acattaatatgtgtaatacatacattattattacttccctgacacataaatggtaaataatccctttttagtgtgtttgttttggatgtactggacaaatttgcagaaagtaatgtattg

SEQ ID NO: 900998 - DNA, 120 bp, Artificial Sequence
  ENSG00000225386_15 (sequence is synthesized)
ttggctcatttctactaatggacacctgtgtggactgaataagatgtggtctcttctagctctattatttgtttatttctccaactttcagagccactatttatacatgcttcttgccag

SEQ ID NO: 900999 - DNA, 120 bp, Artificial Sequence
  ENSG00000225386_16 (sequence is synthesized)
aaaggtgaccatgacatgagaatcggccttcttggggttctatgtcttaacagatagtacgggtacctatacaattctaggagtgccccagccacataattactgtgatgtaactacaaa

SEQ ID NO: 901000 - DNA, 120 bp, Artificial Sequence
  ENSG00000225386_17 (sequence is synthesized)
gctgcatgatctaatagagaatccttgccccaaagtggaactgtctctcctctggaaattttgtataagaaaactgggagggttgggttaacctctctggtagctaaagctgcaagattt

SEQ ID NO: 901001 - DNA, 120 bp, Artificial Sequence
  ENSG00000225386_18 (sequence is synthesized)
aaatcataggtgcaatgagcaggtatactgtctgccatgtggagaaagccatactgcagtatgagtgataaagctgccacacaggtacagacgtgagagacagggcaattccctgtagct

SEQ ID NO: 901002 - DNA, 120 bp, Artificial Sequence
  ENSG00000225386_19 (sequence is synthesized)
tctatgcccctggatacagctatttaaaggtccagccatgtctctgttcttcccatagctttttatatatccactcatttcaataagtttccctttttacttaaagtcattcaaattttc

SEQ ID NO: 901003 - DNA, 120 bp, Artificial Sequence
  ENSG00000225386_20 (sequence is synthesized)
tttccatcatttgggacccaaaaaatttcaactaatgcaacatcaaagaaagatttgaggaatgactctcagaaaatgtttaattaaaagttggagagaagtattttgggatgctttgat

SEQ ID NO: 901004 - DNA, 120 bp, Artificial Sequence
  ENSG00000225386_21 (sequence is synthesized)
ataaggcttacatttttcaaagttaaaagcccaaaagcaacataaactgaactatttttccagacagtaaaaataggaccttaaatgtgaaaacatgatcccagtgtttgtaatttacta

SEQ ID NO: 901005 - DNA, 120 bp, Artificial Sequence
  ENSG00000225386_22 (sequence is synthesized)
gaatgtagacttcatgaaggcagagatttggatcctttgctactatattccaacaactagaatagaattctacgtagggtaggatattaatatttattgaataagttgatgtatttcctt

SEQ ID NO: 901006 - DNA, 120 bp, Artificial Sequence
  ENSG00000225386_23 (sequence is synthesized)
gttgcatctctttcttaatcccagtaggaatatgaaaaattctcatttattgaactcatgctataaaacagccatcgtgctaaaatgttgtcaaaatttcattttttaccagatgttggg

SEQ ID NO: 901007 - DNA, 120 bp, Artificial Sequence
  ENSG00000225386_24 (sequence is synthesized)
actgttctcatagataaaacagtttgctcaagggcacacaggttctatatattgaggctaggggttaaacccaggatcacctgtctccaaaacatgtgttttttctaccatcccacaatc

SEQ ID NO: 901008 - DNA, 120 bp, Artificial Sequence
  ENSG00000225386_25 (sequence is synthesized)
acatattaatgtgttcctttatagggcagaaatctttcctgaggtattaagatgtaaggcgtagagctagactggtattttgcttcatatataattgcagctttaaatatcaagggttta

SEQ ID NO: 901009 - DNA, 120 bp, Artificial Sequence
  ENSG00000225386_26 (sequence is synthesized)
atgaataaagaattagttcccattttatagacaagtaagtggaggtctatggtgttgcctcagtattcatcaatgtcttctctgaaagtcttattatgaggatggaagctccactcttgc

SEQ ID NO: 901010 - DNA, 120 bp, Artificial Sequence
  ENSG00000225386_27 (sequence is synthesized)
tcctcttgcctccccatgaagagacttcataacatcttagtctcttgtagctgttgctgctctaccacacagcttccaactgcaaggaagcacctgcttctctatgcctggtcttttgac

SEQ ID NO: 901011 - DNA, 120 bp, Artificial Sequence
  ENSG00000225386_28 (sequence is synthesized)
gagtgccaggggacttactgctccattaccaataactgatgagaaatgatggataaatatcccacatgcaactcctcttttgagatgtctctaaggcatgttgtacactgtgccccagaa

SEQ ID NO: 901012 - DNA, 120 bp, Artificial Sequence
  ENSG00000225386_29 (sequence is synthesized)
gtcctgtatatgattaagcactcgttacacacaacactagcttgcccaaaagcgaaccctttattggcttctttcccatccttgtctcactgccctaactctaccagaattttccaaata

SEQ ID NO: 901013 - DNA, 120 bp, Artificial Sequence
  ENSG00000225386_30 (sequence is synthesized)
aatttcttgaattcacacccttatcccaaaggtttgcatctgggatacccccaactaaggcatctctctggcccattcactcttgaactctaaaagagagggtcaaattacctgattgat

SEQ ID NO: 901014 - DNA, 120 bp, Artificial Sequence
  ENSG00000225386_31 (sequence is synthesized)
cagtttaaaagaagacactgaaaattatccttacatttatctcttttgaagatatcaagtacataggacacaaacgtgttcagactgcaccctgccatgtgcttaaggacttgcactttg

SEQ ID NO: 901015 - DNA, 120 bp, Artificial Sequence
  ENSG00000225386_32 (sequence is synthesized)
gggaaggtcttagtcactgaatgaacaagtcagtttacttcaaaagtaaggtattaggacatatcaaagtccttatagatctaaaatcacgtttccaatcaactttatttgcaatacagt

SEQ ID NO: 901016 - DNA, 120 bp, Artificial Sequence
  ENSG00000225386_33 (sequence is synthesized)
ggacattttaatttccatcaaaattagcttcacatgattcataatagccaaaaggtagaaacaacccaaatgtctccatcaactgacaaatggaaagagaaaatatattatagccatata

SEQ ID NO: 901017 - DNA, 120 bp, Artificial Sequence
  ENSG00000225386_34 (sequence is synthesized)
atgaaatattacttggccataaaaagagatgaagtactgatacatgctatagcatggatagaccatgatactatggtaagtagaataagaagccagtcacaaaagatcacatattgtgtt

SEQ ID NO: 901018 - DNA, 120 bp, Artificial Sequence
  ENSG00000225386_35 (sequence is synthesized)
attctattcacatgaaatgtctgggacagagaaatttacagagacagaaagtagattagtggttgcttagggctgtggtatgagttggagatgaaaaacatgataactaaagagtgtgag

SEQ ID NO: 901019 - DNA, 120 bp, Artificial Sequence
  ENSG00000225386_36 (sequence is synthesized)
gtttccttttgaggtgataaaaatgttttaacattgactgaagtgttggttgtcctatatctatcaataaaagccattgaagtgtattctttaagtagatgaattatgtctcaaaaaagt

SEQ ID NO: 901020 - DNA, 120 bp, Artificial Sequence
  ENSG00000225386_37 (sequence is synthesized)
ggtaaaagctagccccacgtggtgatgcaaaatgttaatgttgtgtgaaagatacatgacagctctgtgctatctttgcaactcctctgtaaatataaaacagtcatctcttaaggttgt

SEQ ID NO: 901021 - DNA, 120 bp, Artificial Sequence
  ENSG00000225386_38 (sequence is synthesized)
aataatcaattgagatattatatatgacaccactgtacctggcaaatactctctttccccctcctccttctccctctaactaaaatagggacccatgtggagatatatatatatacacac

SEQ ID NO: 901022 - DNA, 120 bp, Artificial Sequence
  ENSG00000225386_39 (sequence is synthesized)
acacacacacacatatatatgtatatatatacacatgtatatatatgtgtgtgtatatatatgtatgtatacatatatatatagatatatggacagcaccacgtctgcttctgaggcatc

SEQ ID NO: 901023 - DNA, 120 bp, Artificial Sequence
  ENSG00000225386_40 (sequence is synthesized)
atggacagcaccacgtctgcttctgaggcatctgattttttttccctaaaatctccattatcctttatgtcctcttgttactttacgggtgtaacatttggcccgataaggtgtagttaa

SEQ ID NO: 901024 - DNA, 120 bp, Artificial Sequence
  ENSG00000225386_41 (sequence is synthesized)
tatccctattactacaatttaatagacataataagccaattcagttttcaatgccagagatttgggcaaaaaataaagcagggtgacatcaataactgatgccagtgtggcccttctcag

SEQ ID NO: 901025 - DNA, 120 bp, Artificial Sequence
  ENSG00000225386_42 (sequence is synthesized)
caattgtttttttcttgtttcttttgcaccccatcatagctatttttgttatttatgtgtgttttatgaaaatggtagcattccaccagatccacatgtaagcctcgagttgctgatgca

SEQ ID NO: 901026 - DNA, 120 bp, Artificial Sequence
  ENSG00000225386_43 (sequence is synthesized)
ggctttccttcctccttctgtagaacttgtgaaagccagcacaatatttctgttagttggtctggagtcaattctgtttctaattatggggtttattttcttcttttgttgtaaagtttt

SEQ ID NO: 901027 - DNA, 120 bp, Artificial Sequence
  ENSG00000225386_44 (sequence is synthesized)
ctccactccctgggggtgtttcaaggatttgacaaggaagctttccctatggtcctgatttcatcgtagaagccaagggtgtggaggaaatgcccttgctggagtggaggcggaggtttc

SEQ ID NO: 901028 - DNA, 120 bp, Artificial Sequence
  ENSG00000225386_45 (sequence is synthesized)
agtcctctttctaaacttaaaaggaactaaggaaaccagagacaagccatctaatcccttcaggcttcagtgttttcttccgtaaaatgagaggattggcttgaatgtctctaaagtttc

SEQ ID NO: 901029 - DNA, 120 bp, Artificial Sequence
  ENSG00000225386_46 (sequence is synthesized)
actcaggcctgacattctctcaaaatgcaagcattttcctgaagtttactgacaagcagttgccaaacaccagaagagtgctgatatgttgctagctaatattatctctcatctgtttgc

SEQ ID NO: 901030 - DNA, 120 bp, Artificial Sequence
  ENSG00000225386_47 (sequence is synthesized)
agcattttgctcggagatcatcagtgagagcagttcagtgttctgatgtctgctctgaggaaagctttagagaacacaggaacagggagtgatacagagggtagattcctccaacatgag

SEQ ID NO: 901031 - DNA, 120 bp, Artificial Sequence
  ENSG00000225387_0 (sequence is synthesized)
agttcccagagccacagacaaaaggtcctcggaggaatctttctctaaactgcttctcctttccaacttcccaaatttgacctcctccagggaccatccttttctgaccacaggaaaagc

SEQ ID NO: 901032 - DNA, 120 bp, Artificial Sequence
  ENSG00000225387_1 (sequence is synthesized)
ccttccttaaatcctttaaagcctaggcttaggggattgggctcctgctttaagaggagcatggcagagcgatcaagcacagggacccagcctgcgtctgaagtcactgtcagctctgtc

SEQ ID NO: 901033 - DNA, 120 bp, Artificial Sequence
  ENSG00000225387_2 (sequence is synthesized)
ccatggcttcggcactttactaacttctctgtgcctctacttcctcttctgaaaatggggacgccgaggtccatggcgttcacctcggagaattaaataaatgaagatgtggaacatcct

SEQ ID NO: 901034 - DNA, 120 bp, Artificial Sequence
  ENSG00000225387_3 (sequence is synthesized)
tagaacagtgcctggcacatgcagcctgaacagaactgctgtgcaggaagagaagtgaagacggagaccacccagcgagcacaatgctcaaaggcccaatggatccactcctgaccctgg

SEQ ID NO: 901035 - DNA, 120 bp, Artificial Sequence
  ENSG00000286330_0 (sequence is synthesized)
ggaaaaaaaaactggggagaactaggcggctttctgatcagagttcagataaaaagggtcacagtaatttgtgggcactgactaaaataacccaatggatttgagagttaccgcaaaaga

SEQ ID NO: 901036 - DNA, 120 bp, Artificial Sequence
  ENSG00000286330_1 (sequence is synthesized)
agcaaacagacaaactaaagaggtataactcctacttgaagagtgtgagagaatatttactactcggatgtttgagacataccaaaaaatgctttttgatcctttatcaagaagacgtaa

SEQ ID NO: 901037 - DNA, 120 bp, Artificial Sequence
  ENSG00000286330_2 (sequence is synthesized)
tgaccaagattgataaagaaaaatgcaatggttactttacctgcaaccatctcaaagacgctctaatgtcatttcagaggacttcagccatgaacttggtgatgagccagagaaggtaac

SEQ ID NO: 901038 - DNA, 120 bp, Artificial Sequence
  ENSG00000286330_3 (sequence is synthesized)
ttttcatcccctacaagacctattccatgttgcagctaaccttaaagaaatcatcacttggaactgattcagaatcccatatcacattttgttattacttttgcctggtctcctgctgtc

SEQ ID NO: 901039 - DNA, 120 bp, Artificial Sequence
  ENSG00000286330_4 (sequence is synthesized)
tggaacagtttttcagtcttccttcattttcaagagtgtgaaaggatcccaagaccaaaagtctgggaactgctggtttagagtcacaatactgactgctcaaaatgactttttaaagaa

SEQ ID NO: 901040 - DNA, 120 bp, Artificial Sequence
  ENSG00000286330_5 (sequence is synthesized)
gaaagccttaaaaacccttgagtgaatggttggtatttacagacaagcaaatgtatggaagagaaacgagagacccagcctgaatctgttgaatgaacgaaaggggaaatgccctaagga

SEQ ID NO: 901041 - DNA, 120 bp, Artificial Sequence
  ENSG00000286330_6 (sequence is synthesized)
gtcagatggaagaagtttttctgggaagagcagaacacaggagttggggtgcagacctcctggatcaccagcagaaggaaaagagcagtgagacgttaaagtgattgagacaaaaatgga

SEQ ID NO: 901042 - DNA, 120 bp, Artificial Sequence
  ENSG00000286330_7 (sequence is synthesized)
ctttctgagatcgagttcctggcagtgtcatcagcagatggtttcttctgaagttcaggggaagagaagatgctcgaagaactctccagggactgagtgggtggtacagagctagtgctg

SEQ ID NO: 901043 - DNA, 120 bp, Artificial Sequence
  ENSG00000286330_8 (sequence is synthesized)
tagatgccatgtatacaggcaaattccccaatgagtgttttccaatatcaagtttaactggcatttaagatatatgccaaaggtaggtaaattattttggcctgtgcttataggtttatt

SEQ ID NO: 901044 - DNA, 120 bp, Artificial Sequence
  ENSG00000286330_9 (sequence is synthesized)
tccctggatgaagctttctgtctctgtcctagtgcactgtagcagatgcagggtctttccatacaatacattaaaagctgcatctcattttaaatatattatagaaaccctgatcataca

SEQ ID NO: 901045 - DNA, 120 bp, Artificial Sequence
  ENSG00000286330_10 (sequence is synthesized)
atacatacaagatttttaagatcagccttcagtcgatttttttgctttatttttgttctggaggtcaaaatgagtggttaactgtctaagttgattgcagagaaagttactactcattct

SEQ ID NO: 901046 - DNA, 120 bp, Artificial Sequence
  ENSG00000286330_11 (sequence is synthesized)
aaacgtaggtttttagaaaagtgttcttggcagttgctaccattggctttttccaacttacatgggaatcaagattcagaactggtacaccaatgggaagagcctggaaaatagactatt

SEQ ID NO: 901047 - DNA, 120 bp, Artificial Sequence
  ENSG00000286330_12 (sequence is synthesized)
gatcaagatgaatctggtccagatactttaagaccttttcagtgtgtttttaagattataagtttgaactaacagaaacttcaatgctgttttttcacaagtcaatgtgtagtgtactgt

SEQ ID NO: 901048 - DNA, 120 bp, Artificial Sequence
  ENSG00000286330_13 (sequence is synthesized)
tattcttttttttcctgtaatatcttaataatattcctggctgtaagaaaaagttaacactatacctatgttttgacttactttatagaagacccaaacaatatttaacaaaaggatttt

SEQ ID NO: 901049 - DNA, 120 bp, Artificial Sequence
  ENSG00000286330_14 (sequence is synthesized)
tcaatttgcttctttttgaaacttccacattttggtgttcttttcagcatcactcattttctttcataataaagatacccaataacaatatcataataaagatttgataacaaatctcca

SEQ ID NO: 901050 - DNA, 120 bp, Artificial Sequence
  ENSG00000286330_15 (sequence is synthesized)
gttttggagtgttacatttcatatctacatgcttacagagaatttagtatgaatattccctggccttagttcctctaagcctaggatacttgtagtcatttggcaaataatttaatccat

SEQ ID NO: 901051 - DNA, 120 bp, Artificial Sequence
  ENSG00000286330_16 (sequence is synthesized)
ggcaaacatgagtcttaatacaaaaattattgagtaggcaaaaaataattgaacatattttggactgattaccagtgcattaaaaaagtagaggtttaaggatgagaataataagttttt

SEQ ID NO: 901052 - DNA, 120 bp, Artificial Sequence
  ENSG00000286330_17 (sequence is synthesized)
ttgtttttacttaaatttatataaaaggagtgaaaatacagtagcctatagtacttaagagtgtgggtatattttcagcacttaataattactagttgaattgcataatatgggactata

SEQ ID NO: 901053 - DNA, 120 bp, Artificial Sequence
  ENSG00000286330_18 (sequence is synthesized)
actgatatggtttggctctgtgtccccgcccaaatctcatgttgaattataatttccaatattggaggaggtacctagtgggaggtgactggatcattgggggaaatttcccccttgctg

SEQ ID NO: 901054 - DNA, 120 bp, Artificial Sequence
  ENSG00000286330_19 (sequence is synthesized)
agatctgatggtttaaaagtgtgtggcatttccccctttactctttctctctcctgctggccatgagaataagtgcttgcttcccattcaccttctgccatgcttgtgtttcctgaggct

SEQ ID NO: 901055 - DNA, 120 bp, Artificial Sequence
  ENSG00000286330_20 (sequence is synthesized)
ttctgccatgcttgtgtttcctgaggcttcccagccatgcttcttgttcaagctgcagaactgtgagtcaattaaacctcatttcttcataaattacccagtctcagctctttatgggag

SEQ ID NO: 901056 - DNA, 120 bp, Artificial Sequence
  ENSG00000286330_21 (sequence is synthesized)
tgtgagaatggactaataaaatatctctagaattatgtttttggagataatttaaagataaacaaatattggaaacctcatttgatcacacagagaacagtaaatggaagttctactttt

SEQ ID NO: 901057 - DNA, 120 bp, Artificial Sequence
  ENSG00000286330_22 (sequence is synthesized)
tctccagggcctttctcatgcttatgcagggattattcacccagatatcctgaaataagacatccaattaaggtacctgctatctcatgtaacacagaagaaagttgagcatagaggtta

SEQ ID NO: 901058 - DNA, 120 bp, Artificial Sequence
  ENSG00000286330_23 (sequence is synthesized)
aacattacctaatattgttggaaaagcttcgaagcgttcattttcaaagcagctaatgtaaaccatgataatcactagtagcactatgccattttaaatacttcaatattttgtagttat

SEQ ID NO: 901059 - DNA, 120 bp, Artificial Sequence
  ENSG00000286330_24 (sequence is synthesized)
tagattctaagtaagtataaaatgtagtgaatacaaattttatttgcctaaacagtgttagacaatataaattaacgagttattttttattctgtttaatattttcaagccaataaacac

SEQ ID NO: 901060 - DNA, 120 bp, Artificial Sequence
  ENSG00000286331_0 (sequence is synthesized)
aggagcttgggatacatggatgaacaaggcagacaagtatccccatccgtatggagtttacattccaggggcaggagacaggtcagtaaattatacttttgttagagagtggtaagtgct

SEQ ID NO: 901061 - DNA, 120 bp, Artificial Sequence
  ENSG00000286331_1 (sequence is synthesized)
atggaggaaaggaaagttgtttctggagatgcagggttgggggcaggtcacagctggagtcaggcagcccagtcaagaggctgtggaaagtcaagctggagaggcaaggcctgctggggg

SEQ ID NO: 901062 - DNA, 120 bp, Artificial Sequence
  ENSG00000286331_2 (sequence is synthesized)
acaccacgggccagactgtgtatggtaggggtgggaccaaggtgccactgagcttttacgtttaggtggcaaagaagatgatgtcattcataaaagcaggaaggcattagttcatttgag

SEQ ID NO: 901063 - DNA, 120 bp, Artificial Sequence
  ENSG00000286331_3 (sequence is synthesized)
gaacagaaagagtgcagtgcatctgatgagcggggagaggcgtttcagatgaagagacaggctgggaccaggtcatgtagcctggtagtctcttggggaattattccaagaacaatggga

SEQ ID NO: 901064 - DNA, 120 bp, Artificial Sequence
  ENSG00000286333_0 (sequence is synthesized)
caagccttctgcagcttccggcccttcctgccgcaattccaaggagcaccttggcaaagctaaacttcgatgctctcttaggaggtggatgaacgcctggtcctcctctcccttctcctc

SEQ ID NO: 901065 - DNA, 120 bp, Artificial Sequence
  ENSG00000286333_1 (sequence is synthesized)
cgtggcctccagtgcttgctctggcaccagcaaccccattttctatctatctatctttggagcccaaggctggagctgatgaagctctcaagagggcagcatccgcatgggagcagtgag

SEQ ID NO: 901066 - DNA, 120 bp, Artificial Sequence
  ENSG00000286333_2 (sequence is synthesized)
ctcttttctgctgagagcagcagcagccagagccaaagcttggacaacagctaccgggtcttaaggatggttcccaaggcagccttgcagcaggatccaggtctgggtgtcatatccttt

SEQ ID NO: 901067 - DNA, 120 bp, Artificial Sequence
  ENSG00000286333_3 (sequence is synthesized)
gccctgtgcatggacaggccagctcccccatcagtgagtaagagagtaggtcctgtgctggttccgagagcagcgggaatcacaggtagtctagtcaacagaaagggagggacaagcgaa

SEQ ID NO: 901068 - DNA, 120 bp, Artificial Sequence
  ENSG00000286333_4 (sequence is synthesized)
gctgaaacatgacgtggtggaaagtgcagacagtgcattcaatctgtcatcaaatttcatccaaagtaagatgtacttgtttcttttttttttttttttagggttaaacatgtttttctg

SEQ ID NO: 901069 - DNA, 120 bp, Artificial Sequence
  ENSG00000286333_5 (sequence is synthesized)
ttgctgttcagagaaatgtctttggagccaagtgcatggcccaaaggtgccactcagtggcagactggagtaatgcaacccaatttctgcaaggcaagacgactgtgtgtgtgtgtgtgt

SEQ ID NO: 901070 - DNA, 120 bp, Artificial Sequence
  ENSG00000286333_6 (sequence is synthesized)
gtccccaaatgctgggctccaactcttcccctgatttgccattttttgccatttaggattctgatgatctccttaaaggaacctctcagcgaccctgcagagccaagcgtaaggcagaga

SEQ ID NO: 901071 - DNA, 120 bp, Artificial Sequence
  ENSG00000286333_7 (sequence is synthesized)
aggcttcatgacttccatcagatcaggaagctggctctgccctcatcctgtctacgccatatcttgccttggtgtacctttctgggtgcctctctcttcatctgtaaaatgggcactgag

SEQ ID NO: 901072 - DNA, 120 bp, Artificial Sequence
  ENSG00000286333_8 (sequence is synthesized)
tggatggagggatatgtggcatggctctggaaaacttcctatgcagacttaactcagaaatgctttcaggtcctgtgagggggagctgaggaggggtcagtgtggtggccacaggctcaa

SEQ ID NO: 901073 - DNA, 120 bp, Artificial Sequence
  ENSG00000286333_9 (sequence is synthesized)
cagccttctctccgcaggtggcctgggcagatgctgccgcccagctcttgctgctgccatctggtgtcccctgcccttccacagctctctgacagccacaagtcctgggtgctcaggtcc

SEQ ID NO: 901074 - DNA, 120 bp, Artificial Sequence
  ENSG00000286333_10 (sequence is synthesized)
ttctggcttctgggtgagaggaaagcagtcgtgtttctttatccagagtccagagagggtggggaaggaagggcttgaaaggagctgttcccctacctcattgttcaggtgggcccttga

SEQ ID NO: 901075 - DNA, 120 bp, Artificial Sequence
  ENSG00000286333_11 (sequence is synthesized)
ctcttgagctggggcatgggtctcctccatctcccaggcctgccctaggttctgtagggctctctgtccactctctcaggtctgctgtgaaaagaaggaagtggccgggaggcttgccaa

SEQ ID NO: 901076 - DNA, 120 bp, Artificial Sequence
  ENSG00000286333_12 (sequence is synthesized)
gtgaaaatggccatctgctggtgagagtacctacaaggctttctctgcctggaaggccatgtctgaccagtaggtgaaagatgcggggaacctggctctataggaagaagccagtgttgg

SEQ ID NO: 901077 - DNA, 120 bp, Artificial Sequence
  ENSG00000286333_13 (sequence is synthesized)
cttttccaaggcccagaaggggtcaaatgtccagagacgaagtcagtgaggcttcctcagccccatgctaggcagacaggagaaccaggttcacagagggaggccgtctgggctgaatcc

SEQ ID NO: 901078 - DNA, 120 bp, Artificial Sequence
  ENSG00000286333_14 (sequence is synthesized)
ctggctggaagcaaccttctgggtcagcgtcttcccacgccccctgggcccctgcaacttctcacacaaatggatgacacctgggtgatttcctgccccctcaatcaatgccacatggga

SEQ ID NO: 901079 - DNA, 120 bp, Artificial Sequence
  ENSG00000286333_15 (sequence is synthesized)
ggtcactttctgtcacctctgtcagcactgaggaggagctgctgagcccctgtgggaaggccctgaggaccctgggagctctgcaggctccctgcggttcctgagggctcagggtccttt

SEQ ID NO: 901080 - DNA, 120 bp, Artificial Sequence
  ENSG00000286333_16 (sequence is synthesized)
ttgcaggatgatttgggtgccacatgaaaatgtacatcactcagctggatatagagatgaccggagctgatggaaatacaaatttcataatcaatttttttgagacagggtcatgatctg

SEQ ID NO: 901081 - DNA, 79 bp, Artificial Sequence
  ENSG00000286333_17 (sequence is synthesized)
aatttcataatcaatttttttgagacagggtcatgatctgtcacccaaactggagtgcagtggcttattctcctgcctc

SEQ ID NO: 901082 - DNA, 120 bp, Artificial Sequence
  ENSG00000286334_0 (sequence is synthesized)
aagctgggattggccactttagcaattagttctgcttgggactgtctgttagtatctttggtatagaaaaaaaaaaactttaaaagacagtctgaagactaatcccaggtgtgcacctat

SEQ ID NO: 901083 - DNA, 120 bp, Artificial Sequence
  ENSG00000286334_1 (sequence is synthesized)
ttgagcagctcttgagatggaaacttttatccctcaagctacagcattggagagcttctaaagatacagaacactgggatccatacccagacctactgaccagatgcctccataagtccc

SEQ ID NO: 901084 - DNA, 120 bp, Artificial Sequence
  ENSG00000286334_2 (sequence is synthesized)
cgaaggaatatcatttggcagccactgatataggctactattttttggtctgtcctgtggaaacagcttgcaatcctcacaagaacctcgtaatgtgaatatgccagcgtgttgctacag

SEQ ID NO: 901085 - DNA, 120 bp, Artificial Sequence
  ENSG00000286334_3 (sequence is synthesized)
accgtgcttacttcagccaatttctctgctgaatatcctccttttactgatgaggaaaccaagtcaagaagtcataaatgacacacccaaggctgggaagtggttgagcaggtatttaga

SEQ ID NO: 901086 - DNA, 120 bp, Artificial Sequence
  ENSG00000286334_4 (sequence is synthesized)
ctcaggtctattttactcctgtgcctgtgggccgttttcacattcttttcagttggacagttttaaaaatgtgtaatgttgcactcaaattaaataacctgaaattttgcaattctgaaa

SEQ ID NO: 901087 - DNA, 120 bp, Artificial Sequence
  ENSG00000286335_0 (sequence is synthesized)
ggaatataacaccttaatgaggcctactaggtagtggtatatcaaaatattgctctcccttcttatgcttctacttaactttctacacattttggcaatggtagctcatgaaagaaaact

SEQ ID NO: 901088 - DNA, 120 bp, Artificial Sequence
  ENSG00000286335_1 (sequence is synthesized)
gagagatggttcaagagtttctttatgaggctgaggtccctgggccctgcagaaggacagatgtaagaaaacttggcaaagttcacagctgctccatggccacacattgatgaatgtatc

SEQ ID NO: 901089 - DNA, 120 bp, Artificial Sequence
  ENSG00000286335_2 (sequence is synthesized)
ccatgtccttggcttccttacataatgcaaacacagctgaattgatccacttcaaatcttcataaacaattcaactgaggatgaaagcaggaatccagcagcacatcaaaaagctaatcc

SEQ ID NO: 901090 - DNA, 120 bp, Artificial Sequence
  ENSG00000286335_3 (sequence is synthesized)
gaagctctgtataaagtctaaagggcctgggattaattctgtgttgtttaatgatgtatttcaagtgcctgaagacaaagaaaggtgacagaatagctgttagaatagtgactgttggtt

SEQ ID NO: 901091 - DNA, 120 bp, Artificial Sequence
  ENSG00000286335_4 (sequence is synthesized)
ttatttaaacctaggaaggattagttgggaatttgtagaaaaaaggtaggattttctattaacccacaaacttacattcagcattctgccttgagtactttcttttgattttctacatgc

SEQ ID NO: 901092 - DNA, 120 bp, Artificial Sequence
  ENSG00000286335_5 (sequence is synthesized)
caggttttcccataaaccataatgtttcaaaatacagctcctactcaaagctatgtgtctctagatctgtaataaatataaatattaagacttttgaaataaactaaaccttgaaatgaa

SEQ ID NO: 901093 - DNA, 120 bp, Artificial Sequence
  ENSG00000286337_0 (sequence is synthesized)
ctatatccacagccatcctatcctttcctactgttacaacagatgttcctcccatccatggccaaaatgtcatctatgcttgggatcctatctccttcttagaaaactactattgatgac

SEQ ID NO: 901094 - DNA, 120 bp, Artificial Sequence
  ENSG00000286337_1 (sequence is synthesized)
ctcttctaccccatatatgcttgcctcttcctttttcctagtagttcttaaaatagttctttcccattaaactcataaactttcctcttttatagccagcttccctaagaactctgtttc

SEQ ID NO: 901095 - DNA, 120 bp, Artificial Sequence
  ENSG00000286337_2 (sequence is synthesized)
cactccttcacctactgtgatctgtcctttgccccagtcactctagtgaaatagcataagttataaccacatgactgacatcttgccaacaggaatgcatgtggaaaaggtataacactt

SEQ ID NO: 901096 - DNA, 120 bp, Artificial Sequence
  ENSG00000286337_3 (sequence is synthesized)
cccatctgaggcactcaagaaaaggcgtgagttctctaccttctctctcccatccacctggctgacagagttggaggatggaagtgtcctggattcctaacagaaactgccagagtgctg

SEQ ID NO: 901097 - DNA, 120 bp, Artificial Sequence
  ENSG00000286337_4 (sequence is synthesized)
cccaaccctcaggagactgacacaggtgccatgctctacacagaagctcacaggattgtgctacccattcctgtcttaaaatattaaagacctcactgctttcagcataaaaatatgaaa

SEQ ID NO: 901098 - DNA, 120 bp, Artificial Sequence
  ENSG00000286338_0 (sequence is synthesized)
tctgtgtttactttgagcagccatacaccatgcatggacactaagcttcttactgcttctgattagtgacctcaattgagactcattgctcattgcaaagactgctaatggattgtttga

SEQ ID NO: 901099 - DNA, 120 bp, Artificial Sequence
  ENSG00000286338_1 (sequence is synthesized)
gcctgaatgtgttaggatggaatatttcttcttctcagattcaaggccagtttttttccaccccaagtccattctacccagagttctagatgatgatggtcaggttattcaagataatga

SEQ ID NO: 901100 - DNA, 120 bp, Artificial Sequence
  ENSG00000286338_2 (sequence is synthesized)
ttatgttttctagatgatttaaaatgaagttcaacttttattatcttccctataatgatatttgtagtctttatgttcaataacaagctgtcaggctgcctcagtttaagccaaggcatt

SEQ ID NO: 901101 - DNA, 120 bp, Artificial Sequence
  ENSG00000286338_3 (sequence is synthesized)
ttcttatcaaaacccatcacagaaaaagatacaatcatgaaaccacagattcttgtagctcttcacagtaaactttaactatgaataacctcttggattattagccgattgtgattacat

SEQ ID NO: 901102 - DNA, 120 bp, Artificial Sequence
  ENSG00000286338_4 (sequence is synthesized)
ttatattatttgctcacatgctttgtcactttagagccctgaaaaccctgttcattgttgctaggagatgggtggctatggcaacagtgtgggtcagagccagatggaatgcctaaagca

SEQ ID NO: 901103 - DNA, 120 bp, Artificial Sequence
  ENSG00000286338_5 (sequence is synthesized)
cacggaagccccaaatcactgcctcttcagcttgtttcaaaagactgagtctcacactgtcacccgggctggagtgcagtagtgtgatcttggttcactgcaaccaccgcctcccaggtt

SEQ ID NO: 901104 - DNA, 120 bp, Artificial Sequence
  ENSG00000286338_6 (sequence is synthesized)
gcttcctgagtagctgggattacaggagccagccaccacacccagacatattccttgaaggtagaatcactgtcagcagagtccttgccaggaacgactttccagtgaaggagacaatgg

SEQ ID NO: 901105 - DNA, 120 bp, Artificial Sequence
  ENSG00000286338_7 (sequence is synthesized)
aaatttggacaacattttgaaaaccactaacagtaacaacgtgttaataataattaaaacattaagatgaagaagacaaagaaggagaaatatgaagggattgctaattgctggtgttct

SEQ ID NO: 901106 - DNA, 120 bp, Artificial Sequence
  ENSG00000286338_8 (sequence is synthesized)
gcatttgttttcttatttaatcctcatcataaccttatgaggtgtttctctcgggaaaagagagaaattgttggcagaaaataatgaaaacacaaggacttgtgctatgtgctgaaagaa

SEQ ID NO: 901107 - DNA, 120 bp, Artificial Sequence
  ENSG00000286338_9 (sequence is synthesized)
ttgctcctgaaacgataaaggtgaaatgcagataaagacaatcaagatacagccttttttaaaaaattatttccattccagtcctatccatcctggctataaagtgactctcaacccaaa

SEQ ID NO: 901108 - DNA, 120 bp, Artificial Sequence
  ENSG00000286339_0 (sequence is synthesized)
gagtccttacggaaggctgaatgggaactccacctactgcctgttgaccaagcattaaatattttggaggttcaaaagcctctgagcttgtcataatgggcttgctttcagcactgagca

SEQ ID NO: 901109 - DNA, 120 bp, Artificial Sequence
  ENSG00000286339_1 (sequence is synthesized)
aagaattacccatctgggatatcattctcctccgggaaagggtctccaatcacctctcataaggagacatgtcctgctgcctcactgcggtggcctcaggggtaaggaatcagaacccac

SEQ ID NO: 901110 - DNA, 120 bp, Artificial Sequence
  ENSG00000286339_2 (sequence is synthesized)
ccagtgtgaagaataaacctggactctcggcaacacaggaagaaaaagcctacagtacagataccacggcgacaaggactcaaggcctcctagcgagattacatccttgtcaaaggttgg

SEQ ID NO: 901111 - DNA, 120 bp, Artificial Sequence
  ENSG00000286339_3 (sequence is synthesized)
ctccggaaagccgaaaaagggtgaacccaccacacaagtgaagaaggccccacctctggcaaagtcatggaccatcactccaggaccaacagcctcaaaactaacattcaaacgggtttg

SEQ ID NO: 901112 - DNA, 120 bp, Artificial Sequence
  ENSG00000286339_4 (sequence is synthesized)
tctttttcttctccccttagctactcaaggatatcttactgttaatgtaactatgcttgtctagtcttaccttgtggagatctccaaagtcaaagacagttagcttgtacagaaaagtac

SEQ ID NO: 901113 - DNA, 120 bp, Artificial Sequence
  ENSG00000286339_5 (sequence is synthesized)
ttctgcccctctgtggaaagagttaatactcctgtgtcttgcatatggggggaatcctcagaggaagagttaggcaattgggggttatggtctcagtgggcagttttagggcactgccct

SEQ ID NO: 901114 - DNA, 120 bp, Artificial Sequence
  ENSG00000286339_6 (sequence is synthesized)
aaaaccatacctacacttcaccaaaggggccaccccttctgactgtcaatctaatcattgcaatccagtacttatccattgtaaaaattaaagatctaaagcaaaccatagccattgaaa

SEQ ID NO: 901115 - DNA, 120 bp, Artificial Sequence
  ENSG00000267069_0 (sequence is synthesized)
cgccactgtccagaacagacgataagaatttcacaggactttcgtctggaagtttgcggttgacaatgcgtttttacctacatgatcacagtaactttcccagcaaggctgttagctaaa

SEQ ID NO: 901116 - DNA, 120 bp, Artificial Sequence
  ENSG00000267069_1 (sequence is synthesized)
gaaggtgccctccccgccctggagcctgagagaggacgagctgcagccttgtccaagagaaaggcccgggggacccagccatccacctccctgcccaccaccacccttccttccaaggag

SEQ ID NO: 901117 - DNA, 120 bp, Artificial Sequence
  ENSG00000267069_2 (sequence is synthesized)
cacgcaagaccaagcctaggactcgctacaaagctcggttcctaactagaccggcggggactgactaggaatggaatccaggcaaacacctggccgatcataatcagatgttactaaata

SEQ ID NO: 901118 - DNA, 120 bp, Artificial Sequence
  ENSG00000267069_3 (sequence is synthesized)
caatcagcacctagcacagtgtctgggacatggcaagtgctcaatatttatggaagaaaagagtgaataaatcaagaaatcgtcattaaacaccaaaattgtgtttaacagaaccaaaca

SEQ ID NO: 901119 - DNA, 120 bp, Artificial Sequence
  ENSG00000267069_4 (sequence is synthesized)
gcgccacgcacttgtgaccctgacctgaagcttctggtcgagaaggcccttgaactcccaggccctccctgtaagcaggttgggcagtgcagagggcacagggcacagggcggagccaca

SEQ ID NO: 901120 - DNA, 120 bp, Artificial Sequence
  ENSG00000267069_5 (sequence is synthesized)
gggaaagatgagcagggtgctacccacaggaaggtgccctcccgatccccccacagcctctgccccctgtaaacacagtggcctgtcttctctgggcctcttcccttttctctgcatcct

SEQ ID NO: 901121 - DNA, 120 bp, Artificial Sequence
  ENSG00000267061_0 (sequence is synthesized)
agaagccagttcttcccaacaaaggaacttaggatttacaagtcagtaaaacatgtgcaacatttccagaaatgtaccagagttgttcgtgatcataaccccaaatcattggtacctcga

SEQ ID NO: 901122 - DNA, 120 bp, Artificial Sequence
  ENSG00000267061_1 (sequence is synthesized)
tgtttagaggggaaacagcattggctgggcaagctggggcagggaacgtgatgaacagtgggctggaataagttaactggaggaggggaggcgtctcaggaagggagaatagcatgaaca

SEQ ID NO: 901123 - DNA, 120 bp, Artificial Sequence
  ENSG00000267061_2 (sequence is synthesized)
ctgcataagggaggtgtgtgaacagcagaagcaggacaaacctgagatgaatgtgaggttctgccctgttgtaacaatgctgtcttctcacaaactactcatgtgccctataagaagata

SEQ ID NO: 901124 - DNA, 120 bp, Artificial Sequence
  ENSG00000267061_3 (sequence is synthesized)
acccacaatccctgattctgctttattcaatgactagctactgcacagaccgtgtaaatggacaggacagccagagagggagaagatggctaaactgaagcaacttggagctagaagata

SEQ ID NO: 901125 - DNA, 120 bp, Artificial Sequence
  ENSG00000267063_0 (sequence is synthesized)
gatgggcgtgtctccatggcatgggttctgccactgcctcttctctcacctcacaacgcagggctgccacgtgttcccaacagcaagaggagtttggggatccataaagacgtttcccag

SEQ ID NO: 901126 - DNA, 120 bp, Artificial Sequence
  ENSG00000267063_1 (sequence is synthesized)
catgaagacacagagctgagcttgagatgagaactttggagctggaagtggcctcaggaaaggccctagaaaacaagatgcggatgccccttgtctgaagacaggatcaggatgctccca

SEQ ID NO: 901127 - DNA, 120 bp, Artificial Sequence
  ENSG00000267063_2 (sequence is synthesized)
caaagatcagatgggaagaacctggtgtaaactcaaagacagattctggaagacctccttcttctctcctgttatgtgcgtgagataaagtcaggtatatctccaaatgctatccctccc

SEQ ID NO: 901128 - DNA, 120 bp, Artificial Sequence
  ENSG00000267063_3 (sequence is synthesized)
tggtgtctttataagaggaaaatgtcacatgaagacagaaacacacacggaaggtggccacgtggaagatggagggagagactgaattatggtgccacaagcaaaggaacacttggggct

SEQ ID NO: 901129 - DNA, 120 bp, Artificial Sequence
  ENSG00000267065_0 (sequence is synthesized)
aaagaaaatatggaaatgcaatagattcagaatcataagatgtagacacagaaggaatcttggagaacatttaaaacttagggaactcttgagacaaaatctcactctgtcacccaggct

SEQ ID NO: 901130 - DNA, 88 bp, Artificial Sequence
  ENSG00000267065_1 (sequence is synthesized)
actcttgagacattgtcacgatcttggctcactgtaacccctgcctcccagttcaagcaactctcgtgcctcagcctcccaagtagct

SEQ ID NO: 901131 - DNA, 120 bp, Artificial Sequence
  ENSG00000267065_2 (sequence is synthesized)
cacgtcctgccttattattatttttgagacacagtcttgctctgtcacgcaggctggagccatgtcagctcaatgcaacctctgcccccctggattcaagcagttctcctgccttggcct

SEQ ID NO: 901132 - DNA, 82 bp, Artificial Sequence
  ENSG00000267065_3 (sequence is synthesized)
tctgcccccctggattcaagcagtcttgctctgtcaaccaggttggagtgcagcggcgcaatcttggctcactgcaacctct

SEQ ID NO: 901133 - DNA, 65 bp, Artificial Sequence
  ENSG00000267065_4 (sequence is synthesized)
ctcagcctcccaagcagctggtagtttcaccatctcggacagactggtcttgaactcctgacctc

SEQ ID NO: 901134 - DNA, 120 bp, Artificial Sequence
  ENSG00000267065_5 (sequence is synthesized)
ccttggcctcccaaagtgctgggaaatgacaggtatgagccactgcgcctggccagtgatctcttcttactgcactctgtgacttgccttgaattccttcctgcacaagatccaggaacc

SEQ ID NO: 901135 - DNA, 120 bp, Artificial Sequence
  ENSG00000267065_6 (sequence is synthesized)
ctcccttagggtctgggtagggacccctttttctggcaacagagactttaaatacttttatgactgcctctgatagattgttctacacatctgtcctttttgttaacatgattataggaa

SEQ ID NO: 901136 - DNA, 120 bp, Artificial Sequence
  ENSG00000267065_7 (sequence is synthesized)
atgtaatttagggcaccaagagaagatctattcacggaacacaggagtgaatacacactgcctctgtattgatggaactcatgctgggccattaagtatttatccatgtatgcaaatgag

SEQ ID NO: 901137 - DNA, 120 bp, Artificial Sequence
  ENSG00000267065_8 (sequence is synthesized)
cattgttttcaagatattgagcctctcctacctttccttctaactgatccaaatcagaataacctgattggtgagctgagcttcacctctaacttgacttgttgttgtgctgctattggt

SEQ ID NO: 901138 - DNA, 120 bp, Artificial Sequence
  ENSG00000267065_9 (sequence is synthesized)
aatgaggtgatactaagggactttttatgttgatagtgtgagcgtctcacatgcatgggataggtagggtatgtgggccctgggttttgactaggtgagatgcgaggaaatacttttttc

SEQ ID NO: 901139 - DNA, 120 bp, Artificial Sequence
  ENSG00000267065_10 (sequence is synthesized)
ctgtgcctggccttttttttttttttcaccattttttgagacggggtttcactctggcccagggtggagtgcagtgggactacaggcatatgccaccatgcccggctaaattttgtattt

SEQ ID NO: 901140 - DNA, 73 bp, Artificial Sequence
  ENSG00000267065_11 (sequence is synthesized)
tgccagatatgaggaaatactacccactttggcagagtgctttatccttgctaaaataccttaccccaaatgc

SEQ ID NO: 901141 - DNA, 120 bp, Artificial Sequence
  ENSG00000267065_12 (sequence is synthesized)
acccactttggcagagtgctttatccttgctaaaataccttaccccaaatgcaagaaacaaatcttattcctgtttgttttttgagacggagtttgctcttgttgcccagactggagtgc

SEQ ID NO: 901142 - DNA, 120 bp, Artificial Sequence
  ENSG00000267065_13 (sequence is synthesized)
cagcagctgctgtgctcaatttctcgcccggccttagctgcctccctgcggggcagggctccggacctgcagcctgctatgtctgagcctccccgcccccgccgtgggctcctgccctgc

SEQ ID NO: 901143 - DNA, 120 bp, Artificial Sequence
  ENSG00000267065_14 (sequence is synthesized)
acctgcagcctgctatgtctgagcctccccgcccccgccgtgggctcctgccctgcccgagcctccccaatgagcgccgccacctgctccagggcacccagtcccatcgaccacccaagg

SEQ ID NO: 901144 - DNA, 83 bp, Artificial Sequence
  ENSG00000267065_15 (sequence is synthesized)
tcaccaatcagcaccttgtgtctagtttagggttggtgaatgcaccagttggcgctctgtatctagttaatctggtggggact

SEQ ID NO: 901145 - DNA, 120 bp, Artificial Sequence
  ENSG00000267064_0 (sequence is synthesized)
gtgctgggtcacacctgatgccaacatggctctgaatctcatccaacgcccatgattccagctttggccatggggagctccttcatgctggttcctgcatccttcagacatgccctgtcc

SEQ ID NO: 901146 - DNA, 120 bp, Artificial Sequence
  ENSG00000267064_1 (sequence is synthesized)
ttctgtgagcactgtcttactttctgaccccacaagatatttcaggctcatcttgtagtttccctgctccagtcctggactcagccacttctccaagaacctctgattctttttcttaga

SEQ ID NO: 901147 - DNA, 120 bp, Artificial Sequence
  ENSG00000267064_2 (sequence is synthesized)
gaatggtattgagaagccaagatctggggactaagtgttcaacttgtgttccactgttactttaatgtatccctggaatccaatcaagagatagaaaccacatggtagtttaaatagaga

SEQ ID NO: 901148 - DNA, 120 bp, Artificial Sequence
  ENSG00000267064_3 (sequence is synthesized)
atgtttaatataactattaactataacaggagattggagaaatgggggattggctagtaagaggtaagaagaaccctcactgctcccaaaacaaaggaggaatatcagatttagggagta

SEQ ID NO: 901149 - DNA, 120 bp, Artificial Sequence
  ENSG00000267064_4 (sequence is synthesized)
gccattgtccccagtgcctaagaaagaggccactctccatctttccaccccctctcagaaccagacctcactggaaagggctccactgtgacctactggatggcagagaagattgctggg

SEQ ID NO: 901150 - DNA, 120 bp, Artificial Sequence
  ENSG00000267064_5 (sequence is synthesized)
gtgctttggaaatctgccctctgtaatgcagaaggaagctgtccatgggcaggagtcatgctttggaactcacagcaaagtcactagagggctgccgggggaagctgttcatagggatgt

SEQ ID NO: 901151 - DNA, 120 bp, Artificial Sequence
  ENSG00000267064_6 (sequence is synthesized)
gccacatgctgctggccactgggcactgctggccacctagagatgcattgtgtaagccgcagatgctgcaggagcctgatgaggggagctcatgagaaccaggaagagaaatctcttcct

SEQ ID NO: 901152 - DNA, 120 bp, Artificial Sequence
  ENSG00000267064_7 (sequence is synthesized)
cttccaaagtctttctagtgccctctactgataattggaacatttaggtgaattcttctgtttcccatgttcttcagtgtcactatgctattcatttttaatacatgtatgttcatttgt

SEQ ID NO: 901153 - DNA, 120 bp, Artificial Sequence
  ENSG00000267064_8 (sequence is synthesized)
tagtttatatgccatttagagtttcccccacatcatagtccattttgaatttgatttttttagggtatgtgaaacagtatggttccaagagaaaaagctgcacaaaaggtcccttcaaag

SEQ ID NO: 901154 - DNA, 120 bp, Artificial Sequence
  ENSG00000267064_9 (sequence is synthesized)
aagtgccacttatctcatccctactatcctgtccctttcccaccatccccttataagtaagtaatctctttagtttctattatagtttattcacctgtatttcttttgcacaagtgagca

SEQ ID NO: 901155 - DNA, 120 bp, Artificial Sequence
  ENSG00000267064_10 (sequence is synthesized)
ggtacatgtatgtcttcttatatcccttctttctgtgaaggatagcatacagtagatattctttagagctttgctttttcacttacagatatgtcctagaaatttttctgtattaattca

SEQ ID NO: 901156 - DNA, 120 bp, Artificial Sequence
  ENSG00000267064_11 (sequence is synthesized)
ataccttagtttgttcaactactctcctatgtatagacatttatattttgtaattacaatgctgtaatgaataactttgtgcattgtattttgctattgttagagatgtatcttcaggat

SEQ ID NO: 901157 - DNA, 120 bp, Artificial Sequence
  ENSG00000267064_12 (sequence is synthesized)
attgttaagtattctccaattcccctccagaaggactgtaccagttttcattcccaacagaaatatgcaagagtgactgttcccctacagcttcaccaacataatatcttatcatacttt

SEQ ID NO: 901158 - DNA, 120 bp, Artificial Sequence
  ENSG00000267064_13 (sequence is synthesized)
taatatttaccagtccaaaagatgagaaatgaaatctcaatgttgttttagtgtgcatttctctaattataaatgagtttgaactttaaaaatatgtttggttgaataatattccattgt

SEQ ID NO: 901159 - DNA, 120 bp, Artificial Sequence
  ENSG00000267064_14 (sequence is synthesized)
gtgtatatatatatatcacattttcttgatccatttgtccattaatggacaggtaggttgtttccatatcttggctattgtgaaaaatgctacaatgaacatgggagtgcagatattttc

SEQ ID NO: 901160 - DNA, 120 bp, Artificial Sequence
  ENSG00000267064_15 (sequence is synthesized)
actaggtggtgaaatattattcagccatataaaaggaggagatcctgccatttgccacaacatagatggacctgcagaacattatgctaagtgaaataagttagatacagaaagaaaaat

SEQ ID NO: 901161 - DNA, 120 bp, Artificial Sequence
  ENSG00000267064_16 (sequence is synthesized)
attgcatgatttcacttatgtatgaaatctaacaaacaaaacttaaaatatccagatatagagaataaaacagtggttaccaggtgtattagtccgttctcacactgctgtgaagaaatg

SEQ ID NO: 901162 - DNA, 120 bp, Artificial Sequence
  ENSG00000267064_17 (sequence is synthesized)
cctgactctggatgatttataaaggaaagaggtttaatagactcacagttccgcattgttgggggggcctcaggaaacttacaactgtggcagaaggcaaagagatgcaggcaccttctt

SEQ ID NO: 901163 - DNA, 70 bp, Artificial Sequence
  ENSG00000267064_18 (sequence is synthesized)
acaactgtggcagaaggcaaagagatgcaggcaccttcttcacagggaggcaggacggagtgagtgcaaa

SEQ ID NO: 901164 - DNA, 120 bp, Artificial Sequence
  ENSG00000267064_19 (sequence is synthesized)
cacccttgacacatggggattatggggattacaactggagatgagatttgggtggggacacgaagcctaaccatatcaccagggatggggttgggtggggaggaaatggggagatgtagc

SEQ ID NO: 901165 - DNA, 120 bp, Artificial Sequence
  ENSG00000267064_20 (sequence is synthesized)
ggggaggaaatggggagatgtagctcaaagacacaaagaagcagatatgtgggatgaacaagtctagagatctaatgtacaacatgaggactataggcaataaaattgtgctgtaatagg

SEQ ID NO: 901166 - DNA, 120 bp, Artificial Sequence
  ENSG00000267064_21 (sequence is synthesized)
gatttttgttaaataagtagattttagttgctattgtcactaagaagtaactacgtgagatgatggatatgttaatttgcttcactacagtaaccattttactatttatatgtatctcat

SEQ ID NO: 901167 - DNA, 120 bp, Artificial Sequence
  ENSG00000267064_22 (sequence is synthesized)
gagtggaagaagacgggccaaaggggagaagagaagggcagggcttcacggaatccgaggagatcaaagaagactagggcgtgcgagcaggggccgtctggcaataaaccggccaatggg

SEQ ID NO: 901168 - DNA, 120 bp, Artificial Sequence
  ENSG00000267064_23 (sequence is synthesized)
ggactgcaaaagcggcgcctggagcctatggagaccgtgtgtggctggttagattttcaaacaagaacttataacccagcaagaatgggcctttgcctggagaagaatccagaccatggg

SEQ ID NO: 901169 - DNA, 120 bp, Artificial Sequence
  ENSG00000267064_24 (sequence is synthesized)
atgaatccccaaatgctatttccatctgtagagcctagagcacccacccctaccaaggaagtcttcccagataatttgtgtttcatatgtaaaagcaagttttttttttcaaatgctcaa

SEQ ID NO: 901170 - DNA, 120 bp, Artificial Sequence
  ENSG00000267064_25 (sequence is synthesized)
gtaaaagcaagttttttttttcaaatgctcaaaacccaagcaagttaagcccttccttccttccttccttcctttcttttctctctctctctctttctttctctctctctctctttcttt

SEQ ID NO: 901171 - DNA, 87 bp, Artificial Sequence
  ENSG00000267064_26 (sequence is synthesized)
gcttcagcctctggagtacctgggactactggcatacaccaccacgcccatctaatttttaaaaaagtttttgtagagacagagtct

SEQ ID NO: 901172 - DNA, 83 bp, Artificial Sequence
  ENSG00000267064_27 (sequence is synthesized)
taagtgatttgcccacctcggcctcccaaaatgccgagattataggcatgagccagcacacctggccaagttaagcttttctt

SEQ ID NO: 901173 - DNA, 120 bp, Artificial Sequence
  ENSG00000267064_28 (sequence is synthesized)
aggcatgagccagcacacctggccaagttaagcttttctttgcccttagaacgagataattgtaaaatgaaaacattgagattagtttttttggtctgtaaatctcatgttacatatagt

SEQ ID NO: 901174 - DNA, 120 bp, Artificial Sequence
  ENSG00000267064_29 (sequence is synthesized)
ttaaattacattgagtgtgattggaatagatactaggtagaaaaatattatctagttaatctataccactttcctgtgaaaagagagaaaagaagacacatatttatttaacagagaaca

SEQ ID NO: 901175 - DNA, 120 bp, Artificial Sequence
  ENSG00000267064_30 (sequence is synthesized)
caattctgatgggctggagatgagtctgtgtaagtctattaacttatatttcacaaaaaagaattttttacttaaaaatgtatttccaactttatttttacatttcaaacctacagaaaa

SEQ ID NO: 901176 - DNA, 120 bp, Artificial Sequence
  ENSG00000267064_31 (sequence is synthesized)
cactcatataccctgcacttaagttcgccagttgttttattttgaatttttaaaatttttttagaggcagggtcttgctctcttgcctaggctagaatgcagtggtgtgatctcggttca

SEQ ID NO: 901177 - DNA, 82 bp, Artificial Sequence
  ENSG00000267064_32 (sequence is synthesized)
tcttgcctaggctagaaccgggctcaagcaatcctcccgcctaagcctcctgcatagctgggactacaggcatgagccacca

SEQ ID NO: 901178 - DNA, 65 bp, Artificial Sequence
  ENSG00000267064_33 (sequence is synthesized)
cctaattcactcgttgttaatatttgatcacatttgctttctttccagaccataggataattgtt

SEQ ID NO: 901179 - DNA, 120 bp, Artificial Sequence
  ENSG00000267064_34 (sequence is synthesized)
gatcacatttgctttctttccagaccataggataattgttgacatggctgcatagcattccattctttggatggcctcagatttttgagccactcctctgtcactggatatttgaatgtg

SEQ ID NO: 901180 - DNA, 120 bp, Artificial Sequence
  ENSG00000267064_35 (sequence is synthesized)
ttcagatattttcgttgttataaccaggatgggataagtctttgctgtcaaatttttgtgcggagccatgattatttccttgtgataaattcctagaagtagaatttatagatttttttt

SEQ ID NO: 901181 - DNA, 120 bp, Artificial Sequence
  ENSG00000267064_36 (sequence is synthesized)
gagacagagtctcactttgttgccaaggctggagtgtagtggtgtgatctctgctcatggcaacctctgcctcctggtttcaagtgattcttctgcttcagcctctggagtagctaggac

SEQ ID NO: 901182 - DNA, 67 bp, Artificial Sequence
  ENSG00000267064_37 (sequence is synthesized)
caagtgattcttctgcttcagcctctggagtagctaggactacgggcacacactaccatgccgccta

SEQ ID NO: 901183 - DNA, 120 bp, Artificial Sequence
  ENSG00000267064_38 (sequence is synthesized)
attacaggcatgagccacctcacccggctgaatttatggatttaaaggaggtcactgcattgtaaatcaagtgttgagtgacagtggtacgcataacagtgaacctcctcatctaagctc

SEQ ID NO: 901184 - DNA, 120 bp, Artificial Sequence
  ENSG00000267064_39 (sequence is synthesized)
ctcctcatctaagctctatatcaggggtcagcaaattatggcccctggtttgctgaccctttacagtttcctatagcctgcaaactaggaatactatttacatctttaaagggctttaga

SEQ ID NO: 901185 - DNA, 120 bp, Artificial Sequence
  ENSG00000267064_40 (sequence is synthesized)
aagtcccgctgcagcacgtcactgatgaaggtctcgtagcgcagcactttctcccccgtggcctccaccgcccgccgcttagggggcgtcgccatgatgggctcctggggagtggggagg

SEQ ID NO: 901186 - DNA, 120 bp, Artificial Sequence
  ENSG00000267064_41 (sequence is synthesized)
gggaagaccatgttgaccgatccagtttggcctcacacacagttcatctctaccctctcaacgctgggaatcggcttgtccggctcaagctggaggttcagccttccgcccctcccaact

SEQ ID NO: 901187 - DNA, 120 bp, Artificial Sequence
  ENSG00000267064_42 (sequence is synthesized)
gacacccaagcgcggcctttacctcaggccgccagcaataagaacggttggtaggaaccgcggcttccgggtggcgcgggtgaatgacgtaagtggcaagcgcgctggccaaccaaatag

SEQ ID NO: 901188 - DNA, 120 bp, Artificial Sequence
  ENSG00000267064_43 (sequence is synthesized)
acaggtggaggtagaggaagtgaagagtttaatatttaaaaggacctaaaaattgactatggttctggtctataaggaagatcccgtgtgatctgtcggcctggatattgatttttcaca

SEQ ID NO: 901189 - DNA, 120 bp, Artificial Sequence
  ENSG00000267064_44 (sequence is synthesized)
atctttgataactccagctctgcactcgcaacccataagtgaggctcaagtggaaattgacaacactctctgtctaatcacctcgtttgatagtcaaatggagagggtggctgaagtcct

SEQ ID NO: 901190 - DNA, 120 bp, Artificial Sequence
  ENSG00000267064_45 (sequence is synthesized)
ctgccgaagattggccatcttgtagttaggcatagttcccatgtttttatttaaatggtaaggtttttgtgaatttattcttatgcactagagtgactgagtgaatttatttttcaggtt

SEQ ID NO: 901191 - DNA, 120 bp, Artificial Sequence
  ENSG00000267064_46 (sequence is synthesized)
aatctcatccaacgcccatgcacctgcagggatcctcccttgtggccctctccctgcttgaagtcccacccgaaaagcttggggacatagcagcagctgcctcggtacagaggactaata

SEQ ID NO: 901192 - DNA, 120 bp, Artificial Sequence
  ENSG00000267064_47 (sequence is synthesized)
gggacacccaagcgcggcctttacctcaggccgccagcaataagaacggttggtaggaaccgcggcttccgggtggcgcgggtgaatgacaaggagtcgctccccatagccaccacaact

SEQ ID NO: 901193 - DNA, 120 bp, Artificial Sequence
  ENSG00000267064_48 (sequence is synthesized)
gggaatgtgctgggtcacacctgatgccaacatggctctgaatctcatccaacgcccatggatctcatccaggatgccacattacatttagttgtcacatctcttcggtctccacaatct

SEQ ID NO: 901194 - DNA, 120 bp, Artificial Sequence
  ENSG00000267064_49 (sequence is synthesized)
cctttagactgtgacaattgcttatacttttcttgtttttgatgaccttgaaaattttgaggagtactggtcaggtgtttgatggaatattcttcaatttagatttgtctgctatttccc

SEQ ID NO: 901195 - DNA, 120 bp, Artificial Sequence
  ENSG00000267064_50 (sequence is synthesized)
tcattactggactggggctttggattttgggaagaataccacagaagtgaagtacccttctcatcacttcacatcaggggtacatgccatcaacatgacttagcactgacaatattaacc

SEQ ID NO: 901196 - DNA, 120 bp, Artificial Sequence
  ENSG00000267064_51 (sequence is synthesized)
ctgatcatctggcaggcatttgccagatttctccactgaacgttccttgttctccctttttcatactttgctccttggaagcaagtcactaagcacacacatatctgggggaggagtggg

SEQ ID NO: 901197 - DNA, 120 bp, Artificial Sequence
  ENSG00000267064_52 (sequence is synthesized)
aggttaactaccacctcctggaagggtggttatctatttacacaagttatttggaattttccaaaggatttgtctcatctctcctgtttattaatttattcaatcttgtgtttacaacag

SEQ ID NO: 901198 - DNA, 120 bp, Artificial Sequence
  ENSG00000267064_53 (sequence is synthesized)
cacggactcatggacatttattttactctgtgggttataagccagtactaccactgtttattttgttcctcagattccagctttggccatggggagctccttcatgctggttcctgcatc

SEQ ID NO: 901199 - DNA, 120 bp, Artificial Sequence
  ENSG00000235426_0 (sequence is synthesized)
tgcttttaaaagtccttttaatacagcatgaagaggctatatttctataggcgagccgtatacagattctccaggaataaggcacacaacggaatgccatcccaagggctgcacttcgga

SEQ ID NO: 901200 - DNA, 120 bp, Artificial Sequence
  ENSG00000235426_1 (sequence is synthesized)
gacgtcggagccttctccacgcaccttccgagctgggcccacgggttctgttttgtctttttagctggactcacacgtatggacagacacagacacggacggggtcaccgcatgggggcg

SEQ ID NO: 901201 - DNA, 120 bp, Artificial Sequence
  ENSG00000235426_2 (sequence is synthesized)
tgattttcgtggtgcctgccctgccatggccgggggcagcaggcacacatgacttgagttggcattcctgacctagatgatccctaaagatccttccaatgcaaatagttccatgagtag

SEQ ID NO: 901202 - DNA, 120 bp, Artificial Sequence
  ENSG00000235426_3 (sequence is synthesized)
acagcacacaggcttgagaagtggacagagtccaagtcctggccactgcttctgcacacctctgggcatgtaacagaggctagtttttgccaggcttgggccacttgggtgctgggcttt

SEQ ID NO: 901203 - DNA, 120 bp, Artificial Sequence
  ENSG00000259058_0 (sequence is synthesized)
tgagatggcttgttggggggtgatgggggatgtgataggcaggtggggcatctacacctgtttggctaaagtcctcccagctcatctctttccaccaaaaactgtttgggggccaggcca

SEQ ID NO: 901204 - DNA, 120 bp, Artificial Sequence
  ENSG00000259058_1 (sequence is synthesized)
ccttctttcccacaagatactcgcctcccacagtcccaccgccaaccacccactttccccaaccccgtttgtaatctcagaacaaaccccatctcctgcaagaagccttcctttctctga

SEQ ID NO: 901205 - DNA, 120 bp, Artificial Sequence
  ENSG00000259058_2 (sequence is synthesized)
gggaggaactagggctcaggcgcagctgctgtgtgccaagaacttcgatgcgttttcttactgcgtcttcacaacagccccaggagggcggtgctgttttcattatccccattttacaga

SEQ ID NO: 901206 - DNA, 120 bp, Artificial Sequence
  ENSG00000259058_3 (sequence is synthesized)
ggcaaagaataaggaggtaagccgaatgctcagggagggtcaggaactcagacatctcctggcttactggaagcttatgcagcagggagctggaagccaagctcgggtgtttgtgagaag

SEQ ID NO: 901207 - DNA, 120 bp, Artificial Sequence
  ENSG00000259058_4 (sequence is synthesized)
caggtgacccaggactttgtggctggtacctgccctgagttcttccagttgcactgtcctggataacccttctggaaccttccaaagaggcagaaactggtcgctgtgctggaggagtga

SEQ ID NO: 901208 - DNA, 120 bp, Artificial Sequence
  ENSG00000259058_5 (sequence is synthesized)
ggagtgggtgtgcatgcagcctgaacaatctccttgtcccccagctgctgaagcctgtcacctttctaaggagttagtgcccaggaaccagcttttccttaataaaagaactcaaatgta

SEQ ID NO: 901209 - DNA, 120 bp, Artificial Sequence
  ENSG00000259052_0 (sequence is synthesized)
aaagaagccaaagattaaactccttacagaagttaactctgcagactgagaagacgtgaacagagagagtcaaggggagtgatgactatttcagagacaggaaaggacagaagagatgac

SEQ ID NO: 901210 - DNA, 120 bp, Artificial Sequence
  ENSG00000259055_0 (sequence is synthesized)
caggaaaccaacacaaacaagctaaagcaaagaaaaaaaaaaaaagactctcagtggacactgacatgaataagtaagaaattagatgccattataattcactgagattcgaagatttgt

SEQ ID NO: 901211 - DNA, 120 bp, Artificial Sequence
  ENSG00000259055_1 (sequence is synthesized)
tactggagcatagtccaacctgactgatgctgagagtgaacttagtttctagctttatagttccattctccttgtgagttgattttatttcacttcccatgaaatcctctgagatcacct

SEQ ID NO: 901212 - DNA, 120 bp, Artificial Sequence
  ENSG00000259055_2 (sequence is synthesized)
aagtgggtttctgatcctttcaatgaataatccctgataaaactgataaacaaatgatatttatttataactatttgattcttaaacatttatcttgttataggttcttctatccttctg

SEQ ID NO: 901213 - DNA, 120 bp, Artificial Sequence
  ENSG00000259055_3 (sequence is synthesized)
taggccaaagttaagttgtatgtgtatatacactttgaaaagtccaccaacttgtttaggtgggaagtacagacaggtgatgatacttgcaaaaagtttcctgcaatcttgcatcgtcac

SEQ ID NO: 901214 - DNA, 88 bp, Artificial Sequence
  ENSG00000259055_4 (sequence is synthesized)
tggaactacaatttttcagtagaaatggagtctcaacatgctggtcaggctggtcttaaatcctggccgcaagagatctgaccgcctc

SEQ ID NO: 901215 - DNA, 88 bp, Artificial Sequence
  ENSG00000259055_5 (sequence is synthesized)
tccagtgcacccagccctgattcagtgactattgaaaccccaggaattcaaggataatatcaggatttaggaatgtgaactgcttaaa

SEQ ID NO: 901216 - DNA, 120 bp, Artificial Sequence
  ENSG00000259055_6 (sequence is synthesized)
caaggataatatcaggatttaggaatgtgaactgcttaaaatcacaaagtaatagtagtggtttctattgcccattttaaagtatctacaaaatcacttttttggtgttataattctttt

SEQ ID NO: 901217 - DNA, 120 bp, Artificial Sequence
  ENSG00000259055_7 (sequence is synthesized)
aacaagtacgttgaataaaggaatatagttaagtactggcactaaataaaaactgctaccaaatatttgacttataagaccattattattattattattattcatgtgttattatttttc

SEQ ID NO: 901218 - DNA, 120 bp, Artificial Sequence
  ENSG00000259055_8 (sequence is synthesized)
atggagttttgaagaccaaaaatatctgaaaaacattttaatctggccagttgaaaactagtgaatttcaaccagatgtttttaataccactttaaaaataaactgcagccattttatta

SEQ ID NO: 901219 - DNA, 120 bp, Artificial Sequence
  ENSG00000259054_0 (sequence is synthesized)
caggttctgcggctccctgagaccagcagattcctggtctccgggtccctgggtcccggacgtgtccatcaaggcgtccattagggccatcacctaatggacaagcatcagggagacact

SEQ ID NO: 901220 - DNA, 120 bp, Artificial Sequence
  ENSG00000259054_1 (sequence is synthesized)
gccctgtactaagcaagcgcttaatcagaggatgtggcttctgcgggagagcttcaaagggtgccctacttgcccctcttggtaaccatgacgtcatggaaatgggaggggaccgcccca

SEQ ID NO: 901221 - DNA, 120 bp, Artificial Sequence
  ENSG00000259054_2 (sequence is synthesized)
gcccccaaacacctggagggaagtgggagactttttccacttcctgttctacttgtggctactgactcaatgtctgacctgtttattaattgcaaaatatagctctatgtgtgctaccca

SEQ ID NO: 901222 - DNA, 120 bp, Artificial Sequence
  ENSG00000205424_0 (sequence is synthesized)
attccacatagatgaatcccaactaataagtacagaaagaacaacacaattagaaaatcaccgttctgcagcccctaatgtgtactgcatccaggcaatgaccatcaatgaatattgaca

SEQ ID NO: 901223 - DNA, 120 bp, Artificial Sequence
  ENSG00000205424_1 (sequence is synthesized)
gcaagctgcaaggctggtggggaacccagcagtggcggatcaggctgaccccctaagctcaatcctcagtctcagcaccagtgaaggagcggccagaccacacgcctcatcatgccatgc

SEQ ID NO: 901224 - DNA, 120 bp, Artificial Sequence
  ENSG00000205424_2 (sequence is synthesized)
ggtgcaacgtgcagtgccacctaggaagctcgctcgcctcacaggaaaaataaatctgagtggaatcgcacctcagacctaccagggcaaatatggggttgcaggtgggctctgcaccat

SEQ ID NO: 901225 - DNA, 120 bp, Artificial Sequence
  ENSG00000205424_3 (sequence is synthesized)
gccagaggaggcagccagccaaatccagaacgcaggcattccacacagccgctacccccaagaggcagacaacccagggctacaggtaggccttcgacatgaaaccgcccgcaggagaat

SEQ ID NO: 901226 - DNA, 120 bp, Artificial Sequence
  ENSG00000205424_4 (sequence is synthesized)
ttccacaggcacgtagccatgccctataacctgaagctagggcgccgtggcctgttctcacagcgccatccctaggctccaagagccagcatcctgggagctctgcagcgctgtgctgct

SEQ ID NO: 901227 - DNA, 120 bp, Artificial Sequence
  ENSG00000205424_5 (sequence is synthesized)
gcctgtggcttgcacacagatgtcacataacatcatttccgctggaggcacatgcctgcccagattaaagggagggtcacgatcccctccctggcgggaggtgcatcaaagtcacagcac

SEQ ID NO: 901228 - DNA, 120 bp, Artificial Sequence
  ENSG00000205424_6 (sequence is synthesized)
aagagcatgtggaacgggagatacagaccacagtgaaacgttatttacattcactgcattggcaaacattcagaatgttggtggactgtagatcatccgtggcgctaacacgctgctggg

SEQ ID NO: 901229 - DNA, 120 bp, Artificial Sequence
  ENSG00000205424_7 (sequence is synthesized)
ggatgggaattggtacccgcgctttgaaacaaaaactgacatggtcctgaaagttcctgaaagttcacctttcacagactttatgatgcagcaattccacttccttaaaccaaaaacacc

SEQ ID NO: 901230 - DNA, 120 bp, Artificial Sequence
  ENSG00000205424_8 (sequence is synthesized)
tcatgtgtgcaccaaaagaaacacacaggaatgtccacggaagcatcactcacaatggcaagcgagccgcatgaccctgctggaaaaacaaataaatgatgcctattcacacactggaac

SEQ ID NO: 901231 - DNA, 120 bp, Artificial Sequence
  ENSG00000205424_9 (sequence is synthesized)
actatgcagccaggcacacaaactgcagctctgcccagaaacacataccaacctaagacaccttgtgtgtgactaaacagaacaggtttgggaagtctatgtagggactgatgtcacttt

SEQ ID NO: 901232 - DNA, 120 bp, Artificial Sequence
  ENSG00000205424_10 (sequence is synthesized)
ctaagagttcagaaacaagcaatcatgtgtaataaaataaaattattttaaagagaagagatgagaaaacaaaatgcaggatcacggtaaagaagaggaagcacccacggcagcatgggt

SEQ ID NO: 901233 - DNA, 120 bp, Artificial Sequence
  ENSG00000205424_11 (sequence is synthesized)
catctcgcttagcctggtcctggggtcacggctgttcatgagaaagctatgctccgcagctcacgttacgtacgtgtcatatgctaattctcatgtcacaacattttaacgaatatactg

SEQ ID NO: 901234 - DNA, 120 bp, Artificial Sequence
  ENSG00000205424_12 (sequence is synthesized)
ggaagtgcagccaagtactgcaagcagaggagccggcacacgtgatcccagaccaggcagcacttacaaaggatggcaggaaggccaagacgttgtcacggagatgaggcccagcagggc

SEQ ID NO: 901235 - DNA, 120 bp, Artificial Sequence
  ENSG00000205424_13 (sequence is synthesized)
aggaaggcatgaccagcaggcctggctacaggcagcaagcaccaaaccccattccagatgccaggaaaggcacacacaggcctggcgcaggtgggctgtcttctggccgctccctgggtg

SEQ ID NO: 901236 - DNA, 120 bp, Artificial Sequence
  ENSG00000205424_14 (sequence is synthesized)
gactggtcttggagactggacggagtgctcaatgtcaggaggaagccacgactcactcactggagaacacgagagacagccggcgccgccccgaggagtgagcggaggatctgcctggag

SEQ ID NO: 901237 - DNA, 120 bp, Artificial Sequence
  ENSG00000205424_15 (sequence is synthesized)
ctagccagcctcatggcctggacagacacctcagtgagcctgtgatcagggccctcggagcagagccagctgcagggaggcaagtcaggaggcctttccttgaggccaggagagaagaac

SEQ ID NO: 901238 - DNA, 120 bp, Artificial Sequence
  ENSG00000205424_16 (sequence is synthesized)
aagccagcaggagggcaggacagactccagagacactcgttgagaaaactggcttcagctccagagtggggggcagaggggctgctccgcctgggcagcgtggggactgctgccggccgg

SEQ ID NO: 901239 - DNA, 120 bp, Artificial Sequence
  ENSG00000205424_17 (sequence is synthesized)
gaagctgccaagagcccgggagaggagggcagagggcacagcactccttcttcatagacagcagggacaaaggtggagggtgactacgtcactctcgattccccgcctttctgggaaggc

SEQ ID NO: 901240 - DNA, 120 bp, Artificial Sequence
  ENSG00000205424_18 (sequence is synthesized)
ctcatcatgaaacattttcggcatcataatactggcttataaatgttcgtatacccaattcccaaaccattgattaatttattaaagctatgatttacgtaaggatgagcatttaattag

SEQ ID NO: 901241 - DNA, 120 bp, Artificial Sequence
  ENSG00000205424_19 (sequence is synthesized)
agaagagcttctaccatttcaccaacccaggcagtggggaaggggtggaaaggggcggctgctgtcccaggggcagtccttggtgtcctcctggtccaggctttcttccctcccttcact

SEQ ID NO: 901242 - DNA, 120 bp, Artificial Sequence
  ENSG00000205424_20 (sequence is synthesized)
cctgctctcccagcgagcctgctgtccatagtctggcaggtctcctcttcacgttcagtgacacaactgctcggcgcattatagaggcctctgaaaggctatgtgttcacgatcctccca

SEQ ID NO: 901243 - DNA, 120 bp, Artificial Sequence
  ENSG00000205424_21 (sequence is synthesized)
tggaggggctcagaggagcggcctaagaggagatgcctgcactgtgcaggaaagaggggctccctgcagagccagtgccgttggtggggctcaggctcccagggtaggggcaggagtggt

SEQ ID NO: 901244 - DNA, 120 bp, Artificial Sequence
  ENSG00000205424_22 (sequence is synthesized)
ctccacagtgcacatttgcacgtatgttaggacgaggctatggggcacagaggggccatttgccctgcctggagactggtctagggttgcagggcccacatgtactgcatgcccccaaaa

SEQ ID NO: 901245 - DNA, 120 bp, Artificial Sequence
  ENSG00000205424_23 (sequence is synthesized)
gggtcaggggaaggcttcctccatccccttggggccacagcctcctacttgcctagggaaacatggctcttggaggcccagggaggccactaccctgctgagcaggcaggccccaaacta

SEQ ID NO: 901246 - DNA, 120 bp, Artificial Sequence
  ENSG00000205424_24 (sequence is synthesized)
aggtggagaccacagcgatcgcagcagggcagcagaagctggtctcaggctggtgggtgaaagctgaggttactggcagttgccatggcatggtgagattgccaggatgagggcccactt

SEQ ID NO: 901247 - DNA, 120 bp, Artificial Sequence
  ENSG00000205424_25 (sequence is synthesized)
gaagaacatgcctgcactgccctagagctgcatcttcctggcagcagaatgtcaggggaaccaggcctccccgcttcaagtgggacaaatgtatgagcctggggggcaggtggggagggc

SEQ ID NO: 901248 - DNA, 120 bp, Artificial Sequence
  ENSG00000205424_26 (sequence is synthesized)
cctgcagggtgcctgggcagcctgtggaggaacagcggggattcccttcgcaccgggtgtagccagctgcacggcattaacagccacttgtccttcagaactttgctcttcaggtggggt

SEQ ID NO: 901249 - DNA, 120 bp, Artificial Sequence
  ENSG00000205424_27 (sequence is synthesized)
ctggggtgaggaaacccagtaacccaggatttgcacaaggaaagtagcttcctgtggcttggcttcttacgagtgtctaaaagaaccgtcctggtaccgctaggccacaaaatgttcaga

SEQ ID NO: 901250 - DNA, 120 bp, Artificial Sequence
  ENSG00000205424_28 (sequence is synthesized)
aaacactgcaagagacactgggacactctaaagccaggcccagagaaggaatgccgaggagagagaggaggaatgccaaagagaggcccagcgggaaggggttctgcccagcaccctctg

SEQ ID NO: 901251 - DNA, 120 bp, Artificial Sequence
  ENSG00000205424_29 (sequence is synthesized)
cctggtcccgggctccctgtgcagggagctatgccagtgtgctgagggtgttcgatgaggacagcagctcacaattgcagaagccacggactcctggagaaatggaccacgcaccttctc

SEQ ID NO: 901252 - DNA, 120 bp, Artificial Sequence
  ENSG00000205424_30 (sequence is synthesized)
cccagcaaagtgtcctctctccaaagagctttgaatctcagagaatctgaaggcccccaccacgtggggcccatccagagccctggcccagagcagcagaggacaggcttatacccctgc

SEQ ID NO: 901253 - DNA, 120 bp, Artificial Sequence
  ENSG00000205424_31 (sequence is synthesized)
tctggagttgtgaaaccgtggcaccctggagttgtgaaatgccatctcaaactcggccaatggcccttccatccctgtcccagctcctacactagctctttccattataaggaggccggg

SEQ ID NO: 901254 - DNA, 120 bp, Artificial Sequence
  ENSG00000205424_32 (sequence is synthesized)
aagtaatccagcttcacctggtaagttcgacctgtgaaatgtgggaagacacaagtcagacacaacaccttctgtccacaccgctggcacaaggcttccagttgggcagagctgctaggg

SEQ ID NO: 901255 - DNA, 120 bp, Artificial Sequence
  ENSG00000205424_33 (sequence is synthesized)
ggcacggggacagaggtggagctcctccatccagcccccaaaggagcctgggcatgaccgtgggtactcagagcaggctgcctcctgagggaccagaagtcaagcgtgcgacgggctgcg

SEQ ID NO: 901256 - DNA, 120 bp, Artificial Sequence
  ENSG00000205424_34 (sequence is synthesized)
gggcggagaggccactctgcctccagggacacacactctcccaggcccacttccctgtggccaaggaggaaagccgagcaggcacctttgagttgcacacaacggacacacagcacagag

SEQ ID NO: 901257 - DNA, 120 bp, Artificial Sequence
  ENSG00000205424_35 (sequence is synthesized)
cccacccagcctgagtatttaccatccgcctttcatggaaatgccggcacctgctccagaggatacaggaatgacagggatggaggacgggagggactcccagcctgcggggaggctcct

SEQ ID NO: 901258 - DNA, 120 bp, Artificial Sequence
  ENSG00000205424_36 (sequence is synthesized)
gcatgtgcccagcagactttcagcagggctgggctgcaggagtgcccagcatttcccatttcagctccactggaaagtgcggctggttcaagttgttgcgaactgatcccacccatgtat

SEQ ID NO: 901259 - DNA, 120 bp, Artificial Sequence
  ENSG00000205424_37 (sequence is synthesized)
actggggtgggagggcagtgggcagcttctcggctcaggtttccagagcacgagggggcagatccagagcgagagtaactcaccgtattaagagtctgggcattaagcctggtgccatga

SEQ ID NO: 901260 - DNA, 120 bp, Artificial Sequence
  ENSG00000205424_38 (sequence is synthesized)
agggaccagactttggggccatcttccttgggtagggtttattttgcatggggaaagctgggaagcaaatatttgtgaccagaagggcaaatgatggtgactgaattactgctcatgcat

SEQ ID NO: 901261 - DNA, 120 bp, Artificial Sequence
  ENSG00000205424_39 (sequence is synthesized)
attcactgcctgtccctgggagaggcctacacttcccaccccctgaagtcttggccagttggcgtctcttgtgggaagaataactcccgtcctgcgggtggttgtctgtgctctcactgc

SEQ ID NO: 901262 - DNA, 120 bp, Artificial Sequence
  ENSG00000205424_40 (sequence is synthesized)
tctgctccaacaccaacgacactccagatggggactgcactagttgcttgggaaggggttgaagacaagagccacagctgacacaggtgaacaggaaataaacttgtctatgtatcagcc

SEQ ID NO: 901263 - DNA, 120 bp, Artificial Sequence
  ENSG00000257906_0 (sequence is synthesized)
gggggcgctggggtgattagcatcatgcagggcatgtgattctgacaccctcttctgtggtgggggtgattctgtagaaaggagtttctccaataaagcagagcttctctttcaactcca

SEQ ID NO: 901264 - DNA, 120 bp, Artificial Sequence
  ENSG00000257906_1 (sequence is synthesized)
tggacatcagagagagtccctttcaaaaaaggaggctcaggtctggagagacaaaggcctctactttcgaaaaggcctcttggatcaagcccagctctgtcggagcattctgaacaatca

SEQ ID NO: 901265 - DNA, 120 bp, Artificial Sequence
  ENSG00000257906_2 (sequence is synthesized)
aacatgtccagcctgcactactgcaagaacttctttgtctatggtagtgtggtcaactgaagaagccggcttagttgctccagtcaggtgctcacactaagaaaggatgggtgaaggtta

SEQ ID NO: 901266 - DNA, 120 bp, Artificial Sequence
  ENSG00000257906_3 (sequence is synthesized)
taaagtggctgtgaatgagaactcggtctgggctctaccaagcagagaagccatgcagagatgagaaaggtgaaagccatgaaaccatgttaagcagaaaaataaaaattcaaaacagaa

SEQ ID NO: 901267 - DNA, 120 bp, Artificial Sequence
  ENSG00000257906_4 (sequence is synthesized)
gggggcgctggggtgattagcatcatgcagggcatgtgattctgacaccctcttctgtggtgggggtgagaaggcaccggtgccactagtccctgacctgtccctcagacaagttacaaa

SEQ ID NO: 901268 - DNA, 120 bp, Artificial Sequence
  ENSG00000257906_5 (sequence is synthesized)
tgaagactgagggggtggagtagctatggaaaccaggagggaaggatttttttttttaatgcaaatgaattagaacaaaatgactggcatccctttttctttttccatctgtgacaaaag

SEQ ID NO: 901269 - DNA, 120 bp, Artificial Sequence
  ENSG00000257906_6 (sequence is synthesized)
ttctgtgtcctggtttctaccttcacttggagtaaattatgggggaaagaacatcatgaagacctgctattgtcagagtgtcatttcctctttctatctttctgtggattaattttaaat

SEQ ID NO: 901270 - DNA, 120 bp, Artificial Sequence
  ENSG00000257906_7 (sequence is synthesized)
agggccatctgaggggaggacatggctgtcagctgggaagagtgaaatgggcaaagactgcgtcacggctggaagggatcgtggcaagggcacaggcagcaggaaagctggaagtgaaac

SEQ ID NO: 901271 - DNA, 120 bp, Artificial Sequence
  ENSG00000257906_8 (sequence is synthesized)
acgccaggttggcccctctccactcctgacgtcagggccatctgaggggaggacatggctgtcagctgggaagagtgaaatgggcaaagactgcgtcacggctggaagggatcgtggcaa

SEQ ID NO: 901272 - DNA, 60 bp, Artificial Sequence
  ENSG00000257906_9 (sequence is synthesized)
tgggcaaagactgcgtcacggctggaagggatcgtggcaagggcacaggcagcaggaaag

SEQ ID NO: 901273 - DNA, 120 bp, Artificial Sequence
  ENSG00000257906_10 (sequence is synthesized)
ggggaggacatggctgtcagctgggaagagtgaaatgggcaaagactgcgtcacggctggaagggatcgtggcaagggcacaggcagcaggaaagctgggttttacagccaggcctgtgg

SEQ ID NO: 901274 - DNA, 120 bp, Artificial Sequence
  ENSG00000257906_11 (sequence is synthesized)
tctaccaagaatgttgttcttctcagagaagactagaaaagctctgcccagacatcggagaccatttccatcaatctctttcctggctgccatatgtccacctggaaccaatgagagaga

SEQ ID NO: 901275 - DNA, 120 bp, Artificial Sequence
  ENSG00000257906_12 (sequence is synthesized)
caactgtacagagactttttgtttttcattttagtgttgttctaagaagttaccaaaatacatcatgaaattatcgcaattaagtttacccaaaagctacaatgtacactattttcagcc

SEQ ID NO: 901276 - DNA, 120 bp, Artificial Sequence
  ENSG00000257906_13 (sequence is synthesized)
catctattcccatctccagccatgcctggctacattttcctgtaaagctcaacagctagaatgtgcatcagataatagtgctaaatggttcaaatagaatatggccagggttacaaaaag

SEQ ID NO: 901277 - DNA, 120 bp, Artificial Sequence
  ENSG00000257906_14 (sequence is synthesized)
catccactttgcctgcatacacccctgcaaaattcagctccacagatttttcctcttttgttaccactccagcaatcccatgagacaggcagaagttgtctagccccagaggacccatga

SEQ ID NO: 901278 - DNA, 120 bp, Artificial Sequence
  ENSG00000257906_15 (sequence is synthesized)
gattacatgacatctccaagatcttagcaagagtaaaatctaagtcaaggactcacattcctgattagttgaggactccagctttgcacctgtggcttggagcaggcatgcacacacagg

SEQ ID NO: 901279 - DNA, 120 bp, Artificial Sequence
  ENSG00000257906_16 (sequence is synthesized)
ggaataggtaattttagcagtgctgctaccagaagaaattcaacatcccctgctggatctagcctgcagtgccctggttagaacttgatcctcacagctaaggcttgagtccttgtaatg

SEQ ID NO: 901280 - DNA, 120 bp, Artificial Sequence
  ENSG00000257906_17 (sequence is synthesized)
caaatacccagggcatccatgctccctccgatcccagcacctacaccttgtagtcaggaagccagttatttcaggactcggacgaatgctgcacctgatcctcctcaggcttctgagaaa

SEQ ID NO: 901281 - DNA, 120 bp, Artificial Sequence
  ENSG00000257906_18 (sequence is synthesized)
gtcctcggttcccagtaatgactgccgtcctctcagccaggcgatacctggttctcatccaagaattggccactgcactggagataaattgtttggggatgacttaaagtttgaggattg

SEQ ID NO: 901282 - DNA, 120 bp, Artificial Sequence
  ENSG00000257906_19 (sequence is synthesized)
ggaggagacgttgtgtttgaatcctgcctagaaggaactttccagagacaagatgctggagaatcacaagacctgagtctcactggcatttccaactgccccaatgtgatttctaaattg

SEQ ID NO: 901283 - DNA, 120 bp, Artificial Sequence
  ENSG00000257906_20 (sequence is synthesized)
cgagaactctgggtcttgctttcctgaagacctaggaagagtttctcatactgacccaaccaagctgtgatgttattagcattttctacccactgtgtcagataactacaccaagaccag

SEQ ID NO: 901284 - DNA, 120 bp, Artificial Sequence
  ENSG00000257906_21 (sequence is synthesized)
caaggagccattggcttcagaatgtgagcctatgcagcagcagaagggtgtaagaccttcagagagtcccttgaggatagagggtacttggaaagacagcagaaggggaagagaaggaaa

SEQ ID NO: 901285 - DNA, 120 bp, Artificial Sequence
  ENSG00000257906_22 (sequence is synthesized)
gaccccttccttgggcattgcttccacctgagtagaaatcaggcaaggaaaatcctcaccagagggagagtatataaaacaaaaagttggagaaaaatctcagcattctgaaaggagcac

SEQ ID NO: 901286 - DNA, 120 bp, Artificial Sequence
  ENSG00000257906_23 (sequence is synthesized)
gacgtcagggccatctgaggggaggacatggctgtcagctgggaagagtgaaatgggcaaagactgcgtcacggctggaagggatcgtggcaagggcacaggcagcaggaaagctggtga

SEQ ID NO: 901287 - DNA, 120 bp, Artificial Sequence
  ENSG00000225964_0 (sequence is synthesized)
ttcaatcccacccttccttaccagatactaaagtcatttctacctttcctcttgagatttgctgttagatattagaacttctctttgtcacatacttacagggagattttgattatccat

SEQ ID NO: 901288 - DNA, 120 bp, Artificial Sequence
  ENSG00000225964_1 (sequence is synthesized)
gggattccattcataacctcataaaccacccccacgaagaaattatatatctcgaagaggttatatgggcacattgtgagatggtggcctcccatgagccaagaaaagagggcttaaaat

SEQ ID NO: 901289 - DNA, 120 bp, Artificial Sequence
  ENSG00000225964_2 (sequence is synthesized)
cttggacttcctagcatccagaaatgtgacatggttttctggtgccttggcaactgctcacgatgcatgggaagactaaacactttgtgtacagcattctgtctcatccagtgaagactt

SEQ ID NO: 901290 - DNA, 87 bp, Artificial Sequence
  ENSG00000225964_3 (sequence is synthesized)
cactttgtgtacagcattctgtctcatccagtgaagacttcctctggattattgcagcagacacctctaacctccttaatctgtact

SEQ ID NO: 901291 - DNA, 120 bp, Artificial Sequence
  ENSG00000225964_4 (sequence is synthesized)
cgaagaaattatatatctcggagcaattatatagtatcttaaaagtgtttggacacgtggatcattttggaacatacaccaagaaaataatcagtggtacacataaaaaggtgacatggt

SEQ ID NO: 901292 - DNA, 120 bp, Artificial Sequence
  ENSG00000225964_5 (sequence is synthesized)
ttaatctgtatgagagcacccacgcttcctccaactcctgccgcagagctgcgtttcctcagtactgctgtccgcttccagccccgctccgacgcatctgacgtcatttcctcgtcttgt

SEQ ID NO: 901293 - DNA, 120 bp, Artificial Sequence
  ENSG00000225964_6 (sequence is synthesized)
ctctggacctggttctcccaaggcctcagtccctgtgtccatggtccctctgttcctgggctccctggagtccattgggaatccgagtcctcgccttcccatcatctgcctctggaatga

SEQ ID NO: 901294 - DNA, 120 bp, Artificial Sequence
  ENSG00000225964_7 (sequence is synthesized)
cccttgggtttgtctttcgctctctctccgttctgccaccttcccggtgctttaatcaggcatcagtcttgtagctgtagccaggacccaccaagccactccattctcttctcagctccc

SEQ ID NO: 901295 - DNA, 120 bp, Artificial Sequence
  ENSG00000225964_8 (sequence is synthesized)
ccattctcttctcagctcccggagtgtgatggttaatattgactgtcagcttgatgaaattgaaggatgcaaagtattgttcctggtgtgactgtgagggtgttgccaaaggagattcac

SEQ ID NO: 901296 - DNA, 79 bp, Artificial Sequence
  ENSG00000225964_9 (sequence is synthesized)
tcagctgccagcatggctcttagtcttttggcctccatctttctcccgtggcttccgtgctcctcagcttgcagatgac

SEQ ID NO: 901297 - DNA, 81 bp, Artificial Sequence
  ENSG00000225964_10 (sequence is synthesized)
ctggcttagtcttttggcctccatctttctcccgtggcttccgtgctcctcagcttgcagatgacctgctgtgggacctca

SEQ ID NO: 901298 - DNA, 120 bp, Artificial Sequence
  ENSG00000225964_11 (sequence is synthesized)
gagaaccctgactagtacacagagcaatcctggaaatagcctcactgcctcaccactccccctgggagacttttctttacttccctctttgacttgcactctccccactgggccaagcag

SEQ ID NO: 901299 - DNA, 120 bp, Artificial Sequence
  ENSG00000225964_12 (sequence is synthesized)
gcttcccactaccggggctcctgtgctaccccagggacactcagggtctcaccccttaagcccgtgcctctcattgtccctgctcatccccacctgggctgcccagcttctcccactcct

SEQ ID NO: 901300 - DNA, 120 bp, Artificial Sequence
  ENSG00000225964_13 (sequence is synthesized)
gcctcgtgttctttcaaatccctgatcaagtttggcttctgaaatggacccttcttcagtcccctgggcccactcagccttccttcctcccggtgttcaggggactgaattagccacagt

SEQ ID NO: 901301 - DNA, 120 bp, Artificial Sequence
  ENSG00000225964_14 (sequence is synthesized)
ttaaccttttgttggcctttgtttcacatctattcattattttagaaatgttgtgttgtcgtgtgaaataatgcatctacaggctaaaaattaaaagacagtgtaaaaaatatgcggtga

SEQ ID NO: 901302 - DNA, 120 bp, Artificial Sequence
  ENSG00000225964_15 (sequence is synthesized)
aaagtgagtctccctctgcctgaacatccagtgcccattcccggggctgacatgcactgttccttatgtgcccttacagaaaatggccatgtgtgaagtcactatgcatattctattttt

SEQ ID NO: 901303 - DNA, 120 bp, Artificial Sequence
  ENSG00000225964_16 (sequence is synthesized)
agtttgttactaaagcacacagcagcttacaatgcaatttttttctataccttgtttttctctctagaatattaaaatattgcttggaaaatatacatactttggaattattttcacatg

SEQ ID NO: 901304 - DNA, 120 bp, Artificial Sequence
  ENSG00000225964_17 (sequence is synthesized)
aacatatagctacttcacctgttttcacatctgtgcagcatttcattgtatagatcaatctgaatttattgagtggattattgactgttgtttccagttattagctagaatcatcagtgc

SEQ ID NO: 901305 - DNA, 120 bp, Artificial Sequence
  ENSG00000225964_18 (sequence is synthesized)
ctccaatgaacaccagcatgtgtgtatgtgtgcctatatgtgtgcatacatgtatttgtgtatccctatgagaatatctgtaggataaatgcattataaagtaaccactgagtcaaagaa

SEQ ID NO: 901306 - DNA, 120 bp, Artificial Sequence
  ENSG00000225964_19 (sequence is synthesized)
ttgtgtctttataagaacagacacaaaagtgttctctcccttccatgcgtgcactctctctcttcccctccctgcccttgcctccttgcgtctgcataaagaagaggttatatgggcaca

SEQ ID NO: 901307 - DNA, 77 bp, Artificial Sequence
  ENSG00000225964_20 (sequence is synthesized)
actacaggcacatggtatcactatgttggccaagatggttttgatctcttgacttcgtgatccgccctcctcggcct

SEQ ID NO: 901308 - DNA, 120 bp, Artificial Sequence
  ENSG00000225964_21 (sequence is synthesized)
gcctcccaaagtgctgggatttcaggcgttagccaccgcacccagcctggacttgtctatttcatttggagaacttcaattgatctaaatctactttgcagcttttcattgttaattttg

SEQ ID NO: 901309 - DNA, 120 bp, Artificial Sequence
  ENSG00000225964_22 (sequence is synthesized)
actttgcagcttttcattgttaattttgaatttatttaaacaagtaaaatatttaagacatttgtgtggaaaacctgtaacaaattgcatttggttcaatccctgattatgttttagata

SEQ ID NO: 901310 - DNA, 77 bp, Artificial Sequence
  ENSG00000225963_0 (sequence is synthesized)
ctgccaagactactagccgtggactcacggactgccttatccaccgtcatggtagtccacacggcggcagtgggctc

SEQ ID NO: 901311 - DNA, 120 bp, Artificial Sequence
  ENSG00000225963_1 (sequence is synthesized)
atgctcatggaattcacctgtcttaccatgttccccataatcctgaagcagctgggttgatagagtggtggtatggccttttgaagtcacaattaaaatgccaactaggtgacaatactt

SEQ ID NO: 901312 - DNA, 65 bp, Artificial Sequence
  ENSG00000225963_2 (sequence is synthesized)
gtggaagtggcaccactcaccatcacccatagtgatccactagcaaaatttttcttcctgttctt

SEQ ID NO: 901313 - DNA, 77 bp, Artificial Sequence
  ENSG00000225963_3 (sequence is synthesized)
tagttccagagggaggaatgctgccagcaggagacacaacaacgattccattaaagtggaagttaagatggctacct

SEQ ID NO: 901314 - DNA, 88 bp, Artificial Sequence
  ENSG00000225963_4 (sequence is synthesized)
cctgcccagcccgaagaagctttatctgatctgaacctgatttagataaggaggtcctggactttgttccaatgctgcagagagtgag

SEQ ID NO: 901315 - DNA, 120 bp, Artificial Sequence
  ENSG00000225963_5 (sequence is synthesized)
aggaggtcctggactttgttccaatgctgcagagagtgagacttctgtggggagaggagtgtcctttgcatttgggaaagatgtgaactactgtggccagagggtgaactatggtagatt

SEQ ID NO: 901316 - DNA, 120 bp, Artificial Sequence
  ENSG00000225963_6 (sequence is synthesized)
gcttctaaagatgggagcagcaatgtttcttcccaagcaacattctcctttgaaatgtgactttgccacccatcgcatcaagagggtcttagatacatgatggcactgttggcttcctga

SEQ ID NO: 901317 - DNA, 120 bp, Artificial Sequence
  ENSG00000225963_7 (sequence is synthesized)
agacctcttcatcctgcagaaggtgcaactccacagcatcctgagaggttggacacaaggcttggaaagaatgaatggtgcctctcggtgaattactacaacctgaatcctgtgacccca

SEQ ID NO: 901318 - DNA, 120 bp, Artificial Sequence
  ENSG00000225963_8 (sequence is synthesized)
cctgtgatggcccaatgttattgaaattactgactccatccacttagcaagtggtaaatactctgcaggcatagatttgactaatgtgttctgttcagcgcctatttcaacagatctcag

SEQ ID NO: 901319 - DNA, 120 bp, Artificial Sequence
  ENSG00000225963_9 (sequence is synthesized)
ctgcaggttgctttcacccccgaagggacacaatagaccgttatctggctaccacggggtacctcgacagttctgccaccatacacaatctttgcaggcaggatttgaactgcatctgac

SEQ ID NO: 901320 - DNA, 120 bp, Artificial Sequence
  ENSG00000225963_10 (sequence is synthesized)
gacactttcccttgtggggcatgatagtgtgttcctcgttgcagaaggacccctgtatgcagaagtagaggcgctggcctcaggctcctccacttcctcttggacagaagacgctgagca

SEQ ID NO: 901321 - DNA, 120 bp, Artificial Sequence
  ENSG00000225963_11 (sequence is synthesized)
ttttttcaggaagtggtcaccccagtggtccccggctttctcagacttcctgcagctctctacacagtgaatcacagtgagacactggcagcaggcaccacggaagggaccctcaaatct

SEQ ID NO: 901322 - DNA, 120 bp, Artificial Sequence
  ENSG00000225963_12 (sequence is synthesized)
gaaggctcaaggtcctgggaaaagatgaagtggagcatgcctcttgtttcctcctattagatgctgagtgttggaagttcttcctaggattcacaaagaaactcctgctcttcttccaca

SEQ ID NO: 901323 - DNA, 76 bp, Artificial Sequence
  ENSG00000225963_13 (sequence is synthesized)
aaaacttgtttcactggcagaaaagatccccactgttaaagtgaggtaaagaagattcttgcttcctctttacgcg

SEQ ID NO: 901324 - DNA, 120 bp, Artificial Sequence
  ENSG00000225963_14 (sequence is synthesized)
taggtgtgagccactgcgcccggctggggccatgtgtttttataaaaatatctacatgagtcacttaggatgcattcagttacagggaatagaaaactcaatttaattggcttcaacaag

SEQ ID NO: 901325 - DNA, 120 bp, Artificial Sequence
  ENSG00000225963_15 (sequence is synthesized)
caaatgtgttggttcatatagccagaaacttcaaaagttaagacaagttttggtgttagtttaatttggcagctcagaaatttctttaaggactgaatttcttttcatatatcttttctg

SEQ ID NO: 901326 - DNA, 120 bp, Artificial Sequence
  ENSG00000225963_16 (sequence is synthesized)
ggatatctgcttcatcccaaagctgggttcctccagtgatcgaaacatggctaccaacagtctccagaaacacctcttccaacccgaggagtgagcgtctcctccccagccactgggcag

SEQ ID NO: 901327 - DNA, 120 bp, Artificial Sequence
  ENSG00000225963_17 (sequence is synthesized)
agttctaggattccctctgattggaccatgttgatcatgtgcctttcctggggctggggactgtcctacgttgattggcttagatctggcttatgcgctggttcctgaaataaacaccgt

SEQ ID NO: 901328 - DNA, 120 bp, Artificial Sequence
  ENSG00000225963_18 (sequence is synthesized)
gtcaagagtaggatatacttgcagtttaatttagccaaacctggacctatgctggagctgaggatggagcaaataccagcaaaactgcctaaatgttccccagtgctgtgggggtggaac

SEQ ID NO: 901329 - DNA, 120 bp, Artificial Sequence
  ENSG00000225963_19 (sequence is synthesized)
ggacgctgagaagctcaccctaatatccaattcaccatggaaaaaagacaggaaggatatacagcaaagtgcccacgacagttattttcaagtggtgatattatggggaatttttatttt

SEQ ID NO: 901330 - DNA, 120 bp, Artificial Sequence
  ENSG00000225963_20 (sequence is synthesized)
cttttttacgcttatctgtattttacatttttgacaacaagcatatattacttgaataacttcaaagagaaatgaaagctataaatatgaagaaaagctggtatataacactagcaagta

SEQ ID NO: 901331 - DNA, 120 bp, Artificial Sequence
  ENSG00000225963_21 (sequence is synthesized)
attaacagcttgagggatttaaagcagacgtgttggcaaacaggaaacatgaattttcagaatggtaccaacggtgccttgcagaagcttccaactgcctttctcttgcccctgttaggc

SEQ ID NO: 901332 - DNA, 120 bp, Artificial Sequence
  ENSG00000225963_22 (sequence is synthesized)
atgtgactttgccacccatcgcatcaagaggtaaggtctattctccctccttctgaatctgtccctgtgacttgctttcaccaatagattgtggcagaagtgacagtgtgcaagtatgaa

SEQ ID NO: 901333 - DNA, 120 bp, Artificial Sequence
  ENSG00000225963_23 (sequence is synthesized)
tggggtctgccagtaccatgtggagcaaagggaagcatcctcatggatgatgcctgaattcttgatccacagaatagtgagcaataaaatgtttttttctttttaagcagctaagctttg

SEQ ID NO: 901334 - DNA, 120 bp, Artificial Sequence
  ENSG00000225963_24 (sequence is synthesized)
aggtcatttgttacacagcaatagatagctaatacaccatcaaagagttctggggtcatttcaaaacaactcaggaggcaaattgaggagtttctcactaaaagtggggaacttgcacat

SEQ ID NO: 901335 - DNA, 63 bp, Artificial Sequence
  ENSG00000225963_25 (sequence is synthesized)
aggaggttgcagtgagtcaagatgacgctactgtactccggcctgggtgacagagtgagactc

SEQ ID NO: 901336 - DNA, 120 bp, Artificial Sequence
  ENSG00000225963_26 (sequence is synthesized)
ggtcttagatacatgatggcactgttggcttcctgaagacctcttcatcctgcagaaggtgcaactccacagcatcctgagaggttggacacaaggtgagcagagggcaaagcccctgga

SEQ ID NO: 901337 - DNA, 120 bp, Artificial Sequence
  ENSG00000225963_27 (sequence is synthesized)
aatggccaccattcctgtggctgccactgtcttccctcaggaaggatgggctcagccatgagggtgggacacctcccagagtgtccaagatccccacatggggtctccagcattggccct

SEQ ID NO: 901338 - DNA, 120 bp, Artificial Sequence
  ENSG00000225963_28 (sequence is synthesized)
ttccctgtctgagctgctgggagcacaaaggaaccctgcctgccaggcttgagtgtcagaatctgggctttcacctgcagggacctcaggcctccatcagccaggcttggaaagaatgaa

SEQ ID NO: 901339 - DNA, 120 bp, Artificial Sequence
  ENSG00000225963_29 (sequence is synthesized)
ttggggtttgcatccaactcaccagctggtcctgaggctgcatctgcctctccagggtcttagatacatgatggcactgttggcttcctgaagacctcttcatcctgcagaaggtgcaac

SEQ ID NO: 901340 - DNA, 120 bp, Artificial Sequence
  ENSG00000225963_30 (sequence is synthesized)
gtttccacatggtgggattaaactaaaacaaaaaagtatgggccactgccccaggcatagtacagggatccacaccaatttctggccattgtctggtcagttgagggatgctccatccct

SEQ ID NO: 901341 - DNA, 120 bp, Artificial Sequence
  ENSG00000225963_31 (sequence is synthesized)
ttggcttcctgaagacctcttcatcctgcagaaggtgcaactccacagcatcctgagaggttggacacaaggggggatgtgacagtcctcatggaagactcgtggacaagtaccgcagca

SEQ ID NO: 901342 - DNA, 120 bp, Artificial Sequence
  ENSG00000225963_32 (sequence is synthesized)
gagaagttgtcccccttgacagcacacctcgcattcatccgagtttttccgctgcaagggcagataacgtgggcaccgctaggaccatggagacccacgaatgctgaccctgtggggttc

SEQ ID NO: 901343 - DNA, 120 bp, Artificial Sequence
  ENSG00000225963_33 (sequence is synthesized)
tagaacacatcatttttgtgtgtgccagagtggatatccaaacccaatttttgatggggggagctgatgccacctccctgggggaaattgcaagacaaatggcacaacaagcagagagtc

SEQ ID NO: 901344 - DNA, 120 bp, Artificial Sequence
  ENSG00000225963_34 (sequence is synthesized)
caggttctgctgcgttttgagctgtgctgctgcctgctggcaagcttgtgctttgagctgggccactctgggcgcatttgctgagcccaccaggcctctattaatagatctgactgacca

SEQ ID NO: 901345 - DNA, 120 bp, Artificial Sequence
  ENSG00000225963_35 (sequence is synthesized)
aagtaagaaatgatgataactggcatttgggtgcaggagtatgggaactgttgttcctggtgccttgcctaactgccccatggtcgtaacataacatggccctaaaatgttccacagtgg

SEQ ID NO: 901346 - DNA, 120 bp, Artificial Sequence
  ENSG00000225963_36 (sequence is synthesized)
gcatggatgctatgacccagtaaataacacattaaaataattaaaattaagttacctttggcacttacaattggctttacaaaatggaactctatggaccttctctgttaaaatatttaa

SEQ ID NO: 901347 - DNA, 67 bp, Artificial Sequence
  ENSG00000225963_37 (sequence is synthesized)
gttgtccaggctggagtgcagtggtgcattcttggctcactgcgacctctgcctcccaggcttgccc

SEQ ID NO: 901348 - DNA, 120 bp, Artificial Sequence
  ENSG00000225963_38 (sequence is synthesized)
ctgctgtccagggaatagcatactaggaaagggcacttccaggggcagaagcagtgtggggccaagaggctcactggcagtctcagagacccagagaggcccagagtctctggcaccaga

SEQ ID NO: 901349 - DNA, 120 bp, Artificial Sequence
  ENSG00000225960_0 (sequence is synthesized)
aataaagagatggcacagcgatccctctgcccttaacagacacctctgggaaggaacctccagcagggcaatcctggtcatcatcaaaactccagtacgaatgcagtcactgccatttgc

SEQ ID NO: 901350 - DNA, 120 bp, Artificial Sequence
  ENSG00000225960_1 (sequence is synthesized)
tggatcatgttctgcctcagatttatgttcctgaaatccatgtatattgagttgagatgagcaaactggagttcaaagaagtgaaacagcttgccaatgtttactcaacccatttgtggt

SEQ ID NO: 901351 - DNA, 120 bp, Artificial Sequence
  ENSG00000225960_2 (sequence is synthesized)
gagtccagtctccaaacacaggaccgattccaaagcctcaactctagttccacactgtactgctctcctggcacagagttcggacttgttgaataaatccctgatatgcaccaagtcaaa

SEQ ID NO: 901352 - DNA, 120 bp, Artificial Sequence
  ENSG00000229056_0 (sequence is synthesized)
agaaggagttgagtgatggtagatatcaggccctggtctgcggcttggaagtttcctgtgaataagaaaaacatcatcgcttcttgagtcacaaggatgataggatgagaaaaagaaagg

SEQ ID NO: 901353 - DNA, 120 bp, Artificial Sequence
  ENSG00000229056_1 (sequence is synthesized)
acaaaggcaccagaggaggtatgccaaatgggaaacttttcatcactttccagataaaaactagcagtctgtgaaggcaactggtctgatttttcaggaaccagacactggaacatgtcg

SEQ ID NO: 901354 - DNA, 120 bp, Artificial Sequence
  ENSG00000229056_2 (sequence is synthesized)
tctgatgtacatcacaccaagaaataaaaaaagaattggaaagccaatgtccaattatttactaaaacagaatccactggagagaaatgcaaaggcaggtaaaaaggcaatctcttaaca

SEQ ID NO: 901355 - DNA, 120 bp, Artificial Sequence
  ENSG00000229056_3 (sequence is synthesized)
ctcaggaaaaagtctccagctactgctgtctctcagactctcacagtatgtgtaaccacttcctcctctgcacggaatcaccccagaagatcaactctactagatcatttgaggacaatg

SEQ ID NO: 901356 - DNA, 120 bp, Artificial Sequence
  ENSG00000229056_4 (sequence is synthesized)
aacaaagtctcaagactgaattcccacagaaaacattctcatgaaaccacccaatattctggtgaagttaaagaagggcatgtgttcggagacaaccagaagcagcaatgctcaaaacca

SEQ ID NO: 901357 - DNA, 120 bp, Artificial Sequence
  ENSG00000229056_5 (sequence is synthesized)
caaaactctggattgccgactctgcacatcctggttcctctagatacagttcagtggcacattcacaaataaacgttttcaaaaactgccctcaggcagttctagagaaatgctttgact

SEQ ID NO: 901358 - DNA, 120 bp, Artificial Sequence
  ENSG00000229056_6 (sequence is synthesized)
attgtgtgccagtcatggtaccacacgctgggaatccaatggggagtaagagaaagtcccttttcaaggagcttacagtgcagtggaagagagaaagttaaaagagaaataaaaaaagaa

SEQ ID NO: 901359 - DNA, 120 bp, Artificial Sequence
  ENSG00000229056_7 (sequence is synthesized)
ttttcaggtaagaacatatgagaggcaggctgagaccaattttctaccaggccagctaattcatcacaatgacaagctatgggtcatatgctttcaggaaccagacactggaacatgtcg

SEQ ID NO: 901360 - DNA, 120 bp, Artificial Sequence
  ENSG00000229056_8 (sequence is synthesized)
tcatactcattattacagtcacagggcactgtctgacttgacagatacagccgagcagttaaaaggttatgggaatttaagtccattatggtcatacgattcttatggacccagagatat

SEQ ID NO: 901361 - DNA, 120 bp, Artificial Sequence
  ENSG00000229056_9 (sequence is synthesized)
gaaattaatcagccacatgtgtagggacaaagtttgtcataaatagatataagttatctgcatgctaagaacttagttacttaactctgtttcctcatgttaatataaacataattatag

SEQ ID NO: 901362 - DNA, 120 bp, Artificial Sequence
  ENSG00000229056_10 (sequence is synthesized)
aatgcaaatgaaatacttagcctggagcctattatataggaagcactcaataatttcaaactattgagtatattattagataggctccataattatttattcctttttcaacagacagta

SEQ ID NO: 901363 - DNA, 120 bp, Artificial Sequence
  ENSG00000229056_11 (sequence is synthesized)
tgatctattgaaaataaagccaaactagatttctttgacccactcctttttctgtttgtattgttggcaagttgttctaaatcaacttgccaacatactattaacatgttattaacatag

SEQ ID NO: 901364 - DNA, 120 bp, Artificial Sequence
  ENSG00000229056_12 (sequence is synthesized)
aagggatgcttattttgtttgctttgtaagaaatgcttctgattcagtaactgggcaatttatttaaatataagtaaaaagcagattttattaaaaactactttgtgctatcataaataa

SEQ ID NO: 901365 - DNA, 120 bp, Artificial Sequence
  ENSG00000229051_0 (sequence is synthesized)
gttacagtgcgccattttagctttgccatccgcggacggcttgagtgttaaccagctcggtggaccgtttgcctttctgcgagggcagcggcctacatgttcagcctcaacgtgaacgtg

SEQ ID NO: 901366 - DNA, 120 bp, Artificial Sequence
  ENSG00000229051_1 (sequence is synthesized)
atgaggatgaagacctttatgataatccactttcacttagtgaatcgggattggactgctgcattctaaaaataatggtgagaagaatgaataaattagagtttactatgtaataaaacc

SEQ ID NO: 901367 - DNA, 120 bp, Artificial Sequence
  ENSG00000229051_2 (sequence is synthesized)
taaaaaagaggagaggtagcagaatttacaagaaggttaaacctgaccttactgaagagaatgataccctcatagcagcgcatcttctttgctcacagaaaggctggcgtcaatcctcaa

SEQ ID NO: 901368 - DNA, 120 bp, Artificial Sequence
  ENSG00000229051_3 (sequence is synthesized)
ccaaagtgctgggattacagatgtgagcagccatgcctggccaatacagaagatgaaaattggagattgtcaatgaacttgagatcattcgttcaatgctcattaattcaatattcactt

SEQ ID NO: 901369 - DNA, 120 bp, Artificial Sequence
  ENSG00000229051_4 (sequence is synthesized)
tcattcgttcaatgctcattaattcaatattcacttaacaaatatttattgagtgtttactatgggccaagaactgagcaaaacactccacaatacaagtctgtgaaataacccaaacaa

SEQ ID NO: 901370 - DNA, 120 bp, Artificial Sequence
  ENSG00000229051_5 (sequence is synthesized)
cattttagctttgccatccgcggacggcttgagtgttaaccagctcggtggaccgtttgcctttctgcgagggcagcggcttcctctagaataaagaatgaagaaaattgaaatgatctc

SEQ ID NO: 901371 - DNA, 120 bp, Artificial Sequence
  ENSG00000229051_6 (sequence is synthesized)
tgaaactcgagaatagttatgtaaaagagaaaaaacaaagtctatcgttcaaaggctactgaaccaggaaacaggcagcccgcgttaaaatcccagctctgggatcaactggttagatta

SEQ ID NO: 901372 - DNA, 120 bp, Artificial Sequence
  ENSG00000229051_7 (sequence is synthesized)
ttttcattcaggcatcttttctttctgcactacttcatctaccagttgctaacattgaatgaacctttacagtgttccaggtactgttttaagagattttctatactcatataacatttt

SEQ ID NO: 901373 - DNA, 120 bp, Artificial Sequence
  ENSG00000229051_8 (sequence is synthesized)
gtgaaggtagagggatttattatgagagctttgctagcagacatctcattctttaagacaaaatcaacgcacaaacataattggtcaaaggaagaaagctacaaaaccaattcaataaca

SEQ ID NO: 901374 - DNA, 120 bp, Artificial Sequence
  ENSG00000229051_9 (sequence is synthesized)
tctgaagcctgagaggaaaatgaaagacaagaggctgtggctgcagctgtgtctgctgacaacaggataaaaatggttgcattgagagtgagctgcattttcaccaggcagagcaaactg

SEQ ID NO: 901375 - DNA, 120 bp, Artificial Sequence
  ENSG00000229051_10 (sequence is synthesized)
aagcttttaagaggactggctggagagtcaaagaagatccattagcttctggaccactgaaaacctaagggctgatggtggggcagggtaagtggccggcagcagggagacattttctgt

SEQ ID NO: 901376 - DNA, 120 bp, Artificial Sequence
  ENSG00000229051_11 (sequence is synthesized)
atctaggatggtatagaaaagacccccactggacagatctacaaagaacaactaaagagtctcatggtagaacaggtcagctctggacatcattcaaatccaggggagcctcttatactg

SEQ ID NO: 901377 - DNA, 120 bp, Artificial Sequence
  ENSG00000229051_12 (sequence is synthesized)
gattgcaattgtgttgggcatgtacaatggtgttctttttctctaatggcttctttcttctggtcagtctctggaaggggtgaaagagtgagaaatagtagccagcaagtgtagaaagag

SEQ ID NO: 901378 - DNA, 120 bp, Artificial Sequence
  ENSG00000229051_13 (sequence is synthesized)
atgtggaagagagaacggggaaacagaaattgcatttctcccacgttccaaatgtaggttatccgggttaaatgtaggccccacctgactaggcaaagattttttcctttgttgtgagtt

SEQ ID NO: 901379 - DNA, 120 bp, Artificial Sequence
  ENSG00000229051_14 (sequence is synthesized)
tgaaaagaactaaacatcatactgaagtggaattattgaaattggatagacccaggttcaaatgttgactcagttatgtaacatcttgtgaattttgacaggttccttaactccactgag

SEQ ID NO: 901380 - DNA, 120 bp, Artificial Sequence
  ENSG00000229051_15 (sequence is synthesized)
tctgtttttatacccatgaaatggatgtaggattgttatgaacattaattgaaaaattatatataaaataagtgtccagcatagttcctggcacatactagtgcttgaaaactaccaatc

SEQ ID NO: 901381 - DNA, 120 bp, Artificial Sequence
  ENSG00000229051_16 (sequence is synthesized)
aacttcatcaatttgtgttatgccctgcatgggcacatatttgtcctgatactcttcaaaatgtagaagtacccacagaaaaattgtctcagttcaagcacagtattattaatattctac

SEQ ID NO: 901382 - DNA, 120 bp, Artificial Sequence
  ENSG00000229051_17 (sequence is synthesized)
tgagtactaagtatggtcgttaatagtctaatatgaggaagtcaaaacagtctctggaaaaagtctttctgcaagctttttgaagcttcagggattgctacaaagactggaaaatcgatc

SEQ ID NO: 901383 - DNA, 120 bp, Artificial Sequence
  ENSG00000229051_18 (sequence is synthesized)
ttgaactcagccttttaatttcttttcatgattactgttctcaaatggagaatgcaattaaaattaatgctgtcttagttcacttgcctcaaaataaacattgatcaaattctatgtgaa

SEQ ID NO: 901384 - DNA, 120 bp, Artificial Sequence
  ENSG00000229051_19 (sequence is synthesized)
atgtgtctagccttacggatatttggttacaaggaatgggaaacaactcaagtcaaattaaacaaaaatagaaggcatcaaatgcaactccttggacaaatgtgttttgagtttcaagtg

SEQ ID NO: 901385 - DNA, 120 bp, Artificial Sequence
  ENSG00000229051_20 (sequence is synthesized)
gttggttgtcttatgtgtctagccttacggatatttggttacaaggaatgggaaacaactcaagtcaaattaaacaaaaatagaaggcatcaaatgcaagtcaaaggaagaaagctacaa

SEQ ID NO: 901386 - DNA, 120 bp, Artificial Sequence
  ENSG00000278146_0 (sequence is synthesized)
tgtctagttagaatatatgatccaggtaacccaacctatggccacatttctttttggttattaaagtaaaagcacacatgcgaacttatttagatacccaaagatatggcaggcatcttt

SEQ ID NO: 901387 - DNA, 120 bp, Artificial Sequence
  ENSG00000278146_1 (sequence is synthesized)
cacagacttgttctctttgtttgaaattgattcaaatgagtcatatgatctgtacaaatgctcttcctgttctagagtaagacatgctaaatgtttaataaatgagtgtgtgcttcccag

SEQ ID NO: 901388 - DNA, 120 bp, Artificial Sequence
  ENSG00000278147_0 (sequence is synthesized)
tcggcataatttgggaagtggttaataagggagtatttataaaggcatggcttagggaaacctggaacctagaatgaagttatattgagagggttaccttcatcagagctgagatcaccc

SEQ ID NO: 901389 - DNA, 120 bp, Artificial Sequence
  ENSG00000278147_1 (sequence is synthesized)
gagaacctattgatacggtctataagggtcaatctccaaataatggagcagggtggatgatctgttgatctggaggggcaaatggaagaactgcattaataaataatatcatttcccatt

SEQ ID NO: 901390 - DNA, 120 bp, Artificial Sequence
  ENSG00000227527_0 (sequence is synthesized)
ttctttttttcttttttttttttttgaggagagatactcctccacttttttaaatctatatatttaaggtacacaacatgatgttatgggatagtcaaaaagtcactatagtgaagcaaa

SEQ ID NO: 901391 - DNA, 120 bp, Artificial Sequence
  ENSG00000227527_1 (sequence is synthesized)
ttaacagagccatcatctcacacagttatccattttttttgtttattgtggcaagagaagctaaaatctactcatttagtatgaatcccatatgtaataaattttattgcccctccacct

SEQ ID NO: 901392 - DNA, 120 bp, Artificial Sequence
  ENSG00000227527_2 (sequence is synthesized)
cctcattctggcagctatccacctctgttctctctccagccctatcccatattagctcaggatgagcacttcagggaagtgccttagaattccagacaagtgagagaagcggagctgccc

SEQ ID NO: 901393 - DNA, 120 bp, Artificial Sequence
  ENSG00000227527_3 (sequence is synthesized)
aacacttgtaagaggtggtgctaaacaggagggcagaaggcaccattccttcggggcatggggccccaggtatccgtgggcagggtccaaagccaccgatccctactgtcctcaactgcg

SEQ ID NO: 901394 - DNA, 120 bp, Artificial Sequence
  ENSG00000227527_4 (sequence is synthesized)
gggttgcctccgccgcctttgctcccagacgccactccgaggcacaaggaccccaagtcgctcggaactgccggccgctagatgacaccggctgcgccgatgcagagcctcgggagtctc

SEQ ID NO: 901395 - DNA, 120 bp, Artificial Sequence
  ENSG00000227528_0 (sequence is synthesized)
ctcgtgtaggacgcccaacatctggacgcacacagcatgactactagtgctgagcagccacccacaatgaattacctcacaggattgctggtcaaagacactcggagagactccaggcat

SEQ ID NO: 901396 - DNA, 120 bp, Artificial Sequence
  ENSG00000227528_1 (sequence is synthesized)
agaagatcaggtgaagtggtacgaaattcggtgtttttcatgttttttgtttttattaatttactataatgttattcaaaacaacattcccaataaagcaaaacaaattagcactgtaaa

SEQ ID NO: 901397 - DNA, 120 bp, Artificial Sequence
  ENSG00000227528_2 (sequence is synthesized)
gatactacctgccttctctgccaaaccctctggccctaacctatcatgtatgaaaggtgaaataggagcatactctgatttcacagttttaaccatcatcctgtgaccccaaaagtccat

SEQ ID NO: 901398 - DNA, 120 bp, Artificial Sequence
  ENSG00000227528_3 (sequence is synthesized)
cacaggagggcatatgcacaaagacattaaatgtaaaagaaatggcctgtgctgagcaacagagaaagctgtatcagagataaaaccaaacagtaagcttcctatgacacagctccagtg

SEQ ID NO: 901399 - DNA, 120 bp, Artificial Sequence
  ENSG00000227528_4 (sequence is synthesized)
ctgcaaggtggaaacagaagtccaagagagattctttgttaccacttgacatggatgggaatctaggtactccctgatggagagaaggaggactgcctcattatgctcaccatgtaacct

SEQ ID NO: 901400 - DNA, 120 bp, Artificial Sequence
  ENSG00000227528_5 (sequence is synthesized)
acaatagcaccatggaagggggatgtggacgtctgttatcactgggtggttgtgaaagccctgactctattggcttctttggacataatgccagtggggagggggaagaatgcctcatta

SEQ ID NO: 901401 - DNA, 120 bp, Artificial Sequence
  ENSG00000227528_6 (sequence is synthesized)
atgccatctgtgggtagaaatccaggctacccactttgctttttgatagtgtggtgggggatggggccacatatttttttctgcgatatttagcagaaatacaaagcagttattgccaac

SEQ ID NO: 901402 - DNA, 120 bp, Artificial Sequence
  ENSG00000227528_7 (sequence is synthesized)
atcctcgtgtaggacgcccaacatctggacgcacacagcatgactactagtgctgagcagccacccacagagggcatatgcacaaagacattaaatgtaaaagaaatggcctgtgctgag

SEQ ID NO: 901403 - DNA, 120 bp, Artificial Sequence
  ENSG00000244676_0 (sequence is synthesized)
ttcagaagctgttcgatggcaacgtggcggacatggagctgtgaggccaaagaatctttttcttgcacttggttgtcccagcatcagctattgaggctgataagcaaaagggagctgcta

SEQ ID NO: 901404 - DNA, 120 bp, Artificial Sequence
  ENSG00000244676_1 (sequence is synthesized)
cataatcctgttctctctcttgaaagaaaggctaattaggataaatatgctagtctgccttacttggatggtggaagaacagagagcagtgttagaatcactgtttcattaccagctgac

SEQ ID NO: 901405 - DNA, 120 bp, Artificial Sequence
  ENSG00000244676_2 (sequence is synthesized)
atctgcatggttcttctgggtaaggaccagcaacaagactgtcttgtgtgtgtcctttttcttcctagctcctcccatctctctgattaacaccaatccaataaaaatttctcaaaacta

SEQ ID NO: 901406 - DNA, 74 bp, Artificial Sequence
  ENSG00000244675_0 (sequence is synthesized)
tacaggaatgcgccaccacgcatcaggctagtctcacactcccgacttcagatgatccacccgcctcggcctcc

SEQ ID NO: 901407 - DNA, 120 bp, Artificial Sequence
  ENSG00000244675_1 (sequence is synthesized)
caggcgtgagccaccgtgcctggccaaagccttcttcactttcattttgtggctgctgttgtgaaatctgcagaacctcaagctgtttggactccatcttctaggttgaattagattaca

SEQ ID NO: 901408 - DNA, 120 bp, Artificial Sequence
  ENSG00000244675_2 (sequence is synthesized)
gttgaattagattacaggtaatctcatggtggaggtgtattctggatcgactcacttttgaaatgtttatgaaagaaattccttcacctcgggacttccacactggagctggcaatcagt

SEQ ID NO: 901409 - DNA, 89 bp, Artificial Sequence
  ENSG00000244675_3 (sequence is synthesized)
ccttcacctcgggacttccacactggagctggcaatcagtatcaccttaatttacctatcacagtgaggcatctctgctctgagggaag

SEQ ID NO: 901410 - DNA, 90 bp, Artificial Sequence
  ENSG00000244675_4 (sequence is synthesized)
gttctgttttgttttgttggggctggaatgcagtgacatcatcacagctcactgtagccttgatctcctgggctcaagcgatccttctgc

SEQ ID NO: 901411 - DNA, 120 bp, Artificial Sequence
  ENSG00000244675_5 (sequence is synthesized)
tgcacgccaccacacatggctaatttttttattttttagagacgaggtcccatgtgagccacggtgccccaccttttaaagcaattaccgtaaggaagcaactgtctttagcaaatagaa

SEQ ID NO: 901412 - DNA, 120 bp, Artificial Sequence
  ENSG00000244675_6 (sequence is synthesized)
gatcataaacatccttctggagatcttgagatgttgactgtggtttatagggcaatgaaaatctacatacctgagtggggcagtgagacatgagtgccacctatgatccttccagtgagc

SEQ ID NO: 901413 - DNA, 120 bp, Artificial Sequence
  ENSG00000244675_7 (sequence is synthesized)
aattctttctggtgccaggagcccaaaggaaactcagtcaaccagctgtagatgggcttgttccgagtttgttctagaagtcagaactgccagctctgaaagtaggtcacaagtgactgg

SEQ ID NO: 901414 - DNA, 120 bp, Artificial Sequence
  ENSG00000244675_8 (sequence is synthesized)
ccatccctgggctgctcacaggaagtagctgcaaaggtcagggaaagtttttaatgactatacaggccagtgaatgacaggctttgaggagcttctcttcttggcatctgaaacaggcac

SEQ ID NO: 901415 - DNA, 120 bp, Artificial Sequence
  ENSG00000244675_9 (sequence is synthesized)
tcctcagccccataaaatagatgcctttgcaaaaaacccatttatttttttttttttctgtttttgagagggagtctcgctctgtccccccaggcggagtgcagtggcgtgatctcggct

SEQ ID NO: 901416 - DNA, 79 bp, Artificial Sequence
  ENSG00000244675_10 (sequence is synthesized)
ttctcctgcctcagctcccaagtagctgagattacaggcatccgccaccacgcctggccaattttgtgaaaaagcccat

SEQ ID NO: 901417 - DNA, 120 bp, Artificial Sequence
  ENSG00000244675_11 (sequence is synthesized)
atacagaggaatcatcttgcaggactcaaggaatgattaagaggaatctacagcattaactttagaaactcgatgcaatattcccaagaggagttaagattgggataagtaatctctgaa

SEQ ID NO: 901418 - DNA, 120 bp, Artificial Sequence
  ENSG00000244675_12 (sequence is synthesized)
aggagttaagattgggataagtaatctctgaattaatttcaaccttgagatgttgtgatcctatgaagtcaaagacatatttcttttttctttgtttgagatggagtcttgctctgtcac

SEQ ID NO: 901419 - DNA, 68 bp, Artificial Sequence
  ENSG00000244675_13 (sequence is synthesized)
accatgtccggtctagatacatatttctattaatacacatttgcagggattgtttgttactgaagttg

SEQ ID NO: 901420 - DNA, 120 bp, Artificial Sequence
  ENSG00000244675_14 (sequence is synthesized)
attaatacacatttgcagggattgtttgttactgaagttgacgccttgtgcttgagaatgctatttcactgacacaattgttatggtataaatgtgagagtatagttacaatctggacac

SEQ ID NO: 901421 - DNA, 120 bp, Artificial Sequence
  ENSG00000244675_15 (sequence is synthesized)
tattttttgcttgtcttattggcccagcaaccagcttgacactggggactatcaggctccaaataataaccaatgtctcactccaaacagacaggatactacggagccagggtcagcaaa

SEQ ID NO: 901422 - DNA, 120 bp, Artificial Sequence
  ENSG00000244675_16 (sequence is synthesized)
cattttctgtaaagggccagatagtaaatattttgggctttgtgggccctatggtctctgtcacaacgattcaactctgctgttgtaacaaaaaagcagtcagacaatatgtaaatgaat

SEQ ID NO: 901423 - DNA, 120 bp, Artificial Sequence
  ENSG00000244675_17 (sequence is synthesized)
gggcatggctgtgttccagtaaaaccacaaaaacaggcagctagctttggtgtggggccctaagagcttggactttgaagccaggttcaaatcctggctttctcaccttctagctccgtt

SEQ ID NO: 901424 - DNA, 120 bp, Artificial Sequence
  ENSG00000244675_18 (sequence is synthesized)
accttaaagaacttcattatcttccttgtattttagtcttttcatctctaaattagtgatagtacttaacagtgttgttataaagattaaacgagttaagtttgtaaagtacttaaacag

SEQ ID NO: 901425 - DNA, 120 bp, Artificial Sequence
  ENSG00000244675_19 (sequence is synthesized)
tgcctaccaggtagtaagtgctatagcagagtgtgttagataatgaaacatcctgtgctgtggatatattattcccattacgatttggattcaaataaagaaatacatgacttagaagaa

SEQ ID NO: 901426 - DNA, 120 bp, Artificial Sequence
  ENSG00000251688_0 (sequence is synthesized)
agaacggagccttaggcatccagccgttggggtgtgccactcagatctcctttaaaggaagaaattgccatgaggaatgtagttatctgacagcctccagctgcctcaactttgaggtct

SEQ ID NO: 901427 - DNA, 120 bp, Artificial Sequence
  ENSG00000251688_1 (sequence is synthesized)
ttcgcagcattcactcaaaggccacatagtcctggtcaaagactaaacatggcaaagtttctagagctggtccattcttgctcatcataggattcctctaatgggaaatctttccccaag

SEQ ID NO: 901428 - DNA, 120 bp, Artificial Sequence
  ENSG00000251688_2 (sequence is synthesized)
ggttccgcattagcctaaccaagactttctctgagactcttagttattatgatgctacttccaccagcaccagggttcttgttgctatctggctgttgagtgattcagtcccactgagca

SEQ ID NO: 901429 - DNA, 120 bp, Artificial Sequence
  ENSG00000251688_3 (sequence is synthesized)
gtcttgctctgctgcccaggctggagcacagtagtgtgatcatagctcactacagccttcaactcctgggccttagcaatcctcctgcctcagcctcccaaggagctatggctgcaggta

SEQ ID NO: 901430 - DNA, 120 bp, Artificial Sequence
  ENSG00000251688_4 (sequence is synthesized)
ccgccaccactcattgacagccacttccagtactcactgtcttggacacagacttgagtaaaagtacaggggcaagaggcctggatgaagaaataccctcagaaactcccactcttctgg

SEQ ID NO: 901431 - DNA, 120 bp, Artificial Sequence
  ENSG00000251688_5 (sequence is synthesized)
ttcctgctgaagactccagtaataaaagttattcatacctacctccaccatcttggctgggaagtcaaggaagaagatagcagcccgcaacccggaagagggccctcaccagaacctacc

SEQ ID NO: 901432 - DNA, 120 bp, Artificial Sequence
  ENSG00000251688_6 (sequence is synthesized)
atgctggcacccagacctcagacttccagcctccagaaatgagctccctctgctgcaggaactcaacgatagggaggaagagtccagaaaagtagggctgtcagcacctctgtgagcagc

SEQ ID NO: 901433 - DNA, 120 bp, Artificial Sequence
  ENSG00000251688_7 (sequence is synthesized)
cgacgatccacagcggatggagtttggtggtaaaggtactcacttcctgtctctctggtgatgattttgagcatgttctacaaagtctttcagatggtcccagtaggttggagcccagct

SEQ ID NO: 901434 - DNA, 120 bp, Artificial Sequence
  ENSG00000251688_8 (sequence is synthesized)
gccctcagtggtaacctgcccattaacgtatcctgtgttggtttcctttcctcccctacctcacctccccactcccctttctatgattcctagagtcacctcccaaataaactttcacat

SEQ ID NO: 901435 - DNA, 120 bp, Artificial Sequence
  ENSG00000251688_9 (sequence is synthesized)
tgcagtaaggagcttcacagaatacgactggaaatccacatacccacttttctgtttaattcaggaagcagttgctaaacacaactaacagagcaaagggcaagaggcctggatgaagaa

SEQ ID NO: 901436 - DNA, 120 bp, Artificial Sequence
  ENSG00000251688_10 (sequence is synthesized)
aagatagcagcccgcaacccggaagagggccctcaccagaacctaccatgctggcacccagacctcagacttccagcctccagaaatacaccatctggctctgtcacccaggctggagtg

SEQ ID NO: 901437 - DNA, 120 bp, Artificial Sequence
  ENSG00000251688_11 (sequence is synthesized)
cacagttcactgcagcttcgacttccctggctcaagtgatcctccctcctcaccctacaggcatgcaccaccgtgcccagatttgggaaactcatctgttattcatctgcctggacgttc

SEQ ID NO: 901438 - DNA, 120 bp, Artificial Sequence
  ENSG00000251688_12 (sequence is synthesized)
tgctgtgcgttattaaccctttctgtggaggtctgaggcagcctgaacacaggctggcactgggccaggatggagaatgtgtggacacttcaggaggctcattccacaccatcaagaggg

SEQ ID NO: 901439 - DNA, 120 bp, Artificial Sequence
  ENSG00000251688_13 (sequence is synthesized)
cttccttccctgaaagcgacctggcaggaccatgcaggtcataaggtcatacagccctgaggggcacaaggatgctgatcccagacacttcaggccttaataaaaataaaagcaagcaca

SEQ ID NO: 901440 - DNA, 77 bp, Artificial Sequence
  ENSG00000251688_14 (sequence is synthesized)
atgtcctctgctttgatcctctttccagatgggaaaagaaaacatctgccagatcaacaacaacagggccggtagga

SEQ ID NO: 901441 - DNA, 68 bp, Artificial Sequence
  ENSG00000251687_0 (sequence is synthesized)
gattcctcctaagcagcagccactcccagagcccctggaactctagcccaaggctctctgactgactc

SEQ ID NO: 901442 - DNA, 69 bp, Artificial Sequence
  ENSG00000251687_1 (sequence is synthesized)
gctgagcttcgggtaactctcacagtggaagattgtcttacaggtgggccagtatgtacaacctaacac

SEQ ID NO: 901443 - DNA, 120 bp, Artificial Sequence
  ENSG00000251687_2 (sequence is synthesized)
ctctagcattcatgcactgtggagcccggaaacttctcgggacaaggagcacaatgccaggccttgtcgagggccgctgcagtggagaggccagaccgggggtgccagagccaaccgcag

SEQ ID NO: 901444 - DNA, 120 bp, Artificial Sequence
  ENSG00000251687_3 (sequence is synthesized)
accaaggaagtgaaccctgcacatccggatacttgaaatgtcagcttgtggaggatctcccgcaggaatctgactttatacacaaacaaagacattgagctttctgctgaggtgagctca

SEQ ID NO: 901445 - DNA, 120 bp, Artificial Sequence
  ENSG00000251687_4 (sequence is synthesized)
gaacggatgaacttagtcttctctgcagtgatgcaagcctctgtcatgtggaagttacagacgatgctagtgaaatgtggatggtctcctggcccactgcatcatgcaagagggctgctt

SEQ ID NO: 901446 - DNA, 120 bp, Artificial Sequence
  ENSG00000251680_0 (sequence is synthesized)
acgaggtaaagactaagggacaagcgcgaggcggcaccgaaaacagcaagtgaggaaggcgaataaagccagaaatcagcatgagaagatgatcaaaattcatatattgaaacatgaaaa

SEQ ID NO: 901447 - DNA, 120 bp, Artificial Sequence
  ENSG00000251680_1 (sequence is synthesized)
ggttgaagaagaaataaagaagcacggaagtaataacatgggattatcagaaaacctgactgattgtgctgctgctggcaatggtgatgatggactaattccacaaagagcagaaaacct

SEQ ID NO: 901448 - DNA, 120 bp, Artificial Sequence
  ENSG00000251680_2 (sequence is synthesized)
aagagtatcatagggttgaagatggcatggcctgtatgctgcaggtttttctgaggaaaaacattcatttccatgtcttcctgtgatcttatgcatgcattggattacacgggactgcat

SEQ ID NO: 901449 - DNA, 120 bp, Artificial Sequence
  ENSG00000251680_3 (sequence is synthesized)
tcctttgccacagatgaaaatatagccagaaagtatcccaacagatacccaaagactaaggcaggcgttgcaagtgactacctgagaagatgaattcaccatcctcacaggaaaagactg

SEQ ID NO: 901450 - DNA, 120 bp, Artificial Sequence
  ENSG00000251680_4 (sequence is synthesized)
agatccccagagactgaggagcatctctgaagaaaagagtctcccaagaagccacaaatgtgacccatgaaagactctccatttaaagcacttggcaaatgcggagctcagcaataatat

SEQ ID NO: 901451 - DNA, 120 bp, Artificial Sequence
  ENSG00000251680_5 (sequence is synthesized)
acagagaaaggagtcggggagactggcaggctggaaagccggcgcagggaggtcacctttgatgtagacatcgtcgtcggcgcgcatgaaccactcatacttgtccagaaatcagcatga

SEQ ID NO: 901452 - DNA, 120 bp, Artificial Sequence
  ENSG00000251680_6 (sequence is synthesized)
gaagatgatcaaaattcatatattgaaacatgaaaaggtaaattatttatggcatatcataaaactatgtaagtttcagagcctggtattaatctgcatttaatcaccatgaaaatattc

SEQ ID NO: 901453 - DNA, 120 bp, Artificial Sequence
  ENSG00000251680_7 (sequence is synthesized)
cagtaaatttttttacactgagcagatttgatgctaccaaaggtttattaatcaagaattactttttaggtatgataatgctattgtagccttgtttttttatacaaagagtccttattt

SEQ ID NO: 901454 - DNA, 120 bp, Artificial Sequence
  ENSG00000251680_8 (sequence is synthesized)
tggatgtagatgtgaatagggtctgattggccaggtattgattactattagggtaggtaattatcttcagataaatttggatctctataataaaaagatttttaaaaaatacttcatttg

SEQ ID NO: 901455 - DNA, 120 bp, Artificial Sequence
  ENSG00000251680_9 (sequence is synthesized)
tttaaggtcagaacatactcttcatttattttctgtagatttacctaaccaagatatggtccacttgtttaaacaatcagtgagaagatcaattgaggaggaaagaatgaaactcctcct

SEQ ID NO: 901456 - DNA, 120 bp, Artificial Sequence
  ENSG00000251680_10 (sequence is synthesized)
gtcacttaggaaagggtcaaaaagcaatcaattgaaataaaaacatccacttcttccagcccttcttggccccatgacagtctgagacataagcaaaatactcggtcaagcttttacaaa

SEQ ID NO: 901457 - DNA, 120 bp, Artificial Sequence
  ENSG00000251680_11 (sequence is synthesized)
gaaaaagggactatttacacatgagaattttttcgtaagtagtaatagtctctgattaggtaatgggctgcaaaatctcaagttcctaatcactaaactgaatttatgctaaaaaaaaaa

SEQ ID NO: 901458 - DNA, 120 bp, Artificial Sequence
  ENSG00000251680_12 (sequence is synthesized)
gtcggcgcgcatgaaccactcatacttgtccagaaatcagcatgagaagatgatcaaaattcatatattgaaacatgaaaagatacctgtagccatattcccatctgacttctaactcaa

SEQ ID NO: 901459 - DNA, 120 bp, Artificial Sequence
  ENSG00000251680_13 (sequence is synthesized)
actgcattgacgaatgtgaagacctccgtggacagcaaggactgacagtctaaatgagcaatgatgctgctcttatcacaaaacaggaccgactcaagtagggtataagagatcaaactg

SEQ ID NO: 901460 - DNA, 120 bp, Artificial Sequence
  ENSG00000251680_14 (sequence is synthesized)
atttcccttctttccttggaaggatgttaaaaatttgagctccaggaagacatagctgacctgggaatgctgttttggacgaagagaggaatttgtacttcctccctggggtaggtgaag

SEQ ID NO: 901461 - DNA, 120 bp, Artificial Sequence
  ENSG00000251680_15 (sequence is synthesized)
aagggaaaggaagaaaatataaatatgtcccttgaaaaatgtggcatttctgagagatgtgaaaacagatttgccatgtttgggatgcagtttaagagtagaaacctccgagataccata

SEQ ID NO: 901462 - DNA, 120 bp, Artificial Sequence
  ENSG00000251680_16 (sequence is synthesized)
taccatgaggcttggggaaaaaacagaaatgatacattttgacgaaaggagggcccagctctacctgagattccctgtggctggggagtggcaatgaagaggtctgtactcttcccaagg

SEQ ID NO: 901463 - DNA, 120 bp, Artificial Sequence
  ENSG00000251680_17 (sequence is synthesized)
ctccatggtaagctgtggaaagtaacttggagcatgagctgatgatcatggccagaggctacctggccaaaaacaggtcatagatcaaggagatgcacattactgtgatgtatgtggacc

SEQ ID NO: 901464 - DNA, 120 bp, Artificial Sequence
  ENSG00000251680_18 (sequence is synthesized)
tttataagtgagatgctggctggtatctcctgcacactgtactggtgatgactgtgtcacctgtgggagccagcaccatccagcactgtgccacaaaataatgaaagtagacagaatctc

SEQ ID NO: 901465 - DNA, 120 bp, Artificial Sequence
  ENSG00000251680_19 (sequence is synthesized)
accctccctgccacgaatgaatggacttctcctctctagacttgcatatcttccagaggaagaagtaggaagctgaattaaaatttgaattaaattttgactgaattagtaattctgata

SEQ ID NO: 901466 - DNA, 120 bp, Artificial Sequence
  ENSG00000251680_20 (sequence is synthesized)
aaagactgattggactaaatttagccccaatactatatttctggagacaggacaagagttctatttcttcgcactcaagttggtgtctatagaattcaaacctgttacataaatttagaa

SEQ ID NO: 901467 - DNA, 120 bp, Artificial Sequence
  ENSG00000251680_21 (sequence is synthesized)
tcagaaggagtggctttgtgtcctagaaaccatctttagggacaatatatggctggagttctgccactgattcacacgaaattcctactgatgcacaagaagtcattattgcatgatccc

SEQ ID NO: 901468 - DNA, 120 bp, Artificial Sequence
  ENSG00000251680_22 (sequence is synthesized)
tgatggctgaggctgtctcatgatcatatttctaagattccatttaaaatgagtacgaattccagctcaactttaaagtataatttatctgttaaataaaaatctgtttgtatacatctt

SEQ ID NO: 901469 - DNA, 120 bp, Artificial Sequence
  ENSG00000251680_23 (sequence is synthesized)
gagggttaaattgctcatgaaacttgtattcctgaggagtgtgtaaaggccgaggaaagagccaagacaaagagatgatttgtatctgtacatctgcctgtttgttccacagggaagtgc

SEQ ID NO: 901470 - DNA, 120 bp, Artificial Sequence
  ENSG00000251680_24 (sequence is synthesized)
caccaagtaggccttacgttcatgggcgcctggacggggcttttaaaagttcacaacaaaatccagaacacttgtgggtttccccaacctgaaccttagctttgaaagagtttgctgagt

SEQ ID NO: 901471 - DNA, 120 bp, Artificial Sequence
  ENSG00000251680_25 (sequence is synthesized)
tgctgacactctcaagatcctgtttcaaacttaagagagaaagaatcacccagggagcttgttaaacatgacgattctgatgcagctgccctgagagtctgcattttttaataagcatga

SEQ ID NO: 901472 - DNA, 120 bp, Artificial Sequence
  ENSG00000251680_26 (sequence is synthesized)
tactgtcacttttctgtgctgatgcacactcagtgatcccggcaggctctcctgctccctaccctagggcttaatcagcacaattaatcacttgtattcctttggaagttcttcactcat

SEQ ID NO: 901473 - DNA, 120 bp, Artificial Sequence
  ENSG00000251680_27 (sequence is synthesized)
ttgtcaagatacccgtatattgacacaactgaaataccgccctcaaaataggcaagctgtggtttggcatcctggtacacacctgccctctggtggtgagagagtaactccaagctatag

SEQ ID NO: 901474 - DNA, 120 bp, Artificial Sequence
  ENSG00000251680_28 (sequence is synthesized)
ggaaataaaagatcctttcccttctgctctttatcatggtgaacaagatgaaactcggtgtctggccagtgtacagtaaagaaaggtgcattttaaaggcatagtctacaaagatgagaa

SEQ ID NO: 901475 - DNA, 120 bp, Artificial Sequence
  ENSG00000251680_29 (sequence is synthesized)
aatcctgggagcaaattctgttgccaaactatgactaggtgccttacatggcagcacattggagagtgattgagggattcatcccaccaaacctctgatgcagacgacacagacctgcag

SEQ ID NO: 901476 - DNA, 120 bp, Artificial Sequence
  ENSG00000251680_30 (sequence is synthesized)
gtttcccggaggtgaggttcttcagcgtgggtttgatgtcagctcctctgaagccaaactccttcctgacacagaggcgttggagcttcctgggactgacatctaatttagggataatct

SEQ ID NO: 901477 - DNA, 120 bp, Artificial Sequence
  ENSG00000251680_31 (sequence is synthesized)
aaggcaaagttagagaaatcagatcctgtactctggaacattgtcataagggaaagacattctatccataacacttactaagaaagagtaattaactcatacatattcttaatcatagag

SEQ ID NO: 901478 - DNA, 120 bp, Artificial Sequence
  ENSG00000251680_32 (sequence is synthesized)
tctatcacttaatattttaccttataaagaagccccacaagcctaaattacaaaatggtacaagcatatggcattcagatttactgggattctgagcataactgtgtttgcccttgttaa

SEQ ID NO: 901479 - DNA, 120 bp, Artificial Sequence
  ENSG00000251680_33 (sequence is synthesized)
agcagggtctttttgtactcacttggagactggggctgagtgtacgtatagctatgggtcgaaggagaggagacgcacttccgttgtcttcatcaacagctggaccatatcaagccccca

SEQ ID NO: 901480 - DNA, 120 bp, Artificial Sequence
  ENSG00000251680_34 (sequence is synthesized)
ctacagccatgagaaaataaaaactttagcagaaagaatagtcagaataggtttagtagatctaagctctcattgcaatttgattctgacaagtcttttgatgtccctgagcctcaatct

SEQ ID NO: 901481 - DNA, 120 bp, Artificial Sequence
  ENSG00000251680_35 (sequence is synthesized)
cttcttgtaaaatacggcttttacacttatctctcaagattatagttgagatgaaatgagcttgtagaaggggtagggttttaaaaattatgcagtgtagaagctacaactatttctgtt

SEQ ID NO: 901482 - DNA, 120 bp, Artificial Sequence
  ENSG00000251680_36 (sequence is synthesized)
gaattcttaataaggccaggatggaaatgttcaggtgggtgggcagcaggcatagggccctatgggacactgctgtccatgggcatccactggacttgttaaaggaaaaattgtttacga

SEQ ID NO: 901483 - DNA, 120 bp, Artificial Sequence
  ENSG00000251680_37 (sequence is synthesized)
cacatgttaaaggcagtgaagaagactttattcaagggaggcttctgcagtggggttttatagtagaggagagagatcagtctccactctgaatatgataaggaaaagtggagacttata

SEQ ID NO: 901484 - DNA, 120 bp, Artificial Sequence
  ENSG00000251680_38 (sequence is synthesized)
gctaaggggaacagtcaggctttgatggatggaatattactaagagtagggtaatattttgctaaactgacctaacaggatttttactgaaggaaggccagggtgataagatatcgtata

SEQ ID NO: 901485 - DNA, 120 bp, Artificial Sequence
  ENSG00000251680_39 (sequence is synthesized)
gagggtagtcagatttactgtaaactgacttagcaagatttttgccaaaagtggaataagccaaccatggacacaacccaagatccagagcctagtcagagagacactcgggggagccta

SEQ ID NO: 901486 - DNA, 120 bp, Artificial Sequence
  ENSG00000251680_40 (sequence is synthesized)
actagcattagatcaaggacagagtctttgtcaagaatcttcctgaataacttggaaaacagctgtaaaagctgtacatttatatgttcatgataagcaaaataaaacttttttcctggg

SEQ ID NO: 901487 - DNA, 120 bp, Artificial Sequence
  ENSG00000251680_41 (sequence is synthesized)
tgtgtaggtccacttacaggcaattttttaaaaactaaacaaggatcaaaattgcagtgtttgcaggttgctaaatttgcatatatagaggacaaacttctcaaataagtgagttccaca

SEQ ID NO: 901488 - DNA, 120 bp, Artificial Sequence
  ENSG00000251680_42 (sequence is synthesized)
agaccaactgctggacttggatatgcatggatttggggatatgcagaggtccaggaaccaatcccctggcaaataccgagggacaactgcatatctatacatttaaaaatggtgacatca

SEQ ID NO: 901489 - DNA, 120 bp, Artificial Sequence
  ENSG00000251680_43 (sequence is synthesized)
aaaatcaattacttgaaaattactaggagagtagattttaagttctcaacacaactgctaaatatgtgaggtaatgcttatgttaatttgctcaattttgccattccacaatgtatacac

SEQ ID NO: 901490 - DNA, 120 bp, Artificial Sequence
  ENSG00000251680_44 (sequence is synthesized)
atttcaaaacatttgtatggagtaaattttggtcaattaaaaaattagaaatcaattggtattgatattgttctgtttcttgggctgggtgatggatacattgctatatttaattttgtt

SEQ ID NO: 901491 - DNA, 120 bp, Artificial Sequence
  ENSG00000251680_45 (sequence is synthesized)
aattcagtgagctgtgtaattacaatttgatcacttgtgtttacttgaataactttttaaatcaactactgtcatgtccaatgtaaattgtttcttctaagctttcctttaccaatcaaa

SEQ ID NO: 901492 - DNA, 120 bp, Artificial Sequence
  ENSG00000251680_46 (sequence is synthesized)
ttccactgccaactaaactttactgaagtgcgtacagactccaggaatataatgaaaatgaagtgagctgggtgtaccatatactagggtgttgcggcctctgatgaactgagaaagatg

SEQ ID NO: 901493 - DNA, 120 bp, Artificial Sequence
  ENSG00000251680_47 (sequence is synthesized)
ggtctaatttaaagggtacagatcctacacagctcctaggaatggttgccatatgggctgtgggttgagtgttaccaggtctgcaaatcttacttttatgtcaaatttacacttttttaa

SEQ ID NO: 901494 - DNA, 120 bp, Artificial Sequence
  ENSG00000251680_48 (sequence is synthesized)
tgttggcaactaattgaattttttaaacactgaaggccaaactaaatatgtctttaactaaagagccctccctccataaagatcacctccctagtagggcctcactaaatctgagtccaa

SEQ ID NO: 901495 - DNA, 120 bp, Artificial Sequence
  ENSG00000251680_49 (sequence is synthesized)
gagtccaattaaaatactttcatttgtactgctgatactgccagcaattagggaagcctgcattcaaaattaagtctgattccccaacctgtgccatttcttttttttctttttttcttt

SEQ ID NO: 901496 - DNA, 120 bp, Artificial Sequence
  ENSG00000251680_50 (sequence is synthesized)
agattacaggcatgagccaccgtgccaggtctccatttctactttaataaacttcctaaaaatatgatcacagctttatgtaatttgaatcctaaactaatcccataacaaaggtattat

SEQ ID NO: 901497 - DNA, 120 bp, Artificial Sequence
  ENSG00000251680_51 (sequence is synthesized)
tcccataacaaaggtattatcccgattcactgacgaggaatctaggccagaagataacagataacttaatggaacagtttgacctgagttgaatggcttgagttcaaacccctcgctcca

SEQ ID NO: 901498 - DNA, 120 bp, Artificial Sequence
  ENSG00000251680_52 (sequence is synthesized)
acaattgccattttaataatttcaggagggtaaattctctatatttctgtatttttccaataaaatgggtacactaataacacatcacaaaattgttgtgagtacttacaaagcacttaa

SEQ ID NO: 901499 - DNA, 120 bp, Artificial Sequence
  ENSG00000251680_53 (sequence is synthesized)
aaacgtgtctggcaaacattaatagtaagtactatgtaagtgttgctattactaattattcctattattaatttcagtgaaatgaaaattagaacaataactacctctttgggttttgta

SEQ ID NO: 901500 - DNA, 120 bp, Artificial Sequence
  ENSG00000251680_54 (sequence is synthesized)
atgaactaatctattgaaaatgtttataactgttcctgagacatagttaatattcaatatgtgttaattatatgtctaatttcattgtctttcaaatacattatatctaaaccatgcggg

SEQ ID NO: 901501 - DNA, 120 bp, Artificial Sequence
  ENSG00000251680_55 (sequence is synthesized)
cgggttaattccttcacttatgcctggtaataacaaatacaggtactaccataggctggaattactttcatttgtactaagcgtttgaaaagtttatagctttgtagtctcaagattatg

SEQ ID NO: 901502 - DNA, 120 bp, Artificial Sequence
  ENSG00000251680_56 (sequence is synthesized)
gaaatatttgtatcatttacaaatctgtagtgaaatcaatcatgcactatgtaatgactgtcttgatagggattttaataatgtaataagattttattcaaagaagcaggaatagttgca

SEQ ID NO: 901503 - DNA, 120 bp, Artificial Sequence
  ENSG00000251680_57 (sequence is synthesized)
acactcaaaagacattctttaaatgtagtcagtcttcaccccttcttgtctccctagtttttcaaaaacttgaagcccaaattaaaaatcagaagatatccaggtaattcagtaactcga

SEQ ID NO: 901504 - DNA, 120 bp, Artificial Sequence
  ENSG00000251680_58 (sequence is synthesized)
attacaaagttatatgctaacatatttaacatagccatgatttttacttacttgtgacccatttcatgagcaattgtaaaagcaagattcaagccattgtcttcagcaataatacatttt

SEQ ID NO: 901505 - DNA, 120 bp, Artificial Sequence
  ENSG00000251680_59 (sequence is synthesized)
ctcttttcactacacattccactcaagtaagctatacctaaaaaatacaaacattaattattatatgtctgaatgaatatgcaaatatttatactagttattagcagcaggaatgaaaat

SEQ ID NO: 901506 - DNA, 120 bp, Artificial Sequence
  ENSG00000251680_60 (sequence is synthesized)
ggcagttgtcacgactaaaatgtcagtattaatctgtgaaatctagccctaataaatgaaattttaggggcaagtgtatatgtataggccaggcaaaaaaatgttcatatcattttcatt

SEQ ID NO: 901507 - DNA, 120 bp, Artificial Sequence
  ENSG00000251680_61 (sequence is synthesized)
aattattttaccaattatcaagttcccaaaaggaataatataagaatataggttataaataccaatttcatcatcatgtaagacaaatgaatagttataacttggaaaatataatcaaac

SEQ ID NO: 901508 - DNA, 120 bp, Artificial Sequence
  ENSG00000251680_62 (sequence is synthesized)
gaaaatataatcaaacagcaatgattattttaaatatactcaattattgtgaagaacacagtttcaaaaaaattaatgcaaaataaactacatataaagcagtcttgaacttacatttat

SEQ ID NO: 901509 - DNA, 120 bp, Artificial Sequence
  ENSG00000251680_63 (sequence is synthesized)
ttaatacaattgtgaaattctatttatgaaatactatgttaactaatatggcatagagctatctatcatatttaaaatactagaaagattttatttgaaaatttcttggctaaatggtgt

SEQ ID NO: 901510 - DNA, 120 bp, Artificial Sequence
  ENSG00000251680_64 (sequence is synthesized)
aatggtgtgttgcatagtatatgatactgaaatattaagataaaattttagcaagatatttgatcttttggtataaattatcagtaaaaatggcaatatttaaactccttgatattcttt

SEQ ID NO: 901511 - DNA, 120 bp, Artificial Sequence
  ENSG00000206028_0 (sequence is synthesized)
tcctgtgcaggacagcttctatccccgtcacttaacaatggagaggattcttccccagcttccttccagaggacacaaaagctcagagctccacagtctagagtctagaccaacaggcct

SEQ ID NO: 901512 - DNA, 120 bp, Artificial Sequence
  ENSG00000206028_1 (sequence is synthesized)
ccacactcacgtcccagagatttccctggtcccacctactcccagtggcaaccagacttctgcacataggagagatgtcatactcagagtccagcctcccacatccacaggaccacctct

SEQ ID NO: 901513 - DNA, 120 bp, Artificial Sequence
  ENSG00000206028_2 (sequence is synthesized)
tcctcctctgagtcttgttaatagggccatcccctgccttagacctggcccagtggactctgatcttacagccaatatggggcagcaaagtgggacatctgtctacagggccagtagccc

SEQ ID NO: 901514 - DNA, 120 bp, Artificial Sequence
  ENSG00000206028_3 (sequence is synthesized)
caggtcatctgcttgccaaaaggagggggaccagcccccggggggagcccagagctcggcagggctggggttagtaagaagagaaaacagggttagtaggggctgggttagtaagtcaga

SEQ ID NO: 901515 - DNA, 120 bp, Artificial Sequence
  ENSG00000206028_4 (sequence is synthesized)
gcacagcaccagcggacagggcacctcagcagacacacacaggagtcgctaagagaaaaggaagaacgcacgcaggtccgttagtttgttaagggatgatcggggtgcagttgaggcacc

SEQ ID NO: 901516 - DNA, 120 bp, Artificial Sequence
  ENSG00000206028_5 (sequence is synthesized)
ccaggggttagacgggttagtaatcgaacaaaagagctgcctacagaaaagaaagctgagacggaggaagaatgtggggaagtgacatggattcaaagccaagtgtcttgccccaggcag

SEQ ID NO: 901517 - DNA, 120 bp, Artificial Sequence
  ENSG00000206028_6 (sequence is synthesized)
aaggatctgtgtgcagaacacccagagaggccagggcctaggcagcagacgtgttcaaccaggtttgaggggccttcctccatcctcatactttttttttttttaggtgtctgccatgtg

SEQ ID NO: 901518 - DNA, 120 bp, Artificial Sequence
  ENSG00000206028_7 (sequence is synthesized)
ctgagacccttatattgacgggaatcctcactgcaacctgtaaggtatcagaactcgcattctaccactgaggaaactgaggttgagagaagtgaggtgacttactcaaactcactcaac

SEQ ID NO: 901519 - DNA, 120 bp, Artificial Sequence
  ENSG00000206028_8 (sequence is synthesized)
aggaagtggcagagttgagaaaaggccatgtgaggacatagtgagaaggtgccacctgcaagccaaggagagaggcctcaccagaaaccaagtcttaacaccttgatctggactttccag

SEQ ID NO: 901520 - DNA, 120 bp, Artificial Sequence
  ENSG00000206028_9 (sequence is synthesized)
cctccagaactggcagaaaataaattcctgatgtttaagccatccagtctggcatggtgctgtggcagcccaagctgatgaatagtacacaccactccgcattctgggaaaaaggacatc

SEQ ID NO: 901521 - DNA, 120 bp, Artificial Sequence
  ENSG00000206028_10 (sequence is synthesized)
gggcctgtcctgccaccttctgttccccaagaacagaatccaggagcagtgcaactagaagcagcgatctgattggagaagagtgtcctgagactgggctaaggtgaccccttaagcctt

SEQ ID NO: 901522 - DNA, 120 bp, Artificial Sequence
  ENSG00000206028_11 (sequence is synthesized)
tgggatggtgcactctcagcccctctggctgcccctcccagagttcaacagcacagggggaaggctccagctcctcccagatcctgactgtctcctctttgtaaccatcagggagaggaa

SEQ ID NO: 901523 - DNA, 120 bp, Artificial Sequence
  ENSG00000206028_12 (sequence is synthesized)
aagcatggaaaagccccaccaaggaagtcccccacaaaatgacaattacgcactgagcaaatggagacaaaggactccagccagcggcacccgaggagctgcatctgccctctgcctgac

SEQ ID NO: 901524 - DNA, 120 bp, Artificial Sequence
  ENSG00000206028_13 (sequence is synthesized)
agcccctccccgactcccatccttgttcctgtccccatcctgtagggtcctttgagacccagccttggggaaagtgtggtcagtggggacttggcccaggccaggctctgtctggtcacc

SEQ ID NO: 901525 - DNA, 120 bp, Artificial Sequence
  ENSG00000206028_14 (sequence is synthesized)
ggcagaaacgcgaggaggaatcaagttcacatggggcaggaaagggcccccagacccagacaatagggcccagcaggcagggcccgagcaggtgaggagggagtagtgggctgccaggcc

SEQ ID NO: 901526 - DNA, 120 bp, Artificial Sequence
  ENSG00000206028_15 (sequence is synthesized)
tccctcatacccctggagctgtcctccagagccagatcagtcatctgctgagcatcaaccaggaagagttcctatccatgggaggctccatcccaacaggtgtgaagaggatgagatctt

SEQ ID NO: 901527 - DNA, 120 bp, Artificial Sequence
  ENSG00000206028_16 (sequence is synthesized)
cagggagtcacccagcgggctagaaaaccaccggagtctgaccgctaagtcactgtggccagaatccaaggtcacccgaggtccaaagagaagtccaggccaggagtcctggagatgcgg

SEQ ID NO: 901528 - DNA, 120 bp, Artificial Sequence
  ENSG00000206028_17 (sequence is synthesized)
cccagatggagccacctgggggagaagacagcgagtgaggatgaggccacagcctccatccccaacttcccacatccccccagcctaattctgcatctgaggggactcatgttcagagat

SEQ ID NO: 901529 - DNA, 120 bp, Artificial Sequence
  ENSG00000206028_18 (sequence is synthesized)
ccccccagtctctcatgcccccagcacacacacagggtggaagtgagggttttggacatgaaacatttttagaagaaacttaggccaggcacagtgactcccacctgtaatcccagcact

SEQ ID NO: 901530 - DNA, 69 bp, Artificial Sequence
  ENSG00000206028_19 (sequence is synthesized)
ttgggaggctgagggagactctgtctctacaaaaaataagccaggcatggtagcatgcacctgtagtcc

SEQ ID NO: 901531 - DNA, 73 bp, Artificial Sequence
  ENSG00000206028_20 (sequence is synthesized)
gtagtattgagccctggagttcaaggctgcagtgagccgtgatcataacactgtactctagcctgggcaacag

SEQ ID NO: 901532 - DNA, 120 bp, Artificial Sequence
  ENSG00000282527_0 (sequence is synthesized)
gaaggcgccggcctgagagcctgaggggagtcgcccagcgtgcgacgctaggctcgggcttacggctcaaacaagttcaggctgcagcctgttgggctttgccttcaattactttctgtg

SEQ ID NO: 901533 - DNA, 120 bp, Artificial Sequence
  ENSG00000282527_1 (sequence is synthesized)
ctgtaattcaataacttgtgtgatatatgagaaatcctgaagttcatcacactgtaactgaattgccattcccacaacactccagagagttctcttgtcctcttttggccatgtgaggat

SEQ ID NO: 901534 - DNA, 120 bp, Artificial Sequence
  ENSG00000282527_2 (sequence is synthesized)
acaagaagatggcagtctgcaaccaagacggctctcaccagaacccaaccatgctggtaatctgatctcagacttccagctccagagctgtaagaaataaatttctgtcgtttataagcc

SEQ ID NO: 901535 - DNA, 120 bp, Artificial Sequence
  ENSG00000251536_0 (sequence is synthesized)
caaagtaggtccaaggttgctggatggtgccttctgaaaagtcatctggtagaccgaggctgtttcagtaaggcagcacagtcaggagggagggagtctccagccagatggctcggctca

SEQ ID NO: 901536 - DNA, 120 bp, Artificial Sequence
  ENSG00000251536_1 (sequence is synthesized)
gatcccagctctggtgcttgctagctgtgtgaagatgagctgggattttatctaactgtgtctcatttccatatctttaaaatgggtgctagcacaacacctacctcatccacttaggag

SEQ ID NO: 901537 - DNA, 120 bp, Artificial Sequence
  ENSG00000251536_2 (sequence is synthesized)
gagctgatgagtatcaacgatccagagagttcctggcccgcagctggcacacagtccacgttactgtcagacagtggggagaaaagagtttcctcattctcctggtgggccgttctcatt

SEQ ID NO: 901538 - DNA, 120 bp, Artificial Sequence
  ENSG00000251536_3 (sequence is synthesized)
gcaatgttgcttttgttccacaagaacacatcctccactccctggaagatgcaactcctacggaaactgagtccaatgatcaaaggcactggcattcagaggggacccactgataattgc

SEQ ID NO: 901539 - DNA, 120 bp, Artificial Sequence
  ENSG00000251536_4 (sequence is synthesized)
cgactacacaggagctgtcttccataactcctcagagagcacgttggccctacaaatgcaaatccaacattcagccacgacctcccatgtgccaagtgtcatgggattcatgctttcaaa

SEQ ID NO: 901540 - DNA, 120 bp, Artificial Sequence
  ENSG00000251536_5 (sequence is synthesized)
ccatcggttccagttaagactcatataatgaaacagatgggttcacatgattttagtttatatgggaagaagctttagactaaagcagagggaggtaaacttacaggcaagcaggaaggc

SEQ ID NO: 901541 - DNA, 120 bp, Artificial Sequence
  ENSG00000251536_6 (sequence is synthesized)
ttgaaggcttgagtgttcttggaggctcacggctgggtgcaggctgaccttgggtgagagccctcgttcattgccccgtgacactgtccttcctgtgttttcaaacggcctcttgttcct

SEQ ID NO: 901542 - DNA, 120 bp, Artificial Sequence
  ENSG00000251536_7 (sequence is synthesized)
ggtcaatatcctctgcgcttctctttggggatttaggacaccacgacattctcttcattgtccaaggaaaccattctcctcatctagaaacatcatcgatttctgaagttaaattgagac

SEQ ID NO: 901543 - DNA, 120 bp, Artificial Sequence
  ENSG00000251536_8 (sequence is synthesized)
agggaggtggtgccaatggcaaagacatgctctgatggtgcggcttttccacaggcctttcttaagctgtgactgggtctcagatctttcttcagacctgagggatgtttagagtggagg

SEQ ID NO: 901544 - DNA, 120 bp, Artificial Sequence
  ENSG00000251536_9 (sequence is synthesized)
atgtttgcaaccatcagtcttccgtcatgttacactggagtttcgtggcagtgacgtgaattaaagagtaatattttagatttgatattttattgctgcataatttattataatttttag

SEQ ID NO: 901545 - DNA, 120 bp, Artificial Sequence
  ENSG00000251536_10 (sequence is synthesized)
tggtcaatctcagcatcctgattcagcttcagaaaagtttggaaagtctcccaaagaatgaggaatgattagcctaccacagaatcttcttttggaggcacagtgaaaagcgcataaaac

SEQ ID NO: 901546 - DNA, 120 bp, Artificial Sequence
  ENSG00000251536_11 (sequence is synthesized)
acaaatgacagtttatgacttatgataaagcattcccttgtataagcctgatgcagggtcatgaatgaaaccttgtcctcacccctcgatgtcctgcttccaagataccactccttcccc

SEQ ID NO: 901547 - DNA, 120 bp, Artificial Sequence
  ENSG00000251536_12 (sequence is synthesized)
atctccagagatcacccctgatctgactgccatgggaatctctgccccctaaatacacaataggcttgagacccacccatttttagagtctttacaaagaattggttgtacattgttttt

SEQ ID NO: 901548 - DNA, 74 bp, Artificial Sequence
  ENSG00000251536_13 (sequence is synthesized)
gcctcaacctgccgggctcaagcaatcctcccacttcaaccttatgagcagctgtgactacaggcatgcatcac

SEQ ID NO: 901549 - DNA, 88 bp, Artificial Sequence
  ENSG00000251536_14 (sequence is synthesized)
acttcagcctcaacctgccgggctcaagcaatcctcccacttcaaccttatgagcagctgtgactacaggcatgcgcagagacagggt

SEQ ID NO: 901550 - DNA, 120 bp, Artificial Sequence
  ENSG00000251532_0 (sequence is synthesized)
gtattcagtgtgactgcccagcagtcacgggctctaggcctggtcagacctgctcccttcctcagtcgaggggagagaggtgcatccatccccagcggggcacccgctgcagctccggta

SEQ ID NO: 901551 - DNA, 120 bp, Artificial Sequence
  ENSG00000251532_1 (sequence is synthesized)
ccccagccagctccaggccgggtgcccattgcagcttcggtaccccagccagctccagcacggcaggtgccctgtctccgtggcccgctaccaaagaagagacaacatccagcagcagcc

SEQ ID NO: 901552 - DNA, 120 bp, Artificial Sequence
  ENSG00000251532_2 (sequence is synthesized)
atccctgtgacactcagatgccagctaacgtgttctaataaaactaaccagtcacatcggtcaaaccctaccttgatccggtgatgggcccctgcccaccccaaaatttcccgcgtgttc

SEQ ID NO: 901553 - DNA, 120 bp, Artificial Sequence
  ENSG00000251532_3 (sequence is synthesized)
atgaaagacgactaactccagaacggaacatgacgcacgtgccgagacatcagcattgagtaagcacccgctgtgggccaggcccggtctcaggacagctgcgcgccctccagactccac

SEQ ID NO: 901554 - DNA, 120 bp, Artificial Sequence
  ENSG00000251532_4 (sequence is synthesized)
ggtcctacagacaatgaatattatgcaaccaaaatgtcctgggaattcagagccaaaggcagcattcttaggaaatgcctcccactctcctgccatggcatagagctctgctgggctctg

SEQ ID NO: 901555 - DNA, 120 bp, Artificial Sequence
  ENSG00000251533_0 (sequence is synthesized)
cggggcgccaggtacagccggcgggacgtccagtgccagcgcaggagccgggcgaggccgtggcctccagggttcctgggcggaggacaaggcgcgcagccgcgttggcgcgagttttaa

SEQ ID NO: 901556 - DNA, 120 bp, Artificial Sequence
  ENSG00000251533_1 (sequence is synthesized)
atcggtgccttctcagctttgcaagttcttatcaattgctgcatgccagaggaagtttttaaaaaatggcccccagctctattgcggtgtaattgatggatagaaattgtatttatttaa

SEQ ID NO: 901557 - DNA, 120 bp, Artificial Sequence
  ENSG00000251533_2 (sequence is synthesized)
ggtgaacagctggatgatgtgatggaggcacgcagggtggaggggttaccacagtctaggtactctacacatccagagcctcccacagttgacaaatggattttcctaatcagtttcgtc

SEQ ID NO: 901558 - DNA, 120 bp, Artificial Sequence
  ENSG00000251533_3 (sequence is synthesized)
gtgttttgtacttaagttgaggattccacaccgtgtggtactttcagaagagatgtagtggtgaatcaatcgcaacggttgtgatgttttcctaattaggtattgagaattaccattggt

SEQ ID NO: 901559 - DNA, 84 bp, Artificial Sequence
  ENSG00000251533_4 (sequence is synthesized)
gtgatgttttcctaattaggtattgagaattaccattggtatttggaattagattgcggagcatttaggaaccgtagctgaaat

SEQ ID NO: 901560 - DNA, 120 bp, Artificial Sequence
  ENSG00000251533_5 (sequence is synthesized)
gcgtcccctctgccccagtactgtttcctctccccagcccagcccccacagctgcctgccctggcctcactccctggcctcccccatcccagcctctgggtccctgagtcagtccctggg

SEQ ID NO: 901561 - DNA, 120 bp, Artificial Sequence
  ENSG00000251533_6 (sequence is synthesized)
tcctgtctctggcagagaggactccaggatcaagggcaggtaaaaggaggagcctcctggggagcttcagaaggagggtcccaagtccctcctgccccacttctgtgcctgggtcactca

SEQ ID NO: 901562 - DNA, 120 bp, Artificial Sequence
  ENSG00000251533_7 (sequence is synthesized)
cacccctgcctgactctagccccccttctccaggggtctccacaacatgtgaatcatgcccagcgtcttccattacacccttgataaagtcctctcctcaccaggacctctgtcatttta

SEQ ID NO: 901563 - DNA, 120 bp, Artificial Sequence
  ENSG00000251533_8 (sequence is synthesized)
cctcatggttttgaaataatttttggtcttcttagcagtttaaaaatattgttttgttttttttcctgagtttggagcattcctgttactaattacattttttttttagacaggtgtaca

SEQ ID NO: 901564 - DNA, 120 bp, Artificial Sequence
  ENSG00000251533_9 (sequence is synthesized)
ttacattttttttttagacaggtgtacactactacacccagctaatttgttttgttttgttttgttttggtagagataggatcttgctatggtacccaggctggtcttcaactcctgggc

SEQ ID NO: 901565 - DNA, 120 bp, Artificial Sequence
  ENSG00000251533_10 (sequence is synthesized)
aaagtgctggaattacaggcatgaggcagcacgcccagccctaattacttctattacgccaaattccttgtgtggaattcctgtgctttgcacacaaattgccaggttggccccaaaggg

SEQ ID NO: 901566 - DNA, 120 bp, Artificial Sequence
  ENSG00000251533_11 (sequence is synthesized)
gaaaaaagtggatcccattttcccatcttctatgcctacgtggctgacaaatctcccgaatcccacaggagctgtcgctgatctttgtcctctattcgctgaaataaagttcaccatgga

SEQ ID NO: 901567 - DNA, 120 bp, Artificial Sequence
  ENSG00000251538_0 (sequence is synthesized)
aatgggagacagcctcaggatgaagccaacactcagagaatgacaaaatcaaaacttggagattaactgacctcatatagcattgcataagcccctgaatcaagttatgcctgaagctta

SEQ ID NO: 901568 - DNA, 120 bp, Artificial Sequence
  ENSG00000251538_1 (sequence is synthesized)
gtccttgagccttcaactacatgaaccaatatatttctctaattaaccaggacctttttattgcattgggcccatctggatatcccaggataatctccctacttcaagagagaatgaagg

SEQ ID NO: 901569 - DNA, 120 bp, Artificial Sequence
  ENSG00000251538_2 (sequence is synthesized)
caaggagaatgtaagaactcagaaggcaagaagagaagctggcattagaatgcggttgaacaagagaaagagttggagatgctgagttctggaggcagatctacctaagtctagagcatt

SEQ ID NO: 901570 - DNA, 120 bp, Artificial Sequence
  ENSG00000251538_3 (sequence is synthesized)
tacgatgaactcaaatcaatactaatacagcctaaactttgacagattttgggatgtctctccatcctgacaattccagaatgcagagcatgtggagtgagtgtactgctttgctaagag

SEQ ID NO: 901571 - DNA, 120 bp, Artificial Sequence
  ENSG00000251538_4 (sequence is synthesized)
ttccagacattctctgacaggggagttatcaaggccccaactttttttcctgagactcaagttagggaaatctgttgggatggactgaggtagctcagaccaaagcccagttgtaaggaa

SEQ ID NO: 901572 - DNA, 120 bp, Artificial Sequence
  ENSG00000251538_5 (sequence is synthesized)
tggcagaagcaatgcctgaggccagaattaagaagaaaacaaagggggatggtggtagaacctgaccttcccagtcctcctgggagctcatgtatacctggggcaatagctgtgtaaatg

SEQ ID NO: 901573 - DNA, 120 bp, Artificial Sequence
  ENSG00000251538_6 (sequence is synthesized)
aatcaaaatttctgtaaccttgagaaccctggccaggttggtgtggagccattttgatctgaaaaaacactaaagaatgagtatttcttctcaagaacgaacaccacaaagcctttcctc

SEQ ID NO: 901574 - DNA, 120 bp, Artificial Sequence
  ENSG00000251538_7 (sequence is synthesized)
atctattcagaacctcatctattcagaacctcatctactcagaatttaaaaacattatttaagaagagacaaggaaaaaaagatggagggatgatttttgtgccatttcagggtgacaga

SEQ ID NO: 901575 - DNA, 120 bp, Artificial Sequence
  ENSG00000251538_8 (sequence is synthesized)
aaaggaaacaaggagagctggaattgacctggatccttgtgggaaatacttcagtgatggatggaagcagagggagaaaggaccaaaatgaagccaggagggacaagatggctggaatgt

SEQ ID NO: 901576 - DNA, 120 bp, Artificial Sequence
  ENSG00000251538_9 (sequence is synthesized)
ttggttctgaggattcatgattgtccttaactcacacggactgaactctcgcttgcctgtcttcctggggcttgtgtaagaacatcctgcagaaaagtattaacaacgcgagtgatcttc

SEQ ID NO: 901577 - DNA, 120 bp, Artificial Sequence
  ENSG00000251538_10 (sequence is synthesized)
gtgtttaacgattcattgattgtaaaagatgttttacctgggataacaatgagtgtgtattcctggagcctaaactcactgacctggaagggggccccgagaagtgtgctaagtggacaa

SEQ ID NO: 901578 - DNA, 120 bp, Artificial Sequence
  ENSG00000251538_11 (sequence is synthesized)
aggaagcctggctagagtttatagttttctaactagataattgagtgaactaaaaggtcttttattatccttatgtggattacgtactttgcaggatatgcatagtcattattaaaacca

SEQ ID NO: 901579 - DNA, 120 bp, Artificial Sequence
  ENSG00000251538_12 (sequence is synthesized)
tccagggcgagagcaagaaaagtacaataagaatttaaaacatcttccacagccggaaagtaagaagtattcaaaagtgcaggaagtggttgaatctggcatctcagacatggttggagc

SEQ ID NO: 901580 - DNA, 120 bp, Artificial Sequence
  ENSG00000251538_13 (sequence is synthesized)
ttgcttgatcctcagacaaatcagcatttctgacagtagagtggagcaatcttacagaaggctgttggcaaaatttaatgaaagttcttccagaagagagttcctatgggtgaagttcca

SEQ ID NO: 901581 - DNA, 120 bp, Artificial Sequence
  ENSG00000251538_14 (sequence is synthesized)
gacatgtgagcatgactcaggatacgagttctagggaggaggacagacaaatctgagtgccatatgctgtcagtcatcaggatttgtctttcagcaaagcccctttagcagagcaagaag

SEQ ID NO: 901582 - DNA, 120 bp, Artificial Sequence
  ENSG00000251538_15 (sequence is synthesized)
attttgagtgaaatgactaagagctgccctactgaattatgtcatatatatttaacaccatggtattggagtccttgcaataatgttacacaaaaatgtagggagcccctcttctgcagt

SEQ ID NO: 901583 - DNA, 120 bp, Artificial Sequence
  ENSG00000251538_16 (sequence is synthesized)
ttgaaagctaagggctagagggtcactaggtagaattacagaatctggtccaggaatgaggaagatcatgacacccaggagaacactgtatatttgaggttaaataaaatgcatcttttt

SEQ ID NO: 901584 - DNA, 120 bp, Artificial Sequence
  ENSG00000251538_17 (sequence is synthesized)
agcctcattttatccagctcctacttaagatggagttgctctggttcacctacttctgacaaattttggggctttactaattaagaaagaagaggagccggcgtggtggatcatgcctgt

SEQ ID NO: 901585 - DNA, 120 bp, Artificial Sequence
  ENSG00000251538_18 (sequence is synthesized)
aatcccagcacttcgggaggatgagaaaatggttatttgaagaagtgattgactccagggcgagagcaagaaaagtacaataagaatttaaaacatcttccacagccggaaagtaagaag

SEQ ID NO: 901586 - DNA, 120 bp, Artificial Sequence
  ENSG00000251538_19 (sequence is synthesized)
tgtgcaaagttaaagggccacatctggtgagggctttcttgctggtgaggattctctgaagagtattgaggcagcagaggacatcacatgcatcgctagcgaactttgcatgaatgcacc

SEQ ID NO: 901587 - DNA, 120 bp, Artificial Sequence
  ENSG00000251538_20 (sequence is synthesized)
ttcagggcccttcagttactgcagctatgcagtggcacataagggaagtttccttctctttggggaatcataaataaaatagtggtgtaatcaaggacagaagaaaaaagagacttcaga

SEQ ID NO: 901588 - DNA, 120 bp, Artificial Sequence
  ENSG00000251538_21 (sequence is synthesized)
cagatttcttccgagtcaccggtgggagcttcccagggagatgcggctttattccctcatggcagacaggaggaggatgctgagcgggagctgatgccacctggcagcaatggtggcaca

SEQ ID NO: 901589 - DNA, 120 bp, Artificial Sequence
  ENSG00000251538_22 (sequence is synthesized)
gactgctggagaggcacagattggaacccaagcctcatcagacggcagctgtgacagcggcatatttcaaaaatgtattgcaaatttcacacaaggggtctttaaaaaaatttgaaagtc

SEQ ID NO: 901590 - DNA, 120 bp, Artificial Sequence
  ENSG00000251538_23 (sequence is synthesized)
ttaaaaacatcaagaaatggtggtcttcaacaaatgaggaggaatgaaggagaatgatcctattttccagtgaattatcactttactttggagactttgtgggaagacttactacgaaag

SEQ ID NO: 901591 - DNA, 120 bp, Artificial Sequence
  ENSG00000251538_24 (sequence is synthesized)
ttccttttgaagaactgaagtgatcttatccctgcctgaaaatgtaactctccttctctagtaatataatgaccagagaagagtgttatttcagctgattaaaatagctttgttgtaaaa

SEQ ID NO: 901592 - DNA, 120 bp, Artificial Sequence
  ENSG00000251538_25 (sequence is synthesized)
tctacctaaggaggaactctctgttcatcgtcttccatggcctcatctgtgatggacactggagaataaacctttcttaaaggctgcatagcattgtaccccattttcctgctggtgtag

SEQ ID NO: 901593 - DNA, 120 bp, Artificial Sequence
  ENSG00000251538_26 (sequence is synthesized)
gacaaagcccttcaaggagaagtctttaggcctaattgcctcatttttgcctggaacatggatgtgatttctggaggcgcaccagccactgcagggccctgttcataaagttatggatgc

SEQ ID NO: 901594 - DNA, 120 bp, Artificial Sequence
  ENSG00000251538_27 (sequence is synthesized)
taaaaaatttgcagttgattatgtggttttcaaatttaataacctactatgaataattaactcaacaagaagaaaagggcacattggcacctcacaattaaaagagtaagagtgaaatta

SEQ ID NO: 901595 - DNA, 120 bp, Artificial Sequence
  ENSG00000266850_0 (sequence is synthesized)
atttatttgttttagaatgacatggggaaatggaaggagaaaaaaaaaaacaatgctaaaaagcctagagatgaccacatatgaaacgaccatgtgtgtaaaggattgctggaaaataaa

SEQ ID NO: 901596 - DNA, 120 bp, Artificial Sequence
  ENSG00000266850_1 (sequence is synthesized)
ccatgtaaatcaaagaagagagggcctaactcagctgcctagcctggatcacctggaacccattaggatacaggatcataaacacctctattttcccttcagagagagaccagaaccact

SEQ ID NO: 901597 - DNA, 120 bp, Artificial Sequence
  ENSG00000266850_2 (sequence is synthesized)
ggagttaagctacctgcataagagttgagtgcgatcagctgtacttaatctttaaatgtccaacccactgataacctttggtttgctttgataactatgaaataaattctcactgcattg

SEQ ID NO: 901598 - DNA, 120 bp, Artificial Sequence
  ENSG00000266850_3 (sequence is synthesized)
agcaagaaagctgacagggaggaagagaagcaaggaaaggcacccagagaagaaggttgagtggtggtgatggtagtgtgcttctgatgagttgaagtcacatggagtgtgccccactaa

SEQ ID NO: 901599 - DNA, 120 bp, Artificial Sequence
  ENSG00000266850_4 (sequence is synthesized)
ggtccaagtaggctaaatccagtccagagtttgtggacgttcttagggaatataaagctaaggggcagcaaaattagtagcaccaaatctgtggagccagaagatgtggattcaaactcc

SEQ ID NO: 901600 - DNA, 120 bp, Artificial Sequence
  ENSG00000266850_5 (sequence is synthesized)
atagtgaaagactgaggcaaaaaaggcaagaaaaaataaaaggccatgtagactgaaaaggaagaagtaaaactgtctttgcagagaggacctgttttctcatatcatcacatctgatgg

SEQ ID NO: 901601 - DNA, 120 bp, Artificial Sequence
  ENSG00000266850_6 (sequence is synthesized)
atatgccaaacttcatccaaattcaaacaggcacaccctgaatgacatggggaaatggaaggagaaaaaaaaaaacaatgctaaaaagcctagagatgaccacatatgaaacgaccatgt

SEQ ID NO: 901602 - DNA, 120 bp, Artificial Sequence
  ENSG00000266850_7 (sequence is synthesized)
agcagttgccatcagaggctcccaccaagataatgaaaatggccaacgaatcctgcactggcaactgtggtatccaggttctctcattgaattaggcagttggcgcaacccatggagagt

SEQ ID NO: 901603 - DNA, 120 bp, Artificial Sequence
  ENSG00000266850_8 (sequence is synthesized)
gaggaaaagcagggtggagcaatggccctcctgggagtgcaggggaaggggagctcccacccccagccaagggaggtgtgagtgattgtgctacctgccccaggaaaccacactttttcc

SEQ ID NO: 901604 - DNA, 120 bp, Artificial Sequence
  ENSG00000257272_0 (sequence is synthesized)
tttcttgctaaattggaatgcaaacgattttagttgctaaagatgaggaaattaaaatattttaaaaagaacatgagccaccacacctggcccaaaatcatatattgaagctttaccccc

SEQ ID NO: 901605 - DNA, 120 bp, Artificial Sequence
  ENSG00000257272_1 (sequence is synthesized)
cagtacctcagaatatgactatatttgatgataggggcttgagagaggtgatgaagttaatcatgtctttgatcttggatttccagcctgcagaactgtgagaaaataaatttctgttat

SEQ ID NO: 901606 - DNA, 120 bp, Artificial Sequence
  ENSG00000257272_2 (sequence is synthesized)
taagccagctagtctgtggtattttgttatgtcaggcctagcaaactaatagatgccccaaagtgacaattctggaaacattagactggtcaatttacagcggattaaagtgtacaccaa

SEQ ID NO: 901607 - DNA, 120 bp, Artificial Sequence
  ENSG00000257272_3 (sequence is synthesized)
gtgtcagtttaataatttacattgggattacattgggattatttactgggattccaggcgtgagccactgcacttggcccaaaatttataggctggatgttctaaaactgttatgttgct

SEQ ID NO: 901608 - DNA, 120 bp, Artificial Sequence
  ENSG00000257272_4 (sequence is synthesized)
actctttctgaaaaatatatctgtttagtggtagaaggctaaaatttctttgctgtttaacttgaagctaatttgttctctttcaagacacattttattaaaggaaagtgaagagaagaa

SEQ ID NO: 901609 - DNA, 120 bp, Artificial Sequence
  ENSG00000257271_0 (sequence is synthesized)
gagatgacccaaggaggaccagccggtacctgctaggcccttctgctggggcacggggtcagggggcagcacatgggcatgtggccccactcctgtctgctccccaggacaactctattt

SEQ ID NO: 901610 - DNA, 120 bp, Artificial Sequence
  ENSG00000257271_1 (sequence is synthesized)
tccagcatggagtgcccctggaggtggcgacagctcctctaataagagagttactcatggcttcactggagagaagagagcagctttcaacccccctctcctaaacgcaacgatatttgg

SEQ ID NO: 901611 - DNA, 120 bp, Artificial Sequence
  ENSG00000257271_2 (sequence is synthesized)
aatccatccttccctgggatctcttggagggctctccatctctcttagagcagtttctttcttagacagttgaagctgcctcagtggtctccccagatcatgcaggtcggggcagaagct

SEQ ID NO: 901612 - DNA, 120 bp, Artificial Sequence
  ENSG00000257271_3 (sequence is synthesized)
tctcactcagagaactgagaatatcatttttcacagaagtctaaggtggaatttagaccaagatattcttggccttagcagtttgactcgggcgggggtttgaagctggaacttttcaac

SEQ ID NO: 901613 - DNA, 120 bp, Artificial Sequence
  ENSG00000257270_0 (sequence is synthesized)
cgatcctaacattccaggtgtaagttacagagctcaagttcatctacaaaaaaagtaataaaaataaaatttaaaatggcaccttcaacagaacacaacaaaaccttagggcccggcctc

SEQ ID NO: 901614 - DNA, 120 bp, Artificial Sequence
  ENSG00000257270_1 (sequence is synthesized)
caactcctcggcattctcggaataagttagccgcgcttcttcctctcctcccccagtgtccgccaaggagcgcgtttctctgcaggtgagggcgggaggtgtggaaaattcagtgggaac

SEQ ID NO: 901615 - DNA, 120 bp, Artificial Sequence
  ENSG00000257270_2 (sequence is synthesized)
aaataagcttttatgtaacttgctggttaaccgctttttacaaaacaaaacaaaaagctcgaagatgcctgctgacaaggactccctcctgtttctaccagctcttatggggctgttcct

SEQ ID NO: 901616 - DNA, 120 bp, Artificial Sequence
  ENSG00000257277_0 (sequence is synthesized)
ttgcactgaaaattagagagtaagcaagctcttgtgctattacaccagactggcagattgtggattcgtaagaataacagagaactcctgcgaaaaaggagaagtgggtaggtttgctgc

SEQ ID NO: 901617 - DNA, 120 bp, Artificial Sequence
  ENSG00000257277_1 (sequence is synthesized)
agtaaatctcttctcataaggatccatctaggtgctatgatcaaattagcaaagtatataggaagtaaactcaaatacttcagctgagaaaaattttgtgtcctctgctaatgagattga

SEQ ID NO: 901618 - DNA, 120 bp, Artificial Sequence
  ENSG00000257277_2 (sequence is synthesized)
gcaatattaaaattaggccaatgaaaaaacctacaatgacctctaagtggttcaagtcaaagaaagaggtgcatgcctcttttcctttaaatcaaatcaaaagcagaacaggattgagct

SEQ ID NO: 901619 - DNA, 120 bp, Artificial Sequence
  ENSG00000257277_3 (sequence is synthesized)
attgagcttagtgaggaaggcatattgaaagccaagatgggccaaaagctaggttgcttgtgccaaagaattagccaagttgtgaatgcaaaggagaaaagttcttgaaggaaattaaaa

SEQ ID NO: 901620 - DNA, 120 bp, Artificial Sequence
  ENSG00000257277_4 (sequence is synthesized)
tagaagatcaaagcagccacaacattcccttaagccaaagcataatccatagcaggaccctaactctcttcaattgcaatgaatgctgagagaggtgagaaagttgcagaagaaaagttt

SEQ ID NO: 901621 - DNA, 90 bp, Artificial Sequence
  ENSG00000257277_5 (sequence is synthesized)
gaagaaaagtttgaagctagcagaggttgcttcatgaggttttaaaaagaaagctgtctctacaatgtaaaagtggatgcagcaagttat

SEQ ID NO: 901622 - DNA, 120 bp, Artificial Sequence
  ENSG00000257277_6 (sequence is synthesized)
gctaacatacttgatgatggtggttacactaaacaataaattttaaatggagatgaaacgtgttatgttagaagatactattgagaactctcatagctagacaagagaagtcaatgccta

SEQ ID NO: 901623 - DNA, 83 bp, Artificial Sequence
  ENSG00000257277_7 (sequence is synthesized)
ttgagaactctcatagctagacaagagaagtcaatgcctagcttcacagcttcaaaggacaggctggctctctttgttagggg

SEQ ID NO: 901624 - DNA, 120 bp, Artificial Sequence
  ENSG00000257277_8 (sequence is synthesized)
gttaaatctaatctgcctgtgttccataaattcaacaacaaagcctggatgacagcatatctgttcgtagcatggtttacagaatgttgaagccctctgttgagtcctactgctcagaga

SEQ ID NO: 901625 - DNA, 120 bp, Artificial Sequence
  ENSG00000257277_9 (sequence is synthesized)
agcagatcactgtcaatgtattaccgctctaatggaggtgtacaaggagaccaatgttgctttcatgcctgctaacacaatatacattctgcagcccatggatcaaggagtaattttcac

SEQ ID NO: 901626 - DNA, 120 bp, Artificial Sequence
  ENSG00000257277_10 (sequence is synthesized)
attatttaagaaatacattttataaggctatggctgccatagagaatgagccctctgatgaatgtgggcgaagtaaattgaaagccttattgaaaggatttaccatcctagatgccatta

SEQ ID NO: 901627 - DNA, 120 bp, Artificial Sequence
  ENSG00000257277_11 (sequence is synthesized)
agaacattcatgattcataggcagaagggcaaaatagcaacattaacaggagcttggaagaggttgattccaattctcatggatgactttgaggagttaagacttcagtggaggaagtga

SEQ ID NO: 901628 - DNA, 120 bp, Artificial Sequence
  ENSG00000257277_12 (sequence is synthesized)
ctgtagatgtggtggaactagcaagagaactaaaactagaagtagagcctgaagataaatgactaatttgctcaaatctcatgacaaaactttaatggttgagaaagaaagtggtttctt

SEQ ID NO: 901629 - DNA, 120 bp, Artificial Sequence
  ENSG00000257277_13 (sequence is synthesized)
gagatggaatctcccctggtgaagatactgtgaaaactgtggaaataacaacaaatgatttagaatattacatacacttggttgataaagcagtggcagagtttgagaggattgactccc

SEQ ID NO: 901630 - DNA, 120 bp, Artificial Sequence
  ENSG00000257277_14 (sequence is synthesized)
attttgaaagcagttctactgtgggtaaaatgctatcaagcggcactgcacgctagagcaattttttgtgaaaggaagggcccatgatgtggcaaatctatttgttgtcttattttaagt

SEQ ID NO: 901631 - DNA, 120 bp, Artificial Sequence
  ENSG00000257277_15 (sequence is synthesized)
aattgtcacaattaccccaaccttcagcaaccccccaccctgatcagtcagcgaccattaacatggaggcaagaccctccaccagcgaaaagattatgactcactgaagtctcagataac

SEQ ID NO: 901632 - DNA, 120 bp, Artificial Sequence
  ENSG00000257277_16 (sequence is synthesized)
cattagcatttttagcactaacgcattttaaaatcaaggcctgtacattgttttcgtaaacataacgctattgcatacttaatggactacagtatagtataaacgtacctcttatatgca

SEQ ID NO: 901633 - DNA, 120 bp, Artificial Sequence
  ENSG00000257277_17 (sequence is synthesized)
ctgggaaaccaaaaaattcgtatgactcactttgttgcaatattcactttattggggtagtctgaaattgaccccacaatctctctgaggtatgcctgtaagttttgataaatgtaggcc

SEQ ID NO: 901634 - DNA, 120 bp, Artificial Sequence
  ENSG00000257277_18 (sequence is synthesized)
ctcacataaccaacagtagtcgagttacaggacatttttctcaccctgaaatttcctgcatacatctttccagtcaatctccatctccctcatatgcaactattgttctgattttagtca

SEQ ID NO: 901635 - DNA, 120 bp, Artificial Sequence
  ENSG00000257277_19 (sequence is synthesized)
tagattaatttcacttattcttgaatgttttataaacggaataatgtaggtatatactcttttgtgtctggattctttagctcaagaaaaaattttaacgattcatccatattgtagtca

SEQ ID NO: 901636 - DNA, 120 bp, Artificial Sequence
  ENSG00000257277_20 (sequence is synthesized)
gagcatgctcagtgggaggttttaaaatattttctttaggtcagctttattttgctcatttctttggaaatatttcaacaaaagccatctaattagtccttaataacattgttcactaat

SEQ ID NO: 901637 - DNA, 120 bp, Artificial Sequence
  ENSG00000257275_0 (sequence is synthesized)
agtcatctggcagcagctcgagaagcatgtcctccacgccgtcaatctgagaggcagagagagagagaaggcattgatcggccagagccctccactccctccattcctcactcctgcgcc

SEQ ID NO: 901638 - DNA, 120 bp, Artificial Sequence
  ENSG00000257275_1 (sequence is synthesized)
ttcccctagctggaaacagcaggtaggaacccaggtgtgaggatttcaggggctcttggagactgcccctcctcccaccagccttcagcctgtgactgcccaccagagatgtcttcctgc

SEQ ID NO: 901639 - DNA, 86 bp, Artificial Sequence
  ENSG00000257275_2 (sequence is synthesized)
tcctgggttcaagcgattctcctgcttctgcctcccgagtagctgggattacagacaaagaattcaagactaaactgggcatggtg

SEQ ID NO: 901640 - DNA, 120 bp, Artificial Sequence
  ENSG00000257275_3 (sequence is synthesized)
agagtgaagtatgaagtaattcacccacagacacccagctagtgagtggcagacctggaagacaaactagttctgtttggcatcagaatctatgctgtcagccacctcaccacattcatg

SEQ ID NO: 901641 - DNA, 120 bp, Artificial Sequence
  ENSG00000257275_4 (sequence is synthesized)
agagcaagatgacaagctcgctaataagctctgttggggaggtctcagcccaggccagagctgtgaagtgagaaataagtccagtttaaatagtgctgctgggatggacttttgtggcca

SEQ ID NO: 901642 - DNA, 120 bp, Artificial Sequence
  ENSG00000257275_5 (sequence is synthesized)
gggaaggggtacccaggagccagtgtggccactgacccagcctcatcaatggccctaggatccagaatgccacaaacaatggagcaagaatcagatctgtgtgtctgggctggaatgcaa

SEQ ID NO: 901643 - DNA, 120 bp, Artificial Sequence
  ENSG00000257275_6 (sequence is synthesized)
gccaagactatgaagtggacaatgatctatgaagcgctaagtgaacagatgtcatgtaaatagcttggatctctacgtgcatgtgtgcattgtatatgtttaccaaagaccttgttacag

SEQ ID NO: 901644 - DNA, 120 bp, Artificial Sequence
  ENSG00000257275_7 (sequence is synthesized)
tgtttttaggcatggctcactttataaaggtcatcacagttggccaagctatctggtatttattactcatttgatactcacacctgctcaatgatgctggtatcattactctccataatg

SEQ ID NO: 901645 - DNA, 120 bp, Artificial Sequence
  ENSG00000257275_8 (sequence is synthesized)
attttcctatcattttacagatggggttcagaaagatcaggtggtagatccatagtcacactctagttaattgataggactgagaattcaatgcatgcccactgccttctcttacaagtc

SEQ ID NO: 901646 - DNA, 120 bp, Artificial Sequence
  ENSG00000257275_9 (sequence is synthesized)
ttggggtatttgagtgtaattcaataatgacaaccccttcactgtccaaaaggggtgaatgaaacatcaagctgtcacaaaggctaggttggagggcatggcttatatccttgggtaagt

SEQ ID NO: 901647 - DNA, 120 bp, Artificial Sequence
  ENSG00000257275_10 (sequence is synthesized)
aggcttactaaacttaaaccctaaagttgaactgacttaactaccccgtcccagcagctggagtgggacaggacactgggtctatatggagaggggtctgcccagattagctttaggacg

SEQ ID NO: 901648 - DNA, 120 bp, Artificial Sequence
  ENSG00000257275_11 (sequence is synthesized)
ccaatcagataagtcacttccgcccccagagagatttaataaaggagcagagaaagacttctaataaaattccctccatatggaaggaaaaggagacatcgggagttacgttaatcatgc

SEQ ID NO: 901649 - DNA, 120 bp, Artificial Sequence
  ENSG00000257275_12 (sequence is synthesized)
catcgggagttacgttaatcatgctcatttcttaacagtgcaaatatcaagagttagaaattagagttcctggctgggtgcggtgcctcactcctgtaatcctagcactttggaaggcca

SEQ ID NO: 901650 - DNA, 64 bp, Artificial Sequence
  ENSG00000257275_13 (sequence is synthesized)
cacggtgaaaccttgtctctactaaaatacaaaaaaatagccaggcgtggcaaagggagccaga

SEQ ID NO: 901651 - DNA, 120 bp, Artificial Sequence
  ENSG00000257275_14 (sequence is synthesized)
tcccacatgacagcaagaatcactgaaaatgctggacccactgtcaatgctgtattgttgcaaagaaaatgtttatcttgcctaactttaaagtcacacatgcctgggaacttccaacta

SEQ ID NO: 901652 - DNA, 120 bp, Artificial Sequence
  ENSG00000257275_15 (sequence is synthesized)
gaacacagctggcaaagcagacaccctctccctgcagcctcgttgaaaatgacctcctttacatttcctcattgagaatctgcccagtgaggactgtggcagaagagagtcagggagaat

SEQ ID NO: 901653 - DNA, 120 bp, Artificial Sequence
  ENSG00000257275_16 (sequence is synthesized)
tttctagctgattagggttagaaaatgaagacgagggctctcttgtaatcagcaggaagctatgatagaaaagaatgccttttaaatttgaagtgcaaaactagaaaatagaaaattatt

SEQ ID NO: 901654 - DNA, 120 bp, Artificial Sequence
  ENSG00000257275_17 (sequence is synthesized)
aggggggtttgatatgaagtttcggaattcttttcaagactgtgtgttttgaagttaagattttaaataatgtaggaaggtacagtctatactgatgggttcaggatatgctaacccaaa

SEQ ID NO: 901655 - DNA, 120 bp, Artificial Sequence
  ENSG00000257275_18 (sequence is synthesized)
atatggcaccttggtgtttgagaaaatggcggaagcaggaaggtcattctcaccatccacctccctttccccctcctgaagcaggtcttctttgaaaggcccctccctgtaaccagaaga

SEQ ID NO: 901656 - DNA, 120 bp, Artificial Sequence
  ENSG00000257275_19 (sequence is synthesized)
aaggaacattcttacctttgaagtcacagggtcacagagaagaatctgaacaggacttactaaattcttccagtttgtcaccatttgctcataccatctttgtccagttatatttctcca

SEQ ID NO: 901657 - DNA, 120 bp, Artificial Sequence
  ENSG00000257275_20 (sequence is synthesized)
aagctatccactcttcatcaaacttagcataaaaattgtaaaaccttacacatttcttcaggtcttccttttccttaggaagcctcccatgtcacatgaaacttaaataaaataaatctg

SEQ ID NO: 901658 - DNA, 120 bp, Artificial Sequence
  ENSG00000257279_0 (sequence is synthesized)
acacatagaaggtgagccacactaattatgaaaatccacagtgtgaaaggacagcgctgccctgaccatatgccaaagagttcaaagccggcctccagaacacggtccagaagagctgga

SEQ ID NO: 901659 - DNA, 120 bp, Artificial Sequence
  ENSG00000257279_1 (sequence is synthesized)
gggagcgtcaacatccgggggactctgctaatactcgggcccagctccgcaagctgcgggtccatcacaaaggacagccgcactaggctaatatcgcagacctgggaacactgccactgc

SEQ ID NO: 901660 - DNA, 120 bp, Artificial Sequence
  ENSG00000257279_2 (sequence is synthesized)
cattcaggggcgtatatggacaagacaaaactggcttggctcttcgggccaggggtgccttttccaaggatactcagagcattttgtgggaacctttcactcaaagtgaaaaataattcc

SEQ ID NO: 901661 - DNA, 120 bp, Artificial Sequence
  ENSG00000257279_3 (sequence is synthesized)
taaaacgtgcataaaacccgccttgaacaatggctgctcggttcctctcactcccccaaatcatgtctcattttcctacaactgatatcctccgtctagccctttaactttatctccgtg

SEQ ID NO: 901662 - DNA, 120 bp, Artificial Sequence
  ENSG00000257279_4 (sequence is synthesized)
ttggctttctgacagaccaagaggctcagattgacagtggtggtgccatttgctgggggctgtaaactagttcaaaaagcttccagtctgtgccaggatgccaccttattgccaaggcag

SEQ ID NO: 901663 - DNA, 120 bp, Artificial Sequence
  ENSG00000257279_5 (sequence is synthesized)
cttattgccaaggcaggatttgcactttacagagaaactggcatcttaagtaagtatctgggtccatacagtgattgctggtctacagtattcgtttttttgttgtttttttgtcttttt

SEQ ID NO: 901664 - DNA, 68 bp, Artificial Sequence
  ENSG00000257279_6 (sequence is synthesized)
acagtattctttaatcacagactaaatagtaagtactatggaagttttgagaacagaaatgtactttc

SEQ ID NO: 901665 - DNA, 120 bp, Artificial Sequence
  ENSG00000257279_7 (sequence is synthesized)
gtaagtactatggaagttttgagaacagaaatgtactttcacatttttctaataaaacccagatgagctgacagcatcaggccattttaggggagcactatactcaaagtgcagacgctc

SEQ ID NO: 901666 - DNA, 120 bp, Artificial Sequence
  ENSG00000257279_8 (sequence is synthesized)
ctggaggtgaagcagtgatgccatggctttctaagttattctagtctaagaagattcccaacagacagaaagagggaggaacaggattggttccaggtcaggccctcaattcatcactca

SEQ ID NO: 901667 - DNA, 120 bp, Artificial Sequence
  ENSG00000257279_9 (sequence is synthesized)
gtgttggcttttctgctcactctcctaccagtgccaaaatcaagtttgtttaaattaaatcctaactcagcatagacagatttgagcacttccttcttaacaccaaatcatctcccactc

SEQ ID NO: 901668 - DNA, 120 bp, Artificial Sequence
  ENSG00000257279_10 (sequence is synthesized)
tacaaatctagaggttcctgtaccaatgaactcagaaataagctcgacataaagaattcttaaggctggctgagctgcacacatgacatcctggaacatggctacccaattaacaccaac

SEQ ID NO: 901669 - DNA, 120 bp, Artificial Sequence
  ENSG00000257279_11 (sequence is synthesized)
ttaaatctatcttcacgcaagagttactttaaatttcaggtgagacagtcttgggatgaagaaagtgtaggaatggaaaccttccttcccagatggactgggataacaccactgaactca

SEQ ID NO: 901670 - DNA, 120 bp, Artificial Sequence
  ENSG00000257279_12 (sequence is synthesized)
ttctcacttatatattaggtcaaactgatctttgattcccaagggtgagattccaccgtgttagtctgaagaaggccaaggaaccacagtgatgagcagctctggccctgaagtcagccc

SEQ ID NO: 901671 - DNA, 120 bp, Artificial Sequence
  ENSG00000257279_13 (sequence is synthesized)
tgagctatctgccagtacccctcctcattgggggataacatcacgacatcaaaagcagaagctgtggccacggttgcatcgtcctggctgagggctagtgcctgtattcttgcatcgtgc

SEQ ID NO: 901672 - DNA, 120 bp, Artificial Sequence
  ENSG00000257279_14 (sequence is synthesized)
tcaaaacgatgaacagggtactttccggtccttaaatcccaaatattaagaaaccctatgcagcaagaaacaatgcagcaatggaacatttggttgtaagaaacagacacccactgaaac

SEQ ID NO: 901673 - DNA, 120 bp, Artificial Sequence
  ENSG00000257279_15 (sequence is synthesized)
tggcttaaacataaaaaggaaactgactggaaaggaatgaggctacttcatggagcccaagggcaggaagtacagctggaggtgataagggatcagaaccaggaaccaggaagacatgca

SEQ ID NO: 901674 - DNA, 120 bp, Artificial Sequence
  ENSG00000257279_16 (sequence is synthesized)
tgctccctgggctcaggaccctccaccttgacaagcagcagccaggctgaaggaactctgagctcagcctagaccagtaacagccattaacgatgacatgagtaacgatggccagtcttt

SEQ ID NO: 901675 - DNA, 120 bp, Artificial Sequence
  ENSG00000257279_17 (sequence is synthesized)
cgaggagacataaagcctgctcagcagctgtggatgggcacccatgccagtttgcagcaggcccctcccacctccctaaggaggccagccagagtgtggtaatgaaactgcacatagtgg

SEQ ID NO: 901676 - DNA, 120 bp, Artificial Sequence
  ENSG00000257279_18 (sequence is synthesized)
aaatgggatctaaatgagtttaaactgatttatgttagcttttgtaaagattactcgatatctggaaagtgctaccactgtgaaataatgtcgacaatccttaagacctctgtctaatgg

SEQ ID NO: 901677 - DNA, 120 bp, Artificial Sequence
  ENSG00000257279_19 (sequence is synthesized)
tacttgcacagaatatttatattcttcgtcatgggaacaaggaccataatggataccatttttgttttattagggatgcatatttaaattaatctgctatttgcctaaacaattagctgc

SEQ ID NO: 901678 - DNA, 120 bp, Artificial Sequence
  ENSG00000257279_20 (sequence is synthesized)
ttctgtttgtgtgcacaaagccaaaattgcaattaagcttccatcaaaaagataagtcccaactaaaactgtcccggtggagtcataagagctcagggcagaactttccaaaattacttt

SEQ ID NO: 901679 - DNA, 120 bp, Artificial Sequence
  ENSG00000257279_21 (sequence is synthesized)
ttagcataatggtaattatgttaattgcctgaaaggtaaataactgctgaactggttttggaaaaaaaacacaattggtatactcttccctcccctttgatcttttccatgcaccacaaa

SEQ ID NO: 901680 - DNA, 120 bp, Artificial Sequence
  ENSG00000257279_22 (sequence is synthesized)
atttaaaacaggttaacagtttcgaaaggtcatagactagtcccttcttcaactacagagctggtcttgtggtctttagtggtttcttgattagaaattatttcagccgcgagctcccat

SEQ ID NO: 901681 - DNA, 120 bp, Artificial Sequence
  ENSG00000257279_23 (sequence is synthesized)
cctcttgagcttccacaataaacacctgaagcttggtgtcaacttcatgatcgttaaatagacaggatcaattaactgcgttcagagatactgaatgaagttgactatttataataaaga

SEQ ID NO: 901682 - DNA, 120 bp, Artificial Sequence
  ENSG00000257279_24 (sequence is synthesized)
cagctggcaatctcaatttctaccatgtaaataaacacttgcctatcagaaattaatcaggagtcaaaagaaattctgcaacaaaggaaaaggcattttgacaaaaattttaaatatacc

SEQ ID NO: 901683 - DNA, 120 bp, Artificial Sequence
  ENSG00000257279_25 (sequence is synthesized)
catagcactgacttaacacgtacctctttgttcattaagtccacacatcaccactctgaaatgcaggccagagacataaaactagcataaagttggacaggacaaaagtttttgctcttc

SEQ ID NO: 901684 - DNA, 120 bp, Artificial Sequence
  ENSG00000257279_26 (sequence is synthesized)
atggaagaggtgccggtgggagattagtatcagtgtagacaagggtcataaagaacagctaaaccacggagggtcacgaaaaaggaaaaaggctgaagtttcttgttactgcagctactg

SEQ ID NO: 901685 - DNA, 120 bp, Artificial Sequence
  ENSG00000257279_27 (sequence is synthesized)
tggcatgccatcctgctttcccgctgaccacagcgctacagctctgttgcctaaggcagaaaataaacagaaaacattctggaatctgcattttagattgacaagtaaaagaatctgaat

SEQ ID NO: 901686 - DNA, 120 bp, Artificial Sequence
  ENSG00000257279_28 (sequence is synthesized)
aggcttatggaggaggcgactggttagggcataaacaaagcagcgagatcaccaaaatagaaactgagtcaagagaagaggaagtaagattgaatatatttagtagctctcaaattcaaa

SEQ ID NO: 901687 - DNA, 120 bp, Artificial Sequence
  ENSG00000257279_29 (sequence is synthesized)
gcagaaagaacacctgaaaaagaagaatgaaaaatgacgagacagcagactgaaaaggaggcaaatagtatattgttaagactatggcaatgtgactagatagaagaatttccagttaac

SEQ ID NO: 901688 - DNA, 120 bp, Artificial Sequence
  ENSG00000257279_30 (sequence is synthesized)
atcttaggaaaaacagattgatggagaaggcaaagaatttggaccagcttctacaagggaaagttccagagggcaggtaacgtgaaagagacatcactgtgcatgcagcctcagactgag

SEQ ID NO: 901689 - DNA, 120 bp, Artificial Sequence
  ENSG00000257279_31 (sequence is synthesized)
gccagtgttctctataaccgatatacacatgatatagactctatcccgaagagatcagcagacactggtagtagcagatgcctctaaggaggggagtggggaatcagtggactgggtggt

SEQ ID NO: 901690 - DNA, 120 bp, Artificial Sequence
  ENSG00000257279_32 (sequence is synthesized)
agtagattaaaaaaaaaagatcactactgaagctgagtgatgggtacacgggggtgcatcatgctattcgttccatttttgtgtattttgaatttttcacaataaaagatttttaagaat

SEQ ID NO: 901691 - DNA, 120 bp, Artificial Sequence
  ENSG00000236889_0 (sequence is synthesized)
agacttctgcaagatgccaagaggggaacttgggctttttcttttttccaattgccttttacagagtgatggaaagttaactacgaactcctgcggggaaaagaagagacgatctaggcc

SEQ ID NO: 901692 - DNA, 120 bp, Artificial Sequence
  ENSG00000236889_1 (sequence is synthesized)
cgccctgctttccagtgttatttcatctgtttttataattggatgtgaaacttcttgagaaagggtcctatgactctttaaccaattattgttcaaaggagtccccaaagtgttaagcag

SEQ ID NO: 901693 - DNA, 120 bp, Artificial Sequence
  ENSG00000228878_0 (sequence is synthesized)
ccgacggctttgtgagtgaaagtgaagagacacttcgaggcaggaggtcctggaaccaatcccctctgatactgagagacaactattacacaagagaaatattctaccattcacaaaatc

SEQ ID NO: 901694 - DNA, 120 bp, Artificial Sequence
  ENSG00000228878_1 (sequence is synthesized)
tcgtttaagtgttgtgaaatacaaacaccagggaatcaagaactttagaaaattgtggctgtgttcccatatgtggtacaaagaaccagtgagtcccatttgttgtggttcctgcattcg

SEQ ID NO: 901695 - DNA, 120 bp, Artificial Sequence
  ENSG00000228878_2 (sequence is synthesized)
atgactccagatgtgccaccaccgagctagtcttatgacaacctagaaggcaaattgggagatatgaacaaaaacattgaaaacaacataaatgcccttcaaccaaggaatggagaaatc

SEQ ID NO: 901696 - DNA, 120 bp, Artificial Sequence
  ENSG00000228878_3 (sequence is synthesized)
acgacatgttaatccaagaaaatgctaagtagttgctaaggattaatgagcatggataaatctcagcaacataatactgaagggatggccctatatttgtcactgagagcagaagggttg

SEQ ID NO: 901697 - DNA, 120 bp, Artificial Sequence
  ENSG00000228878_4 (sequence is synthesized)
agaacttagatcctgacaggaggcccacctttattggagaaatggctctgcaacttagctcatgtaagactgctgggatttgaaatttatcctattatttgaagactgaaatcaaaatat

SEQ ID NO: 901698 - DNA, 120 bp, Artificial Sequence
  ENSG00000228878_5 (sequence is synthesized)
gaaggtggagcatcatgtgtgccttctgtcttgttctctactagggtgtaaaccatttaactaaaaatagtctccaatttgacaccttcccaacatttcactagtatactccaaatctcc

SEQ ID NO: 901699 - DNA, 120 bp, Artificial Sequence
  ENSG00000228878_6 (sequence is synthesized)
atgcagggttacagacctatttcagctggctccatttactctgaggcagataaagctgagattgcaacatcagaagcagttcaaccaatcattatgtacaaacctcagcccatttgtata

SEQ ID NO: 901700 - DNA, 120 bp, Artificial Sequence
  ENSG00000228878_7 (sequence is synthesized)
atgcaatccttctggtagtaatgacacaaaacatgcctatagggacgatcacaaccctgtcaaagtcccaagtcatctgtggcaccagggccacagaacttcttaccacttggaagcaaa

SEQ ID NO: 901701 - DNA, 120 bp, Artificial Sequence
  ENSG00000228878_8 (sequence is synthesized)
atagttgctttaatggtaaccaaatgccctccttcaagacagtatttcaagaaggaggagtatacgtatattatacaaacatatccaatccctttagaagataattatcaatatcatgca

SEQ ID NO: 901702 - DNA, 120 bp, Artificial Sequence
  ENSG00000228878_9 (sequence is synthesized)
gggaagctggaacacacacacaaaatcgagtactatctagaagatcaagccacaaatctcaagagaagcagtaagtgtccagggcctgggattttttatcttggccgtgagaatagcaca

SEQ ID NO: 901703 - DNA, 120 bp, Artificial Sequence
  ENSG00000228878_10 (sequence is synthesized)
gcccatggtgcagaaacgacaggctagttgtccagcataacatggtgttttatttcaccatagtagactgctgggaaatctctggaggccttggcagctgtgtcttgtctttaatatgaa

SEQ ID NO: 901704 - DNA, 120 bp, Artificial Sequence
  ENSG00000228878_11 (sequence is synthesized)
gcctgggggggaagacagagagagagactcataattcacaagaggcccagccgtaagaaagccattctaaataactgaatcaggcaccgaggaggagcgactattccattcctaagtcaa

SEQ ID NO: 901705 - DNA, 120 bp, Artificial Sequence
  ENSG00000228878_12 (sequence is synthesized)
gaatgctttttgtctttccttctctcctaattggctcatgaaaagatcatttatgtgtggtagaatcagtacatcagaggcagcttctgtttctctccatttctcctccccactgctgct

SEQ ID NO: 901706 - DNA, 120 bp, Artificial Sequence
  ENSG00000228878_13 (sequence is synthesized)
gtcctgtaaaaagaccctttgttacagactgaaacagcagatgcagctcagatattatcttgaataattttgtggggagcattttatcttgaattggtgtaatgccattttcacgtggaa

SEQ ID NO: 901707 - DNA, 120 bp, Artificial Sequence
  ENSG00000228878_14 (sequence is synthesized)
gtctgatccaaatgttctagaaacttgagagacccatatggcaaagaagtactttacacacatatctctttaaagtagtgcagggtatgggaagaactgataatgctgattaaatgatat

SEQ ID NO: 901708 - DNA, 120 bp, Artificial Sequence
  ENSG00000228878_15 (sequence is synthesized)
gtagacgaaatgaatgtaaactggcatcatgggctgagtgagtcaggggaggccttgtggaagagataagagtaatagaaaatgctaggtcaagtatgtgtagaggcctggagagaggaa

SEQ ID NO: 901709 - DNA, 120 bp, Artificial Sequence
  ENSG00000228878_16 (sequence is synthesized)
tggacttagtgggtccaaaagtaagaagacttgtttgttgtgaatacagagttagaagtaggtagaagaaaaagttggtcgggtcctgcagagattaaaaatccggtttaagattttaga

SEQ ID NO: 901710 - DNA, 120 bp, Artificial Sequence
  ENSG00000228878_17 (sequence is synthesized)
ttgtttcaatcatcaattagttggtgtctgtgttcattgtggaaatgctttaaatatagataacaaaaaggataataacttacaatcctaccagtcgtaggatgatgatggcagacaatg

SEQ ID NO: 901711 - DNA, 120 bp, Artificial Sequence
  ENSG00000228878_18 (sequence is synthesized)
tggtgcacattctttcatatattttattgtcctagtttaaggttccctataggcagatcctgagatgaagatttaaatgcacaccacttattgaggaggtgatttcaggaaacaccggca

SEQ ID NO: 901712 - DNA, 120 bp, Artificial Sequence
  ENSG00000228878_19 (sequence is synthesized)
ggagagtggggcagtatgacagggaaagaaaggaagcaaaaaaataaagggcatgttctcaaaggaatcagttggagagcagtcatgctggagacactggaagagagtatagaagatgtc

SEQ ID NO: 901713 - DNA, 120 bp, Artificial Sequence
  ENSG00000228878_20 (sequence is synthesized)
tcaatgtagtcctgcctagggatcaggaagtcgaagtatttatccactaattcttgtcaattgagaatttatttgaggggcattaactctccaaaacggtctccctgtgccggaaaaata

SEQ ID NO: 901714 - DNA, 120 bp, Artificial Sequence
  ENSG00000228878_21 (sequence is synthesized)
accctaagcagaatgttgtaggtatttgcagcaaatagccctcagtgtgtcctgaggattggtgtagtacataaatatacaaaattatttttatttataaaaaagctttctatgcatcag

SEQ ID NO: 901715 - DNA, 120 bp, Artificial Sequence
  ENSG00000228878_22 (sequence is synthesized)
gctctgtactgtgtgttttacttgcattcactcaaaatagttctcacagaagccctatgaggtcggcgctactcttatcccctgaggattagaggctgggagaagtatatatgagagtca

SEQ ID NO: 901716 - DNA, 120 bp, Artificial Sequence
  ENSG00000228878_23 (sequence is synthesized)
tatggagattaaatacctgaagtcatgaggagatgatgcactctccaagagagctttgatgacagcctatttatgcagcttctgtcatctgtacacattctcctctttctgtcaacaaag

SEQ ID NO: 901717 - DNA, 120 bp, Artificial Sequence
  ENSG00000228878_24 (sequence is synthesized)
agtttttcttttgcaattgtaaatgtcctctgttttcagagacttttgttggaaaacaaaacaaaatcttgagacatgaaggatctgtaatggacacctgtcgattgtgtctgttcagca

SEQ ID NO: 901718 - DNA, 120 bp, Artificial Sequence
  ENSG00000228878_25 (sequence is synthesized)
gctcctctcccacctgtcttccagtacaacaccttatttcattggagagaaaggttctacctcttctccttaaggttttagtggacagccaaaccagtcttcagtctacagggtgagtat

SEQ ID NO: 901719 - DNA, 120 bp, Artificial Sequence
  ENSG00000228878_26 (sequence is synthesized)
gagatccaggcttgaccaaccatagtcaccacccacttggctacatcaaattgagccagaaagagcctttccctgggaatttatatgtagactttgggaaaaggaagctttcttctctga

SEQ ID NO: 901720 - DNA, 120 bp, Artificial Sequence
  ENSG00000228878_27 (sequence is synthesized)
tgttactagacagcgatgacaaaaccagtgcttgtctggaccatgctccacttcctctccacagcaagatgagcaagctcatctgtagtaggaaagaatgtaggaatgcatcccctgcac

SEQ ID NO: 901721 - DNA, 120 bp, Artificial Sequence
  ENSG00000228878_28 (sequence is synthesized)
aagttttggagctgcgggagccggccagttggcctcagcgcctccttacggaattggcgtaaggcaaagaggcgcggctggaagaaccagactgagaaagtgccacagggcgggggccgc

SEQ ID NO: 901722 - DNA, 120 bp, Artificial Sequence
  ENSG00000228878_29 (sequence is synthesized)
ccctgcaatccccaccaaggtctgcaaggtctacttcccctagactacaactacccattacttgtgccaaatattcaataaatcgtaaccttagcagggagagggatgaagagagattga

SEQ ID NO: 901723 - DNA, 120 bp, Artificial Sequence
  ENSG00000228878_30 (sequence is synthesized)
ttaatgggtatgtatatacagtatgatagaagaaataagacctagtatttcatcagtcagtagtatgactatagtttacaataatctattgtatatttcaatatagctagaagagaagaa

SEQ ID NO: 901724 - DNA, 120 bp, Artificial Sequence
  ENSG00000228878_31 (sequence is synthesized)
ttagaatgtttctagcataaagaaaacacaaatatttaaggtgatgggaatctcagttacactgattttatctttacaaggcatatgaatgttttaaattgtcatagtacccccaaaata

SEQ ID NO: 901725 - DNA, 120 bp, Artificial Sequence
  ENSG00000228878_32 (sequence is synthesized)
acaacttgtaaaaattagtgagttatacgtgggaagcattttggcctcacaattgagaagcagagaagtggttcaaggctcatgtaagactgctgggatttgaaatttatcctattattt

SEQ ID NO: 901726 - DNA, 120 bp, Artificial Sequence
  ENSG00000228877_0 (sequence is synthesized)
tgcatggcccagacggggccctagaaacaagctaagaagagagacctggtggtccggcggtggaactgggacaatggagtggaacgtccaaccatgccaggagcatccatgtgctcataa

SEQ ID NO: 901727 - DNA, 120 bp, Artificial Sequence
  ENSG00000228877_1 (sequence is synthesized)
ccggacaccagattcacccacggcgcgatcccggtgacggaggcagtgtgagcaggcaggcggcggccactctggggaagggagaaggaatgagggtgagaggggcacagagggcctcca

SEQ ID NO: 901728 - DNA, 120 bp, Artificial Sequence
  ENSG00000228877_2 (sequence is synthesized)
gggagacggtcctattgtgcctcttctcctgggtgtctgtcacctgcatgcaaactttgtgatcattcactgagtcacgttttcttacatgtctccttaaaaacagttcttaaaagctcc

SEQ ID NO: 901729 - DNA, 120 bp, Artificial Sequence
  ENSG00000228876_0 (sequence is synthesized)
cggatgtaccacaacacactttctgaggcagaacgtaaaaggtagagccacgtttggtatccgaggtatcctaacatcttaacagtctctttgctggaaagaaatcttcagtggctccca

SEQ ID NO: 901730 - DNA, 120 bp, Artificial Sequence
  ENSG00000228876_1 (sequence is synthesized)
ttacctacggatccagcctggctttttagtccagcattcaagacctgtcaagctcttctgcatcctctcgtatgcatgtgatagacaggcactccacctagcgaagtacaaccatcccaa

SEQ ID NO: 901731 - DNA, 120 bp, Artificial Sequence
  ENSG00000228876_2 (sequence is synthesized)
acttattcctattacttttcttccattcattcgttcatacaatcaatcagtcatcattgaggatttattagacgataggttctggagacaaaaaggtagataaatacgacgcagtctttg

SEQ ID NO: 901732 - DNA, 120 bp, Artificial Sequence
  ENSG00000228876_3 (sequence is synthesized)
cttttgaggactgtatcccagatacatctgactggttgttcctgctgaaacatttttccacctccatgcttttgcatacactactttctccacctggaagaccctctctgcatttctgaa

SEQ ID NO: 901733 - DNA, 120 bp, Artificial Sequence
  ENSG00000228876_4 (sequence is synthesized)
catgcacttttattaactgtccacagctgcagtgaggccttcttcatgaagcctctcccagttctccgcctcaccccaccaagctggaactgatcgcagcctccaaactcccacagcaat

SEQ ID NO: 901734 - DNA, 120 bp, Artificial Sequence
  ENSG00000228876_5 (sequence is synthesized)
cctttgcctcctcttctgacgctactctttctctcttggatgaaagccgtgtgtatccatgttggttctccacttctagaacctgtcgttttggggctgcaggacttggtggattcacac

SEQ ID NO: 901735 - DNA, 120 bp, Artificial Sequence
  ENSG00000228876_6 (sequence is synthesized)
tggcatcccctcaggaagcaggtgagcaggaagtgactgttggatgcacgagaaagcaagggaaccacagaggtgggaaaatgctgtctctttttcattgttaagtcactactttaggca

SEQ ID NO: 901736 - DNA, 120 bp, Artificial Sequence
  ENSG00000228876_7 (sequence is synthesized)
caagagtgtaactaagtcctttccaaatggaaaatggctactttagagccacgtggactcctcacaaattacatgttgtgtcttctgttcctctttaaaatatttttcacaggtagcttc

SEQ ID NO: 901737 - DNA, 120 bp, Artificial Sequence
  ENSG00000228876_8 (sequence is synthesized)
atagactattagaatttgaagggacctgcaagacccttctctctttagctctcaattttagatctaagaaaactgggtcaagagaggcaaaaataacttactcaaattccctgtgagtgc

SEQ ID NO: 901738 - DNA, 120 bp, Artificial Sequence
  ENSG00000228876_9 (sequence is synthesized)
ttgtggtatattgtacaatacaccataataattgtttataataatttagtgattcattcaactactctgcaagtcaactctgtgtcaggcaaaaggtgattctaaaccattgagaaaaag

SEQ ID NO: 901739 - DNA, 120 bp, Artificial Sequence
  ENSG00000228876_10 (sequence is synthesized)
ataaaatatattggttattgaggagtagtttaactttttagaaatgctttcatcaacagtagcaaaaaggaaagcaaataaaagctcatataaggtaaatttcagttacctggaaaagtt

SEQ ID NO: 901740 - DNA, 120 bp, Artificial Sequence
  ENSG00000228876_11 (sequence is synthesized)
acctatgtgaagtgtttcattttacaggtgaacagagcagtgagacagggccatatgacaacctttccttgttcgcaggggatagttcaggtttacttctcttgtaaacttctctcttcc

SEQ ID NO: 901741 - DNA, 120 bp, Artificial Sequence
  ENSG00000228876_12 (sequence is synthesized)
caccacaattattaatagtgtgttctttcactctcaaaagtgttctggcttggacaatggccattctacgtataaagcttagtcgttttttcttgtatagctataatatcactttttttt

SEQ ID NO: 901742 - DNA, 120 bp, Artificial Sequence
  ENSG00000228876_13 (sequence is synthesized)
ttaggaatgcagaatctcgggcctcatccctgatccactgaattggaatctgcatcttaacaagatcctcaggcaatctgtaagcatatgcatggttgagaagcactgctgtacaacact

SEQ ID NO: 901743 - DNA, 120 bp, Artificial Sequence
  ENSG00000228876_14 (sequence is synthesized)
ttgtaacaatctctcttgtccaagagcggggacgaagctagctgtgaaagctaacacaggtctcaggtgttcttcttcctgcaagtgagggttggacagcccaagccatgcttcgcctgg

SEQ ID NO: 901744 - DNA, 120 bp, Artificial Sequence
  ENSG00000228876_15 (sequence is synthesized)
gccctgaggaggcctcaccccccactccccatggcagcaacattctccttgagccttccttggtggtccgatgtcagcatcttgccaatccaggcgaaggcatcatgccacactgacaga

SEQ ID NO: 901745 - DNA, 120 bp, Artificial Sequence
  ENSG00000228876_16 (sequence is synthesized)
tggcccaaagtaggacagacagaagaaatgtatgtttatcaaatttgggttgaaaagaccacgttcccccagcataggctgtcaaacagctgtcattcaggagcatatggcccagcggtg

SEQ ID NO: 901746 - DNA, 120 bp, Artificial Sequence
  ENSG00000228876_17 (sequence is synthesized)
agagggcacagacacagctaatcccactcttagagagattagctctgacgagtgaagaaagttgcggctgtcgccagggtgctgcctgggaggagagggtggagggtctgcattgtggtt

SEQ ID NO: 901747 - DNA, 120 bp, Artificial Sequence
  ENSG00000228876_18 (sequence is synthesized)
catttcccgaatcaccttccctgtgatcgaggctcctgtctgccaaaaagaagccagaatgaaatgatgctgtagaaataactatgacagtaataataataaatctaccatttatcaacc

SEQ ID NO: 901748 - DNA, 120 bp, Artificial Sequence
  ENSG00000228876_19 (sequence is synthesized)
gaatgatgacgatggttgccagaataatagcccctgatgtgcacaacttaatccccagaagcaatgtcaccttacatggcaaaggcactctgcagaagtgatcaagtcaaggatcttgag

SEQ ID NO: 901749 - DNA, 120 bp, Artificial Sequence
  ENSG00000228876_20 (sequence is synthesized)
atgaggagatgatcttggattctcctcctggcccagtgttatcacaaaggacagctgaagagggagacaaaagggtctgagtcacagaggatgtgaggacagagcagaagtctcggtggt

SEQ ID NO: 901750 - DNA, 120 bp, Artificial Sequence
  ENSG00000228876_21 (sequence is synthesized)
tgaaagcattcacagaggtcattcagcccagccattcccagatctgaccgatcaccggaatcatgtgggcatcagagacagagcaacaacaacaagctacaacagcagcagcagcagcag

SEQ ID NO: 901751 - DNA, 120 bp, Artificial Sequence
  ENSG00000228876_22 (sequence is synthesized)
agcagcagcagcagcagcagcagcagaatgaaggaatgaatgaatgaatgagcgaggtgtatgccattgacctacagcaagagctgtctatggagactcctcataaaaaggctgcacccc

SEQ ID NO: 901752 - DNA, 120 bp, Artificial Sequence
  ENSG00000228876_23 (sequence is synthesized)
ccccagcgagccctacccatgtgacgtgctgcgcagacatacagagacatggacaccaggagtgcgcagggaatgacaggcagagagcagagccatgccagcctggttcagacccaggag

SEQ ID NO: 901753 - DNA, 120 bp, Artificial Sequence
  ENSG00000228876_24 (sequence is synthesized)
tccccaagggcagaactctcagcagtgggaatggcgggggagctcttgaggtggatgagcacacggccagagaatggtaccaatggaaaatggaattctataaaaacaaatccaataagt

SEQ ID NO: 901754 - DNA, 120 bp, Artificial Sequence
  ENSG00000228876_25 (sequence is synthesized)
atttattggccaaactgcccgagctcttgcaaagcagcaattcctgctcataaagtataaaaatgcatgctttccaaccctcttgcctcatctaggaaaatgctacgaaccaggggtgat

SEQ ID NO: 901755 - DNA, 120 bp, Artificial Sequence
  ENSG00000228876_26 (sequence is synthesized)
gagtttctcagagcctctcactttctcttgacttgattcctgtagctgcgtcactagttacattgttttgtggtttcttatttacacatcagcctctgccacagacccaaagcagctaga

SEQ ID NO: 901756 - DNA, 120 bp, Artificial Sequence
  ENSG00000228876_27 (sequence is synthesized)
gagcagggaccagtctggtcctggagccgctcccatctcctgcgggtctggcacagactaagtagtatcttatacagtgtttatttaactgaatcaaattttgcttcacaggtaggtcca

SEQ ID NO: 901757 - DNA, 120 bp, Artificial Sequence
  ENSG00000228876_28 (sequence is synthesized)
agggtgtcccatttcacagcactagagcctgtgagcttcaaacccaagcgtcatgagttatttcctgtgggattgtggacctgtttcttcagggctctgcctcccataataaagtattca

SEQ ID NO: 901758 - DNA, 120 bp, Artificial Sequence
  ENSG00000228876_29 (sequence is synthesized)
ctaggactctgtggggtggagtggtgtggctgcatcagctcaggttccttgagaacgtgtccacaaaactggaattccatggtggccctgttgaggagccccgtccctgaggaatgacag

SEQ ID NO: 901759 - DNA, 120 bp, Artificial Sequence
  ENSG00000228876_30 (sequence is synthesized)
agacctcttcagggagcagcaaattccagaaaagcagggaaattgttaagtggtggagccaagatttgtacgcgggtcacctggttcctgagcctcttctctcaactgctgtactgctca

SEQ ID NO: 901760 - DNA, 120 bp, Artificial Sequence
  ENSG00000228876_31 (sequence is synthesized)
gacataattaccaccaccttcccaggtgccgaaattgagactgagagaaaaacaatcagcccccgattttacagctacagaatgctggagctggagcctagcgtcctgacccctctactg

SEQ ID NO: 901761 - DNA, 120 bp, Artificial Sequence
  ENSG00000228876_32 (sequence is synthesized)
cacttacagatttctccggatcttgactacaatccaaagcaatcgtgctggaactaaggagagctgtagcctcatccatcagactgaatcttttacttttcttctggctgtttgcatgtt

SEQ ID NO: 901762 - DNA, 120 bp, Artificial Sequence
  ENSG00000228876_33 (sequence is synthesized)
ataaacaaagctacgagttactctttttttccaaggtggcacacagtaactgtggggagggtcagatgcttttcttggagtactgattccaaggaaataccttaatctcattgagtcaat

SEQ ID NO: 901763 - DNA, 120 bp, Artificial Sequence
  ENSG00000228876_34 (sequence is synthesized)
tcattagcagcttctaagactttaatcaactaacatttctgtgctaagtcaaaaccaaactatttaaaaatttttaaaaaaacaatttctaatgaacctgactcccacttagagtacttc

SEQ ID NO: 901764 - DNA, 120 bp, Artificial Sequence
  ENSG00000228876_35 (sequence is synthesized)
agctgagaatcttttttggcccctccctaattgtctaattaatgcaatattaaattgacaccaagcaaatgggagctgaattgtgtgctaacagtttgggcaaactgagaagaagtgtaa

SEQ ID NO: 901765 - DNA, 120 bp, Artificial Sequence
  ENSG00000228876_36 (sequence is synthesized)
tttctgtgcataagccagatgggagcagagaagaggaagggatatgtgcatgctaatttgcagtttgacaaactccttttgtaaaaataaacacttttgcagaagtctaaggaaagcaaa

SEQ ID NO: 901766 - DNA, 120 bp, Artificial Sequence
  ENSG00000228876_37 (sequence is synthesized)
gacacctagaatcatgtttacaaagcattcccttggcaagaggctgtctataggatccagatggtctgaccccaagtcagatgtcctttataaccttgcttttatggtcctctgaccagc

SEQ ID NO: 901767 - DNA, 120 bp, Artificial Sequence
  ENSG00000228873_0 (sequence is synthesized)
gcatcggctctgaccccagcacacacaagctccagctccttctcacacatagtggaactgcacagtcgctggtccccgcctcctcccggtgtgttggtccccgcgccctgccttccccct

SEQ ID NO: 901768 - DNA, 120 bp, Artificial Sequence
  ENSG00000255693_0 (sequence is synthesized)
gagcaaaacaagaagagctgtgtcaccaagttccataaaatctgggagcccaagcagcatatttgtgggatttgtctgacagaacgcaatggaaacagagcgtggcattcgctccatctc

SEQ ID NO: 901769 - DNA, 120 bp, Artificial Sequence
  ENSG00000255693_1 (sequence is synthesized)
ccccagcttctgcaaacaagcttctcttactctatgtctccaccaaatgaggtacttctgcatctacttctgctcacagaactgcctaggtggtccaccaagaaggaaaattgtttactc

SEQ ID NO: 901770 - DNA, 120 bp, Artificial Sequence
  ENSG00000255693_2 (sequence is synthesized)
tggtatcttcctaagaaactgtacacttaaattgttttgtcttcaaggagattcatagaaaggactctaacaagtttctgataactttaagattataccattaaactagcaggtaaagga

SEQ ID NO: 901771 - DNA, 120 bp, Artificial Sequence
  ENSG00000255693_3 (sequence is synthesized)
agattttcatgattcactgactgaggacaatcaaattcttcaccacgtagaacctagacattgggtctttggaaaggacatcagagaaagactgccattaagctccattggaagagacca

SEQ ID NO: 901772 - DNA, 120 bp, Artificial Sequence
  ENSG00000255693_4 (sequence is synthesized)
tatcaagttcttttctgcagcaaaccatcaggctctcaagtcttggatctatgtctctcaactcaaaagagctcctccagactcctggaactgtatacctattggagactctaaggtaaa

SEQ ID NO: 901773 - DNA, 120 bp, Artificial Sequence
  ENSG00000255693_5 (sequence is synthesized)
gctcaccagggaagatttcccccaggagcagttggcatcctagacttcaacagctttcgtaagattgtggatcaagacttctctgccatcatgaaagtcttatcttttccctttcttccc

SEQ ID NO: 901774 - DNA, 120 bp, Artificial Sequence
  ENSG00000255693_6 (sequence is synthesized)
gctttagctaagtcttatgctgtagtgaaaaaacagagcaattgttgggtttatgaagataagctagtttctactgaggaaagattccagtggcattcctgggggctcagtcttggtact

SEQ ID NO: 901775 - DNA, 120 bp, Artificial Sequence
  ENSG00000255693_7 (sequence is synthesized)
agcagggtactggtagtatggaatttgaaagtaatccataaaatgagaaaaatcttgggtttgaccaaccagtccccacagaggttcaggtgagtagaagtcatcttttgaaaacactta

SEQ ID NO: 901776 - DNA, 120 bp, Artificial Sequence
  ENSG00000255693_8 (sequence is synthesized)
ataaaacatcatgcagttttggatcctgtttccttagacactgccaccaaatacataaaggaaatttctcagaggaaagaaacatatgacatgttcataggagcagcaaaccattggttt

SEQ ID NO: 901777 - DNA, 120 bp, Artificial Sequence
  ENSG00000255693_9 (sequence is synthesized)
gcaggtaggcttggcttttccaaggtgttctaacctttatgctcttctaatggttctccagattactatgacttgtgttaacaagataatgacaacattggatacctctttaaatcagca

SEQ ID NO: 901778 - DNA, 120 bp, Artificial Sequence
  ENSG00000255693_10 (sequence is synthesized)
cctctttaaatcagcaaactgcagttcttaatcattatcacctcctgaacaaaaaccatgaccaacggtactcaaatgcttttgagctgcctgtaagggaggagaccacccctcatattg

SEQ ID NO: 901779 - DNA, 120 bp, Artificial Sequence
  ENSG00000255693_11 (sequence is synthesized)
ttatctatagattacagatatcgtataggaaagcactgtgaaaatccctgtcctgttttgttccgatctaattaccagtgcatgcaacccccagtcatgtacccctggcttgctcaatcg

SEQ ID NO: 901780 - DNA, 120 bp, Artificial Sequence
  ENSG00000255693_12 (sequence is synthesized)
gactatttccagaaaaatacttgtaagaattattggtctctgtttttttctatttgatctcatggaaacctctctctccgttgggaacttctccgttgattaaaacccctcttctcaaac

SEQ ID NO: 901781 - DNA, 120 bp, Artificial Sequence
  ENSG00000255693_13 (sequence is synthesized)
ccctgctgactatatgatctgccaactttgtctacctctttcttgttgtcatgatctttggtatgccccaaaactctttcttggaaaacaacaacaacaacaacaacaacaagacaactg

SEQ ID NO: 901782 - DNA, 120 bp, Artificial Sequence
  ENSG00000255693_14 (sequence is synthesized)
attgctttgtcattcaatcttgaaaacaaacaaacaaacaagaaaataacaaagcagtctctaacaataaggcaagattagaagtatccatttgagtccaggcatacaaaatgcttgtcc

SEQ ID NO: 901783 - DNA, 120 bp, Artificial Sequence
  ENSG00000255693_15 (sequence is synthesized)
ctagacttccatgggctccacccactcaatattctagcaaaaagacacaaactttgtttttgggaaagaatggataggcccttggaagaatagatggtggtttgtgacaaagtcagtcta

SEQ ID NO: 901784 - DNA, 120 bp, Artificial Sequence
  ENSG00000255693_16 (sequence is synthesized)
tgatggacttctggcctcctctcctgtgattttgggaatttctacatggaccctttggaagtttccatctggaaacttctccttgtagagagagagatattaaactaattgggcttattt

SEQ ID NO: 901785 - DNA, 120 bp, Artificial Sequence
  ENSG00000255693_17 (sequence is synthesized)
tatgtattaaattatatgggaagcattgtcaaataatgctaaacctccattgagttatatttgtatgattattttattaatatgtgcttcagaaattctatgaaattcatagaaatctaa

SEQ ID NO: 901786 - DNA, 120 bp, Artificial Sequence
  ENSG00000255693_18 (sequence is synthesized)
tagtcctggtgtaacactatcagtcttaattctagttgttatcttaaaatgttgtatgcagcaataaccaaatttccttgtcaattgcataatcattgtaattaactctcattagatctt

SEQ ID NO: 901787 - DNA, 120 bp, Artificial Sequence
  ENSG00000255693_19 (sequence is synthesized)
agatgttccataagtttctgcttccatcagcaatgtaaggaagtgcccaattcctcctacccccacattactgagaatcttatcaaattttttgatcttttctgattgggcaaggaaagc

SEQ ID NO: 901788 - DNA, 120 bp, Artificial Sequence
  ENSG00000255693_20 (sequence is synthesized)
atcttttgggaccatcaaatgcatcctgttcctgaaggagcagaaacagtgaaagcggacacttgtctcagctggcctctgtctctagcatgaaatccctggagagtgattttgcagccc

SEQ ID NO: 901789 - DNA, 120 bp, Artificial Sequence
  ENSG00000255693_21 (sequence is synthesized)
tcatgttgcaattttactgaaggtcagcaaagtggagaatgctgttctgggagaactggatgccttcagattgtgccagctctccaatcctgaagtcaaaatggaatgcatctctgctct

SEQ ID NO: 901790 - DNA, 120 bp, Artificial Sequence
  ENSG00000255693_22 (sequence is synthesized)
agaggtgttgtgaagattacagattataagggcaaaatggtggctgtatcagtgaacagtagtcaggattattttttactttccagtgactcaaacctctcctaaactgctctctcagtt

SEQ ID NO: 901791 - DNA, 120 bp, Artificial Sequence
  ENSG00000255693_23 (sequence is synthesized)
ttggctccgtcttcccatgataataataggtggtgtagagaggtgacagagtcaaggaacatggttcttgttttctgaagatggttctttcctcaagccctttgagtcttctttggtctt

SEQ ID NO: 901792 - DNA, 120 bp, Artificial Sequence
  ENSG00000255693_24 (sequence is synthesized)
tggagaaagaaacatcatctctcaacagaggattgttcctccgtttgatgatacgtgcatcctgccatctggaattcaattgactgttctgtcttggagccaagaatctagaaactctcc

SEQ ID NO: 901793 - DNA, 120 bp, Artificial Sequence
  ENSG00000255693_25 (sequence is synthesized)
aatcctgaagtcaaaatggaatgcatctctgctcttcctctgggcatcatctaatttttttgttcttgttttccttgtgctggaatctacaacaccctctcctagcccctcaaccagcct

SEQ ID NO: 901794 - DNA, 120 bp, Artificial Sequence
  ENSG00000255693_26 (sequence is synthesized)
ttcttctgcagagcaacttagttctaattagcaactacaaacctattcacctacatccaagagttcagtagtgtcttttaagtatgtaacaggcaattcttttacattttattgagatga

SEQ ID NO: 901795 - DNA, 120 bp, Artificial Sequence
  ENSG00000255693_27 (sequence is synthesized)
ctactttaaaaaaattggttgctacccagaactgtttagaacattgcttgctttaggtaagtgagtgaagcaagatgtgataacatagggctgggggactagagttgggtaatatggtag

SEQ ID NO: 901796 - DNA, 120 bp, Artificial Sequence
  ENSG00000255693_28 (sequence is synthesized)
cacatgattttgttacttgagattgcctgtaattgtagacatcagtgagcagggtgatatgaacctcacaggggctcttgaagttctgcttcttccctattccttaatgcaatacaatat

SEQ ID NO: 901797 - DNA, 120 bp, Artificial Sequence
  ENSG00000255693_29 (sequence is synthesized)
ttaggttcatcttttcaattttcctggagaaattaaatactgtgccataataaaaaaataagtaatttgaaagtaaaggaagggcatgaatggagagaaggcaggaaaacattctaggtt

SEQ ID NO: 901798 - DNA, 120 bp, Artificial Sequence
  ENSG00000255693_30 (sequence is synthesized)
ggaaaaaatggcagaagtaatgttgggacattggagtgatggtggaggtgggaatagagtctaggatctcttcatcccatactatgcatctatcttcacaaaattagtatggccaaatat

SEQ ID NO: 901799 - DNA, 120 bp, Artificial Sequence
  ENSG00000255693_31 (sequence is synthesized)
taaatcagctcatttctggttgggaaaagtagggtgaatgtgcctttctagctgtccttgagatgtaaatctcctgtaacatagcttccctagtggtcacctcaaaggctttgttctctc

SEQ ID NO: 901800 - DNA, 120 bp, Artificial Sequence
  ENSG00000255693_32 (sequence is synthesized)
caggatagatgctacagagtgggacagtacttggtgtgtgtgtatctcaatttttttttaacatgacaaattgaactaggggcaagagaaggatagacagaggagcctatgatggggtgg

SEQ ID NO: 901801 - DNA, 120 bp, Artificial Sequence
  ENSG00000255693_33 (sequence is synthesized)
tggatactaaatattttccaggtgtaaggagcagaggaggaaaagggagactgggtaaccctttttcagaccatcatttagtccattttatgttgcaaatattagcaaacctactccagc

SEQ ID NO: 901802 - DNA, 120 bp, Artificial Sequence
  ENSG00000255693_34 (sequence is synthesized)
gatcctgagtaagttacttaatcttggtgtctcagtttcttcattccagttaagtaaatatatttaaattaaattatattagttagtaaatgtaaagcacacagaaaagtgtttggcttc

SEQ ID NO: 901803 - DNA, 120 bp, Artificial Sequence
  ENSG00000255693_35 (sequence is synthesized)
tggtgagctttcaataagtgttaactattatttgttattattattttaacaaaaccaacctccaaaacctatgaagtcagtttacagaaagccaccaggaaaagggaaataagaagattc

SEQ ID NO: 901804 - DNA, 120 bp, Artificial Sequence
  ENSG00000255693_36 (sequence is synthesized)
tttactttgctgtcatttgatacacttagcattttaaatgactatatgtacaatattaaccatgcctttccacaaaactatgtgtgtgcatatgaattacagggctttcatttgaaactg

SEQ ID NO: 901805 - DNA, 120 bp, Artificial Sequence
  ENSG00000255693_37 (sequence is synthesized)
aactatctgtgtttgtagtcactttaatcatacaacaaacctacaaaatatttaagcataaattatcatgatgactaaatatggaaaagcttctgttaccaaaacctgcacccaaattga

SEQ ID NO: 901806 - DNA, 120 bp, Artificial Sequence
  ENSG00000255693_38 (sequence is synthesized)
ctgcacaggatgggtaattggatggtggtgtaaagaatgctcatgaggactaggctgctgctaattagatcttctatgctatttaaatgttctccaagcttcagggagtgccctgaaggc

SEQ ID NO: 901807 - DNA, 120 bp, Artificial Sequence
  ENSG00000255693_39 (sequence is synthesized)
agttggacattagccttgtggtttttgagggtaacctacagtttgtcagcacaggggtggaggtgagcaccatgggacttttcccaggctgctggttaacatactgtggtttcaatcctt

SEQ ID NO: 901808 - DNA, 120 bp, Artificial Sequence
  ENSG00000255693_40 (sequence is synthesized)
taagccaataaatggaggagagagaaagaaggcagactgaaattagaggaaaagagacaaagaaaggaaaagtggaagtaagaataatattcatgaaatgtcttctttgggccagatatt

SEQ ID NO: 901809 - DNA, 120 bp, Artificial Sequence
  ENSG00000255693_41 (sequence is synthesized)
tttttaggaactttcacatattgtgcttacatcaactctgtgggaaatgtatgattatactatcctcatttgtaacagacattgttgggtgcctatataacatataacagctatttttct

SEQ ID NO: 901810 - DNA, 120 bp, Artificial Sequence
  ENSG00000255693_42 (sequence is synthesized)
tcatttttttcttgctgatggcgcttttttttttttagtgtttacttcccatacaaaacttatgtctccatgtctccatccttcagcaataggggtaattctgaaaggtcattgttttgc

SEQ ID NO: 901811 - DNA, 120 bp, Artificial Sequence
  ENSG00000255693_43 (sequence is synthesized)
aattgcccttgaaaggaaattcttggacataacaacagataagattctagccaatgaaaggtgatgagaaggttgctgagaagtttctgagaaaggtttctttattctttaacaaatacc

SEQ ID NO: 901812 - DNA, 120 bp, Artificial Sequence
  ENSG00000255693_44 (sequence is synthesized)
ctggaaagagacaggccttctgctgctgttcatggttgtacctgcacaggatgcctgaaaaggagtaaccgtggggtcagaagaggagccagcgtgaggacaaagcagatacactgaagt

SEQ ID NO: 901813 - DNA, 120 bp, Artificial Sequence
  ENSG00000255693_45 (sequence is synthesized)
accacctgtcactgaatttttgtgcaagagtataaacattctcattgtttaatctttctgtgggagacgctttactatgtgtagcaaagtcattctaactgacataccattttccattgt

SEQ ID NO: 901814 - DNA, 120 bp, Artificial Sequence
  ENSG00000255693_46 (sequence is synthesized)
atgagaaaactgatgtacagaaaggttaagaaacttgcctgcatttgcatgcataatgaggagtggagagaacaggttgtgccttctaatatacaggcaagatatgtctcttttaaacag

SEQ ID NO: 901815 - DNA, 120 bp, Artificial Sequence
  ENSG00000255693_47 (sequence is synthesized)
cacatacagacacactccaaaatgacaatttccatcattttttaaaaattaaatgagacaaagactctaaaactatttaaataacatgtacattactgtcttgggatttatttttgtttc

SEQ ID NO: 901816 - DNA, 120 bp, Artificial Sequence
  ENSG00000255693_48 (sequence is synthesized)
agctctattgagatatagttgacaaataaaatggtatgaatttaaggtgtacaatgtgatgatttgatgtatgtatatattgtgaaaagaccaaaataaagtcagttaacatatctatta

SEQ ID NO: 901817 - DNA, 120 bp, Artificial Sequence
  ENSG00000255693_49 (sequence is synthesized)
aagttccataaaatctgggagcccaagcagcatatttgtgggatttgtctgacagaacgcaatggaaacagagcgtggcattcgctccatctcccccaggtccctcagctgcaggtctgt

SEQ ID NO: 901818 - DNA, 66 bp, Artificial Sequence
  ENSG00000255693_50 (sequence is synthesized)
tccctcagctgcaggtctgttggagttgctggacgtctactccagaccctgtttgcctgggtgtca

SEQ ID NO: 901819 - DNA, 120 bp, Artificial Sequence
  ENSG00000255693_51 (sequence is synthesized)
tttttttttttttgcctgaagtttttcttttaacagactggtgtcagaaatgggatctgaggtagaaccttagtgactcccaggaggaccaagtgaccaaatgaaggtacccaccaggcc

SEQ ID NO: 901820 - DNA, 120 bp, Artificial Sequence
  ENSG00000255693_52 (sequence is synthesized)
caactatgcccattgatctcttgtagcaactgagattgtgattgaattctctttcagatttcaagttccacaaacttgtattttgaactttctgagtttatttggacattttaaaatttg

SEQ ID NO: 901821 - DNA, 120 bp, Artificial Sequence
  ENSG00000255693_53 (sequence is synthesized)
gactgggcttggaagtcatgacagaaataggactggtttctgtagggaggcctcaggtgtctgactgggtcagaaagaaactgaactgggttcagtaggtaggtgaggttaccataagac

SEQ ID NO: 901822 - DNA, 120 bp, Artificial Sequence
  ENSG00000255693_54 (sequence is synthesized)
agagaatcataggttcctctggatccaaggagtctagaactcctgcatctggaactccagccaatttaatatataagaactctggacccagaactgtacttttcttaaaaaaaaaaaaaa

SEQ ID NO: 901823 - DNA, 120 bp, Artificial Sequence
  ENSG00000255693_55 (sequence is synthesized)
aggataaaccttaccaaaggtaacctagagttacagtggccacagtgggaaagttttaatctagacaaaattgttcacttgtgagctgcattagaaaagaggatccaaaatgcttcagaa

SEQ ID NO: 901824 - DNA, 120 bp, Artificial Sequence
  ENSG00000255693_56 (sequence is synthesized)
acaaaggaatccttttttttctaaactggtactcagagccttccaaaagattaaatgaatacaaaattgccactctaaaagactctttacaaaaggtgaacaggcacatgtctttatagt

SEQ ID NO: 901825 - DNA, 120 bp, Artificial Sequence
  ENSG00000255693_57 (sequence is synthesized)
agctataacagctgtagggaccaagaagatctccttgtatatgttttaaaccaaaaccaaggagtcccagatgaaagaaccctgtgccctaagacatttgcctttattataaactgctag

SEQ ID NO: 901826 - DNA, 120 bp, Artificial Sequence
  ENSG00000255693_58 (sequence is synthesized)
accattggaaaagaaagtatcaatttttacaccaggcatctgacggacccattccttttggcttggactgattcccgactagaggaagcctctaaaggcttcactcctgagacaataatc

SEQ ID NO: 901827 - DNA, 120 bp, Artificial Sequence
  ENSG00000255692_0 (sequence is synthesized)
gagttggggccaataataagctgttgtttgaagtcactaagctttcagatggcttgttatgcagcaagagagaaacaaaatagcctcgaagggtatctgggccacgacggcatttcagaa

SEQ ID NO: 901828 - DNA, 120 bp, Artificial Sequence
  ENSG00000255692_1 (sequence is synthesized)
tgagatcgtctgtgcggctacgtcttccgtaagaatccacgaacactccaaattctgcaaggtgtcaagagcacgtgggcattagcacagccaagagcaggggcatcagcgacacacatg

SEQ ID NO: 901829 - DNA, 120 bp, Artificial Sequence
  ENSG00000255692_2 (sequence is synthesized)
gtgatggaagaatgaggagcagagcccagggacccctggccagatgggactgactgtgaaaaccagaggccctctgctgagccagctctcagctttattaaaaatgagggactttttaaa

SEQ ID NO: 901830 - DNA, 120 bp, Artificial Sequence
  ENSG00000196668_0 (sequence is synthesized)
cgaggctcccacctgctctaagcgcttggtaccagggagggaatgggaggacgcttgcgggatagggaggcgggggctggaaattggcagggtgagagctggggaaactagtctgggacg

SEQ ID NO: 901831 - DNA, 120 bp, Artificial Sequence
  ENSG00000196668_1 (sequence is synthesized)
aaaggaaagataccagattgatcttgatcacctctgcctccccagcacctagtcttccttggcacatcgtgagtgctcgggtcaggctgtgccacatccacccagccttgcctggggtca

SEQ ID NO: 901832 - DNA, 120 bp, Artificial Sequence
  ENSG00000196668_2 (sequence is synthesized)
tttatcctacatgtactcagatcacgtgaactggtgatgggccacccatgtgcctgcctggagactcctattcacccttcagatcaatatcccccaaataaactcccagtcactctggca

SEQ ID NO: 901833 - DNA, 120 bp, Artificial Sequence
  ENSG00000196668_3 (sequence is synthesized)
ctctccaagcctcggattcctcccctgagaagtaaagaaaataactcctaaactgcctcccgaggcttgctggcaggatccaaggtgtccagagatgttaaaaaaaaaaaaaaaaaaaaa

SEQ ID NO: 901834 - DNA, 120 bp, Artificial Sequence
  ENSG00000196668_4 (sequence is synthesized)
aaaaagcccagtaaatgggaaagtgaggctgtcactgctgagtggcatcctgttttcaggagttctggttggtccccagagttctgctacacaaaatgttgacccaaatttgtaccccca

SEQ ID NO: 901835 - DNA, 120 bp, Artificial Sequence
  ENSG00000196668_5 (sequence is synthesized)
cccacaacacttggtgtcaagtgggagctcagaaactgaggggcaggcagatgcttttatgtgtattaggttgtcttttattgtattgtatagttcctttttttttttttttttttgaga

SEQ ID NO: 901836 - DNA, 120 bp, Artificial Sequence
  ENSG00000196668_6 (sequence is synthesized)
ttacaggcttgagccaccgtgcccagcctgtactatatatttctttattatttgacacgtgtatttgtttaatggccctctgctccaccagtatggaagctccaaaaggaaagataccag

SEQ ID NO: 901837 - DNA, 120 bp, Artificial Sequence
  ENSG00000196668_7 (sequence is synthesized)
cttgttgaggcccttggcttttgcataatacaccctttaaaaaaatgtatttaaagaggctggttcctatccatccgactggaggcatctcagtgcaagagcaaagctaagtcctgcaca

SEQ ID NO: 901838 - DNA, 120 bp, Artificial Sequence
  ENSG00000196668_8 (sequence is synthesized)
caactagacgcggcccctcccccacctgcctccccccttccttccctcgatcgtggagggagcgttctctgtgccttcccaagtccccgtgggggaccttctatgttggagtggggggag

SEQ ID NO: 901839 - DNA, 120 bp, Artificial Sequence
  ENSG00000196668_9 (sequence is synthesized)
ggggggagggtcatataacgaaggccagaaagaacaaattagataatcaaaagaattatagtaattgctttcactttcccccgcccgctcagcggattccctcccccgcccctcccctgg

SEQ ID NO: 901840 - DNA, 120 bp, Artificial Sequence
  ENSG00000196668_10 (sequence is synthesized)
tcccccaggttcctcctctcctctccccttgctcgcgcgttccctctcttcctccgttttctggtgtgctggaacgttcagcggaatatgatgaatgatcacctgtcacagcttgtttat

SEQ ID NO: 901841 - DNA, 120 bp, Artificial Sequence
  ENSG00000196668_11 (sequence is synthesized)
tataatgcaggcaatcaattacacatccccaatgctggccggcccgcaggaaatttatatgctcagcacaaaccaatgtgaaaatggaatctcatttgccaaatgtctttctccccgtac

SEQ ID NO: 901842 - DNA, 120 bp, Artificial Sequence
  ENSG00000196668_12 (sequence is synthesized)
gtgtacaactgacagtgccatcatttactgcctggctcaggtcacgttactctaaggctttatttatggtgttacgaagggcagcacaggaaaaggacaagggtgtctgtcagggatggc

SEQ ID NO: 901843 - DNA, 120 bp, Artificial Sequence
  ENSG00000196668_13 (sequence is synthesized)
actgtgttaaaaagtgggcgtgcaagggccgcattcccgggcagccgctgcaacctcagcccctgggcccttacctccgcagcctctcccagcatccagctacccagactccaaggcccc

SEQ ID NO: 901844 - DNA, 120 bp, Artificial Sequence
  ENSG00000196668_14 (sequence is synthesized)
aggcgagagccagctctcggtacctggagctccacaggtcccagaatcggggtggatcagagttcaaattctggttctgctactgtctaattgcgtgctgcagggactcaatctcttcat

SEQ ID NO: 901845 - DNA, 120 bp, Artificial Sequence
  ENSG00000196668_15 (sequence is synthesized)
ctgggaaatgggagtaataacccttggcaggaatgttgcgatcctctgggatgtcagaggtgttgatgaatgttagttcccgggacttcggaaagaggtcccgttggaagagatgtgaat

SEQ ID NO: 901846 - DNA, 120 bp, Artificial Sequence
  ENSG00000196668_16 (sequence is synthesized)
tggaattcacaccctatattaaaatctcctccaatcttcacctctgagacatggctgtctcaagactgttttgtttcccttcctggtggaattttgcacttttatgtcctgtgtagcagc

SEQ ID NO: 901847 - DNA, 120 bp, Artificial Sequence
  ENSG00000196668_17 (sequence is synthesized)
tcctggtggaattttgcacttttatgtcctgtgtagcagcaggtagtgtggctttgagaaaataaaatggccaccttgctccgctgttctttctttgtaaaaaaaaaaaaaaaaaaaaaa

SEQ ID NO: 901848 - DNA, 120 bp, Artificial Sequence
  ENSG00000196668_18 (sequence is synthesized)
caggccggtcaatccctcctcctctccaagcctcggattcctcccctgagaagtaaagaaaataactcctaaactgcctcccgaggcttgctggcaggatccaaggtgtccagagatgtt

SEQ ID NO: 901849 - DNA, 120 bp, Artificial Sequence
  ENSG00000264235_0 (sequence is synthesized)
gggcccgctgggcgcggctgggcaggccgctggaatttgacccgagtgggccgcgatcggccgaggatttggggtcccctttgacccaggcggggcgcgatccgcctaggatttggggtc

SEQ ID NO: 901850 - DNA, 120 bp, Artificial Sequence
  ENSG00000264235_1 (sequence is synthesized)
ccctggcgccgaaccctgagttgccagatgtagcaagtaaaagtacagttcttctaaatttgaatttcagacaagacaggttttagggttcgtctcatgtaatgttgagaaggtgagggc

SEQ ID NO: 901851 - DNA, 120 bp, Artificial Sequence
  ENSG00000264235_2 (sequence is synthesized)
ggcgcctgggcggattcttctccgttccagaatccctttctcttttcaaaccgcattacagcccgagttaaattctttaacctactcctctctgcttaccctcataaggtttacggccgt

SEQ ID NO: 901852 - DNA, 120 bp, Artificial Sequence
  ENSG00000264235_3 (sequence is synthesized)
atcaggctacggccgcagcctacggctgtttgattccccttttggccacaagaaagttttattcgaactacttgctttcctttatcaagaaaatggcaacgcacacacatacatgcacac

SEQ ID NO: 901853 - DNA, 120 bp, Artificial Sequence
  ENSG00000264235_4 (sequence is synthesized)
tccctcatctacctttctttgggagatacgactgaaaccaacaaaagccaagtttggtaaataagaagtttaaacaagtgcttctctgtacagctcatccacttcctcatctgtaaaccg

SEQ ID NO: 901854 - DNA, 120 bp, Artificial Sequence
  ENSG00000264235_5 (sequence is synthesized)
atcccccatggttgtcagcagctctctcaagtaatcttcctgtatggtgcctggagaataaagaacaagggatcagaatacatactattctgagggttaattacaaagaatatctatact

SEQ ID NO: 901855 - DNA, 120 bp, Artificial Sequence
  ENSG00000264235_6 (sequence is synthesized)
tgactaagcatgttctgtatgttacaaactataaacatgcaaatatatgaactacagggtgtccacctacttaaaacagcctcagcagagaagtgcctagaaaaatgcctagctgcttag

SEQ ID NO: 901856 - DNA, 120 bp, Artificial Sequence
  ENSG00000264235_7 (sequence is synthesized)
cagcactgctccgctctatcatttgctctatcattctgcctccacattcagcttctgatctcttgataagagagactaaacctatgcctaaacaaagtaataaaaagtatggttaaagaa

SEQ ID NO: 901857 - DNA, 120 bp, Artificial Sequence
  ENSG00000255528_0 (sequence is synthesized)
tgtagggtccccctcatctgccttacaccctggaagaaacagaggcctctgacctcactctttcctaaagagcagctctttcaatcaacagactttcactggaacacctaccttgcacca

SEQ ID NO: 901858 - DNA, 120 bp, Artificial Sequence
  ENSG00000255528_1 (sequence is synthesized)
actgtaatagagatcccccaaaaggaagaccacagagaagaggagtgagtgagaaggttccaagaaccaactctccctccaaactcaccagccaagtacctaaacccatatcagcataga

SEQ ID NO: 901859 - DNA, 120 bp, Artificial Sequence
  ENSG00000255525_0 (sequence is synthesized)
atcttcaggttcgagggcttccttgccgtctgccaagaacactcgtcttgcggccatgttcagattcagcttttctgtgcactcctccagcagctagaagaaagcaagagagtttctgat

SEQ ID NO: 901860 - DNA, 120 bp, Artificial Sequence
  ENSG00000255525_1 (sequence is synthesized)
tgcccgggttgaagtgtatctcatatttcccacagtgtaattaacaacattctactctggtgctttcaaagaaaaaaacaaaaacaaaaacaaaacccgagagatgtgttacattttaat

SEQ ID NO: 901861 - DNA, 120 bp, Artificial Sequence
  ENSG00000255525_2 (sequence is synthesized)
gttgacccactggagcactgacaggccttcagactcagattggaaactacagcaatggccctctgtctctcaggcctttgaaccacaccactggttttcctgggtctccagcttgtagat

SEQ ID NO: 901862 - DNA, 120 bp, Artificial Sequence
  ENSG00000255525_3 (sequence is synthesized)
gactaatcatgagacttcacagcctccataatcgggtccagagtctgggcaaagcttagctggatcctctgttcagaatctcacagagctgaaatcaaggtgtcagctggggctgcagtc

SEQ ID NO: 901863 - DNA, 120 bp, Artificial Sequence
  ENSG00000273786_0 (sequence is synthesized)
ttgtaacattaccatcttcctactattacaacttcctatgtctgtgaacaaattatgtatcaaattatgtaaagtccaactcttttcaacacaaaatacattttttatggctttcatata

SEQ ID NO: 901864 - DNA, 120 bp, Artificial Sequence
  ENSG00000273786_1 (sequence is synthesized)
aaaacttgagttttcacaaagtgatgtatgtttaagaaaagaacaaacagtgatgaacttaggctaaacttctatagacatgtgctttttttccatcaaaacatattacttccaataatc

SEQ ID NO: 901865 - DNA, 120 bp, Artificial Sequence
  ENSG00000273786_2 (sequence is synthesized)
ttgtggttgtcctgtcaaactgctagtttttaagccccttgtgagcaggggactatgtgtctattaattttatatactcccagaaatgagctcatgggtcttaaaaataagtagtgaatt

SEQ ID NO: 901866 - DNA, 120 bp, Artificial Sequence
  ENSG00000273786_3 (sequence is synthesized)
aaaatattggaaaagagcagccacaagttcagaaagtagttacattggcaccttggtgagagggaaagatatctgagtgagtctctagatgtagctgaaggtgtaatctcactttcattt

SEQ ID NO: 901867 - DNA, 120 bp, Artificial Sequence
  ENSG00000273786_4 (sequence is synthesized)
ttagtatgccactttatacatgtttctttaacatgtaataattgactgctgaccttacattgcaatacacttcactgtcctgtttacacctttttcaattaaatgttattttcacaagta

SEQ ID NO: 901868 - DNA, 120 bp, Artificial Sequence
  ENSG00000255521_0 (sequence is synthesized)
catgtgaactactaaaagtaaatctgcatggacttcttgcctggtgagttacacagaaaatgaaagtgattatcagtggctgtggcaagatgaaaggaaccatgccaggacttctgaggg

SEQ ID NO: 901869 - DNA, 120 bp, Artificial Sequence
  ENSG00000255521_1 (sequence is synthesized)
aaggaagagtgtttgggactgaaaaatccttgtctggatctagtcctcagccactcagaagctggcatgccatgactcaaagagccgcccgtctggaatgaagacagtgacccgtaactc

SEQ ID NO: 901870 - DNA, 120 bp, Artificial Sequence
  ENSG00000255521_2 (sequence is synthesized)
ccacctgaagagcaggtgcttggaaaatgctgccagtccgcaggaaaaagttgttactgctgctgtctgtgaccaagaggacactttatttcttgaaacaactgggggcaaactggctcc

SEQ ID NO: 901871 - DNA, 120 bp, Artificial Sequence
  ENSG00000255521_3 (sequence is synthesized)
cagataaggcttcagtccctactcatgtgaggaaaccagccctggtaggttccatgcacaagaatacaggacaaggagcagcttttttcacctcatgcaacctccagggatttcagcttc

SEQ ID NO: 901872 - DNA, 120 bp, Artificial Sequence
  ENSG00000255521_4 (sequence is synthesized)
cttttcttggagcaagaaagtgaagtgacgtggggagtcactaggaacaatgtctgtcttactgtgtttcatggaacctggaggttccttagagacccctcagaagcagacctagtggtc

SEQ ID NO: 901873 - DNA, 120 bp, Artificial Sequence
  ENSG00000255521_5 (sequence is synthesized)
agagtaaaagctgaggagtaagctgtgcctctccctccccaggccccatcccaaccacagaagttccacttgcatcagttttatataccagactattgcatgaaattacattttgacaga

SEQ ID NO: 901874 - DNA, 120 bp, Artificial Sequence
  ENSG00000255521_6 (sequence is synthesized)
tgattattcttaaaaaatatataaaaaccaacaaactaggccatatcaagtcctggtcccttctccattagtgcagtaaacaattccaccaaggaaaatataggtgtgaaagtgctttgc

SEQ ID NO: 901875 - DNA, 120 bp, Artificial Sequence
  ENSG00000255521_7 (sequence is synthesized)
aaactgtagaagggcatgcaaattctaggggctgtaattaggattattctccccagaagcggggattattttgtttgcttgcttcccgatagtttggtgagggactgaggtcatttgccc

SEQ ID NO: 901876 - DNA, 120 bp, Artificial Sequence
  ENSG00000255521_8 (sequence is synthesized)
ggaattcctggatcacctctttgagctcccctctcatccactttccattctaaagacaccctgcccacaccactggtcacacaaacccttcccaaactcttagatgcttgatatctgttg

SEQ ID NO: 901877 - DNA, 120 bp, Artificial Sequence
  ENSG00000255521_9 (sequence is synthesized)
tgtgttgcaccatctttctttctaagccaaaccatgggatgtgggaaactggaaaggaaacttgaattgatttgagttgacacgagattacactatttgggaagaatccagaattcaatc

SEQ ID NO: 901878 - DNA, 120 bp, Artificial Sequence
  ENSG00000255521_10 (sequence is synthesized)
agcagccttggaccgagaaagtccaggtctgagcattggctttcccccttatcagaggatgacttaacctctgggagtttcggtaatcccagccacaaaacaagggtaatcagacctttc

SEQ ID NO: 901879 - DNA, 120 bp, Artificial Sequence
  ENSG00000255521_11 (sequence is synthesized)
ccatagtttattatgagtagtcagtgaaagaagacatcaagaccatttcctggtgtgcctgcctcatggtgggactcaatgacctctaagctacctgagaacagggacatgtccttctgg

SEQ ID NO: 901880 - DNA, 120 bp, Artificial Sequence
  ENSG00000255521_12 (sequence is synthesized)
ggtgccagcacatactcagctctcagtccctaacatatacactgtgctccataaataagcattacataaatgtatgagggactgttattttttttccctcccatcaaagcgcataggggt

SEQ ID NO: 901881 - DNA, 120 bp, Artificial Sequence
  ENSG00000255521_13 (sequence is synthesized)
gtttcaggaatcacatgaactggtgggaggaaacacatagacaacttgacagtttctaaataaatgcaagcagtgacatcctatttggggtgactggttcagggagacttgagtgcaaac

SEQ ID NO: 901882 - DNA, 120 bp, Artificial Sequence
  ENSG00000255521_14 (sequence is synthesized)
agagcattactcactctggcagactagggttctttgctgaaatattggggactgatggcttctgactggtagtaataaatcctgttcctctcgagcaaagaaaagccaaatctaaaccaa

SEQ ID NO: 901883 - DNA, 120 bp, Artificial Sequence
  ENSG00000255521_15 (sequence is synthesized)
atgtgagcaggagtgtgaaatggaaagctgggagatcttgggctgaatcatggaattcaaggattacaaatgcagcaggtcacagactcttttaaagggacaatatttaattatttcacg

SEQ ID NO: 901884 - DNA, 120 bp, Artificial Sequence
  ENSG00000255521_16 (sequence is synthesized)
ggacagcttcccagaaaaggaatgatctggcacagtaaagaaaaaatgacattccagttaaaccttaactcttaaaaaaattcatccttagttcatattcacagtgtgaattctacacat

SEQ ID NO: 901885 - DNA, 120 bp, Artificial Sequence
  ENSG00000255521_17 (sequence is synthesized)
tttttgcccccattatcctcctttctgtgtaaacattaattcattttctcccatctttcctacccagcagatcttaaagagaggaagagtttgtaatattcttcaggggaagccttttga

SEQ ID NO: 901886 - DNA, 120 bp, Artificial Sequence
  ENSG00000255521_18 (sequence is synthesized)
agagtttattcagtgacgataatactcacaagaccctttttggatttgtggcccaacccacaagttatagttccttctctgaatatttcatccagattgtgaagagcagcttctggcagc

SEQ ID NO: 901887 - DNA, 120 bp, Artificial Sequence
  ENSG00000255521_19 (sequence is synthesized)
cacagttgtactatgtgacccctacttcccatgcccaggactgattcgaccccgtagtagacacctaaagcaatcctgatcagtcagagtctttgttcctgacatttgggattagagcat

SEQ ID NO: 901888 - DNA, 120 bp, Artificial Sequence
  ENSG00000255521_20 (sequence is synthesized)
ggctgaaggtttaagacacaaacttggaagctgtggggcagcaatacacctccatgaggacagagaagcaggggaaataagaataaaccagaagctcacagaaacgcaggaaatacttct

SEQ ID NO: 901889 - DNA, 120 bp, Artificial Sequence
  ENSG00000255521_21 (sequence is synthesized)
agagttctaacacttttcgggtttcttgttctagtccattcttgacacacttgtgcctcacagaagccaatggcaagaatgcagtcagatccttccaataaattccttttattctgttta

SEQ ID NO: 901890 - DNA, 120 bp, Artificial Sequence
  ENSG00000255520_0 (sequence is synthesized)
agatgctcggaaggacatggatagttcggggcatgaccacaccaccccttccaatccctggggcaccaaggctttgttaccaggccacagctgaaaaaaaatcagaagacctggtaatga

SEQ ID NO: 901891 - DNA, 120 bp, Artificial Sequence
  ENSG00000255520_1 (sequence is synthesized)
tatgacctgcctggccagtgttggcatctgaattttcaaccccagatgaggaatttctctttggaagcttttacaataaagatttaattcatctgatgaaatgagtttaagatgaaaaca

SEQ ID NO: 901892 - DNA, 120 bp, Artificial Sequence
  ENSG00000255523_0 (sequence is synthesized)
agtgacaaacctcttttggtttacaggcggtcagacactcagcatgactggcaaaacagattatctgtgtgtcagtgtacattttattcatccgtcgtttgggtcagggtctgcgggcag

SEQ ID NO: 901893 - DNA, 120 bp, Artificial Sequence
  ENSG00000255523_1 (sequence is synthesized)
acacaggtagctactgccctgttgtgagaagcaatacctcaattggtgccccatgtgaggagagctgtgtgaggacagtcaggggtctgcagaaacagaccttccgcagttggagcccct

SEQ ID NO: 901894 - DNA, 120 bp, Artificial Sequence
  ENSG00000255523_2 (sequence is synthesized)
ggaaagctgcaaaggaagcctgaggaatgcgacgggcccccaggaaacaaaggtgaagaaaaaccgcgtggtcaagtcagtgagtaactacaatcaaagacagccttgcagagccccagg

SEQ ID NO: 901895 - DNA, 120 bp, Artificial Sequence
  ENSG00000255523_3 (sequence is synthesized)
ggagtcaaggggaggagcaggctggcaaggagagagatgccccaggtctgaaggagtgatgtagaagacaggatctgttggctgggaacctaaggatgattcacactcacttcctagaac

SEQ ID NO: 901896 - DNA, 120 bp, Artificial Sequence
  ENSG00000255523_4 (sequence is synthesized)
tgaatcaaaaggaaaatcccacctctccacaatcaagtaacaaaaggatcagaggctactccttttgcaaatcatgccaccaattcccactttccactgcattgcagatgaaaaacggaa

SEQ ID NO: 901897 - DNA, 120 bp, Artificial Sequence
  ENSG00000253592_0 (sequence is synthesized)
tcatctcctgcaggtctagtcagaccctcctgcatagcaatggaaacacctatttgtattggtaactatagaagccaggcgagtctccacagctcctgatctatggggtttccaatgggg

SEQ ID NO: 901898 - DNA, 120 bp, Artificial Sequence
  ENSG00000253592_1 (sequence is synthesized)
agtcccagacaggttcaatagcagtgggtcaggcacatattttaaactcaaaattagcagggtggaggctgaggatattcgactttattaatacatgcaagctacataatatccttgcac

SEQ ID NO: 901899 - DNA, 120 bp, Artificial Sequence
  ENSG00000253593_0 (sequence is synthesized)
gagtttgaaccatggtcctgccacttcctgataatggcacctcagatgcagcctacatcaaggaagctgcctgctgttaggggaacaggatacctgcagaggctccggtcctgacaatgc

SEQ ID NO: 901900 - DNA, 120 bp, Artificial Sequence
  ENSG00000253593_1 (sequence is synthesized)
cttcagctccacctcccaccaaagacctgtgtggtgtcagcagcagccccatttgcagaacttcccagagcaggttatctgcaatggaagcagtgatgcagcacccacatgtcccagagg

SEQ ID NO: 901901 - DNA, 120 bp, Artificial Sequence
  ENSG00000253593_2 (sequence is synthesized)
agtctggccctttgcgtatctgggctgctgacccaataaaatggagcccctgtgacctgctttcagggctttcacaactggtcccgcatgacgaccctgcctgacaaccccaacttggct

SEQ ID NO: 901902 - DNA, 120 bp, Artificial Sequence
  ENSG00000253593_3 (sequence is synthesized)
tcagccttcctcttgctggatgacttcagcaagtcagacactctccatgcatgtgccttctcgtttataaaacaaagacaggattattgtgagaatcaaataaaataatggatataagca

SEQ ID NO: 901903 - DNA, 120 bp, Artificial Sequence
  ENSG00000253590_0 (sequence is synthesized)
cgcaaaagccaggccaggcccctgtgctggtgatatataaagatggtgagcggccctctggaatccctgagcgattctctgggtccacctcagggaacacaaccgccctgaccattagca

SEQ ID NO: 901904 - DNA, 120 bp, Artificial Sequence
  ENSG00000253591_0 (sequence is synthesized)
tgctcatagggccggagcaggagaccctaacttcctggctcccgcactccccaggcgcaccacatttcagcacgacggacagcgcagcactggggcgcgactggggaggcggggaccaat

SEQ ID NO: 901905 - DNA, 120 bp, Artificial Sequence
  ENSG00000253591_1 (sequence is synthesized)
accacgctgtttcagcccggctttttcaaatctctcgggtctccgccctcatttccgtgcattttcgaaacgactgtcacagcaaccgaagccacaaaaacacattcacagaaaacgggg

SEQ ID NO: 901906 - DNA, 120 bp, Artificial Sequence
  ENSG00000253591_2 (sequence is synthesized)
aagctccagggttcgcttaccgtctgacaagtcaatcagtccgaggcaatttctccaaaggtttaaccagtccctaatcttctgctagctgagtgtaaccatcactggcaacatctcatg

SEQ ID NO: 901907 - DNA, 120 bp, Artificial Sequence
  ENSG00000253591_3 (sequence is synthesized)
gcatattctctcggcagctcagagaaaacgtgtgtcagtgtagaccatttgaaagacatacagaaagagccccattgctttagatcgcagatagatggagagatgaaagatgctttttca

SEQ ID NO: 901908 - DNA, 120 bp, Artificial Sequence
  ENSG00000253591_4 (sequence is synthesized)
aagggacaacaatttgtcttcacttcccagtgaaaaacccaacaagctggtctggaacatatgtggtccctgctttgacacagtgaaatgtccctggaaactgtaccaccaggaaagcta

SEQ ID NO: 901909 - DNA, 120 bp, Artificial Sequence
  ENSG00000253591_5 (sequence is synthesized)
tggaaatcagcaaggcagttgctaaacctttgtcagcttgaaatcagccatggtagggtgttgacaccacagaaatgctacacatcagtgtttcttcaccctccccactgtctctgaatt

SEQ ID NO: 901910 - DNA, 120 bp, Artificial Sequence
  ENSG00000253591_6 (sequence is synthesized)
acgctaccattccagatcccatctgcccagaagaaaacctgagaaattcacctgcccagaggtttttctgacttactgtgtttcctctcctctggggccctagcaagtgtaataattaac

SEQ ID NO: 901911 - DNA, 120 bp, Artificial Sequence
  ENSG00000253591_7 (sequence is synthesized)
ccactgggcttaatgggattttaggcattcacatatccagatatgcggaactaaattagaagcaggaagacttccatgtttctggaaagaatgatgcaagaaggcagagtagtggttccc

SEQ ID NO: 901912 - DNA, 120 bp, Artificial Sequence
  ENSG00000253591_8 (sequence is synthesized)
actgtctgctttgctgttactgtgtaaagacttacattcttccaagaattctgacttcacagacagctccccttctggattgtctcctaaccttgaactttaggagcaactgtgtctcag

SEQ ID NO: 901913 - DNA, 120 bp, Artificial Sequence
  ENSG00000253591_9 (sequence is synthesized)
gaccctttgacatttcagtaccagaaatcaaatgtcgcttcagaagcccggccctccaaagatgtcacaatccaacctcccacacgcacaggagaacagcgcgtttggagggatgaagta

SEQ ID NO: 901914 - DNA, 120 bp, Artificial Sequence
  ENSG00000253591_10 (sequence is synthesized)
actcaccaaggtcacgcagtcctgcagagccaggatcccaacccaggaagtcctcagagccggccctcgccaccgactccctggaggtatgtccatttcactcaaatacccaacagattg

SEQ ID NO: 901915 - DNA, 120 bp, Artificial Sequence
  ENSG00000253591_11 (sequence is synthesized)
agggtttaaatgtaatatgcccattttttgagacgtccgttctgttcagagtttgatatcttattttataaagtggaggtgatcgtggagccagtctcagggctgggtgttgtgggggcg

SEQ ID NO: 901916 - DNA, 120 bp, Artificial Sequence
  ENSG00000253591_12 (sequence is synthesized)
tggatgaggtgaggcgggtgaacacggtatttgcgctcagtaattgctgggctgcctgtaactctaagcagagtcgaatgtcattctggaggggaaattaaagatgatctaagcagaagg

SEQ ID NO: 901917 - DNA, 120 bp, Artificial Sequence
  ENSG00000253591_13 (sequence is synthesized)
ctgagtggttctcctggtaaggtactgtctaaacctcatttggaaaaactaatttgataggggcctcattttccagaatgttctgctgcagtcggtattaaaataatgccaataattgca

SEQ ID NO: 901918 - DNA, 120 bp, Artificial Sequence
  ENSG00000253596_0 (sequence is synthesized)
gaaaggaagttccggtcgacaagcaaagcaacaggaaaaggatctatgagctttcattagaagatgctactatgacattagtggactaattccacaaatttgactaactgctgtagatta

SEQ ID NO: 901919 - DNA, 120 bp, Artificial Sequence
  ENSG00000253596_1 (sequence is synthesized)
gagaatagtcttgtataaacaaaattttagctgagcacatgactgctgagaataaagactgtatttcctaggctctattgcagcaaaacatggtctcctaactatcttctaacaagggga

SEQ ID NO: 901920 - DNA, 120 bp, Artificial Sequence
  ENSG00000253596_2 (sequence is synthesized)
ctgacctggaccatgaagaatggggccacgccttaggaacagctgggccatgaacttggggaaaattgagcttctaaagacactgaggagcagaacccacaccaacttgggtctgcaaac

SEQ ID NO: 901921 - DNA, 120 bp, Artificial Sequence
  ENSG00000253596_3 (sequence is synthesized)
ctccaaacttttacttgaaaaggaaaaaaaggatcttgtgtaaggcactgttatttggtgctttctggatgctattgtcttaacctatcctcatcaatacatcaatcttgtaaaatatag

SEQ ID NO: 901922 - DNA, 120 bp, Artificial Sequence
  ENSG00000253595_0 (sequence is synthesized)
ggtagataggaatgtctgggttaagataatgggttgtgcagaccgaggtttcatcatgcagatgaagcctccaggcagcagactgcagagagaatggatgggagatgtttattatcagac

SEQ ID NO: 901923 - DNA, 120 bp, Artificial Sequence
  ENSG00000253595_1 (sequence is synthesized)
tgaaagactgttctgccagtcattccaaaagggaggggggataacaagcacggtggcttcaggtccctccgcattatcgcatgtgccagtgctttgctcctttttacacctgagtaatcg

SEQ ID NO: 901924 - DNA, 120 bp, Artificial Sequence
  ENSG00000253595_2 (sequence is synthesized)
tccactgtggagtcatcctttcagctgctgagagatgcgtgggcagtttccacctgcagccatcaattcacaaatcctacaattctaagctctcagaacccttggatctgaaggttctca

SEQ ID NO: 901925 - DNA, 120 bp, Artificial Sequence
  ENSG00000253595_3 (sequence is synthesized)
aatgctaaggtttctagatgttagcagacgaaggtgtcaagacgcatgggatctacgatgcagagttctgagtggggatatgcgtcccccaccccgactcaccccacgacacatatcagt

SEQ ID NO: 901926 - DNA, 120 bp, Artificial Sequence
  ENSG00000253595_4 (sequence is synthesized)
aacagcctctgcaactccgccttggtgcccccgcacgttccaggggcagccacactgatggattgctcagaacgggctggagccgcatctccacttctgccccgacagttcctgctgcag

SEQ ID NO: 901927 - DNA, 120 bp, Artificial Sequence
  ENSG00000253595_5 (sequence is synthesized)
cagatgcccttccagatgcaaactcctacgcatccttcaaaacccagctaaatgtcacttcctccggaaagccttccccacctctctagcaggcagttgagcccagcttacatttccgac

SEQ ID NO: 901928 - DNA, 120 bp, Artificial Sequence
  ENSG00000253595_6 (sequence is synthesized)
aggccctcactgcccgggattgcagctgcgggctccttgagggcagggattgtccctcattcatcctgattccatgccaaggcttatagtaggtgctcaataaatgcttgctgaatgata

SEQ ID NO: 901929 - DNA, 120 bp, Artificial Sequence
  ENSG00000276454_0 (sequence is synthesized)
cacctcagcctcctgagtgagtagctgaggctgcacgtgtgtgccacaacaaccagctaataagaaagcgtttccaactgtttttttgtcttccactcatgccttgcaggagatccatag

SEQ ID NO: 901930 - DNA, 120 bp, Artificial Sequence
  ENSG00000276454_1 (sequence is synthesized)
tagtagcagaaggagttgctccattctttctggaatccattaaccaaaagaaaatccatgttctttaatcatgtcacataacaaggagtttgttgcccatagataagagggagaaaggtg

SEQ ID NO: 901931 - DNA, 120 bp, Artificial Sequence
  ENSG00000276454_2 (sequence is synthesized)
gtaaacataacaggacaaatatttaaaatggcagaagaaaaattagggttttagaaacaagaagaaaagggctaaatcggcattttaaaaataaatggtcttagactgctgcaccaaaca

SEQ ID NO: 901932 - DNA, 120 bp, Artificial Sequence
  ENSG00000250950_0 (sequence is synthesized)
aggtggtgcaaacaaggctcactgcagccttgaccttctggctcaaggaatccttccccgtcagcgtccccggtagctaggactacaggtgcgcaccaccacacccaggagttcaaggct

SEQ ID NO: 901933 - DNA, 120 bp, Artificial Sequence
  ENSG00000250950_1 (sequence is synthesized)
gcactccagcctgggcaacacagcgagaccctgactccacaaataaataaatcaacatcatatgatctgtaccagggtataggcaggtgctatgatccccacttttcatcctcaactcta

SEQ ID NO: 901934 - DNA, 120 bp, Artificial Sequence
  ENSG00000250950_2 (sequence is synthesized)
gtggagagaatcttatctcttttgagagctaatataaaaagaattcctcctaggcataaaaatattgtgacatcagttacttaggctaaacatgcctattatgctaagtgagttattaac

SEQ ID NO: 901935 - DNA, 120 bp, Artificial Sequence
  ENSG00000250950_3 (sequence is synthesized)
aataaatactttaactctgtgccatgttacttatcataatctgatttataatttgttttaaccttaggttatatataccttgaagccatttatattttggtatacttgtaataattacta

SEQ ID NO: 901936 - DNA, 120 bp, Artificial Sequence
  ENSG00000255355_0 (sequence is synthesized)
gattgtcacaggatatagctttgaagaatcctgcgcttagcctgggctgggaaagatgagattcccgggcagtttttccaacgtccgactcactcctcaggctgctcgggggtctccccg

SEQ ID NO: 901937 - DNA, 120 bp, Artificial Sequence
  ENSG00000255355_1 (sequence is synthesized)
ttgcaatctgcgccttgcgcagggaaaaaagaatggaaagttgctggtcttcgaaaggggcggacttcgtcgccactttcagcggctcgtcgcctgctgaatccacagcagcaatgttca

SEQ ID NO: 901938 - DNA, 120 bp, Artificial Sequence
  ENSG00000255355_2 (sequence is synthesized)
cttcaccgggagaagattctatcttaaggaaactcttttctcatgcataagaagcacctccttacctgttaaaagtttaatcatgagattgcaggaattcagtcacatcttcaggctcca

SEQ ID NO: 901939 - DNA, 78 bp, Artificial Sequence
  ENSG00000255355_3 (sequence is synthesized)
aggctccacttctaattctagttctcttggtattccaccgcacctgcagtgacttcctccaccgaagtcttgaaccgt

SEQ ID NO: 901940 - DNA, 120 bp, Artificial Sequence
  ENSG00000255355_4 (sequence is synthesized)
atacatataggttttcatacacaggaaacagaatctctttgaccttctcttgccttccttttacctgccttcctttcacctaccccaaagcaggactctaatcttctgcttttataattg

SEQ ID NO: 901941 - DNA, 120 bp, Artificial Sequence
  ENSG00000255355_5 (sequence is synthesized)
ataagactcatttcagagagggtcccaacccatggcctgggggaaggaatgctgatataatgaagcttccataaaaatccaagaggacagcttcctgatagctgaacaagtggaggtttc

SEQ ID NO: 901942 - DNA, 120 bp, Artificial Sequence
  ENSG00000255355_6 (sequence is synthesized)
tggggaatggctacctggggagggcatgggagctccgtgtcccttcctccatacctctccctgtgcatctcttcatctggatccttcgtgatatcctttataataaactggtaaatataa

SEQ ID NO: 901943 - DNA, 120 bp, Artificial Sequence
  ENSG00000278996_0 (sequence is synthesized)
tgtttccacagtactttcagtttctcttcgttttgtttttcttttatttttcttgctcctctttctacacactgaagttgctgttgttttacatttaccttttatttatttgtagttttt

SEQ ID NO: 901944 - DNA, 120 bp, Artificial Sequence
  ENSG00000278996_1 (sequence is synthesized)
gaggcaggttggagtgtaagaatgcaatctcggcttacagccgcctcgactttccaggactccctcaggtgatcttcctatctcagccttccaagtggctgagactacaggaatcactta

SEQ ID NO: 901945 - DNA, 120 bp, Artificial Sequence
  ENSG00000278996_2 (sequence is synthesized)
ggctgagactacaggaatcacttaattctgtgatgtcgaagctgaagtgagccgtgatgatgccttgccctccagtctgagtgtttcagaaggtggagtttcgctcttattgcccaggct

SEQ ID NO: 901946 - DNA, 120 bp, Artificial Sequence
  ENSG00000278996_3 (sequence is synthesized)
tcaccgcaacctctgccgcctgtgttcaagagattttccagtcttcaccctttcgagtagctgaaaccacaggcaaacacctccaggcctggctaattttttttttttcatagagactag

SEQ ID NO: 901947 - DNA, 120 bp, Artificial Sequence
  ENSG00000278996_4 (sequence is synthesized)
gtagctccataatggtcaggctggtctagaacacccaacctgaggcgtaccacccaacttgaccacccaaagtgctgagattaaaggcgtgagctccgcgtctggccataacatcttatc

SEQ ID NO: 901948 - DNA, 120 bp, Artificial Sequence
  ENSG00000278996_5 (sequence is synthesized)
ctatagaagcccagagaggttaggcgtcatctcacgtgtcgaggtgatctcgaacttttaggctccagagatcctcccgcatcggcctcccggagtgctgtgatgacacgcgtgggcacg

SEQ ID NO: 901949 - DNA, 88 bp, Artificial Sequence
  ENSG00000278996_6 (sequence is synthesized)
atcggcctcccggagtgctgtgatgacacgcgtgggcacgacggagtttcactcttgtcgcccagggtggagtacgatggcggctctc

SEQ ID NO: 901950 - DNA, 120 bp, Artificial Sequence
  ENSG00000278996_7 (sequence is synthesized)
cagagatgagccatcgtgcccggctaatttttctatttttactacagatggggtttctccatcttggtcaggctggtcttcaacttccgaccgttggagaatcttaactttcttggtggt

SEQ ID NO: 901951 - DNA, 90 bp, Artificial Sequence
  ENSG00000278996_8 (sequence is synthesized)
atcttaactttcttggtggtggttgctttccttctcctccccccccacccccccttgtcgtcgtcctcctcctcctcctcctcctcctcc

SEQ ID NO: 901952 - DNA, 120 bp, Artificial Sequence
  ENSG00000278996_9 (sequence is synthesized)
ctctttcatttctttcagctgggctctcctacgtgtgttgctctgttgctcacgctggtctcaaactcctggccttgacgcttctcccgtcacatccgccgtctggttgttgaaatgagc

SEQ ID NO: 901953 - DNA, 120 bp, Artificial Sequence
  ENSG00000278996_10 (sequence is synthesized)
cggaaacacggagggagcttggctgagtgggttttcggtgccgaaacctcccgagggcctccttccctctcccccttgtccccgcttctcccccagccgaggctcccaccgccgccctgg

SEQ ID NO: 901954 - DNA, 120 bp, Artificial Sequence
  ENSG00000278996_11 (sequence is synthesized)
cattttccataggagaggtatgggagaggactgacacgccttccagatctatatcctgccggacgtctctggctcggcgtgccccaccggctacctgccaccttccagggagctctgagg

SEQ ID NO: 901955 - DNA, 120 bp, Artificial Sequence
  ENSG00000278996_12 (sequence is synthesized)
cggatgcgacccccacccccccgtcacgtcccgctaccctcccccggctggcctttgccgggcgaccccaggggaaccgcgttgatgctgccttcggatcctccggcgaagacttccacc

SEQ ID NO: 901956 - DNA, 120 bp, Artificial Sequence
  ENSG00000278996_13 (sequence is synthesized)
ggatgccccgggtgggccggttgggatcagactggaccaccccggaccgtgctgttcttggggcacacagatgagacgcacgagagggagaaacagctcaatagataccgctgaccttca

SEQ ID NO: 901957 - DNA, 120 bp, Artificial Sequence
  ENSG00000278996_14 (sequence is synthesized)
tttgtggaatcctcagtcatcgacacacaagacagacggagtctcgctctgggcggggcgaggcgaggcgaggcacagcgcatcgctttggaagccgcggcaacgcctttcaaagcccca

SEQ ID NO: 901958 - DNA, 120 bp, Artificial Sequence
  ENSG00000278996_15 (sequence is synthesized)
ttcgtatgcacagagccttattcccttcctggagttggagctgatgccttccgtagccttgggcttctctccattcggaagctttgacaggcgcaaccccacccagaggctggctgcggc

SEQ ID NO: 901959 - DNA, 120 bp, Artificial Sequence
  ENSG00000278996_16 (sequence is synthesized)
ttcagcctttaaaagcgcgggccctgccacctttcgctgtggcccttacgctcagaatgacgtgtcctctctgccgtaggttgactccttgagtcccctaggccattgcactgtagcctg

SEQ ID NO: 901960 - DNA, 120 bp, Artificial Sequence
  ENSG00000278996_17 (sequence is synthesized)
cactgtagcctgggcagcaagagccaaactccgtccccccacctccccgcgcacataataactaactaacaaactaactaactaactaaactaactaaataaataaaatctctacacgtc

SEQ ID NO: 901961 - DNA, 120 bp, Artificial Sequence
  ENSG00000248774_0 (sequence is synthesized)
cttttaatcaagagttcctccagaatgaactcaggatttgagatggatccttcctggctcatgtttgatattcttgtcagaaacccttcttgccctgattggaaactcaacttaccctgc

SEQ ID NO: 901962 - DNA, 120 bp, Artificial Sequence
  ENSG00000248774_1 (sequence is synthesized)
agcaaaggtattggagaaaagtaaatcccaaatgtcagtggacaatttttctctagttggaagactcctttgcaatcctagaagtaggtatggacagagggcactgggaatgccagtagg

SEQ ID NO: 901963 - DNA, 120 bp, Artificial Sequence
  ENSG00000248774_2 (sequence is synthesized)
gccttgggatgttccatattgtcatttctttttcaagccatacaaagttcaactttatagcaaatggcagcacataaattcatttctgagtagtaaaagtattccccatacaggtgacaa

SEQ ID NO: 901964 - DNA, 120 bp, Artificial Sequence
  ENSG00000248774_3 (sequence is synthesized)
gtccatcattaccatcctatagatttcatcacaagctcttgaaatatatactgagaaatgaaagaggcactaaatgtgttgaaattcacctttcaaaaaagcagcatgactgtgaaggaa

SEQ ID NO: 901965 - DNA, 120 bp, Artificial Sequence
  ENSG00000248773_0 (sequence is synthesized)
tggtttgtggatcatttatctaataggtattcaatatctaaagacaatccattcataaaactggtggaatctgtaggtaattaagtgggtgttgtagttgtgattttattttatgtcaga

SEQ ID NO: 901966 - DNA, 120 bp, Artificial Sequence
  ENSG00000248773_1 (sequence is synthesized)
tttctgtttttttagtaggtgctgcccccttaagtagaactaaggaaattgtattaggaagagtactgaataaatataacactacagtttctcatttactagtcaccagggagactgata

SEQ ID NO: 901967 - DNA, 120 bp, Artificial Sequence
  ENSG00000248773_2 (sequence is synthesized)
tgaccattgcctttaaatgatcatagggaatttgacttacattcaccctatcacttcttgggagaatatgagtggggttgaaagagaatccctcaggtgcacagaattttagttaatcat

SEQ ID NO: 901968 - DNA, 120 bp, Artificial Sequence
  ENSG00000240562_0 (sequence is synthesized)
cccggtctagtagggagggcttcctggagtagggacagccacattcatcccggctgtggactgaactgtgtccccttcagatgtcatatgttgaagcccttgcctccactgtgactgcat

SEQ ID NO: 901969 - DNA, 120 bp, Artificial Sequence
  ENSG00000240562_1 (sequence is synthesized)
ttggagactgggcctatcaggagataagagatcacatggagacacagcaagaaggcagctgtctgcagccaggaagagagccctcagcagaacctgcgcctgccagcaccatggtcttgg

SEQ ID NO: 901970 - DNA, 120 bp, Artificial Sequence
  ENSG00000240562_2 (sequence is synthesized)
gcgcttcctgcatggtggacagtgcctgcctgctcacaactgggaccactgcctcctctgcttctctgtagccctggccctagctcgtggaaggagcaacagggccatatttgagtttca

SEQ ID NO: 901971 - DNA, 120 bp, Artificial Sequence
  ENSG00000240562_3 (sequence is synthesized)
gagcactgctcaggggggcagaaggcagggtcagattcttctggaagaggtcggaggtttcccagccagaacaaaactgggatgagaagctggggttcctcccacccctctccaggacct

SEQ ID NO: 901972 - DNA, 120 bp, Artificial Sequence
  ENSG00000240562_4 (sequence is synthesized)
gtgaatgtccctcccctgtggagctggaaagccagcccgaaggcacctgccccgtgggaggacacacccctgagcctggatgcctcatctcctgcagctttggaattctagcccctaccc

SEQ ID NO: 901973 - DNA, 120 bp, Artificial Sequence
  ENSG00000240567_0 (sequence is synthesized)
caaacaaaaaattcctacccgagaagactcatgactctggaacacagtgagtgcagctgttatggtaagtgaaacagctaatgatctggcagaaccttcaagatacaaggtaaagagaaa

SEQ ID NO: 901974 - DNA, 120 bp, Artificial Sequence
  ENSG00000240567_1 (sequence is synthesized)
aaagccaggcgcagggtagtccacttgctgtcttttgtgtgaatctatctgtgtttttaaatgcagagactaaaggaattggcggtaggtaggcatcgcctccagggagtggaattggat

SEQ ID NO: 901975 - DNA, 120 bp, Artificial Sequence
  ENSG00000240567_2 (sequence is synthesized)
tactgggaggcacagagagaggtgtactttcttttcactgcaaaccttttgtgcatccagccttctgccttaaaaaaaaaaaaatctgcatatggatcattcttcaaacaacagaaaaag

SEQ ID NO: 901976 - DNA, 120 bp, Artificial Sequence
  ENSG00000240567_3 (sequence is synthesized)
gaaaccaaataaaaaaaaatctacccaaagaaaattttttcgtaataaaaattgttccaagcctcagagctggctcccatgttttgagcaacatcagctattcatgtattcagctgaagc

SEQ ID NO: 901977 - DNA, 120 bp, Artificial Sequence
  ENSG00000240567_4 (sequence is synthesized)
tcatccttaggtttttgatcaagctgtgccatgtttttcatttcctttgatagggtttctcagttcccgtcttgtcagtgaagtggtttttagttgaactgttatttgcaatagatgaaa

SEQ ID NO: 901978 - DNA, 120 bp, Artificial Sequence
  ENSG00000240567_5 (sequence is synthesized)
gtaaacagtgcaagacattaattgtggtgtttctactttaaaaacaatcagataaaattctagaacaagatttgctgttcggtaggaagatcagattcttttccctatacacttaatgct

SEQ ID NO: 901979 - DNA, 120 bp, Artificial Sequence
  ENSG00000240567_6 (sequence is synthesized)
acgtattcatgctccagtgcagactgctggcaaggtaaagaggctgacaaccagagttgtaattaggtcctgcttgtttcctttagagtttacagtccagaaagttcatggaaataatga

SEQ ID NO: 901980 - DNA, 120 bp, Artificial Sequence
  ENSG00000240567_7 (sequence is synthesized)
gagtcttatagcattttgttatgcattgaaatgtattctcatatgttaaagtcctaatccccagtactttagaatgtgacctgatttggaaataaggtcattacagatgtaagtaaagat

SEQ ID NO: 901981 - DNA, 120 bp, Artificial Sequence
  ENSG00000240567_8 (sequence is synthesized)
gaggtcacactggagtaaggtgggctataatccaatatgagcatgtccttgtagaaagggaaaatatttacacagccacatacacagggagaactccatgtgaagatgaaggcagagacc

SEQ ID NO: 901982 - DNA, 120 bp, Artificial Sequence
  ENSG00000240567_9 (sequence is synthesized)
agagtgatggttctaccagacaaggaatgctgaagattggcagcaaactaccacatgctaggagagggtaatgacacagattcttccttgcagcaatcagaagaaaggacccctgctaac

SEQ ID NO: 901983 - DNA, 90 bp, Artificial Sequence
  ENSG00000240567_10 (sequence is synthesized)
caagcttgtttctcctgggagcgctcttccgaggatatttgggctgtctccggagtcgcagtgtcttcggccgccggaaggaagaagagt

SEQ ID NO: 901984 - DNA, 120 bp, Artificial Sequence
  ENSG00000240567_11 (sequence is synthesized)
aaacgtctgcctgctctgagctgtgttggaaacctgaggaggaagttgccattaatttctgcaagaaaaaaatgaaagtgtaccagtcagagttgttaaagcagaaaaggattttactga

SEQ ID NO: 901985 - DNA, 120 bp, Artificial Sequence
  ENSG00000240567_12 (sequence is synthesized)
aagaacataggattgctcccagagtttccaggagggctgatgaacaagccttgagaagccagcaggaagaatggcaggccaggcaggcagagccatggccaagactgtaccacagatcaa

SEQ ID NO: 901986 - DNA, 120 bp, Artificial Sequence
  ENSG00000240567_13 (sequence is synthesized)
cctcagggaagcacactgatgcctctacagggactcagacatctcagtttcaatcagtaccaccaatgccactgaacactggacttggctgctgctgccttcaccactgtaatggattct

SEQ ID NO: 901987 - DNA, 120 bp, Artificial Sequence
  ENSG00000240567_14 (sequence is synthesized)
ccactttgcctgtttctttgtccaaattcacagtgccagcctgctgcatttaattgaccaggtctgtttcagtcacccatgacttaaactgccaggggtgctggggaacaatcatcaggt

SEQ ID NO: 901988 - DNA, 120 bp, Artificial Sequence
  ENSG00000240567_15 (sequence is synthesized)
tttggggttcccatgctgggaagtgggcatgagcagtgaatggagttaatagagggatgatataccaggaagttaaaaaaaaagaaattacagtcatctacaatattgagagaaatgatt

SEQ ID NO: 901989 - DNA, 120 bp, Artificial Sequence
  ENSG00000240567_16 (sequence is synthesized)
ttttataaaaagcagtttttcttctatgctgcctatgtgaaagcaataaatatccaaagcaatgttatgagtagtgtattaaaattaacatgggtattttaagacttctttgggaggtga

SEQ ID NO: 901990 - DNA, 120 bp, Artificial Sequence
  ENSG00000240567_17 (sequence is synthesized)
gagcaggtccatatgtacatacaaatcatttttgagatggcccctggagggggttctgtggtaagaacctgaggagggcctcttagagtagtcctgattgatagttgtcaagaaaacagg

SEQ ID NO: 901991 - DNA, 120 bp, Artificial Sequence
  ENSG00000240567_18 (sequence is synthesized)
gactttacttgacaactacaagaatcttaatttttccaaccaccagtgaacttggaagaagacttcaagtttttgatgagatcatggcattgactgacatcttgatttcagcctcgtgag

SEQ ID NO: 901992 - DNA, 120 bp, Artificial Sequence
  ENSG00000240567_19 (sequence is synthesized)
atgttgattagaggaccaagttatcctgctctggactccttacttaaagaaactcagatattagatttgtgttgtattaagttgctaaatttatggtaatttgttatgcagcaatagaaa

SEQ ID NO: 901993 - DNA, 120 bp, Artificial Sequence
  ENSG00000240567_20 (sequence is synthesized)
actaatacagtgacaaataaaatattaccaaaatgttcttcaatagggacagattaagtaaatgatgatacattcacacaatggagtaatattagttttaataggaataaagaatatctg

SEQ ID NO: 901994 - DNA, 120 bp, Artificial Sequence
  ENSG00000240567_21 (sequence is synthesized)
tgtgaggtgtttttatatgctaacttttgtataagaaagactatgaatacatacacaccaatgcttatattttcaatatgaaatagtaggatgataaatcaaattaaataaaaaatggtt

SEQ ID NO: 901995 - DNA, 120 bp, Artificial Sequence
  ENSG00000240567_22 (sequence is synthesized)
acttagaagaggagtcaaggaccaaagagaagaaaacaggattgacaagagaattttgtaaatataccttgttatgtttttgacttcggtactatgtaaaatgtttacataatgaaagct

SEQ ID NO: 901996 - DNA, 120 bp, Artificial Sequence
  ENSG00000272366_0 (sequence is synthesized)
tcccgtaccgctttacagctgctggccccctaggaccccgcggcgcaggccggatcccagaggcggggataggagccaatagctgatacagacaaaaaaataaaaagcagctgtacctca

SEQ ID NO: 901997 - DNA, 120 bp, Artificial Sequence
  ENSG00000272360_0 (sequence is synthesized)
acacgggcagccaggtggagagaagggcagagctaccttcagcagacaaaacgacccatgcaaaggctctggggcctggaggagctcgaccctagatgagactggcgctggtattgtccc

SEQ ID NO: 901998 - DNA, 120 bp, Artificial Sequence
  ENSG00000272360_1 (sequence is synthesized)
tcctgctagccaggccactgtccccttccggtgggaccagttacctgatgctgggtttaaccttctccaccagaataaccactggccttagaaactcacttgggtttcacgtctgcatgt

SEQ ID NO: 901999 - DNA, 120 bp, Artificial Sequence
  ENSG00000272360_2 (sequence is synthesized)
gtgtgagctagctctggggttgaaattgtatcagcatgatcatcacagttatatctgatacttgatttgtctccaaaagctcaaattgataggttaaataaatgacatatgcttcatcaa

SEQ ID NO: 902000 - DNA, 120 bp, Artificial Sequence
  ENSG00000272361_0 (sequence is synthesized)
tttccagcaggattgagttcttggtgaacatcctcttcctggtctacagagtactgtgttacttaagtggaaaaagtagggtgagctggttctctggcctcttcttttaggggactaatt

SEQ ID NO: 902001 - DNA, 120 bp, Artificial Sequence
  ENSG00000272361_1 (sequence is synthesized)
catgagggctccaccctcatgacctatttacctcccaaaggctccatctccaaataccatcacaatggggattagaattcaacataggagttttgggaggacacaaacattcagtccata

SEQ ID NO: 902002 - DNA, 120 bp, Artificial Sequence
  ENSG00000272361_2 (sequence is synthesized)
aacttaatctctgagactctatgaggtaactactattattgttttaagtaaaagggtatcaaaaccttgacaggtcaactaacttttccaagtagcatctagtaaatggaacagctaagc

SEQ ID NO: 902003 - DNA, 120 bp, Artificial Sequence
  ENSG00000272361_3 (sequence is synthesized)
tagatttgctggattccaaagccccagcttttagccaaaccctctgtagatctacatatcattattttttgtttcccagtcatgagaaattccattgtaaataaatatgcttccacttga

SEQ ID NO: 902004 - DNA, 120 bp, Artificial Sequence
  ENSG00000272362_0 (sequence is synthesized)
tccaatttgaagtgggtactatgaccgaggcatagtgcttgccattgttttaccttgacttcctcacttcgtacaccaaggagtccactctgatgactcctgttctgctctctaccttat

SEQ ID NO: 902005 - DNA, 120 bp, Artificial Sequence
  ENSG00000272362_1 (sequence is synthesized)
gctgtgctgggcatgcctatgagcggaagaccccaattcatggtctcgaaagctgtgttggaggacaatgaatggggagaatgcagtcttggaaatttggaaataggtgggatccaaaga

SEQ ID NO: 902006 - DNA, 120 bp, Artificial Sequence
  ENSG00000272362_2 (sequence is synthesized)
atgcatgaatatatactttttgagactgtagagatgcttgtaggaagagcagctgaacacctggcgaggatagcgattatttgcatgtgtccagctgtgtgcctgtgccagggctaagtc

SEQ ID NO: 902007 - DNA, 120 bp, Artificial Sequence
  ENSG00000272362_3 (sequence is synthesized)
tcctaggaaaccagagtagcaccacattgtgaacctgatgtcatgacggtggcaagcagtttagtttcctgcctccaccagagtgagggcatacttggtgttagtaaatttcataaatgt

SEQ ID NO: 902008 - DNA, 120 bp, Artificial Sequence
  ENSG00000272368_0 (sequence is synthesized)
cctgcctgaggaggcctcggttggatgcgaaggagctgcagcatccagttctagaggctgggaaatccaggatcaagttgccagcagatccagtgcatcatgaggacacacctcctggtt

SEQ ID NO: 902009 - DNA, 120 bp, Artificial Sequence
  ENSG00000272368_1 (sequence is synthesized)
acctaatgaccccctaaagagcccacctaatgctgtcccactgggggttagggttttgacattggaattttgaggaggacacaaacatgcagtccataacacattccctctcatgatatg

SEQ ID NO: 902010 - DNA, 120 bp, Artificial Sequence
  ENSG00000272368_2 (sequence is synthesized)
gcagtccataacacattccctctcatgatatgcaagacctctttttttttttttttgaggtagggtctcctctccgttgcccaggcgggagggcagtggcatgatcatagctcactgcag

SEQ ID NO: 902011 - DNA, 120 bp, Artificial Sequence
  ENSG00000272368_3 (sequence is synthesized)
cgagtgctgcgttcggctgtgctgggaagttgcgtagacagtggcctcgagaccctgcctgcctgaggaggcctcggttggatgcgaaggagctgcagcatccagagactatggaagaga

SEQ ID NO: 902012 - DNA, 120 bp, Artificial Sequence
  ENSG00000272368_4 (sequence is synthesized)
gtacctggatctagtttattccaaagacagacaagcagtttgtgcctccactccaggatgactaactacaacgattacacgtaaaaagacaaaacaaggccgggcgcggcggttcacgct

SEQ ID NO: 902013 - DNA, 82 bp, Artificial Sequence
  ENSG00000272368_5 (sequence is synthesized)
ttgctacactaagttcctgagggccaaggaaagccatttagatctttgggtttcatttgcttcacttaagcatctttatttt

SEQ ID NO: 902014 - DNA, 120 bp, Artificial Sequence
  ENSG00000272368_6 (sequence is synthesized)
tctttgggtttcatttgcttcacttaagcatctttatttttgcacttgaacgtctggcagagcattttgatgatgatgatgcacaaatactacgaataaatggatgcgtgactagctaaa

SEQ ID NO: 902015 - DNA, 120 bp, Artificial Sequence
  ENSG00000272369_0 (sequence is synthesized)
aaggaagaaaaatcctgctgaatccaggagctcttgctgtcccttttgccctcacatgaaacgtctttgtggctcagactcaatgagctatggacctgtggaccctggtggcagtcacac

SEQ ID NO: 902016 - DNA, 120 bp, Artificial Sequence
  ENSG00000272369_1 (sequence is synthesized)
agtgtggtttcacctgttacctcataaaggtgccattgctgtatgcacatctgaatctgtttacaatttgagaatagagattattgcctgctcctccaagcccttcactgtagaatggaa

SEQ ID NO: 902017 - DNA, 120 bp, Artificial Sequence
  ENSG00000272369_2 (sequence is synthesized)
gcctgtgattttcctggcatcatgcatgactgagaaggtcagtgtggctaattctgagcttcaacatcaggaaacccgtagttcttcacactgagccgcctcctgcagcacagtcatcct

SEQ ID NO: 902018 - DNA, 120 bp, Artificial Sequence
  ENSG00000268906_0 (sequence is synthesized)
agtctgggacagcaccaactggaggatggatcagcttcttcccagtgggcaccaccctcccttgtgatcctacccccagcgcttgccttcccatagtcctcccttcgcccaccccaggaa

SEQ ID NO: 902019 - DNA, 120 bp, Artificial Sequence
  ENSG00000268906_1 (sequence is synthesized)
gggacttacctgccgctgcagtgagccgctgtgaggacccacctgtggtcaataaggacacccccgcagcgcaggctggtgccctcaaacagccccacctgccacggctgtgagttacgc

SEQ ID NO: 902020 - DNA, 120 bp, Artificial Sequence
  ENSG00000268906_2 (sequence is synthesized)
ctcagtgccattgaaaatcttcggtgtggctgcctggctgagccctggagacagacaggggcatgggtcagagagaggaagaaaagatacagagatggagagacacacagagtgagagag

SEQ ID NO: 902021 - DNA, 120 bp, Artificial Sequence
  ENSG00000268906_3 (sequence is synthesized)
agaaacaggcaggagagagagaggagaaagagagacgagaaagagagagaaagagagagagacccagtgatagaaaaagaccatgaaacatcaaagacacccagggagaaagatgcttac

SEQ ID NO: 902022 - DNA, 120 bp, Artificial Sequence
  ENSG00000241383_0 (sequence is synthesized)
aacaccttgagataactctacaaaaccaggatcaaattatcacaaaaaaacttcacagagtgaagaatgaaggaaaagaaaaatgatcacaaatgggtttttgttttaatcaggaaatac

SEQ ID NO: 902023 - DNA, 120 bp, Artificial Sequence
  ENSG00000241383_1 (sequence is synthesized)
tggttgacggtccaaagtatttgacttgctaaagaatctttccctcctagaagtataaaattctactttattttccctataaaaacaaacaaaataactatatatatatgctgatattga

SEQ ID NO: 902024 - DNA, 120 bp, Artificial Sequence
  ENSG00000241383_2 (sequence is synthesized)
accagaattacaaataatttgtaatgtcagatatttaaattctacctattttataatatttatttcacaaaagtcacaagactcactatgttatacaatagagttttcagaatcacttta

SEQ ID NO: 902025 - DNA, 120 bp, Artificial Sequence
  ENSG00000241383_3 (sequence is synthesized)
gatgttctatgtcatggatctcccaaaacccctggcaccattggttgacggtccaaagtatttgacttgctaaagaatctttccctcctagaagctttggtatcaggatgatgctggcct

SEQ ID NO: 902026 - DNA, 82 bp, Artificial Sequence
  ENSG00000241383_4 (sequence is synthesized)
tacatagggtttcaccaccatgttagccatgctcgtctccaactcctgacctcaggtgaccctcctgcctcggcctcccaaa

SEQ ID NO: 902027 - DNA, 85 bp, Artificial Sequence
  ENSG00000241383_5 (sequence is synthesized)
gtgctgggattacagacgtgagctaccgtgtctggccttcctcaaaaatttaatatcagagtcttccattgatttctaaggaccc

SEQ ID NO: 902028 - DNA, 82 bp, Artificial Sequence
  ENSG00000241383_6 (sequence is synthesized)
ataataggctccaaactataaaaatcctagaagaaaacctaggaagtaccattctggacatgggccttggaagagatttcat

SEQ ID NO: 902029 - DNA, 87 bp, Artificial Sequence
  ENSG00000241383_7 (sequence is synthesized)
gttaggctccaaactataaaaatcctagaagaaaacctaggaagtaccattctggacatgggccttggaagagatttcatgataaag

SEQ ID NO: 902030 - DNA, 120 bp, Artificial Sequence
  ENSG00000241388_0 (sequence is synthesized)
ccaggtctctgctggtccctaggaagcactttgacctctgcttccccttcaaatgctgtggatcaagcctccccaaccccaccatcccaccaaagggggctgctgaccgagagagctcac

SEQ ID NO: 902031 - DNA, 120 bp, Artificial Sequence
  ENSG00000241388_1 (sequence is synthesized)
ttcccgggaacatctgcccagagtccaccagctggaagaagactgcccaggacttctaccttcctgggaacatctgcatcagactctgtggggtagggaaataaaccttcattgtgttca

SEQ ID NO: 902032 - DNA, 120 bp, Artificial Sequence
  ENSG00000241388_2 (sequence is synthesized)
agtaagtgcagtaggtaggccaagataactattaagtatgtcctaacaaggtagctgcttgaaaaaaataatgcacataaattaaaaaaaaaaaaactattttcactcattcttaacttc

SEQ ID NO: 902033 - DNA, 120 bp, Artificial Sequence
  ENSG00000241388_3 (sequence is synthesized)
tcgtatggatgtactaacgggaggcctgtgcctgttgggctgtccacagctactcaaaccttgagattagattggacgctatctaatctcatttcctgttacacaataacttctgcatgg

SEQ ID NO: 902034 - DNA, 120 bp, Artificial Sequence
  ENSG00000241388_4 (sequence is synthesized)
cacttgcttttaatcatgacaactgccatacactcagctttacaaaatcatgtcattgtggaaaggaagttccctccatctaacattcaaatttaactatcctgagctggtagtttgcaa

SEQ ID NO: 902035 - DNA, 120 bp, Artificial Sequence
  ENSG00000241388_5 (sequence is synthesized)
ggtgtccaacagatgtcactgtgtttccttcgcaaattctctaaaatagtctgctgtgtcccggggcatagtagatattcaagaaatggtggctatgagttttatcacaattctctccta

SEQ ID NO: 902036 - DNA, 120 bp, Artificial Sequence
  ENSG00000241388_6 (sequence is synthesized)
ctgggtgagcagctgtttgcaagactaaaattcgggcgaggcacaggcttccccttggtcttagcagctagcacaagacgagtgtcccttcagccagtctcagagctctttggcaattca

SEQ ID NO: 902037 - DNA, 120 bp, Artificial Sequence
  ENSG00000241388_7 (sequence is synthesized)
actgacccttgtccttcagtccagacaatgccccagggcccacctgcattcaaactcggactgttctccttcccacccctattatcttttcaactttatggacagtacatgcaattttct

SEQ ID NO: 902038 - DNA, 120 bp, Artificial Sequence
  ENSG00000241388_8 (sequence is synthesized)
cattcattttctcatttaacatctaacagcttcatgatatccccattttacagataaggaaaccaaggctttaagaggatagggaccctaatcggctaaggcagaattaggatttgaacc

SEQ ID NO: 902039 - DNA, 120 bp, Artificial Sequence
  ENSG00000241388_9 (sequence is synthesized)
cagatccccatgacgccagaatctaagccttgaccaaatatgtgttactattacttttgttgttgttgttgttctgggtaactccaaccctctgctcgttggccttgtcacctcagtgct

SEQ ID NO: 902040 - DNA, 120 bp, Artificial Sequence
  ENSG00000241388_10 (sequence is synthesized)
gattttgcagatgaagagactaaggttccgaggtgctagagcacagtggttaggaacacacactctagagccagagtgcctgggtttgagcctcgttctgccgtttactagccgtatggc

SEQ ID NO: 902041 - DNA, 120 bp, Artificial Sequence
  ENSG00000241388_11 (sequence is synthesized)
cttgggcaacttgcttaacttctctttgcctcagttcctcttctcttgggttgttaggagaatgaatgaggtgatatccacagtgtccaacaccctgcaagcggccaggtgtggtggatc

SEQ ID NO: 902042 - DNA, 66 bp, Artificial Sequence
  ENSG00000241388_12 (sequence is synthesized)
ctaaaaataaaaaatgaacagtgtccaacaccttgaaagcattccgcatgactgaacgatcactgt

SEQ ID NO: 902043 - DNA, 120 bp, Artificial Sequence
  ENSG00000241388_13 (sequence is synthesized)
aacaccttgaaagcattccgcatgactgaacgatcactgttacgtgattaccaacatgacgaccccacttctcttggccaaactgagttctcttctcttgtaaaaacttctgcatatgaa

SEQ ID NO: 902044 - DNA, 120 bp, Artificial Sequence
  ENSG00000241388_14 (sequence is synthesized)
gtcacccattccatttgactctttagccctcatcctggcattcaagggcatggacgactcaaccccactctctagccagcctgacctctccattcccttctctggcgtagaggccactcc

SEQ ID NO: 902045 - DNA, 120 bp, Artificial Sequence
  ENSG00000241388_15 (sequence is synthesized)
caccacctgcccttaccccctgcccacttttgtcagcctgtactgtgttgaagctcccaggagagacaactgcagtcatcactttccactgtgttcagtgatgtcagttcggcccagctg

SEQ ID NO: 902046 - DNA, 120 bp, Artificial Sequence
  ENSG00000241388_16 (sequence is synthesized)
gaggtactcacatcatggaaacagaccatcagatttggtgtgtgtgtgttttattttgctttttcagagagccagctgttaaacactagccaacaccccattgatgctgttccttctacc

SEQ ID NO: 902047 - DNA, 120 bp, Artificial Sequence
  ENSG00000241388_17 (sequence is synthesized)
tgaaacacctcgcattgccggtgagctctaaagacaaaaggacctgggtctgcatttcccaaaggcaagactctggtatcacctgcatattattttcccatatttgagcaccactgcctt

SEQ ID NO: 902048 - DNA, 120 bp, Artificial Sequence
  ENSG00000241388_18 (sequence is synthesized)
tgagcaccactgccttttgcattatttacttagcagttttgctcctgtcaactcacttttttaaaactaaacttattttaaaaagaaaagttttggccgggagcggtggctcatgcctgt

SEQ ID NO: 902049 - DNA, 120 bp, Artificial Sequence
  ENSG00000241388_19 (sequence is synthesized)
actccagcctccttgcaagcttggggcgcctcattctctcccgtgccccttctcccagctgggtctgagcccccgcccccctggctcctccgttctgcttctcccagcttctctgtccat

SEQ ID NO: 902050 - DNA, 120 bp, Artificial Sequence
  ENSG00000241388_20 (sequence is synthesized)
cgggttcaagcaattctcctgcctgagcctcccgagtatctggaactacagagccagattcttactctgtcacccaggctggcatgatcatagctcacttcagcctagaactcctggctt

SEQ ID NO: 902051 - DNA, 120 bp, Artificial Sequence
  ENSG00000241388_21 (sequence is synthesized)
gccagctgttaaacactagccaacaccccattgatgctgttccttctacctgaaacacctcgcattgccggtggagtctcgctctgtggcccaggcaatctcggctcactacaacctccg

SEQ ID NO: 902052 - DNA, 74 bp, Artificial Sequence
  ENSG00000241388_22 (sequence is synthesized)
tccgcctcccaggttcaggcgattctccttcctcagccttctgagtagctggaattacaggcacccgccaccat

SEQ ID NO: 902053 - DNA, 120 bp, Artificial Sequence
  ENSG00000241388_23 (sequence is synthesized)
caaagtgttgggattacaagcatgagtcaccatgcctggcctatggtatttttttatagcagcaggaacagactaagacatcctacttctcagcttaaacgtcacctctgcacagagccc

SEQ ID NO: 902054 - DNA, 120 bp, Artificial Sequence
  ENSG00000241388_24 (sequence is synthesized)
acttctcagcttaaacgtcacctctgcacagagcccttcgtgatacatctgaacagattcttttctgtgactctccatccctgcactgtatttgctctttcagggtgctttttcacattt

SEQ ID NO: 902055 - DNA, 120 bp, Artificial Sequence
  ENSG00000241388_25 (sequence is synthesized)
gtgagggtgtatgcatctcctcttccaggctgtaagcttcataaagtctctgttttgttcataactagaacaagccctagcacctagcagtgagtgttcattaaacatatgaagaatgaa

SEQ ID NO: 902056 - DNA, 120 bp, Artificial Sequence
  ENSG00000241388_26 (sequence is synthesized)
tgctgctgtcttcaagatctacctggtcagaatctcctgctgtcctcttctgccacccacagcaatgtgagccttcactggctggccttccctactcactggagcagagctacggcatca

SEQ ID NO: 902057 - DNA, 120 bp, Artificial Sequence
  ENSG00000241388_27 (sequence is synthesized)
gctggccttccctactcactggagcagagctacggcatcagaatgccctggagcaggggttagaaacacagatttctgagtctacactcgaagatttttttttctttctttctttttttt

SEQ ID NO: 902058 - DNA, 120 bp, Artificial Sequence
  ENSG00000241388_28 (sequence is synthesized)
acgttgcccaggctggtctcaagctcctggactcaggtcatcctaccacctaggccttctaaagtgttaggatgagccctgaaccttgtaacatgaacatttattagttatatctggaaa

SEQ ID NO: 902059 - DNA, 120 bp, Artificial Sequence
  ENSG00000241388_29 (sequence is synthesized)
ggaactacaggtacgcaccatcatgcccagcttcatttatatatttatcttttttgtttgttttttgagacagggtctccttctgtcgcccgagctggagtgcagtggcacaatcttggc

SEQ ID NO: 902060 - DNA, 120 bp, Artificial Sequence
  ENSG00000241388_30 (sequence is synthesized)
aggagacggggagtccgccagcggatggggatgtagaacgggcagcctctaatggcgcctgctggtgaggtggggtgcctgtggccatacaggaaaggggagcagctcccacctcgaggc

SEQ ID NO: 902061 - DNA, 120 bp, Artificial Sequence
  ENSG00000241388_31 (sequence is synthesized)
caagtgccagttagtcacggcctcagtgcagcacctcatccctcccagaaagccatggctctggactccacccactgaaaacagggcttttgtgggaatacaatgggacaagaagaaaaa

SEQ ID NO: 902062 - DNA, 120 bp, Artificial Sequence
  ENSG00000241388_32 (sequence is synthesized)
catgctgaacctgatctccatgggacctgatgtggagtcacgttcattcacatcactggcttgcagcctctccactcacaagttattgataatcgaaaaaataaaacaccatgcgatcgt

SEQ ID NO: 902063 - DNA, 120 bp, Artificial Sequence
  ENSG00000237002_0 (sequence is synthesized)
caaagatgatgtttggagttcagtggtcaagaaaaccccgatgactgcacttctgtgaattttgaagtcttcatcagtatatccatgtaaaaaggagatgacaaaaaccaaaataaaata

SEQ ID NO: 902064 - DNA, 120 bp, Artificial Sequence
  ENSG00000237002_1 (sequence is synthesized)
cagtttcagtaaaaagggctaacttgaagacaaatcttttgaagataaattttgacaccagttctttagaggatctaaagtgaccttgatggagaatgaaagaaatcacaagatggaatt

SEQ ID NO: 902065 - DNA, 120 bp, Artificial Sequence
  ENSG00000237002_2 (sequence is synthesized)
atggaattcctcgaataaaaatttattgactttaaataattttgcctaatgttacatacacacaattaaaaaaaaaacacctctttatgctgttaagaaagaaagaaagaaagaaagaaa

SEQ ID NO: 902066 - DNA, 120 bp, Artificial Sequence
  ENSG00000237002_3 (sequence is synthesized)
caaagatgatgtttggagttcagtggtcaagaaaaccccgatgactgcacttctggagccaatgagggcccagccattgcgcaagtctggattcgtaggagatcaccttttattccaaat

SEQ ID NO: 902067 - DNA, 120 bp, Artificial Sequence
  ENSG00000237002_4 (sequence is synthesized)
agtgggaatattaatattttaagatcccatctctacctttaatgacgtggcgtggtactgatggtggtgtctcgtccattctttcagacacgtatttcacataaatgcactaaataaaac

SEQ ID NO: 902068 - DNA, 120 bp, Artificial Sequence
  ENSG00000237001_0 (sequence is synthesized)
tccccatttaccaacccaagcaagtaagcccacctgagccacagaaccttctccctccctacaaaaggctcaggagtaggaggcaccaggatgttttactctctggaaaagaaaggtaaa

SEQ ID NO: 902069 - DNA, 120 bp, Artificial Sequence
  ENSG00000237001_1 (sequence is synthesized)
ttaaagaatttgaacttgggactctaggcatagctaaaggtaggggaggaaatgtactggaaacaggaatactaaatcaaagtctacaatgactggtgagacagctccccaacctcttgt

SEQ ID NO: 902070 - DNA, 120 bp, Artificial Sequence
  ENSG00000237001_2 (sequence is synthesized)
tccacttggctcctagaacacaggcagcctggcttttactcccatccaaaaacactggagcattccttcctggggaatgtttgaagagaaaagatctacaaatatgaacactggggaggg

SEQ ID NO: 902071 - DNA, 120 bp, Artificial Sequence
  ENSG00000237001_3 (sequence is synthesized)
aaatctccccaagcacccagagtgcaccagcttttagtgcctcagacttaaataagagtcaaggatcaccaaacacttcagaaaagccttctccaacatcctaggcatccctttcacccc

SEQ ID NO: 902072 - DNA, 73 bp, Artificial Sequence
  ENSG00000237001_4 (sequence is synthesized)
gaaaagccttctccaacatcctaggcatccctttcacccctctcctcaaaaaggagatgatatgctgggctca

SEQ ID NO: 902073 - DNA, 71 bp, Artificial Sequence
  ENSG00000237001_5 (sequence is synthesized)
tgactaacatggtgaaaccccatctcgacaaaaaatacaaaaaaaaatggaggcaggagaatcccttgaac

SEQ ID NO: 902074 - DNA, 120 bp, Artificial Sequence
  ENSG00000237001_6 (sequence is synthesized)
tccccatttaccaacccaagcaagtaagcccacctgagccacagaaccttctccctccctacaaaaggctcaggagtaggaggcaccagggaaaaaagaaaagaaaaatgacatcatgaa

SEQ ID NO: 902075 - DNA, 120 bp, Artificial Sequence
  ENSG00000237001_7 (sequence is synthesized)
accactggaagtcacaatttagagaataatcacagaccacaagtcaagccaggaaaaataactgcctagttaaaaaaaaaaaaaaaaagtctttttctaaaaagaagaggggaagaggag

SEQ ID NO: 902076 - DNA, 120 bp, Artificial Sequence
  ENSG00000237001_8 (sequence is synthesized)
atatgagtgcagaccacaggtgactgccagtaactgaaactgcggtaagtgaaacctcggatatggggggactactgagcatggaaagtgctacgacagaagactggttccagctgcagt

SEQ ID NO: 902077 - DNA, 120 bp, Artificial Sequence
  ENSG00000237001_9 (sequence is synthesized)
aaacaagagaggaacagtgacaccaagagactgatttctgtcctttgagatgcaaagagtatacaaagtcaacatgaagataaactcttatcaccaactaaatattgtgctacgagaggt

SEQ ID NO: 902078 - DNA, 120 bp, Artificial Sequence
  ENSG00000237001_10 (sequence is synthesized)
acatttgtcttatctgaattgctttctcaggcaaccatccatccggccttccaggtagtattaaaaaactaaaacttactagatcatctcatctggaccatgagaagtcagactcctcac

SEQ ID NO: 902079 - DNA, 120 bp, Artificial Sequence
  ENSG00000237001_11 (sequence is synthesized)
ccatcatgactgcttaagaccacctgttccctgttgaccaactcctcttccttatctctccctaattcctgttttctcacatatagttacctttcttcctgctacataaacccctaattt

SEQ ID NO: 902080 - DNA, 120 bp, Artificial Sequence
  ENSG00000237001_12 (sequence is synthesized)
tagtaggtcaggaggatggatttgaggcttatctccatctcctgagctatagcacccaatcaaagctttcttccctagcaacactcattgtctcagtgattggctttctgtgtggcacgc

SEQ ID NO: 902081 - DNA, 120 bp, Artificial Sequence
  ENSG00000237001_13 (sequence is synthesized)
aactggacctagacaaacctctggcattttggtacacctaggctgctaactgggggcagcaggtcaatgtccccatttaccaacccaagcaagtaagcccacctgagccacagaaccttc

SEQ ID NO: 902082 - DNA, 120 bp, Artificial Sequence
  ENSG00000237001_14 (sequence is synthesized)
tccctccctacaaaaggctcaggagtaggaggcaccagacagcttttatcgtctctaacactaactcagttttgaataaattgaagagcgaggaagagtcaaaggaaaaaatgctgggtc

SEQ ID NO: 902083 - DNA, 120 bp, Artificial Sequence
  ENSG00000237001_15 (sequence is synthesized)
aactatgacccatccaaatcattcttcaaagtcagtctgtctgtgaagaataaaacaatgattgctaataaaatgtttaggactattagaggttatataaagtattagtgttaggtctgt

SEQ ID NO: 902084 - DNA, 120 bp, Artificial Sequence
  ENSG00000237001_16 (sequence is synthesized)
agtttgtccagcttttctgggaaatgtctcagtttagagagataaaacctggttcacctaactgtgaactagatcccagacatggctgaaactgggccagggtccttccctaagaatttg

SEQ ID NO: 902085 - DNA, 120 bp, Artificial Sequence
  ENSG00000237001_17 (sequence is synthesized)
gaggtgggactatgctatccagcttggtctggctgctgtcttcaactatggaaatggataactcccaccacatgaaatggagaatgacaaaactagtctgcagcaagaaatcaggatgaa

SEQ ID NO: 902086 - DNA, 120 bp, Artificial Sequence
  ENSG00000237001_18 (sequence is synthesized)
ataaccgagaaaagctgacaaaggtgaattaaagacaagaacccctcatcggctctgctgaatctcccttagacctcatggcagactaggaaagctcgctaacacccaaccccctctcct

SEQ ID NO: 902087 - DNA, 120 bp, Artificial Sequence
  ENSG00000237001_19 (sequence is synthesized)
ccccactgcaagggtcaggtttgcactgtggtttgatggctctctcagcctccccagtttctacccccttttctttcacataggtgatatccttaatcaaatcctatagctgtgatccca

SEQ ID NO: 902088 - DNA, 120 bp, Artificial Sequence
  ENSG00000237001_20 (sequence is synthesized)
ccggcccacagctccccgtcccgctctgcctcctcaaggaccctgtgcttcctatgtggccctgcgtggtgtgctgtgaccccctcctcttgggaactgtaacaagctatcttttctatg

SEQ ID NO: 902089 - DNA, 120 bp, Artificial Sequence
  ENSG00000237001_21 (sequence is synthesized)
tatgtgcaacaatactacaggactacaaatgatagataacctccaaagttgaaaggcaacgggatgagattaaaggaagaaaccacaagccaaaaatatgacaggaaggactgtggccac

SEQ ID NO: 902090 - DNA, 120 bp, Artificial Sequence
  ENSG00000237001_22 (sequence is synthesized)
gagatgtgtggttggagaaccacaatgaaaagatcttggcaatttacaccagagaaatacaaatggcagccaaccatcaaattgtcctttgaaagaattatatctaataaaactaggaat

SEQ ID NO: 902091 - DNA, 120 bp, Artificial Sequence
  ENSG00000237001_23 (sequence is synthesized)
gtaagcccacctgagccacagaaccttctccctccctacaaaaggctcaggagtaggaggcaccagccaaggatgtgatccatccgcatctctgcagaccatgattcagtacgacatctg

SEQ ID NO: 902092 - DNA, 70 bp, Artificial Sequence
  ENSG00000237001_24 (sequence is synthesized)
gtaagcccacctgagccacagaaccttctccctccctacaaaaggctcaggagtaggaggcaccagctgc

SEQ ID NO: 902093 - DNA, 120 bp, Artificial Sequence
  ENSG00000237001_25 (sequence is synthesized)
gtaagcccacctgagccacagaaccttctccctccctacaaaaggctcaggagtaggaggcaccaggttcctaactgtccaccatcccccagatgacatcgcatcaccctggctatcttc

SEQ ID NO: 902094 - DNA, 120 bp, Artificial Sequence
  ENSG00000237001_26 (sequence is synthesized)
cccacttgcccatgctgtattcagagttgaacccaatctctctcccctactgcaagatgctgttgcagtggctcctctaccttctgcaatggtcctgaataaaagtctttaccatgcttt

SEQ ID NO: 902095 - DNA, 120 bp, Artificial Sequence
  ENSG00000237009_0 (sequence is synthesized)
aggcctaaaaaagggtagttgtggttggctctgcctttgctgtctttacctgaatagaggtcaggcccgggtccaggggagcgtcccacggtcccttcagcagcagcatctctaggggaa

SEQ ID NO: 902096 - DNA, 120 bp, Artificial Sequence
  ENSG00000237009_1 (sequence is synthesized)
gtggccggctgcagggactgcacggtgaggcaatctgtgagcaggtctggatggagctctgtgctggaccgcaactaagaggacaaaacggaagagacatcgataaggagagccggtcct

SEQ ID NO: 902097 - DNA, 120 bp, Artificial Sequence
  ENSG00000237009_2 (sequence is synthesized)
tggaatattttcctgggaaggcatcatgctctatcagtgcaactcagcccacaaaaatttatcaagcagcaactacgggtcctctgaacgggccacaccacggttgagccattgtgaccc

SEQ ID NO: 902098 - DNA, 120 bp, Artificial Sequence
  ENSG00000237009_3 (sequence is synthesized)
tccaggcctcctggagtcacaaagctttgagcaacaggagaaccactaaagaagaagaaacagctagctcctgccttaactgattaaccgaacttgcaacattccaccattgtgatatgt

SEQ ID NO: 902099 - DNA, 120 bp, Artificial Sequence
  ENSG00000237009_4 (sequence is synthesized)
tcctgccctaccctaaataatcaatcggccttgtgatatcctgccatgtgaactccctccacctcgtgactacgcaccttgtgacattcttcccctgcccgaaaagactgccccaactgt

SEQ ID NO: 902100 - DNA, 120 bp, Artificial Sequence
  ENSG00000237009_5 (sequence is synthesized)
aaccttccactacctatcccaaacctataaaaccagttccactcccaccgcccttcgctgactcccttttcagactcagcccgctcgcaccggagtgaataaacagccttgttgctcaca

SEQ ID NO: 902101 - DNA, 120 bp, Artificial Sequence
  ENSG00000233783_0 (sequence is synthesized)
atggggagtaacaccatgtgaagacagaggtggagattggaggggtgcatgtaccaaccaaaggaatatcaagggctggcagcagcactagagcaagcgaaaggcatgaaacagattctc

SEQ ID NO: 902102 - DNA, 120 bp, Artificial Sequence
  ENSG00000233783_1 (sequence is synthesized)
ccctagagctgtaagaggcagtgtggccctggcaacaccttgctttaggacttctaacctctagaataatgagataatgagagtatatttctgttggtttcggccatgcggtttgtggta

SEQ ID NO: 902103 - DNA, 120 bp, Artificial Sequence
  ENSG00000233783_2 (sequence is synthesized)
actggttccagcagccctaggaatctaatacactgcccatggaacaaatcctttcttgaccaccaatggctgcatgacttatcctgagaagatcatggggattttggatgccaggtcaac

SEQ ID NO: 902104 - DNA, 120 bp, Artificial Sequence
  ENSG00000233783_3 (sequence is synthesized)
gaagtggaagggcctcagtttcaaacactttgtaaacacagagataaggtcgtccctctgtcacccagcctggagtgtagtggtgccgccaggcctcactgcaacctccaactcctgggc

SEQ ID NO: 902105 - DNA, 120 bp, Artificial Sequence
  ENSG00000233783_4 (sequence is synthesized)
agcctcctgactagctgggattacaggttattttgaggatcaagtgaaacttagaaacaataacaacaaaaaaagcaaagtctgtgatcaagaagaattactctgttgcaacaatataaa

SEQ ID NO: 902106 - DNA, 120 bp, Artificial Sequence
  ENSG00000233783_5 (sequence is synthesized)
ctctgttgcaacaatataaactaagaaaaaaatacgcaaaattctctgctgccttgggagatgatctcatgatgtgtatcatttacttttaatatttttatttatttatttttgagacgg

SEQ ID NO: 902107 - DNA, 120 bp, Artificial Sequence
  ENSG00000233783_6 (sequence is synthesized)
ggggagtaacaccatgtgaagacagaggtggagattggaggggtgcatgtaccaaccaaaggaatatcaagggctggcagcagcactagagcaagcgaaagggaacaaatcctttcttga

SEQ ID NO: 902108 - DNA, 120 bp, Artificial Sequence
  ENSG00000233783_7 (sequence is synthesized)
ttcctctccaataagccagaagctgagctgtccctggcagcaaactgtgtgtcaaatgcctggcgggtttcaggttttactaactccagagtgacgaaacatcaccacctctaatgccag

SEQ ID NO: 902109 - DNA, 120 bp, Artificial Sequence
  ENSG00000233783_8 (sequence is synthesized)
tcccaaagtgctgggattactggtgtgaccgaccgtgcctggccaatgtgtatgatttaatagccagcagcaacaggccactaacatgccatctgctaacaggggctctagctattaaca

SEQ ID NO: 902110 - DNA, 120 bp, Artificial Sequence
  ENSG00000233783_9 (sequence is synthesized)
ttaacatcaacagagctaaaaactcttatgtctgatcccttgcaaatggcgaagacctggctgagaattattatctcatgctttcagagaaaactttgcttgtcctgcactgaaaaatct

SEQ ID NO: 902111 - DNA, 120 bp, Artificial Sequence
  ENSG00000233783_10 (sequence is synthesized)
ggctgcaataatcacatggaagaagaaaaagattccatgatactagttatctaaatatcctccctggtactgagatttgaagtttattgtgctgccctattcttgggcatttcgtaatat

SEQ ID NO: 902112 - DNA, 120 bp, Artificial Sequence
  ENSG00000233783_11 (sequence is synthesized)
tcaagatatctgaaccaccatctgttctgtggaagtgtgactaattagtggctaatgttttcagtagtatagtgccaaataaaaagttctaataatttaattataaagagtcaacaataa

SEQ ID NO: 902113 - DNA, 120 bp, Artificial Sequence
  ENSG00000233783_12 (sequence is synthesized)
tgcaataatcacatggaagaaggtatgtttgttggcatggttcatgggctggcttatgacttctaagcagaagatacaaaataatataaaaatcctgcaacatgcacaatgtagctgata

SEQ ID NO: 902114 - DNA, 120 bp, Artificial Sequence
  ENSG00000233783_13 (sequence is synthesized)
ttcatgttctctttaaatatcttaacactgacttacatatttaagggtgtggagtctttgagcttgggaagcatcttattactgaggtacaaatgctaaaagagggacatttcttctatc

SEQ ID NO: 902115 - DNA, 120 bp, Artificial Sequence
  ENSG00000233783_14 (sequence is synthesized)
taccgcattttcaatgaaaagatgctgaaggtgaataaacagctctgcaaacccagttttgtttaacttggcaacagcagtaagtaagtatcactggacacagagacactggaatagatt

SEQ ID NO: 902116 - DNA, 120 bp, Artificial Sequence
  ENSG00000233783_15 (sequence is synthesized)
cagtctttagtcttattcatcacgtctgaccttgggcatattacatggttttcctgagcctatgaaatcatgcggctgaacgagctgaaaactaagattctttcctttgctaataaattt

SEQ ID NO: 902117 - DNA, 120 bp, Artificial Sequence
  ENSG00000233783_16 (sequence is synthesized)
cagcaaacgataggagtaagaacggctgtctaacgagactaccaaatgctacgagacgcagcaagcaatgtccctttacctaatggatacagcttcttaactgtttatccaaagtctccc

SEQ ID NO: 902118 - DNA, 120 bp, Artificial Sequence
  ENSG00000233783_17 (sequence is synthesized)
caagcaaattctaaattattctaaattatttgagtaacaaagattgggcccttatacctgtgacgtgtctggcaatgacaaagaatgtggaacatgggaagcatttaatacatatttatt

SEQ ID NO: 902119 - DNA, 120 bp, Artificial Sequence
  ENSG00000233783_18 (sequence is synthesized)
ccctaggaatctaatacactgcccatgtaagtgaatattagctatttgctgataagacaagaatttctggttataataaatatactggaatagaatgtggtttctttttttttgagatgg

SEQ ID NO: 902120 - DNA, 90 bp, Artificial Sequence
  ENSG00000233783_19 (sequence is synthesized)
tatactggaatagaatgtggcagtcaccaggctggaatgcagtagcgtgatctcggctcactgtaacctcttcctcccaggttcaagcaa

SEQ ID NO: 902121 - DNA, 120 bp, Artificial Sequence
  ENSG00000233783_20 (sequence is synthesized)
agtctaatctagccctcttaagtgcagagatgttttccctctgaacacccgtgtgtttcagctctgttcctcttccaatgcccttccacagggaacaaatcctttcttgaccaccaatgg

SEQ ID NO: 902122 - DNA, 83 bp, Artificial Sequence
  ENSG00000233783_21 (sequence is synthesized)
ttttttttttttttaactggagacagagtcttgctctgtcaccaggttggactgcagaggcgtaatctcggctcatggcaatc

SEQ ID NO: 902123 - DNA, 120 bp, Artificial Sequence
  ENSG00000233783_22 (sequence is synthesized)
ggtcataaatttaagacatgtagttcttagatttaaatttgatagtggttgaaaaaatttgacaatagttcacattcttaaaagtcaaggaaaataaaaacataaccgcattatgggttg

SEQ ID NO: 902124 - DNA, 120 bp, Artificial Sequence
  ENSG00000233783_23 (sequence is synthesized)
aattttcccccaaaatatatgttgaagtcctaatgcctacacctaagaatacagccttacttggaaacagggtctttgcagatataagatgaggtcacaatggagaagggtgggccctta

SEQ ID NO: 902125 - DNA, 61 bp, Artificial Sequence
  ENSG00000233783_24 (sequence is synthesized)
ctcactgcaaccttcgcctcccgccatgcctgcctagttttttatttttagtagagatggg

SEQ ID NO: 902126 - DNA, 120 bp, Artificial Sequence
  ENSG00000272797_0 (sequence is synthesized)
gacttttttctgaagttgtttattgccttgcagagcaagaggaacttaactctcacttaaagcaggcctatataatttaatatgataatcttcctcaattagactcaacatgcttacccg

SEQ ID NO: 902127 - DNA, 120 bp, Artificial Sequence
  ENSG00000272797_1 (sequence is synthesized)
ccaacacactctctgatcatattttaagtcctcctagcaccctaattttctttatatgactgagcacattttaaattcttactcaattcttgtcttttccaccaagtttaaaactatgtc

SEQ ID NO: 902128 - DNA, 120 bp, Artificial Sequence
  ENSG00000272797_2 (sequence is synthesized)
aaagtaaactatcatctgtgctttcctagtgttgtttcctcaggaccatgcatagtgctttgcacatggctggccttagataaatgtttgctgaatgaataaaattgatgcattaactgt

SEQ ID NO: 902129 - DNA, 120 bp, Artificial Sequence
  ENSG00000261573_0 (sequence is synthesized)
gatgctgagcatgaagacaaaagcctatcgaatggggtgtcagaaaagaaacatcaaaatatcgaggatggaaactagagtccatgttggccttacaagtcttctctgaatattccagaa

SEQ ID NO: 902130 - DNA, 120 bp, Artificial Sequence
  ENSG00000261573_1 (sequence is synthesized)
agcaattctgaatggaaagaggccagctgtaaaacgtcatagaagacctgcagtagagatacaatcctgagaagaatatttagcaagaatggggtttcagatttctggtatttccatatg

SEQ ID NO: 902131 - DNA, 120 bp, Artificial Sequence
  ENSG00000261573_2 (sequence is synthesized)
ggtggagattgaagaaaaaaaagaaaagagcaaaagttttctcataatgttttgcaacttctgcttccgggcccagtcagagcccaaaagcagcaagagaagtaaaatgaaaacactgaa

SEQ ID NO: 902132 - DNA, 120 bp, Artificial Sequence
  ENSG00000273254_0 (sequence is synthesized)
cttaaggagagcggccttcaagaagagaacgaagttggggcggaaaacaggagctctcccagcgcagaaagccaggcgagcgacgactgccaggcagtgggaccagaactcacccacggc

SEQ ID NO: 902133 - DNA, 120 bp, Artificial Sequence
  ENSG00000273254_1 (sequence is synthesized)
gacagagcccataactgcatcccctcatgggcctttgggctgggcagccagctccgtcttcctcctggtgacgaattgagagcgacggagtcgaagccagagtgacccctggaaagcaat

SEQ ID NO: 902134 - DNA, 120 bp, Artificial Sequence
  ENSG00000273254_2 (sequence is synthesized)
ccaccaccaccccacccccacctcccgggaccatcggctctgacgctagtaaatctgcgcctgcgtgcggcttgcgccggatgttcgggtttaggggtttggttgtcaatgggttttctc

SEQ ID NO: 902135 - DNA, 120 bp, Artificial Sequence
  ENSG00000273254_3 (sequence is synthesized)
gtctctgacataaccacgaagttatataaatgctcctgaagtgtgggcatccggtggtggtctgagccttggagtttcctagatggttacctttctggaacacattatatttggagctaa

SEQ ID NO: 902136 - DNA, 120 bp, Artificial Sequence
  ENSG00000273254_4 (sequence is synthesized)
aagggggaacgcttaaatttgtttccgtaattctgtcctgtcgacttctaaaactgagtacctaagttgtcttgaatttaccttcctgcaccatgtcagaataaaaaacgcagcgagtga

SEQ ID NO: 902137 - DNA, 120 bp, Artificial Sequence
  ENSG00000236665_0 (sequence is synthesized)
tttaattaaaaatataacacatttgatagtttagatatgaaataatacaacatatgcaatcaaagagtctgatttttatacctacgagatccctagtttgacacctcagagacaactgac

SEQ ID NO: 902138 - DNA, 120 bp, Artificial Sequence
  ENSG00000236665_1 (sequence is synthesized)
gctgggatattgtgtgtgttcttctggaaattctatgcctttgtaagaacgttttctcgtctgagggcagtttggtcatattgatcagatatacaatgtatgtgcattttaatccagcag

SEQ ID NO: 902139 - DNA, 120 bp, Artificial Sequence
  ENSG00000236665_2 (sequence is synthesized)
ttcttcttgggttccttgtggcctaaataattgttaatgccccacgtgttctggaaaaaaaataagctaagcccaggagccaggcacctgatgccacgctaaacacacaggagtctcctc

SEQ ID NO: 902140 - DNA, 120 bp, Artificial Sequence
  ENSG00000236665_3 (sequence is synthesized)
tgcatctcctcccccaccagaaatggggagtccctgtggacagtcacatcccactaattcatcctctttccttgaaccacttctcatagtgtactcagatgtagataaattttaaaaaat

SEQ ID NO: 902141 - DNA, 120 bp, Artificial Sequence
  ENSG00000236664_0 (sequence is synthesized)
caaaatctagaagtgattcacgggaaagtatttcttccaaataagagaagacagcaaagtataatggctgtactggccatatggaacctcaccaggaagctctgtgataaagttgccctt

SEQ ID NO: 902142 - DNA, 120 bp, Artificial Sequence
  ENSG00000236664_1 (sequence is synthesized)
tcagcatcattcttggaatttttatttgtttgtttgtttctgatggagattatagttttgtgacagctaggcccttgtctgttgtttcacatttttctatcttataaaatttctacacct

SEQ ID NO: 902143 - DNA, 120 bp, Artificial Sequence
  ENSG00000236666_0 (sequence is synthesized)
catatgtaacatgacctgtgcttcagtgttcttttgtgatcaaaaattccttacttttagttttttatctatggtagaaccacccagagcaggggtcctcaactcccaggccacagactc

SEQ ID NO: 902144 - DNA, 120 bp, Artificial Sequence
  ENSG00000236666_1 (sequence is synthesized)
accacaccacacaggaggaggtgagcactaggcaagccaaggaagcttcacctgtacttacagccacaccccatggctcatattacagcctgaactctgcctccactcagatcagtgata

SEQ ID NO: 902145 - DNA, 120 bp, Artificial Sequence
  ENSG00000236666_2 (sequence is synthesized)
ctgcctccactcagatcagtgataacattagaaactcattggagcacgaaccctgttgtgaactgcctatccgaaggatctaggttgtgtgcttcgtatgagaatctaatgccagatgat

SEQ ID NO: 902146 - DNA, 120 bp, Artificial Sequence
  ENSG00000236666_3 (sequence is synthesized)
ctatcattgtctcactttgcccccagataagaccatctagttgcagaaaaataagctcagagcttccactgattctacattatggatatgtgccgccgaagcaagcacaaagccctactt

SEQ ID NO: 902147 - DNA, 120 bp, Artificial Sequence
  ENSG00000236666_4 (sequence is synthesized)
ttacacatgcctagtgatgcttcatggacaaggcttggctctgttgagtccaactaacctacctgagattctgagatttctcttcaatggcttcctgtgagctagagtttgaaaatatct

SEQ ID NO: 902148 - DNA, 120 bp, Artificial Sequence
  ENSG00000236666_5 (sequence is synthesized)
ggcttcctgtgagctagagtttgaaaatatcttaaaatcttgagctagagatggaagtagcttggacgattttcattatcatgtaaatcgggtcactcaaggggccaaccacagctggga

SEQ ID NO: 902149 - DNA, 87 bp, Artificial Sequence
  ENSG00000236666_6 (sequence is synthesized)
agctgggagccactgctcaggggaaggttcatatgggactttctactgcccaaggttctatacaggatataaaggtgcctcacagta

SEQ ID NO: 902150 - DNA, 120 bp, Artificial Sequence
  ENSG00000236666_7 (sequence is synthesized)
ctgaccctttagaacaagcctacctaatatctgctagagaaaagaccaacaacggcctcaaaggatctcttaccatgaaggtctcagctaattcttggctaagatgtgggttccacatta

SEQ ID NO: 902151 - DNA, 120 bp, Artificial Sequence
  ENSG00000236666_8 (sequence is synthesized)
ggttctgaatatggggggaagggtcaatttgctcattttgtgtgtggataaagtcaggatgcccaggggccagagcagggggctgctgctttgggaacaatggctgagcatataaccata

SEQ ID NO: 902152 - DNA, 120 bp, Artificial Sequence
  ENSG00000236666_9 (sequence is synthesized)
ggtatgggaacaaaaaacatcaaagtcactgtatcaattgccatgaagacttgagggacctgaatctaccgattcatcttaaggcagcaggaccagtctgagtggcaacaatgcagcagc

SEQ ID NO: 902153 - DNA, 120 bp, Artificial Sequence
  ENSG00000236666_10 (sequence is synthesized)
cctccttctgacttgataaaagggaccgtcttccttggatttagtgaacccctttggttcctgaaaaattcaaggagtatctaggacatagtccccagaagacagtacaagactttctga

SEQ ID NO: 902154 - DNA, 120 bp, Artificial Sequence
  ENSG00000236666_11 (sequence is synthesized)
agacccaaataactaatcagaaaaatcaaagatgtgatactattttttatcccatgcataggtgctacacttggatcaaatgaacaatgttgggatctctatggataaaggtcttaaaag

SEQ ID NO: 902155 - DNA, 120 bp, Artificial Sequence
  ENSG00000236666_12 (sequence is synthesized)
caaatgaacaatgttgggatctctatggataaaggtcttaaaagtcctgagataaagaatcctgcacccactggtacttctaacttgtcttgttttttgtctgatttctggctgatgcag

SEQ ID NO: 902156 - DNA, 84 bp, Artificial Sequence
  ENSG00000236666_13 (sequence is synthesized)
tggctgatgcaggggactagctcactgccacacgaaaattacctgaactgaactatgacatctcacctgatatgtaagatgtaa

SEQ ID NO: 902157 - DNA, 120 bp, Artificial Sequence
  ENSG00000236666_14 (sequence is synthesized)
cagatagatcttgagaagatacatcaatgttttgctcaagtagaaggctgactatacttgccgatccacaacatacagcaagtatgagagcagttctaaaatgacagagataggaacagt

SEQ ID NO: 902158 - DNA, 120 bp, Artificial Sequence
  ENSG00000236666_15 (sequence is synthesized)
gttctaaaatgacagagataggaacagtaataaagttattttaaaagctaatttgatatactttaccaatttaacatcttgcctgtccgtgcagaatcaaacatttacatgcactaaaag

SEQ ID NO: 902159 - DNA, 120 bp, Artificial Sequence
  ENSG00000236666_16 (sequence is synthesized)
atgcactaaaagacataagcatcttcagtgctcaagtgttcatctttgtaaaataccaccaaggttgaaaggaagggacaaaaaaaaaaaaaccctcttatctcagtggggtattgcata

SEQ ID NO: 902160 - DNA, 120 bp, Artificial Sequence
  ENSG00000236666_17 (sequence is synthesized)
aatttaaagtcctttgatggacaagaaacaatattagggccacttatctgaaatgaacaaagatttaagtgaagatttcatcacagcttccctagactgatatgctgtaatagaaaatca

SEQ ID NO: 902161 - DNA, 120 bp, Artificial Sequence
  ENSG00000236666_18 (sequence is synthesized)
gctagggggtaaaataactaagagctctctgcatgctgaaagcaagtaagattaataataatggtaagaatagtagtcacaggagtttcagttaatgatgccaataagcatgtgctaggc

SEQ ID NO: 902162 - DNA, 120 bp, Artificial Sequence
  ENSG00000236666_19 (sequence is synthesized)
actgaattaaatgccacatatatctttcttatgcacagcaaactttgaaggatatattctcctacttttcatatatgacaacatatttggtggtaaataacgttcccaaggtcacacacc

SEQ ID NO: 902163 - DNA, 120 bp, Artificial Sequence
  ENSG00000236666_20 (sequence is synthesized)
tagcaagtaagaaagttaggaattaaaaccagtattgtgtgaatctaaagcctaacttttttctctttatcacccacctacggcttgtcttcattaaaggaaaagtgtatccacttaaaa

SEQ ID NO: 902164 - DNA, 120 bp, Artificial Sequence
  ENSG00000236663_0 (sequence is synthesized)
cccgcagcggacgctccccacgaggtagagccccgtttccacacctggagcagctgcacctggaggtggggctcatctccagacctggagcagctgcctgccccagggcagaagccactg

SEQ ID NO: 902165 - DNA, 120 bp, Artificial Sequence
  ENSG00000236663_1 (sequence is synthesized)
cagtttcctcccacatcccaagtatacacctcagcctcacggcatgtctacatgggcctagtccgagtgagtgtgggtgtcccatggaggcctgtcctatccagggcgggtgcccacctt

SEQ ID NO: 902166 - DNA, 120 bp, Artificial Sequence
  ENSG00000236663_2 (sequence is synthesized)
ggcactgagcctccaggatgggccctggtcacctgccactctgaactggagaaagcaagttggaaaatgaatgaatacatgaatataaattatcaaataaaaattataaagcctacggta

SEQ ID NO: 902167 - DNA, 120 bp, Artificial Sequence
  ENSG00000236662_0 (sequence is synthesized)
tggggaaaaagggtgtttattaaccaacggcagggggaggagctgagcccaggctccccactctgtcacatgcctgttccacccacctggttgtaagtgggggcattcctaaagaagtgt

SEQ ID NO: 902168 - DNA, 120 bp, Artificial Sequence
  ENSG00000236662_1 (sequence is synthesized)
atgtgcatcccagagcccaggactacggccttgtggatccagccatcagctggtatggaaagagcagagagttagaccccaactatgggatctgctctcagcaccctgcaagaggcctaa

SEQ ID NO: 902169 - DNA, 120 bp, Artificial Sequence
  ENSG00000236668_0 (sequence is synthesized)
atacatataggcacgcgattccgtcgccacctctcggaccagcagcccacgtccaacgctgggccgaccccagatacacaggcagtcgggattcccgcccggtgcgcttgtctattcatc

SEQ ID NO: 902170 - DNA, 120 bp, Artificial Sequence
  ENSG00000236668_1 (sequence is synthesized)
cctctgcgtcaggctgggacgcgctccgtctgtaaaaggctcaaacgcatctcccgccgcggggcgggatctaggggcccaggccccggggtccagaggcgggtaactttgctaatctcc

SEQ ID NO: 902171 - DNA, 120 bp, Artificial Sequence
  ENSG00000236668_2 (sequence is synthesized)
cccagcggcggggaacgtcgcgcaaccgctgagccctgtccgccgagactaaacaagcagaggaacaggctgtaaacacacatcctgacacgcagggatgttgctcttggagaatgtgaa

SEQ ID NO: 902172 - DNA, 120 bp, Artificial Sequence
  ENSG00000236668_3 (sequence is synthesized)
gacagtttgcttcttgacaagcgagcgaacgggcgcccagatttttgcagcctttccgagtctcccccgagggagaggcggcagagaaaacgccggatttgggagccaccagggaaggat

SEQ ID NO: 902173 - DNA, 120 bp, Artificial Sequence
  ENSG00000236668_4 (sequence is synthesized)
ccgcgcaggggagccgccctccttggccccagacccgcctgcctggggccccctttgctcactgtcaatgtatggtctgaagctctgaggatggtgctggggactggggtcgggggaagc

SEQ ID NO: 902174 - DNA, 120 bp, Artificial Sequence
  ENSG00000236668_5 (sequence is synthesized)
ctcttgaataataactgcaaagaagaaagaggcgagaacgtctccctaaccttgaagcagaaaggactgtgttcttaaagctgttggctgcagtcacagggccagttgcccgcctctgtt

SEQ ID NO: 902175 - DNA, 120 bp, Artificial Sequence
  ENSG00000236668_6 (sequence is synthesized)
tgttccctgagtaaagtgtaacatcttctgtcctcctggcttgcttgcaccattcagcaaattatactccttccttaccaaagtgggaatgctcagggaagtgtgtgtgtgtgtgtgtgt

SEQ ID NO: 902176 - DNA, 120 bp, Artificial Sequence
  ENSG00000236668_7 (sequence is synthesized)
gtgtgtcccctctgcactgaggctgctgttagagatgttaccaatttaaaccttccagaatcctggaggtttacattttgtaaagggaggggacactcctggactgtcacaatcccaatt

SEQ ID NO: 902177 - DNA, 120 bp, Artificial Sequence
  ENSG00000236668_8 (sequence is synthesized)
ctttccccttctctctaacctctgtctcctgtttgtaaggcagaggaagggtgattccttgccactgcacaggaatgcagggttagggttatctccaagaaagggtggggtgaggctgag

SEQ ID NO: 902178 - DNA, 120 bp, Artificial Sequence
  ENSG00000236668_9 (sequence is synthesized)
tcacagggagagcagaaaagctctgtatcttcaatgaggacccacacacacacacctttcccaggcttgtgggcctcattcagcaaagcagggagtgttttatattgatgcgagaggctg

SEQ ID NO: 902179 - DNA, 120 bp, Artificial Sequence
  ENSG00000236668_10 (sequence is synthesized)
tcagtcagcagtaaatcagttcaggcatagctatctctttctttacgaaatcagctcattgccttggtcacactacacagaaaatctgcttatcaccgctatcgacaataaaaattagtg

SEQ ID NO: 902180 - DNA, 120 bp, Artificial Sequence
  ENSG00000236668_11 (sequence is synthesized)
gagccttagttgtttccgaagaggaaccccgtgtctgtgacattagaatagataagtggcttggcctgttgcaggcagagagaagcccaattcctcctcctcttctccctgcagcgatct

SEQ ID NO: 902181 - DNA, 120 bp, Artificial Sequence
  ENSG00000236668_12 (sequence is synthesized)
gaacaattctgaaaccgcctccctgggcgtcagctgagcaggttggggaactaaccagggctctctctctagggccctgttaaatgcactgaacttaaaatgaaacacgaagtgtgaatt

SEQ ID NO: 902182 - DNA, 120 bp, Artificial Sequence
  ENSG00000236668_13 (sequence is synthesized)
tcaggtttgaacatgatgcatcaggaaacgtggaggttggcagcccttttcctccctcctgcttttcagtagcaggtattaatattgtattaaatgttatgagaaagtaaaggctgcgga

SEQ ID NO: 902183 - DNA, 120 bp, Artificial Sequence
  ENSG00000236668_14 (sequence is synthesized)
gaggaatgtgctcagatgcaattttgtcaaggtttttatctgtgattatgattccagatgtagaaactcccggaggagggaaatgaggggctgctggcatgtgacatgtgttttaaggtg

SEQ ID NO: 902184 - DNA, 120 bp, Artificial Sequence
  ENSG00000236668_15 (sequence is synthesized)
tttggcagtgtttctcaaagtggtgacaaaatgttcaattttattacagggaattggtaaaagaaatatgaatactaggtcagagattgttcacctcagcaaaaggatttaccattattg

SEQ ID NO: 902185 - DNA, 120 bp, Artificial Sequence
  ENSG00000236668_16 (sequence is synthesized)
attagggtgcagaaagtatgtatctaggtcctgcttaaatcacattgtcaacaatataaatctgtcagatcagatttttctgaaagaacaattataacaaaatacactatagctaattgc

SEQ ID NO: 902186 - DNA, 120 bp, Artificial Sequence
  ENSG00000232788_0 (sequence is synthesized)
gcatgtgagaacttttggctgatgaatacaagatacgctcattcattctcttcattgctatgaaatgagtttttccacaacctcctgcagaacctcaacacatcactaggtggcaacatc

SEQ ID NO: 902187 - DNA, 120 bp, Artificial Sequence
  ENSG00000232788_1 (sequence is synthesized)
cctacaccatatcggtttagaaaccacggttaggaggagcagcaaaacacgcggcatcccagtatgattcagaagtaaagtttacaatctttgaggcctggctgactcatggaacaacta

SEQ ID NO: 902188 - DNA, 120 bp, Artificial Sequence
  ENSG00000232788_2 (sequence is synthesized)
gactggacagagataaaccaagagctgagagttttggaaacaaggctggagctgaggaaaaggactgggaacacgaacctgtacaaacaacaaattcttacaacagaaaacaagccactc

SEQ ID NO: 902189 - DNA, 120 bp, Artificial Sequence
  ENSG00000232788_3 (sequence is synthesized)
ctggccatcaagaaacccacaaatctcagaagcaaaagcaaaacaaatgaaaatacaaaccaaatagtctctattaccttcatgcctgttgggtcccaataaaggaatcattccaataaa

SEQ ID NO: 902190 - DNA, 120 bp, Artificial Sequence
  ENSG00000232788_4 (sequence is synthesized)
cgttatcaaactcgatccgcgtgcatggcccccgggcggtgatgtcgcagctgtacagccctcccgttctgttggctctctgcagtggaagcgcttctgcccgcggggcccccacgagca

SEQ ID NO: 902191 - DNA, 120 bp, Artificial Sequence
  ENSG00000232788_5 (sequence is synthesized)
gaatttaatatacgtttaacagttaaatcagtcagaactaggagatagtgggattattctttgtctaggagtccactaattcttcaacagcttaggcagtgagtgagaacaaatgtagag

SEQ ID NO: 902192 - DNA, 120 bp, Artificial Sequence
  ENSG00000232788_6 (sequence is synthesized)
tcctatggctggttcatgcaaaacgcacaaacacaactaaacaggggaagccaaagaggggataccaaaacgaggaaaataggcctgtctctcatagtatcagcatttcttgctgggtat

SEQ ID NO: 902193 - DNA, 120 bp, Artificial Sequence
  ENSG00000232788_7 (sequence is synthesized)
gatctggtgtttaaaagacaccctcttcaaagaatacaacctctaagcccctatgatgccagggatatcatatgaaactcaagagaagaaaccaaatacttgtgacaatggaaggaaaaa

SEQ ID NO: 902194 - DNA, 85 bp, Artificial Sequence
  ENSG00000271109_0 (sequence is synthesized)
ccctccgagccaggtgcgggatatatggcgcagtatttgggtaggagtgacccgattttccagtgagatgaacccggtacctcag

SEQ ID NO: 902195 - DNA, 120 bp, Artificial Sequence
  ENSG00000271109_1 (sequence is synthesized)
tccttgacaagcttgaaggtgagcacctcgaagggcttctttttatgttgaaaggcacgggtttgcatggcggttcatcagaggtcaataccccagtttgagaaagtccactgtggggag

SEQ ID NO: 902196 - DNA, 120 bp, Artificial Sequence
  ENSG00000271109_2 (sequence is synthesized)
aaagaatggaacacccctccgctgacttcaaccaactgcctgctgatgcggcctgactcccagccctttttgcagttttgaagtgacaaactgactaggctacaaagtattcaaccatgg

SEQ ID NO: 902197 - DNA, 120 bp, Artificial Sequence
  ENSG00000271109_3 (sequence is synthesized)
gctggttctggctggttcaccgaggctgtgtacaaagtgtcttcatgtcctgtgtttcaccttttaacatacagaacctaattttactgcattttaatgttaattctccactcgaaggtg

SEQ ID NO: 902198 - DNA, 120 bp, Artificial Sequence
  ENSG00000271109_4 (sequence is synthesized)
aacatgggatgtatgtaacacatatgtttgcttatcaagcacacatatgaccccctttcatgaatattcatagttccccctgtgacctgttgaatatgtctgtttagccaacctgtttgg

SEQ ID NO: 902199 - DNA, 120 bp, Artificial Sequence
  ENSG00000271109_5 (sequence is synthesized)
cataaaactcctatcccaccctatctccctcaaagtacctgtttgtggtctcagctggaggtgccacttcccagcctgcagtttgcaacccttctcaagaaataaagtcttcctttccaa

SEQ ID NO: 902200 - DNA, 89 bp, Artificial Sequence
  ENSG00000271109_6 (sequence is synthesized)
gagctgtagactgcatcttggctcctccttgaaaacaagccctggaaaaacaaagaatggaacacccctccgctgacttcaaccaactg

SEQ ID NO: 902201 - DNA, 120 bp, Artificial Sequence
  ENSG00000227562_0 (sequence is synthesized)
agtctcctttctgcaggctcgatgggaaggtccttcttgcccattaataatataaaagagccgcaaagggcaacaacttgtcctttatcttagaatcgctgtcttggcatgccacagact

SEQ ID NO: 902202 - DNA, 120 bp, Artificial Sequence
  ENSG00000227562_1 (sequence is synthesized)
acaggacttctaaaagcttcagtgttgaagctcctgaatcttcatagggtgtatctcccatctggtgcacatgtgtcttcctgagtgtcttcctacggcaccaggtctaactgatatgac

SEQ ID NO: 902203 - DNA, 120 bp, Artificial Sequence
  ENSG00000227562_2 (sequence is synthesized)
gtctagtggattgtgccatcccgaccacgtaagggcagactgttttattgatggggataaagaagaatgaattttccagaataagtgctccataccaagtgccaaagcccactgaagaca

SEQ ID NO: 902204 - DNA, 120 bp, Artificial Sequence
  ENSG00000227562_3 (sequence is synthesized)
gcacatctactactggggctaccacttgattaagtttaagacagttactgtcatttgctacggtccagttgattttgataggggccctacagggatggtgaatggggatatgacgggacc

SEQ ID NO: 902205 - DNA, 120 bp, Artificial Sequence
  ENSG00000276337_0 (sequence is synthesized)
tactaactggaacatgtgctgttaaaaggatgaggtgctgtgcggagagaaggctagcatggcccagtgccttgaagttcatgggtccatttggaggatgtcagtggaatggttgtctac

SEQ ID NO: 902206 - DNA, 120 bp, Artificial Sequence
  ENSG00000276337_1 (sequence is synthesized)
atgctctagcccctggtggcggtcagccacgggaaggagagtcaggcgtgtggtgaacttgccagagaagcaggcctgggctaggcttcacctgtaggtgtgaagttcagttgggcagat

SEQ ID NO: 902207 - DNA, 120 bp, Artificial Sequence
  ENSG00000276337_2 (sequence is synthesized)
accaggtgcctaggggatgagggtctggtcatagctgcagtgggaggtaaatctgaaactttttggcctaaatgtcttctgtgatcaatccaggtgagccctttctggtctgatcttttg

SEQ ID NO: 902208 - DNA, 120 bp, Artificial Sequence
  ENSG00000276337_3 (sequence is synthesized)
ttgcatggctgacagtaagagatggggaccctggctctgaagcagcgatgccttgttcataatagggtgtcccaagaagactcctggaatagagtttgtggtgcctgcagaaacaaagcc

SEQ ID NO: 902209 - DNA, 120 bp, Artificial Sequence
  ENSG00000276337_4 (sequence is synthesized)
tgctagccgattttactgacactttctggaccttggatgcactcttgttttgaaccaggggtttctcgctcctggcctcttcaagtcctgttctttcccatcctagatgcctaagtgttc

SEQ ID NO: 902210 - DNA, 120 bp, Artificial Sequence
  ENSG00000276337_5 (sequence is synthesized)
tgaaaccgaacctatactgtggctggtatccccaaagcactgtaaagcagccacttgaacgtgctcactgctttgaatggtccatctcagggagctgaatattatagtgggaaccaaaat

SEQ ID NO: 902211 - DNA, 120 bp, Artificial Sequence
  ENSG00000276337_6 (sequence is synthesized)
ggtcatgataacgcagtttagttattgtgattagacatttagccagcttctctaagaaaaccccagtatttaagcatattcctggccaaatattcacaataacaatattgtgtgtattat

SEQ ID NO: 902212 - DNA, 63 bp, Artificial Sequence
  ENSG00000276337_7 (sequence is synthesized)
cctggccaaatattcacaataacaatattgtgtgtattatgtacttaacgtcaaaagtcctga

SEQ ID NO: 902213 - DNA, 120 bp, Artificial Sequence
  ENSG00000276337_8 (sequence is synthesized)
aggttgcagtgagctgagatcgtaccgttgcactccagcctggggaaaaagagcgaaactccatctccaaaaaaaaaaaaaagtcctgtagataaagataacctcagggaatgtctcatc

SEQ ID NO: 902214 - DNA, 120 bp, Artificial Sequence
  ENSG00000276337_9 (sequence is synthesized)
catctgccatcctcttggatgtggcatcagtggagttagattgcatctatgcctgcaatggagagggtgctggctgcagcctctgcccctgaagctgttgcagctcactgtttctaacat

SEQ ID NO: 902215 - DNA, 120 bp, Artificial Sequence
  ENSG00000276337_10 (sequence is synthesized)
tacgagtgtcacatcatttaaattttttcttacactgggtgcagtggttcatgcctgtaatcccactcaccacttttgggaggctgagttgggaggatctcttaaggccagtagtgcaag

SEQ ID NO: 902216 - DNA, 120 bp, Artificial Sequence
  ENSG00000276337_11 (sequence is synthesized)
gcctgggcaacatagggagacccccatctgtacaaaaaataaaaacaattagccgggcgctgtggtacacgcctgtagtcgcagctgctcaggaggctgaggtgggagatggcactgagc

SEQ ID NO: 902217 - DNA, 120 bp, Artificial Sequence
  ENSG00000276337_12 (sequence is synthesized)
cactccagcctgggcaacagagcgagcccctatctcaaagataaaaaataaaaagtgcatttttcttgagggggaaggaaccatcatggtggccgtattgctttactttctgatggtgtc

SEQ ID NO: 902218 - DNA, 120 bp, Artificial Sequence
  ENSG00000276337_13 (sequence is synthesized)
ctttactttctgatggtgtcgtcttcagagattgttgagattgggttgttggttcccacgtggccatgtcctgtcagtgttgcttctgtgtgttccctcgctgtcacctgttgctcctaa

SEQ ID NO: 902219 - DNA, 120 bp, Artificial Sequence
  ENSG00000276337_14 (sequence is synthesized)
gtgctgactttgtacctttttcgagcagcctctgattggtttctccccgacccggcccgcgccacagcggtgctgctggtggtctgctctgtggggccgtgttgagagagaagctctgag

SEQ ID NO: 902220 - DNA, 120 bp, Artificial Sequence
  ENSG00000276337_15 (sequence is synthesized)
tggatccctgtggctgtggaatgggcgcttgctgtttgccaggctccatcctgagagccatgcttggtggactggctacttcaatccttgcaccaaccctcggaagtcaatatggtggct

SEQ ID NO: 902221 - DNA, 120 bp, Artificial Sequence
  ENSG00000276337_16 (sequence is synthesized)
gtccccactttacagatggggacacaggcttggaaatgccacatcacttgtgtcgcacgactagtgatgggggcggccctcccgagggtctgactgtagggccggcatttggcatcacta

SEQ ID NO: 902222 - DNA, 120 bp, Artificial Sequence
  ENSG00000276337_17 (sequence is synthesized)
caggaggttgacactttcactattatgtttactcctcctacttcagttccacccctacccccagcccagttttattgacacttgcacttgtctgtgcaagcattttctctcctgttgcat

SEQ ID NO: 902223 - DNA, 120 bp, Artificial Sequence
  ENSG00000276337_18 (sequence is synthesized)
aaagttgttttttttagtggagggtagtagttgctcagaagcactggaagacagcagtggtcagagcccggtcagcagtgaaggtcagcgccattgccggcctccgaccctagtggtgag

SEQ ID NO: 902224 - DNA, 120 bp, Artificial Sequence
  ENSG00000276337_19 (sequence is synthesized)
taggtcgctgctggacaggagggcaaggaggggctaggaaggcagaaatgagttgttgctcatgagtacaagcaagatgctggtgttctctctgaagtcaatacatccgttaagatgccc

SEQ ID NO: 902225 - DNA, 120 bp, Artificial Sequence
  ENSG00000276337_20 (sequence is synthesized)
tttgaaccctgttttatgggattacaggactaggaagtatgtctttagcctccctagggctctcgactttagactccctctgtttctacaggcagtgtctggaacagggattctgggtgt

SEQ ID NO: 902226 - DNA, 120 bp, Artificial Sequence
  ENSG00000276337_21 (sequence is synthesized)
gttggaggctgactgtagggaagccctaccccagaggtcccatgtggttggcccctggtgggatgtcttggcacctggaggcctggaagcccccgcgggtgggcagttggggccggtgtt

SEQ ID NO: 902227 - DNA, 120 bp, Artificial Sequence
  ENSG00000276337_22 (sequence is synthesized)
cctagaggaggccgtgctgccctgtggctatttgtgaaagagatttgcatctggtcactctgggagctggtctagttaagtactgggttccctttgctgagattttaagcagtaatcttt

SEQ ID NO: 902228 - DNA, 120 bp, Artificial Sequence
  ENSG00000276337_23 (sequence is synthesized)
tttctctctttctctttttgatgagtagagctctaggttaagaaatattaaaaggaatgtttttacatggaaaatgtttttttggttagcgttggctttcacttggtctaagtcagcaaa

SEQ ID NO: 902229 - DNA, 120 bp, Artificial Sequence
  ENSG00000276337_24 (sequence is synthesized)
tagctttcactcttaaactgtctgtcttcttgttctggtttttagagacacgtaatgactattttagcaaaatgcttacaaatctattttgtttttatgttttatgttttttacgttaac

SEQ ID NO: 902230 - DNA, 120 bp, Artificial Sequence
  ENSG00000276337_25 (sequence is synthesized)
ttaaaagtatttaacagacgttactccttcctgtatagaggtaggttaattggaaaacaaattgaaaacactattttttcatagtcatgtttactgtattttgtttgtgggggtagacac

SEQ ID NO: 902231 - DNA, 120 bp, Artificial Sequence
  ENSG00000276337_26 (sequence is synthesized)
tttgaagttcatgttaacccctgatgtgcccggccctcgagatatgtgtggaaggaaagtgtggttatggttttagaagcttgctttttctatacttttcatatcattcacatcttgtag

SEQ ID NO: 902232 - DNA, 120 bp, Artificial Sequence
  ENSG00000276337_27 (sequence is synthesized)
ggaggtatttatatttagacttaatatctgtaacttttttaaattctagaagtagtgattgttcctcacagaaaaattggaaaacagaaaaataaaataaaaattacccagagataaatg

SEQ ID NO: 902233 - DNA, 120 bp, Artificial Sequence
  ENSG00000276337_28 (sequence is synthesized)
ctagtaatatttcggtgtacctttgtcttttctcagtgcctgtttgcacacaactgatgtacgttctgcccattttcacattatctgtgagcatcctgcatgccttttaagactgcataa

SEQ ID NO: 902234 - DNA, 120 bp, Artificial Sequence
  ENSG00000276337_29 (sequence is synthesized)
tattcagtcatctggacatacacatttagcgacctatttcaatagtaatctgttgctgggatgtttatgttgtttgtttttctttttgctcaagctgagataaatctccttacacacaaa

SEQ ID NO: 902235 - DNA, 120 bp, Artificial Sequence
  ENSG00000276337_30 (sequence is synthesized)
cctttgactacatcgctgattgactgtatcctaacagcagactcctcccagtgggattagtgggtgaaaagctacagatgggaaaaaagctcatcacatcctgcctccttgctgtccaga

SEQ ID NO: 902236 - DNA, 120 bp, Artificial Sequence
  ENSG00000276337_31 (sequence is synthesized)
cagtggccccaggttacactcagctgaggacgaggccaccccctgcagctttatgagcatttgactcctgagaacattttaactgtagtccaagtaattaaataattattcaagctgtca

SEQ ID NO: 902237 - DNA, 120 bp, Artificial Sequence
  ENSG00000276334_0 (sequence is synthesized)
aatctgtgtgttttagatttcactaaatttcgaaatattttggcaattatttcttcaataattgcctcccctttttttataattacagttacttattaggctgtatgaagttgtttgaca

SEQ ID NO: 902238 - DNA, 120 bp, Artificial Sequence
  ENSG00000276334_1 (sequence is synthesized)
ccccaaatctgtgtttcctcttttcccccccatcattttttttctctatttttaaattttggataatttcctgtgtctgatctgttagacgttttatatctccttgtccttacttaaagt

SEQ ID NO: 902239 - DNA, 120 bp, Artificial Sequence
  ENSG00000276334_2 (sequence is synthesized)
gtataggttttcttcagctttcttgaacatagtagtctgtttgtactatttttctcttccttatggattgtatgttctcgcttctttatttgcctggagaattttcttggatgccagaca

SEQ ID NO: 902240 - DNA, 120 bp, Artificial Sequence
  ENSG00000276334_3 (sequence is synthesized)
gacaatgtaaattttactttttggggtgctgaatattttgtattctaatatatatattttattttttcatgaaatataatgatattatttgaaaacagtttgttgcttttagacttgctt

SEQ ID NO: 902241 - DNA, 120 bp, Artificial Sequence
  ENSG00000276334_4 (sequence is synthesized)
tctttgtaagtaggatcagagcagcttttaatctaaggcaagacttactgtaattattggtaatttttataaaccaatgttgtctagtttggtaactgttaagcacatgaaatgagacta

SEQ ID NO: 902242 - DNA, 120 bp, Artificial Sequence
  ENSG00000276334_5 (sequence is synthesized)
agaaactaaatttttagattgaatttttaattttaatgaattttacctttaaatatgtacctcattagaatagaattaaggtaccaggtttgaaaatgcagttctaaatcccatttgacc

SEQ ID NO: 902243 - DNA, 120 bp, Artificial Sequence
  ENSG00000276334_6 (sequence is synthesized)
acaaagcattttattccctgaaaccctggggttgcttgccctgctacttttcgatagtacctttcctggccttcagtggtttgctcacataggttcgtcagtacatgttgaagtcttgaa

SEQ ID NO: 902244 - DNA, 120 bp, Artificial Sequence
  ENSG00000276334_7 (sequence is synthesized)
gaccctgtatagatctctggagatccagggatctccagatctctagatgcaaatctgcatagatgcaaatattttcttcctggatttccggctcttacatcctcagtctagggtgacaac

SEQ ID NO: 902245 - DNA, 120 bp, Artificial Sequence
  ENSG00000276334_8 (sequence is synthesized)
taggttgtgctgagctgtggcctaggaattcttttccagacagctcacacaatcctaggggtcacctcattggtttccacttacccaggcatcactgccctgccctgcctgatactcagt

SEQ ID NO: 902246 - DNA, 120 bp, Artificial Sequence
  ENSG00000276334_9 (sequence is synthesized)
gtctgaaaagtattgttaatatatatttctagttaaggttatttcacgtgggagatgaacctgatccttataattccagaagtggaattctaaaacagagcagctttttgcatacgttca

SEQ ID NO: 902247 - DNA, 120 bp, Artificial Sequence
  ENSG00000276334_10 (sequence is synthesized)
agtacagagaaaaaaataaaacagaaatttgtattaaaaaataaaaaagtaaattaatattagaaaccagagcatttttaaaaggaagttgagaaatttttttttagtgtttgaatggca

SEQ ID NO: 902248 - DNA, 120 bp, Artificial Sequence
  ENSG00000276334_11 (sequence is synthesized)
tttattctttatatttacttttgaaataagggtaataaatgaaaattggctaaacttctaattgcactaagtaaattattacctaatattctttgtgtgcttttcttacctgattatgct

SEQ ID NO: 902249 - DNA, 120 bp, Artificial Sequence
  ENSG00000276334_12 (sequence is synthesized)
atgaattaattttgtgaatttcttattatttaaatgtttcactctgacctgtgtcagtatgtttgccatttttagttgcttggttgtttttgttagaaagtaaaatgtattgttgcacca

SEQ ID NO: 902250 - DNA, 120 bp, Artificial Sequence
  ENSG00000270279_0 (sequence is synthesized)
ataagtattgaggcgctgctatgggggccctgctaggaggatttccctggactcaacgggttcctgtccaaggtcctttcattatccttcttcgccgatggagaactgagatccagagag

SEQ ID NO: 902251 - DNA, 120 bp, Artificial Sequence
  ENSG00000270279_1 (sequence is synthesized)
tttaactaactcacccaagatcacatcagctactggggtggaagtaggagctgatcccagaccaacttgctcaggaagaaaggttttctcctgtgttggatatggtagagcctccgtaca

SEQ ID NO: 902252 - DNA, 120 bp, Artificial Sequence
  ENSG00000270279_2 (sequence is synthesized)
taccaggttcatctgaattctcagcctcagctgcggtcacgcgcatcaccagcttctcacctcccaaatcacaccaaagaagaataaaataggcatccatcggaaattcccgtctgcttt

SEQ ID NO: 902253 - DNA, 120 bp, Artificial Sequence
  ENSG00000270279_3 (sequence is synthesized)
cgacacacatttttgtaaatgttcgttacatcctagtaggggtgagtgtgtgtctaaggcaggcatgttgatggggttggggaagttatggcccaccttaaacgtaataaccttgcgcag

SEQ ID NO: 902254 - DNA, 120 bp, Artificial Sequence
  ENSG00000270279_4 (sequence is synthesized)
ttctttgggggctgcgagtacactacaggcatgaatgttcagtcacctgatcttcattccagacgctaggaaaagcaggccggtgtaaggaagaaagcctttcaaatttgtattggctcc

SEQ ID NO: 902255 - DNA, 120 bp, Artificial Sequence
  ENSG00000270279_5 (sequence is synthesized)
tatttagtatttgtcagggtccagggctgcactccagtgaacgcctcacttaggaaagattggacactcgacagaccacatatttatctcgctctctgtcggtcagtgcgttccaaagcc

SEQ ID NO: 902256 - DNA, 120 bp, Artificial Sequence
  ENSG00000270279_6 (sequence is synthesized)
acaagctgccccttcagcaaatatcctattgccccagccacggggatcaccttcatgatgccccctccccatcagagcgtataaaagagtccctatgcttcccataggcctcatgacctc

SEQ ID NO: 902257 - DNA, 120 bp, Artificial Sequence
  ENSG00000270279_7 (sequence is synthesized)
atctctcctgcacagtccacttggtgttaatgggcccagtcaaaaggcaggactgttggacgccagtgttccttattcgaccatctgtcgatcaaagtgaccacacaaaccccgctttgc

SEQ ID NO: 902258 - DNA, 120 bp, Artificial Sequence
  ENSG00000270279_8 (sequence is synthesized)
cgtcgcagtacctccacagcaacgccacggttctccctcttcctctcacacgcttctccccatcccacctgggtcctgccgcctcctcccgagagcaaacgtggagctatttgtccaagc

SEQ ID NO: 902259 - DNA, 120 bp, Artificial Sequence
  ENSG00000270279_9 (sequence is synthesized)
gtcatatgcgagccgcaggagacgctcataaatccctgccctgttctctggcagtttcagacgttgtcgggcccagaccctccttttctttcttaaaggtcacaaaatctaattagaacc

SEQ ID NO: 902260 - DNA, 120 bp, Artificial Sequence
  ENSG00000270279_10 (sequence is synthesized)
attgctaactgtatattctcgttgtcggtaagccttaaataataaaaatcagaccaaatgagactaagcaagggagatggaaaatcgatgtcatatttgttccaagtaatttcccttcag

SEQ ID NO: 902261 - DNA, 120 bp, Artificial Sequence
  ENSG00000270279_11 (sequence is synthesized)
aagagaaaaggctcttaggactggtttgtgaatttaaaagatgtttaaagttgcatctaggcatcggaacatcaaagtcaaccccaaacagaatttcgctggatgatctctccttattcc

SEQ ID NO: 902262 - DNA, 120 bp, Artificial Sequence
  ENSG00000270279_12 (sequence is synthesized)
cggaaaagtcagtgctgtttggtagaagggcctaagacggggtgacagccttcctcttcctgtctgttttaagcagttgtggctttgccaaaaataaaaataatttctttgaaaaaccga

SEQ ID NO: 902263 - DNA, 120 bp, Artificial Sequence
  ENSG00000270277_0 (sequence is synthesized)
aattgtgccagtcacttcacagctgtcgccttttccagcaccattgatagcactaactcggaatttgtattcttcacctgcttgtagatcagtgactgtatatcttgttttcacacatgc

SEQ ID NO: 902264 - DNA, 120 bp, Artificial Sequence
  ENSG00000270277_1 (sequence is synthesized)
ctctgcattcaccttgtgccagtctcctaagtcggccttacacatttcaataatatacccaattatttccatgccaccatcaaacactggtttggaccattctaagctcacagttgtctt

SEQ ID NO: 902265 - DNA, 120 bp, Artificial Sequence
  ENSG00000270277_2 (sequence is synthesized)
tgatgtgtctgttactttgaccactgtgggaggacctggtgggttgacgggctctctacatttaatgagtcttgagatgccacttgcaggtccaactcctgcagcattttcagccatgac

SEQ ID NO: 902266 - DNA, 120 bp, Artificial Sequence
  ENSG00000270277_3 (sequence is synthesized)
atggaattcatactcattgccttctgtcagaccagtgactttgaatcttgtttcagagattggtcgtttgctgatcacttttacccatcttgtgcttttcttttctcttctttcaaggat

SEQ ID NO: 902267 - DNA, 120 bp, Artificial Sequence
  ENSG00000270277_4 (sequence is synthesized)
atactgttgaatttcactgccaccatctgattctggccttgcccatgtcagggtaatgctgttgcctgttatgttgctaggttctggaatgccaggggcatcaggaacagctgtaaaaca

SEQ ID NO: 902268 - DNA, 120 bp, Artificial Sequence
  ENSG00000270277_5 (sequence is synthesized)
aaaacaaaaccccaaatcaattagatgcatttgcttggaaggttaaacttttgacatagtaccgcttagtaaaaacgcaaacttactatattgtatttgagcaaccactggatcagaatc

SEQ ID NO: 902269 - DNA, 120 bp, Artificial Sequence
  ENSG00000270277_6 (sequence is synthesized)
aagtggcctgccaacaccaaacttgttaactgcagaaacacggaattggtattcattgccgtttattagtttaatggcagtgtaactttgggcttcacatttatcctcaattagtgccca

SEQ ID NO: 902270 - DNA, 120 bp, Artificial Sequence
  ENSG00000270277_7 (sequence is synthesized)
attggcccaactacttttcctggtgtatctataagaaaaagtttctagagttagtttctttttccttgtccattaaaatacaactaggcatgtctctaatccaagttcataaattgtagc

SEQ ID NO: 902271 - DNA, 120 bp, Artificial Sequence
  ENSG00000270277_8 (sequence is synthesized)
attaagaagctattttaaaagtaccttgtactttcactttaatttctgcttttgcagaaccagatgcatttttggcttccactgtgtatacaccacgatggtcccgagtagcatctctaa

SEQ ID NO: 902272 - DNA, 120 bp, Artificial Sequence
  ENSG00000270277_9 (sequence is synthesized)
caaataggctggtggatccaagtacgtcggttatttccatattcatcctcttttcgatttccactccatctttgaaccaagttactcgaggcactggtcttccttgtaccaaagctttaa

SEQ ID NO: 902273 - DNA, 120 bp, Artificial Sequence
  ENSG00000270277_10 (sequence is synthesized)
ttctaaggctctctccggacttaataatgagaccatcaaagtattcagggccaaactctactattggtggaactataaaagaaagagaaatactatgtattagtttggcttaataaagac

SEQ ID NO: 902274 - DNA, 120 bp, Artificial Sequence
  ENSG00000270277_11 (sequence is synthesized)
atacataaatatatatttttcagtagtgccatatcacaaggccaggaagagtagtgacttctactgtgctaccaaagcctattttgaaagtaggattgataattgagaatttggactatg

SEQ ID NO: 902275 - DNA, 120 bp, Artificial Sequence
  ENSG00000270277_12 (sequence is synthesized)
gggttaaatatttgcctattattattccctttgtaatgcctgtcatgtttttaattttgcattgctctttgtaaaaaggaaagtgaaacatttacagatcatgtacttcctaatactgct

SEQ ID NO: 902276 - DNA, 120 bp, Artificial Sequence
  ENSG00000270277_13 (sequence is synthesized)
gcacagtcacacaagttcttttaagaggccatcagctgcattcaagcaaggggatgattgtgttgttggatgtatgttgtattttaataacttcagtaaagatggacacttattctcgag

SEQ ID NO: 902277 - DNA, 120 bp, Artificial Sequence
  ENSG00000224563_0 (sequence is synthesized)
caggagacagacatgatcataggaaacttcctcagatcttccaagactaggtttgctttgtccctgaatatgcttccagagtaccctctgctgaccctgagtactggtctatagcaccaa

SEQ ID NO: 902278 - DNA, 120 bp, Artificial Sequence
  ENSG00000224563_1 (sequence is synthesized)
atggaagactgtctgtcgatacacattttgtgacaggctcagttttgtataactattgtcaatctccataaccctagcacataggaagtctctggcacatatcagatgctcaatatcggt

SEQ ID NO: 902279 - DNA, 120 bp, Artificial Sequence
  ENSG00000224563_2 (sequence is synthesized)
aatcatctcctttaaaaccagagtcagtggattgaagggattgacttcagtaggcagcaattcagtccaacaaataaggatctattactgagcatcaactatggtgaaactgtgcttggt

SEQ ID NO: 902280 - DNA, 120 bp, Artificial Sequence
  ENSG00000224563_3 (sequence is synthesized)
ggaagttcaagaatgaatatatcaaaagtcacgtcctgcaggaagtcacaaccaacaacggagataaactgttaaactgaaaatgatccttgtatgaattaaagatgctggtacacttga

SEQ ID NO: 902281 - DNA, 120 bp, Artificial Sequence
  ENSG00000264108_0 (sequence is synthesized)
gaataccgcgtcgagtccttgctcatccccacgaatgctttgggtttcgctgtgatgtgtgtgcagctgtatatgggcctgttggggctgatacagcagtcattctttccaagaaatctt

SEQ ID NO: 902282 - DNA, 120 bp, Artificial Sequence
  ENSG00000224565_0 (sequence is synthesized)
gagagatccagatctggagtagaagaacgaaagtgattggcaagagtctgctcagcaggaaaagctctactgatctactccatagctccctctctgtctggctcctgtttcattcttccc

SEQ ID NO: 902283 - DNA, 120 bp, Artificial Sequence
  ENSG00000224565_1 (sequence is synthesized)
attacaaaaatccagggaaactattgggcaaaggcagagtctcctccaagggcctcagttgctgggcaggcaaagaccaaatggtcttttctttaagggggcggggtgctataatcactt

SEQ ID NO: 902284 - DNA, 120 bp, Artificial Sequence
  ENSG00000224565_2 (sequence is synthesized)
atattaattattcaaccacataaattaacttccaggactctggatatatttcgggggaagagtctaaataattcatatttgattcataatacgtgcatattctaataccagataattgga

SEQ ID NO: 902285 - DNA, 120 bp, Artificial Sequence
  ENSG00000224565_3 (sequence is synthesized)
gagacacaactggctccagcccttttcctgcctcttcctgctttgaatactcacatgatacctggagctgcagcagccatcttgtttaccaagaagaaaagccaagatgatcacagaata

SEQ ID NO: 902286 - DNA, 120 bp, Artificial Sequence
  ENSG00000224565_4 (sequence is synthesized)
gccagcactggtattgttccgccagcgacagcagatacttacctccagatttttggggaaaaaaaatgagctggagtgactctcttggtccctaaggtggaagccatgtgttgaggacac

SEQ ID NO: 902287 - DNA, 120 bp, Artificial Sequence
  ENSG00000224565_5 (sequence is synthesized)
tgagcaacaagataggaggagcctggggcccagccagagaacaggaagccacccaaatagctctcaaccccttatagatggactactaaatgggaaataaagtagactgttctctcttga

SEQ ID NO: 902288 - DNA, 88 bp, Artificial Sequence
  ENSG00000224565_6 (sequence is synthesized)
agactcgagcaattttctcacttcagcctcctgagttgctgggaccacaggtgcacgcaccaccccctgcagagacagtgtcgcctta

SEQ ID NO: 902289 - DNA, 120 bp, Artificial Sequence
  ENSG00000224565_7 (sequence is synthesized)
tgttgcccaggctgaacacctgtgtctcttaacctaagagctgtctccagcacaggatgcaagacagccccaaaaaagtgttagggacttaaagccaccagaagcttttcttaaccaatg

SEQ ID NO: 902290 - DNA, 120 bp, Artificial Sequence
  ENSG00000224565_8 (sequence is synthesized)
gaatacaggagtcaatgggaacatcctgtccagaggaaaggatatttaaggagaaaggaagcagcacaagttcgactcagccaagaaacagaggaaggacatcccaagcacgaagtgggg

SEQ ID NO: 902291 - DNA, 120 bp, Artificial Sequence
  ENSG00000224568_0 (sequence is synthesized)
ggtgtgacatttacatagcccagggaaggctggccaccctaccctaatcttattatgtaactgaactttccccttggccagggccatcttgtctgctccttactgtacatgtggctggca

SEQ ID NO: 902292 - DNA, 120 bp, Artificial Sequence
  ENSG00000224568_1 (sequence is synthesized)
gagaagggaaggtggagccgctattttgaacatgattggcacaactgccagcatctatatctgcagcttgattttacaggctgctctttgttagaaaggaacatgatttggggctacttt

SEQ ID NO: 902293 - DNA, 120 bp, Artificial Sequence
  ENSG00000224568_2 (sequence is synthesized)
tcattaaaaggaaaactgtaccgaagacttccataccctcactatctgtggaatccctggaaagaaatgaagcttcacactcagaatatcacatttagtgatttcaggagaccagcagaa

SEQ ID NO: 902294 - DNA, 120 bp, Artificial Sequence
  ENSG00000224568_3 (sequence is synthesized)
ggaattaagctggaactcctatacagtttattttctaggtttgggacctctgcgtacctcctgtggctttatggtacctggtattgtttccccagaccatgagtctccagtgttggagtg

SEQ ID NO: 902295 - DNA, 120 bp, Artificial Sequence
  ENSG00000224568_4 (sequence is synthesized)
cccacttcagaagtctgtgtgttttgcttcatcctgaggtaaacactgcttagtatgtgcatcctggtggtggttgtgatggtggggactagctcagccattctccctgtgtggctactg

SEQ ID NO: 902296 - DNA, 120 bp, Artificial Sequence
  ENSG00000224568_5 (sequence is synthesized)
acaggtaaaaggaaatcagtgtaagtaactagattggggagttaatgatgatatccacttggacatactgtgtggagcctgttgggaatccaggtgacaaatccagccagaatataaaaa

SEQ ID NO: 902297 - DNA, 120 bp, Artificial Sequence
  ENSG00000224568_6 (sequence is synthesized)
tcagaagtctgtgtgttttgcttcatcctgaggatcccatcttggataccacattaccttaaacactgcctcagccaggtgatcaaggtcaacgtctactgtgataagtcatggttttgg

SEQ ID NO: 902298 - DNA, 120 bp, Artificial Sequence
  ENSG00000224568_7 (sequence is synthesized)
tgtgtacccttgatgtgatgtgataaaaatggcactttacctctgtggtcttcctctgaaaaatcccgtaacagcagcctaatcatgagaagcatatcaacaaaactcagactcagggac

SEQ ID NO: 902299 - DNA, 120 bp, Artificial Sequence
  ENSG00000224568_8 (sequence is synthesized)
attctacaaaataccaggctgtccctccctgaaattgtcaagttcaccaaaaacaaggtgaatctaagaaacctgttacagccaagaggagcctaagaagacatgaggactaaatataac

SEQ ID NO: 902300 - DNA, 120 bp, Artificial Sequence
  ENSG00000224568_9 (sequence is synthesized)
tgggtataaggaattctctgtactatgtttatctaaaaacaattccatggtgagcaaacttaagcatagaaatgttaaataaattgtccaaaatagagaagtaaatagcagtgccaggtt

SEQ ID NO: 902301 - DNA, 120 bp, Artificial Sequence
  ENSG00000224568_10 (sequence is synthesized)
tcaagcataagaatcatcaactctgaactttaaacacagctctgtatggtacttttgtttatatcaatgcctagatagataaataggtagatagataatttccaagtgctagaaacaaaa

SEQ ID NO: 902302 - DNA, 65 bp, Artificial Sequence
  ENSG00000224568_11 (sequence is synthesized)
aggaaggttcggagttcaagaccagcctggccaactggggaaaccctgtctctactaaaaaaaaa

SEQ ID NO: 902303 - DNA, 120 bp, Artificial Sequence
  ENSG00000224568_12 (sequence is synthesized)
ctgtctctactaaaaaaaaaaaaaaatagccaggcatggtggcatgtgcctgtgaagcaagagatgtgagaggaaaaacaaatttttcctctttcttttggtatgggcagcttccccctt

SEQ ID NO: 902304 - DNA, 120 bp, Artificial Sequence
  ENSG00000224568_13 (sequence is synthesized)
gtatgggcagcttcccccttgaatccctcctcactccttgtgattttaccctgctctgtaagttttatgagtttatagattcctgttttctgtaactagtgtctgtaagtctctgtagca

SEQ ID NO: 902305 - DNA, 120 bp, Artificial Sequence
  ENSG00000224568_14 (sequence is synthesized)
ccgtggaggtaatgagacatgcttgagcaagcttagattgcagccatctgggcgccatagcgaaggacacgagataaggctgtgcaggcatcttgagcaaacctagataacagccacctg

SEQ ID NO: 902306 - DNA, 120 bp, Artificial Sequence
  ENSG00000224568_15 (sequence is synthesized)
gcctgcacagcaagaatcatgtgtaagcttgagttaggaacctgtcacagtttgattaactgcctttgttctgcttctgtaagcttgctttccacaccccacaagctttgcgccactggc

SEQ ID NO: 902307 - DNA, 120 bp, Artificial Sequence
  ENSG00000224568_16 (sequence is synthesized)
aagccaccctccttcagttgcatgaataaaagtcaagccctgtcttcttttgttgctcagcctctggatattaatccactaagccagtggcaacctaaataaaatcctcctgttccaccc

SEQ ID NO: 902308 - DNA, 120 bp, Artificial Sequence
  ENSG00000224568_17 (sequence is synthesized)
gggagagggaggagatttccaagaggaaaggccagctggcagcacatgtggtgaattttatagtcaggctccagtaggcggtgtctgatttatgtagagctcacagattggttccatcag

SEQ ID NO: 902309 - DNA, 120 bp, Artificial Sequence
  ENSG00000224568_18 (sequence is synthesized)
aaggttcaggaaagctgcctggagcagaaggagtctcaaaattcacgggcaccacttgcactgcagctgaggatccccagacagcagcatccccacccccaggtggtatgctctgcggca

SEQ ID NO: 902310 - DNA, 120 bp, Artificial Sequence
  ENSG00000224568_19 (sequence is synthesized)
ataggaatgtctgggctacagcattaaagcacattctgtttctaggggagcatggcaacagagccccagctgtcaggccattctccctatctcagcatgttctagtgatcccagctgttc

SEQ ID NO: 902311 - DNA, 120 bp, Artificial Sequence
  ENSG00000278462_0 (sequence is synthesized)
cacggttcagtcgatcatgtcagatgtttggaggttgtcattttttcctatttgcaatttgtctctactatgccctgggcaacagaaaaatttctgtaccgaaatagtctttacaaatat

SEQ ID NO: 902312 - DNA, 120 bp, Artificial Sequence
  ENSG00000278462_1 (sequence is synthesized)
tatgtttatcttcattctctttgttcttaactttgacctgtgattggaatacattttctaatgtaatgctatctttgtaaataacctttataaataaacattatcttattaccagctcaa

SEQ ID NO: 902313 - DNA, 120 bp, Artificial Sequence
  ENSG00000264107_0 (sequence is synthesized)
gcggccgctcctacctcccctcacctactctgtccccacccccactccgctcccacctcccgcccgccacgggccggttacctgctcgtcgaagcggctgaccacggcctggacccattc

SEQ ID NO: 902314 - DNA, 120 bp, Artificial Sequence
  ENSG00000264107_1 (sequence is synthesized)
caccggcctgtgcgcggccatgtcctccccgcggccggggggcggcggagggaagggtgggccggcgccctgggccgggaagagggcggggagcggaggctgagagacaaggtctgactc

SEQ ID NO: 902315 - DNA, 120 bp, Artificial Sequence
  ENSG00000264107_2 (sequence is synthesized)
tgcagtggctcaatcatagctcactccagcctcagactcctgggccgaagtgatcctcccacctcaagctcctgaatagctgggactacagctgggcatggtggcatgtgcctgtggttc

SEQ ID NO: 902316 - DNA, 64 bp, Artificial Sequence
  ENSG00000264107_3 (sequence is synthesized)
tgggactacagctgggcatggtggcatgtgcctgtggttccagttacttgggaaggtgtcattg

SEQ ID NO: 902317 - DNA, 120 bp, Artificial Sequence
  ENSG00000278464_0 (sequence is synthesized)
gactgtgtgagttccctctcacgattatctcaggtcagtatttgcctttgtaattgatggagaacttcttaatttctctctctagtgcgtctagagtgttgacagttgtttccatggact

SEQ ID NO: 902318 - DNA, 120 bp, Artificial Sequence
  ENSG00000278464_1 (sequence is synthesized)
tcaaatcaacccaaccctgtgagcacagactttcagcaccagagtcagatttcccaaaaatgctattcttgaagcgtagagccagactcacagatcctgtaaagaaaacagatctttcag

SEQ ID NO: 902319 - DNA, 120 bp, Artificial Sequence
  ENSG00000278464_2 (sequence is synthesized)
ttctgagggagagatgtgaatagaaggagtgatcatcactgtggactctatttcttccatctgtgcgtgcaagatttatatctgtatgtgtttgttttaaagttttattgaggtataatt

SEQ ID NO: 902320 - DNA, 120 bp, Artificial Sequence
  ENSG00000278464_3 (sequence is synthesized)
gatacacaataatctgtacctatttaatgtatacaatttgatgagtttggacatacttaaatacctgtgaaaccatcaccacaatcaaggtaatagacatagccatcacctccaaaagtt

SEQ ID NO: 902321 - DNA, 120 bp, Artificial Sequence
  ENSG00000278464_4 (sequence is synthesized)
tttttctttttttctttctctttgttttggtctctaacatttatgttaaaggatctactcaaatatctggttatacttgattgtctgctcgtgtttaaaagtgggggtctaaatagctga

SEQ ID NO: 902322 - DNA, 120 bp, Artificial Sequence
  ENSG00000278464_5 (sequence is synthesized)
ctgatctgtagtctcagcatatgagtggagctgattgaacatgagctttactttagggtgctctgcttgggcccacgtcagtatgtttaaggcttttcttttggattggtcagatgcccc

SEQ ID NO: 902323 - DNA, 120 bp, Artificial Sequence
  ENSG00000278464_6 (sequence is synthesized)
aaagaaggctctttcatctctgatctgaaggtaaaggtctgactgccagtgttctgtgtgttgagtggagaaatttggctggagggtctcagaatttacgacgtacaggattacaaaatc

SEQ ID NO: 902324 - DNA, 120 bp, Artificial Sequence
  ENSG00000278464_7 (sequence is synthesized)
cccgtgtgtctgtatgatactcatccttcagttaggcctggtatcctctagagtagaccagaccccctctatcttgccctctctgtagtatgaacctcttgttttcaccagagtgggagg

SEQ ID NO: 902325 - DNA, 120 bp, Artificial Sequence
  ENSG00000278464_8 (sequence is synthesized)
acagtcacccagtggggtgaagcagagaagaggatctaggatctgtttcctcagaagctttcaacaaatcctgttgtctgtcccattttcagaggtacctggtgccagttcctgagactt

SEQ ID NO: 902326 - DNA, 120 bp, Artificial Sequence
  ENSG00000278464_9 (sequence is synthesized)
gaggattctggttggttctcagcacaggagtcagcctgctctgatttgctagtgatgtcctaaccaatctccctgaaaaattatctgtgaaatttatttctatacatccaacaagcacaa

SEQ ID NO: 902327 - DNA, 120 bp, Artificial Sequence
  ENSG00000278464_10 (sequence is synthesized)
aggtagaataaattcagtgaggtccacatcaagaacattgtaatcaaactgttgaatgtcaaagacagagaatcttgaaagcaacaagaaagaatcaactatcatgtacaagggaacctt

SEQ ID NO: 902328 - DNA, 120 bp, Artificial Sequence
  ENSG00000278464_11 (sequence is synthesized)
agtaagatgaacagttggctatttatcaggaactatggaagccagaaaacagtgggcatatttaaagtgctgaaagaaaagaacctatcaaccaagaattctgtatctggcaaaattgcc

SEQ ID NO: 902329 - DNA, 120 bp, Artificial Sequence
  ENSG00000278464_12 (sequence is synthesized)
cttcaaaagtgaggaagaaattgagatattcccaataaacaaaagctgaggggttcactacaagtagacctgccctgcaagaaatgctacaagatgtcctcaagttgaaatgaaaggaca

SEQ ID NO: 902330 - DNA, 120 bp, Artificial Sequence
  ENSG00000278467_0 (sequence is synthesized)
agttggtgcaaacaaggctcactgcagccttgaccttcgggctcaaggaatccttccctgtcagcctccccggtagctaggactacaggtgcgcaccaccacacccaggagttcaaggct

SEQ ID NO: 902331 - DNA, 120 bp, Artificial Sequence; identical to SEQ ID NO: 901933
  ENSG00000278467_1 (sequence is synthesized)

SEQ ID NO: 902332 - DNA, 120 bp, Artificial Sequence
  ENSG00000278467_2 (sequence is synthesized)
gcggagagaatcttatctcttttgagagctaatataaaaagaattcctcctaggcataaaaatattgtgacaccagttacttaggctaaacatgcctattatgctaagtgagttattaac

SEQ ID NO: 902333 - DNA, 120 bp, Artificial Sequence
  ENSG00000278467_3 (sequence is synthesized)
aataaatactttaactctgtgccatgttaattatcataatctgatttataatttgttttaaccttaggttatatataccttgaagccatttatattttggtatacttgtaataattacta

SEQ ID NO: 902334 - DNA, 80 bp, Artificial Sequence
  ENSG00000275445_0 (sequence is synthesized)
cgccgcgccccagctccgtcctcccggctcggccggccgccctgggcccctccccgcaccgcccgcctctacgttctgga

SEQ ID NO: 902335 - DNA, 120 bp, Artificial Sequence
  ENSG00000275445_1 (sequence is synthesized)
cccggacccgaccggcccggctccggtccctgcccgggtcccggtctcttctggcaggccacgccacctcttggctttctgcccactaataagattgttgatgttgatgactgggcacag

SEQ ID NO: 902336 - DNA, 120 bp, Artificial Sequence
  ENSG00000275445_2 (sequence is synthesized)
gggccccgcgcggtccctgtcaccttgtattctcattgcccgttccgcggccgtcagctcccaggattgccccatttagcaaatagctttcgacaacccctcttcgtcagacgttgtagg

SEQ ID NO: 902337 - DNA, 120 bp, Artificial Sequence
  ENSG00000275445_3 (sequence is synthesized)
tgcagaggtgctggagtggacagaggcaaggcgcccgctcttggggagctcacgttctggtgggaagagacagaaacacattaagaacctatctgtaaaataaagataatttcaggtgca

SEQ ID NO: 902338 - DNA, 120 bp, Artificial Sequence
  ENSG00000235314_0 (sequence is synthesized)
cttctcctcgatgtccacgagcttggtgatgaagtccttcagctgcgccacgccctggcgcacggtgggctgcagcggctccatccaagcctccttggccctggaagccggcgtgtccat

SEQ ID NO: 902339 - DNA, 120 bp, Artificial Sequence
  ENSG00000235314_1 (sequence is synthesized)
gttgcccacgttctggactgcctggaggtgacagcaggaaggaccaggttctgctaggtttaactgacgctgctgcactggataccccaccccggtgccgggcacataggtgcagcctga

SEQ ID NO: 902340 - DNA, 120 bp, Artificial Sequence
  ENSG00000235314_2 (sequence is synthesized)
gagtaagcagacctgggttggaaggtcccgcgattcaccaccgacaggatgggcggccttggcaacccccgacccctcgcaggcctgttcccttatccatgagatggaactcggacaagg

SEQ ID NO: 902341 - DNA, 120 bp, Artificial Sequence
  ENSG00000235314_3 (sequence is synthesized)
tggccacaggaaggctttgcaaactgtgaagtgcagtgcctacgtgggcgtgccagtggcctcgccggagccggtagggaacactctgcagtccaggccagggccccggtaggacaccca

SEQ ID NO: 902342 - DNA, 120 bp, Artificial Sequence
  ENSG00000235314_4 (sequence is synthesized)
gctgtgcatcccgcccgtggccgcaaggcccgcaccttggccaacaggagcagggtgcggctggtgcgggcgtccgcgtggcgctcccgcaggtggaagagcttgggcgacatgatggcg

SEQ ID NO: 902343 - DNA, 120 bp, Artificial Sequence
  ENSG00000235314_5 (sequence is synthesized)
ggagagaagaagcgcaggcacaggaagctggtgacggcgatgaacggtacattctggaggggtgcggaagagcgcgggctggagtcccccagaccagggctcctggcagccccctcccct

SEQ ID NO: 902344 - DNA, 120 bp, Artificial Sequence
  ENSG00000235314_6 (sequence is synthesized)
taggctccgtccctgaccctcgccgggacacagcctccctggtcctccccagcgctccctggttccccaccgctcttcgcccgcccctcgccccagcccagtccaacccggcccagccta

SEQ ID NO: 902345 - DNA, 120 bp, Artificial Sequence
  ENSG00000235314_7 (sequence is synthesized)
gagggcgcacctcgtgctgggcgccggggaagcgctcgcgcacgcgccggaagagctggcggaaggtggcgcgcaccacggcggggcacgcgggaaccgagcggctgagcgcgctcagca

SEQ ID NO: 902346 - DNA, 120 bp, Artificial Sequence
  ENSG00000235314_8 (sequence is synthesized)
gcgcgctcagcagggcccccaggtgggcgcgcagcgtctgcgcgctctgctccagcacctcggcctcggtctgcgggcggtgcagcccggaacacctgcgtggaacggggcgggttggca

SEQ ID NO: 902347 - DNA, 120 bp, Artificial Sequence
  ENSG00000235314_9 (sequence is synthesized)
gaggaggtcacggtcagcgccagggccacgacaggaacagtggctctcacagcagccgggacacggacacaggggacaatacacgggtgggcagaagcacaaacacacatgctgacaggg

SEQ ID NO: 902348 - DNA, 120 bp, Artificial Sequence
  ENSG00000235314_10 (sequence is synthesized)
taacttccactttgctggggtccagctccacgtacttctcctcaaacaccttgttgatgatggggcccaggacgccgtgcaggtactgcatcccggccacctggggaccaccgcaggtca

SEQ ID NO: 902349 - DNA, 120 bp, Artificial Sequence
  ENSG00000235314_11 (sequence is synthesized)
cattgatcctgtctcccccagtcccactccagctgcccaccttctcccggcagccgcccttgcaccgtttgcctgccgtatccgcccaggagggggacaggtacacaagcagggcaaact

SEQ ID NO: 902350 - DNA, 120 bp, Artificial Sequence
  ENSG00000235314_12 (sequence is synthesized)
cccaggagggggacaggtacacaagcagggcaaactgtttattcatgaatgaatgaatgagtgagtgaatgaatgactagaattcttagcccttgtaatcctagcactttgggaggccga

SEQ ID NO: 902351 - DNA, 120 bp, Artificial Sequence
  ENSG00000235314_13 (sequence is synthesized)
agcctgggcaacatagtgagactgtctctaacttaaattttaatcacacacacattcttttggggggggggggtgcggggcacggagtctagcacggggcccaggctagagtgcagtggc

SEQ ID NO: 902352 - DNA, 75 bp, Artificial Sequence
  ENSG00000235314_14 (sequence is synthesized)
cacggagtctagcacggggcccaggctagagtgcagtggcgtgagctcactacaatctctggcttctacaggtgc

SEQ ID NO: 902353 - DNA, 120 bp, Artificial Sequence
  ENSG00000235314_15 (sequence is synthesized)
taaccttaaagggctctcaatatggagatagaacactggagtcgaagtcccagccccctctgtcgctctctctgaagctcagtgttgtcatttgcaagatgaggacaatatagcatgcaa

SEQ ID NO: 902354 - DNA, 120 bp, Artificial Sequence
  ENSG00000235314_16 (sequence is synthesized)
cctcaccttcagaaaagactccatggactttgaggccagagagttgctccggaacagggtgttggtcttttgttacttggtcataagtaggcgttttccttttgatttggttctaggagg

SEQ ID NO: 902355 - DNA, 120 bp, Artificial Sequence
  ENSG00000235314_17 (sequence is synthesized)
gaggttagtgtgcattggcgttctgttgcctgcttccagcccctattctcctgcctcaggttcattagaaaagactgagtttggggccgggcagggtggctcacacctgtaatcccagta

SEQ ID NO: 902356 - DNA, 76 bp, Artificial Sequence
  ENSG00000235314_18 (sequence is synthesized)
tgggaggcagaggtttcagtgagccgagttcgtggtcactgcactccagcctggctacagagtgagattccatctc

SEQ ID NO: 902357 - DNA, 120 bp, Artificial Sequence
  ENSG00000235314_19 (sequence is synthesized)
ctgaggaaggcagggccatgggcttggaggcgggacacgcgtcagtagcaggtggcggcggggctatggagctcaaggatggagcaaatgtcaacaggcacagatgatgggaggtttaac

SEQ ID NO: 902358 - DNA, 120 bp, Artificial Sequence
  ENSG00000235313_0 (sequence is synthesized)
tgaactcctgaaccctgccccaaggcctgtgttactccccagcagcagcccagcccttctccccagtcatccaagtgggtacctctctgaaaatccttggaaaggggatccaggacatga

SEQ ID NO: 902359 - DNA, 81 bp, Artificial Sequence
  ENSG00000235313_1 (sequence is synthesized)
tcacctctgcctttgtgcagtggtgtgatctcagctcattggagctccgcctcctgggctgaggcaggagaatcgcttgaa

SEQ ID NO: 902360 - DNA, 90 bp, Artificial Sequence
  ENSG00000275734_0 (sequence is synthesized)
ccatcaaaaagtgggtgaagtgccaatttactgagcacgagacaaatacatcattgacttcttttgtcttgtggattcaaggatgtgtcc

SEQ ID NO: 902361 - DNA, 120 bp, Artificial Sequence
  ENSG00000275734_1 (sequence is synthesized)
tcattgacttcttttgtcttgtggattcaaggatgtgtccacgcccgccctccttcccctccagctcctccccttgaaatactgaagccctcaacatcatctttggaggaaggtacagag

SEQ ID NO: 902362 - DNA, 120 bp, Artificial Sequence
  ENSG00000275734_2 (sequence is synthesized)
ttggctctcacgcgcacatccttaaccttggcctaataaacctctaaggtggctgagacctgtctcagatacttgttggcttacaaattgaccaccatgcagggactcagagtggaggtg

SEQ ID NO: 902363 - DNA, 120 bp, Artificial Sequence
  ENSG00000275734_3 (sequence is synthesized)
gccctgccctttggcaggtttcctcctggtgcttaggaccagtttgggccttctttattgctcaggacagtaggacaatttgctgagatccgggagccctaccaccctccagagaatctc

SEQ ID NO: 902364 - DNA, 120 bp, Artificial Sequence
  ENSG00000275734_4 (sequence is synthesized)
tgatctcccgaaacttggttgaggtcgaaagtttattttgcgcacaatgccttttccttttccggtgttttacttgcttccaacaaagaaggcgagttttcctgcttccgtgatgatggg

SEQ ID NO: 902365 - DNA, 120 bp, Artificial Sequence
  ENSG00000275734_5 (sequence is synthesized)
gagcaggagacttccctggagtttcagctcggaaacaactcgagtttttcctgattccacgatgggggagagcagtctaaagcctgggccccattcctaggacatagagacactgcatat

SEQ ID NO: 902366 - DNA, 120 bp, Artificial Sequence
  ENSG00000275734_6 (sequence is synthesized)
ggctttgactggaatggcatgctttcaaatataaacagacggctttaaggaatcagagttgacctatagtgcccatcaaagcccttgggaaaactggcttcatactgtatccacccagtg

SEQ ID NO: 902367 - DNA, 120 bp, Artificial Sequence
  ENSG00000275734_7 (sequence is synthesized)
ccgtgcttttcttaaagctctgcgaacgaaagctagacaacttaaacctcagaagagaataatggtacctatttatatacataaaccactttcacgcctgcctgctgtgtatggacttca

SEQ ID NO: 902368 - DNA, 120 bp, Artificial Sequence
  ENSG00000275734_8 (sequence is synthesized)
gaggaacacagcctacgtcagttttctaggattgttctctccacgtgctctttgttttctttctttcttcttccctctattttcctccctccctcccttccttccttcctttcacaaagt

SEQ ID NO: 902369 - DNA, 120 bp, Artificial Sequence
  ENSG00000275734_9 (sequence is synthesized)
ccattttgtataccacactcaactcccccattttctacatgctgatcaaaaccaatctgaatggagtctaggtctggctgtgggctgttgggaagaggcccccaaatctggccatcaact

SEQ ID NO: 902370 - DNA, 120 bp, Artificial Sequence
  ENSG00000275734_10 (sequence is synthesized)
ggcccccaaatctggccatcaactggccgcaaaactggccataaacaaaatctctgctgcactgtgacatgctcatgatggccatgactcccacactggaatgagggcaaggaacacctg

SEQ ID NO: 902371 - DNA, 120 bp, Artificial Sequence
  ENSG00000235319_0 (sequence is synthesized)
gccatacaagacgttaacaaaagaggaagctgggtaaagtgtattcatgaattctgcactattttgcaactcttagaaatttggactgggctgtgtgcttctcctataccattctccagc

SEQ ID NO: 902372 - DNA, 120 bp, Artificial Sequence
  ENSG00000235319_1 (sequence is synthesized)
tacttctggatgaagaggaagggaatggaggtcttgaaaggtggaagagtcatgctgaaatgttagctgcatatcagacccagaaaatacagcaagttttttggctgggcgcagcggctc

SEQ ID NO: 902373 - DNA, 120 bp, Artificial Sequence
  ENSG00000235319_2 (sequence is synthesized)
ttgggcccgcggccgcctgaccacgcgggctggaggatcggacgtaccgccggtgccccaccaggagacgaaggcatggttgggatgcgcagccctcccacgaggcccatggcgccccag

SEQ ID NO: 902374 - DNA, 120 bp, Artificial Sequence
  ENSG00000235319_3 (sequence is synthesized)
ggccctagggattgaccgggacccccgactggcagagtccacctgcttgatacacttatttgagaagggaggcctgggactatcttactccttttaggaaaacccaactgtagctgctat

SEQ ID NO: 902375 - DNA, 120 bp, Artificial Sequence
  ENSG00000235319_4 (sequence is synthesized)
tcctttggttcaggccgcaaggaagaattgtaggttaccatgaatccatgaacccctctttagtatacaaagtccactttcatgacggaagaattggaaagctccctccagagttgtcag

SEQ ID NO: 902376 - DNA, 120 bp, Artificial Sequence
  ENSG00000287277_0 (sequence is synthesized)
agcagtgggtattttgatgaaagccacccctgtctacagctcagaagcagactcaatggtttccttgtgagaggtccggctccctggcctagaaatggaggcctcacgggcaggagggta

SEQ ID NO: 902377 - DNA, 120 bp, Artificial Sequence
  ENSG00000287277_1 (sequence is synthesized)
gtggtatgtagctgtagtggtatgtgctctctctcaatgctgagctgcagctcccagtcagccactggatcatgagggtaaaatacggatacttgacatcttcttaaagaacatcatgcc

SEQ ID NO: 902378 - DNA, 120 bp, Artificial Sequence
  ENSG00000287277_2 (sequence is synthesized)
tgctaagccatccagtttggatgccccagtgccttccaccagccattctcaagcctcattagaagagagagattgatgaccctgtagctgcagcatcccatcatcctgcattttagttca

SEQ ID NO: 902379 - DNA, 89 bp, Artificial Sequence
  ENSG00000287277_3 (sequence is synthesized)
cctgtagctgcagcatcccatcatcctgcattttagttcaatgcttcaaacgttcttcaggcccagtgtgctttcagctgtgtatgtta

SEQ ID NO: 902380 - DNA, 120 bp, Artificial Sequence
  ENSG00000287277_4 (sequence is synthesized)
cgcaatcgagcaccgtcgagtcacaagatgaacaaaatgatgatgtcagaagaacagatgaagttgccatccaccaataaggcagagccgctgacttgggcacaactaaacaagctgacg

SEQ ID NO: 902381 - DNA, 120 bp, Artificial Sequence
  ENSG00000287277_5 (sequence is synthesized)
cagttagctacaaaatgtctagagaacacaaagatgacacaaactccagagagtatgctgcttgcagcattgatgattgtatcaacggtgcaccgtattctgctggtgagagcaagagaa

SEQ ID NO: 902382 - DNA, 120 bp, Artificial Sequence
  ENSG00000287277_6 (sequence is synthesized)
ggcatgcggatccctgtgtccatggaccaaccgtgggaggcctcgccatccgtccatgttttgactgaagtattaaaaggcattttaaatagatccaaaagattcatttttactttaatt

SEQ ID NO: 902383 - DNA, 120 bp, Artificial Sequence
  ENSG00000287277_7 (sequence is synthesized)
ttaaatagatccaaaagattcatttttactttaattacagtgattatgggattaattgcagtcacagctatggctgctatagcaggagttgcgttgcactcttctgttcagtcagtaaac

SEQ ID NO: 902384 - DNA, 120 bp, Artificial Sequence
  ENSG00000287277_8 (sequence is synthesized)
cgagattgtggaattcgcaatctggtattgatcaaaaaatggcaaatcaaattaatgttcttagacaagctgtcatttggatgggagacaggctcatgagcttagaacatcgtttccagt

SEQ ID NO: 902385 - DNA, 75 bp, Artificial Sequence
  ENSG00000287277_9 (sequence is synthesized)
ttagtctgcaggtgtacccaacagctctgaagagacagtgaccattgagaacgggccatgatgacgatggcagat

SEQ ID NO: 902386 - DNA, 90 bp, Artificial Sequence
  ENSG00000287277_10 (sequence is synthesized)
acaggagactccattttgttctgtattaagaaaaattccttaccccaaccccgtgctctctgaaacacatgctgtgtcaactcagggtta

SEQ ID NO: 902387 - DNA, 120 bp, Artificial Sequence
  ENSG00000287277_11 (sequence is synthesized)
attcaatccctgcaaaaatcctctgaggggagcacttaagagcctctcattttccaaaagaagaaactgaaggatagatctctagaaccctgaagttcctgtgttctcattaacaattct

SEQ ID NO: 902388 - DNA, 120 bp, Artificial Sequence
  ENSG00000287277_12 (sequence is synthesized)
atgacctactttagttttgaatgtaattccacagcagatggctggaacgtggtctgggggattaagcgagccttttcagattaatgccaagaaaatatatgcagaagagacacccatgtc

SEQ ID NO: 902389 - DNA, 120 bp, Artificial Sequence
  ENSG00000287277_13 (sequence is synthesized)
gctgtgtatgttaatggtgcatctcctgctgttcccaatctactcatcctaggaaccaactcaggctacaaacctgtacagcatgtgattctactgaatatacgggcaattgttaacaca

SEQ ID NO: 902390 - DNA, 120 bp, Artificial Sequence
  ENSG00000287277_14 (sequence is synthesized)
atggtaggtatttgtgtatctaaacatacctaaacatcgaaaagtagagtagaggcccagtgtggtggcttatgcctggaatgccagcactgcgggaggccaaagtgagagaatggcttg

SEQ ID NO: 902391 - DNA, 120 bp, Artificial Sequence
  ENSG00000287277_15 (sequence is synthesized)
aaaccaggtgtttgagaccaggctgggcaagatagcaagaccctatctctataaattttttaaaaaaatattagccaggtgcagtggcttgggcctttatttctagctactcaggaggct

SEQ ID NO: 902392 - DNA, 120 bp, Artificial Sequence
  ENSG00000287277_16 (sequence is synthesized)
gaggcaggaggatcacttaagcccaggggcccatgattgcacactgcattccagcctgaatgacagcctgcagcttacttttttttttaataacagtctgtttcaaagagcagaagtttt

SEQ ID NO: 902393 - DNA, 120 bp, Artificial Sequence
  ENSG00000287277_17 (sequence is synthesized)
taattttgatgaagtccagttaatcaattgcttcttttatgattttttcttttttcggtggcaaatttctgttttattttgtctggaaataggtatagctctcattcctaaaaatattct

SEQ ID NO: 902394 - DNA, 120 bp, Artificial Sequence
  ENSG00000287277_18 (sequence is synthesized)
cactgaggatataaatctggttgacagttatcatgttctttcagcatattatgccattgccttccaactctcagtgctgctgttgagaaatcagatgacacgctaaatgtctaaaaatga

SEQ ID NO: 902395 - DNA, 120 bp, Artificial Sequence
  ENSG00000287277_19 (sequence is synthesized)
tcagcagaatttttcttttgtgtcttaagatttatttgccaaggtctcaataattttcttctgtattttcttctagaggttttatagttgtaggtcttatatttaggtgatctgtttcaa

SEQ ID NO: 902396 - DNA, 120 bp, Artificial Sequence
  ENSG00000287277_20 (sequence is synthesized)
attttatatagtgtaaatttcacttttttcatataaattttatttttggcatatggatgaacaattgttctggtataatttgttgaaatggctatcttttgcccattaaatggcaccatt

SEQ ID NO: 902397 - DNA, 120 bp, Artificial Sequence
  ENSG00000287277_21 (sequence is synthesized)
gtcaaaaaataactgaccatgtatgtgtaggtctatttctggaatctctattcagatccattgagctagaaagtctcttcttttaccaataccttccttgatttctgtgcttttctgtaa

SEQ ID NO: 902398 - DNA, 120 bp, Artificial Sequence
  ENSG00000287277_22 (sequence is synthesized)
gtcttgaaattaggtacaacaagttctctgattttttttttcttcaaaactgttttcggtgttttaagttctttgctttgttgtataaactttaggatcaactcataaattttaacccca

SEQ ID NO: 902399 - DNA, 120 bp, Artificial Sequence
  ENSG00000287277_23 (sequence is synthesized)
aaaaaaagcccttctaagaattttatttgtattatgtgagtctatggatcttttgcgggagcactgatgtattaacaaccttggggctttccactcagggacaccatacatcctctacat

SEQ ID NO: 902400 - DNA, 120 bp, Artificial Sequence
  ENSG00000287277_24 (sequence is synthesized)
ttattggatttctttcatttttatcaccaatgtttcacagctttcatcatacaaatcttccacatcttttgttagactcatccctaagtttttgctgctctttcaaacagtaatatttta

SEQ ID NO: 902401 - DNA, 120 bp, Artificial Sequence
  ENSG00000287277_25 (sequence is synthesized)
aaatttcaatgaccaattgttcattgctcacataaatacaatcaattttgtatatacagttattatttttaatctgacaatttatcccatactttgctagattctctgtagtttattacc

SEQ ID NO: 902402 - DNA, 120 bp, Artificial Sequence
  ENSG00000287277_26 (sequence is synthesized)
acctttctaaatattctgtctaggtaacccagagagtcaaagtaagaattattcatttggtcaactgattagattatttctgtgctcttggattctgttaatttcacactctataggctg

SEQ ID NO: 902403 - DNA, 120 bp, Artificial Sequence
  ENSG00000287277_27 (sequence is synthesized)
gatgttctgccatcatcaatttgcattccaagattttgtgtgtgtatgtctcaaaaatatgttaaggcagttttaacaattctttagaaactcagggcctggcgcagtggctcacacctg

SEQ ID NO: 902404 - DNA, 81 bp, Artificial Sequence
  ENSG00000287277_28 (sequence is synthesized)
cctgtaatcccagcactttgggaggctacggtgggaggatctcttgggccaaggagtatgaaaccagcctaggcaacatga

SEQ ID NO: 902405 - DNA, 120 bp, Artificial Sequence
  ENSG00000287277_29 (sequence is synthesized)
aaaaatcaaaactgacaatgggccaggatattgtagtaaagctttccaaagattcttaaatcggtggaaaatttcacatacaacaggaattccctataattcccaaggacaggccatagt

SEQ ID NO: 902406 - DNA, 89 bp, Artificial Sequence
  ENSG00000287277_30 (sequence is synthesized)
tgctgcttgcagcattgatgattgtatcaacggtgatgatcgctgccctgccaaacctgaggaagaagtgatgatgataaatatttcca

SEQ ID NO: 902407 - DNA, 120 bp, Artificial Sequence
  ENSG00000287277_31 (sequence is synthesized)
tcagtggtgaaaggccccactcaatcctcggagtgctcctctatcactcactcctttgatggtgtgttccaggcctggctttaaagttattgatgatttacaaatttatatctgtagcct

SEQ ID NO: 902408 - DNA, 120 bp, Artificial Sequence
  ENSG00000287277_32 (sequence is synthesized)
gattcactctgttgccttctacactcttatatccaactttctatctaacgtctccacttatagtcaatattcatctcacacttaacatttccaaaactgaatccccaattgcaatggttt

SEQ ID NO: 902409 - DNA, 120 bp, Artificial Sequence
  ENSG00000287277_33 (sequence is synthesized)
attttgtgtcaacttggctggccagtgcccagatacgtggtcaaacattttctggatatttctgcaaatgtttttgaatgtgattaacatgtaaataggcagactgagaaaagtggatta

SEQ ID NO: 902410 - DNA, 120 bp, Artificial Sequence
  ENSG00000287277_34 (sequence is synthesized)
ccctcccctactgtgggagagcctcatccaatcagttgaaggcctgacgagaacaaaacccgaccttccctgagcaagaaggaattctgcagcagatggccttcagacttgacctgcagc

SEQ ID NO: 902411 - DNA, 120 bp, Artificial Sequence
  ENSG00000287277_35 (sequence is synthesized)
atgcctcttgcagggtctctgcctgcaggctcaccctgcagattttggacttgccagtctccataatcaagccacttccttcaaaataaagagctttctctgtagacacacacacacaca

SEQ ID NO: 902412 - DNA, 120 bp, Artificial Sequence
  ENSG00000287277_36 (sequence is synthesized)
cacacacacacacacacacacaattgtttctgtctctctggagaaccttaaataatatgtcaatcttctatcttaaatttgtgcatgctccactcttctttgacccagttaagaacaatt

SEQ ID NO: 902413 - DNA, 120 bp, Artificial Sequence
  ENSG00000287277_37 (sequence is synthesized)
gaacaattcttaattctgttctttcacttgcccaggtcagaaatcttggagttatccttgactctgtccctttcctcccactccacaatcaatccaccaacaaatcccactggctttgcc

SEQ ID NO: 902414 - DNA, 120 bp, Artificial Sequence
  ENSG00000287277_38 (sequence is synthesized)
ttcagaatgtaaccagagtctgaccccttctcctctctactacctcctccttggtctgagctgtggtcacctttccattggattactagttcttctaactagtccccctgcctctgcact

SEQ ID NO: 902415 - DNA, 120 bp, Artificial Sequence
  ENSG00000287277_39 (sequence is synthesized)
tgtctccacattgtctcatctcacagcagctggggtgatcaaaattatttactaatccagtgaaaactccagtaattcataatctcatttggaataaaagccaatgttcctaaagtagct

SEQ ID NO: 902416 - DNA, 120 bp, Artificial Sequence
  ENSG00000287277_40 (sequence is synthesized)
tctttgcactttctagaatattctagacttggtcctgtctcagggtctttgcacatgttgttcccactatacagcatgttccttacccaaagagccacatgcctcattccctcacctcct

SEQ ID NO: 902417 - DNA, 120 bp, Artificial Sequence
  ENSG00000287277_41 (sequence is synthesized)
ccctcacctccttccagaaatggctcagatgctattggtgcaaatgaaactgtggtttcagaccatgaattttaaatcattataactaggttcaaacacatctttattaatcaaaatagg

SEQ ID NO: 902418 - DNA, 120 bp, Artificial Sequence
  ENSG00000287277_42 (sequence is synthesized)
tttttgccaatgagatataagtttgtttatcactgtagcataaaaatctgctttgggattcaatgaactcttggaaatacttttctgcatcctgctggctgtagaagcgttttccctgca

SEQ ID NO: 902419 - DNA, 120 bp, Artificial Sequence
  ENSG00000287277_43 (sequence is synthesized)
aaaagttgttgagatgcttgaggaagtggtagtcagttggcgagaggtcaggagggtatgacagatgaggcaaaactttgtagcccaattcattcaacatttgaagcgttggttgcgcga

SEQ ID NO: 902420 - DNA, 120 bp, Artificial Sequence
  ENSG00000287277_44 (sequence is synthesized)
cgtgcgattgggcgtcattgttgagaattgggccctttctgttgaccaatgccagctcaacaatgccagctataggtgttgcagttttcggtgcatctcataggtttgctgagcatactt

SEQ ID NO: 902421 - DNA, 120 bp, Artificial Sequence
  ENSG00000287277_45 (sequence is synthesized)
ctcagatgtaatagttcctccaggattcagaaagctgtagtgaattagaccagcagcagaccaccaaacagtgaccgtgacctttttttaatgcaagtttgtatttgggaagtgctttgg

SEQ ID NO: 902422 - DNA, 120 bp, Artificial Sequence
  ENSG00000287277_46 (sequence is synthesized)
agcttcttcttggtccaaccactgagctggttgtcactggtagtcgtatgaaatccacttttcgttgcatgccacaatccaatcaagacatggttcactgttgttgcatagaataagaga

SEQ ID NO: 902423 - DNA, 120 bp, Artificial Sequence
  ENSG00000287277_47 (sequence is synthesized)
agacaacacttcaaaacaaagatttttctttttttattttcagtcagctcatgaggcatccacttattgagctttttcacctttccagtttgctttaaatgctgaataaccatagaataa

SEQ ID NO: 902424 - DNA, 120 bp, Artificial Sequence
  ENSG00000287277_48 (sequence is synthesized)
ttgatgttgagttctttgggaacttgttgtgtagttgtaagagcatcagctgcgatggttgctctcaactggtctttgtcaacttccgatggcctggcactctgctcctcatcttcaagg

SEQ ID NO: 902425 - DNA, 120 bp, Artificial Sequence
  ENSG00000287277_49 (sequence is synthesized)
ctctcatctcctttgcaagacttcttgaaccatcactgcactgtacatttgttagcagttcctgggccaggccaaatgtgttgttgatgttgggagttgtctccactgctttacaacaca

SEQ ID NO: 902426 - DNA, 80 bp, Artificial Sequence
  ENSG00000287277_50 (sequence is synthesized)
ttgttgatgttgggagttgtctccactgctttacaacacattttgaactcaagaaaattggtcgaatttgatttttgcta

SEQ ID NO: 902427 - DNA, 120 bp, Artificial Sequence
  ENSG00000287277_51 (sequence is synthesized)
gaaatgcccactaaagttatgtataacataaccacatttaagaatatagtccaatatcaaacagcaaattccaacaaagcaaaaaccgcaatgacttttgcaccaaactaatacttttgc

SEQ ID NO: 902428 - DNA, 120 bp, Artificial Sequence
  ENSG00000287277_52 (sequence is synthesized)
agagaccttccctaactacctaatttataattgctcctcactctgcaacttgtattctctgtctccctgccatgcttcatgtttctctactgctttatcaatttctaatatatcatagaa

SEQ ID NO: 902429 - DNA, 120 bp, Artificial Sequence
  ENSG00000287277_53 (sequence is synthesized)
ttaactacttttgtgttcattcttttcttatttggtgttactttacaataacttgtaataattacaaatatgcattaaaacatacaaaataatgtgttattttgcaacatattattatct

SEQ ID NO: 902430 - DNA, 120 bp, Artificial Sequence
  ENSG00000287277_54 (sequence is synthesized)
atttcagctatttctctttcattccatttctcctgccccactggaaaatcaagcctatggaggcaggaatttagtttaatttgttcattgtattctattacctagaatagagcctagaac

SEQ ID NO: 902431 - DNA, 87 bp, Artificial Sequence
  ENSG00000287277_55 (sequence is synthesized)
agttcccagacacagcaccataagggatccacctatgacagaaacatctcttaccaggtcccacctccaacgttgggaatcacattt

SEQ ID NO: 902432 - DNA, 120 bp, Artificial Sequence
  ENSG00000287277_56 (sequence is synthesized)
atcacatttcaacatgagatttggagaggacaagctatccaaaccatctcggagtcccatggtgcatctcctgctgttcccaatctactcatcctaggaaccaactcaggtcaggagaag

SEQ ID NO: 902433 - DNA, 120 bp, Artificial Sequence
  ENSG00000287277_57 (sequence is synthesized)
aggagaagcaaggaaagccttacaacctgttactgaccggaggggatgaaggagacagggaaactacaacacatggaatgtggtatcctgaatgggaccctggaaccaaagaatgacact

SEQ ID NO: 902434 - DNA, 120 bp, Artificial Sequence
  ENSG00000287277_58 (sequence is synthesized)
ggggaagaactgctgaaattcaagtaaaatgtggagtctcgttagtggcaatgtaccaaggttggattctgagttataataacgtaccataataatgtaagatgttatcagtagaggaaa

SEQ ID NO: 902435 - DNA, 120 bp, Artificial Sequence
  ENSG00000287277_59 (sequence is synthesized)
gtatatgtcaattctctgtactaactttgcaaatttgctagaaatctaaaactattctaaaatgttacaaagtttatttacagaagaaggctgttaaggatttcaataattagtcatata

SEQ ID NO: 902436 - DNA, 62 bp, Artificial Sequence
  ENSG00000287277_60 (sequence is synthesized)
ttctattaactttgttgatcctttcaaaaaaccatctcctggattcattaattttttgaagg

SEQ ID NO: 902437 - DNA, 120 bp, Artificial Sequence
  ENSG00000287277_61 (sequence is synthesized)
atttgatagtcctgtctatagcatactcagaggaacccttggggagttgagggatttatgagttccacaaatctttctcaatgctgctaccttatgtatcacatttaaatatggctattc

SEQ ID NO: 902438 - DNA, 120 bp, Artificial Sequence
  ENSG00000287277_62 (sequence is synthesized)
ttcattaagaaaaatcaaacaaccacaatagccatgacagcaacagaatatttattgtgcttctcctccattgtgcgatgcttattatatcaaagggtttttatggtgttggaattgttc

SEQ ID NO: 902439 - DNA, 120 bp, Artificial Sequence
  ENSG00000287277_63 (sequence is synthesized)
ctccagggcaaataggtgactaatgattagaaagactggtctatggtctatgcaaggggtcagcaaactataggaccagacccaactcttgtctgtggcttgcttttgtaaataaagttt

SEQ ID NO: 902440 - DNA, 120 bp, Artificial Sequence
  ENSG00000287277_64 (sequence is synthesized)
tattggaacactgccatgctcacttgtttgtgtatgctgtttttacactttaagagcagagttgggcagttgaagcagaggctgtatggcctataaaacttaaaatatttacctttacag

SEQ ID NO: 902441 - DNA, 120 bp, Artificial Sequence
  ENSG00000287277_65 (sequence is synthesized)
aaaatgttggctgagatctggtctatgctatcaaaattactgacgtaagaaggtatttccttatcacccataaaggaaggagcaaaacagcagcttgctcttaacagcctatttccagag

SEQ ID NO: 902442 - DNA, 120 bp, Artificial Sequence
  ENSG00000287277_66 (sequence is synthesized)
ttgtgttaccctttattggtgccaaagaaaggagagaagtttgcaaggtggtgttacatttagaacagagtgtttcactgtagttactttatcaccaaaaagactcaggcagcagtgaaa

SEQ ID NO: 902443 - DNA, 120 bp, Artificial Sequence
  ENSG00000287277_67 (sequence is synthesized)
atggggatttaaagacacatttgtctgagaaagaaaaatgacatttaggtcctttaagaaacaagtagattccagtaagaaaataaagtttattcaaatgagttacttttacttgcttct

SEQ ID NO: 902444 - DNA, 120 bp, Artificial Sequence
  ENSG00000287277_68 (sequence is synthesized)
ccaggcaagtagctggagcttttttgattttattttctttcttttttagaggacaggtgatatttctctttatgagttattaaatgtgtacaattccctttaggtcactgtgtttcagat

SEQ ID NO: 902445 - DNA, 120 bp, Artificial Sequence
  ENSG00000287277_69 (sequence is synthesized)
aaaaccattactgtttcttttttgcaatgaacttctctttttcatgattaaatgtgatgctctctattaaatatatgagtgaattctaatttattgctgtttgcttatttactcactcat

SEQ ID NO: 902446 - DNA, 120 bp, Artificial Sequence
  ENSG00000287277_70 (sequence is synthesized)
tatgtatttgatttgtgtatattcactcaatattatacagtgtagtaattatcatatgtgtttcttctgtttatctcacgggttgctttttcttcatcgtctttgatggctgctgctctt

SEQ ID NO: 902447 - DNA, 120 bp, Artificial Sequence
  ENSG00000287277_71 (sequence is synthesized)
tagaagcaacaatcgcagacaaagagtacaacttgtttttgaagtagttccggagcaacagttcacgatgtgagtctccacacactgctctgtctgtctgcatggcagctagaatctaat

SEQ ID NO: 902448 - DNA, 120 bp, Artificial Sequence
  ENSG00000287277_72 (sequence is synthesized)
ctcttgtttaagtcacccagtgtgtgatgctttgtgacaggcagccctggcaaatgaataagctgccagggaacaggaactcccattgtggaattcacagaagtgagaaataaatatttg

SEQ ID NO: 902449 - DNA, 120 bp, Artificial Sequence
  ENSG00000287277_73 (sequence is synthesized)
cggctccctggcctagaaatggaggcctcacgggcaggagaggtggagaaagagaatgtctggatccttctaggggctggttagagggactggaaacacgggttccaggcctggctcctt

SEQ ID NO: 902450 - DNA, 120 bp, Artificial Sequence
  ENSG00000287277_74 (sequence is synthesized)
gttcttcaggcccagtgtgctttcagctgtgtatgttaatgggagagtgagcaagtttcgtccttgtgcctgcatctgctgggaaacgataagagcccaacatatgttagaagcaacaat

SEQ ID NO: 902451 - DNA, 120 bp, Artificial Sequence
  ENSG00000287277_75 (sequence is synthesized)
cgcagacaaagagtacaacttgtttttgaaggacagagtcgcttttttgctttggaaaggaaagtgcacagcttgtgtgaacattcacccactaccctagctctgcaccctgccccggct

SEQ ID NO: 902452 - DNA, 120 bp, Artificial Sequence
  ENSG00000287277_76 (sequence is synthesized)
cctaaggcgaacgcccacgttacctccgctgttgcttcagagggctgctgccatctatgggcgtctgtcagcatctgcgcaggtgcgatgtctccgagtcgagacacatagggagaatac

SEQ ID NO: 902453 - DNA, 120 bp, Artificial Sequence
  ENSG00000287274_0 (sequence is synthesized)
cagccctaagccccgaccagaggcagttccagccgccagggtccctcacacaacgctgaaagcaaaatacacgtatttgacgtgcctcagagctgacgaagcacccaaaagcagccctca

SEQ ID NO: 902454 - DNA, 120 bp, Artificial Sequence
  ENSG00000287274_1 (sequence is synthesized)
ctaaaggagtcgaaagaaaaagagagagggaagggcaaaacaagtagaagacaaacaagtccagggctcaggaaacttttcagcctgtcaaagttagagaaagctccttcgctttctaca

SEQ ID NO: 902455 - DNA, 120 bp, Artificial Sequence
  ENSG00000287274_2 (sequence is synthesized)
gggcagcagcagccaggagagacagggaaggaaaaacacggcaccgaaaaggcactccggaaattggaaaggggagagcattttggaagaagagcctgaaaatcatcctaatcctattta

SEQ ID NO: 902456 - DNA, 120 bp, Artificial Sequence
  ENSG00000287274_3 (sequence is synthesized)
actgcctgcgatactggaatgcctacatggaaatatgggtatggggcggctaaaatcccgtggtgattgagagttggtgtcttcaagtaagaagtacagatcccagagcccttagtcaat

SEQ ID NO: 902457 - DNA, 120 bp, Artificial Sequence
  ENSG00000287274_4 (sequence is synthesized)
caatagaagccacaagccctcttaggagtaacccataggtgaggactagagactctccccacccccccaaccctcaaatgaataagcagctcagcttgaccctctttgccaatcctttcc

SEQ ID NO: 902458 - DNA, 120 bp, Artificial Sequence
  ENSG00000287274_5 (sequence is synthesized)
ccttgagtttctcatagcattcactgtcaatgcaaacactccaaatacagtcaaaactctgaaatttgacctctaagcaaaacttttggtatttggaattttcaagtattttgatagatg

SEQ ID NO: 902459 - DNA, 120 bp, Artificial Sequence
  ENSG00000287274_6 (sequence is synthesized)
atcccagattagcgctcaatggaatcttgtatacacagggcagaacgctaaggagtgcttttacagaagccaggaatggctcactgtctgctgccctttctactccttcacacacattcc

SEQ ID NO: 902460 - DNA, 120 bp, Artificial Sequence
  ENSG00000287274_7 (sequence is synthesized)
agcctcctcatcagtctgttcagagggagccaaggtagttctgccaactgggaaaatgtttgagatacaagtggcaggcagaaaaatgcagagctgatttggaaggctgctttcgaaatt

SEQ ID NO: 902461 - DNA, 120 bp, Artificial Sequence
  ENSG00000287274_8 (sequence is synthesized)
acatgaacccaaagattgtgggttgatgtcaaagccttcctgtgggctctgaaggccagcatttgaggattttcaccgattgatttgtgatgtgtgtgcccaactctgtgccaattaact

SEQ ID NO: 902462 - DNA, 120 bp, Artificial Sequence
  ENSG00000287274_9 (sequence is synthesized)
ttcccaatctgcatgcaccccatgtcccatgcccagtgcagacaagctggtgacactaacactggcagctttgaccaggactccatgaaagagcttggtccagatcagctttcctagctc

SEQ ID NO: 902463 - DNA, 83 bp, Artificial Sequence
  ENSG00000287275_0 (sequence is synthesized)
tccctctcacaaagattaaacccatttagctgactttgtgggtattctcaataaccattttcctaacatgaaactgtttcaat

SEQ ID NO: 902464 - DNA, 85 bp, Artificial Sequence
  ENSG00000287275_1 (sequence is synthesized)
gactaaatcaaaccaattgaaggtactgagaatgtcttcgcagatgggtctagtaatggtaaagcctcttattctggattgaaag

SEQ ID NO: 902465 - DNA, 120 bp, Artificial Sequence
  ENSG00000287275_2 (sequence is synthesized)
gggtctagtaatggtaaagcctcttattctggattgaaaggtaaagtttttcagacgccctatacttcagctcaaaaagcggagcttgaggctgtaattgaggcattgactgcttttaat

SEQ ID NO: 902466 - DNA, 120 bp, Artificial Sequence
  ENSG00000287275_3 (sequence is synthesized)
cttttaatatgcctattaatatgatttctgattcttcatatgtggttctacacagttagttgaaaatgctcagctacaattccacacataagagcaactgatgactttatttacccaatt

SEQ ID NO: 902467 - DNA, 88 bp, Artificial Sequence
  ENSG00000287275_4 (sequence is synthesized)
aatcaaatggctgatcacctagttgctactgcaatatctaatgctagacaattccacaatttaacacacgttaatgtctctggtctca

SEQ ID NO: 902468 - DNA, 74 bp, Artificial Sequence
  ENSG00000287275_5 (sequence is synthesized)
tatcccatataattctcaaggacaagccagaaagggggagacagtgactataggactccacacatgcaactaaa

SEQ ID NO: 902469 - DNA, 76 bp, Artificial Sequence
  ENSG00000287275_6 (sequence is synthesized)
gattgttatcagcagctgaaaaacatttacagaagacagctgcaaaggcagaagtggaacaatgggtttggtggaa

SEQ ID NO: 902470 - DNA, 120 bp, Artificial Sequence
  ENSG00000287275_7 (sequence is synthesized)
aaacaggtaaaataataacatggggcagaggttatgcttgtgtttctaaaggactgaatcaacagccaatttgggtgccattgagacatctaaagccctactatgttggggtgatcagac

SEQ ID NO: 902471 - DNA, 120 bp, Artificial Sequence
  ENSG00000287275_8 (sequence is synthesized)
tgaacactaggccatgggggctacgaagtatggcagagtcaaaggaatgagacaagttaagagttcatagggtgggtccagggggccaacactagtatggaggctgcgaagtccctgagc

SEQ ID NO: 902472 - DNA, 120 bp, Artificial Sequence
  ENSG00000287275_9 (sequence is synthesized)
ggagcccacactatttattggtgatcaaagaagcaggtggtgaggacgtgtggacatgggggtagacaggtgaggatgtgggggtagaaaggtagctgtgatggtttagcatatgctctg

SEQ ID NO: 902473 - DNA, 120 bp, Artificial Sequence
  ENSG00000287275_10 (sequence is synthesized)
tctgctacttgagataatggagaataggttcttctaactcaagatacaatcaatttatgagccacaaggggttttatgccctgggcttagactgtagtgcagcggggcagccttccatcc

SEQ ID NO: 902474 - DNA, 120 bp, Artificial Sequence
  ENSG00000287275_11 (sequence is synthesized)
ttaggcacagagcttggtgttccataggccacaaggggttttagacccgggacccaggacatgttccaagactcttttacattatgtcagacaagcaggccctgcctcagcccttctacc

SEQ ID NO: 902475 - DNA, 120 bp, Artificial Sequence
  ENSG00000287275_12 (sequence is synthesized)
gacacagaaagtggaacaacgggtttggtggaaagacccgataacaaaaggttgtgaaacaggtaaaataataacatggggcagaggttatgcttgtgtttctccaggacagaatcaaca

SEQ ID NO: 902476 - DNA, 120 bp, Artificial Sequence
  ENSG00000287275_13 (sequence is synthesized)
gccaatttgggtgccatcgagatatctaaagccctactatgagccagataacgaggaagaggttttgggaggatcccaaacacccactggtggcagcattgtccaagttgatgctgagga

SEQ ID NO: 902477 - DNA, 75 bp, Artificial Sequence
  ENSG00000287275_14 (sequence is synthesized)
cacccactggtggcagcattgtccaagttgatgctgaggatgacccccaactgtcacgagcaacactcatcgaaa

SEQ ID NO: 902478 - DNA, 120 bp, Artificial Sequence
  ENSG00000287275_15 (sequence is synthesized)
gcagatgcggatcctgactcctgcaagaagtagctcactgtgataaagccgcctttgcttttattgccctggtaaaacaaaaagggggacatgctgggaataggccccaagcctggccat

SEQ ID NO: 902479 - DNA, 88 bp, Artificial Sequence
  ENSG00000287275_16 (sequence is synthesized)
aaagggggacatgctgggaataggccccaagcctggccataaacaagccataagaaaagtcataaacaagttatgatgcacacactgg

SEQ ID NO: 902480 - DNA, 120 bp, Artificial Sequence
  ENSG00000287275_17 (sequence is synthesized)
cccacccagggcggaaaactgctcaaggtgttcctaaaccacaaacaatggcataagcaatctgtgccttaatgacatgctcctgctgcagataacaagccagagcctgtccctttgttc

SEQ ID NO: 902481 - DNA, 120 bp, Artificial Sequence
  ENSG00000287272_0 (sequence is synthesized)
gggcggcttgcaaggcggtgagctccccgccactggaagctggaagctacagggaagcttccgcggaggactggcgatggcttctttgctccaacagctgctccttgtgccaggctcagg

SEQ ID NO: 902482 - DNA, 120 bp, Artificial Sequence
  ENSG00000287272_1 (sequence is synthesized)
ctgagttacagctagaggtgcagtggctacaagagtttctgctcacggtcatggaagagaaagaaaatgaacaagcaccccagcctgaaactcaccccttgacaagcaccctgcaagcta

SEQ ID NO: 902483 - DNA, 120 bp, Artificial Sequence
  ENSG00000287272_2 (sequence is synthesized)
cagtgattctgaatcccagaagtgatgggctgtcttggagaatcccaggggctgtcctgtgctccaggcctgtctcaggactccttgggtggacgcaatctcctctagtcccctctaaag

SEQ ID NO: 902484 - DNA, 120 bp, Artificial Sequence
  ENSG00000287272_3 (sequence is synthesized)
acttcttcatcattacgatggaaaacattggctgtgacgtgggttgtgcaatgaagcttccaacccaggatctgtttctgaatggctgtcatggagcagagagcagaggctctgcatggc

SEQ ID NO: 902485 - DNA, 120 bp, Artificial Sequence
  ENSG00000287272_4 (sequence is synthesized)
cccaacacttgtccctcctccaagctccgacattaagaaacatgcctgcttcctcgtggaggagggaagcctggtctaaggatgaagggcaagctgccaggcacccgaggctccttcatg

SEQ ID NO: 902486 - DNA, 120 bp, Artificial Sequence
  ENSG00000287272_5 (sequence is synthesized)
cttgcagctcaagcctccaggggccaaagagaagtcctcaggaggctgttggtgcagtccacttagagcaaagcacatggccgctggaggatgggggcacagagctggcaagagtgatcc

SEQ ID NO: 902487 - DNA, 120 bp, Artificial Sequence
  ENSG00000287272_6 (sequence is synthesized)
acatgaacctggacaggaccttaacagtgtctgctgaggcccttgccccagctggccctgaagtcgaagtctggtttgctctgttttgttggtctgtgcagtggagaggaaggtgccacc

SEQ ID NO: 902488 - DNA, 120 bp, Artificial Sequence
  ENSG00000287272_7 (sequence is synthesized)
ccagctctagttctccacgtcacttaagaggtatgggatttcagcaaggactgaacaatgctgggcctcagctttctccttcatcctgtgaagaccttcaatcttatctaccttggggga

SEQ ID NO: 902489 - DNA, 120 bp, Artificial Sequence
  ENSG00000287272_8 (sequence is synthesized)
tgatactgtggttatcaaatgtcagaggaccttgaaggatggaaaacacgtgtatgtgactcatcaggctgtgccattgcaaggtgatgctgatgtcaggatatttttgtctgcaggaga

SEQ ID NO: 902490 - DNA, 120 bp, Artificial Sequence
  ENSG00000287272_9 (sequence is synthesized)
atccactactgtatggagcttgtcctggaaagccattgcaccccaccccaccacccccaccatctctcagaagaggtcacaaagagcattttgttacaacataaccttactcaagaaatc

SEQ ID NO: 902491 - DNA, 120 bp, Artificial Sequence
  ENSG00000287272_10 (sequence is synthesized)
actcaaaaaatgcacataggaaccactgaaacatttcctgaatttaaaagaatgactcagcagagcattcgtttgtgatagaactgcttcttgaatttctcaaaactggtgatgttcaca

SEQ ID NO: 902492 - DNA, 120 bp, Artificial Sequence
  ENSG00000287272_11 (sequence is synthesized)
aaggccaaaatgtgtgagcattctgccaaaaccaggccaaagtttgctgctgtgctttgtatttaaaaagaataagaaaatgtatagttcaaaaaataaaattctaagcccaccaactga

SEQ ID NO: 902493 - DNA, 120 bp, Artificial Sequence
  ENSG00000287272_12 (sequence is synthesized)
ctaaacagatcccctcttggccaaggggaccccagagtaatcaggaacattgagttctcggccatgatgggatggggagcatcagacaagtctcgttattcccttcccttgctaaccacc

SEQ ID NO: 902494 - DNA, 120 bp, Artificial Sequence
  ENSG00000287272_13 (sequence is synthesized)
actaggctttctttcctaagggctaaacacaaacctacccttccaacacagtccactgctgtgatcaacccactgcttgacgctgctcctcgtttttgcctgataagagaccactgacca

SEQ ID NO: 902495 - DNA, 120 bp, Artificial Sequence
  ENSG00000287272_14 (sequence is synthesized)
tggggtggctctgcctagtccacggaggatgcacagtgagggttttggtgtcctctgctttaccttttgacatcagagggccaaaagttctacccttgggtcatgctaaaaccaccattt

SEQ ID NO: 902496 - DNA, 120 bp, Artificial Sequence
  ENSG00000287272_15 (sequence is synthesized)
ttggtacagggggcccatgaaggggcatgcagctcacttgtgcatgtgcatgtttcacctctcataaatattcatgactcctcctgcagcttattgaatatgtatattcagccatccaac

SEQ ID NO: 902497 - DNA, 120 bp, Artificial Sequence
  ENSG00000287272_16 (sequence is synthesized)
tcagcacaaattcctgttccctttgcccctccctgaaagtgtctgtttctggcttctcatcagaggctacgcttcccagccggtcagagtggccaccctgcagggtgcaaccctttatga

SEQ ID NO: 902498 - DNA, 120 bp, Artificial Sequence
  ENSG00000287272_17 (sequence is synthesized)
aaaacaaagttcttctttccaaaaggaaaaaataaagaaagaaaatttgtagtttaacaaagacaattagataaagttaacccactggagatccccgtcctgcaggccttggtgctgatt

SEQ ID NO: 902499 - DNA, 120 bp, Artificial Sequence
  ENSG00000287272_18 (sequence is synthesized)
gatctcctgcccaggacatggccacacgggggctagtgggttggtgacctgaggagcactcctgagtgacctcggagttcagggctgcctccaagaatggctggtgcataaagactactc

SEQ ID NO: 902500 - DNA, 120 bp, Artificial Sequence
  ENSG00000287272_19 (sequence is synthesized)
agaccaaagctgagcactccaaagtatgaataatgaaggacatttgctggctcagtggtgagaacctggggtgtttaggctgtcactgccaatagtccactattggctgggatcagaaga

SEQ ID NO: 902501 - DNA, 120 bp, Artificial Sequence
  ENSG00000287272_20 (sequence is synthesized)
ccgatgcaacccttctgcatgttgacaacaatataaaaagggaatacctgcatttctattttgctcttcagattggagacctggttgtattacactgcagatttactctagccagtcctc

SEQ ID NO: 902502 - DNA, 120 bp, Artificial Sequence
  ENSG00000287272_21 (sequence is synthesized)
agatattgcctactacttaaagtgaattgttaccaaaatgttcagagaaaaccttagattaagcgtattgactatgtttcttctttaagtcatagttaagggcaataacaacaacagagc

SEQ ID NO: 902503 - DNA, 120 bp, Artificial Sequence
  ENSG00000287272_22 (sequence is synthesized)
agctgagtagatattttctgctcatcattaataataacccttcggctgatggatggatggccctcccggtgatgaagagctggcagcactcactctgtggcgggatctgttcctgggagg

SEQ ID NO: 902504 - DNA, 120 bp, Artificial Sequence
  ENSG00000287272_23 (sequence is synthesized)
gcctgtaagatatttgatttgagagatgcctggctgctgatggattaggagggcctggtagaaacacagtggcatgaacaccaggaccataaaaagagaagaagagtacaattatcttgt

SEQ ID NO: 902505 - DNA, 120 bp, Artificial Sequence
  ENSG00000287272_24 (sequence is synthesized)
atgttcccttccttctctcactcccggtagaaccagagaagggcaagccgagaagcatggaggtcattccaccagcctgtggactcctggcccatccagtcactaaagctatggaggaga

SEQ ID NO: 902506 - DNA, 120 bp, Artificial Sequence
  ENSG00000287272_25 (sequence is synthesized)
aggcagagagacatggacctgggggaaagaggaggctccctgtacctatcagctgtagggaagaagactctgctccacacagtcacttgggattgaagctgatggaggctccaccatctc

SEQ ID NO: 902507 - DNA, 120 bp, Artificial Sequence
  ENSG00000287272_26 (sequence is synthesized)
atagctacttcatctggaaccagcagcctcctcagcagaaggagggagcaggaagggtgtccagggtgttttcactcgatcaacccggaatgagaggtagcactttgctcacatttcact

SEQ ID NO: 902508 - DNA, 120 bp, Artificial Sequence
  ENSG00000287272_27 (sequence is synthesized)
ggccagaattaggaatgtgacctcatctaactgcaagggaactgggaagcaatgtgcccagaacgagtggtctgcacacattgccctgcttccttacctttcattcaatcttcaattgcc

SEQ ID NO: 902509 - DNA, 120 bp, Artificial Sequence
  ENSG00000287272_28 (sequence is synthesized)
cagtctaggctgttccccaccacttataccagcacagcctcctgtttccaaacccagtggtcattctcatgtttcccaatctatgggcagcactaaccccagctactgcccccacctcga

SEQ ID NO: 902510 - DNA, 120 bp, Artificial Sequence
  ENSG00000287272_29 (sequence is synthesized)
tctagcctggcctcagcttctgcaatacctcattctgctgggcttccttccctctctctctgctctgtgagtttctcctcacccaaccttctctaaatgttggtgtcttctcagaacaga

SEQ ID NO: 902511 - DNA, 120 bp, Artificial Sequence
  ENSG00000287272_30 (sequence is synthesized)
tcttggccctattgttttttctctgtatattctcttgctaaataattacatcagttccatagctttaaatggcatctatttgccaatacatcttaaacacagatcgcagggcagagttct

SEQ ID NO: 902512 - DNA, 120 bp, Artificial Sequence
  ENSG00000287272_31 (sequence is synthesized)
atccctaggagactcacacttttcttctccactgcttgcttgagagcccacagtgcatcatataaggaacttgagtctcccacacttgagtcaatcacggcttcttgtcgtaattggaaa

SEQ ID NO: 902513 - DNA, 120 bp, Artificial Sequence
  ENSG00000287272_32 (sequence is synthesized)
tctaggagtggcacatccttgacagctcccttttgctcagccctgaatataaaccatccatatgtcctgtagatttaacctccaaaatacatcaaaggaggtctggaatcaacaaacctc

SEQ ID NO: 902514 - DNA, 120 bp, Artificial Sequence
  ENSG00000287272_33 (sequence is synthesized)
aggctgtctccactgccactcgctcagtgccaatcttgtcctgggcggcactcggggttcccccactcgctccttgtcaagtcattctcccagcagcaccagatttgtctataaaatgca

SEQ ID NO: 902515 - DNA, 120 bp, Artificial Sequence
  ENSG00000287272_34 (sequence is synthesized)
aaccaaatcatggtacttcctgcttcagtccctgagctggcttctcactcctcgggaatcaagttcaagttcccctccatggcccacatgaccatgcaacccaggccctcctcggcctca

SEQ ID NO: 902516 - DNA, 120 bp, Artificial Sequence
  ENSG00000287272_35 (sequence is synthesized)
tacatgctaccctcccctccacagtgtgttccagccacacagagctccttgtcctgctctgcaccacttgccccctttccacaccgaggccttgtcacactcagtgctgtatcgttcact

SEQ ID NO: 902517 - DNA, 120 bp, Artificial Sequence
  ENSG00000287272_36 (sequence is synthesized)
aaaacgtcaccgccttgatgagctggatgcacagaggcattgaggagaagtgcatctggcatctccccaaaacaaaagacatcactgtatcaaaagaatacctgccctcatatgttcttc

SEQ ID NO: 902518 - DNA, 120 bp, Artificial Sequence
  ENSG00000287272_37 (sequence is synthesized)
ccagcaccattcacaatagcaaaggcatgaaatcagcccgggtgtccaccaaccgaagacgggacgaagaaaatgtagtgcatatgcaccaaggaatactacttggccataaagatgaat

SEQ ID NO: 902519 - DNA, 120 bp, Artificial Sequence
  ENSG00000287272_38 (sequence is synthesized)
gaaatcatgtcttctgcagcaataaggatggaactggaggccattctcctacgtgaaataactcagacacaaaaagataaataccacacgttctcacttaacagtgggagctaaataatg

SEQ ID NO: 902520 - DNA, 120 bp, Artificial Sequence
  ENSG00000287272_39 (sequence is synthesized)
tgtacacatggatgtagagtgtggaatgatagactctggagacacccaagggtggggaggatggagggggtgaggcaggagaagttacttcatgggtaccacatacgttagtccagcaat

SEQ ID NO: 902521 - DNA, 120 bp, Artificial Sequence
  ENSG00000287272_40 (sequence is synthesized)
ggctacactaaaggctcagatgacaccactacgtattatatccatgtaacaaaattacacttgtgcctcataaatgtatacaagtttgaataaaggacaactgtgagtgtcttctgcaca

SEQ ID NO: 902522 - DNA, 120 bp, Artificial Sequence
  ENSG00000287272_41 (sequence is synthesized)
ctgctagggcaggactcagcccagagagcctgctggatttggggctctgtgtggaagggcgaggagacatcgcagtgccactctgacactgcatacattttcctaaagcacaggaaagga

SEQ ID NO: 902523 - DNA, 120 bp, Artificial Sequence
  ENSG00000287272_42 (sequence is synthesized)
aacagaaggctccagggagccccaggacttgacctctgggattgggccattctaagggcaggctcagcagtctctctgctctccaggaaaggcgttccctctacgggagacagctctggg

SEQ ID NO: 902524 - DNA, 120 bp, Artificial Sequence
  ENSG00000287273_0 (sequence is synthesized)
aaaatgcattttaaccaagaaggtatacaaaattatggtggatgtcatatgatagagacatttttggaggtagacaatttaccattttttgccaaaactatccagtgaataaacaatacc

SEQ ID NO: 902525 - DNA, 120 bp, Artificial Sequence
  ENSG00000287270_0 (sequence is synthesized)
ggcagagctgggaatctgaaagggaaagtctggctgcataaaccctccaaatgctgtgctgtctcttgaaggatccttgggccataccaatggctcagttgagggcaagatctatcaatg

SEQ ID NO: 902526 - DNA, 120 bp, Artificial Sequence
  ENSG00000287270_1 (sequence is synthesized)
gctgcagtagtgggaagaacaagatcatcggggagaaggtcacaaaggagcatgatgtgatgccaagcagggggattaaaatgcaagagcgaggcaggaagctgtggccagaacgttctg

SEQ ID NO: 902527 - DNA, 120 bp, Artificial Sequence
  ENSG00000287270_2 (sequence is synthesized)
aagagaaggaaacaagagacattcattggaatgatcttcattgaattctgctttgagatgcgatgtttaagcttgggactcagcaccagcagaatgtgggagaccatgcagaggaggtcg

SEQ ID NO: 902528 - DNA, 120 bp, Artificial Sequence
  ENSG00000287270_3 (sequence is synthesized)
gtggaggaggcaagaaccaaacaaatacagatggatgtctccagaaagggtctttgactctgcatttggaagcaaggccagcccaatccacagagcagaggcggcatctccagatacagg

SEQ ID NO: 902529 - DNA, 120 bp, Artificial Sequence
  ENSG00000287270_4 (sequence is synthesized)
gcatggcagcatgtggccctacattcatcattatttcaggttaaggcattcccagcagcaggactccatgaaacatgctacctcaagtagtctgtcatttaacatgcgagctctatcatc

SEQ ID NO: 902530 - DNA, 120 bp, Artificial Sequence
  ENSG00000287270_5 (sequence is synthesized)
taaaacatttcctagaaattcaaggccctacaggaattgaaaacaagactctatatttgagaaagagattgctgggggaaagagctgaagtttgggaacagcagaatgtagatgctggat

SEQ ID NO: 902531 - DNA, 120 bp, Artificial Sequence
  ENSG00000287270_6 (sequence is synthesized)
ccccacaaaaaagaggaggaagctttctaatgcagtctttcatagtgtatcagcaagaggtagacacagtgagttcatcctacctcttcttctttacaggagtagtagcagaagtggatg

SEQ ID NO: 902532 - DNA, 120 bp, Artificial Sequence
  ENSG00000287270_7 (sequence is synthesized)
ctatggtgttggaggtgttggcattcaatgaaccgccaggttgcctgtttaatgacaagaacaacaattaatcccactctcaaactttttcatttcagcctacctttgaaaagtcttaaa

SEQ ID NO: 902533 - DNA, 120 bp, Artificial Sequence
  ENSG00000287270_8 (sequence is synthesized)
ttctactcatattcctgcctgctctctgttcataaaatgtttcacttggggatagaaaaacagccaaaaatcttcttccttagttgacatattttagaagttgtcaggttctcatagaac

SEQ ID NO: 902534 - DNA, 120 bp, Artificial Sequence
  ENSG00000287271_0 (sequence is synthesized)
agattctgcgaagggactgacggccagaagacagaaaatccagcaacgcttatatatcaagaaaagaagcggggcacgattgctcatgcctgtaatgctagcactttgggaggccgagga

SEQ ID NO: 902535 - DNA, 64 bp, Artificial Sequence
  ENSG00000287271_1 (sequence is synthesized)
tgctcatgcctgtaatgctagcactttgggaggccgaggagggactctactaaaaaaatacaaa

SEQ ID NO: 902536 - DNA, 60 bp, Artificial Sequence
  ENSG00000287271_2 (sequence is synthesized)
aattagccagacgtggaggcgcgggcctgtagtcctagtcaagatggcgctactgcactc

SEQ ID NO: 902537 - DNA, 120 bp, Artificial Sequence
  ENSG00000287271_3 (sequence is synthesized)
aaacaaacaaacaaacgaacaaacaaacaacagaaatcctaaattttcaaaatgtttttctataacctctttcccgatcatcatccaatgaacttcctgcaaaagctcaatccctttctg

SEQ ID NO: 902538 - DNA, 120 bp, Artificial Sequence
  ENSG00000287271_4 (sequence is synthesized)
gggaccgctgcatcagtaatcaaactgccttcctaaggtgtgtgttgtagcaggagagaagtggggaagtagagtcaggctacaggccacagttgcaacctacaactaatccagaaagtt

SEQ ID NO: 902539 - DNA, 120 bp, Artificial Sequence
  ENSG00000287271_5 (sequence is synthesized)
gagcacaaggcaacagaaatgaggcgtctcccaagtgtccaacctgtcagaagcagccagaggggtcacagtccctgagaggtgccctccttgaacttacagcttttggcaggaatcaca

SEQ ID NO: 902540 - DNA, 76 bp, Artificial Sequence
  ENSG00000287271_6 (sequence is synthesized)
tgacagaaggagactccgtctatagagccaagaagccagttgattgtagatggtttcctcaaagaagaagcccttt

SEQ ID NO: 902541 - DNA, 89 bp, Artificial Sequence
  ENSG00000287271_7 (sequence is synthesized)
taaaagaaaataaaaagaaagaaatatagagccaagaagccagttgattgtagatggtttcctcaaagaagaagccctttccttggcct

SEQ ID NO: 902542 - DNA, 90 bp, Artificial Sequence
  ENSG00000287271_8 (sequence is synthesized)
acgccactgcactccagcctggaaaaagaagccctttcctgtgggcatttttatgtgatccagatggtccagtcagcatccatgatgttt

SEQ ID NO: 902543 - DNA, 120 bp, Artificial Sequence
  ENSG00000287271_9 (sequence is synthesized)
ttatgtgatccagatggtccagtcagcatccatgatgttttcagtttaggtcccacggagggtgccctaagtctgcaatggtctcatagtcgaagtgctgttcctggagtgtgcgcccgt

SEQ ID NO: 902544 - DNA, 120 bp, Artificial Sequence
  ENSG00000287271_10 (sequence is synthesized)
ttttaatttagcacagcacatgctgagactgaaacagcacagagcagacagcagtatcaggttttggcttacagtcaggtccaggccagtaggatctgtgaattcaggaagccacaagtc

SEQ ID NO: 902545 - DNA, 120 bp, Artificial Sequence
  ENSG00000287271_11 (sequence is synthesized)
agtggctgttctttggcagcagcaaagccaagatgctgcaggctagaaggttctgtttcaagtgcaagtgacaaacaaggctttcctaagcctttttacctcgtcaatcttagagctgga

SEQ ID NO: 902546 - DNA, 73 bp, Artificial Sequence
  ENSG00000287271_12 (sequence is synthesized)
ctttcctaagcctttttacctcgtcaatcttagagctggaattggtgcactcaaaaacacgcacgggctggaa

SEQ ID NO: 902547 - DNA, 120 bp, Artificial Sequence
  ENSG00000287278_0 (sequence is synthesized)
cactccaagaaggtgcagatcctgtctggttggaactcagtcatattttcagcaaggtgacaagtcataggtcattttgaggtgaacgaatgaatggtggaacaggaagacttccaaata

SEQ ID NO: 902548 - DNA, 120 bp, Artificial Sequence
  ENSG00000287278_1 (sequence is synthesized)
atccttgctctgaaatttacaagttttataagctcaggccagcatttcccttcttggagcctcagattcattctttacaaaatggctgatttggcttggaggctctccaaggtccatctt

SEQ ID NO: 902549 - DNA, 120 bp, Artificial Sequence
  ENSG00000287278_2 (sequence is synthesized)
aagttccagaagccttcaattccataaatgaatatacagtagatgccctagggctctaccaccgcctctcttctgaaaactgtttgcacaacccgcatctccgtctcactgcagcacaac

SEQ ID NO: 902550 - DNA, 120 bp, Artificial Sequence
  ENSG00000287278_3 (sequence is synthesized)
attccctggagatagtcatctaggccagagttagaccccagatcctagctggacggagcacctgcttttttccagctatagagatgcctcaagttggcaagaaagaaaaggaagtctttg

SEQ ID NO: 902551 - DNA, 120 bp, Artificial Sequence
  ENSG00000287278_4 (sequence is synthesized)
tgccgttgaataccaaatctggtctctattacagtgccgaaggagtgctgtttggaatgacattggaaacagccaaagaacatctccaagaccttctgacgttgatggagagaacctctg

SEQ ID NO: 902552 - DNA, 120 bp, Artificial Sequence
  ENSG00000287278_5 (sequence is synthesized)
actgaatccttggtggccaggcaggcagggcagctcattctgaatgagtagaaatctcatttataatgttcaacctaggtaacatgttttagaagacaacttaagtcagagggaaagcct

SEQ ID NO: 902553 - DNA, 120 bp, Artificial Sequence
  ENSG00000287278_6 (sequence is synthesized)
attatggccaaagcctgaatatttgtccagtcggctgttaatccagtcagctttgatggaagaattggtaataggaagattgttctttttggcttgttgggctggagtcagagagagggg

SEQ ID NO: 902554 - DNA, 120 bp, Artificial Sequence
  ENSG00000287278_7 (sequence is synthesized)
gacacccacatggccagaaagctgagatgtcatagctagatagtcctcgcaaatgccactttaccaaacagccttccattatgattgtctgcaaatgaaagttaacactgctacacctgg

SEQ ID NO: 902555 - DNA, 120 bp, Artificial Sequence
  ENSG00000287278_8 (sequence is synthesized)
caaggaaattctttgcagagccatgggtgtagttaccacactgcactgcagcagtttgggagaagatgctgaattagggtgaacctccagtagcctcttctgggcttcttcatggaaagg

SEQ ID NO: 902556 - DNA, 120 bp, Artificial Sequence
  ENSG00000287278_9 (sequence is synthesized)
aagtgagagagcttcctgaagcaggagatgggacaggtgccaggcaacagaagaaaatcaggccctgcacaatggatcacgcctgtaatcctatggcttttggaggctgaggcaggagga

SEQ ID NO: 902557 - DNA, 72 bp, Artificial Sequence
  ENSG00000287278_10 (sequence is synthesized)
tgcttgagctcaggagtttgggaccccatctatacaaaaaaaaattggccaggtgtggggtgacttgagccc

SEQ ID NO: 902558 - DNA, 120 bp, Artificial Sequence
  ENSG00000287278_11 (sequence is synthesized)
cagagccagactctgtctcaaaataaataaagaaaagtcaaaaaaagaaaatcagcgatttggccctaccaggccaggatgcaggaaccctggctgggaacccaagaggcagtgggaaaa

SEQ ID NO: 902559 - DNA, 120 bp, Artificial Sequence
  ENSG00000287278_12 (sequence is synthesized)
gcaatgttagggttccaagcccttgtggagtgagtgctctgctccactgctggtctgagccaaccccctgtgttcatggcacctctactttgcgttctgagagcttgggcttggcagtga

SEQ ID NO: 902560 - DNA, 120 bp, Artificial Sequence
  ENSG00000287278_13 (sequence is synthesized)
cctggatgaggcagaaaaagggagacaggattgtgggacaggcacagaatctggagacagggctactatttgctttctttcgagggaggagcacaaaagccaaatatgaagtccttcctt

SEQ ID NO: 902561 - DNA, 120 bp, Artificial Sequence
  ENSG00000287278_14 (sequence is synthesized)
ccaatcttccattgtctgaattgagctgactcactgcagagtaaactcatggatagccttggtttttccagcatgaacagctgggggcaacttcacaagggtgtgagattggggagctag

SEQ ID NO: 902562 - DNA, 120 bp, Artificial Sequence
  ENSG00000287278_15 (sequence is synthesized)
aatggtgcctccagtgtgtgtgaagacactggagagtcatatttacaccgtcacgagctctcctcccagaaaatcatcacgtttattatcttgccaattaaacctgcataaatgcatggg

SEQ ID NO: 902563 - DNA, 120 bp, Artificial Sequence
  ENSG00000287278_16 (sequence is synthesized)
caaggtaggagaaaaatggaaaaaatgcacagttcatttccttctctggtgctgtttactctacatgagatattattaaaagagaaaggtggtaaacaggcagaaaactgccctgtaaca

SEQ ID NO: 902564 - DNA, 120 bp, Artificial Sequence
  ENSG00000287278_17 (sequence is synthesized)
cccacaggtcaaccaaaaaagtctggtgtgattttaatctcagcaatttttgaaatttagtgatgaagagaaatgctgaaccccctttctggcgtgttaaataatgataatgtatgcttt

SEQ ID NO: 902565 - DNA, 120 bp, Artificial Sequence
  ENSG00000287278_18 (sequence is synthesized)
aaaaactcattacaaccattaacatgaataactagtgatttcaaatttgagttaaatagttaggctgctacatttatgttctttgggtgtttgaatataattatttgaggattaaattga

SEQ ID NO: 902566 - DNA, 120 bp, Artificial Sequence
  ENSG00000287278_19 (sequence is synthesized)
gacacatcgatcggtcccagaaataaataacaggcttgcttgcaaagccaaaattggaatggagaaatgagaattcttagagaaaatatctgttgtatgaatgaatgaataaaaaggaga

SEQ ID NO: 902567 - DNA, 120 bp, Artificial Sequence
  ENSG00000287279_0 (sequence is synthesized)
gtcattggaacaagccttgctcggtcgtcagtgtggatgttcctgggtcccctagaacactcgaaatctccccaaaaataccagagagtagcgcactgaatgatattccatggtctggat

SEQ ID NO: 902568 - DNA, 120 bp, Artificial Sequence
  ENSG00000287279_1 (sequence is synthesized)
gtgccacagtttgtttattcacctacagaaggaaatcttggttgtttccaagtttgggcaattatgaatgaagctgctatagaaatatatgtgtgtgttcggagtttcttccttctgatg

SEQ ID NO: 902569 - DNA, 120 bp, Artificial Sequence
  ENSG00000287279_2 (sequence is synthesized)
gattcgtggtctccctggctgaggagtgaagccgtaaaccttcgcggtgagttttacagctcttaaggcagggcgtctggagttgttccctccttccagtgggctcatcatctcgctggc

SEQ ID NO: 902570 - DNA, 120 bp, Artificial Sequence
  ENSG00000287279_3 (sequence is synthesized)
ttcagaaatgaaactgcagactctccagacaagtgttacaactgctaaggcgacgcttctggagttgttcgttcctctcggtgggctcgtggcttcgctggcttcagaagtgagactaca

SEQ ID NO: 902571 - DNA, 120 bp, Artificial Sequence
  ENSG00000287279_4 (sequence is synthesized)
gatcttcccgtggcacatggacacccaagaacttaaggaggtcagagaaaatctcaaaagaatatgcaaaatttgtccagattttttatccgtgattgaacttgaacccctgagtttggt

SEQ ID NO: 902572 - DNA, 120 bp, Artificial Sequence
  ENSG00000287279_5 (sequence is synthesized)
gaaattccaatataactgtctgggagatcatcagaaactaatagtctttgaggatgcaggtgtaatgaagagagattggagagattaaagctctatgcagtggacttgatattgtgatta

SEQ ID NO: 902573 - DNA, 120 bp, Artificial Sequence
  ENSG00000287279_6 (sequence is synthesized)
aggattatagactaaaaattgtgataaatttacaaaaacagacggcccttattaaagggggaaagaaaaaaaaacacgcacaccctaaggccccgctgggattcgaacccaggatctcct

SEQ ID NO: 902574 - DNA, 120 bp, Artificial Sequence
  ENSG00000287279_7 (sequence is synthesized)
gtttacgagacaggcgctttagccaactaagccacagagccagccgtgctgattctgtggcttcttttatgaccgaattgcacttaattaggtgacaaattctgttgccattaagagtta

SEQ ID NO: 902575 - DNA, 120 bp, Artificial Sequence
  ENSG00000287279_8 (sequence is synthesized)
tcacacaatcacttagaaaatgtgcttagaacaatgtcagcgcgtcccagagggcaaataaaaccgtgaaatcggagagtggagatgaaccatgttcccagcggaggaagaggcatcggt

SEQ ID NO: 902576 - DNA, 120 bp, Artificial Sequence
  ENSG00000287279_9 (sequence is synthesized)
ctctagacgtggcgagagcagtttttacattccatggcattgcggtgatttcgaatcatcaagtggttggattctaaaagtggagtgaaaagcttttctagcaaaacagatcattcagaa

SEQ ID NO: 902577 - DNA, 120 bp, Artificial Sequence
  ENSG00000287279_10 (sequence is synthesized)
ttttcatcacattaatggcttttctggccaattagaagatagcacacggatgcgctgaaaaacaaaaactgttaacgcgttcagactctccaaacagctgccagatcactgctttagaga

SEQ ID NO: 902578 - DNA, 120 bp, Artificial Sequence
  ENSG00000287279_11 (sequence is synthesized)
aagcaggcgacagctgggaggcgacctggtcggagctcacttaacggttttgtatttcaaatccaaagagactttgcctgctcgaggcttgtgttcccgcggctcctgagagggggcaca

SEQ ID NO: 902579 - DNA, 120 bp, Artificial Sequence
  ENSG00000287279_12 (sequence is synthesized)
gatggaaaccagaaggggaggcgtcaccggacagggtctttcctaattctgccttcctcattttggttcttcaagcttcaattagatgtttcctaatatcttccttatggatccgcacct

SEQ ID NO: 902580 - DNA, 120 bp, Artificial Sequence
  ENSG00000287279_13 (sequence is synthesized)
tgtagaagctaaacaaacattaattgattgaaaaatccccaaattaagatccattctgaaactgttaacgattgtatcctagttttctgcctttgcttagtactgaggctggtgccaaag

SEQ ID NO: 902581 - DNA, 120 bp, Artificial Sequence
  ENSG00000287279_14 (sequence is synthesized)
tgagggagtgagttcaccaaataaagcaagcgtctctgcacattacccagcttccccgccatgttaaaaagacaacagggaggactacaaaattccctatttaacctggcaaaggctgta

SEQ ID NO: 902582 - DNA, 120 bp, Artificial Sequence
  ENSG00000287279_15 (sequence is synthesized)
aggggctctgggccggataatgcccttgaatcctaaagtctttcttaattcctctcttgagccaaaatttggagcattgccatttcgtatcccattcagaatgtttttgtagtgaatata

SEQ ID NO: 902583 - DNA, 120 bp, Artificial Sequence
  ENSG00000287279_16 (sequence is synthesized)
aacttattttcctgttaaccaagatagtcacgttttaatttaatatagattaacaaactgttatgattagacctgtactaacagttactgtattaagagttactgtatatttactgagtt

SEQ ID NO: 902584 - DNA, 120 bp, Artificial Sequence
  ENSG00000287279_17 (sequence is synthesized)
gcggacctcaggtcttaggcaggagcttgcgggcctaaaatgcattagctggtttttactgaatttacgcttagcagagacctacagaaaaatgagatccagctcgccgctggagggaac

SEQ ID NO: 902585 - DNA, 120 bp, Artificial Sequence
  ENSG00000287279_18 (sequence is synthesized)
agctctggcctcccagtgacgctgatatagacgcgaggctggagtgatttttttgataatcctgctagagacagaatggatcgcagtttcagcggactaacattcctcgcagaccaagcc

SEQ ID NO: 902586 - DNA, 120 bp, Artificial Sequence
  ENSG00000287279_19 (sequence is synthesized)
tcgtctctgccttcttaggattcagcttggggtggtccattgacttctccagggagctcctagcgtttgcggccgcgtcacatctccaacctttgcctcgccctgcctgtcatcccggtt

SEQ ID NO: 902587 - DNA, 120 bp, Artificial Sequence
  ENSG00000287279_20 (sequence is synthesized)
ttctttcttgcccgcctaagtgtggcggacagggatactattccccgccttccataccgccccttcctccttgtcgcggactccttgtccttgccggttcacctccctgtggaggacctc

SEQ ID NO: 902588 - DNA, 120 bp, Artificial Sequence
  ENSG00000287279_21 (sequence is synthesized)
ctctctctgtcattggaacaagccttgctcggtcgtcagtgtggatgttcctgggtcccctagaacactcgaaatctccccaaaaataccagagagtagcggtgggtgccctgccccttg

SEQ ID NO: 902589 - DNA, 120 bp, Artificial Sequence
  ENSG00000287279_22 (sequence is synthesized)
ctgtacccctctgtccgcagccgtgttgtggagggaaagggagaatagaaaaccaatgtgaaaaaaaaaaggcaaaagctaagatgaaagcttttgaatcaagtaaaagaggccccaaaa

SEQ ID NO: 902590 - DNA, 120 bp, Artificial Sequence
  ENSG00000287279_23 (sequence is synthesized)
taaataaatataaatctctagaaataagcaaagagagcctaactggaggataaaacctttggctctttgcttatttctcttgctgcgcttctctgcatcccagactaactcctttccacc

SEQ ID NO: 902591 - DNA, 120 bp, Artificial Sequence
  ENSG00000287279_24 (sequence is synthesized)
caccacctgccgctccccgctgccgcaagtggttccttaacagaccgcaacgggtggcggagagatctgggtgacctgactcgggcgtccatcccccggcctgggctgcgggacacgctg

SEQ ID NO: 902592 - DNA, 120 bp, Artificial Sequence
  ENSG00000287279_25 (sequence is synthesized)
ttagttaaagcggtgcatttgttaaaattgatgacctaaattgacacatcagtattactcaaagtccacagtttacaatagggtttacgcttggtgttgcacattttatgggtttggata

SEQ ID NO: 902593 - DNA, 120 bp, Artificial Sequence
  ENSG00000287279_26 (sequence is synthesized)
aatatataatgacatacttccaccattatagtatacagagtattttcgctgagctaaaaatcctttgtgctccaccaattaatcagtccctccctctccctctaacccttggcaacttct

SEQ ID NO: 902594 - DNA, 120 bp, Artificial Sequence
  ENSG00000287279_27 (sequence is synthesized)
gatcttttactatctccacagctttgccttttccagaataccatatagttggaatcatacagtatgtaactttttcagattggcttctttcacctaataatatggtacatgtttcctcca

SEQ ID NO: 902595 - DNA, 120 bp, Artificial Sequence
  ENSG00000287279_28 (sequence is synthesized)
atgtttagttttgtaagaaactgctaaagtcttccaaagacatcataccattttgtatttccatcaacaatgaattagagttcctattttttgacatcctcaacagtatttggtgttgta

SEQ ID NO: 902596 - DNA, 120 bp, Artificial Sequence
  ENSG00000287279_29 (sequence is synthesized)
agggttccggagtttggtcattctaataggtgtgtgtgttgtctcgttttaatttgcacttatctgatgggatatgatgtggagcatcttttcacaggcttagttgctacttgttctggg

SEQ ID NO: 902597 - DNA, 120 bp, Artificial Sequence
  ENSG00000287279_30 (sequence is synthesized)
tttgtttcttttcagtctttcttctctttgcttttcggttttggaaatttctactgatatatccttaagttcaaagcttctttcttcagccatgtgaagtctactaataagcccatcaac

SEQ ID NO: 902598 - DNA, 120 bp, Artificial Sequence
  ENSG00000230920_0 (sequence is synthesized)
cctaagggtagaaagggactctaaaggccaggccaaatacttctaaaaatgaaagtaaccacttgcaaatcagtaagccttgcttttgaaagaatgatacactgtgtttccttgggggca

SEQ ID NO: 902599 - DNA, 120 bp, Artificial Sequence
  ENSG00000230920_1 (sequence is synthesized)
gtgttgtcagttcaatattccataaacactaatgagaaccaaggtctgtaaagagagaacggattatttgaaatttaatagatgaacaaaggaaggatcattgtctatagaccatgaggt

SEQ ID NO: 902600 - DNA, 120 bp, Artificial Sequence
  ENSG00000230920_2 (sequence is synthesized)
cttggaagacagaaaccacttgtttgatactttgtagctctgtcagcacatggaaagaaactggttttcctgtaaaactaatacatgtgattattaaaggtaaaaacataacaaatcaaa

SEQ ID NO: 902601 - DNA, 120 bp, Artificial Sequence
  ENSG00000230921_0 (sequence is synthesized)
tgatgaagtgccagataggatgggaatggaagatatcgtggaagccaactatgagtttgcaagctttgccttcttgaggatggaggatcgctgtagaggaggaaacaaagctggagggtc

SEQ ID NO: 902602 - DNA, 120 bp, Artificial Sequence
  ENSG00000230921_1 (sequence is synthesized)
gaactagtcacagagccatgcctgtatttaagcaacagcgaaatgttaagcatgtggggagcagtatatgcctccgccaccctggctgagagtgtgtgtcaataaaccttcttggataaa

SEQ ID NO: 902603 - DNA, 120 bp, Artificial Sequence
  ENSG00000230922_0 (sequence is synthesized)
aaccttctggtggcttccccttgctcttggaatgaatcccaggggcctgcagagccacagggatggccctgcccacctgctcggcctctgccccagaagctcctcctcgctcctgcgggg

SEQ ID NO: 902604 - DNA, 120 bp, Artificial Sequence
  ENSG00000230922_1 (sequence is synthesized)
cagctacagacacctggagtgcttttctgcctctgcggcgttcttagccttgcttgtgtagatcttcctagatcagctactgtgctagactgtaagctccctgaggggcagctgcagaca

SEQ ID NO: 902605 - DNA, 120 bp, Artificial Sequence
  ENSG00000230922_2 (sequence is synthesized)
cctggagtgcttttctgcctctgcggcgttcttagccttgcttgtgtagatcttcctagatcagctactgtgctagactgtaagctccctgaggggtgcctgctgagctcccctctgcct

SEQ ID NO: 902606 - DNA, 120 bp, Artificial Sequence
  ENSG00000230922_3 (sequence is synthesized)
tttcccagggcagtgatggtgtgaagattggcaatgatttgttaactgtcctaggggagcccctagcctgcagtaggcctggagcaaagggaagattttgaaatcgtgtgtgttgaaatg

SEQ ID NO: 902607 - DNA, 120 bp, Artificial Sequence
  ENSG00000230922_4 (sequence is synthesized)
agtggacccagagatgaatgagacaagctccctgcccttggaaacccaacaaaagagtgaggcgtggagaacagtttcaaggaacttctggaaaagggctgtgaaaatcatgctgcggga

SEQ ID NO: 902608 - DNA, 120 bp, Artificial Sequence
  ENSG00000230922_5 (sequence is synthesized)
acacctgcatcattgctggcctggaaactgaggacggcttccgggagggggttgcctgggagatgcgtccatagggcctcctggggagcggatgggcgcggatggtggccaagcttgtca

SEQ ID NO: 902609 - DNA, 120 bp, Artificial Sequence
  ENSG00000230922_6 (sequence is synthesized)
agaaaagcaacacgtgctcatcgggaaaatggcagtacaagtttgaatatcgtaaagcgcgggtctcacttcttcctgccccactgtatccttgggcgagagcggcggtggcctcgagga

SEQ ID NO: 902610 - DNA, 120 bp, Artificial Sequence
  ENSG00000230922_7 (sequence is synthesized)
taatcctgggacttgggtcggactgggctggtgaatcttcaggacacatcggaggagggcagctttccaaggttgagccgcctgggaccgctgtgaatggaattgtcgacactgccccct

SEQ ID NO: 902611 - DNA, 120 bp, Artificial Sequence
  ENSG00000230922_8 (sequence is synthesized)
ggcccggaatgcctccatgttagccccctgctcatctccagctggtctcccatggtgtagggtaaaaggtgatggagccggaagagcaagggccccatagtcagcacacgggggttcacg

SEQ ID NO: 902612 - DNA, 120 bp, Artificial Sequence
  ENSG00000230922_9 (sequence is synthesized)
gcccagcttcctgtgtcttggctgagcaaccttgggcaagccattctgcctctctgaacgagctccgtttgccagctgtgaagtgggggtgggaataagacccactcacctggtgattgc

SEQ ID NO: 902613 - DNA, 120 bp, Artificial Sequence
  ENSG00000230922_10 (sequence is synthesized)
gatgaaatcagcagatatgaaagtgcttttagactgcaacgtgaaggtgttaaacgtgggtctgtcactagagatgagggttgacttgaaccacaggaaccacccccctgcccgggctct

SEQ ID NO: 902614 - DNA, 120 bp, Artificial Sequence
  ENSG00000230922_11 (sequence is synthesized)
gacctgggcacttttgtcttgttgcttgtccccgctggggaggcgatctttccatgcgagagcgtcatgttgctttttgcccccgtaaaggttgacgaccactatgctgactacgccgcc

SEQ ID NO: 902615 - DNA, 120 bp, Artificial Sequence
  ENSG00000230922_12 (sequence is synthesized)
tgcatcagccactccaaagagtccgctttgataccttagagtcttaaaacacctgctgtcggaaccgtacaattgatttcaattaactttgaattttttcaatgaaatgactctgataat

SEQ ID NO: 902616 - DNA, 120 bp, Artificial Sequence
  ENSG00000230923_0 (sequence is synthesized)
ctgggacctgtccccaggggaattatttctaatacccttgataaaatgtacaaagctagggtaggaagtagcaaggtgacagcagtggttaggtggaaagtttctctaagagaaagaact

SEQ ID NO: 902617 - DNA, 120 bp, Artificial Sequence
  ENSG00000230923_1 (sequence is synthesized)
aatgaattcgttcaattgaagctttttaaatatatttattcctgtcacctttcaagtcagcagctttttccaggtgacatggcaaaagggcctggcaagtgcacagggttaagccaagga

SEQ ID NO: 902618 - DNA, 120 bp, Artificial Sequence
  ENSG00000230923_2 (sequence is synthesized)
ctatcaatactgctccctaaaatattttcacctctggttttggggatctgcttcttctcggggtctctcctgctgctttcctggtaatagcacctaagagacccatgaaacaaatcccca

SEQ ID NO: 902619 - DNA, 120 bp, Artificial Sequence
  ENSG00000230923_3 (sequence is synthesized)
gttcaatacaaatttatagctgagtaaatatgagcataggctttaggaatccacagaattggagctttgcttaataccagccgggaaaatgtggttgtcagttaacctctcagagcctct

SEQ ID NO: 902620 - DNA, 120 bp, Artificial Sequence
  ENSG00000230923_4 (sequence is synthesized)
tcgaggcttggttcgctcatctattaaatgagtctgaataagccctactcctccaggttgttgctagcatcagacgagaaatgtatgcaaagccccagtgccatggctgacacacaggaa

SEQ ID NO: 902621 - DNA, 120 bp, Artificial Sequence
  ENSG00000230923_5 (sequence is synthesized)
acattcaacaagtggtagtgcattttcactaagtaaaaggagtaatgatttctttagtggtttcttttaacacaggggtttctatccatcccaaatagaggatagatattctaataaaac

SEQ ID NO: 902622 - DNA, 120 bp, Artificial Sequence
  ENSG00000230923_6 (sequence is synthesized)
aatcatttatgtgatttgtgattacaccgtacaactcaagttcctgtggaatgtttagcgtaatcaatccgaagctctcagcaagctccctgggcctgattttcaaatccaatgttactg

SEQ ID NO: 902623 - DNA, 120 bp, Artificial Sequence
  ENSG00000230923_7 (sequence is synthesized)
tagcaaagaactaaaggaggggaagaaaagcaccactgtattaaatacaccctcctcccctttttcctaaaggctgtttgtccccttctcttgataaatcttcagttcccagagagcaga

SEQ ID NO: 902624 - DNA, 120 bp, Artificial Sequence
  ENSG00000230923_8 (sequence is synthesized)
gactcttgggaaacaggaagtagcaaaatgccagtgagaaaatccccagatgaagagcagcaacaagtctccgggcaacagtgtggtcaaaagggggaaattcccccatcagcgctcaaa

SEQ ID NO: 902625 - DNA, 120 bp, Artificial Sequence
  ENSG00000230923_9 (sequence is synthesized)
aacagtccctcaggaaagcttagtgaaggttaatttgggaaattccctcagaggccatagaacagaaacggaaaactgctgtttaagagaaatctgaacggagcaagccagttcgtggct

SEQ ID NO: 902626 - DNA, 120 bp, Artificial Sequence
  ENSG00000230923_10 (sequence is synthesized)
gcctggggtgctctctgcgtgaaccgcgctgctgctccagcctgacttcccccttttcatcctgatcctgagggcaaccccgaaggggtccagttgccagagccacttgacacccaccct

SEQ ID NO: 902627 - DNA, 120 bp, Artificial Sequence
  ENSG00000230923_11 (sequence is synthesized)
gcccaggctcccaacccaggagaattaatgccgcaacacccagcctcttgaaacgagctgctgctaaagcagatttgcctccccgttaggacctcctgtgacccaccctcattcctgtcc

SEQ ID NO: 902628 - DNA, 120 bp, Artificial Sequence
  ENSG00000230923_12 (sequence is synthesized)
ccatggtagactagcaagccacagtcatcatactgtgagtgtccctcacagtcacttgctataacaagtccatcaggttttactgggttttaatctaaatgtgaccttaggatgacattt

SEQ ID NO: 902629 - DNA, 120 bp, Artificial Sequence
  ENSG00000230923_13 (sequence is synthesized)
acataaacattgtcccatgaaaggcttagaatggaatatcctctgatcagctgaagcagagaaagcatataaacactgctggaaagggggctgggtcaggggcaagtactggctctacag

SEQ ID NO: 902630 - DNA, 120 bp, Artificial Sequence
  ENSG00000230923_14 (sequence is synthesized)
agccctgatctccagatgcaagcgaggcccagttccctgctgcaaccagctctccgtgaatcatttccattcccataaaacttctatttgctgttttgttttgtttttttatgtgtgact

SEQ ID NO: 902631 - DNA, 120 bp, Artificial Sequence
  ENSG00000230923_15 (sequence is synthesized)
taaaatgaccatttcaagaagatgacaaaaaggagatttcagtagaagagagaggaaagtagactccatcatgacagcctaaatttgttttactgtacacttacgcaaaataggtatcaa

SEQ ID NO: 902632 - DNA, 120 bp, Artificial Sequence
  ENSG00000230923_16 (sequence is synthesized)
attttggaaaagagattttaaaggagaaagtactctgggtttaaaattctattaaaaaatatgctctactagagcgtgtgtgccttttttatgtaatcaggacccactgctgtatgagtc

SEQ ID NO: 902633 - DNA, 120 bp, Artificial Sequence
  ENSG00000230923_17 (sequence is synthesized)
acaattatagattctactttcaaatattttttgactcctagaaaacagccctgacaaaaaccacttttctgatgtcttcaaacaaacagctactttcaaagtctcctacacttgaaaatt

SEQ ID NO: 902634 - DNA, 120 bp, Artificial Sequence
  ENSG00000230923_18 (sequence is synthesized)
ctagacagactgtcaacatactctcaagaagtattctttccatttttcttctgggaaaatagcaggaattttggcccctagggagaaatgcagaaggagtagcaaatgagcacactgact

SEQ ID NO: 902635 - DNA, 120 bp, Artificial Sequence
  ENSG00000230923_19 (sequence is synthesized)
ggaaagaatgctatttgtctttcactatgtggagttcagaagagcactggccattggcgaagtcccagaagtgaaggtcaagttacagcttaatctgggctcataccctgcaactgagtc

SEQ ID NO: 902636 - DNA, 120 bp, Artificial Sequence
  ENSG00000230923_20 (sequence is synthesized)
caccttcagatggtgcttccactaagaaagctgtgggatgcctacgctgcattcattagaccctagcaatataaatattgctcgtttccactagggaggaaaacaactctgctgtcaaat

SEQ ID NO: 902637 - DNA, 120 bp, Artificial Sequence
  ENSG00000230923_21 (sequence is synthesized)
ttgctgagcacaaagtgaaaggaagtctgcaatctgttggctaattaagacccattaaatctgtacttggatcatggaagcttgtagggactagccatgtcagtcccaccttgaagacag

SEQ ID NO: 902638 - DNA, 120 bp, Artificial Sequence
  ENSG00000230923_22 (sequence is synthesized)
agttccaggctggattgcattttctagaacaaatcctttaaatattttcattcaaagagaacagtaatgacagcttccaacaatcaaactgaatattttagtagaagcttttctagacat

SEQ ID NO: 902639 - DNA, 120 bp, Artificial Sequence
  ENSG00000230923_23 (sequence is synthesized)
ttgtgttgggataactaatggaactaatagatttaagaaatttcagaactcctaattaagccctggatactgcctcagattctgaatgactgaatatattgggcattttatgcctcatcc

SEQ ID NO: 902640 - DNA, 120 bp, Artificial Sequence
  ENSG00000230923_24 (sequence is synthesized)
gggcattttatgcctcatccttcatgtagtccaacaaacacctattctatatttattctaaaaaactttactaaaaactttactaatattaaattttctaaatactttctaaaactttac

SEQ ID NO: 902641 - DNA, 120 bp, Artificial Sequence
  ENSG00000230923_25 (sequence is synthesized)
aagatcttcagaaaattttccaaattttataaattgtatacatttttgatgctgctattgctatagatgtcttctggaagttgagttgtgcctttaggaatattttcccactacatcact

SEQ ID NO: 902642 - DNA, 120 bp, Artificial Sequence
  ENSG00000230923_26 (sequence is synthesized)
gtaatgagtgttacaaaaaaagtctctgtacattctgcatgccttgattaaatgtattaattttctaccaaatcactattcctataagtgtttaaaataaaaatgaatatggtcttcaaa

SEQ ID NO: 902643 - DNA, 120 bp, Artificial Sequence
  ENSG00000230923_27 (sequence is synthesized)
agtgagaaaatccccagatgaagagcagcaacaagtctccgggcaacagtgtggtcaaaagggggaaattcccccatcagcgctcaaaaacagtccctcaggaaagcttagtgaaggcac

SEQ ID NO: 902644 - DNA, 120 bp, Artificial Sequence
  ENSG00000230923_28 (sequence is synthesized)
agatgaaacagattccaacatggggctgagagtaataaataaactaataaaaaaaggaaagcatggagcaactttgatagaagaattttggcccctagggagaaatgcagaaggagtagc

SEQ ID NO: 902645 - DNA, 120 bp, Artificial Sequence
  ENSG00000230923_29 (sequence is synthesized)
catttcacgctgtgcttagagatgcatgcaaaagcattatcttctgctgcaagcagcagcccctaggatgtacatgtgctctctgctgatggctaaatttggggaaactgagacactcta

SEQ ID NO: 902646 - DNA, 120 bp, Artificial Sequence
  ENSG00000230923_30 (sequence is synthesized)
acacagcaggagcaacttaatttctcaactgcttacattaaagatgagaccaaggatgaacatacttggactttttcaacctgatgtttcatctatcatgctgcccctcctcccaagact

SEQ ID NO: 902647 - DNA, 120 bp, Artificial Sequence
  ENSG00000230923_31 (sequence is synthesized)
ttctcttcctgaggacctcttggtgagaagttgcccaccccatacccaagccaaagtggaatggcagagccctgccagaaaaccaagcaacatttctactaaaggcaggtggctactgct

SEQ ID NO: 902648 - DNA, 120 bp, Artificial Sequence
  ENSG00000230923_32 (sequence is synthesized)
ccttcctctttctccttatctgagatgattagaagtccaggtacagaggaactgacccatgtgtcctaccttgaggaccctgcagtattaattagttatcattgtctgcagaatgaaaaa

SEQ ID NO: 902649 - DNA, 120 bp, Artificial Sequence
  ENSG00000230928_0 (sequence is synthesized)
gggttagggactgtgggtgtgcagacaggaagcaggcaatgcttgccctcggagagctcagcagagataggacaggtctgcaactcttctccaagatggaaagtgctgagtgttttaaaa

SEQ ID NO: 902650 - DNA, 120 bp, Artificial Sequence
  ENSG00000230928_1 (sequence is synthesized)
gaagaacaatgcgtggggaattcagaggaagtaaaaacctcctgcgtaagatttcagaaggagactccagccaggaagcgcccgccaccgtgggagcagtgcaccggcccgtgcctctgg

SEQ ID NO: 902651 - DNA, 120 bp, Artificial Sequence
  ENSG00000230928_2 (sequence is synthesized)
cactgctgcagggccagctctgtgcctgagcagcgcaccccactcatcaccacctcctgggcccttggcgtccccgaccagaaccaggtttcctaagaagacagccagcgtcacccagtc

SEQ ID NO: 902652 - DNA, 120 bp, Artificial Sequence
  ENSG00000230928_3 (sequence is synthesized)
agcgtgcctttggagtcacctcctgactcccatctgaggtgtggcctcagtcataccacccccaccgggttgtgtccagcctgggcctgaaaatcttcagtgatgagaacccgaattccc

SEQ ID NO: 902653 - DNA, 120 bp, Artificial Sequence
  ENSG00000230928_4 (sequence is synthesized)
ctactggccctacacccctctctcttccagatggcagaggagggtcctgttccccgcccctctccctgggggctgtgctcacatttccccagctgctcctcaagcggcccagatcgtcag

SEQ ID NO: 902654 - DNA, 120 bp, Artificial Sequence
  ENSG00000230928_5 (sequence is synthesized)
ttgtgctcagggttgcccagtccacactgtgcggcagccagtgtgggtgcaagtgcagaggtttctctgttgcggtcatgcctaagtcctcttgattttattttttgatgtattttagat

SEQ ID NO: 902655 - DNA, 120 bp, Artificial Sequence
  ENSG00000230928_6 (sequence is synthesized)
ctatccacttatttctcctggactacctggtccagtccagcctcatttctcacctgggctactacaatagcctcctgagtgtgtttccttgcattcatgttaatctccacccaacgtttt

SEQ ID NO: 902656 - DNA, 120 bp, Artificial Sequence
  ENSG00000230928_7 (sequence is synthesized)
ccaaacagcaaaggaagaaatctttcaaacatgtggattgcaagctttgagtgatcttgcccctgcctcctctgccctcatgtttgacagcactctcgagagagagccacactacaatcc

SEQ ID NO: 902657 - DNA, 120 bp, Artificial Sequence
  ENSG00000230928_8 (sequence is synthesized)
ctggccctgatttcctcagctgaatcaagctttctctggccacagggcttttgcataagctattcattcctcctccaccttgtctgactaatttctattcatctttcctgcagatgcaaa

SEQ ID NO: 902658 - DNA, 120 bp, Artificial Sequence
  ENSG00000262624_0 (sequence is synthesized)
tggtaggaacagcgtctttaatgggccccgccccccacgcccgccaaaccgccccccttgcgggccactttggcctcctccaccgcggcacggagggcccgggccgggtccccgcggagc

SEQ ID NO: 902659 - DNA, 120 bp, Artificial Sequence
  ENSG00000262624_1 (sequence is synthesized)
tcgagcactcggccgagctcgtctagcagcccgaggcagcaggcgactcggacgctgaaacgtcactaggcgatttttccaaagacaccggcgcctcgtgctcagtgacgtagctgtgcg

SEQ ID NO: 902660 - DNA, 120 bp, Artificial Sequence
  ENSG00000262198_0 (sequence is synthesized)
taattgctgccaaaatcatcacaagctgtacgtcatcaaggctccctttgcactcccaagaagaactgttcattttaaacaaaagtgatgagaattcctctggaggtgggaacagagaaa

SEQ ID NO: 902661 - DNA, 120 bp, Artificial Sequence
  ENSG00000262198_1 (sequence is synthesized)
acttcatgcttggtaaagcacctgaggcacccattacaatctgggacaagatgaggacatcaacactcatgctgtattccacatgggaggccaagtcaactcaagatgatttttaagaga

SEQ ID NO: 902662 - DNA, 120 bp, Artificial Sequence
  ENSG00000262198_2 (sequence is synthesized)
aagcaagaccaagacgccttctctacaaaaaaataagaaaattagcctggcatggcagtgcacacctgtggttccagctacactagaagctgaagggggaggttcacttgagccccgagt

SEQ ID NO: 902663 - DNA, 120 bp, Artificial Sequence
  ENSG00000262198_3 (sequence is synthesized)
ttgaggctgcagtgagccacattagtgccaccgcactatagcctgggtgacagagcaaaagcctgtctccaaaaaaataaataaataaataaaagctataaatactgcaaagaggcaaaa

SEQ ID NO: 902664 - DNA, 120 bp, Artificial Sequence
  ENSG00000224918_0 (sequence is synthesized)
tccaaggcgaggtggagcaggagcgcaggagatttccccaggccactcagaacggcccacttcaaatgcggagagatacacctgcagtttctgaatggatttcttcaacaatgccgccta

SEQ ID NO: 902665 - DNA, 120 bp, Artificial Sequence
  ENSG00000224918_1 (sequence is synthesized)
ttgtcacatgaagctggaaacactaacagaggctgttggaaagaaaggtctggttccgtggccaaataccttgacttttccaaaaacagactttttctgtctcttcagaagaagaattac

SEQ ID NO: 902666 - DNA, 120 bp, Artificial Sequence
  ENSG00000224918_2 (sequence is synthesized)
atgcaatgggaagattgatgttcctctgtcagaaagctaccttggaacaggtgctcccaattaatttccatgagccacatttatcctgtggtcagataattaaaaaaaaaataacctgga

SEQ ID NO: 902667 - DNA, 120 bp, Artificial Sequence
  ENSG00000263574_0 (sequence is synthesized)
gtggcagcagagcccagacctggcccaggcggggtctgttctgccatccacaggcacctcttctcctctctcttagaccctctggaatgaaaaggaagaaagagcctctcactcatgttt

SEQ ID NO: 902668 - DNA, 120 bp, Artificial Sequence
  ENSG00000263574_1 (sequence is synthesized)
cccgctgtgcccacctgcagcacacagcagcatgctgacccaacaggacgtaccccgtgaacattaacgccttctgttatgaacgaccatgtgatgcagaaaaaatcatgccctgatttt

SEQ ID NO: 902669 - DNA, 120 bp, Artificial Sequence
  ENSG00000263574_2 (sequence is synthesized)
tggtagacgcagcggccaaagcctaagatgtgaagaaactcacctgaggccactaaattggaaagtggccgcgcggagatgcagtgcattgctttaggactggacagatgaaatcagcat

SEQ ID NO: 902670 - DNA, 120 bp, Artificial Sequence
  ENSG00000263574_3 (sequence is synthesized)
cttcccaaacttctctgctggaagactgtctggaatatctccccttggccctctgggggatgctgcccactccacagggctccctgaagctctgtctgattataaagcttctccctaatg

SEQ ID NO: 902671 - DNA, 120 bp, Artificial Sequence
  ENSG00000263574_4 (sequence is synthesized)
ggcaagatctcacacatgatagagccataaaatgtggcactcctggctggccctgctgcttgtctgataagggagatggagggactcgccagcacaggcagagggccctgggtcttaccc

SEQ ID NO: 902672 - DNA, 120 bp, Artificial Sequence
  ENSG00000263574_5 (sequence is synthesized)
cgcccctgtgcctcctcccgactccagctggtctcggcttccagcatgttggaaggcctgttctgcagaacccaaagcccgtgttttgcaatgatgaggattccatgttcaagaaaggct

SEQ ID NO: 902673 - DNA, 120 bp, Artificial Sequence
  ENSG00000263574_6 (sequence is synthesized)
cttgtcacggtggtgagagagacctgtggtctcctaggaggcgtggagcagccttcccacactctctgcacatacacatcctcgggggatctggtccaggggcagattctgacaccccag

SEQ ID NO: 902674 - DNA, 120 bp, Artificial Sequence
  ENSG00000263574_7 (sequence is synthesized)
gcctcagctgaggctccagacgctgtgtctctcacaagccctcggaggacagtgatgctgcaggtccacaggccacagggatccagagtggctgctgaggagaagacagagcataaagag

SEQ ID NO: 902675 - DNA, 120 bp, Artificial Sequence
  ENSG00000263574_8 (sequence is synthesized)
gttaaaccatgcctatggtcacccctatcggtgaagctgagatttgaagtggcgtttggaccccagagctgagctgattatcaccatgacattcaaccttccagaatcctgcagaccctc

SEQ ID NO: 902676 - DNA, 120 bp, Artificial Sequence
  ENSG00000263574_9 (sequence is synthesized)
aatagggtgccctgccctcctgtccatgcctgggccttccaggactagcagagtggtgtaggacattcagggatgggccagggcatccttgtacgtggcccctccctaggtcacccccaa

SEQ ID NO: 902677 - DNA, 120 bp, Artificial Sequence
  ENSG00000263574_10 (sequence is synthesized)
tccctgctctggttggctccacacttttacatgaagccccgctgctcccagatgggggattagaccaggggctcctgttcagcttttcatgcaggaagactactgagcaggggctggctg

SEQ ID NO: 902678 - DNA, 120 bp, Artificial Sequence
  ENSG00000263574_11 (sequence is synthesized)
tggaagaggggaaagttgccacccttgtctaaaattgccgctgcgggatggagaggaagattcctgcatacccaaggagaggttgaggctccagggagaaggagggagcagcgctgcctg

SEQ ID NO: 902679 - DNA, 120 bp, Artificial Sequence
  ENSG00000263574_12 (sequence is synthesized)
agcacatgcccccagcgtgtgggctgctgggcagatgccagcatccccatcatttagggcctgaataaacagccttgttttactctgctctttgctgagcaaaacagggctccaaacccc

SEQ ID NO: 902680 - DNA, 120 bp, Artificial Sequence
  ENSG00000263574_13 (sequence is synthesized)
ggcagatgagagggtttggtgagtgatacagcagcctcagcctcctgggagactggtctggcctgctgggaagacattgtccactctggcctggcctggcctgagcaggtatgtgagcga

SEQ ID NO: 902681 - DNA, 120 bp, Artificial Sequence
  ENSG00000263574_14 (sequence is synthesized)
caactgcagagagtgccagcctctggaagagccccaggggcctcatccgaccacggcgcccacaaggtgcccctcataagtgttctggaggctgcgagcacagccaaaaagatgaacagc

SEQ ID NO: 902682 - DNA, 120 bp, Artificial Sequence
  ENSG00000263574_15 (sequence is synthesized)
tcctgtccctgcggtgggctgatgagagtggaacgagggcacatgttccaatgaatctctcgtgtcagttttcactgcagcacaaacagagggaggtggggagtgcatcgtttcttctag

SEQ ID NO: 902683 - DNA, 120 bp, Artificial Sequence
  ENSG00000263574_16 (sequence is synthesized)
gaagccccggtttccactgctgatgaggagagagagacagaaatggggatttttcacactcctttgcctggtgaatatttttgttttcgtttaattttggattagtgcattgctttagga

SEQ ID NO: 902684 - DNA, 120 bp, Artificial Sequence
  ENSG00000263574_17 (sequence is synthesized)
ccgggaatgctgttgaacaaaaaagtgggacctggggtggctgagatgggcgtcctggagaagtgtgggctgggagacctagaagccacctttcggtagaataatctaggatctcaaaac

SEQ ID NO: 902685 - DNA, 120 bp, Artificial Sequence
  ENSG00000263574_18 (sequence is synthesized)
ggaaatggtgctctgcatcactggaggaagcaagtgtgaaacctcagtccaccccatcactcaatcaggagaattcccattggacagctggcttgcatgtggaccctctggaatgaaaag

SEQ ID NO: 902686 - DNA, 120 bp, Artificial Sequence
  ENSG00000263571_0 (sequence is synthesized)
gagagacacacacgcacacgcacacgcacacacacacagaatgccacctcgtcaatgacaagctgttccaatcacacagctcggacaccaagcggaccggacaacggacagcccaggcct

SEQ ID NO: 902687 - DNA, 120 bp, Artificial Sequence
  ENSG00000263571_1 (sequence is synthesized)
cctccctctgactgggaggaagccaactgagcacgtctggggaagtgatcccccaccgcaagccccccactcaccctccatatttgatctgacagcagtgctctatcctggccggtagcc

SEQ ID NO: 902688 - DNA, 120 bp, Artificial Sequence
  ENSG00000263571_2 (sequence is synthesized)
ttccctgcaaccagctcgcacaactctgaccaactaccctcgtggccttcaggtgaggcactgctctctctcctgtcccaaagcacaaggaaaccccaaaccaagcaggagaccaccggc

SEQ ID NO: 902689 - DNA, 120 bp, Artificial Sequence
  ENSG00000263571_3 (sequence is synthesized)
gcaccacttctccagaggaccagacagagtgagctgaaaaccaagtactcactgtggtgaagtcttggtggccgcactcctgccctttgaacttgcagtagagcatcatatccttcaggt

SEQ ID NO: 902690 - DNA, 120 bp, Artificial Sequence
  ENSG00000263571_4 (sequence is synthesized)
catggcccacacggtgcaggaactccagcatgctgaactgcttgggtttgtagtgcttgaagttggccttctgccgcagggcctccagcacggaggggtcagccagatgggggtccggga

SEQ ID NO: 902691 - DNA, 120 bp, Artificial Sequence
  ENSG00000263571_5 (sequence is synthesized)
tctgcaggttgacatccagcagggccagcagctccccagcatggtacaggtcattggtggtgagcctggagaaccggaagccattcaggttacagagggtcacagctgggaagaccaggc

SEQ ID NO: 902692 - DNA, 120 bp, Artificial Sequence
  ENSG00000263571_6 (sequence is synthesized)
tttgagccaccacttcgtccaccttagtgacatgctggtaggagaagtagtaggacaccctctcagagctctccaccagcagcaggcccagagagcccacgaaggccactgcccacagca

SEQ ID NO: 902693 - DNA, 120 bp, Artificial Sequence
  ENSG00000263571_7 (sequence is synthesized)
cacgccggatggtcagcggcccatacacgaagatgtggcggatgccatggagggtggaggtgttggcaaagatctggatgctagaaggttgcaggctgccctcactggggctttccttga

SEQ ID NO: 902694 - DNA, 120 bp, Artificial Sequence
  ENSG00000263571_8 (sequence is synthesized)
ggtccatcgggaccccgtgcagttccgcaactggcttcaggttgatcgaatttcagagaagagctcccagtcctcgggctctgcttaaaccttgacgttcaggggagagaacgcaaggca

SEQ ID NO: 902695 - DNA, 120 bp, Artificial Sequence
  ENSG00000263571_9 (sequence is synthesized)
agcatcgcgccagatgctgtgagtttatcctgagagcccagccgcacgctgacagggctccaggccctctcctacaggaagacttcctggattaatctgctaatcttcagctcatccacc

SEQ ID NO: 902696 - DNA, 120 bp, Artificial Sequence
  ENSG00000263571_10 (sequence is synthesized)
tgtttaataggcaaaacctacagaactagtccacactgagtggacctctggggctcccagctgccgattgacctgaaccccagagtgaactcgtgttgctttgtggcttcaggaaacctt

SEQ ID NO: 902697 - DNA, 120 bp, Artificial Sequence
  ENSG00000263571_11 (sequence is synthesized)
ggaacatctctgtgctgttttttcatttgtgctcaatcattcctgaggcctcctcctcctgctgcaatttgacaagacttgaccaaatcattaactcccagttaatgggataaaatgagt

SEQ ID NO: 902698 - DNA, 120 bp, Artificial Sequence
  ENSG00000263571_12 (sequence is synthesized)
ttgaatctgggattctggtcattaaccccatgtcaccatctgctccagcagtttgatggcagggctaggtgaattctaatcacccaacacttgttaaactgctgattcctgcttccccac

SEQ ID NO: 902699 - DNA, 120 bp, Artificial Sequence
  ENSG00000263571_13 (sequence is synthesized)
ctctgctgactcagcatctctggggtggggcctgcaaaggctctcttccttgacggggttattgagggcagctctaggaacccacccaggaccagacctgatgaggagttcctcctatgc

SEQ ID NO: 902700 - DNA, 120 bp, Artificial Sequence
  ENSG00000263571_14 (sequence is synthesized)
atcagtctacttctgtccctctttcccctgcgaaggaaaaatagaagaaagaagccatctctgtttgctttctccctgtcactcaatctctggagccaactgcttcacaaataaagagaa

SEQ ID NO: 902701 - DNA, 120 bp, Artificial Sequence
  ENSG00000263571_15 (sequence is synthesized)
gaaaatgggagagaggaacagcgctagagaagtttgtccttgcctggttcccgggtggaacttcctctcccccttgtgttctatgcgtgtggttacagctgcctctgatctttggtgacc

SEQ ID NO: 902702 - DNA, 120 bp, Artificial Sequence
  ENSG00000263571_16 (sequence is synthesized)
agcggttggcagtggtggtatttcagcataccttgatcatcgtgcttattacacagcctcctttaccatcaaccctacctaccttcttctagccatgccccccacctcctcccgtctcta

SEQ ID NO: 902703 - DNA, 120 bp, Artificial Sequence
  ENSG00000263571_17 (sequence is synthesized)
tccatctcttcgctcttttaaaaaatacttaagtgtgtacagatcacagtgacttcatttgtgtgcccattcacatttgatgacttccataacccccatacaagtagttgtgtattcgtt

SEQ ID NO: 902704 - DNA, 120 bp, Artificial Sequence
  ENSG00000263571_18 (sequence is synthesized)
ttaattcactttatttatttcctagctctttcataaaataaaatgaaatataagtaatgaaatgggaataaaaaagagaaaaatagaattgagggggaaaaggagaaatgcatctatgtt

SEQ ID NO: 902705 - DNA, 120 bp, Artificial Sequence
  ENSG00000263571_19 (sequence is synthesized)
tgtgatcacgttcatctttctccatgcatcaatatgcatactattatgaattcattgcacgtattttaacatgtaggcactacatggggatgtggtgtctacataccacctctatagtgg

SEQ ID NO: 902706 - DNA, 120 bp, Artificial Sequence
  ENSG00000263571_20 (sequence is synthesized)
taggcactgcaaagggacatacaaaaggtaaaaagcatagtctctactctcataggacttttcatctcatggatgtggcactcataatgtcttttatctgtgtcccacttgatgtgaaac

SEQ ID NO: 902707 - DNA, 120 bp, Artificial Sequence
  ENSG00000263571_21 (sequence is synthesized)
tctttagtaggcatgatcctatttgatttccataagcagaagaggggtcactgtttccatgttatgagagaggaaactgaggttcagagagtgaaaggaccctgatgagataatggaact

SEQ ID NO: 902708 - DNA, 120 bp, Artificial Sequence
  ENSG00000263571_22 (sequence is synthesized)
ggggctcaaatcctggtttcccgactcaacatttcacattctttctactctgtcattattcattagtcaagtttctccacagacaactcactgagccacaacatatgaagcagcatggta

SEQ ID NO: 902709 - DNA, 120 bp, Artificial Sequence
  ENSG00000263571_23 (sequence is synthesized)
atgccactagactggtcatgatcagaagatgtggccccagggaagagaaagcaagagagctggagatagcagagaaagcaccaaggaagggcttggccgtgcagctctagcagggaggtc

SEQ ID NO: 902710 - DNA, 120 bp, Artificial Sequence
  ENSG00000263571_24 (sequence is synthesized)
cttcctttcagcccccaagtgtccctctgtgtctcatctaaaaagcaaaaaaagaggagaactagagcttatggttgaaggcgtgagaatgaggtgtcttttccctctatctctgtaata

SEQ ID NO: 902711 - DNA, 120 bp, Artificial Sequence
  ENSG00000263571_25 (sequence is synthesized)
tacaagtataaatactatatatacatatgtatatgtgttccttttttctgtgtctgattatgcatgcaatttagcaaggatttattgcctaattttggtctgggcactttgctaacgcaa

SEQ ID NO: 902712 - DNA, 120 bp, Artificial Sequence
  ENSG00000263571_26 (sequence is synthesized)
tgggggaggataccaagaaattagggactcagcctcattgtccccagagactcctgggggtgggcaaggcacggtgtctgtgcatactgctgggggagctctggattaggggacatcagg

SEQ ID NO: 902713 - DNA, 120 bp, Artificial Sequence
  ENSG00000263571_27 (sequence is synthesized)
agacatgacattgaaatgtcctactcagttctctgtacagattggatttccgtggaagaaagaaaatcaacatgtattgggagtcaacatctcattcagtcctgtgagtttattctgcct

SEQ ID NO: 902714 - DNA, 120 bp, Artificial Sequence
  ENSG00000263571_28 (sequence is synthesized)
atttttcagacaaggagactaaggcttcaagacggtaagtaaattgcccacagtgtcactgctggtgtgggaatgagcttcagggtcattgagtcatgctgctgcccaggtaccctgtaa

SEQ ID NO: 902715 - DNA, 120 bp, Artificial Sequence
  ENSG00000263571_29 (sequence is synthesized)
ggccgtcaagtgttgtgggtaagggttttggtgctgacgttcaggtgattgtgagtttaaagcctgggcccacccacaccagcagtgttatttgaagcatgctattgaacgtgcctaaac

SEQ ID NO: 902716 - DNA, 120 bp, Artificial Sequence
  ENSG00000263571_30 (sequence is synthesized)
ttccgtttgctcatcggtaacatgggaacagtaacagtgcctacctcataagactgatgggaggatgtgatcagctaaagtgtgtaaagtaccaataagtatctaataaagttcagtaac

SEQ ID NO: 902717 - DNA, 120 bp, Artificial Sequence
  ENSG00000263571_31 (sequence is synthesized)
ttgcagctggcttcttctgtgtcacggccccacagagatcttggctggtctccctatctccaccctccaccatgctcactattccattacaagtttccttttctacccagtactaatcat

SEQ ID NO: 902718 - DNA, 120 bp, Artificial Sequence
  ENSG00000263571_32 (sequence is synthesized)
tttctgcaattcatctcatttccttgtgaactatctgttggtcctaccagaatgtaagtctccacctgggggcagagaccctgcctggcttgttagaagccatatccccaggattgaagc

SEQ ID NO: 902719 - DNA, 120 bp, Artificial Sequence
  ENSG00000178243_0 (sequence is synthesized)
ctccagccagggctgagtggcagtgtgggcaccgcggcccgggacgacagcctgggctcagagtcaggcttgtggcttcgcctctcagcttgcgtctcctcccctgtgggatgggggatt

SEQ ID NO: 902720 - DNA, 120 bp, Artificial Sequence
  ENSG00000178243_1 (sequence is synthesized)
ccgtggcacccccatgatgaacaggatgccatgggcctcagcccagggcagacctcagtgtccttcctgtggccgctgctggaggtgcgtgaccacaacacagggaggggactcgtcccc

SEQ ID NO: 902721 - DNA, 120 bp, Artificial Sequence
  ENSG00000178243_2 (sequence is synthesized)
gccactgtgctgacgcctgggtctccagagaccctcctggaactccgccaggccttcctgggttccagacaggcccgccacgggcatgacgcagcgccatctagcggacagcagggctgc

SEQ ID NO: 902722 - DNA, 120 bp, Artificial Sequence
  ENSG00000178243_3 (sequence is synthesized)
agcgtggacagaacggccggacgcccagtcctgggctggcggctgaggaacagcctcacagggcaagagggcaggcaacacctgcatctttccggcataagaacctcaagaaaagcaaag

SEQ ID NO: 902723 - DNA, 120 bp, Artificial Sequence
  ENSG00000178243_4 (sequence is synthesized)
gaatataagcctgtgttctttggagccaccgaaatctctgttctcatggcagtcgctgaaagtttaagggagccgccaccgccccaatggggttggtttctttcttccctgtttttaaag

SEQ ID NO: 902724 - DNA, 120 bp, Artificial Sequence
  ENSG00000178243_5 (sequence is synthesized)
atcttttaaaatgtctagagagaccctgggatccagtgctggacggatgatgcagggccacacagagaggctattgtgtgtcacttgctgggttaggaacagacggatcagggcttctat

SEQ ID NO: 902725 - DNA, 120 bp, Artificial Sequence
  ENSG00000178243_6 (sequence is synthesized)
gctgcgtctgcctggtcctgggagagagaaactcacacaaccatctgcctggaagacctgggcttctcaggctagagggtctgcacatgtaggtgtgtgtgcatgcatacatatgcctgc

SEQ ID NO: 902726 - DNA, 120 bp, Artificial Sequence
  ENSG00000178243_7 (sequence is synthesized)
gtgtggatgtctgtgcttcacacaaacaagtgtacttgtgggcatatgtgtgtgtgtgcctgcatgtgcagctctgggtatgtgtgtgtgcgcatgcccctgagtctctctgcatgtgat

SEQ ID NO: 902727 - DNA, 120 bp, Artificial Sequence
  ENSG00000178243_8 (sequence is synthesized)
ttgtgcatgtgtgtgcctgtgtgcccgggtctgtgtctatatatatgcatgcatggatatgcatacgtatgtgcatttctgcacatgtgtgcgtatgcctgtatgtgcctggctatgtgc

SEQ ID NO: 902728 - DNA, 120 bp, Artificial Sequence
  ENSG00000178243_9 (sequence is synthesized)
acacacatgtgaatgtctgagcagctccagagggagggccaccaccctgcatggtggacattagtttgagcctgtgaggaccagtgtcccccaaagcccctcaactacagcccagcccaa

SEQ ID NO: 902729 - DNA, 120 bp, Artificial Sequence
  ENSG00000178243_10 (sequence is synthesized)
cccaacccggagcagatcacaggccccagagacatctccaaccctcacacatggttcccaaacccgggctatccttcactctgcaggggcgggccagccctgcccactgccagggacccg

SEQ ID NO: 902730 - DNA, 120 bp, Artificial Sequence
  ENSG00000178243_11 (sequence is synthesized)
ctccaaggcgcctgcaggagggctgtgggcgacagtgtgggcgcccaccagcaggagggcctgtcatggtctgtgcacgaagctggtgcgctgtcttctccaggaactcgcaccttcgct

SEQ ID NO: 902731 - DNA, 120 bp, Artificial Sequence
  ENSG00000178243_12 (sequence is synthesized)
ccccctcccctgccagccaacactttcaggtttctgccataaaagagaaaaaaatctccctccctctctacccgctccgcgcctgctccttctccactttttgcagatcaaacagcatgc

SEQ ID NO: 902732 - DNA, 120 bp, Artificial Sequence
  ENSG00000178243_13 (sequence is synthesized)
atggagtcgagcctgctggctctgttccgagctgcactttgggcatccgtgggctgccttgctccttgtggggtggcttcaagagcaggtcccaggtgtgcctgcagcagtgccgacacc

SEQ ID NO: 902733 - DNA, 120 bp, Artificial Sequence
  ENSG00000178243_14 (sequence is synthesized)
cctgagaacacagcgcaccccagctttcggcgccaaccacacagccagcaactgggcttggaagcttccctgaggtcgacgctgcctggaaatggactttgctgcctgcattcaggccag

SEQ ID NO: 902734 - DNA, 120 bp, Artificial Sequence
  ENSG00000178243_15 (sequence is synthesized)
gggccatgtttgctcccccattacaagttggcctcatattaacatgtctgaggactaaggctggtattctagaacacgcctttcactgattgtgttaaataaaagagaaagatgaaaaaa

SEQ ID NO: 902735 - DNA, 83 bp, Artificial Sequence
  ENSG00000223770_0 (sequence is synthesized)
catggaactatatgaccaacatatgtgctagagtgtctgacggagagaagaatttaatcgatgtctgttgaattcgctcaagt

SEQ ID NO: 902736 - DNA, 120 bp, Artificial Sequence
  ENSG00000223770_1 (sequence is synthesized)
agagaagaatttaatcgatgtctgttgaattcgctcaagtaaataaaacagaaaaactgttttataaacggcaacaaagtgcagtagtcattactagataaaggaagaataagctacggg

SEQ ID NO: 902737 - DNA, 120 bp, Artificial Sequence
  ENSG00000223770_2 (sequence is synthesized)
cccactgaatttccaagcaacttgcagttctgcaaagagtattatcagctgagaggcaaccactatttcactcttcgaatctatgaaattgaccatttttgatatctcatattggaggtt

SEQ ID NO: 902738 - DNA, 120 bp, Artificial Sequence
  ENSG00000223770_3 (sequence is synthesized)
tgtggcaaccctgtatcaagtaagtccactgttgccatttttccaacagcacacgctaacttcatgtctctgtcacagtttagtaattcttagaatagtttaatctttttcattattatt

SEQ ID NO: 902739 - DNA, 120 bp, Artificial Sequence
  ENSG00000223770_4 (sequence is synthesized)
acatctgttatagtgatcattatatctgatacagtgaatatagtgatatcatactgttatattcagtggtccctgaagctggcagaggttggctcatgaggtgtaaggaaaaaaggcatc

SEQ ID NO: 902740 - DNA, 89 bp, Artificial Sequence
  ENSG00000223770_5 (sequence is synthesized)
gtagctaagatcactggtgaaggccactataataaacaacagattttcaatgtagagaaaacagccttgtatttgaagacaattttatc

SEQ ID NO: 902741 - DNA, 120 bp, Artificial Sequence
  ENSG00000223770_6 (sequence is synthesized)
atgtagagaaaacagccttgtatttgaagacaattttatctaggactttcatagctaaaaaggagaagttattgcctgcttcaaagcttcaaaggacaggctgactttcttcttagtagc

SEQ ID NO: 902742 - DNA, 120 bp, Artificial Sequence
  ENSG00000223770_7 (sequence is synthesized)
taatgcacttggtgactttaagtggaagccagtgctcttttaccattccaaaaatctcagggtccttaagaattatgctaaatctactctgcttatgctctgcaaatgaaccaacaaagc

SEQ ID NO: 902743 - DNA, 120 bp, Artificial Sequence
  ENSG00000223770_8 (sequence is synthesized)
ttacagcatggtttactgaatattttgagcccactattgaaacatatgttaaaaaaaaattattgctcactgacaatgtaggtagtcgcccaagagctctgatggagatttacaaggaga

SEQ ID NO: 902744 - DNA, 120 bp, Artificial Sequence
  ENSG00000223770_9 (sequence is synthesized)
gatggagatttacaaggagattaatgtgttttcatgcctgctaacacaacttgcattttgtagcacatggatcaagaactaattgtgactttcaagtcttattaattatttaagaaacac

SEQ ID NO: 902745 - DNA, 120 bp, Artificial Sequence
  ENSG00000223770_10 (sequence is synthesized)
atttggtaagactatagctgctataaattgtgattcctcttactgatctgggaaaacccaactgaaaaccttctagaaagatccacaattctatataccattacaaacattcgtgattca

SEQ ID NO: 902746 - DNA, 120 bp, Artificial Sequence
  ENSG00000223770_11 (sequence is synthesized)
aaaaatatcgacattatcgggaatttggaagaagttgatttcaacccttgtggatggctttgaggggttctagcattcagtggaggatgtaacagcagatgtggatgtggtggaaacagc

SEQ ID NO: 902747 - DNA, 120 bp, Artificial Sequence
  ENSG00000223770_12 (sequence is synthesized)
gaaacagcaagagaactagaagtggacactgaagatgggctgaattgctacaatctcatgataaaacttgaacaaatgaggagttgcttcttacggatgagcaaagaaagtggtttcttg

SEQ ID NO: 902748 - DNA, 120 bp, Artificial Sequence
  ENSG00000223770_13 (sequence is synthesized)
tctactcctggtaaagatgttgtgaacattcttcaagtgacccaaaggatatagaatattagatgaacttatttgataaagcagtgccagggtttgagagaaatgactccaagttttaaa

SEQ ID NO: 902749 - DNA, 120 bp, Artificial Sequence
  ENSG00000223770_14 (sequence is synthesized)
agttctgtgtgggtaaaatgctatcaaatagcactgcatactacagagaaatcttttgtgaaaggaagagtcagtcaatgcagccagcttcattgttgtcctattttaagaaattgccat

SEQ ID NO: 902750 - DNA, 120 bp, Artificial Sequence
  ENSG00000223770_15 (sequence is synthesized)
agccatccaaccctcagcaaccaccactttaatcagtcagcagccatcaacattaaggcaagaccctccaccagcaaaaatacaaagacttgctgaagtcttagatgatcgttagtgttt

SEQ ID NO: 902751 - DNA, 120 bp, Artificial Sequence
  ENSG00000223770_16 (sequence is synthesized)
gttatacattttgtgaattaaagaatagagtattctttaattaaggtatgtactttttttagacaaagtgctatcacacaattaagagactacagtatatagtaaacataacttttatac

SEQ ID NO: 902752 - DNA, 120 bp, Artificial Sequence
  ENSG00000223770_17 (sequence is synthesized)
acaatgggaaaacaaaaaacttgtgtgactcacttaattgcaattttcactctattgtggttgtggtgatctggaaccaaaccctcagcatctttgaggtatgcctgtgtgtgtgcgcac

SEQ ID NO: 902753 - DNA, 120 bp, Artificial Sequence
  ENSG00000223770_18 (sequence is synthesized)
aacttgaccctgagttaactgtcttattcttctcttttatttcttagcaaatttgccatgatttaaaaaagaaaaacagcttatatttatattcctacttcctcattcctcatttacttc

SEQ ID NO: 902754 - DNA, 120 bp, Artificial Sequence
  ENSG00000223770_19 (sequence is synthesized)
tcaaccatctgttggcttttgctcatatcactttatgtaagagaggtcatgccaaagctatatacatggttccttgttcctggaggggatatccatttgaaacagatataaatatgtgtg

SEQ ID NO: 902755 - DNA, 120 bp, Artificial Sequence
  ENSG00000223770_20 (sequence is synthesized)
gatatatatatatgtatgtatgtatgtatgtatgcaggcttttatatatgtattactgtgtatcacagaactttgttatagcctctgaagttagaaaaacaaacaatataatatgcagtt

SEQ ID NO: 902756 - DNA, 120 bp, Artificial Sequence
  ENSG00000223770_21 (sequence is synthesized)
ccaagaatattttaatttttatgttagagacaaaattaaatgaaacatcaccacaactgaatgttaactacttaattttcacaattgccttggcattaataaaggttatatgttttcagg

SEQ ID NO: 902757 - DNA, 120 bp, Artificial Sequence
  ENSG00000188693_0 (sequence is synthesized)
gggcacctgaggaagcgggctgcgcctgtggcacagtggtacggggccggaagataacttacctgaagaggcgatcaatccctgagaatcgcgggcgacccgttttttgtgtgcccgggt

SEQ ID NO: 902758 - DNA, 120 bp, Artificial Sequence
  ENSG00000188693_1 (sequence is synthesized)
gcggggtgccgggacacggcgttgaaggcgctgagcggagggatctcagggcgagctcgagcggcgacggcgcgctctgtgattgcaccgcgagcgcctgaggtgatctcggcctacatc

SEQ ID NO: 902759 - DNA, 120 bp, Artificial Sequence
  ENSG00000188693_2 (sequence is synthesized)
gcgtcagcggggccttgggcgtgagcaccgccccctgtccggacgcagggtactggggcacctcgaactgtggcacctcacccttctccggggccacgtcttggggactccgacagcccc

SEQ ID NO: 902760 - DNA, 120 bp, Artificial Sequence
  ENSG00000188693_3 (sequence is synthesized)
aaataagccctcggggactggggttgtgaaaagcgaggtcgtgaagacgccggcctcataccgaagggtaggacggtgaggtcagccccgtcccactccaactaaaatcaacctgacagg

SEQ ID NO: 902761 - DNA, 120 bp, Artificial Sequence
  ENSG00000188693_4 (sequence is synthesized)
aggtggttcaggaaaacggtcccatttggcacctcaagtctaggtccctcaagtctctacaacagtatgcaaagaaaatgttcatcttcattcttcttatagttttctggtaacttactg

SEQ ID NO: 902762 - DNA, 120 bp, Artificial Sequence
  ENSG00000188693_5 (sequence is synthesized)
aaccaagcgcacacacactctccaaggacaaacatttttcagtgctgggacaatgcaaattcagctctcggcagactactacacactgtgcatgatataccaagactaaaagactcataa

SEQ ID NO: 902763 - DNA, 120 bp, Artificial Sequence
  ENSG00000188693_6 (sequence is synthesized)
cctacccgcagaaagagtgcatcttccatagtagctctgcaaaaagatccaaaagaaactgttaatggcctggcttaagtcaaattgtgtccggaattggtgggttcttcgtctcactga

SEQ ID NO: 902764 - DNA, 120 bp, Artificial Sequence
  ENSG00000188693_7 (sequence is synthesized)
caaattgtgtccggaattggtgggttcttcgtctcactgacttcaagtatgaagccgaccctcacggtcagtgttacagctcttaagatggcgcctctggagtttgttccttctgatgtt

SEQ ID NO: 902765 - DNA, 120 bp, Artificial Sequence
  ENSG00000188693_8 (sequence is synthesized)
gctcaggagtgaagctgcagaccttcgcaacttccttccagaggaagatgttgactctaatgtattctgtctaggatgtgtttcataaatctggttagaagatttcccttccagcatcaa

SEQ ID NO: 902766 - DNA, 120 bp, Artificial Sequence
  ENSG00000188693_9 (sequence is synthesized)
agcatcaacaaattgttttctaaatgtggaaaaagagacattcagtacaggctaacgtaacgtgggacagcatgcaaagccatgagaagtgggaaaatgagagagaatctgggcgtggct

SEQ ID NO: 902767 - DNA, 120 bp, Artificial Sequence
  ENSG00000188693_10 (sequence is synthesized)
tacagggctgctgaagtaagacacacccttcgcttcacctgtggcctcccgcggcggctgcggctccttcgcaggaccggtagggggcgcgcgcggttgagtccagcaattgcgaggacc

SEQ ID NO: 902768 - DNA, 120 bp, Artificial Sequence
  ENSG00000188693_11 (sequence is synthesized)
tccgcaggcgcagcccagcactgacgcctctccgggccgtggctcctctttcccaggccgaaagcggccgggccctctgctccgctgcgccctggcgcggccgcacccactgcgcgtttg

SEQ ID NO: 902769 - DNA, 120 bp, Artificial Sequence
  ENSG00000188693_12 (sequence is synthesized)
cgctggccgctgcaggcgggtggagaacgggcgtctgagtctttggctttcgtaccggaatctccccgggagattttacaagcccctccgaatgttctgattgaattggtctgggggggt

SEQ ID NO: 902770 - DNA, 120 bp, Artificial Sequence
  ENSG00000188693_13 (sequence is synthesized)
cggtccgggcatctaacgagcagccgggatggagaattactagtctggattctggtcctcagaggttcactcacgttaatcaacccgagtccatcttggtgggattgtcttgctccgagg

SEQ ID NO: 902771 - DNA, 120 bp, Artificial Sequence
  ENSG00000188693_14 (sequence is synthesized)
ccctcccactgagctttattttcctgcctgatttcggggtccgctaacaggatgaacagcggaccatacaggcacggtgaaaatgacacttggtgacgtggaagacccagcttgccacag

SEQ ID NO: 902772 - DNA, 120 bp, Artificial Sequence
  ENSG00000188693_15 (sequence is synthesized)
ttgaggcagagctcctcagggtcttttgtcttagttatccccgagctatttttcaggaaccgacaggctcccccaccccaacaccggatgaaggccagcaactggaggccaggaataatc

SEQ ID NO: 902773 - DNA, 120 bp, Artificial Sequence
  ENSG00000188693_16 (sequence is synthesized)
aagcacgctctcatttcaaagaggtgacgattgtgcccgtgtttaaaagggatgcctgagaccatgaggatttggagttttggaggcggatctgcctttggggagtgagcgtagggccct

SEQ ID NO: 902774 - DNA, 120 bp, Artificial Sequence
  ENSG00000188693_17 (sequence is synthesized)
aagatgtggttgtgctttgagacagttcccagggtgatgtgtcccatcatccaaacattgcaggataagtcaaagttacagaaagactctagtttacttccagcctaacattaccaaaat

SEQ ID NO: 902775 - DNA, 120 bp, Artificial Sequence
  ENSG00000188693_18 (sequence is synthesized)
acggtatttgtcagaaaacatgtagtatttgtataatttgagaatgtaattgaagaacccgatatagagcttttagaaaggggaaatagaaaacttaaaaagaatcttgcttggtatatt

SEQ ID NO: 902776 - DNA, 120 bp, Artificial Sequence
  ENSG00000188693_19 (sequence is synthesized)
aataccaacatctaaaatataataaaattgaataaaccagtgagttttatactatgattgaaataaaatgccactatgttcttaagagtgctagtttaacaggaaatctccaatgcatta

SEQ ID NO: 902777 - DNA, 120 bp, Artificial Sequence
  ENSG00000188693_20 (sequence is synthesized)
ttatctagactcatctcaaaggctcacttttcatttgcatgggcccttgctatttgtagggtaggaggcagcacctcgttctggtggctgccaccttcatgaggagacactccttgttaa

SEQ ID NO: 902778 - DNA, 120 bp, Artificial Sequence
  ENSG00000188693_21 (sequence is synthesized)
caggatggttagcccacggctcttcccagcccccttttccacacccagtaaattgttttagtttatggccctcagctgcagttgcaatcatcatcaaattccagttttgaatttaaaggt

SEQ ID NO: 902779 - DNA, 120 bp, Artificial Sequence
  ENSG00000188693_22 (sequence is synthesized)
gaataatgaatgcaatgaactttctagaatttatgaagggcagtgatgttcctttttatctaataattctacatgtgtagcctttcagtatgctattctgtggactgaatttacaaattg

SEQ ID NO: 902780 - DNA, 120 bp, Artificial Sequence
  ENSG00000188693_23 (sequence is synthesized)
tcatttgtttaatgaactgttaatataacatgatgactaactgaaaacacatacaatttgctggtattccagaagtctatggatttcgttgttttgtttaaataaaaggcattaaaagca

SEQ ID NO: 902781 - DNA, 120 bp, Artificial Sequence
  ENSG00000188693_24 (sequence is synthesized)
gctactatatgctttatagcttgatctcacttgattctcatgacaattctcttatatgagtatattcattttaccagtgaagaaaccaagtcatcaagaagttaaaggacttgcccaagg

SEQ ID NO: 902782 - DNA, 120 bp, Artificial Sequence
  ENSG00000188693_25 (sequence is synthesized)
tcacaaagccagttgtgagtaaaagtcagtctgtcctcatagcctttgttctttattatgttatatggccttccaacatggatcacaaacatgtaataaactaaaatcagctttctacag

SEQ ID NO: 902783 - DNA, 120 bp, Artificial Sequence
  ENSG00000273198_0 (sequence is synthesized)
acttccctgtgagccagggacccagaacagatagtcttacttcaccctggcttttgcaggacaagatggagctcatacagcattgatttcgtcagtgtctagggacctgtggtgatcaca

SEQ ID NO: 902784 - DNA, 120 bp, Artificial Sequence
  ENSG00000273198_1 (sequence is synthesized)
gatattctctcctgggagaaatatcttgatcaaatgagggaaatgtgagcttatcaatgttccacacttgccatcagtaatttcatctttgtctactgacttcacattaatactgccgat

SEQ ID NO: 902785 - DNA, 120 bp, Artificial Sequence
  ENSG00000273198_2 (sequence is synthesized)
acagtacacactataaagaaaccggtcactatctttaagaactttatatatatagcttttctgacaaactgatgtaatttattcacgtttaatcaactaatgaaataatctgacaaacaa

SEQ ID NO: 902786 - DNA, 120 bp, Artificial Sequence
  ENSG00000273198_3 (sequence is synthesized)
tatatgtaaactaaataagtttttctcaatgtaagccctctttcctctttcaggtggtgcagtctctggctgctaactgggttgtaatccctgttcctgaataaatgtttatttgcctct

SEQ ID NO: 902787 - DNA, 120 bp, Artificial Sequence
  ENSG00000273199_0 (sequence is synthesized)
acgacgcccagcggacagaagagggtcaggggccccgcggccccgagagcagaccgatctcccgccgaggcctcgcccgcggacgacagctgctgggagactaggagggagctgggagga

SEQ ID NO: 902788 - DNA, 120 bp, Artificial Sequence
  ENSG00000273199_1 (sequence is synthesized)
ggagccgcgaccctggcccgccccgaagcaaaacagaaacacaatgcagaggcgacggaacgcagcccggcccgcagccgagctgttccgccgacgggagcgagatggccgccccctccc

SEQ ID NO: 902789 - DNA, 80 bp, Artificial Sequence
  ENSG00000273199_2 (sequence is synthesized)
cacaagccgccaccgcccactgccggccccccttcgcttgcccgcccgccctcctgggacacggcccgctccacccctcg

SEQ ID NO: 902790 - DNA, 120 bp, Artificial Sequence
  ENSG00000273199_3 (sequence is synthesized)
ccgccatcttgagcgagctacaaagccaggaacggcctccgccgcaacccgactgggaggtggcggaacgactgtggagccctatgggtaccgcccacttccggggaggggcgcacgtct

SEQ ID NO: 902791 - DNA, 120 bp, Artificial Sequence
  ENSG00000273199_4 (sequence is synthesized)
ggcccctcccacccacttccgcctccaggcaatgccgaattgggagcttggggaagatgaattgcctgactggttaaagcagggtacagtgggagctgagcttccagcgcggggccctgc

SEQ ID NO: 902792 - DNA, 120 bp, Artificial Sequence
  ENSG00000273199_5 (sequence is synthesized)
gggcctagggcgcatgcgcgaggcgcggccggcccgtacccgtctcgacacccagctggagctcgagactcggggatctagagtttgaagcctggcgcgagatgcggtatacccgagacc

SEQ ID NO: 902793 - DNA, 120 bp, Artificial Sequence
  ENSG00000273199_6 (sequence is synthesized)
ggtgaactccagtcacttgacctggtcggatgtgaattgcgcagaaaaaagccattccatatccaccagtgtccatgtgaaaccttaacgaaataaagacggaaattaatgtagactgtt

SEQ ID NO: 902794 - DNA, 120 bp, Artificial Sequence
  ENSG00000273192_0 (sequence is synthesized)
atggtgtgtgcacgtgtgcactgtgtatgcatggtgtgtgcatgtgtgcactgtatgcatagtgtgcacgtgtgcactgtgtgtggatgcatggtaatgtgcacgtgtgcactgtgtgtg

SEQ ID NO: 902795 - DNA, 85 bp, Artificial Sequence
  ENSG00000273192_1 (sequence is synthesized)
gtatgcatggtgtgtgcacgtgtgcacggtgtgtggtgtgtatgcatggtgtgtgcacatgtgcacatgcatggtgtgtgcacgt

SEQ ID NO: 902796 - DNA, 120 bp, Artificial Sequence
  ENSG00000273192_2 (sequence is synthesized)
acgtgtgcactgtgtggtgtgtatgcatggtgtgtgcacatgtgcactgtgtatgcatggtaatgtgcacgcgtgcactgtgtgtatgcatggtaatgtgcacgtgtgcactgtgtgtgg

SEQ ID NO: 902797 - DNA, 78 bp, Artificial Sequence
  ENSG00000273192_3 (sequence is synthesized)
tggtaatgtgcacgtgtgcacatgcatagtgtgtgcacgtgtgcactgtgtgtggatgcatggtaatgtgcacgtgtg

SEQ ID NO: 902798 - DNA, 85 bp, Artificial Sequence
  ENSG00000273192_4 (sequence is synthesized)
gtgtgtgcacgtgtgcactgtgtatgcatagtgtgtgcacgtgtgcactgtgtgtggatgcatggtaatgtgcacgtgtgcactg

SEQ ID NO: 902799 - DNA, 90 bp, Artificial Sequence
  ENSG00000273192_5 (sequence is synthesized)
atgcatagtgtgtgcacgtgtgcactgtgtgtggatgcatggtaatgtgcacgtgtgcactgtgtgtggtgtgtatgcatggtgtgtgca

SEQ ID NO: 902800 - DNA, 120 bp, Artificial Sequence
  ENSG00000273192_6 (sequence is synthesized)
tggtgtgtgcacgtgtgcactgtgtgcatgcgtgtgtggtgtgtgtgcatgtatgcatggtgtgtgcatacgtgtgcagcagcacctggtcccatctccagtgcccagcagcatcacacg

SEQ ID NO: 902801 - DNA, 120 bp, Artificial Sequence
  ENSG00000273192_7 (sequence is synthesized)
cacgcactttggtgctttataaatgcatggtcagtgaggctgacagcaccaagctgtccctttaccataacacctggaatagtcacctgtgataagctatcacataggaaacatttttaa

SEQ ID NO: 902802 - DNA, 120 bp, Artificial Sequence
  ENSG00000273192_8 (sequence is synthesized)
aatttcattctcattattttctgtaatcttgagaggttccaatcaacatttattgccttattctttttatctcattcctttttgaatgtgtttatctcctaagattttatctgtgatgga

SEQ ID NO: 902803 - DNA, 120 bp, Artificial Sequence
  ENSG00000273192_9 (sequence is synthesized)
atggtctcccctgagagggggtgctgtcttaggtgccccaagaggccctcgggcagcaagcgtggggtgctgccaaaatacagctccccctgggtgggcaggacacacgtggcctcctgg

SEQ ID NO: 902804 - DNA, 120 bp, Artificial Sequence
  ENSG00000273192_10 (sequence is synthesized)
cagacaggtgcctgggtgagcccgctgctcctgattagtcatgaatggcacctggtctgggcgacagtcacccgcaggaagccctgagctggccaccatcaccctgggcagtggctcccg

SEQ ID NO: 902805 - DNA, 120 bp, Artificial Sequence
  ENSG00000273192_11 (sequence is synthesized)
gggtgccaacaagacctgggcccctcgttctttggtgctgagagccccagctgaggctgtggaggaggccctggacctggtctggtgtctgtcagaggcaggtgcccagtcctttgactt

SEQ ID NO: 902806 - DNA, 120 bp, Artificial Sequence
  ENSG00000273192_12 (sequence is synthesized)
gcttctctgaattgtcataattgtgctggaattgtgccagaaactggtagtgataacagctcctggaaggcctgtggctgctgagggctgcctggtccccctcaggacggccgggggagc

SEQ ID NO: 902807 - DNA, 120 bp, Artificial Sequence
  ENSG00000273192_13 (sequence is synthesized)
ctctccagaagcaccagctttgtctgcaggtggacgttgaaggggggcagttgggtcaggttcagactcacacctgtggtccccacgacgctggccaggacccggtgtgtgtccctgtag

SEQ ID NO: 902808 - DNA, 120 bp, Artificial Sequence
  ENSG00000273192_14 (sequence is synthesized)
agggccaggagcccaggggccgcctccatgaggatgtgtgtgtatgccagcatgcctgtccccggctgcacatcctccctcttgtcgtacctgtgggatgagagctggtggtcctgccca

SEQ ID NO: 902809 - DNA, 120 bp, Artificial Sequence
  ENSG00000273192_15 (sequence is synthesized)
gggcccccacatcgccctgtcccccgcccccaaggggccctcacatggcctctgggagggccgtgctgtgtgtggatcctacctccaggcgctgttgacttggagaaaccgagacacacc

SEQ ID NO: 902810 - DNA, 120 bp, Artificial Sequence
  ENSG00000273192_16 (sequence is synthesized)
tgtctgggcggctgccacgtcaatgtgcagaaggacgtctaggaaaaccaggcctgccgtcagagcccagccctgcagtcggagccacagcagtccccaggcagtgcccccagcacccac

SEQ ID NO: 902811 - DNA, 120 bp, Artificial Sequence
  ENSG00000273192_17 (sequence is synthesized)
ctgtctgggggggcaccagctggtgcagcctctgcattgcgacgccacctgggtagttgaaatgggacacatacagggccgtggctgagtaggcggcattcaccacgaggtgtccgatca

SEQ ID NO: 902812 - DNA, 120 bp, Artificial Sequence
  ENSG00000273192_18 (sequence is synthesized)
caagcagagaccccgctttgtacagccaagactttttatagttattcagcctgaaaaaagaatggttacacatcataggcagaacgtaatgacaataaaattaatctacctacaaaacat

SEQ ID NO: 902813 - DNA, 120 bp, Artificial Sequence
  ENSG00000259521_0 (sequence is synthesized)
ctcagcctcctgagtagcttggactacaagtggggaagggagaagtggatggactggacttctttgtactgccctgaaggaaaatgactaagaagaaacacttcagcaacagccttaaaa

SEQ ID NO: 902814 - DNA, 120 bp, Artificial Sequence
  ENSG00000259521_1 (sequence is synthesized)
caataagccatctactcctgtaatgggaacttaggagccagaaccaagaagggagaaaaaagaagagctaacccctttcttgcttcattaacctctgaaactacagtaccttcaggggct

SEQ ID NO: 902815 - DNA, 120 bp, Artificial Sequence
  ENSG00000259521_2 (sequence is synthesized)
ttcttgcttcattaacctctgaaactacagtaccttcaggggctgcccccttaagcgttcagcgcgtccttcctgaggacacgtatgttcctgctctagctgaaggaagcgtaaccgctc

SEQ ID NO: 902816 - DNA, 120 bp, Artificial Sequence
  ENSG00000259521_3 (sequence is synthesized)
gaggaggtagctgatctccgctgatggacaacctggtctgagtagccactcactgctttacagtggctgctgaaaacaagagactgcaaaataaaaatgcaaatgaatgccaactataat

SEQ ID NO: 902817 - DNA, 120 bp, Artificial Sequence
  ENSG00000259521_4 (sequence is synthesized)
tatgtttaatgtaagcaaaatgaaaaaaaaagccacatattaaacatctaactttaagagctttcttccctgtaaatactattaattctaataaacaaccactaattagaaccaagtata

SEQ ID NO: 902818 - DNA, 120 bp, Artificial Sequence
  ENSG00000259520_0 (sequence is synthesized)
gcctctcgccccgtcgcgtttatcgaggagacaggtgaaaactgaggtttagagagggtaaataacttgcccaaaatctggaaaagtttgccaacccctggtcttactcctcattaaggt

SEQ ID NO: 902819 - DNA, 120 bp, Artificial Sequence
  ENSG00000259520_1 (sequence is synthesized)
ttcccttcctctccaccattcccaaatctgagtattccagaagagctactgtttttttaatgatatggtaaattaatttctaaagggattaaaatgaatacctacctgttgtaatgaaaa

SEQ ID NO: 902820 - DNA, 120 bp, Artificial Sequence
  ENSG00000259520_2 (sequence is synthesized)
taaatgtataacataaagcaatctgcaaaatagtaagtatacactcaaaatctgttagccattattaccattgttattatttttattttcagtccaaccaacactgatactgctgaactc

SEQ ID NO: 902821 - DNA, 120 bp, Artificial Sequence
  ENSG00000259520_3 (sequence is synthesized)
ctttttttttatggagtttatggcacatgtttaagttaattaattatgtaagatacatatatatatgtacacatggtaaggtggagcggttgtgataataccacaagctgcctgaagggg

SEQ ID NO: 902822 - DNA, 120 bp, Artificial Sequence
  ENSG00000259520_4 (sequence is synthesized)
cagcccaccctagatcctttcctaactgaacaagattccaaaacaccagtacctctggtaagtggaagggcccagtccatcccccaggctgtgtccttgtgcgtcagtcctcttgcttcc

SEQ ID NO: 902823 - DNA, 120 bp, Artificial Sequence
  ENSG00000259520_5 (sequence is synthesized)
ctcaggctctacttctttttcctacaagcacagagagcattgggatcagtcatggagccctgccagggatgatggggattgagagcagccaaataccctacaggagcccatgcagcagcc

SEQ ID NO: 902824 - DNA, 120 bp, Artificial Sequence
  ENSG00000259520_6 (sequence is synthesized)
cacagctctgcagagagaaactaaactggtgattaccatgagctccagccccgggttcactgtgccagtctccactgtggacagagcaatggactgtcttccacttgctttctccatctc

SEQ ID NO: 902825 - DNA, 120 bp, Artificial Sequence
  ENSG00000259520_7 (sequence is synthesized)
ctgttctcctcaactgaaaaacaaattcagggccaagcctgaaagattggtcattctgttctgtggggatggggagaatttttaggaccagttacccatggaaaacgcaaaactaaaagt

SEQ ID NO: 902826 - DNA, 120 bp, Artificial Sequence
  ENSG00000259520_8 (sequence is synthesized)
ctttgaaggcttagttgatttctttaagaactgagaattgagaagattggatgtgtaatttttatataataaataatgaaaaataaaatcctatttcctcttgtgaatagctaaagaaga

SEQ ID NO: 902827 - DNA, 120 bp, Artificial Sequence
  ENSG00000259520_9 (sequence is synthesized)
ggcagtaagataggagaagagaaatgaaaggcagtggaattgaaatgaatcagtgggccgcccagggccccaggatctgggctataaaggttcctacttggaccctcaaagaaagagtca

SEQ ID NO: 902828 - DNA, 120 bp, Artificial Sequence
  ENSG00000259520_10 (sequence is synthesized)
aaggcagttgggaagacccggaccctaaagtattgctgaacagataacaatttacaggccttcaaattcctgactataatgtagcataagaattggttttttatgccccagagagaactc

SEQ ID NO: 902829 - DNA, 120 bp, Artificial Sequence
  ENSG00000259520_11 (sequence is synthesized)
atcagtgaaattaacaaaacttacatttaaaataattagtatgaatgttaatgatcccaagtaaagtttttaaacaaaataagcaaacatttgggcctcagaataagcaaatttaataca

SEQ ID NO: 902830 - DNA, 120 bp, Artificial Sequence
  ENSG00000259520_12 (sequence is synthesized)
tggacattcacaattagaatataagttcattctgagatatttatttactttgcagaaaattcccttccccatggaattgcttttgaaaatgtgatctcttcaagcatttgaagtataatt

SEQ ID NO: 902831 - DNA, 120 bp, Artificial Sequence
  ENSG00000259520_13 (sequence is synthesized)
tcattaaacacacataaccaacttatattgtgtaaattagggccttcctgactaggcacaaaactacctgcatttagtttaaatatgatctctttaaaaatttgtaaattaggcacctgc

SEQ ID NO: 902832 - DNA, 120 bp, Artificial Sequence
  ENSG00000259520_14 (sequence is synthesized)
cctcccccaaacacctttacttaccccagcttgtggaattgattccctctggctcctcagtgaaggactgaaagaaaagctcagctgcgagggaggaggggcagcttgggtggggcatgg

SEQ ID NO: 902833 - DNA, 120 bp, Artificial Sequence
  ENSG00000259520_15 (sequence is synthesized)
gggctttcctgccattggttagttttatgtcttgggccctccttcgctgagcctgccctcaatgtagaggaggactgcacctctcaagttaaatattatatgtttttaagactgttttgc

SEQ ID NO: 902834 - DNA, 120 bp, Artificial Sequence
  ENSG00000259520_16 (sequence is synthesized)
aggcctaagacttatgcagaggtggcgcccgcccgtaatcccagcacttcgggaggccgagacgggcggatcgcttgagaccagccaggataacatggcgaaaccacatctctacaacaa

SEQ ID NO: 902835 - DNA, 120 bp, Artificial Sequence
  ENSG00000259520_17 (sequence is synthesized)
atacaaaaattagctgggcgcggtggcacacgactgtggttccagttactcggcaggcggaggtggaaggatcccttgagcctctggaggtggaggttgcagtgagctgtgattgcgcca

SEQ ID NO: 902836 - DNA, 120 bp, Artificial Sequence
  ENSG00000259520_18 (sequence is synthesized)
ctgggcgacagagtgagaccctgtcagaaaacaaaacaaaacaaaagaattctgtaagaacttctaacaggtacattcctgtaagcattacccaccactggactaggcactgggtagcct

SEQ ID NO: 902837 - DNA, 120 bp, Artificial Sequence
  ENSG00000259520_19 (sequence is synthesized)
actgggtagcctgtaaaatacagtaagagccgtctctgcacccagaaaatttaccatcattttgtgctggaaagacatgccctagaaaacaataaacagcacgactgtacatgattccat

SEQ ID NO: 902838 - DNA, 120 bp, Artificial Sequence
  ENSG00000259520_20 (sequence is synthesized)
acttccgccctcgcctgggagcgcctctcgccccgtcgcgtttatcgaggagacaactcagtgtacccgctgggtgatgtggggctggtttccccaacatctggcgcccaacatggggct

SEQ ID NO: 902839 - DNA, 120 bp, Artificial Sequence
  ENSG00000259520_21 (sequence is synthesized)
ccccataatctctacaaataatccagtgaagaaacgccagagtgtggaaagtggaggacgactgatgaaggatgcctgagtacgtttttacttcaggctctatgggagagaatcagcttc

SEQ ID NO: 902840 - DNA, 120 bp, Artificial Sequence
  ENSG00000259520_22 (sequence is synthesized)
ctgtctgggtacccacaagacatcttaagctgtgccatgagccagaatccaaggaagaggaaaagacctcggaatgtccctgcacccctggttcatcagatggctcagatgaacatctct

SEQ ID NO: 902841 - DNA, 120 bp, Artificial Sequence
  ENSG00000259520_23 (sequence is synthesized)
gttgagcagatggaaaccagtaaaacttgccaagcaactccaccgacctgtgggcagatgaggagactagctcacattgcagacgagaacctgaggtctcagaacaagctgctgaccacc

SEQ ID NO: 902842 - DNA, 120 bp, Artificial Sequence
  ENSG00000259520_24 (sequence is synthesized)
agtaatctaatgatagctatgatggcagtaatctccttggcggtgagtctccccgtagctggggcagatcaaaattacatttattgggcctacattccattcccccactgattaggtctg

SEQ ID NO: 902843 - DNA, 120 bp, Artificial Sequence
  ENSG00000259520_25 (sequence is synthesized)
ttacatggttagaccccctggtggaggtttatattaatgatagtgtctggatgcctggaccaacagataaccgaggtcctactcatccagaggaggaaggaatgttaatgaatgtttcca

SEQ ID NO: 902844 - DNA, 120 bp, Artificial Sequence
  ENSG00000259520_26 (sequence is synthesized)
cccatctgcctggggccagcagcaggatttttaaattatgataaacaaatttggatggtttatgtccctgcacataatggaccaaaagcctctattcatgcaatcagtggaagaacattt

SEQ ID NO: 902845 - DNA, 120 bp, Artificial Sequence
  ENSG00000259520_27 (sequence is synthesized)
caatctttggacactattaaataccctgagcatggctatgttatgacacatcgccagattaataaatttaaacccaataagaagccctgccctaggcaggccactaaatggtctggaaag

SEQ ID NO: 902846 - DNA, 120 bp, Artificial Sequence
  ENSG00000259520_28 (sequence is synthesized)
ctaaaggtgctaacctgggaagattgtattgcaaacagtgctgctgtactgcagaataattcctatggaatcattgattgggcccctaggggacactttgcagtaaattgtactggacag

SEQ ID NO: 902847 - DNA, 120 bp, Artificial Sequence
  ENSG00000259520_29 (sequence is synthesized)
tgcaaagattgtagagagactccttttgcaaacgactaccaagataatgcaccaaaattatatagaaaaattgaaacaaattaccctattaagtgggaggaaaatggtatggctcctcca

SEQ ID NO: 902848 - DNA, 120 bp, Artificial Sequence
  ENSG00000259520_30 (sequence is synthesized)
agcccaaaaatgattgatccaattataagtccagaacatctagaattgtagaaattaatgatggctcaaaccccaatttggatttggaaaggagaatataaaacagagacccgtagtaaa

SEQ ID NO: 902849 - DNA, 120 bp, Artificial Sequence
  ENSG00000259520_31 (sequence is synthesized)
aaacttcgatttgttgtagccatgacctctaatcagttggtcccattgcagagttgtgttagacctccttttatgttggcagtgggaaaaattaatatcctacctgactctcaaaccata

SEQ ID NO: 902850 - DNA, 120 bp, Artificial Sequence
  ENSG00000259520_32 (sequence is synthesized)
acttccgccctcgcctgggagcgcctctcgccccgtcgcgtttatcgaggagacaggttctaaaagagaaaagccctcgcatttaatttctcatacctggacctgctctcccagccactg

SEQ ID NO: 902851 - DNA, 120 bp, Artificial Sequence
  ENSG00000259520_33 (sequence is synthesized)
aaatacagtatatccaagatcagttctgatgaccaagatcccaaagacaaattgaagacctaggcccgaaaacactgtcctccaggacacctaggatcaataagaatattatttcaatgg

SEQ ID NO: 902852 - DNA, 120 bp, Artificial Sequence
  ENSG00000259520_34 (sequence is synthesized)
agtttgccaacccctggtcttactcctcattaaggtgagcaaaaatattaaccaacattcattgcaaaactacatgtggacagccggttctttcttcttttttttttttcaagacggtct

SEQ ID NO: 902853 - DNA, 120 bp, Artificial Sequence
  ENSG00000259523_0 (sequence is synthesized)
aacccaagtaacttggaagacagtttccgctgccgtgcgagtcttcctgtttgtttttatccaaggtctggcagaattcgcccccaaggagaaagcgcctgtgcaccaaagctttcctta

SEQ ID NO: 902854 - DNA, 120 bp, Artificial Sequence
  ENSG00000259523_1 (sequence is synthesized)
agagacttgtccacttgctcctcgacaagccacgcacatcatggggtgagccccatgcatgagtgcggctggaaaggccggcagagccgatacccgacagttgtttccttcactgggcaa

SEQ ID NO: 902855 - DNA, 120 bp, Artificial Sequence
  ENSG00000259523_2 (sequence is synthesized)
acagcatggtcacggctgtcaccgcgtgcctcggcgttgttcccacggaaggcggaatgcattttctgcaaggcgcgtcatggctttcatctccgaggagctccggcagggtcagaagcg

SEQ ID NO: 902856 - DNA, 120 bp, Artificial Sequence
  ENSG00000259523_3 (sequence is synthesized)
ttgctctcgttcaccggcgccgactgccaaggctgaaactggtgatgaggtcatgggcacccggaggcagcagcctgagaaacaccctagagacctgtgacatctcggcccacaccccac

SEQ ID NO: 902857 - DNA, 120 bp, Artificial Sequence
  ENSG00000259523_4 (sequence is synthesized)
attagacctcaagatatatccaaagtctctttcccgcccatctagacaggaatcttgaaaagtttatttttggccatcaagattgctgaaattcttgttgaccgaacgggtcaagctgcc

SEQ ID NO: 902858 - DNA, 120 bp, Artificial Sequence
  ENSG00000259523_5 (sequence is synthesized)
ctgcattccaatgctgtccctccaactcaaagttgggcagaaaagggtgtaaacacgtgcagtccatggtccagtttaatcagccactacacaaacttcccacaatgttgacggctttgc

SEQ ID NO: 902859 - DNA, 120 bp, Artificial Sequence
  ENSG00000259523_6 (sequence is synthesized)
gaacatggtaagaaaccaatcctagactcactaatctacacttgtaaatgtaaaggtcttcaaaaaatgccagaaatccttagtaacatcaatgataacatctttaaagtatctggtata

SEQ ID NO: 902860 - DNA, 120 bp, Artificial Sequence
  ENSG00000259523_7 (sequence is synthesized)
gtgccacaaccggcacagaagaaatggaagaaatcataaacatcaggctttagacaatggttttctctttagaattcaactgtatgaaaagaacaaatttaacaaagaagtatgtgtagg

SEQ ID NO: 902861 - DNA, 120 bp, Artificial Sequence
  ENSG00000259523_8 (sequence is synthesized)
tgatacataagtatcaattaaggcttcgaagtgccacacatcttgcaacccaaagctgtctgaaccagaaaagagccttctgcaaaccaaacccttattcctttttgttcttcataaaaa

SEQ ID NO: 902862 - DNA, 120 bp, Artificial Sequence
  ENSG00000259523_9 (sequence is synthesized)
tcttcataaaaatggttgaagtcatttttgttttaaagtcatgttgtaattgttttgcttttggacaaagtattatttattcttttaagaattgtgggccaggcgtggtggctcacgcct

SEQ ID NO: 902863 - DNA, 61 bp, Artificial Sequence
  ENSG00000259523_10 (sequence is synthesized)
gaggcgttattaaaaatacaaaaattagcctggtgtggcgcgtgcctgtagtcccagctac

SEQ ID NO: 902864 - DNA, 120 bp, Artificial Sequence
  ENSG00000259527_0 (sequence is synthesized)
actcagctctctcaccatgcgattgccctgcaacaccttggaactctgcagagagtccccagcaggaaggtctcacctgaggtgaaccttcgaccttggacttctcagcctccagaatga

SEQ ID NO: 902865 - DNA, 120 bp, Artificial Sequence
  ENSG00000259527_1 (sequence is synthesized)
agaatggcaaccatcaaatcaagaaattggcccaaagccctacagtctgcaaacatcataacaattcatcctgaagtttctccatgaattgtgatgctttgctacatcattctgcaatcc

SEQ ID NO: 902866 - DNA, 120 bp, Artificial Sequence
  ENSG00000259527_2 (sequence is synthesized)
cagaagattttttgcatatttttttgctattacagaaaaatctcagtctccctccctctctctctctctcaatctgtgtgtctcttttactccatatctctgtgtgtgtctcttttactc

SEQ ID NO: 902867 - DNA, 120 bp, Artificial Sequence
  ENSG00000259527_3 (sequence is synthesized)
catatctctctgtgtgtgtctgtttatgtctctctctctctctcatccttcccatgtttctctctcacacacacacacactcattcacagctttcaaaagacacgtctgtccttaccttc

SEQ ID NO: 902868 - DNA, 120 bp, Artificial Sequence
  ENSG00000259527_4 (sequence is synthesized)
actttttgttttaaacagcacactcactttactctgaactatacctcacatgcacacgagctttctgctccatctgttcatcccacatgtgtcttcacattcaaagcagcaccttcccca

SEQ ID NO: 902869 - DNA, 120 bp, Artificial Sequence
  ENSG00000259527_5 (sequence is synthesized)
agaccagctacctaaccacctcccacctccaccccatccctagtcagaggaaggcctggttcccacctgaattcagctttgtcaaagagcctcctggaaagctgtcatcttcagttagta

SEQ ID NO: 902870 - DNA, 120 bp, Artificial Sequence
  ENSG00000259527_6 (sequence is synthesized)
gggataatgggattattctatctgtgtaataataacatgttcaatttaaagaaaaaaatctgaagccacttaaaagctactgtttggcaccgatacattattccagtaatgaataatcat

SEQ ID NO: 902871 - DNA, 120 bp, Artificial Sequence
  ENSG00000259527_7 (sequence is synthesized)
taaagatattattctggatgcagttaccatgcagtgatgtgaataaaatgcattagatggaaaattgtatttcaagtaaatatatgcactggtagaaatgtattaccacccactaatatg

SEQ ID NO: 902872 - DNA, 120 bp, Artificial Sequence
  ENSG00000259527_8 (sequence is synthesized)
tgaatggcaggcagtgatttggaagtgggaggaaataggtttggatttggtcaaatagactgagaagtgatagtgggggcgggggtttatgactcaaactttaacaggtgagaagactat

SEQ ID NO: 902873 - DNA, 120 bp, Artificial Sequence
  ENSG00000259527_9 (sequence is synthesized)
gccatggacagaacaggcatgaggggctcccctcctacgcctctttaagagatttttatctctgactaaggattactggtagttgttgacatttctgaagcagtggatctttttcctttt

SEQ ID NO: 902874 - DNA, 120 bp, Artificial Sequence
  ENSG00000259527_10 (sequence is synthesized)
tcactatctgcatcttcaaatattcttttctgaagaaagttaaaaggaagcctgtacattttttgctaaggtaaatgccttgccatcttatttcattttctcatttttttcttcagtgca

SEQ ID NO: 902875 - DNA, 120 bp, Artificial Sequence
  ENSG00000259527_11 (sequence is synthesized)
caacataagcaactgtcctccttgtcatactcaagatgagcttggcatatctgaaatctgcagggattttctcattagcacagggttccaagcccaaaccgtgaagatggagttttcatt

SEQ ID NO: 902876 - DNA, 120 bp, Artificial Sequence
  ENSG00000259527_12 (sequence is synthesized)
tttaaatggcacatcttcaagttcttgccctgtcctcactttagtatgccccagaggaagtcaaagatatggacactctaagactcagaagaactttctcaggcattcattttcctatct

SEQ ID NO: 902877 - DNA, 120 bp, Artificial Sequence
  ENSG00000259527_13 (sequence is synthesized)
attttgagccattttatttaaaaggttacaattttaaacctctctttaattaaaagataccagagttacaatgcaatactatttggcaatcaaaactaatgaagcacagatgcatgctac

SEQ ID NO: 902878 - DNA, 120 bp, Artificial Sequence
  ENSG00000259527_14 (sequence is synthesized)
aacacgaatgaactttgaaacgttgtgttaagtgaaataaaccagttattatacaaggccacatactgtatgattccatttgtataaaatgtccaaactaagcaaatctgtagagacaga

SEQ ID NO: 902879 - DNA, 120 bp, Artificial Sequence
  ENSG00000259527_15 (sequence is synthesized)
aatcagattggtggttgtctagagctggcggggggagggatggggattgttcgaggcaaatggggagtgactcacaaagagtaccagtttctttttagggcaataaaatcttttaaattg

SEQ ID NO: 902880 - DNA, 120 bp, Artificial Sequence
  ENSG00000259528_0 (sequence is synthesized)
acccaggagagataaaatataaagaaagttaaagtttccaaagggtgatgaaattaattcttgggcttagaaaataatgacaatatctcacattcttatagttcttatctaccaacacgc

SEQ ID NO: 902881 - DNA, 120 bp, Artificial Sequence
  ENSG00000259528_1 (sequence is synthesized)
tttggagtttcctagcaaaaaaattacccgagtcagagcttttgtcccgagattaaacatgccctgtgactatactgttacagctacagataactcacaccttttggttgtaaatgtact

SEQ ID NO: 902882 - DNA, 120 bp, Artificial Sequence
  ENSG00000259528_2 (sequence is synthesized)
caaaactaagccgatgcagctgaggcaatactccaacagggtgaaagcactcaatctggttcccatgtttctcctgcaaaagaaccttccccttgcttagccaactctacttcccctcct

SEQ ID NO: 902883 - DNA, 120 bp, Artificial Sequence
  ENSG00000259528_3 (sequence is synthesized)
tgaggaagacgggaggattctctgtgatctccagggtgaaaccatattagatacacatgtggatccatttttaccaggtatgccacttattctgttgcatatgaagggaaaactatatag

SEQ ID NO: 902884 - DNA, 120 bp, Artificial Sequence
  ENSG00000264920_0 (sequence is synthesized)
cccaggtgtggcaggagcttttacctgctcttcggcagtagccggctgccactcaaccccatgcctgggttgtcctcatctaatccgtcagtaccagacagtgaacatctctcccccagg

SEQ ID NO: 902885 - DNA, 120 bp, Artificial Sequence
  ENSG00000264920_1 (sequence is synthesized)
tcctggagggaaggatgtggaactacagcctctgctctcaagaagctcagatctgggcagggaacatcacataccagggctgtctgtcgggggggtggagggctgggggagggatagcat

SEQ ID NO: 902886 - DNA, 120 bp, Artificial Sequence
  ENSG00000264920_2 (sequence is synthesized)
gccccagaaatagcatatacattgcgccctaagtccagtctcgcccaggtgtggcaggagcttttacctgctcttcggcagtagccggctgccactcaaccccatgcctgactgagctgt

SEQ ID NO: 902887 - DNA, 120 bp, Artificial Sequence
  ENSG00000264920_3 (sequence is synthesized)
attgcgccctaagtccagtctcgcccaggtgtggcaggagcttttacctgctcttcggcagtagccggctgccactcaaccccatgcctggtgagtggaaagccatcaaccttttattta

SEQ ID NO: 902888 - DNA, 120 bp, Artificial Sequence
  ENSG00000264920_4 (sequence is synthesized)
gtccctctctcgttgtcgcctggggaggggcgactttgtacagtgaggcactggggtccggcaccatagtgggagttggggttgtttacgcgacacttctaaggggattttcacaatcgg

SEQ ID NO: 902889 - DNA, 120 bp, Artificial Sequence
  ENSG00000264920_5 (sequence is synthesized)
ttaagcccccgttaatcctcacatggttattgcggcgacccccatagcccacggtcccaaacgtgtgcatctgaatcatccgaagctctttctaaaggcaggctcccctggccgcctctc

SEQ ID NO: 902890 - DNA, 120 bp, Artificial Sequence
  ENSG00000264920_6 (sequence is synthesized)
ctaatccgactcggtacttcacggggcgtgcctagaatctgcattttagcaagggcctcgcgtggacagaattgcacgcttgagtttgagaagtactgcttggcctctgccccacttacc

SEQ ID NO: 902891 - DNA, 120 bp, Artificial Sequence
  ENSG00000264920_7 (sequence is synthesized)
cttaccttcttgagatgaggtaaagcacttggtaggcactaggcgggtaggtttatctttgctcccaagtctcttccgagaacttgggaaggctgcctagcttagtgagggaatccattc

SEQ ID NO: 902892 - DNA, 120 bp, Artificial Sequence
  ENSG00000264920_8 (sequence is synthesized)
tggcttcagaccagtctgggtttgaaacctacacatcccactaacttaggcagggtaccgaaactccctgagcttcatgtcctcatcagtaaaacgaggttaatcacacctacaccttag

SEQ ID NO: 902893 - DNA, 120 bp, Artificial Sequence
  ENSG00000264920_9 (sequence is synthesized)
aaaaaaacaaacaaaaaaaaacatagtccatcaagagaaatacattttgcatacagaccagtacactgctatttgtatgagagtgtcataaagtttccgaaaacaatgcttactacttgt

SEQ ID NO: 902894 - DNA, 120 bp, Artificial Sequence
  ENSG00000264920_10 (sequence is synthesized)
ccgaaaacaatgcttactacttgtgacgcactgatagtttctatgcttatcctatcctatcttattctccttcttgttgatcatgactggcagtttgaaaaacactgctagaaaaggttg

SEQ ID NO: 902895 - DNA, 120 bp, Artificial Sequence
  ENSG00000264920_11 (sequence is synthesized)
gtgtgataatacaaaatgcagagcagaataccgggtacacagtaattgctgaataaatgttaatagcctcttccagtcttctcctctcagtgttagcctttgaaaaacaagactttagac

SEQ ID NO: 902896 - DNA, 120 bp, Artificial Sequence
  ENSG00000264920_12 (sequence is synthesized)
aataatactcctctagtaaagatccttcatgggatccgtatctcctagataaagcccaaactcctttctaggcaaagtcctcccactcttttttcttcttaacctcagcatccaccagag

SEQ ID NO: 902897 - DNA, 120 bp, Artificial Sequence
  ENSG00000264920_13 (sequence is synthesized)
gacacactcttactggtgtatctttcatgctttatctcctccctctacccccgttcccttcctacaaatcctacccttttccctccaggaaagattccaggttcctaaacacttacgctt

SEQ ID NO: 902898 - DNA, 120 bp, Artificial Sequence
  ENSG00000264920_14 (sequence is synthesized)
ttttccactagttgacttcctatgtgacccttcccttctggtaaacccctatgcatccatggccggatgtgttggctcacacctgtattcctagtgctttgggaagccagaggcaggcgg

SEQ ID NO: 902899 - DNA, 75 bp, Artificial Sequence
  ENSG00000264920_15 (sequence is synthesized)
atttcgagatagctgcatgtggtggtgcgcacttttagttctagctacctgggaagctgaggtgggtggatcact

SEQ ID NO: 902900 - DNA, 62 bp, Artificial Sequence
  ENSG00000264920_16 (sequence is synthesized)
acagaaaaataaataaactcctatgcatccttcaagaccctgctcaaagtctgcatacctca

SEQ ID NO: 902901 - DNA, 120 bp, Artificial Sequence
  ENSG00000264920_17 (sequence is synthesized)
atgcatccttcaagaccctgctcaaagtctgcatacctcactcctgcccagccatagcttcttcctcctctgtgctgccctggcacatgcaaaagagcttctctctcacacactatttcc

SEQ ID NO: 902902 - DNA, 120 bp, Artificial Sequence
  ENSG00000264920_18 (sequence is synthesized)
acacttttattctcacttcttactctcctgctagactgagctgtggtagaaggattgaggccagcacagaggaggatcagcaggaaatgtaaggtgagttaaagaatgaatatttgcata

SEQ ID NO: 902903 - DNA, 120 bp, Artificial Sequence
  ENSG00000264920_19 (sequence is synthesized)
cgggttccatgactcacctgtattagggtgcaggggttttggggggaggtaggtggggttgaatatcctgctgggccactgtcaaacctcttctgggagaaaaacggggtagctatgctt

SEQ ID NO: 902904 - DNA, 120 bp, Artificial Sequence
  ENSG00000264920_20 (sequence is synthesized)
ctcctatcctggaggccccatcatgaagaccgcagaggtgaaaaaaaaaaagtgtgcgcacacggggcggaggacagggtgtgaatacttggaagaattctgcagtagttttgaattatt

SEQ ID NO: 902905 - DNA, 120 bp, Artificial Sequence
  ENSG00000264920_21 (sequence is synthesized)
tgattggttttgcccttttaaaggtcaccttatccttgttttgtttgtttctaggctgtctgactcttcttactagagacacagccaaagaagggaaccctttgtttttttttgttgttt

SEQ ID NO: 902906 - DNA, 85 bp, Artificial Sequence
  ENSG00000264920_22 (sequence is synthesized)
ggaggaaggggacactttctaagaagaagaccccgttatacttttgtcaggcccattggagtcttagagcttccttcacaaacac

SEQ ID NO: 902907 - DNA, 120 bp, Artificial Sequence
  ENSG00000264920_23 (sequence is synthesized)
gtcaggcccattggagtcttagagcttccttcacaaacacccccgctcccccagtgaccacacaactcctcagagattttttctttcaagatggcccctgtcttcaacagagacggagaa

SEQ ID NO: 902908 - DNA, 120 bp, Artificial Sequence
  ENSG00000264920_24 (sequence is synthesized)
ggtcaggcagcggcttggaaatgcttgtgctctcccggccacactttatttatttatttatttagagacggagacttgctccgtcgcccaggctggagtacaggggcactatctcagctc

SEQ ID NO: 902909 - DNA, 65 bp, Artificial Sequence
  ENSG00000264920_25 (sequence is synthesized)
ctcagtttcctgagtagctgggattacagacgcgcgccactggctggtctcaaactcctgacctc

SEQ ID NO: 902910 - DNA, 120 bp, Artificial Sequence
  ENSG00000264920_26 (sequence is synthesized)
aggtgtgagccactgtgccccgcctttatttttattattatttttgagacagggtctctgcagcctcaacctcctgggcccaagtgatcctcccgcctcagcctctcaagtagctgggac

SEQ ID NO: 902911 - DNA, 75 bp, Artificial Sequence
  ENSG00000264920_27 (sequence is synthesized)
tacaggtgcgcgccaccatgcccacctaatttttaaattttttgtagagcttagcgatcctcccacctcagcctc

SEQ ID NO: 902912 - DNA, 120 bp, Artificial Sequence
  ENSG00000264920_28 (sequence is synthesized)
ccatggccacacgtgagactcactaaaagagcttttagtaaattctgaagtctgggtcccatcctaggaaattagaatctctggggggcatcagcattaaggagttcctcaggtgattcc

SEQ ID NO: 902913 - DNA, 120 bp, Artificial Sequence
  ENSG00000264920_29 (sequence is synthesized)
aatgggcagccaaatgtggagaaggactccttagcccaaagataccttcccactgggggtgcccaagtaaaaacaaggaaaagtctgtgccctccacccccacccactcctgtccctcgc

SEQ ID NO: 902914 - DNA, 120 bp, Artificial Sequence
  ENSG00000264920_30 (sequence is synthesized)
ctttctgaatttctcctcttcctaccctacctgctgccatcttcgcagagccagggccagtgggtggttctggctgtgtctgtcaaccttaaccaggggcgacatctcctccctggtgtg

SEQ ID NO: 902915 - DNA, 120 bp, Artificial Sequence
  ENSG00000264920_31 (sequence is synthesized)
tctggaggcaggttctctcagtgatatttcccttttgtctccaactgctttcagtttctttctactctacattgtcactttctctccatttctaacttgcaaagctacacattctccacc

SEQ ID NO: 902916 - DNA, 120 bp, Artificial Sequence
  ENSG00000227050_0 (sequence is synthesized)
ggccgccgagcgcatactggacggcggcccacagttcactcctcaggcgcggaggaaatggtggaaggcccagctctgggtgatcctgggcgctgcccccgttacccgttaccaggaaga

SEQ ID NO: 902917 - DNA, 120 bp, Artificial Sequence
  ENSG00000227050_1 (sequence is synthesized)
aggactcctgaccttcaggctcagtgtggctcggtcatattcgaacacccggatggctggattgttggccccattgaccactccagagcatccgaaagctgtcggtgtggtggtgcccga

SEQ ID NO: 902918 - DNA, 120 bp, Artificial Sequence
  ENSG00000227050_2 (sequence is synthesized)
gctatgacgcgatgatgcttccggaccaccttcagatgaggaaactgagcgagtgagcggcagaccggggatgccgagcacgtcagaatggaaatgatcacagtgcactatattctgcca

SEQ ID NO: 902919 - DNA, 120 bp, Artificial Sequence
  ENSG00000227050_3 (sequence is synthesized)
ccacctaccagcatggccttggagatatatacaggttttccttgacttacaatggggctacgtcccccaaaattgaaaatatcataagtcaaaaatgcattcaacacacccaacctacca

SEQ ID NO: 902920 - DNA, 120 bp, Artificial Sequence
  ENSG00000222020_0 (sequence is synthesized)
gatgcgctcgccgcgtccctgctcaggcggagggagcccggcccgccgccagggtctcgagtccgggtccaggcaggcgtggaggtggcgggaacggcgcaccgcccgggtgggcgttgt

SEQ ID NO: 902921 - DNA, 120 bp, Artificial Sequence
  ENSG00000222020_1 (sequence is synthesized)
cgttccagggaggaagcgcctttgacagcgcgcgccggttcgtggggcccgacggcgtgggcctgtggttgcggacctggcggagatgcgcgttcgcttcgattgtaggccattcctttt

SEQ ID NO: 902922 - DNA, 120 bp, Artificial Sequence
  ENSG00000222020_2 (sequence is synthesized)
aggagctgagaaaggatccgtttttacagcattctcgacctgtgattcttggtgggggaaactagttatgtggataaaaatacagttagcaaaataaaaatgccaattttacatttcctt

SEQ ID NO: 902923 - DNA, 120 bp, Artificial Sequence
  ENSG00000222020_3 (sequence is synthesized)
gcggccgtgagggtgtggggtgtaggtccgccaggcctgcaacggctgccgagggtcgtgggatgcgctcgccgcgtccctgctcaggcggagggagcccggcccgccgccagggtctcg

SEQ ID NO: 902924 - DNA, 120 bp, Artificial Sequence
  ENSG00000222020_4 (sequence is synthesized)
tcgcggttgaggaggcgcagggaccgggggccagtagtggccgtaaacacgggccccggccgtgtccggtcgcactcggtagcccgcatggctgcctagcggagtatgacaacttttcaa

SEQ ID NO: 902925 - DNA, 120 bp, Artificial Sequence
  ENSG00000227053_0 (sequence is synthesized)
cgaatctgctctccctcagattctggtctgtagggagaggccgtgatgagtgatgggagccttggtagggggaggactagggggcagaggggatttcctctggcaaaaggaagagtcagc

SEQ ID NO: 902926 - DNA, 120 bp, Artificial Sequence
  ENSG00000227053_1 (sequence is synthesized)
ctacgccctttcccactgccgaccacccctccgaccctgcatcactgggctgcggctgggaaaagtgagacccagacgctccatctcagcttccccatgtggtgctgtgctctgtggtgg

SEQ ID NO: 902927 - DNA, 120 bp, Artificial Sequence
  ENSG00000227053_2 (sequence is synthesized)
gcttccccatgtggtgctgtgctctgtggtggccaagactgccatgttgccatgctgtgatgcagcaagaaagtcctcaccagatgcagccccttgatcttggacttcccagcctccaga

SEQ ID NO: 902928 - DNA, 120 bp, Artificial Sequence
  ENSG00000267470_0 (sequence is synthesized)
tgtaagacagccactccacccactgcagtctacaaggaaagcctccatagctgtgcttattaccgccaacaggatttctttagtactaagcttcaagaaaccagcaacttgcttgagatg

SEQ ID NO: 902929 - DNA, 120 bp, Artificial Sequence
  ENSG00000267470_1 (sequence is synthesized)
catgaaacttggatgaaactatgcctgccatctggttcttacttcagggtcacggacttaagattgcccattcattcctctttaataagacatcttggtggactaatggctaaccagtcc

SEQ ID NO: 902930 - DNA, 120 bp, Artificial Sequence
  ENSG00000267470_2 (sequence is synthesized)
atgatcacacatcactgtgatggtgtcacacacttggtattttttaatttagggaatgttgtgatccaacatggctgtcacggacttgatgcaataaagcaaactgtagctgagctgaaa

SEQ ID NO: 902931 - DNA, 120 bp, Artificial Sequence
  ENSG00000267470_3 (sequence is synthesized)
gtctgtggcagtgcgtcccctctccgcgggatcgtcgccatggtcctgcgatcctaggagtcgggcaaggccgaacctgcctgaagaaacctcaagcggagattcaaggaagcaccacgt

SEQ ID NO: 902932 - DNA, 120 bp, Artificial Sequence
  ENSG00000267470_4 (sequence is synthesized)
gatccctaaggatcccaaagatgcgtcgggcatgcatgggcggtgtgagggtgcgtctccctgacaggtgtccccgctgggatttcgaggaattatccgatgaaaagtagaagaggttga

SEQ ID NO: 902933 - DNA, 120 bp, Artificial Sequence
  ENSG00000267470_5 (sequence is synthesized)
atgactttcagtggccttttcttcacagggctcacctgaaacttcatgtaccattgcacttcctgagaagctgtccccaatcccaggctcctagcaatgctgttccagtaatctctcttc

SEQ ID NO: 902934 - DNA, 120 bp, Artificial Sequence
  ENSG00000267470_6 (sequence is synthesized)
tgtaagacagccactccacccactgcagtctacaaggaaagcctccatagctgtgccttctttccacaggcctttgaagagagcttcaggcacacacctcaaagtgctgccacctacgga

SEQ ID NO: 902935 - DNA, 120 bp, Artificial Sequence
  ENSG00000267470_7 (sequence is synthesized)
tcagctgtattattagcaatagctgacactgtgaccagcctttattcacctgagctctgtctttatgtcatggttctcatcagcatccagggctcctttccttgctccagtaaggaaagt

SEQ ID NO: 902936 - DNA, 120 bp, Artificial Sequence
  ENSG00000267470_8 (sequence is synthesized)
atatttggcttagggactgcacatacagcttaaaagaaaggaaatggtgcatggtcatgctaggggattcccagattcaaatctagtccattggcatcaaagaagggagacactgacagg

SEQ ID NO: 902937 - DNA, 120 bp, Artificial Sequence
  ENSG00000267470_9 (sequence is synthesized)
aagtgacagagaaagatgtgacagtctaaaggataagagataaaaagattattcagtaagaacagtctcaggaaaacaggaccttcaacagagataagagaattaaaatatgcagactaa

SEQ ID NO: 902938 - DNA, 120 bp, Artificial Sequence
  ENSG00000267470_10 (sequence is synthesized)
caactctgggaatgggctgaccagcctgataagaataggctgatggcacctacagaaggccacaaaacactgaccaagaaagcaatgaccaacaaagcaatgacctgagactgcacattt

SEQ ID NO: 902939 - DNA, 120 bp, Artificial Sequence
  ENSG00000267470_11 (sequence is synthesized)
cacaagaatgttttgatcatcattttttctaatttcccttaaaaacccctgatatggagacagaactcggcggtctttgaacactagttcactgcctcccctgggttgttggattcctga

SEQ ID NO: 902940 - DNA, 120 bp, Artificial Sequence
  ENSG00000267470_12 (sequence is synthesized)
atagagctaaccatcctttcaccaatgctcatctcttaaactttcaagtgacaagtggtctggacctgaatttcgttacaaaacctatgtataccttaccttacatggcaaaggggactt

SEQ ID NO: 902941 - DNA, 120 bp, Artificial Sequence
  ENSG00000267470_13 (sequence is synthesized)
tagaagtgcaattaaattaaggatcttgagagggggttatcctggattatctggttgggcccaatgtatttgtaagtgatagagggaggcaggtgagtaaaaaaaggaaacgtgatgatg

SEQ ID NO: 902942 - DNA, 120 bp, Artificial Sequence
  ENSG00000267470_14 (sequence is synthesized)
gtgattgctggctttgaaaatggatggaagccacaccccagggatcgtggacagcctttagaaccagaaaaggacaaggaaacagattctccagtcctctagaacctccagaaggaacat

SEQ ID NO: 902943 - DNA, 120 bp, Artificial Sequence
  ENSG00000267470_15 (sequence is synthesized)
ggctctgctaatactatgatattagccctttcagactgatttcagacttctgaccagcagaggtataaatcataattatattgatttaagccactaaattagtggttattagtaacggca

SEQ ID NO: 902944 - DNA, 120 bp, Artificial Sequence
  ENSG00000267470_16 (sequence is synthesized)
gcaacaggaaactatatcagcaacaagactccttccttcatagaacccaattcccaaccaattttcaaactttcacagaaaatcttgccacacactgagactaggaacatccaacaaaaa

SEQ ID NO: 902945 - DNA, 120 bp, Artificial Sequence
  ENSG00000267470_17 (sequence is synthesized)
aatgctatcactttcaaatggaaaacccaggattgtagagaagatcaaattttgtcatgtatcacatttaaacactcatctctacctcaccaaaccgtggtactaatgtgtaccaatctt

SEQ ID NO: 902946 - DNA, 120 bp, Artificial Sequence
  ENSG00000267470_18 (sequence is synthesized)
aaaaggaggtatttctgttccctcagagctctgggcagaagactatgcctgtggacaatgtagaattatctgctgaatgaatatctgaaaactgtttggagaggggaaaagcattgagaa

SEQ ID NO: 902947 - DNA, 120 bp, Artificial Sequence
  ENSG00000267470_19 (sequence is synthesized)
gaattgggctctttgctactattactcgctagaatgggagacgtttggaagcagttcccttaaggaaccaaacaaggcaggaaattctgggataaatctggtgttcacattacacaacaa

SEQ ID NO: 902948 - DNA, 120 bp, Artificial Sequence
  ENSG00000267470_20 (sequence is synthesized)
aatgattgtacttcaagaaggaaagaaacagcaactcacgtggggcatggttttttagaactgatcaattttctgggttcttctcctggaggtgtgcaaagtccagagaagccagtgctg

SEQ ID NO: 902949 - DNA, 120 bp, Artificial Sequence
  ENSG00000267470_21 (sequence is synthesized)
gacaaggaaaagaagccacaagattagacttggctcacagcccacaaaataaactacttagaactacctttacttctcctcttttgggaatttggaaaaaatctcagttcttccacaaac

SEQ ID NO: 902950 - DNA, 120 bp, Artificial Sequence
  ENSG00000267470_22 (sequence is synthesized)
ccaatggaagccagctactgcagaaggggttcaggcagacctttccttaatgtccatgttgaacaggaccctaggtgctgttactttcccatggcatctcctcttccacagtagaacaga

SEQ ID NO: 902951 - DNA, 120 bp, Artificial Sequence
  ENSG00000267470_23 (sequence is synthesized)
ggcatgcccagggagccccccaccatcctcctggacccaaacactaagtcaggtactttgctcccaatcttaggaaggggcttcagagaccaaaatgtggccttctttcagacgtcatga

SEQ ID NO: 902952 - DNA, 120 bp, Artificial Sequence
  ENSG00000267470_24 (sequence is synthesized)
acatcagctagactcacagacattttgacagacatatcagggtcaacagatccaaaacagtctcatcccactcccctgaatctagttctttcttgcctgtttactcttccctataaaaga

SEQ ID NO: 902953 - DNA, 120 bp, Artificial Sequence
  ENSG00000267470_25 (sequence is synthesized)
aaattcctttatgcctgacctttgctatgcttgcagatcttatggctggagtattctcccaattacaacacctcctcccttactgcagtgttcctgtgaataaagtcattccttaccaaa

SEQ ID NO: 902954 - DNA, 120 bp, Artificial Sequence
  ENSG00000267470_26 (sequence is synthesized)
gcgtcacagtgacagccaccgttgcctggggacgggccctagcggcttggcggagctggagccctccctggcagtgcgtcggcgctgggctatggccccctcctctccgggggatcgtcg

SEQ ID NO: 902955 - DNA, 120 bp, Artificial Sequence
  ENSG00000267470_27 (sequence is synthesized)
ccaggacagggccctgggaggcccaggtcgaaagggggccagtcagctcatggggcgagggaatgtcctgctcacaccctccactggggtctcaggaattatccgatgaaaagtagaaga

SEQ ID NO: 902956 - DNA, 120 bp, Artificial Sequence
  ENSG00000267470_28 (sequence is synthesized)
ggttgaatgactttcagtggccttttcttcacagattttccatatgctgttccatctgccaagaatgctctcaaagtggccacctcctttgcgtgtgaaatgtcctagcttaaatgtcag

SEQ ID NO: 902957 - DNA, 120 bp, Artificial Sequence
  ENSG00000267470_29 (sequence is synthesized)
aggctaaagaaacgtccagcgtagcttcaaggatgcaccgcgtgatccctatcggatctccccgacgcgtcaggcctgcctagacggtgctgggagcgcgtctccttgaacgttgtcccg

SEQ ID NO: 902958 - DNA, 120 bp, Artificial Sequence
  ENSG00000267470_30 (sequence is synthesized)
cctgggattgcgaggaattatccgatgaaaagtagaagaggttgaatgactttcagtggccttttcttcacaggcacaaggagagaataaagaaaaaggagagcttataggaaagaaggg

SEQ ID NO: 902959 - DNA, 120 bp, Artificial Sequence
  ENSG00000267470_31 (sequence is synthesized)
actccacccactgcagtctacaaggaaagcctccatagctgtggctatagcaaggtactggatgccagtccaggcacacagagacatcactctgaactggtacattccgggaaatcccaa

SEQ ID NO: 902960 - DNA, 120 bp, Artificial Sequence
  ENSG00000267470_32 (sequence is synthesized)
aaggcagaataaaggccccccaaacatgtccacaacctaatccctgaaacagtaacagtactgactcaatgataaagaaaagcttgcttgcttaaatataattactttgcttgactttgt

SEQ ID NO: 902961 - DNA, 83 bp, Artificial Sequence
  ENSG00000267470_33 (sequence is synthesized)
gcctgcctagacggtgctgggagcgcgtctccttgaacgttgtcccgcctgggattgcgaggatagagacttggctcactgca

SEQ ID NO: 902962 - DNA, 120 bp, Artificial Sequence
  ENSG00000267470_34 (sequence is synthesized)
ctgggattacaggcgtgaatgtaatgatttttaaaaagaaaaacatggatgtaaagaaagtaaagcttcgttttgaacagttatgatggtaacaaaactcaaaggagcaactaaagcagt

SEQ ID NO: 902963 - DNA, 120 bp, Artificial Sequence
  ENSG00000267470_35 (sequence is synthesized)
gctgcaaccacttttgtctgtcttagtaattctgattagtgtacattcctcccccaccaaccattttgagagaaatttgtctgaaaacatgatttatgaaataaacataagtgctgaaag

SEQ ID NO: 902964 - DNA, 120 bp, Artificial Sequence
  ENSG00000267470_36 (sequence is synthesized)
atcctaggccaagtcacccctctctcattgtcataacctcttagctggtttctctgctttcatccttgcttctatgatctattcttcatacagcagccagaggaattcttttaaaatgtg

SEQ ID NO: 902965 - DNA, 120 bp, Artificial Sequence
  ENSG00000267470_37 (sequence is synthesized)
gtttatataacatgatttcccctgctaaaaatcttccctattaatggtctgccatctcaggataaaatccaaagtccttaatatggctcacaagaccctacacaagcttgcctgtggcca

SEQ ID NO: 902966 - DNA, 120 bp, Artificial Sequence
  ENSG00000267470_38 (sequence is synthesized)
cttttcttatgtcatctcccactttggccacttttctgatatcatcacttaccactcccctaattattcatttggctgtggtcataatggcctccttggtgttaaaaaagtgtcaagcat

SEQ ID NO: 902967 - DNA, 120 bp, Artificial Sequence
  ENSG00000267470_39 (sequence is synthesized)
atgcctacagttttgtctttagaatgcccttcctctagatacctgcatggcttgttccctcatttcagttttctgctcagctgtcacattatcaaaacatccaacacataattgtaccta

SEQ ID NO: 902968 - DNA, 120 bp, Artificial Sequence
  ENSG00000267470_40 (sequence is synthesized)
tattgcatttttcactaatggatataccatttctaaagtttgactattgtctgtctgtcccatgcttaatcaaagcaagggctttgtttcatatactgctttatctctagtgcctaacat

SEQ ID NO: 902969 - DNA, 120 bp, Artificial Sequence
  ENSG00000267470_41 (sequence is synthesized)
cattacttacacattgctggcattcaatatttgtcaacaatttctaaaatatatatgttccttcattcataaatctccttagatgcttctcataaaacacaaagtttgagaatagagcta

SEQ ID NO: 902970 - DNA, 120 bp, Artificial Sequence
  ENSG00000267470_42 (sequence is synthesized)
ataatctttcaatggtttacccttgtatttagaataaaatccaaactcctattcatggcctacaagcccctttacgatccagttctttcttaaatttctccaatttcttcaacgtacctt

SEQ ID NO: 902971 - DNA, 120 bp, Artificial Sequence
  ENSG00000267470_43 (sequence is synthesized)
ttaagcctcaaattgagccactactatcttcagaacaatgctctaatcttattggcctgatttaagttccaagaacatgtcaaattctttcccattttagattttccatatgctgttcca

SEQ ID NO: 902972 - DNA, 120 bp, Artificial Sequence
  ENSG00000267470_44 (sequence is synthesized)
ctatacctgtaatttattcctaattcttgtttgaatttttgcaattctaaaatttcatttatttatctgttgatctttctgctcctcaagctctacatgtgtagggggaaaatgcctgtt

SEQ ID NO: 902973 - DNA, 120 bp, Artificial Sequence
  ENSG00000267470_45 (sequence is synthesized)
ttattatatagctagtccccagaacacagtatacatataatgttttattcctttaatatagtttttcatgtcttactttccaatatttattacttaaggccaaatgttcttatatttccc

SEQ ID NO: 902974 - DNA, 120 bp, Artificial Sequence
  ENSG00000267470_46 (sequence is synthesized)
aaagaagtacctcaaaatctcctagaaatagtgacaagtttacacaataaagatcttatattattccgaagaaagaagttgagaaacaagtgtacttttcaaatgcagagaaacctatct

SEQ ID NO: 902975 - DNA, 120 bp, Artificial Sequence
  ENSG00000267470_47 (sequence is synthesized)
gatgtaactggatcagcaggcacagggtctctgaccactgtatataggctgtagaataacaaagactggtcatgggaagaaaaataaatacacatcagtaagctcaaatttaaacagtct

SEQ ID NO: 902976 - DNA, 120 bp, Artificial Sequence
  ENSG00000267470_48 (sequence is synthesized)
tttagaaataagcctccaaaacttgagaaaacacacttttgctgaaaagcaaaaagaaatgataaaaacaaaagcaactacccccccccacttgccatatacacaccacagctcagttta

SEQ ID NO: 902977 - DNA, 120 bp, Artificial Sequence
  ENSG00000267470_49 (sequence is synthesized)
acaccaattcatgtcagcaacacatcctagaacaagatagaccctgcttttgtttctttcatagaagaacaatatggtttataaaacactgaaagaaatcaatgggcttatggtgattaa

SEQ ID NO: 902978 - DNA, 120 bp, Artificial Sequence
  ENSG00000267470_50 (sequence is synthesized)
gggaacactataaggaatcaaataaattcagttgggacccaaaatagctacctatgtgctagtgccctaataaaaatgggaagaaatattaatctaatatgattctggggtaggaggcac

SEQ ID NO: 902979 - DNA, 120 bp, Artificial Sequence
  ENSG00000267470_51 (sequence is synthesized)
tatgagaacacaggatggtgctaaacagaaatctagaggaatatagaaaaagttaagattagaataccaaagtctcagaactgtgcccagaatgaggagtacatataaaaatgtattcaa

SEQ ID NO: 902980 - DNA, 120 bp, Artificial Sequence
  ENSG00000267470_52 (sequence is synthesized)
ttaagtagcagctctttttattgtcattaaattaatgaaaaaactatatggtgaaaaaagggaaaactgcaaaaggggtgatgagtgaagacaacaaaatggagtctgaaaaggaggagt

SEQ ID NO: 902981 - DNA, 120 bp, Artificial Sequence
  ENSG00000267470_53 (sequence is synthesized)
cattttaggaggtttcttttattcttgcccccatcaagtcctactgaatatatctcctaagtagctctcgaatctgttaccttatcaccaacaccactgctgacactcgggaagcccaag

SEQ ID NO: 902982 - DNA, 65 bp, Artificial Sequence
  ENSG00000267470_54 (sequence is synthesized)
cttatcaccaacaccactgctgacactcgggaagcccaaggccgtgccatctcagctcactgcaa

SEQ ID NO: 902983 - DNA, 79 bp, Artificial Sequence
  ENSG00000267470_55 (sequence is synthesized)
ggctcatttttgtatttttagtagagataggccttcaccatattggtcccggactcccacagcactaggattacaggca

SEQ ID NO: 902984 - DNA, 120 bp, Artificial Sequence
  ENSG00000267470_56 (sequence is synthesized)
ctgccccggactcccacagcactaggattacaggcatgagtcactgcgcctggccccaaagcatccggaaccacaacaaaaacctactcagtaatgttatgagaccctttgttctaatct

SEQ ID NO: 902985 - DNA, 120 bp, Artificial Sequence
  ENSG00000267470_57 (sequence is synthesized)
tggaatagtaaatatgaaaatcacattatgtcaccatcttaagatttttcaatagcctgcaaaaattggagggataaaatctaaactcttctgcagtatttttcaaacttcttttgacta

SEQ ID NO: 902986 - DNA, 120 bp, Artificial Sequence
  ENSG00000267470_58 (sequence is synthesized)
ttcatagtaagaaatacatattatgactgagtacacacactcaaacataaaacaaggatgtcataaaattatctttgctatatgtattatatattcatattttgttattttatctcctgt

SEQ ID NO: 902987 - DNA, 120 bp, Artificial Sequence
  ENSG00000267470_59 (sequence is synthesized)
ctgttttattaaaaacaacaagtgctgcttataacctactaggttgtattcataacctctagcaggttctgcccggcctggctccagtcaacctctccgactcccttgtggcacctctgc

SEQ ID NO: 902988 - DNA, 120 bp, Artificial Sequence
  ENSG00000267470_60 (sequence is synthesized)
ctcactaggctccagctgcaaaagccttctctcaatacctcatacaaaccaagctccatcctcctatggcctgcagtacactgttacttctgctaggaatgctcttccctcttctctcta

SEQ ID NO: 902989 - DNA, 120 bp, Artificial Sequence
  ENSG00000267476_0 (sequence is synthesized)
cctcctgagtagctgggactacagtttcagatttgcaaagggagacgtgacatcaagtttggaagaaagctgaattactgggactaacagagtgaaaagaatatggactttcaaggagtg

SEQ ID NO: 902990 - DNA, 120 bp, Artificial Sequence
  ENSG00000267476_1 (sequence is synthesized)
cactgcagtttccagcgttctgtgacctgtaatagtgcgacagactgaatgcagaagcacataaacgaatccagctctgtgattaagccaagacattaaagagatcttcaaaatgaaaac

SEQ ID NO: 902991 - DNA, 120 bp, Artificial Sequence
  ENSG00000267476_2 (sequence is synthesized)
caatgccacttctctaatagacttttttgttttggaaaatttgtttttccacgaaagtattatttctgttaccatataatgggttattctttttaaataaattaatattttttaaatgtc

SEQ ID NO: 902992 - DNA, 120 bp, Artificial Sequence
  ENSG00000267476_3 (sequence is synthesized)
ggtgactatgatgacagaaaacataaaaagaaacagggtctcagtatgtttcccaggctgggaggaaaccttctgttagagccttttacacgttctcattcctataataaactgcatgaa

SEQ ID NO: 902993 - DNA, 120 bp, Artificial Sequence
  ENSG00000267476_4 (sequence is synthesized)
gcaggagtcctccatacctggctttcttcaggaagcccagaaccttccctaaccagagtactcgttagcaccgtaatactctggagatctgcccccaaagacaattttttacattatgga

SEQ ID NO: 902994 - DNA, 120 bp, Artificial Sequence
  ENSG00000267474_0 (sequence is synthesized)
aaatgcttcttctccctcactgccccattcccagtttcctagaaggggaaaatatgttttaggtctggctcttccagaaggggaagataagttttaagtcaggcttttctagaagaggaa

SEQ ID NO: 902995 - DNA, 120 bp, Artificial Sequence
  ENSG00000267474_1 (sequence is synthesized)
aatagattttagatccagctcttctagaaacggaagatatgttttaactctgccttttctagaaggagaagatacgttttaggtcaggctcttccagaaggggaagagacgttttaggtc

SEQ ID NO: 902996 - DNA, 120 bp, Artificial Sequence
  ENSG00000267474_2 (sequence is synthesized)
agagacgttttaggtctgcttttttctagaagggaaagatatgttttagatcaggctcttctagaaagggaagataggcttttgatctgcctgttctaggctgggcgtggtggctcatgc

SEQ ID NO: 902997 - DNA, 120 bp, Artificial Sequence
  ENSG00000267474_3 (sequence is synthesized)
tgaggcaggaggatcacctgaggtcagggagaccagcctgggcaacatggtaaaaccgcgtctcaactaaaagtacaaaattagctgggcgtcgtggcacatgcctttagtcccagctac

SEQ ID NO: 902998 - DNA, 120 bp, Artificial Sequence
  ENSG00000267474_4 (sequence is synthesized)
ctcacaaaaaaaaaaaagatctgcttgttctagaaggggaagatacattttagatcaggctcttttagaagcataagatatgttttagatatggtttctcttaatacagaaagatagttt

SEQ ID NO: 902999 - DNA, 120 bp, Artificial Sequence
  ENSG00000267474_5 (sequence is synthesized)
tagatcaggctctttcagaagtggcaggtatgttttagacccgtgtattctagaaggggaagatacattttagatctgtctctgaaccttgatagaaaagtacaccttggccaggtgtgg

SEQ ID NO: 903000 - DNA, 120 bp, Artificial Sequence
  ENSG00000267475_0 (sequence is synthesized)
ctagggcactctcgcgggacaatgggtgtcacggcagccagcgaccgtttgtcattcacagctgcctgaaaggaggaccgcagtattcccacgcaggaagcttggaccaaaagcaggaat

SEQ ID NO: 903001 - DNA, 120 bp, Artificial Sequence
  ENSG00000267475_1 (sequence is synthesized)
gcttaagggcgcatatgacttgccatggtaaaaaacaggatgccaacccaggcctgatgacatccacctcactaaaagctaaggactaggactttctgctttaaacaaggacccacatgt

SEQ ID NO: 903002 - DNA, 120 bp, Artificial Sequence
  ENSG00000267475_2 (sequence is synthesized)
tgaatggacgagccagatgccaatttataaatttcctactgcacaccttgaatgtgaaagtacatgtggccgacaaagagaagggaagatggagccgccatcttcaacaggagtggcaca

SEQ ID NO: 903003 - DNA, 120 bp, Artificial Sequence
  ENSG00000267475_3 (sequence is synthesized)
actgtcggatctatgtctgcagctggattttacaggctgctcttcgttagaaaggaaaactttacggaggacttccatgccttcactatctgcctaagtaaattcttcttaactcctgta

SEQ ID NO: 903004 - DNA, 120 bp, Artificial Sequence
  ENSG00000228668_0 (sequence is synthesized)
atgcggtgagccctagcggtgcttctagctttcctgtatcctgccagtcagaaatcttccaacttggaagggagaatgaagtcagtcaccaggccgactgggtcatctgctgaaatcact

SEQ ID NO: 903005 - DNA, 120 bp, Artificial Sequence
  ENSG00000228668_1 (sequence is synthesized)
tcaggtctcagtcttggaaagtattatactcatacaccgaggaggtggagctggaatttgagactgcaaaatctaattgaaaatgattctggggtctattactgtgccacctggggcagg

SEQ ID NO: 903006 - DNA, 120 bp, Artificial Sequence
  ENSG00000223991_0 (sequence is synthesized)
agtgtccagccctgaagccctggagagccaccatgtccccatcagggaggagcccaactgtgcagacagcttgagaggccggcatcaaggagaggaggatgaacagaaagagggatcggt

SEQ ID NO: 903007 - DNA, 120 bp, Artificial Sequence
  ENSG00000223991_1 (sequence is synthesized)
gtgaggccaccccgtgggctggggccatgtgcccactctgccctcacctgccaggtgaggacacagaagcatgcgtgggccagcgcctctcccagccgcgcccctgcggaccccagccag

SEQ ID NO: 903008 - DNA, 120 bp, Artificial Sequence
  ENSG00000223991_2 (sequence is synthesized)
gagctcctccttcctctctaaggaccaccgctgccgcctacctgtgcgagctgagcgcgcagcgccgcgagctccccctgcagacgcgcccgctcggtgcgcagcgccgccgtctgctcc

SEQ ID NO: 903009 - DNA, 120 bp, Artificial Sequence
  ENSG00000223991_3 (sequence is synthesized)
tgcaggacgcgcctctccgcctgcgcctcggccgcctcctgcccgccgctgagcctctgcggcctgcagagcacctgggccgaagacgctgggcgtgggccagggattgggagggcccga

SEQ ID NO: 903010 - DNA, 120 bp, Artificial Sequence
  ENSG00000223991_4 (sequence is synthesized)
gtttctgagagcggggtcgttccatctaaggctggctctggcctcaacttattttctcctaaacggcgtgtccacagctgactcctctgttgtaggggtgcttactgtacggcaagaaat

SEQ ID NO: 903011 - DNA, 120 bp, Artificial Sequence
  ENSG00000223991_5 (sequence is synthesized)
ccagccccctgactccctgtgggcccctccaggctcagtttccccatctgtcagcgggggactggatggtgcctgggtctctgcaggcctgctcacctgcctccagcatctctctaggcc

SEQ ID NO: 903012 - DNA, 120 bp, Artificial Sequence
  ENSG00000223991_6 (sequence is synthesized)
tcccttcatgttgagggactgattctgcaaaggaccacagggcctcttccctgtaggcctgttcaccgcctcctggtgacagcgtaccctgccctcctggtcaccctcacctgtcgcagg

SEQ ID NO: 903013 - DNA, 120 bp, Artificial Sequence
  ENSG00000223991_7 (sequence is synthesized)
ggctccagcgatacctcagccttctggcacctgtgctccaagttggtgagctgttcttccagcagcttcccctgcttggccagaccttggctgtgcctcctgctctcttcaagagcctgg

SEQ ID NO: 903014 - DNA, 120 bp, Artificial Sequence
  ENSG00000223991_8 (sequence is synthesized)
cgcagcgtttccagttgctcctggggggaaggagacacagggtccacctggagacactgggggtgggaggccctgcagggaaaccctggcctcagggcatctgcctagaccgtctggcag

SEQ ID NO: 903015 - DNA, 120 bp, Artificial Sequence
  ENSG00000223991_9 (sequence is synthesized)
gtgattgtgtttgcaatgtaacctcaaaggtgtggacccccaggaagcctgagacgaaagtcctgggggtctggtctagcgtgggcaaagacttgggcttggcaggttctctgctgcagc

SEQ ID NO: 903016 - DNA, 120 bp, Artificial Sequence
  ENSG00000223991_10 (sequence is synthesized)
cagtggtctcagagggcacatcagtggcatccctgccctgcctccagccttggtggctcctactgcccttgggataaagcctgaggtgaccctccccaaggctcctggagcctgttcggc

SEQ ID NO: 903017 - DNA, 120 bp, Artificial Sequence
  ENSG00000223991_11 (sequence is synthesized)
tcaggccctgcttgccccttctgccatcacactgcatgttctcctgcttcagctcccacctggggacatggctagtcccaaactaagctcaggagctccagagtccgtgaagctgggatg

SEQ ID NO: 903018 - DNA, 120 bp, Artificial Sequence
  ENSG00000223991_12 (sequence is synthesized)
gcccatgatccccgctgtgtccctcacccctgcgccctcttctcagcccctctgccttcagcttgtccaaaccgccatcatccacttgggaccagtgacagcccttcagtttcctcactg

SEQ ID NO: 903019 - DNA, 120 bp, Artificial Sequence
  ENSG00000223991_13 (sequence is synthesized)
tccccaggtgctaccccatgatggctgagggtgcatttcacttgactatcatcggccatgccactgccttgctctgggcctgtggtgctcccagctgcccccaggacactgcccggggaa

SEQ ID NO: 903020 - DNA, 120 bp, Artificial Sequence
  ENSG00000223991_14 (sequence is synthesized)
ctcgccatcccttcgatcacgtgcacctgctgccctctgtgcacagcctccccgctggcgcccccaccctacgctgctgccttctcctcctgcttgcaggaatcctgcctccctgtcatc

SEQ ID NO: 903021 - DNA, 120 bp, Artificial Sequence
  ENSG00000223991_15 (sequence is synthesized)
ccaggagggaggatggcacccgacgtgtcccctgagccccagagctggcagctgttgggccttgagaggaccccagacgtgtgaaggagattgcaaggcgtccgtcattggaagcttgtt

SEQ ID NO: 903022 - DNA, 120 bp, Artificial Sequence
  ENSG00000223991_16 (sequence is synthesized)
gactgcaagttggcctggtcaggtcttgatgagccccgagcccttgcaccttcctgagggttttgtgggagaaatggccagctccttctggggtggccggattctgaaaacacttttttt

SEQ ID NO: 903023 - DNA, 120 bp, Artificial Sequence
  ENSG00000223991_17 (sequence is synthesized)
tttggtccgacactttgttactttaaaaaaggaaaagaaggaagacaatgcttgtacctaagactgtgatgcttcacccttcgtgcaattttgaaaattataattttctatataattttc

SEQ ID NO: 903024 - DNA, 120 bp, Artificial Sequence
  ENSG00000223991_18 (sequence is synthesized)
cagtagaaaagcagaagttttctgcaaatatggcttaaatatttcatggcagttttaagaggtcccaaacctcttgtaatgactcagcttttatggaatttgaatgaaccgtaataattg

SEQ ID NO: 903025 - DNA, 120 bp, Artificial Sequence
  ENSG00000223993_0 (sequence is synthesized)
taccagggtttggggcagaaggaacagataaaagggacaattctaaggaagatgattgaaagactgaccccaatgtggagaggatgattccagcactactcgtactgcactaggatcaga

SEQ ID NO: 903026 - DNA, 120 bp, Artificial Sequence
  ENSG00000223993_1 (sequence is synthesized)
gggatcacagcccctacctgtaactgtcacctcttttgaggtacaattacattctttcctctcatcccattgcaatgtttccatgctgagagggctccagagagatgtagggaagctctg

SEQ ID NO: 903027 - DNA, 120 bp, Artificial Sequence
  ENSG00000223993_2 (sequence is synthesized)
ctagtctctgtgctgaagctcagtgcctggcatacctctgcctttgatgaggctctggcacagccctgcatcattcttcatttgcctgcgcattaaagaatgcccctggtggtcatcaga

SEQ ID NO: 903028 - DNA, 120 bp, Artificial Sequence
  ENSG00000223993_3 (sequence is synthesized)
agtgttactcatgctgcctccatccctggtgccctctctgtatctctgtgcctttgtgcacactgcttcctctgcctggaagcccttcttcctttctccacacaacacatccctccttac

SEQ ID NO: 903029 - DNA, 120 bp, Artificial Sequence
  ENSG00000223993_4 (sequence is synthesized)
tcattaaagtcccgtacaaatgctaaaggcagctgatcttgtcagcaaacttggccaccaaatagaaaatctccttctatgcccactagtcatggacaaaactcaaaagttgcatgggaa

SEQ ID NO: 903030 - DNA, 120 bp, Artificial Sequence
  ENSG00000223993_5 (sequence is synthesized)
caccgtttcatcgcaggaatggaagcataataggctctcagaacatttttgttcagtgttcaattgatgaacataggagagagctcaggctaacttggaagtcatttatgtgtaagcaca

SEQ ID NO: 903031 - DNA, 120 bp, Artificial Sequence
  ENSG00000223993_6 (sequence is synthesized)
gggcaactggttgttacagaaaagagaacattcaagaaatcatggaggtggaatacaggaacctgggcaccacatacgcagattacgtgttgctccgggttcttttgccttgacttcata

SEQ ID NO: 903032 - DNA, 120 bp, Artificial Sequence
  ENSG00000223993_7 (sequence is synthesized)
tctgccccctcagtctctccaggatacaatgtggaaaacatggccactgacaggttggcataactgccagaatagctttattcatcagaaagacagggactgtcctacttactaccagtt

SEQ ID NO: 903033 - DNA, 120 bp, Artificial Sequence
  ENSG00000223993_8 (sequence is synthesized)
ctaaaatccctagaaaaagactgctattagactggcttttcaatggcgggtaccaaccctttatccaatccattgtgatcggcgtaggaagtctcatgagtacagtgagaatgcactcca

SEQ ID NO: 903034 - DNA, 120 bp, Artificial Sequence
  ENSG00000223993_9 (sequence is synthesized)
aggggtctggggttgactcttctccatgcagacctacacagactgctcccctaagcagcagctacatgaattgagtgggcctggttccggtcccctctcttgatccagagtcctcagcac

SEQ ID NO: 903035 - DNA, 120 bp, Artificial Sequence
  ENSG00000223993_10 (sequence is synthesized)
aggttggaagcctgggcgcctccttgccttgagagcatgagtggacacttcctggtgggaaagcagcatgccccttttctagtgttaagggacacctcagcatgattattaaagacagtt

SEQ ID NO: 903036 - DNA, 120 bp, Artificial Sequence
  ENSG00000223993_11 (sequence is synthesized)
gcagcaggaggtcacagagggtcacagaggcagggcgcaaattacagtgagctgatttcacaaagtacctggactccaggcccagctctgcagccttgcacaaagctggttcagccctcc

SEQ ID NO: 903037 - DNA, 120 bp, Artificial Sequence
  ENSG00000223993_12 (sequence is synthesized)
aaagctgaacaacagtgcaaaagaaggtgcattggtatcaagtgattttcctggatcctttcagcactgaaagcctgtattattaaagtcagattttcacaaaaaggaataaattgaaaa

SEQ ID NO: 903038 - DNA, 120 bp, Artificial Sequence
  ENSG00000223999_0 (sequence is synthesized)
ccagagcaaaggggagataaaggggacacctgtgacctcagggaggacactgcacatggcagggacaccattttagcacaactgggtgtgtgaggagagggcactgtgagaagtcaagtg

SEQ ID NO: 903039 - DNA, 120 bp, Artificial Sequence
  ENSG00000223999_1 (sequence is synthesized)
ctgtcacccaggcccgccccatcgccaggtggctttgccaggtaactctctgcttccccctggtggccgctccacactgtgggctgggggctcagggacttcctgggtctaggtgtggat

SEQ ID NO: 903040 - DNA, 120 bp, Artificial Sequence
  ENSG00000223999_2 (sequence is synthesized)
tcagaacctgctgttcaggtccctgatgccctgatccgaggactgctggtcccaggggaggaacacctcttctctgtgtggcccctgcctgactcaagatcaggtacaaggggctcagct

SEQ ID NO: 903041 - DNA, 120 bp, Artificial Sequence
  ENSG00000242385_0 (sequence is synthesized)
aatgacttcacagcaaggttaccaagaagcagatgggctgtgaaggagacaaacccttctgtctaaacacaaatagcattgataattaattagctgaagcagcaggggaaattatgaaaa

SEQ ID NO: 903042 - DNA, 120 bp, Artificial Sequence
  ENSG00000242385_1 (sequence is synthesized)
tgtgtgaaagcacagctgtgaggcatgtaaagccttcctactccagatttggtctactcaccagcagcatctccatcgcctaagagttttattagacatgcgcaacgtcaagccctactc

SEQ ID NO: 903043 - DNA, 120 bp, Artificial Sequence
  ENSG00000242385_2 (sequence is synthesized)
cagacacaccgaattagaacctgcattttaacaagatccccagtgactcatatacaaacaaaagactgagaagcacaggcctagaagatgtctcctcccactgacaaagggcaaagaaag

SEQ ID NO: 903044 - DNA, 120 bp, Artificial Sequence
  ENSG00000242385_3 (sequence is synthesized)
gagttgtctcagaacttggagtaaaaaatactctcctgtggtgatagagagaaaaagtgtggagggcaaagaggggagcctgtgtatatgcgtgtgtatgtgtgagagagatagagagat

SEQ ID NO: 903045 - DNA, 120 bp, Artificial Sequence
  ENSG00000242385_4 (sequence is synthesized)
gaaatgaggtaacaagattcacctgccaaccagccctgcctaaaacttttcagcacactctggatctcagctgctagtacttactcttatttgactactaggcatatttagtttctatat

SEQ ID NO: 903046 - DNA, 120 bp, Artificial Sequence
  ENSG00000242385_5 (sequence is synthesized)
cccgcctgagatgttcccaaaatgtcataagcggcaggaagataacctgaatttttgtcctttatccaagcactaggtctgacagaggtagtcttcctgacattgccctcactggcccag

SEQ ID NO: 903047 - DNA, 120 bp, Artificial Sequence
  ENSG00000242385_6 (sequence is synthesized)
cactaaatgttctgactattatttgaagcatgatttcagccatgctattctaccaaaagcagcacagatctctctcttgatcatttggcattcttcatattacatcatcacacataaaat

SEQ ID NO: 903048 - DNA, 120 bp, Artificial Sequence
  ENSG00000242385_7 (sequence is synthesized)
tgttgattctcgggttagaaggaaccatttttaaaagtacagtttcttacctgatactggaatccctgctataatatagctagtcattgccaagctacacttggaaaaaatagacgaaag

SEQ ID NO: 903049 - DNA, 120 bp, Artificial Sequence
  ENSG00000242385_8 (sequence is synthesized)
aaaactcaaaattcatgctcatatgctattgagcatttagtgacattgcagctaccttatttgagaaggcagcattccactgataacatatatcaccctctaagtatggcatgctcctct

SEQ ID NO: 903050 - DNA, 120 bp, Artificial Sequence
  ENSG00000242385_9 (sequence is synthesized)
tacaaacagttaagcttcagagcagtagtgcaggaaggaaaaaagtcccttcataaataaatccttttgcctaaacgaaagaatatacagtactcataaaaatggcgattagagcccagc

SEQ ID NO: 903051 - DNA, 120 bp, Artificial Sequence
  ENSG00000242385_10 (sequence is synthesized)
atgagaaagataccctcataacactaataatattagcaataaaaataccctctgagatttgctattccagagaaaatatttgctattattgttattattattatattactgctaataata

SEQ ID NO: 903052 - DNA, 120 bp, Artificial Sequence
  ENSG00000242385_11 (sequence is synthesized)
ataatgggttgcttgctaagagattgagcctttgctgtaactaagtaagcatacttagaaagtgctcccctgaagacatttcttcaattaataaagaagactgacagatcttctcacagc

SEQ ID NO: 903053 - DNA, 120 bp, Artificial Sequence
  ENSG00000232139_0 (sequence is synthesized)
agcaaaagcacttttaaaatgagttaagtggaagacgaacagacaaatgaggtaacttctataaagatggaggttgcttctggctcatcagccatcgttgatggtaaccagtcctacaat

SEQ ID NO: 903054 - DNA, 120 bp, Artificial Sequence
  ENSG00000232139_1 (sequence is synthesized)
tctcattaggcagttctgttaccccactatttccttggggtctgttgtgctaaggacaggattggttgggtaaaggggtgtggcacaaataaccctcaggaatacaggccacagagctaa

SEQ ID NO: 903055 - DNA, 120 bp, Artificial Sequence
  ENSG00000232139_2 (sequence is synthesized)
gataatactaccttcagagaactctacttataggctgtggtttttcaagaaaaaggaaaagattcataattcattgagctctttccttgtgagaagaaaggccactcttttgtgtgctga

SEQ ID NO: 903056 - DNA, 120 bp, Artificial Sequence
  ENSG00000232139_3 (sequence is synthesized)
agttggacaacagttcccaaggaagctgaattctagctgtttattgttattgggttttgcactatgccctttatgttgtcattaatcaataaatacgtgtggaacaaatgattaactaga

SEQ ID NO: 903057 - DNA, 120 bp, Artificial Sequence
  ENSG00000232139_4 (sequence is synthesized)
gtacctccgagacaatccaggtatacaaggtacaatgaggtctggccccagggctgacctcagactgtgccttaacactctgtgtcttactgcatcatttctggaaggttatttcagaag

SEQ ID NO: 903058 - DNA, 120 bp, Artificial Sequence
  ENSG00000232139_5 (sequence is synthesized)
gtggtaattacagagagtaaattagggctaaagcaggatgagaacttgcttggatgttctgttgaggaaagagaggtggaaggagcaaagggctcagcacccaaaactctgggaatcact

SEQ ID NO: 903059 - DNA, 120 bp, Artificial Sequence
  ENSG00000232139_6 (sequence is synthesized)
ccaaagataatactaccttcagagaactctacttatagtggtgaaattgaatcactgaagcagctgaggcagagagcttttccttcaggattcacggcctatttctcagttctgggaaga

SEQ ID NO: 903060 - DNA, 120 bp, Artificial Sequence
  ENSG00000232139_7 (sequence is synthesized)
caactctaacaactcaacagagtgaagagagataaagatgttgggaatgactgatttcaaacaatcaaaactgctttggggatgaggatgaagttgggacattactgccttgtataccac

SEQ ID NO: 903061 - DNA, 120 bp, Artificial Sequence
  ENSG00000232139_8 (sequence is synthesized)
atactataatatttattatgtctattgtttattgtgtgtgtccttctttagaattttaactccccaagggcaaagatccctgactgttttgcttatcaatgtatccaaaaggcctaaaac

SEQ ID NO: 903062 - DNA, 120 bp, Artificial Sequence
  ENSG00000232139_9 (sequence is synthesized)
agagccttgtaccctatacacactctgcaaatatttgctgaattgaataaaaggctgccgatctataaactatgctgctttcaaataaaactaagacaaggacattgatagcatatcctc

SEQ ID NO: 903063 - DNA, 120 bp, Artificial Sequence
  ENSG00000232139_10 (sequence is synthesized)
acatcaacattaacgtaaatatcctatttacttttatgaaatgaatgtgttccttttctcaaaaaaggtacagaaaggacaactgaattacaggcctgagagcgaatccagaaaaactac

SEQ ID NO: 903064 - DNA, 120 bp, Artificial Sequence
  ENSG00000232139_11 (sequence is synthesized)
ttatttagcaagattttgcatgtattcaactgttttaattaaagagagtgttcgtttacttgaggcctggaaaacattttcccagacccaagatcctgcatggaaagacaataaaccaag

SEQ ID NO: 903065 - DNA, 120 bp, Artificial Sequence
  ENSG00000232139_12 (sequence is synthesized)
ttaacagttcaaggctcattttaagtcgattccgctgtgagaatacttacagggtccaagattgcaagaggatgggtctagaaaggtacaccgttcctgcttggctgcacaacccggaat

SEQ ID NO: 903066 - DNA, 120 bp, Artificial Sequence
  ENSG00000232139_13 (sequence is synthesized)
tctgcaggctttctggcggcaatgccacactccaatcccaaaagagagagaagcccctcccgggcacagaactaagcgctgcacattccggcgaaggatgtctagcctgctggcagtccc

SEQ ID NO: 903067 - DNA, 120 bp, Artificial Sequence
  ENSG00000232139_14 (sequence is synthesized)
tgaatgatctccaggttttctgataatgccatgagtaaaatcagtagaatcaaacatctacttagaataccattttatatagttttgctttctgctttagcacttctaacctctagagaa

SEQ ID NO: 903068 - DNA, 120 bp, Artificial Sequence
  ENSG00000232139_15 (sequence is synthesized)
tgttctgtaactcccaccacgatttaaaaataagccatatgtgtatgtaatcaaaatatacaacacacgttatttttacagtctgcataataatatatcaatactagacatgtattgcta

SEQ ID NO: 903069 - DNA, 120 bp, Artificial Sequence
  ENSG00000232139_16 (sequence is synthesized)
gtgtgtgtgtgtgtgtgtgtgtgaatgtgagtgtgtgagtatgtatgtgtctgtgtgtgtgtgagtgtttatgtattgggaggcagggagaagaaactgaagaataaaaaggaaggacga

SEQ ID NO: 903070 - DNA, 120 bp, Artificial Sequence
  ENSG00000232139_17 (sequence is synthesized)
ttctgacaggtgccctccaagaatggtgggtgtctcggcctctggctccatccactcctggacatctagctgggtagtgctttgcttaagctctgaccctcccgtcacacatagcctgca

SEQ ID NO: 903071 - DNA, 120 bp, Artificial Sequence
  ENSG00000232139_18 (sequence is synthesized)
gctcactccagccaccgtaaaggtgcaacattgcaaacaacctgcctcagcctctctactggggttcctccaaccacttccatgagagaccttggacaggaacccaaagctttttgcagg

SEQ ID NO: 903072 - DNA, 120 bp, Artificial Sequence
  ENSG00000232139_19 (sequence is synthesized)
cactgcctatcagatgtggaagaaaacagcaaggcaagaagaggcagtgacccaggaaaggcccaccagctccagaagttgcctactccacaatacggagattgctcatttcttttaagg

SEQ ID NO: 903073 - DNA, 120 bp, Artificial Sequence
  ENSG00000232139_20 (sequence is synthesized)
accattcatttgaattatgcaaataattcattgaaagttgggaaattttaaattcctagtggaaatacacacacacaactatctaggatactaatgttccttttttgagttttttaaagt

SEQ ID NO: 903074 - DNA, 120 bp, Artificial Sequence
  ENSG00000232139_21 (sequence is synthesized)
tagctctggttaagagcgatttctaaacttcttgaaggttgggctggtagacttcacaaaatgagggcaagacatggagggtggagagagagagaaagaattaaaaagtacaggacaccc

SEQ ID NO: 903075 - DNA, 120 bp, Artificial Sequence
  ENSG00000232139_22 (sequence is synthesized)
agttaaatttgaatctcagaccatgctatgctcattattttttactccacaatgcttaaaaaacagatttgtatgtagtagttttccccaaagttatttgttaaactgaattggacatca

SEQ ID NO: 903076 - DNA, 120 bp, Artificial Sequence
  ENSG00000232139_23 (sequence is synthesized)
cttcagagaactctacttataggtaagtaactctcctttataggaggtatctttgtgtggcagactgtttatgcgagcaatttgaattgaactttaaatgaaaaagcatatctctgtaag

SEQ ID NO: 903077 - DNA, 120 bp, Artificial Sequence
  ENSG00000232139_24 (sequence is synthesized)
tggtaataattttagtcatctcactgtggctaggggttgtggaattcattagcacagattaacatataaagtgggtgagatatctaatagcaaacggagaggtttaggggccttaattca

SEQ ID NO: 903078 - DNA, 120 bp, Artificial Sequence
  ENSG00000232139_25 (sequence is synthesized)
tcactgaatgaacagcgtgtacagtattagggactatgaaatttttaatttacacaaagtgtccaagaatatagggaataaatttaaacccaaaacagataatggagctatgccctacct

SEQ ID NO: 903079 - DNA, 120 bp, Artificial Sequence
  ENSG00000232139_26 (sequence is synthesized)
tatcccaagcacaaggagactgctaaaaataataagattataaggaataatttgctgatataattacaacaaaattgggtacacacaatcgtcagatacatgtattgcttgacctgggtg

SEQ ID NO: 903080 - DNA, 120 bp, Artificial Sequence
  ENSG00000232139_27 (sequence is synthesized)
agaaagtgaaataaatccttcttctatagccttcgtaaatttgtttttatcatctccaagtggtgtttgcacaggcagcacaatttgcatgtgtaatgtggctgtacaaattgacaacaa

SEQ ID NO: 903081 - DNA, 120 bp, Artificial Sequence
  ENSG00000232139_28 (sequence is synthesized)
gtaaattattcaaggaaataggctggtcgcgggtctgaactatctcgcaaagcctattcattttgaagaatcactgagacgtgaagctcatacatcaaccgttttctgacaatcctcaga

SEQ ID NO: 903082 - DNA, 120 bp, Artificial Sequence
  ENSG00000232139_29 (sequence is synthesized)
cttattgtctcctaaaatgtcattatggctattatttatgaagctaattcatttattaatatatatttaactctgacttgtcatgcaccttagcagacattctgtgcactgcatattttt

SEQ ID NO: 903083 - DNA, 120 bp, Artificial Sequence
  ENSG00000232139_30 (sequence is synthesized)
gaatagatgaaaggcttttgcatgctttaatgattactgtaagctgctatagatttatagaatgcagctttattatctacttgcattaatacctttttataagttttttttcttaaggcc

SEQ ID NO: 903084 - DNA, 120 bp, Artificial Sequence
  ENSG00000232139_31 (sequence is synthesized)
atcaaatataaatggcaaatgacatattcaaaagattgtgtggaataagattttcctagagtttgttgaattttagaacaaagtgggttatctgtcagttaaggcctaattcacctaaaa

SEQ ID NO: 903085 - DNA, 120 bp, Artificial Sequence
  ENSG00000223379_0 (sequence is synthesized)
agtcgaagaggctaattccgggcctcttataaaaataagaaagaaaagcctcgtttcctctagatcagagagatggcttctggattcatctttccctgcaatccagcttctcctcctggg

SEQ ID NO: 903086 - DNA, 120 bp, Artificial Sequence
  ENSG00000223379_1 (sequence is synthesized)
gccctcataatggagactgggatcatcatccaggcttttgcactgggttaggaatttgggagtcatcctggatccatctgcccctgtcaacctttctctgtcaacagatatttactgggc

SEQ ID NO: 903087 - DNA, 120 bp, Artificial Sequence
  ENSG00000223379_2 (sequence is synthesized)
caggccctgttcatggtgctgaagaacagcatgtataaaacaaccctgccctcacagggcgatcaccagtgacctgtggtgtggagtctccttttacctctgtctcctccttcccactgt

SEQ ID NO: 903088 - DNA, 120 bp, Artificial Sequence
  ENSG00000223379_3 (sequence is synthesized)
caccatccttggtcctcctctgtcacctggaatactccacttggtaaccagcatgatcttctaacactagttttacccttgtcagcactttgccgaaaacctcaaataaagacttttttt

SEQ ID NO: 903089 - DNA, 120 bp, Artificial Sequence
  ENSG00000215417_0 (sequence is synthesized)
tggcggctactcctcctgtcatacacgtggacctaactgcaccagtagcttttctgagaatacttgctgaaaaggaagttttctggaatggtatttgctaagtggaagccagaagaggag

SEQ ID NO: 903090 - DNA, 120 bp, Artificial Sequence
  ENSG00000215417_1 (sequence is synthesized)
gaaaatgttttgccacgtggatgtgaagatttcctctaaaaggtacacatggactaaattgcctttaaatgttccaaaattagttctcatttatttgcagtctcattttgttttgttttt

SEQ ID NO: 903091 - DNA, 120 bp, Artificial Sequence
  ENSG00000215417_2 (sequence is synthesized)
tttctctatgtgtcaatccatttgggagaggccagccattggaagagccaccacttccagtgctagttggatggttggttatgattgccttctgtaaagaattcttaaggcataaatacg

SEQ ID NO: 903092 - DNA, 120 bp, Artificial Sequence
  ENSG00000215417_3 (sequence is synthesized)
tgtctaaatggacctcatatctttgagataattaaactaattttttcttccccattagggattatgctgaatttgtatggtttatagttgttagagtttgaggtgttaattctaattatc

SEQ ID NO: 903093 - DNA, 120 bp, Artificial Sequence
  ENSG00000215417_4 (sequence is synthesized)
tatttcaaatttagcaggaaaaaagagaacatcaccttgtaaaactgaagattgtgaccagtcagaataatgtcaaagtgcttacagtgcaggtagtgatatgtgcatctactgcagtga

SEQ ID NO: 903094 - DNA, 120 bp, Artificial Sequence
  ENSG00000215417_5 (sequence is synthesized)
aggcacttgtagcattatggtgacagctgcctcgggaagccaagttgggctttaaagtgcagggcctgctgatgttgagtgctttttgttctaaggtgcatctagtgcagatagtgaagt

SEQ ID NO: 903095 - DNA, 120 bp, Artificial Sequence
  ENSG00000215417_6 (sequence is synthesized)
agattagcatctactgccctaagtgctccttctggcataagaagttatgtattcatccaataattcaagccaagcaagtatataggtgttttaatagtttttgtttgcagtcctctgtta

SEQ ID NO: 903096 - DNA, 120 bp, Artificial Sequence
  ENSG00000215417_7 (sequence is synthesized)
gttttgcatagttgcactacaagaagaatgtagttgtgcaaatctatgcaaaactgatggtggcctgctatttccttcaaatgaatgatttttactaattttgtgtacttttattgtgtc

SEQ ID NO: 903097 - DNA, 120 bp, Artificial Sequence
  ENSG00000215417_8 (sequence is synthesized)
agctgtagaactccagcttcggcctgtcgcccaatcaaactgtcctgttactgaacactgttctatggttagttttgcaggtttgcatccagctgtgtgatattctgctgtgcaaatcca

SEQ ID NO: 903098 - DNA, 120 bp, Artificial Sequence
  ENSG00000215417_9 (sequence is synthesized)
tgcaaaactgactgtggtagtgaaaagtctgtagaaaagtaagggaaactcaaacccctttctacacaggttgggatcggttgcaatgctgtgtttctgtatggtattgcacttgtcccg

SEQ ID NO: 903099 - DNA, 120 bp, Artificial Sequence
  ENSG00000215417_10 (sequence is synthesized)
gcctgttgagtttggtggggattgtgaccagaagattttgaaaattaaatattactgaagatttcgacttccactgttaaatgtacaagatacatgaaatattaaagaaaatgtgtaact

SEQ ID NO: 903100 - DNA, 120 bp, Artificial Sequence
  ENSG00000215417_11 (sequence is synthesized)
ttttgtgtaaatacatcttgtcttgttttcattcaaaaacatttcacttttggggttgcgtgtcagatttggcagtataaattctggctatattttttgttgttagatttatttggctgt

SEQ ID NO: 903101 - DNA, 120 bp, Artificial Sequence
  ENSG00000215417_12 (sequence is synthesized)
taagtattgcgatatgactaaacatactgtatacctgatgatcatctgtaaagttagagtatatctttttgctttctttggagttagtgttattccaggatattttacttaatctaaaag

SEQ ID NO: 903102 - DNA, 120 bp, Artificial Sequence
  ENSG00000215417_13 (sequence is synthesized)
ttaatttatgttgctcatatattactcaagtatttaaatttagagagaatgccgctctgtttaaagcaatgtgtaaagatgagtttttttaagcatggaatttagggttggggtacaatt

SEQ ID NO: 903103 - DNA, 120 bp, Artificial Sequence
  ENSG00000215417_14 (sequence is synthesized)
tgtttctattaagcaagtaccagtttaccaatacatgagtaactgaagtgtaactgttaaatgcttgtatactagtttttctttctgattgtcagtgatttataagctataaatgaccaa

SEQ ID NO: 903104 - DNA, 120 bp, Artificial Sequence
  ENSG00000215417_15 (sequence is synthesized)
ggtcctcagactgcttttagcatctgcaacttaaaaaaatgggagttagaaaaagaacaaatgctaaatagagtaacagttaaatgtatgtgtacactcttcccaaatgccaagagtgca

SEQ ID NO: 903105 - DNA, 120 bp, Artificial Sequence
  ENSG00000215417_16 (sequence is synthesized)
gcgacatgtgctgccggcccgggctccatgagcgtggcgggcactttgcagtctcgggtgttcctgcccggtcttctgttcctaaactgcagcaaagggaaaaggaactgaaaaaggcag

SEQ ID NO: 903106 - DNA, 120 bp, Artificial Sequence
  ENSG00000215417_17 (sequence is synthesized)
gctcgtcgttgcaatatcaccaaaagagaaaattaacggcatgccatcaggaccacagcagttggagaaacaactctttatcccggcttgcagccacgagtcatacacgtggacctaact

SEQ ID NO: 903107 - DNA, 120 bp, Artificial Sequence
  ENSG00000215417_18 (sequence is synthesized)
aataggattggtttcttagagagtaaaagtaggtgtttctttctttagacaatgtaccttttctgaaaaactaactcattaagtacggatttgctaattttaaggtagtaaaattacagt

SEQ ID NO: 903108 - DNA, 120 bp, Artificial Sequence
  ENSG00000215417_19 (sequence is synthesized)
atttttggaaactggcttatgcagtttacgaaatataattttagaccctcttttaagttgggtgataaagtagatataacctgagatgatagatttaaacaggatatttacgttctgcta

SEQ ID NO: 903109 - DNA, 120 bp, Artificial Sequence
  ENSG00000215417_20 (sequence is synthesized)
ggccggccgcacccccggcctggggcctccggtcgtagtaaagcgcaggcgggcggggaggcgggagcaggagcccgcggccggccagccgaagatggtggcggctactcctcctgtcat

SEQ ID NO: 903110 - DNA, 120 bp, Artificial Sequence
  ENSG00000215417_21 (sequence is synthesized)
ccctacgtaagccagactttggcaacagtgatagttgattccaggcttatttgacttaaagtcactgaagtggaaactaagaagtggcagttagtgttttacccagcatttctgccttct

SEQ ID NO: 903111 - DNA, 120 bp, Artificial Sequence
  ENSG00000215417_22 (sequence is synthesized)
ctcttttcttcatgtgtttttgtctctagcctatgtgtatttgtgtagaataatgtgggatacctgaataatagatttaaaaggaccaagtggtaaaattgggcccaagctgaagtacag

SEQ ID NO: 903112 - DNA, 120 bp, Artificial Sequence
  ENSG00000215417_23 (sequence is synthesized)
tctttaagaaatttaaggaacttagccttggattcctgaatagaaagatcttcattttacaggcagacctgtctaactacaagccagacttgggttttctcctgtagtttgaagacacac

SEQ ID NO: 903113 - DNA, 120 bp, Artificial Sequence
  ENSG00000215417_24 (sequence is synthesized)
tgactcctgacaaaatgcagcctgcaacttcctggagaacaactcagtgtcacattaaagtttattatgtatttaatgatacactgtttaattgacagttttgcatagtttgtctaactt

SEQ ID NO: 903114 - DNA, 120 bp, Artificial Sequence
  ENSG00000215417_25 (sequence is synthesized)
gacttcagattattctttagcttagtggttgtatgagttacatcttattaaagtcgaaattaatgtagttttctgccttgataacatttcatatgtggtattagttttaaagggtcatta

SEQ ID NO: 903115 - DNA, 120 bp, Artificial Sequence
  ENSG00000215417_26 (sequence is synthesized)
ggaaaatgcacatattccatgaattttaagacccatagaaaagttgaagaatgcttaattttcttatccagtaatgtaaacacagagacagaacattgagatgtgcctagttctgtattt

SEQ ID NO: 903116 - DNA, 120 bp, Artificial Sequence
  ENSG00000215417_27 (sequence is synthesized)
acagtttggtctggctgtttgagttctagcgcatttaatgttaataaataaaatactgcattttaaagctgttaagaaattgtccagaacgagaatattgaaataaaaacttcaaggtta

SEQ ID NO: 903117 - DNA, 120 bp, Artificial Sequence
  ENSG00000223373_0 (sequence is synthesized)
atgacttatcggatgacagcacaacttcatgccacagaaagaagaggatgccctttaaagcacaaaaaagtggaccaacatctgcatggtcttctccaggtaggagagagcagatggttt

SEQ ID NO: 903118 - DNA, 120 bp, Artificial Sequence
  ENSG00000223373_1 (sequence is synthesized)
aagcctttgccaggaggcctcattcacacgctggattttaaggcatcgtggtgcttgtgaggtgcttggtgagtctcagtcaaatgcttctttgtaaggcgtggtatgaaggggtcactt

SEQ ID NO: 903119 - DNA, 120 bp, Artificial Sequence
  ENSG00000223373_2 (sequence is synthesized)
atcaaacacttcctcaacaattcttattccctttctggagctttcattgctgctgccaattataggagaattgagacagtcaaaacacctccaaaaaagaaaatggcaaaaagaaatttt

SEQ ID NO: 903120 - DNA, 120 bp, Artificial Sequence
  ENSG00000223373_3 (sequence is synthesized)
atgttgtctacaaaagagatactatattttgttatttttgatccaccatctgggcttccatgaagtagagatttgaagcttagtataataaagaaataacatagatgatggggttttggt

SEQ ID NO: 903121 - DNA, 120 bp, Artificial Sequence
  ENSG00000223374_0 (sequence is synthesized)
tttcctcccatcagaaaattactcaaaaagggagtatttaaaggaaactcaaatcaggagaacccggttgaaaatgaagctcagagaaaataagcaaacacctgtcactgcttcctgctt

SEQ ID NO: 903122 - DNA, 120 bp, Artificial Sequence
  ENSG00000223374_1 (sequence is synthesized)
gcaggaccagcctctagagtcagcaggccatcgtttaaaagtcatggcaccatcagcaaatacttttaaactctcggagcggcaacaatttcctcatcagtaaagtgtgaactaagcaca

SEQ ID NO: 903123 - DNA, 120 bp, Artificial Sequence
  ENSG00000223374_2 (sequence is synthesized)
taccctcaggactattctaaggtgtcactgtgatgatgaaactaaagcaaccaacttggactcagttgggggtgacatggatgttttccttacagtaacttattaaactgtacatacgta

SEQ ID NO: 903124 - DNA, 120 bp, Artificial Sequence
  ENSG00000260121_0 (sequence is synthesized)
ctgtaggcaaatctcatagaaccaggacctagacaaggggttactaggggccaggggaggggaaaccgagtgacagccaatgggcactgggtttcttctttttacttttttagagacagg

SEQ ID NO: 903125 - DNA, 70 bp, Artificial Sequence
  ENSG00000260121_1 (sequence is synthesized)
caggcttaatgcagccctgtgcacaagtgtgcaccatcacacccagctaacgtttatttttttgtagaga

SEQ ID NO: 903126 - DNA, 120 bp, Artificial Sequence
  ENSG00000260121_2 (sequence is synthesized)
gcaccatcacacccagctaacgtttatttttttgtagagagagtctcactcactatgttgcccaggctggtcttaaaactcctggcctcaactgatcctcctcctttggcctcccaaagt

SEQ ID NO: 903127 - DNA, 120 bp, Artificial Sequence
  ENSG00000260121_3 (sequence is synthesized)
gctgggaccataggcatgagctgccattgccagctaattgttttatttttacatttgctgaggcagggtctcgcttgtggccgtgcagatcttgaactcctggccttgagcagtacctcc

SEQ ID NO: 903128 - DNA, 120 bp, Artificial Sequence
  ENSG00000260121_4 (sequence is synthesized)
ctcctgggtctcttacagtgctgggatgataggggtgagccgctgtgcccggcccggggtttctttttgaagtggtgagaaggcagatgctcaactgtgaatccactagaaacccctgag

SEQ ID NO: 903129 - DNA, 120 bp, Artificial Sequence
  ENSG00000260121_5 (sequence is synthesized)
ttgtactttttacgtgggggagtggtctgacgcacgaattctctctgagaaaggccattaaacaagaatgcagcaaacagtggctgtccggtcctccctgcaccaggccctgctctgctg

SEQ ID NO: 903130 - DNA, 120 bp, Artificial Sequence
  ENSG00000260121_6 (sequence is synthesized)
ccagcctgcctggaacaggaccaactccgctgcccacttctgcgcccagcactcactcgcagctgccaagatcactggcctcgtgatcagctagtgggtgggctcgcctcatgtccccat

SEQ ID NO: 903131 - DNA, 120 bp, Artificial Sequence
  ENSG00000260121_7 (sequence is synthesized)
gcagcagtgcctctgtcttagggagagggcatatccctggcccttgtcccggcccccgccctgggcccaggcaccttctctgtctctcggctgcatttgatgatgaagatgttggcatag

SEQ ID NO: 903132 - DNA, 120 bp, Artificial Sequence
  ENSG00000260121_8 (sequence is synthesized)
atgtcctccacacacatccagctggacagggacagcgtggtgtccgtccacacccagtccatcactgcccgcagctccaccaggaacggcaccagccggaacctgcccacagccagggtt

SEQ ID NO: 903133 - DNA, 120 bp, Artificial Sequence
  ENSG00000260121_9 (sequence is synthesized)
cccgtcaggtgggctccctcatgcccgggccgtgacccccaccccggcggacctgcactcacccctggaagaggaagaggttgagatgattgtacttcttggtgaggaagttgccgagga

SEQ ID NO: 903134 - DNA, 120 bp, Artificial Sequence
  ENSG00000260121_10 (sequence is synthesized)
tgcgggtggggtagccgcagcggatctggtaggcggacagggcgaagtagatgcacttcacgaagtaccagagctgggccaccacattctggttgaacatcctggggcgggatggccagg

SEQ ID NO: 903135 - DNA, 120 bp, Artificial Sequence
  ENSG00000260121_11 (sequence is synthesized)
tcaaggaccccatcagaaacagccccgcagggcccccagcctgcactgccccgcccctggagaccgagcgcccccacgcgtgggcccacctctcagtgacggcgggcaggatgaagaaca

SEQ ID NO: 903136 - DNA, 120 bp, Artificial Sequence
  ENSG00000260121_12 (sequence is synthesized)
tccataggtggatggccagcaccagcgccacctggaaggccagcttgcccagcacggtcttgcgcaggtagagggcgcggtcaaccaccatggtactgaactggatcagcagcatgacca

SEQ ID NO: 903137 - DNA, 120 bp, Artificial Sequence
  ENSG00000260121_13 (sequence is synthesized)
ggaaagcctcgggtacctggtcgtctgatagggaggacgtgatgtctgtggccgccgagtgcttctgtggccaggagagcacaggtcagggggagccaagcccaggggatgtgggtggct

SEQ ID NO: 903138 - DNA, 120 bp, Artificial Sequence
  ENSG00000260121_14 (sequence is synthesized)
gctgagctctgcgtacactgggtttgggtcccgggcctggctcaccccaaaggcccagaagccaaaaatgatgatgatgaagtcgacaacatcagccaggaacatgagggcatagacgtc

SEQ ID NO: 903139 - DNA, 120 bp, Artificial Sequence
  ENSG00000260120_0 (sequence is synthesized)
tttccactccagaagacatcagccagtatgcttaggccgtttttagtaattctgttgtacaggaagtgtggtatcagcatttgcttctggtgagggcctcaggaaccttacaatcatggc

SEQ ID NO: 903140 - DNA, 120 bp, Artificial Sequence
  ENSG00000260120_1 (sequence is synthesized)
gaaaggtcttctttctgatccaggagtgaattaacagagtttggcaccttaaagaaacacaatctatttattttaaagcctgctacctggagacttcatctgcattataagatccttggt

SEQ ID NO: 903141 - DNA, 120 bp, Artificial Sequence
  ENSG00000260120_2 (sequence is synthesized)
ctgcacgaccccttaccttagcccagatactctcttctactgatttcaggtctttcattaagatctcccaaccaactgccaatcagaaaacctttgaatccacctatgaccaggaaacct

SEQ ID NO: 903142 - DNA, 120 bp, Artificial Sequence
  ENSG00000260120_3 (sequence is synthesized)
cttctttgagttgcatgagggggaactttatgtgttcaaaatgacaataggaaaaaaaagtaaatttttgtcctaaggtaagatgccaatataaaaaggaaatacaggacaaaactggcg

SEQ ID NO: 903143 - DNA, 120 bp, Artificial Sequence
  ENSG00000260120_4 (sequence is synthesized)
ccttaagcaaattttagaaaatctgtggaaaactcatcttgtgaaaggaattttgtttgtgatcaagttggctaaaattagaattatttttctaaaaattgagccataggagcactaatg

SEQ ID NO: 903144 - DNA, 120 bp, Artificial Sequence
  ENSG00000260120_5 (sequence is synthesized)
ggcatagagactgccaggcccgtacccaccagtgccctgtccccatgacaacattgctgccagtgcaaaactgtgcgggagaccactagacccatccccacccccagcagcagctgccgg

SEQ ID NO: 903145 - DNA, 120 bp, Artificial Sequence
  ENSG00000260120_6 (sequence is synthesized)
ctgcacagagggtacacagagtttcatgcctaccagcacccacccttgtgctaacaccagccctggagcaaacacatgcacagacactggggggacccctggctggccacactatcctgc

SEQ ID NO: 903146 - DNA, 120 bp, Artificial Sequence
  ENSG00000260120_7 (sequence is synthesized)
caccatcaccactgtgaacacccacacagaagttggcacccctgaacctaccagcacctcactgcagaatgagtgtgcaccctgccatgctacccatactgctggcacatgcaaacaagg

SEQ ID NO: 903147 - DNA, 120 bp, Artificial Sequence
  ENSG00000260120_8 (sequence is synthesized)
cagactcttgtgaacactgcttcaggaacaacttggcccttccagcatggcaggttcctaacttccagggaccacagaacaaagccagaggtctgaaatcaacaccccagagttagaaca

SEQ ID NO: 903148 - DNA, 120 bp, Artificial Sequence
  ENSG00000260120_9 (sequence is synthesized)
cacagtccaggagttctgagctgagccttggttccctaaaatcctccagaaacaaacccagtcaattgaacccaccttataccacaattaaatctcccagaacataaaatggaattaaag

SEQ ID NO: 903149 - DNA, 120 bp, Artificial Sequence
  ENSG00000260120_10 (sequence is synthesized)
aaaaaaaaacttatctaaaagtcagcaactacaaagattgaaggaatattagcccacaaagatgagaaagaaccagtgcaaaaactctggcaactcaaaaagccatagtgtcttgttacc

SEQ ID NO: 903150 - DNA, 120 bp, Artificial Sequence
  ENSG00000260120_11 (sequence is synthesized)
tccaaaggattggactagttcccaaacaggctgagatggccaaaattacagaaatagaattcagattctggacagaaatgaagattattgagatacaggagaaggttgaaatctaatcaa

SEQ ID NO: 903151 - DNA, 120 bp, Artificial Sequence
  ENSG00000260120_12 (sequence is synthesized)
aggaatctaaggattacaataaactgaacaggaacttatagacaaaatggccattagaacaaagaaccaaatttatctggtagagctgtaaaacattctatgagaatttcacaatgcaat

SEQ ID NO: 903152 - DNA, 120 bp, Artificial Sequence
  ENSG00000260120_13 (sequence is synthesized)
cccaagtattaacagcagaaccgaccaagctaaggaaagaatctcagagcttgaagacctctttgaagacctctgaaataactctatcagagtaaaagagaggaaaaacaataaacaaga

SEQ ID NO: 903153 - DNA, 120 bp, Artificial Sequence
  ENSG00000260120_14 (sequence is synthesized)
aggaacaacctctgagtaatatagaattatgtaaagagacccaatatataactcattgatgtgcctgagaaacagggagggaaaccaagcaactttgaaaaacatatttcagggccaggt

SEQ ID NO: 903154 - DNA, 120 bp, Artificial Sequence
  ENSG00000260123_0 (sequence is synthesized)
gcccacgttgcagaatcatgagcaaatatgttgtggattggctgtaactctgctctgggatccaggctgaaggagcaggctctatctggaacattactagtctccaggcagaagaaaaag

SEQ ID NO: 903155 - DNA, 120 bp, Artificial Sequence
  ENSG00000260123_1 (sequence is synthesized)
agacaatggaatggatgattgaatggatgaatgaactccacaggaagatgaggaaagcctttatggatggagtgagcttgcagcagagtctcaaaggggggcctggccaccagagtccca

SEQ ID NO: 903156 - DNA, 120 bp, Artificial Sequence
  ENSG00000260123_2 (sequence is synthesized)
agctaccaagatgtcaagtaaagaagaactgaaagccaactgctggatgcagcagtgagtgggggtcacagtggcctttgccagaactgttccagtggaggagtagaggaagagagaaaa

SEQ ID NO: 903157 - DNA, 120 bp, Artificial Sequence
  ENSG00000260123_3 (sequence is synthesized)
ccacaggagcaggcatcgcaagctcatgctccacccacacgtcccctttctcctttagtcctgtgacccatgtgcttgctctctttctctctcaaaggagatccaaatttaaaaatatgg

SEQ ID NO: 903158 - DNA, 120 bp, Artificial Sequence
  ENSG00000260123_4 (sequence is synthesized)
agccaagggaatcagttcctttgcgaacacactgaacgttagttttcttcttctcttttgcaaaaacttcttatttcacaaaatactcaaacaaatagacaaagtacagtgaagtccagg

SEQ ID NO: 903159 - DNA, 120 bp, Artificial Sequence
  ENSG00000260123_5 (sequence is synthesized)
tagatatcatccaccttcagcaatgatcaatccatggccaatctttcatctcaacactcgtatcctcattcttgtggagcaaatgccagacattctttcatccatcagtatgtcaatatg

SEQ ID NO: 903160 - DNA, 63 bp, Artificial Sequence
  ENSG00000260123_6 (sequence is synthesized)
tttgtttcgtttcacccattgcagcctctacctcctgggctcaggtgatcttcccacctcagc

SEQ ID NO: 903161 - DNA, 120 bp, Artificial Sequence
  ENSG00000260123_7 (sequence is synthesized)
ttccaaagtgctaggattacaggcatgatccataatacccagctacggtttgttttcatttggatgctaataagacccatacattccatttggttgatctatctcttcaatttcttttaa

SEQ ID NO: 903162 - DNA, 120 bp, Artificial Sequence
  ENSG00000260123_8 (sequence is synthesized)
ttaaatttataattttataaggtccccttccacatttttctttgtggaagaggagaaaagacccttgttctctggatcactctgtggttaagggggtaggtcctcaaatcagatgccctg

SEQ ID NO: 903163 - DNA, 120 bp, Artificial Sequence
  ENSG00000260123_9 (sequence is synthesized)
gttctattttgctttcttgttttttagtactttttgtttgttacctacacacagaaaagtacatgaatcataagtgagcagcttgatgaattttcataagtgaacacacctgtgtaacca

SEQ ID NO: 903164 - DNA, 120 bp, Artificial Sequence
  ENSG00000260123_10 (sequence is synthesized)
ccacccagctcaggaacagggcatcactggcacccaagaaccccctctcaggccctttcccagtctctaccacctcacaaaggtcaggtgactttttcacaccacagccatgtgttacct

SEQ ID NO: 903165 - DNA, 120 bp, Artificial Sequence
  ENSG00000260123_11 (sequence is synthesized)
gaatccaagtcagaagaaattgctgcctcctctgaataattattgctgacactgattgcactctgtgcttattgctcagtcctttgagttatctcgtcaatatttcccatttgtcctata

SEQ ID NO: 903166 - DNA, 120 bp, Artificial Sequence
  ENSG00000260123_12 (sequence is synthesized)
tccatccccacctaggaatgaatgggacttcatgattctgtctttctagtattagatgtcttgctcagtaaaaaatgtttactgtcttgtaaattaatttaaatatatggtaaaataata

SEQ ID NO: 903167 - DNA, 120 bp, Artificial Sequence
  ENSG00000260122_0 (sequence is synthesized)
gtggagtataaatactgcaccaaggacctggctacaaaaaataaatatttatattatatttatatatctatatatatatgtgcagtgatactgtggctgcgctgctctttgattggcttc

SEQ ID NO: 903168 - DNA, 120 bp, Artificial Sequence
  ENSG00000260122_1 (sequence is synthesized)
gttaatatttggcaaagcattgccacttacccactcagcgaagatgcacaaaaacgtcatcactgattctttcagttcgatgcctgttaactgcgggtgtaaactgctggtgatggtgtc

SEQ ID NO: 903169 - DNA, 120 bp, Artificial Sequence
  ENSG00000260122_2 (sequence is synthesized)
atttactaccaaagaagtgtggagcaggatgggtgagagagtgagtgagtgagcaggtggaaggacagtgggtgaaggataaaaaggtgggaaacattttttttttaaaaagtgaaactt

SEQ ID NO: 903170 - DNA, 120 bp, Artificial Sequence
  ENSG00000260122_3 (sequence is synthesized)
caaggcccatgtgttactgaggagacagcctgctgggctggggtcaggagctagcggagggaaacggttagatctcagaaaaatctcatcactatgccctagtagcttaatgacatcact

SEQ ID NO: 903171 - DNA, 120 bp, Artificial Sequence
  ENSG00000260122_4 (sequence is synthesized)
agcatgagcacatggtgtacttggcgggatcttacagctctgttgcccatctcaagacctaagaacaattattaagtttagccaaatcttgcatagacgtggttagaatttattgcacat

SEQ ID NO: 903172 - DNA, 120 bp, Artificial Sequence
  ENSG00000260122_5 (sequence is synthesized)
tggaacaaaaatatatattttttgttgttttggaaaagaccattagcaataaaaaattttttgtctgtctgtctggtttggggatgtacattggctgacagcatctaagttctaagaaga

SEQ ID NO: 903173 - DNA, 120 bp, Artificial Sequence
  ENSG00000260122_6 (sequence is synthesized)
aagaaaagtataaaaaataaaaataaacatgacaatggcataagccagaagccatttcctatttaataagttaataatttgtatttacaaaaaggcatgccaataaaataaaattatata

SEQ ID NO: 903174 - DNA, 120 bp, Artificial Sequence
  ENSG00000260125_0 (sequence is synthesized)
agtattgatagactgcctttatgcaaatccctttggaagaaaggatggagaggaagaagccggaaacagatgagaggcaggaaataccaaattgcatgtttataaatgctgtgaaggaat

SEQ ID NO: 903175 - DNA, 120 bp, Artificial Sequence
  ENSG00000260125_1 (sequence is synthesized)
agagcactgcttctcacaggactgcctcagcctggcaggattcagtctcctgctctgagggaaaaacaggaagtcaaggatcaagaccgagtgctcaactgagatcagaaaggaggacac

SEQ ID NO: 903176 - DNA, 120 bp, Artificial Sequence
  ENSG00000260125_2 (sequence is synthesized)
acagtgacttggccaaatcactggagattcacacagcagagctcagacgagtgctatcagcacagctgaggaagacaacagttagggtgcaaggatcctgaaagagaaacattggttgtg

SEQ ID NO: 903177 - DNA, 120 bp, Artificial Sequence
  ENSG00000260125_3 (sequence is synthesized)
agtgaagtgagctcccagctaccgcctcgagaggctgctattgacaatctcctgtctggccaaacaacttcctttctacaactttgcctgggcgaatggcagtaggaaaacaccaccaac

SEQ ID NO: 903178 - DNA, 120 bp, Artificial Sequence
  ENSG00000260125_4 (sequence is synthesized)
tcaagaagaaagaagtggtagtacaatacaatctcagcattctgtaatctggcttgaatgtgactgtgcaaggatcctgaaagagaaacattggttgtgtttttattccttgggtataag

SEQ ID NO: 903179 - DNA, 120 bp, Artificial Sequence
  ENSG00000260125_5 (sequence is synthesized)
aatcctgaaagagaaaggcatctgaaccttggaggcatggggttcatctcatcctcatccagcctgtgatgatggagctgttttcaccagaaacgtgaggagactcataccacttgagaa

SEQ ID NO: 903180 - DNA, 120 bp, Artificial Sequence
  ENSG00000260125_6 (sequence is synthesized)
ctatttgttggagtgccagattatttaagggcctttgcatgtttcaagtcctcttcttaaagtaagaatactctccacatttataacagcaacaaaaacaccaatgtcagcacaaaatgc

SEQ ID NO: 903181 - DNA, 120 bp, Artificial Sequence
  ENSG00000260125_7 (sequence is synthesized)
aaaaacggaggcacttctatgtcataatgatacatcagagttctgctcaactcttttttagaaaaagaagctcagacttacacacatccactttcttaaataaataattgttcaatgaaa

SEQ ID NO: 903182 - DNA, 120 bp, Artificial Sequence
  ENSG00000260125_8 (sequence is synthesized)
tcatcctcatccagcctgtgatgatggagctgttttcaccagaaacgtgaggagactcataccacttgagttctgcttaaattcagcatcttctctcagttcaaatttaagaaaggagat

SEQ ID NO: 903183 - DNA, 120 bp, Artificial Sequence
  ENSG00000260125_9 (sequence is synthesized)
ctccagctcccaagcactgctcatctgctgacggggggtactctgtgactgttacagaaattgctcttaaatgcataaaacacagaagagaatttttggaaaatcccttattattcatta

SEQ ID NO: 903184 - DNA, 120 bp, Artificial Sequence
  ENSG00000260125_10 (sequence is synthesized)
aagcattttagggcctcattaatccagatgggttaatcggttgttgatttgccaggttgttaagcatccattgtcagatgctgatggggtgtgagaaaatataattccgatctaccaaag

SEQ ID NO: 903185 - DNA, 120 bp, Artificial Sequence
  ENSG00000260125_11 (sequence is synthesized)
tatcttcctcagagaaggctgtagcttcctcagagaagggtgtatctttaccagggaaggctatgtcttcatcagggaaggctgtatcttcctcagagaaggctgtatcttcaccaggga

SEQ ID NO: 903186 - DNA, 120 bp, Artificial Sequence
  ENSG00000260125_12 (sequence is synthesized)
aggctgtatcttcattacggaaggcagtatcttctggggataaattaagctgggcatccagcttcttctttaatttccaaaacttctctgtatcacaaaacattcctcattctttgggtg

SEQ ID NO: 903187 - DNA, 120 bp, Artificial Sequence
  ENSG00000260125_13 (sequence is synthesized)
ttgtttttttgttttttttttttttgcctacctaaggtctgaaatgatgtcagaagccattttcaaaagctagttcgtaacaggtcaacaggtcagtcgcacatatgcacttaggcacag

SEQ ID NO: 903188 - DNA, 120 bp, Artificial Sequence
  ENSG00000260125_14 (sequence is synthesized)
aggcacagaagcccaacatttaaagatgtttgtgtgtacgtgtctgtatacgtgtatacacatctgtgtatatgtttgtgtctacacatgtatacacgtctaggcgtatatgtttgtgtc

SEQ ID NO: 903189 - DNA, 120 bp, Artificial Sequence
  ENSG00000260125_15 (sequence is synthesized)
tacacgtctgtgtatatgtttgtgtctacatgtgtctatgtgtttgtctatatgtccatatgcgtatatttgtgtgtgtctgcgtgtgtgtgcatgagtttggctttgactttgtttcaa

SEQ ID NO: 903190 - DNA, 120 bp, Artificial Sequence
  ENSG00000260125_16 (sequence is synthesized)
agttcttagctagagcctgtccacatcttcagcccttcagacacaaatggtattcaggttatcaaggggattctttagccagggcttaaaaactcaactttctttctttccaaaccttga

SEQ ID NO: 903191 - DNA, 120 bp, Artificial Sequence
  ENSG00000260125_17 (sequence is synthesized)
ctgactgagagtcacataacagcagtgagcacagtgagaaaagtccctggattagaagttggaaaatatgattcagggtcctggttctgttttaagagaggaagtgaccatcattagcaa

SEQ ID NO: 903192 - DNA, 120 bp, Artificial Sequence
  ENSG00000257239_0 (sequence is synthesized)
aggggcggaaacgcccggctctgcagcctgcccagcgccgcgctgctgctggtttcctcttccttgcagattgtgttcaaacccattgctaattgtgtcagtaaacaacagacacaattt

SEQ ID NO: 903193 - DNA, 120 bp, Artificial Sequence
  ENSG00000257239_1 (sequence is synthesized)
attttctctttgcagagaggttgggcagcggcgtttgaacgttgagcaaagcctttccattcacctgtaaaatagaatcaaaggctggacgccgtggcttacgcctgtaatcccaacact

SEQ ID NO: 903194 - DNA, 120 bp, Artificial Sequence
  ENSG00000257239_2 (sequence is synthesized)
cgcttgagcctaggagttcggccttggcaacatagcaagactcattttctataatacaaaaaaataaaaaaattggccgtgtgggctggctcgcacctgtggttccagctgctcgggagg

SEQ ID NO: 903195 - DNA, 120 bp, Artificial Sequence
  ENSG00000257239_3 (sequence is synthesized)
ccaaggtgggaggatcagctgagccctggaggtggaggctgcagtgagccgagatcccactaatgtactccagcctgggcgacagagctgagctattctgacaccagcttttaccttgcc

SEQ ID NO: 903196 - DNA, 120 bp, Artificial Sequence
  ENSG00000260126_0 (sequence is synthesized)
tctcttgcctgcccctgtgtagcatgtgacttcgctgttctttggccttccaccatgattgtgagacctcctcagccatgtggaacttccctcctggagatgaagaaagagttcagtcac

SEQ ID NO: 903197 - DNA, 120 bp, Artificial Sequence
  ENSG00000260126_1 (sequence is synthesized)
cctgctgaggagagaaaaggccattattgtcaaaagaaggcacctgtcctagatttaagggaggtgcgttatcctggatggtttctaggcctcagtgggatggtctgatgacttcgtctc

SEQ ID NO: 903198 - DNA, 120 bp, Artificial Sequence
  ENSG00000260126_2 (sequence is synthesized)
gggatggtctgatgacttcgtctcaccccccagagacaaggtcttgctatgttgcccaagctggtctgaaactcctggcctcaagctgtcctctgcctcagcctcccaaaatgctgggat

SEQ ID NO: 903199 - DNA, 120 bp, Artificial Sequence
  ENSG00000260126_3 (sequence is synthesized)
gtcctatttcccttttctagactcaagctatactccatatttattggaagccagttactaagacccgcttacactcaaaaggagtggaatcgagacagggtttcgccatgttgctaaggc

SEQ ID NO: 903200 - DNA, 79 bp, Artificial Sequence
  ENSG00000260126_4 (sequence is synthesized)
cagcctcccaaagtgctgggattacaggacttcttcctgccaccttgtgaagaaggtgctttgcttcctttttgctttc

SEQ ID NO: 903201 - DNA, 120 bp, Artificial Sequence
  ENSG00000260126_5 (sequence is synthesized)
ttcctttataaattacccagtctcgggccgttctttatagcagtatgaaaatggactaatacagcttgtgtgataatttcactggatgatgtgaaggcttttttgaaaatgttcaaggct

SEQ ID NO: 903202 - DNA, 120 bp, Artificial Sequence
  ENSG00000260126_6 (sequence is synthesized)
gaaaatgttcaaggctctgcccaaatatgtgatggtggaatttattatgatatgcaaatgatacttataatagtgatgtgattttatttatttatttattttttttgagacagggtctca

SEQ ID NO: 903203 - DNA, 66 bp, Artificial Sequence
  ENSG00000260126_7 (sequence is synthesized)
ctcaggattgatcctcccacctcagcctcttgagcaactgggactacaggcatgcaccaacacacc

SEQ ID NO: 903204 - DNA, 120 bp, Artificial Sequence
  ENSG00000236508_0 (sequence is synthesized)
agagacaaaccccaggagagcctgaggtcctccagagggatattagtgagtggcttgtctgagcaaaagccatttctactcaccccacagtcgttagctccatctccacacatgcccaca

SEQ ID NO: 903205 - DNA, 120 bp, Artificial Sequence
  ENSG00000236508_1 (sequence is synthesized)
gatcacttggctgcctggagggatcatttcagaattctttgcaacagtaatggccgtttgaaggttatcacctagaagacaaagaaactttgcttgctgtatgtacaaacctcccctcag

SEQ ID NO: 903206 - DNA, 120 bp, Artificial Sequence
  ENSG00000236508_2 (sequence is synthesized)
caacaagaactgaggtctcccttttccactctgcttggtgttctttgagagcatttaccgctttctgccttattttatcttcctctctgctgtagactgcccctactgggcaaacactat

SEQ ID NO: 903207 - DNA, 120 bp, Artificial Sequence
  ENSG00000226828_0 (sequence is synthesized)
gctgaatgcagccgaggggcgagcgcgcgggctcgcacggattagccgtgctttcccatgagccacaaaagaatgcccgaatctgggacatctgtcatcaaggggcaggctgctcaggat

SEQ ID NO: 903208 - DNA, 120 bp, Artificial Sequence
  ENSG00000226828_1 (sequence is synthesized)
gcaagatattgtcaagaaccctctgctctacagttctttgctgttcttgacccacctccttcaaactcggattttccgtttctctcttctcctaagagctgcctgctgccttctgaagct

SEQ ID NO: 903209 - DNA, 120 bp, Artificial Sequence
  ENSG00000226828_2 (sequence is synthesized)
gctttagaaccacagaagcctggatcatctctacaaagggtgcaagatgaaggtgttaggacaacttaaagagacgggaggtgctaggaatcggcaggtgcctgattgccaaggcaggga

SEQ ID NO: 903210 - DNA, 120 bp, Artificial Sequence
  ENSG00000226828_3 (sequence is synthesized)
ctgatggtgggagatgttgttacagaactgggcttcctgatagcaatgaggatgaaaagattccaaaacaatagatttaaccagcagaatcaagtttctccaggacaagagaaaaagaga

SEQ ID NO: 903211 - DNA, 120 bp, Artificial Sequence
  ENSG00000226828_4 (sequence is synthesized)
atcctgaaggcatggttcccagacggggtgaaatagttaatacagaaattcttctaactcaggcccaaacatctccacactgtccccatcctcaagccctgctgtccaccccacccctat

SEQ ID NO: 903212 - DNA, 120 bp, Artificial Sequence
  ENSG00000226828_5 (sequence is synthesized)
ttgtacaggagccatttaatagagcaaacagtattcgtttggcagtttatttgtgctgcaccaaaaaaaaaaacagagaagccaaaactgaaagaaaaaggaaaaacaaaaaaccagaaa

SEQ ID NO: 903213 - DNA, 120 bp, Artificial Sequence
  ENSG00000226828_6 (sequence is synthesized)
tggagaagtgttccctttccagacaatcatgcaagagaagaagattccatgaagctcacattccaacattggagacagcatggagctgtcagtgacctccccacttccaagcagaaatcg

SEQ ID NO: 903214 - DNA, 120 bp, Artificial Sequence
  ENSG00000226828_7 (sequence is synthesized)
tgggaacagtccctgtgacagccacactgattgagaggaaaaagcacagcgggagaagttgatctctttccactgggagattgatctgcactagactatttcttgaatgcgtattatgtg

SEQ ID NO: 903215 - DNA, 120 bp, Artificial Sequence
  ENSG00000226828_8 (sequence is synthesized)
ccaagcaccattctaggtgctaaggatacagctattatcatagaagagtccccatcctgaggaagcttacatcccaccaaggaagataggaaacaaaaaatagaaggtgctgcattcaag

SEQ ID NO: 903216 - DNA, 120 bp, Artificial Sequence
  ENSG00000226828_9 (sequence is synthesized)
agtgaagcaagcacaaaaggaaaggaaaaatctctccctggaggagaatgcagacagacagacagacgctatttgtatctttgcgtccgaagcacagcagctaacacacaagcatatcaa

SEQ ID NO: 903217 - DNA, 120 bp, Artificial Sequence
  ENSG00000226828_10 (sequence is synthesized)
cctgttcatttctaaatgccagaagagagatgagacagagagaaaaaaaactaagtcagactgaaattgggccttctaccactagactgaaaagacctagaattcatcgacagcacagat

SEQ ID NO: 903218 - DNA, 120 bp, Artificial Sequence
  ENSG00000226828_11 (sequence is synthesized)
acaacaaaagccttcatggaatacaaaaactccaattttcataggatatccttgacctcagtgatgaatcatgagggcgtagagggttgagaaaaaagtaggcacatcactactgtttct

SEQ ID NO: 903219 - DNA, 120 bp, Artificial Sequence
  ENSG00000226828_12 (sequence is synthesized)
aaccagatatctcgaagctatttcagttccaggaattctgtctgctcctgtttttacttcattagcaattcaacatgtctgatttgcccacacaatactttccagctactttacccattt

SEQ ID NO: 903220 - DNA, 120 bp, Artificial Sequence
  ENSG00000226828_13 (sequence is synthesized)
gacctggaacaaagtgaaagcacattttgcccagttgaaaggtctcctggcaggttggttagcaacaggcttgccagtctgggttctgttagcaaagaataaacacatttcattagacaa

SEQ ID NO: 903221 - DNA, 120 bp, Artificial Sequence
  ENSG00000226828_14 (sequence is synthesized)
agcatggagctgtcagtgacctccccacttccaagcagaaatcgtcacatgtaagaaggtatgtttgaactgaacgcgttcaggatgcaacgatcaaaacatatcttcccaatgttatgg

SEQ ID NO: 903222 - DNA, 120 bp, Artificial Sequence
  ENSG00000226828_15 (sequence is synthesized)
aaaaggaggatcaaatccattttgattagaaatctatactcagcaaatccatctgtttctatacatttgtacttattttatcttcatttcttactaatgaagtttcacttggaaaatccc

SEQ ID NO: 903223 - DNA, 120 bp, Artificial Sequence
  ENSG00000226829_0 (sequence is synthesized)
agagcactacaagcaactgctgccatgagcaagatcccagcccacaaggaaaggtctgccctatagatcatcctgtaccagagatctacagcataatggcctggaagcagtctttgtttt

SEQ ID NO: 903224 - DNA, 120 bp, Artificial Sequence
  ENSG00000226829_1 (sequence is synthesized)
ggagccaagcccagcaaagtctcaattccttccccttcaatcgccatctggatgaacaaggccaagtcattgaccttctctgggcctcagtttcctcacccataaactggagcaaagtca

SEQ ID NO: 903225 - DNA, 120 bp, Artificial Sequence
  ENSG00000226829_2 (sequence is synthesized)
tctccaagacagcaggaaccatgtttactctttaatcattgtatgctccctaaatatttgctgaacaagtgaacaaaaaacctggtggtggtgaaattagactccttcttggtgtcacca

SEQ ID NO: 903226 - DNA, 120 bp, Artificial Sequence
  ENSG00000226829_3 (sequence is synthesized)
ttctactgcagtgttgagtttgcgtgcccttgggacagaagacagaatagaggctgagaaaattgcttgttggaagaatgaatcctgggtctgctattacaagaaacttctcaacttcta

SEQ ID NO: 903227 - DNA, 120 bp, Artificial Sequence
  ENSG00000226829_4 (sequence is synthesized)
gccttatctctcaccactccttccttagatcctaagattcaaccatccctgacatcaacacaccatgtcctgtgctttgtgccacctgtttacctttgtacatggcattcccacgtggta

SEQ ID NO: 903228 - DNA, 120 bp, Artificial Sequence
  ENSG00000226829_5 (sequence is synthesized)
gaatctcgctcccatacaatctgttatacttggaacccccttcctttattctcaaaacgtaattccctttgagaaagtttctctgacgttttcctgacaatgaaccaatccttcctccat

SEQ ID NO: 903229 - DNA, 120 bp, Artificial Sequence
  ENSG00000226829_6 (sequence is synthesized)
tctgcatgggagtcagaacatttgtattaaagacctgattttactgggcaacagagcgagaccttgtctctacaaaaaataaacaaaactaaccaggcacagtggtgtgcacctgtagtc

SEQ ID NO: 903230 - DNA, 120 bp, Artificial Sequence
  ENSG00000226829_7 (sequence is synthesized)
gaagacacaattggccaacaagagaaaggaagagcttctccaagactggaaagagaacaaggctaacttctgttcaactccctggcaagttggtggatctcagagatgaatgatcttgag

SEQ ID NO: 903231 - DNA, 120 bp, Artificial Sequence
  ENSG00000226829_8 (sequence is synthesized)
tcacaccaaggtcatgacgcctgggtgtggggaacttctcgtctcaagaaggaactcatttcaactatgacacacaatggtgaagatgcaattatgcaaaggactttctacttagaaaaa

SEQ ID NO: 903232 - DNA, 120 bp, Artificial Sequence
  ENSG00000226829_9 (sequence is synthesized)
aaaagttcatatcatggataaccagcacagacatacattttggaagccttttttaaatattcgagtcttcatgaaaccctaagtttctctcacacagtcatgaatttaggggtagggagt

SEQ ID NO: 903233 - DNA, 120 bp, Artificial Sequence
  ENSG00000226829_10 (sequence is synthesized)
tccaataatgaccaaatttgaatttctcaacataccaggagagatctcaggataggatttactttgatttaaggggaataagagatttttgacatttctgtatttctcacattcaaattt

SEQ ID NO: 903234 - DNA, 120 bp, Artificial Sequence
  ENSG00000226829_11 (sequence is synthesized)
gacaatgggaggatcatgccctgccccccaccctcattctccatctctctgaagcccaggcttttaaccattggccagagggctgaatataaaggtcacatgattttggccaggcatggt

SEQ ID NO: 903235 - DNA, 120 bp, Artificial Sequence
  ENSG00000226829_12 (sequence is synthesized)
tccataaggaagccatgtaagcagccttaagcaagagaaaagtgggtgattctgataatgcgacaagtaccagggacccagaaaggatcagaatgaataaaagtatatattttaatcaaa

SEQ ID NO: 903236 - DNA, 120 bp, Artificial Sequence
  ENSG00000239332_0 (sequence is synthesized)
acataagtgtgagtgactccttactgccgtccaggcagcctgggggctacgaggggcttcagaggtcctcatccccagcctgtaggcctggccatactggacccatgagatcagccaccc

SEQ ID NO: 903237 - DNA, 120 bp, Artificial Sequence
  ENSG00000239332_1 (sequence is synthesized)
tgtcagctggtacctcggggtcctacagtcctcctcgctcaagccctggtcctctaactcggaggtgatgaggtgttgggctggaagagacaggcagccagatgattccaatgtacagcc

SEQ ID NO: 903238 - DNA, 120 bp, Artificial Sequence
  ENSG00000239332_2 (sequence is synthesized)
aatgatgagcagctgctgggctgaagggactggggccattttataccaggatgttacacagaaatgcctgaaaagcaaggagcagctatcagaatgtttggtgacacagctcctcctgtc

SEQ ID NO: 903239 - DNA, 120 bp, Artificial Sequence
  ENSG00000239332_3 (sequence is synthesized)
gtggttccttcggcatggacttcacattcagcagatccatgaggtgttccctttcggatgagctccaaggtcttaagagagcatctctagtctgcgtgagtccgtctgaacgacggtcct

SEQ ID NO: 903240 - DNA, 120 bp, Artificial Sequence
  ENSG00000239332_4 (sequence is synthesized)
gagcaagaaccacctataaccatctgctcaaaataactcaggggaagtcaaagctttctatgtggaaggtgactgaaaccacatacacagaccactgcagcattcctgacattatggaac

SEQ ID NO: 903241 - DNA, 120 bp, Artificial Sequence
  ENSG00000239332_5 (sequence is synthesized)
tccaaacatggccatagcttgagtaacatgttttgctatgacaagaacttggactgtagtccttccccctctcaagaatgtgacatcacaccttatcagatcctacgagtgagctactga

SEQ ID NO: 903242 - DNA, 120 bp, Artificial Sequence
  ENSG00000239332_6 (sequence is synthesized)
cctcaaccactgaacttcaaactatgtaaaaacctaagggttcgacagacactttgagagcttgggctgtggcaagctacactctgtcagcctctcttcgacagggccccaccctgctag

SEQ ID NO: 903243 - DNA, 120 bp, Artificial Sequence
  ENSG00000239332_7 (sequence is synthesized)
cctttgaacttggaagcatcgcccacaaacaccagtgccaccctctagccttgagggaccatatatgtctctgtgaatctccgttgcattggacagcttctctcccaagagctgctctta

SEQ ID NO: 903244 - DNA, 120 bp, Artificial Sequence
  ENSG00000239332_8 (sequence is synthesized)
taaaagagacacaccacattttaatgaggcttcgctctccacagaggcctgcttccatcctaattgagcaagtagactttagtaactttggaactcactcaccccgtgactaatacaccc

SEQ ID NO: 903245 - DNA, 120 bp, Artificial Sequence
  ENSG00000239332_9 (sequence is synthesized)
tgtctacccagcgcattccctgtgagatttgttcatgttgttctccccctccttaagcattgtgaacctaggaaaaatatcatctctgtagggcaataaaccatgtgatttgtgaaatca

SEQ ID NO: 903246 - DNA, 90 bp, Artificial Sequence
  ENSG00000239332_10 (sequence is synthesized)
caagacaaggcgagcctgtgaacaagacatgtgagcttggactccagtgtggaatcccatgtccgctcagtgcacctttctgccgctgaa

SEQ ID NO: 903247 - DNA, 120 bp, Artificial Sequence
  ENSG00000239332_11 (sequence is synthesized)
aagaatcagcccctgaggtctccaggaagtaccttgatttgaaagagctgtgaccaacctcagtggcatgtccaactaccacgctgcagaagtctgtgaggccgtggtcctcagcccttt

SEQ ID NO: 903248 - DNA, 120 bp, Artificial Sequence
  ENSG00000239332_12 (sequence is synthesized)
gcacagattaaaaccccaatcccagccgcaccccagaccaatcaatcaggatctctggagatggggcccaggcatctatatatatgtatatatatatatttttttaattcctcagatgat

SEQ ID NO: 903249 - DNA, 120 bp, Artificial Sequence
  ENSG00000239332_13 (sequence is synthesized)
ttggcagtaagatgcacttgcacaagcatcagaagctgaaggcgagagaaagcccttctctgaattggcctgggcagatgcgtggtagacggtggctttcaaacaagctcctgcacgctg

SEQ ID NO: 903250 - DNA, 120 bp, Artificial Sequence
  ENSG00000239332_14 (sequence is synthesized)
tctgctttctgctctggtgctgcaggcaattgaaatgatctccatgccttctctgcaatcctggcacttcctgattctgtggggtctgacagtgacttccctgatcttccctaatgcagc

SEQ ID NO: 903251 - DNA, 120 bp, Artificial Sequence
  ENSG00000239332_15 (sequence is synthesized)
ccttccgtccattatgaatgcctctaaatcccttgtattaaaaccccgtgtatttggaatatctagagcagcttccagtattataaccaaaccctgaccgacacgctggcatagataaag

SEQ ID NO: 903252 - DNA, 120 bp, Artificial Sequence
  ENSG00000239332_16 (sequence is synthesized)
aagctacgtaaaatgatgtgtggggaaacatcctgttcaatcttcccggcagtgctgaggttaggctgtcattttcccagtttcatagattagaagcctgaggctaaagaggtcaaggtt

SEQ ID NO: 903253 - DNA, 120 bp, Artificial Sequence
  ENSG00000239332_17 (sequence is synthesized)
gcctgactcccaagtcattctctttctactagatcattctactctgcttctcttgatagatagggagaagcaggcataagagggaaagagaaaagcagcaggggaggacatgacagagat

SEQ ID NO: 903254 - DNA, 120 bp, Artificial Sequence
  ENSG00000239332_18 (sequence is synthesized)
ggacaaaggaagaggcaaggagagactcatttgaagtagaaagggagagagagaaaccccaagggttctggaaagttggagaaacttctcatcacctctactcagacggtgctttacaag

SEQ ID NO: 903255 - DNA, 120 bp, Artificial Sequence
  ENSG00000239332_19 (sequence is synthesized)
gttacccttgctcttgggcaatagcaattagccaagtaaccaccgttcacagccctttgcctgttctttattctcaggcttttgagactgcagtgtgaacagaagacacaacaacccacg

SEQ ID NO: 903256 - DNA, 120 bp, Artificial Sequence
  ENSG00000239332_20 (sequence is synthesized)
gagtgaagaattctctgggctgccccagcaatgcagagcagtgttcccctggagggtggatgaactcaggcagaggggcagccccagccctgggctcagggggaatgggaatcaggtttg

SEQ ID NO: 903257 - DNA, 120 bp, Artificial Sequence
  ENSG00000239332_21 (sequence is synthesized)
ccgtgcttgccttcctgggacagtgatagttgcagttcctgctgacttggagtgcccctccgctctgtgtcctgtgagaaagcggatgattccaatgtacagccaatgatgagcagctgc

SEQ ID NO: 903258 - DNA, 120 bp, Artificial Sequence
  ENSG00000239332_22 (sequence is synthesized)
agaaccagagcctttccttactgagtgcaaatgattgaaaatctcaggctacaaaagtgggaggcatgcacctccccaacagagacatgccattgccagtggggacactggaatcccttt

SEQ ID NO: 903259 - DNA, 120 bp, Artificial Sequence
  ENSG00000239332_23 (sequence is synthesized)
ccccaggcagtgtgggatgggtgtggccgtgtgcctaggactggctcttttctacttctctgctgcagacctgaccccttctgactggcatcttttcctttagatacgcaggtctcactg

SEQ ID NO: 903260 - DNA, 120 bp, Artificial Sequence
  ENSG00000239332_24 (sequence is synthesized)
gcctgggccccattctgtctctttttagcatggcttggcctttgtctgctttgatttctatgtgtcaattttatggtcaaactcccaaaaagcaacctcattcctctagggaatgggctc

SEQ ID NO: 903261 - DNA, 120 bp, Artificial Sequence
  ENSG00000239332_25 (sequence is synthesized)
cctcagtttgctcccttgaaatacctgcgattctttattctcctgaaccctgctctacaacctctgtatttttctgagaaaaatcagaaataaccagaacccagacctggaagctagacc

SEQ ID NO: 903262 - DNA, 120 bp, Artificial Sequence
  ENSG00000239332_26 (sequence is synthesized)
ccagacataggtcatccacctctcgggctctggggcctgctcaggatgtgcatgctggggagtggagcaccctctccatgggctggcctgtcctcaggccccacaacagacagtggtcct

SEQ ID NO: 903263 - DNA, 120 bp, Artificial Sequence
  ENSG00000239332_27 (sequence is synthesized)
gagccgggacagcaggatgacaaaggctcacatttgcactctggagcaaaaacatcaccggatggaaattgaagtagagagaaaaagaatgagtataggggatgaggaatctctgatgtt

SEQ ID NO: 903264 - DNA, 120 bp, Artificial Sequence
  ENSG00000239332_28 (sequence is synthesized)
aggggatgaggaatctctgatgttaactcaggggtaccatcagtcccctaaagctgcaaataatgtgaatcaatccctctctctctctctgtctctcactcacacacacacacacacaca

SEQ ID NO: 903265 - DNA, 120 bp, Artificial Sequence
  ENSG00000239332_29 (sequence is synthesized)
cacacacttatcttgagagccttccaatttttttctgcaatgcacggacctcacaaaaaaatgactcagccttacataagagacgggaatttgagggggaccaggagtgtgatgactcat

SEQ ID NO: 903266 - DNA, 120 bp, Artificial Sequence
  ENSG00000239332_30 (sequence is synthesized)
tgccttgaaatttccagtgggatacacatgttttcttagatgattttttaaacatttatctttaatgattgtccaaaataaatggttggggaggcagaatggagtgagaatcccacgtca

SEQ ID NO: 903267 - DNA, 120 bp, Artificial Sequence
  ENSG00000226824_0 (sequence is synthesized)
agccacgcgggcgagcggctgtgtggatgtcggcgaagccgcgggcgaggatgcctggggcgtggggggcagaatgtcagccggcaaagtggggaccggagtacccgggaagctgggatg

SEQ ID NO: 903268 - DNA, 120 bp, Artificial Sequence
  ENSG00000226824_1 (sequence is synthesized)
aaggagcctcctctgcagcctcggtggaagatggggccaagggaaagtccagagcctgggccatctccagcctcactcaccctcctccctcacctggtccctgggctgaggatcatggcc

SEQ ID NO: 903269 - DNA, 120 bp, Artificial Sequence
  ENSG00000226824_2 (sequence is synthesized)
cggcctgagaacccccaaggcagcatgcagaggccgggtctgcaccgagccctgacactgacaggctgtgtgacgacgactgacaactaaccctctctggttttactttctatcacctct

SEQ ID NO: 903270 - DNA, 120 bp, Artificial Sequence
  ENSG00000226824_3 (sequence is synthesized)
taggcagagcagtgggcgcagatgccatggcgggaagcaggcctttctgaattcttagcagcgatctccaggggcactctaaccttgcaagaaagaggctgccagtcttgcatcagatgc

SEQ ID NO: 903271 - DNA, 120 bp, Artificial Sequence
  ENSG00000226824_4 (sequence is synthesized)
aaacagggaggcatctttggatcatctcaccctcaccacccacacccgggccaccaccaagactcttcaattctacctccaaaataaatccctaccccacttccctctgttctcgttgcc

SEQ ID NO: 903272 - DNA, 120 bp, Artificial Sequence
  ENSG00000226824_5 (sequence is synthesized)
acccctgtgtcaagccatcaccagcttggccctggaggccagcacagcctccttcccgcctccctgcctcctctctacccccaacagccagaataacttgcagaaaatgtaaatcaggcc

SEQ ID NO: 903273 - DNA, 120 bp, Artificial Sequence
  ENSG00000226824_6 (sequence is synthesized)
ccatctcattctccttcttaaaccgcccctttccccaagggcttcctattgcatttgcaccaaaatcgacaccccccaaatagctctgaggttcaccatgacctggtgctgcctcacctc

SEQ ID NO: 903274 - DNA, 120 bp, Artificial Sequence
  ENSG00000226824_7 (sequence is synthesized)
ctccaatttcactgtcccctagttcttttcccctggaatctgtgtgtttgcataagctgttccctttgcctggatgctcttccctgcaattctttccccactggtcccttctcatacttt

SEQ ID NO: 903275 - DNA, 120 bp, Artificial Sequence
  ENSG00000226824_8 (sequence is synthesized)
aggtctcagctgggagcttacttaaacttttttgtttgagatggagtctcatgctgtcacccaggctgggtgacatagtacctagaagaggagatgacatattgatggaatttaataaat

SEQ ID NO: 903276 - DNA, 120 bp, Artificial Sequence
  ENSG00000226824_9 (sequence is synthesized)
agagtaggagctagagcatcttggatggagaaacctcggcaaagacaaaggcccattgtcccccttccccggccttctgccagctccctccccagtcaccagaggaggccagccctgccc

SEQ ID NO: 903277 - DNA, 120 bp, Artificial Sequence
  ENSG00000226824_10 (sequence is synthesized)
ttttttttttttttttttttttggctagaggacacaaagacagccagagaaattccaaataacacacactggctggatgaaattgcttcagtgatagatatttaaacaatttttattttt

SEQ ID NO: 903278 - DNA, 65 bp, Artificial Sequence
  ENSG00000226824_11 (sequence is synthesized)
tttgggaggccaaggcgggtggatctcttgaggccaggggttcaagaccagctcactacatcgcg

SEQ ID NO: 903279 - DNA, 120 bp, Artificial Sequence
  ENSG00000226824_12 (sequence is synthesized)
ggcgccactacactccagcctgggtgatagagcaagattccgtctcaaaaaacaaaacaaaattttatttttatttatttaatacacatacgtatacacacacacacacacacacacaca

SEQ ID NO: 903280 - DNA, 120 bp, Artificial Sequence
  ENSG00000226824_13 (sequence is synthesized)
catatgtgctctgatgcactggagcttccactggtcttacttaatgtgtgtgatactctcattatttatgtatctatatatatctatatctatatttatatatatatatagagagagaga

SEQ ID NO: 903281 - DNA, 120 bp, Artificial Sequence
  ENSG00000226824_14 (sequence is synthesized)
tagagagatgggatcttgctgtgttgcccagactgtctcaagctcctggccttgggcaatcttcccaccttggcctcccaaaatgctggtattacagtatttaatttttaggtgtttttt

SEQ ID NO: 903282 - DNA, 120 bp, Artificial Sequence
  ENSG00000226824_15 (sequence is synthesized)
gttttttcgggggctgcatttttggagatagggtcttgctatgttgccccgggtggaatgtagtggctgttcaccagtgccatcatagctcactgcatccttaaactcctggctcaagca

SEQ ID NO: 903283 - DNA, 120 bp, Artificial Sequence
  ENSG00000226824_16 (sequence is synthesized)
caggcatgtgccaccacacctggctatcctacgcaatatgagaccaggaagttgtcatctgtgtggagaggaataagtgtaatcccacataggggggtagtctaaaacaacatggagagt

SEQ ID NO: 903284 - DNA, 120 bp, Artificial Sequence
  ENSG00000226824_17 (sequence is synthesized)
ccacataggggggtagtctaaaacaacatggagagtacctttagacctggatttcggggctcagccttgccatgggaaggaggcatggtgtgtagcagtggttaccagacttctttcagt

SEQ ID NO: 903285 - DNA, 120 bp, Artificial Sequence
  ENSG00000226824_18 (sequence is synthesized)
gtgtggggcgggagcggacaacggagaccagacctactgcagccacgcgggcgagcggctgtgtggatgtcggcgaagccgcgggcgagaatctcactgtgtcacccagactggagtgta

SEQ ID NO: 903286 - DNA, 120 bp, Artificial Sequence
  ENSG00000226824_19 (sequence is synthesized)
agcctccctagtagctgggactacaggatgcctggggcgtggggggcagaatgtcagccggcaaagtggggaccggagtacccgggaagctgggatgaaggagcctcctctgcaggtagg

SEQ ID NO: 903287 - DNA, 120 bp, Artificial Sequence
  ENSG00000226824_20 (sequence is synthesized)
ggatgaaggagcctcctctgcaggtagggacagggccctctgaagccggggaggggacggggaaatggggaagggaccacagtggagtctctccagttgtgcttagagaccacctgcctt

SEQ ID NO: 903288 - DNA, 120 bp, Artificial Sequence
  ENSG00000236507_0 (sequence is synthesized)
agcaagcactgaaagtggaaacaggcagaagcttgtagtgagtattttcacacagggaagatggggctggagtgttttggatgccaagaacagggtgtactccccaccattcagaggcag

SEQ ID NO: 903289 - DNA, 120 bp, Artificial Sequence
  ENSG00000236507_1 (sequence is synthesized)
agccaaaccgagaatgaaaaacagcatcccatcgtctggtcctgcccagcaacttcatcccaagctcagtgagatgctgtccccagagctgcagccggggagactcctccagtttcacaa

SEQ ID NO: 903290 - DNA, 120 bp, Artificial Sequence
  ENSG00000236507_2 (sequence is synthesized)
gcacaccctcttgtaatttccacctctttggagtagcaacttggataaattgaaaatggcacatgaaacatctctgtgcctttcaaagggagggagcatctctaatgagcttttgaaaga

SEQ ID NO: 903291 - DNA, 120 bp, Artificial Sequence
  ENSG00000236507_3 (sequence is synthesized)
ctgattccacccagtctcacattaattctcaggagtcagaagacctacaaatgtactcagggcatccagagagaggcagaatgctgctggattggacacaaaggacctggtctctaattc

SEQ ID NO: 903292 - DNA, 120 bp, Artificial Sequence
  ENSG00000236507_4 (sequence is synthesized)
tagtgccacttatttccttcttcccccaggtccgcgactctggctttgagacagctgctttcccaactctcattcatgggaaacccaccctagctgagcttcccacctcagagcaaactg

SEQ ID NO: 903293 - DNA, 120 bp, Artificial Sequence
  ENSG00000236507_5 (sequence is synthesized)
gagagaacccatgccaagtgcttcagcagtcgcggggatgagagtcctacgcaaatatgaaatgtggcatgcagtctcacagaagaacatgttctcaccaaggattgttacagagagctg

SEQ ID NO: 903294 - DNA, 120 bp, Artificial Sequence
  ENSG00000236507_6 (sequence is synthesized)
ccttgttcaaaggtccaaaacggctttggcaaagggtatctttctttccatatttggccagaaatatgagctgacagcaaatgctatgattttgaaatacatggcatattatttttgcga

SEQ ID NO: 903295 - DNA, 120 bp, Artificial Sequence
  ENSG00000236507_7 (sequence is synthesized)
gcaggattctagctttccaagaagaagcaagttgatgggagcaagcactgaaagtggaaacaggcagaagcttgtagtgagtattttcacacagggaagatggggctggagtgttttgga

SEQ ID NO: 903296 - DNA, 120 bp, Artificial Sequence
  ENSG00000236507_8 (sequence is synthesized)
cacaatgaaagcagtaaggaagccttgagtttccatcgttggattcggacttcatggtgaaatgcaagtaggtcacttgcctaagtacaaatatgtgatctcaatgttggccaaaaaatg

SEQ ID NO: 903297 - DNA, 120 bp, Artificial Sequence
  ENSG00000236507_9 (sequence is synthesized)
ggcaaaacttccttaggaagcaagggtgagaggaatggggtctgagagctaatccagaagcccagaattcagcccaggattgcaggggcccgcaggcctttgaaaacgactggacttctc

SEQ ID NO: 903298 - DNA, 120 bp, Artificial Sequence
  ENSG00000236507_10 (sequence is synthesized)
aaggctcccaggtcctggccaggttgaaatccctgaggaccatggccgcagaagagtacaatgatgggatggcgtagggtaggtccctggcagaaaccagttgatatttgtttctttata

SEQ ID NO: 903299 - DNA, 120 bp, Artificial Sequence
  ENSG00000236507_11 (sequence is synthesized)
atgtagaatatcaagattgggagcagagattctcaagctttgctcacaccagaattccctgggcagctctgaaagatccccaagcccaggtgtcccatcagacccacggagccggaatat

SEQ ID NO: 903300 - DNA, 120 bp, Artificial Sequence
  ENSG00000236507_12 (sequence is synthesized)
ggaggggcccaggcattagacctacctttctcacccaccatgagatttcacagggataaaaacaacctgtgcatgtataagcaggttaactctcatcaggttaaatcaaacctagaggaa

SEQ ID NO: 903301 - DNA, 120 bp, Artificial Sequence
  ENSG00000236507_13 (sequence is synthesized)
gcaaatgacagacatttcctgacctccaacccccaggcacttttcttcagatgataatgagtcattgccgagcgagtggtacttcattccccactcaccttcccacagggacaccgatgc

SEQ ID NO: 903302 - DNA, 120 bp, Artificial Sequence
  ENSG00000236507_14 (sequence is synthesized)
agtcaaccctgtcctcctgtgccatgtgggtgtgaggtggggaggcagagatcacttctcccctggcctgcttctcatctgtccttatgtcctcagacacatatgaaagaccctcctgag

SEQ ID NO: 903303 - DNA, 120 bp, Artificial Sequence
  ENSG00000236507_15 (sequence is synthesized)
ccaggctgcacacagcaaattcagcagctgaaacaaggctcgaccatcaagcttaggaagcacttaatcaaacgtctacacctctgctccatgcttttcagggagcccacacgtacactg

SEQ ID NO: 903304 - DNA, 120 bp, Artificial Sequence
  ENSG00000236507_16 (sequence is synthesized)
cacaataatgggaggatgaggggtaggtagccgtttgatcacttctgtgccagaaaggaggcaccatgctttcacacagaagatccagaggaggggggacccttgtcctccaccactgcc

SEQ ID NO: 903305 - DNA, 120 bp, Artificial Sequence
  ENSG00000236507_17 (sequence is synthesized)
aatcaaagaaatgcggaggagtggagattggtgagcgctgggagtgggatttgaagctggacctgctgacgccaccccagcattccctccaccgattctcagagccaccctgcggctagt

SEQ ID NO: 903306 - DNA, 120 bp, Artificial Sequence
  ENSG00000236507_18 (sequence is synthesized)
gccctaggccctgacctctgagaaggtacttccaaaggcctgctgatctcatctgagtgaaaacatttttcaggagttcacaaactccttatctggctgggctgcctttccatagggcca

SEQ ID NO: 903307 - DNA, 120 bp, Artificial Sequence
  ENSG00000236507_19 (sequence is synthesized)
agcatgagaaaggtcaacgcttgtggtgggttttgccgtgggattaatccaaataacaaaataattgccctgcagtcacaagacctggcctctagtcaggaggctgagattcgaatcctg

SEQ ID NO: 903308 - DNA, 120 bp, Artificial Sequence
  ENSG00000236507_20 (sequence is synthesized)
attcaggacacgccagccttttaaatctcagacgactagagacagggcctgcatgtcccaaagaccttggggttgctcagaggagttagcaccctagaggaagatccttgtgagatcctc

SEQ ID NO: 903309 - DNA, 120 bp, Artificial Sequence
  ENSG00000236507_21 (sequence is synthesized)
tggcaggcctgatacctggagcctgcctccctcacaccacacacctgcactttccttcccagcatctctcctgtccctcacacccactttccagccaagcccccagcaccctactgtggc

SEQ ID NO: 903310 - DNA, 120 bp, Artificial Sequence
  ENSG00000236507_22 (sequence is synthesized)
ctggccagggctccaccgaaaccgccagctcaggcagatccttccatgtggaaacttccctttccagccctccttaacttctgagtagcagtcccaagtcccagccctagaaagtgatgt

SEQ ID NO: 903311 - DNA, 120 bp, Artificial Sequence
  ENSG00000236507_23 (sequence is synthesized)
gatgggctgctttgcactgaggtgttaatgactgacaccagagattacagttgcagaggaccacagttgtcaaacgggccatctccaattacagctgaggaaaccaaatgcccacacaca

SEQ ID NO: 903312 - DNA, 120 bp, Artificial Sequence
  ENSG00000236507_24 (sequence is synthesized)
aagagttctgtccctagtcacacatccagctggagccagaagaacctcttcaaggagctctcaaatctcaggcccccattccttccatagataagcctgccagctggtgcagcctcttta

SEQ ID NO: 903313 - DNA, 120 bp, Artificial Sequence
  ENSG00000236507_25 (sequence is synthesized)
accagcctcccacccaaatgcaaaatggtgagctgaggattctgcagcgctttttccactaaggcagggacagacaactttcccctctgcagcctccgtatcaggagatgaaaccagact

SEQ ID NO: 903314 - DNA, 120 bp, Artificial Sequence
  ENSG00000236507_26 (sequence is synthesized)
tggacctcagcatctgggttcctgataccagctggggaaacaccgtgcagaatgtacataaaaactccagaggcccagaggagctgaccctggtttcacgctgaaccccttaccaggcat

SEQ ID NO: 903315 - DNA, 120 bp, Artificial Sequence
  ENSG00000236507_27 (sequence is synthesized)
gacgcgtgtatggacctttgggggcccatctgcatgagcagcatttgctctgcaaacaacagagaagccttgcccgtttgcaagcatgtggtgcacacgtgtttgctggcaggggtgtct

SEQ ID NO: 903316 - DNA, 120 bp, Artificial Sequence
  ENSG00000236507_28 (sequence is synthesized)
gcacatggcctgctgaacaaacacatcttaagacttaaaaaaaaaaactggaaactgtcattaataatctgatttttatctttatagggctttggccccaaaggtatcaggcttccctat

SEQ ID NO: 903317 - DNA, 120 bp, Artificial Sequence
  ENSG00000236507_29 (sequence is synthesized)
tatcacatttcagtcaagctcacagcccgcacttgacatgttgtttaatcttggcacatcaaagggagggctctgctacatttgttgctattgttaccagtgcctgaatccatctgcact

SEQ ID NO: 903318 - DNA, 120 bp, Artificial Sequence
  ENSG00000236507_30 (sequence is synthesized)
tctgcactccacccagaaacctactgctccagacacaggaattccacccgcttcccacctcaaggctctcagatacttcaaagccatttccttaaataaataaataaataaataaatgaa

SEQ ID NO: 903319 - DNA, 120 bp, Artificial Sequence
  ENSG00000226822_0 (sequence is synthesized)
aggaaatgagtaggcagcaggctgaagagggtgaaaaaaaacagggcaagagcaacccctccactgaaatgcactgggaagggggacttagatactaacacaagttcaattcaagaagca

SEQ ID NO: 903320 - DNA, 120 bp, Artificial Sequence
  ENSG00000226822_1 (sequence is synthesized)
tttattgaaccgtcctcatgagccaggtcagggtgttcagcactgagcgtgtcaagacgaagacacatagcctctaagtgtccaccatctacaatagctaatgtttaattgtccttaaaa

SEQ ID NO: 903321 - DNA, 120 bp, Artificial Sequence
  ENSG00000226822_2 (sequence is synthesized)
gttgaagaatgttgactggattgtctgcaaatcagtcatgtgagtagtgttaatctaatgaagaagaatcttaaaagacaaattctccaaatgctgctgctcctgcatcctgctgctcta

SEQ ID NO: 903322 - DNA, 120 bp, Artificial Sequence
  ENSG00000226822_3 (sequence is synthesized)
cctgctgtggggaggagtgaccactccctgatatgctgcagatgcaattgagtagcagcttcattccacatttctccaacatctttcatggtgaggtcaagagcatattcaaaaccatgt

SEQ ID NO: 903323 - DNA, 120 bp, Artificial Sequence
  ENSG00000226822_4 (sequence is synthesized)
gtggctcagtccaactggagagaccaagtcaaagagcctcatttccataaggtagaatcttgtccatacctcttcactcacaacacagaccaatcttgcagaagccaggaggttctgagt

SEQ ID NO: 903324 - DNA, 120 bp, Artificial Sequence
  ENSG00000226822_5 (sequence is synthesized)
aaggtctgcataaagaaataataccatagtttccaattggccagtttcgttctctaaccaaacagctgctgcctgcttactgagtgtgcatgcccacgcacactcacactgactgtaact

SEQ ID NO: 903325 - DNA, 120 bp, Artificial Sequence
  ENSG00000226822_6 (sequence is synthesized)
caccatcagctgtaaccaggcagttctctcaagccatctgcagctgggcaaaaacctagaatgattaagtcattgatagaacaccactttcctaaaaatggcaatacttaaatacatcta

SEQ ID NO: 903326 - DNA, 120 bp, Artificial Sequence
  ENSG00000226822_7 (sequence is synthesized)
atcaagttgcctaattattttaaatatattccaaatgaacaaaaacacattataactccaaatcaccatgttaccaccaccatggcgtggaaccttcctgtccactccagaaggcagttt

SEQ ID NO: 903327 - DNA, 120 bp, Artificial Sequence
  ENSG00000226822_8 (sequence is synthesized)
tgtgccctcctgggcacctgtgtcgcagcctagagacacttagacatccaccgggatagtcccagggctcagctgtgttgtttccatgtctcagtgatcacttttctttgttgcctgatg

SEQ ID NO: 903328 - DNA, 120 bp, Artificial Sequence
  ENSG00000226822_9 (sequence is synthesized)
tctcaacattttgaaaactgctgtttcacatattttgtctggttttctagttgcttcagacaggagttaactacagtccttattactttgtctttcctgaaagcagaagtcttttaacta

SEQ ID NO: 903329 - DNA, 120 bp, Artificial Sequence
  ENSG00000226822_10 (sequence is synthesized)
aagaagggtagatattaaatgtatcatctttagaatttgatgagaaagtaaaattgcttcctcactgtcctcaccggattcacagggggaaatgattcagaggcttttgcctttacctcc

SEQ ID NO: 903330 - DNA, 120 bp, Artificial Sequence
  ENSG00000226822_11 (sequence is synthesized)
tagagcatgttcttgcaactgttgggctagtcttatctggccaaactctgttactaacagaatgtctagttattttgcaggcacagagttaagaagtggcaagttaacacagccagagca

SEQ ID NO: 903331 - DNA, 120 bp, Artificial Sequence
  ENSG00000226822_12 (sequence is synthesized)
tgcacagaagaaaacttcgacctcaaataacacctagaaccaaagtccctaccgcagaactaaaagattgggatgtggctggaactcaagcacctaaacactttcaaaaggctttgcctt

SEQ ID NO: 903332 - DNA, 120 bp, Artificial Sequence
  ENSG00000226822_13 (sequence is synthesized)
ccagtgtctacttggccttccagtgtcagacagcttcttgcacctgacccactcagctgaggacacagatgtcaaaaaaaaaatcataaatacagaattccagaaaattttaccaatatg

SEQ ID NO: 903333 - DNA, 120 bp, Artificial Sequence
  ENSG00000226822_14 (sequence is synthesized)
atactgagtagcaggagtgtctgttatgatgatgaggggactcttggtaggcacctagatagcttcaggatgggggctggtcaccagagagaccaatcatgtgattagaggattgggact

SEQ ID NO: 903334 - DNA, 120 bp, Artificial Sequence
  ENSG00000226822_15 (sequence is synthesized)
ttgggcccactggacctccaggaaaagtagatgtgctagaaattaagttcaatcacatggccagtgatttaatcaaggacatctaagtaatgaatccccagtgaaaaccctggacccaag

SEQ ID NO: 903335 - DNA, 120 bp, Artificial Sequence
  ENSG00000226822_16 (sequence is synthesized)
cttggaggggtttcctggttggtgaacacgttgatgagccgggggatgatacaccaggatttcatgaggggaggacatagaaacttagcgttggcccccactcaagaccttgccctgtgc

SEQ ID NO: 903336 - DNA, 120 bp, Artificial Sequence
  ENSG00000226822_17 (sequence is synthesized)
ttgggaattagtgttaaacaagacacaaaatgtgtgctctcaggaagatcatatgccagtgcagagagatgataaacacgaaatccaataaatacacagtttgtgccatgaagaaaataa

SEQ ID NO: 903337 - DNA, 120 bp, Artificial Sequence
  ENSG00000226822_18 (sequence is synthesized)
ctttatagatttttaaaaattattggtccagtaacaggtctgaaatttaacccttctcctgcttttgaagcattttttaggtaagtagttttcatgctttgatgtatatcatcagaatta

SEQ ID NO: 903338 - DNA, 120 bp, Artificial Sequence
  ENSG00000226822_19 (sequence is synthesized)
cctgggtggtggatctggaaatgtgtatttttaaagttggtgtttttattaatagactttattttttagaacagttttagacttacagaaaattaaggcaataatacagaaggttatcca

SEQ ID NO: 903339 - DNA, 120 bp, Artificial Sequence
  ENSG00000226822_20 (sequence is synthesized)
agtatggtacctttgttgcaattaaggaaccgatattaatatattattattaacaaaaggcaatagtttacttcaatttccttagattttacctaatgccttttttctgttctagaatcc

SEQ ID NO: 903340 - DNA, 120 bp, Artificial Sequence
  ENSG00000226822_21 (sequence is synthesized)
aattcaggatcccatattgtgtgtttagttaatatgtctccttatgctgctcttggctgtgaccatttctcagacttcccttgtttttggtgatcttgacagttttaaggagtactgtaa

SEQ ID NO: 903341 - DNA, 120 bp, Artificial Sequence
  ENSG00000226822_22 (sequence is synthesized)
tattcaagtgttttgtagaattgccctatattggaatttgtctgatgtattagtctcgagttatgagtttggggaaggaggatcacagaggtaaagaaccactgtcatcatagtctataa

SEQ ID NO: 903342 - DNA, 120 bp, Artificial Sequence
  ENSG00000226822_23 (sequence is synthesized)
agggtacatgttgtcacatgacttatgggtgtggttgaccttgagcatttggcttcagtagtattagacagatttctacgtcgtaacgttactctttcatttccccttttcataacgtat

SEQ ID NO: 903343 - DNA, 120 bp, Artificial Sequence
  ENSG00000226822_24 (sequence is synthesized)
tcattggaaggaagtcactatatgcagcccacacctaaggaatggggagttatgctccccctccattaggatgtaatctacataatttggagttttcctgcataggagatttatctcctc

SEQ ID NO: 903344 - DNA, 120 bp, Artificial Sequence
  ENSG00000226822_25 (sequence is synthesized)
tctataatttattgctttattcaataatttctttatgtcagtatggactcatagatatttattttatactttgggttatactctaaagtgactttatttatgttgtttctcaaaatatgc

SEQ ID NO: 903345 - DNA, 120 bp, Artificial Sequence
  ENSG00000226822_26 (sequence is synthesized)
tgactttatttatgttgtttctcaaaatatgctagctttggccagtgggagctctttcagttagctcatgtacacttttgacgtaccccatctgtgtgtgtgtgtgtgtgtgtctgtgtg

SEQ ID NO: 903346 - DNA, 120 bp, Artificial Sequence
  ENSG00000226822_27 (sequence is synthesized)
tggcactacaaaatgctctacagtcatttcatgtagtcactgccccagtcctagaatcaaccatttctccaaatagccctggcgccttttattgaagaatagtataagaaaccaagattt

SEQ ID NO: 903347 - DNA, 120 bp, Artificial Sequence
  ENSG00000226822_28 (sequence is synthesized)
gagtgcttggtgtgctccttactactggatgtcatttcttttacaccttgtcagctcacagagcaaagaaatacatgtgcatataagaagctgtgtgtgtaaatatacagcttggaaaca

SEQ ID NO: 903348 - DNA, 120 bp, Artificial Sequence
  ENSG00000226822_29 (sequence is synthesized)
cctgtatctactttaagttaaacatgagttcttaccgatgtcatcaactctactccattaccacatggatcattctctcacttacctatcatctcccactcaaacagtaaggaacctggc

SEQ ID NO: 903349 - DNA, 120 bp, Artificial Sequence
  ENSG00000226822_30 (sequence is synthesized)
tagacctctctccttgaagacaaagtgttgatatcaactccaccttcaagtctctcaagcagaactagatgctgtttcttcaatgtttccacatcttcttgttcacatgtgtctaagaca

SEQ ID NO: 903350 - DNA, 120 bp, Artificial Sequence
  ENSG00000226822_31 (sequence is synthesized)
cttgcgtactacattgtaagccatttttactatgaagaagattgtaagctcaattacgggctttactgcgctgataacgaacacagatatgagacaagcagacttgagctcctgcctcga

SEQ ID NO: 903351 - DNA, 120 bp, Artificial Sequence
  ENSG00000236501_0 (sequence is synthesized)
agccatttctgccttgtgccactggacagatgattcctgcatttgatggaatctccctctgtcatcccggctggagtgcaatggtgcgttcttggctcactgcaacctctatctcgcagg

SEQ ID NO: 903352 - DNA, 120 bp, Artificial Sequence
  ENSG00000236501_1 (sequence is synthesized)
ctcaagtaatcctcccacttcagcctattgagtaactgggaccacaggtgcacaccatcatgccaggagaaacaaatgccaaacagtgaaggtcaagaaggccatagtgatatatgcaag

SEQ ID NO: 903353 - DNA, 120 bp, Artificial Sequence
  ENSG00000236501_2 (sequence is synthesized)
cctgaaaatatcatccacctgtgtctctgagcatactttggctttgactcctagtgatattacatgtaatgtcatggctagatatttcaatttcagaaacaaatgattccactgaatagt

SEQ ID NO: 903354 - DNA, 120 bp, Artificial Sequence
  ENSG00000236501_3 (sequence is synthesized)
aagacatttgccaactggacaataattcataaggagagggttcagaaactgtaagttttattatgaaaaggtaaggaaatccaaccctagatggaggtaacttggaaagaatgattggtt

SEQ ID NO: 903355 - DNA, 120 bp, Artificial Sequence
  ENSG00000236501_4 (sequence is synthesized)
tccatcagcataatgggggaatcattgcagtgtggccagagaggagcagacgagattatagatgaaagtagagaaaaacggtgggcaggggcagggagaggaaaggccagacaaatgcaa

SEQ ID NO: 903356 - DNA, 120 bp, Artificial Sequence
  ENSG00000236501_5 (sequence is synthesized)
tcatttctccaaaggatttgagaagagatcatttatttgaaatattcctgccatgttgatggagcagctcaatcttttgccagtgaatctttagcgttttgtttttcatttgtagatatg

SEQ ID NO: 903357 - DNA, 120 bp, Artificial Sequence
  ENSG00000236501_6 (sequence is synthesized)
gttgaacatatacttaggacacgtaataactatggaacttcatcacaaacacagcactgaggacatgttttggaaaatccccactgaatgaatttttttgaaaaagtaaatgtatcctgg

SEQ ID NO: 903358 - DNA, 120 bp, Artificial Sequence
  ENSG00000236501_7 (sequence is synthesized)
gaacatgccgttcaggattttggaaaaggaacttcaaacgaaattgaaggagacatgcatacaaggagaatgccaggtgaacgtgaagaccatcatttgcaagccaagagaggcctggag

SEQ ID NO: 903359 - DNA, 120 bp, Artificial Sequence
  ENSG00000236501_8 (sequence is synthesized)
cagatccttcagagccctcagaagggaccaaccctgctggcaccttgattttggacttccagcctccagaactaagaacttgatgtatacctcctgacctgttcatcttgtagctgcctc

SEQ ID NO: 903360 - DNA, 120 bp, Artificial Sequence
  ENSG00000236501_9 (sequence is synthesized)
ttgacagatataagaggccgccctgtagaggaggaaggaggaagttggctgtgattgaccttgctaggtcatcttcctaatctttgtcctttcctgcaccccaaatggaagataaaaggc

SEQ ID NO: 903361 - DNA, 120 bp, Artificial Sequence
  ENSG00000236501_10 (sequence is synthesized)
agatgattgattgttaacctatgtggtccaaccaaatgtcttaggggttattgataattaaaatggacaatagcgattttccatttcttctggccttgggtgctggcatgtggaagtggt

SEQ ID NO: 903362 - DNA, 120 bp, Artificial Sequence
  ENSG00000236501_11 (sequence is synthesized)
attgatactcatgaccaaataggcacttatcgatttcagttttcataagttgcctaccaaatgcaaactagtaacccagacgtgggagacctaatattccattgttaatctttaggtcca

SEQ ID NO: 903363 - DNA, 120 bp, Artificial Sequence
  ENSG00000236501_12 (sequence is synthesized)
taatttttatttcctctacttgcctcttcttccttcctctgcataatgagttgggcttatataattgcacccatttactcactcattcgttcaatcaattatttgttcctattttatgcc

SEQ ID NO: 903364 - DNA, 120 bp, Artificial Sequence
  ENSG00000236501_13 (sequence is synthesized)
aagtaatgaacagaaggtgttggggatgcaaaacccaactaattggaatttctatgttacaggagcttatgctttagtgaaattatagacaaattattatacagttttaatccagaatag

SEQ ID NO: 903365 - DNA, 120 bp, Artificial Sequence
  ENSG00000236501_14 (sequence is synthesized)
taagtgctatgggagcatgcacagaggaaacaacccaatcttaaggaatcaggaaggtttgcagaggactgacaggaaaagtgggcaggtgaagaagatgggcagtgagaggaggagtgg

SEQ ID NO: 903366 - DNA, 120 bp, Artificial Sequence
  ENSG00000236501_15 (sequence is synthesized)
aagcacttttgctagggaaaaacatgaataaaagggataattttctgctcttacccctgggtgatctttgcgtggtactgtccatcacagttgggagagacggctcctcagagctgctcc

SEQ ID NO: 903367 - DNA, 120 bp, Artificial Sequence
  ENSG00000236501_16 (sequence is synthesized)
acactgttcacagaggatgccattccaaggaaactggggaatagggaaagtctttagcttattcctctttgaggtttgtttgagatgcagtttcttcaatattttgagtctatgaaaaca

SEQ ID NO: 903368 - DNA, 120 bp, Artificial Sequence
  ENSG00000236501_17 (sequence is synthesized)
gctctcatttctggcaggcaattgagcactctgcttcatatgcaaaatcgagggtacattctgatgtagatttcagatagcgggaaatgaaggtattttgtttttcttttaaattgcatt

SEQ ID NO: 903369 - DNA, 120 bp, Artificial Sequence
  ENSG00000236501_18 (sequence is synthesized)
gggcaatttcctttcttatatgaaacgctgtaggctttgtacaattattttatacgttattaccattcttctaaaaagggacagcttttttctttccaatttaaagtagtggataatgac

SEQ ID NO: 903370 - DNA, 120 bp, Artificial Sequence
  ENSG00000236501_19 (sequence is synthesized)
tttggcagcattttcctgcctttttcaagtttatggaacccattcctcatcattaggctgaagatgcagataagaaaggacgagcctttttctggagcttgtcacatcaatgttgcttct

SEQ ID NO: 903371 - DNA, 120 bp, Artificial Sequence
  ENSG00000236501_20 (sequence is synthesized)
gtataactctaaagggcataactaggactaacaagtcaaagctttcaggaagaaaatttctatataatgtgcagaaatttcaaacagttgatcagttgcttttgttattattgttagaga

SEQ ID NO: 903372 - DNA, 120 bp, Artificial Sequence
  ENSG00000236501_21 (sequence is synthesized)
caggatctcactatgttgcccaggcttgattctaacctcccccactgccaaccccccggctcaagcaatcctactgccttagcctcttgagtagctgggactacgggcacacacacacac

SEQ ID NO: 903373 - DNA, 120 bp, Artificial Sequence
  ENSG00000236501_22 (sequence is synthesized)
accactgcaccaggtaaatttctaacaactcaaagtgttataaaggaataggtcgcctagtagcatggtcagcggtgtctgtaagacttctcgtcagtcaggctgcggtatgggattgaa

SEQ ID NO: 903374 - DNA, 120 bp, Artificial Sequence
  ENSG00000236501_23 (sequence is synthesized)
gtggaagatcactaagaaatggagggaatgaatttcagaatgggtggggggtttcagggtgttgggtcaatagctgtcttatcaatggagctgagaatgaaaacctaggaaaagtgacac

SEQ ID NO: 903375 - DNA, 120 bp, Artificial Sequence
  ENSG00000236501_24 (sequence is synthesized)
tggctctagaagggaactgggccatctgccttatagaccatctgctaatttgttgctcatttattggtgaaacttgggaaggtaatggatatgtatgagctctctcagaacttgccttgt

SEQ ID NO: 903376 - DNA, 120 bp, Artificial Sequence
  ENSG00000236501_25 (sequence is synthesized)
tgcctaatggatatctttgacttttccaactccaagtatctgtaaaagttcctaatttcctcatagacttgtaaaaccactcaaacccaccaggcccttattctgtttccaagatcacct

SEQ ID NO: 903377 - DNA, 120 bp, Artificial Sequence
  ENSG00000236501_26 (sequence is synthesized)
ttcaggtgtcaccgtgttgacaagttatttggagctctattgaccttgtctcattattggaacttttctaatatcttgaatgcagatggaaggaaaggagacaataacaacaaaaaataa

SEQ ID NO: 903378 - DNA, 120 bp, Artificial Sequence
  ENSG00000236501_27 (sequence is synthesized)
aactgcaacagcatgatttattatagtatatatttctcagaagagacaaaaacagcatcaatgaagagcaatcatagaaggttcacagttgcctcagaaccaattcaacaattcataggg

SEQ ID NO: 903379 - DNA, 120 bp, Artificial Sequence
  ENSG00000236501_28 (sequence is synthesized)
ggttggcatcacataaacagctgggaaaaagcagttaaatgattttctacatgctcttagggagagactgtgtctaatctgatgcagttgctccaaaggagcgcagctaatgacatctac

SEQ ID NO: 903380 - DNA, 120 bp, Artificial Sequence
  ENSG00000236501_29 (sequence is synthesized)
cacgtaataactatggaacttcatcacaaacacagcactgaggacatgttatattttgctgctaaaattagttggagttgggaggaggagcactggggcataaccgtcagcagctgcagc

SEQ ID NO: 903381 - DNA, 120 bp, Artificial Sequence
  ENSG00000236501_30 (sequence is synthesized)
ttggagaagctggttctcttgtcttcaagaaggcagatctctccctagcctgctgagccttctgtgttttggggaagaagaacttgatgtatacctcctgacctgttcatcttgtagctg

SEQ ID NO: 903382 - DNA, 120 bp, Artificial Sequence
  ENSG00000236501_31 (sequence is synthesized)
gagacttaaagacgagcaggcagacaggcatccatccagctgcagttcatagccgatgcccccgacaagtagcaggctggcgactgagaagctccccagaagctacctttaatgcccaaa

SEQ ID NO: 903383 - DNA, 120 bp, Artificial Sequence
  ENSG00000236501_32 (sequence is synthesized)
cctgacctgttcatcttgtagctgcctcttgacagcacatgttggcacctttagaaagatctagaaatccacgtgttgtacgtaaatctggggctgttgttactgcagatgtaccttcca

SEQ ID NO: 903384 - DNA, 120 bp, Artificial Sequence
  ENSG00000236501_33 (sequence is synthesized)
caacttgattttctgtgatgtcaattattcaggttatacaaaaaggaactttggacacagagacagacatgcatggaaggaagatggcatgaacacacacggaaagcacagccatatgga

SEQ ID NO: 903385 - DNA, 120 bp, Artificial Sequence
  ENSG00000236501_34 (sequence is synthesized)
aatggagacagagattggaactgtactgccacaagccgaggaatgcctggagccaccagaagctaggagagaggcatggaataaattctccttcataatccttagaaggaaccaactctg

SEQ ID NO: 903386 - DNA, 120 bp, Artificial Sequence
  ENSG00000236501_35 (sequence is synthesized)
cttgcatcaaacctaggaactttcgatgtttacaccaatccttcactggttatttgagaaacaaattttccgagcttctaaaatgccctgaactctattctccactctatttcctctgca

SEQ ID NO: 903387 - DNA, 120 bp, Artificial Sequence
  ENSG00000236501_36 (sequence is synthesized)
cagctgtggatgtatgacaggtaaatatagtccctgttgggaagattctcacttgttcagaaaggttgaactgtgtaagtgaagtgaattgcacgtgaattgtgacgtagattacttcac

SEQ ID NO: 903388 - DNA, 120 bp, Artificial Sequence
  ENSG00000236501_37 (sequence is synthesized)
gtcatgaccggtaaaaccttagacctgaagaatctcccagatgaaggaatattgacagatcttatatatggggagtgtgttgctgtaataaccaattcaaagcagaatattgcttttctc

SEQ ID NO: 903389 - DNA, 120 bp, Artificial Sequence
  ENSG00000236501_38 (sequence is synthesized)
caaagaagattcaaagagggagtcaataacattaaccttcacatcagctagtccaagatgaaatactagctcagacatcgactaatcaagaatgtcttgtcccttgtgttcttgtgttga

SEQ ID NO: 903390 - DNA, 120 bp, Artificial Sequence
  ENSG00000236501_39 (sequence is synthesized)
gaaataacttagttcagtatctttaagatttattcaccttgtatttgcactgatcacatacattgaactgcaaactggagccaagaactgtatttctgaagctgagctggtgatagacag

SEQ ID NO: 903391 - DNA, 120 bp, Artificial Sequence
  ENSG00000236501_40 (sequence is synthesized)
gatggatggagggagctgcagtcactgaaccactgcagggagagaagtactcacagaccaggaacgctcaacttggactgttatgtgacagagtaataataaacttctattttggtttga

SEQ ID NO: 903392 - DNA, 120 bp, Artificial Sequence
  ENSG00000236501_41 (sequence is synthesized)
gtaatgttgtgttttgggtttatctgtttctgcaatctagcttactaccttaatgaatataagctttctttccattaaaaaatttattaatgtataaatcacataccatacagttcactc

SEQ ID NO: 903393 - DNA, 120 bp, Artificial Sequence
  ENSG00000236501_42 (sequence is synthesized)
aaagtgtactatttaatggcttttgatctatttcattgttaatttttagaaattatgttaaagtatatataacacacaattttttattttaactatttttagatgtacaattcagtggca

SEQ ID NO: 903394 - DNA, 120 bp, Artificial Sequence
  ENSG00000236501_43 (sequence is synthesized)
ggcattaattacagtcacaatgttggacaaccatcaccacaatttccaaaatttttcttagatgaaaattctgaaaccattatgcaataacttcccattacccactccttccagctcctg

SEQ ID NO: 903395 - DNA, 120 bp, Artificial Sequence
  ENSG00000236501_44 (sequence is synthesized)
gaaatctttaatttactttctgtctctataaattcaactattttagatatttcatgtaagtggaatcatgcaatatttgtccttttgggcttggcttattttacttagtataatggtttt

SEQ ID NO: 903396 - DNA, 120 bp, Artificial Sequence
  ENSG00000236501_45 (sequence is synthesized)
ttattattgtctctctctctgtccatatatatatatacacatatatatgggttatttccaacttttggctattatgaataatgctgcagtgaacattgccctacaaatatgtgtttcagt

SEQ ID NO: 903397 - DNA, 120 bp, Artificial Sequence
  ENSG00000236501_46 (sequence is synthesized)
ccctgctttcagttcccttgtgtatataactaggagtggaattgctggttcatatgataattctatgtttagctttttgaggaaaaatgttctgttaaatttttttttttttttttgaga

SEQ ID NO: 903398 - DNA, 120 bp, Artificial Sequence
  ENSG00000236501_47 (sequence is synthesized)
acaggcgtgagccaccgtgcccagcctctgtcaaatatttctatagctgctgcatcattttacatttctaccagcaatgtgtgagggttccaatttcaccacatccttgttaacattgtt

SEQ ID NO: 903399 - DNA, 120 bp, Artificial Sequence
  ENSG00000236501_48 (sequence is synthesized)
gttaacattgttattttcggtttttaaaactgtagccattctagtagatgtgtagccattctagtagatgtgaagtggcatatcactgtccttttgattgaatttccctgatgactaatg

SEQ ID NO: 903400 - DNA, 120 bp, Artificial Sequence
  ENSG00000236501_49 (sequence is synthesized)
atgttgcgcatctgcttattttgttttcaaattgtcattttattttttatgttgttggttgttggaaatatagttagtgatttttcatatgtttattggccatttgtatatgtttgaaga

SEQ ID NO: 903401 - DNA, 120 bp, Artificial Sequence
  ENSG00000236501_50 (sequence is synthesized)
aatgtctattcaagtcctttgcgccatcccccctttttttgtttctgagatgggctcacactctgtcactcaggctggaggacagtggcaccatcacggctcactgtagcctcagcctcc

SEQ ID NO: 903402 - DNA, 120 bp, Artificial Sequence
  ENSG00000236502_0 (sequence is synthesized)
gagagcggcccggtgcgcgcgcgcagagagagaacccgagacagagagggagagggagagggagagaggagagggagagccaaccaccgccgagtcaagattcagcgattccaccgcaat

SEQ ID NO: 903403 - DNA, 120 bp, Artificial Sequence
  ENSG00000236502_1 (sequence is synthesized)
cgccctaatgacaacagcctcataatatctcccctaaatccacaaattcagctgcctctctgaggagtggtggaggagctgcgggagccgagaagcccaagagccctctggacccagaaa

SEQ ID NO: 903404 - DNA, 120 bp, Artificial Sequence
  ENSG00000236502_2 (sequence is synthesized)
agtcctacagatgcccactcctcaccacacaacagaaggagctctggtcctgcctgccagccccagagggcactcaaactttggaggccagccacccggatgaagtgaataaggcctgaa

SEQ ID NO: 903405 - DNA, 120 bp, Artificial Sequence
  ENSG00000236502_3 (sequence is synthesized)
gcttgtttgctcgtattgtaaaataataataattaccattattatttttaaactgtctaatttctctagggaaagtaacatcgaaagcctaaaacagacgccaaaaggcccatagaacac

SEQ ID NO: 903406 - DNA, 120 bp, Artificial Sequence
  ENSG00000236502_4 (sequence is synthesized)
agagggccctctctgcctctggccaccacagcccctaggccaggcatgggtatttattcttaggtatgttgcttttaagaagctgtaatcagcatcttgagccgggcctccctttgtgag

SEQ ID NO: 903407 - DNA, 120 bp, Artificial Sequence
  ENSG00000236502_5 (sequence is synthesized)
gcttctgtaactatggaagtgtgatttacgcagatttgtcggggtcagagacgtctttccctgagcactgtgtatatttagacaggactcggtttggtgttaaaaagtgtatatgttgaa

SEQ ID NO: 903408 - DNA, 120 bp, Artificial Sequence
  ENSG00000236502_6 (sequence is synthesized)
tggattcacacacagtagccaacaatgaccacattgtcggcccgtgtacaacgcgtattgaaacgcagcgcccagacttcaactaatctgccctcaataaagctgaaataattatcctaa

SEQ ID NO: 903409 - DNA, 120 bp, Artificial Sequence
  ENSG00000236502_7 (sequence is synthesized)
tgcaactcttaatctcgctacctccccctcctctcttctctcttctccctctctctcctcttttctctaccgctgtctctgagacttcttcttccctttttcctaaagaagttgatccag

SEQ ID NO: 903410 - DNA, 120 bp, Artificial Sequence
  ENSG00000236502_8 (sequence is synthesized)
aaattcgaaaagccctgggcagagttgttgaatgggatgtgcaattagagaggggattttgttgggaggcaagagggtcccccaggctccacatagtccaggtcggcaggcaaggaaaga

SEQ ID NO: 903411 - DNA, 120 bp, Artificial Sequence
  ENSG00000239335_0 (sequence is synthesized)
tttgcacttccgtcttccgggcggaggccacccggggcggacgcattgcacgccgggagacaaaatgtctcaagaagccttgagaggcgggattttggaacccgggcgctgacgagcttc

SEQ ID NO: 903412 - DNA, 120 bp, Artificial Sequence
  ENSG00000239335_1 (sequence is synthesized)
cgccattggtgtgatcgcggacctagaaacttggtccgtcccatacaggtgtagaagtcggatttggagaatgctgacgggtgtccggtcaaggttaggccccagcctgccgagtgcctg

SEQ ID NO: 903413 - DNA, 120 bp, Artificial Sequence
  ENSG00000283948_0 (sequence is synthesized)
gaagtcctgtgtgaaatttactgatagagtcaggggggaaaaattgtacagcccagtggttcactgagactctcatgcaaagcctctgatttcacctttactggctacagcatgagcttg

SEQ ID NO: 903414 - DNA, 120 bp, Artificial Sequence
  ENSG00000283948_1 (sequence is synthesized)
tcagagttactctccatgagtacaaataaattaacagtcccaagtgacaccttttcatgtgcagtctaccttaaagggaccaaactgaaagtcaaggacaaggccttgtaatactgtgag

SEQ ID NO: 903415 - DNA, 120 bp, Artificial Sequence
  ENSG00000269961_0 (sequence is synthesized)
cctcataccggcggggagacaaagctggcgctgggagtgggaaaagggcccgcgaaatggcctcaagatcgtgcctttgttagaagaaacatgggtacgctccgatgcgacgcaggcttc

SEQ ID NO: 903416 - DNA, 120 bp, Artificial Sequence
  ENSG00000269961_1 (sequence is synthesized)
caaccccagcggttcggtggtggtgcagtcgttgaattgcgctggccctaataattcagcctggcagggttcgcgtttattgcggagagagactcttaagcattctgtcaacacatatgg

SEQ ID NO: 903417 - DNA, 120 bp, Artificial Sequence
  ENSG00000269961_2 (sequence is synthesized)
gcacagtttttgcagttcttgctttaaatatgttcacagaaaagacggccttgttttacccagagaaggagcgtaatgcggagcgaaccattcgtcacccccattctctgctgcacttaa

SEQ ID NO: 903418 - DNA, 120 bp, Artificial Sequence
  ENSG00000269961_3 (sequence is synthesized)
ctgtgtacagtgatgataattagcctctgggtccctgaagtccctggttcagttcttccgtctgtattctagagataattatttattaccaagtttgaataaagagctatatcccctaca

SEQ ID NO: 903419 - DNA, 120 bp, Artificial Sequence
  ENSG00000269968_0 (sequence is synthesized)
ggttgagcacagggtactttattgatggtacatgacaaggtgcggctccctaggcccctcccctcttcaaggggtctacatggcaactgtgaggaggggagattcagtgtggtgggggac

SEQ ID NO: 903420 - DNA, 120 bp, Artificial Sequence
  ENSG00000269968_1 (sequence is synthesized)
gctggtggtccaggggtcttactccttggaggccatgtgggccatgagcttgacaaagtggtcgttgagggcaatgccagccccagcgtcaaaggtggaggagtgggtgtcgctgttgaa

SEQ ID NO: 903421 - DNA, 120 bp, Artificial Sequence
  ENSG00000269968_2 (sequence is synthesized)
gtcagaggagaccacctggtgctcagtgtagcccaggatgcccttgagggggccctccgacgcctgcttcaccaccttcttgatgtcatcatatttggcaggtttttctagacggcaggt

SEQ ID NO: 903422 - DNA, 120 bp, Artificial Sequence
  ENSG00000185065_0 (sequence is synthesized)
ccggggtcgcagggtaaatccggggcgagacctggcgcgaagcctacgcgaccaccgcgacgacagcgccattcaccccgggccaggcgggcatcctgggccgcgcagctaccttacgtc

SEQ ID NO: 903423 - DNA, 120 bp, Artificial Sequence
  ENSG00000185065_1 (sequence is synthesized)
agccgcctctcaaatcacacggctctggccagttcttttcagcagctttatgagattttctcaaatctcaacaatccggtatattttcaaaagtacatactgagcatcaaggtggtgcag

SEQ ID NO: 903424 - DNA, 120 bp, Artificial Sequence
  ENSG00000185065_2 (sequence is synthesized)
cgaacctcccagatctgcagctccagcagtcttgcttgagcgtccactcaggatggaggtgaactcgcaaagtaactgagattggttgggcatgacatatggtggatctagggttgaatg

SEQ ID NO: 903425 - DNA, 120 bp, Artificial Sequence
  ENSG00000185065_3 (sequence is synthesized)
acctccccagggaacgcaggcttgaagtggaggctgagaatgcaatccgagtacagccataggccggtcaaagggtcttgctgtgtcacccaggcttagtgcagtggcgtggcgtgttca

SEQ ID NO: 903426 - DNA, 120 bp, Artificial Sequence
  ENSG00000185065_4 (sequence is synthesized)
gcagtggcgtggcgtgttcatggcttactgcaacctcaaactcctggactccgaacagctgggaccaaaagcatgcacagcctcaccaggctaatttttaattttttttttttttttttg

SEQ ID NO: 903427 - DNA, 90 bp, Artificial Sequence
  ENSG00000185065_5 (sequence is synthesized)
gagcgccagtgcctggctgggacgtttataaaaaggagcaatgcacaagaggcaacaaaggcaagtaaagaggaggctggtgggcttgca

SEQ ID NO: 903428 - DNA, 120 bp, Artificial Sequence
  ENSG00000185065_6 (sequence is synthesized)
ggcaacaaaggcaagtaaagaggaggctggtgggcttgcagaaacgccctgcagtacctatgctgcggttctcccacttcactgataacaaatcctcagtatccactgatacaaatcctg

SEQ ID NO: 903429 - DNA, 120 bp, Artificial Sequence
  ENSG00000185065_7 (sequence is synthesized)
ggactgctgggccagtcccaggaatgacactgggacagactccctggaggtggatcagaaagctgcagttttaccaggggtcctgctgttgaggcagccggctcaaggaccaagcccaaa

SEQ ID NO: 903430 - DNA, 120 bp, Artificial Sequence
  ENSG00000185065_8 (sequence is synthesized)
gctccaactggccccactgtgtcattaaaaggctctgcaatggaatccatcctggtccaggcaggggagtgtgcctccagcaaaggaccaggcgtttcactgcatacacagcaggtgttg

SEQ ID NO: 903431 - DNA, 120 bp, Artificial Sequence
  ENSG00000185065_9 (sequence is synthesized)
cttagtgaagacaaaaacccagagccagaggtactgtaacattcttcattatgcataaagtgacagtctgttagctgatgtgatcctgcaaatgaaggctgtctacccaccaagggtttc

SEQ ID NO: 903432 - DNA, 120 bp, Artificial Sequence
  ENSG00000185065_10 (sequence is synthesized)
tccctctgctagtaaaactgagactttgtcagtggaggctcaggtaagtccccacagtgctcatgccttccaaaaccacgcccatttccagtgatgatggtttgtgccacaggccaagta

SEQ ID NO: 903433 - DNA, 120 bp, Artificial Sequence
  ENSG00000185065_11 (sequence is synthesized)
ctgaacatcatgacactcatagacactcttcactgaagacgtggatagaccctggggccaccattctctcctctctggagtgttggaggggccctgaccagggcaggacccccatgtctg

SEQ ID NO: 903434 - DNA, 120 bp, Artificial Sequence
  ENSG00000185065_12 (sequence is synthesized)
gaagcagggttagccctggctcatgggggaccctgctgggcttagccattgccacctagggatcaggcagccttgtttcttcctactttctccaggagaagccccagagggacacttttc

SEQ ID NO: 903435 - DNA, 120 bp, Artificial Sequence
  ENSG00000185065_13 (sequence is synthesized)
taatggtgagatggaacacggagcacctgccaacaggccttcagttatggtcagaggcccaaccaccagtctgtgttagtacctaatcaaacatttagatttaggctttagttattgcct

SEQ ID NO: 903436 - DNA, 120 bp, Artificial Sequence
  ENSG00000185065_14 (sequence is synthesized)
gtttttacttgaaattcttggcttagaattattcccaatggggccaggcacagtggctcatgggaacaaatttaaaataatcagattagcatgtcaaaagatctcacgttatagaaagtg

SEQ ID NO: 903437 - DNA, 120 bp, Artificial Sequence
  ENSG00000185065_15 (sequence is synthesized)
aagatctaagaccaaataaatactgataaaaaatacaggccagcagaagcttggatgatttaataaattaaaattgggagttggggagtagggaagaaggagaggaacatctctttagca

SEQ ID NO: 903438 - DNA, 120 bp, Artificial Sequence
  ENSG00000185065_16 (sequence is synthesized)
tttgttcattctaacattcacatgtttgcttctccatggagttgtttcactatgaacaggttcactaaggagccagttatgtccatatgaaatgagaataaaagtgcaaactcattcaga

SEQ ID NO: 903439 - DNA, 120 bp, Artificial Sequence
  ENSG00000238063_0 (sequence is synthesized)
ggcattgtggcgccatccatgactgacactaaacattctagaagtatttctgttttcatgcagatacacacagcacagctagtttcaaaattaaaccacaatgaaaactgtcactactga

SEQ ID NO: 903440 - DNA, 120 bp, Artificial Sequence
  ENSG00000238063_1 (sequence is synthesized)
caaggaactatgcaaagaccttcggtctcaggcccttgctcactcaggagtaccttgagacctgtttcttcctgttcagctgcagtcacggttctaacctggttcttctcacggctggta

SEQ ID NO: 903441 - DNA, 120 bp, Artificial Sequence
  ENSG00000238063_2 (sequence is synthesized)
tcctctgaccttttatgtcttggcaatgacttccatgcattttggcagtgactgcctgaatctctgattcaaccctgatcgcagcctctcgggctttctcgctcctttaattctttccgc

SEQ ID NO: 903442 - DNA, 120 bp, Artificial Sequence
  ENSG00000238063_3 (sequence is synthesized)
ggatggccacggcttttgccgcctgtacccttcctggagcaacccgtgcttttgaaaaatgaccatgccgaaggggaactaacactcccagcctggtgcgggtcttgtcaatctgatttt

SEQ ID NO: 903443 - DNA, 120 bp, Artificial Sequence
  ENSG00000238063_4 (sequence is synthesized)
gggacgctgcaaagatcaagtgaaaaggggaaaaggctcttctcaatgtgagcacattcacaggctctgagaacagagaggtatttaaagtgaactggaacaaacctgcaacatccgtca

SEQ ID NO: 903444 - DNA, 120 bp, Artificial Sequence
  ENSG00000238063_5 (sequence is synthesized)
gagaaaaacactcattgaaccctccactggaaagtagctgcaaaagaccccctgatcccaaacctgcttgacagaccacagccaagggcagggacactcaacaactgtaaacgaggaaca

SEQ ID NO: 903445 - DNA, 120 bp, Artificial Sequence
  ENSG00000238063_6 (sequence is synthesized)
tttcacagcggcagctggcccctctcttcttccaaccagccaatattttttgtctttctagaaaacctgtcttgttcaaaggcctgatggagctgattcggttgtgatcctgggcatatg

SEQ ID NO: 903446 - DNA, 120 bp, Artificial Sequence
  ENSG00000238063_7 (sequence is synthesized)
gatggcatatttgctgcgagctagccggcccccgctgctgcggacaaatctttcattcatgaacaggagcttgttaggccaactccggactctaaagccacttaattaaattgtggaaag

SEQ ID NO: 903447 - DNA, 120 bp, Artificial Sequence
  ENSG00000238063_8 (sequence is synthesized)
gcgttctgccttcaaaaatagctgccagttagaaagggttatttacatattgatttcatgctaactttgtaatggaatgtgctgcctgcctgcctgcctgagacctaacaactgtcatca

SEQ ID NO: 903448 - DNA, 120 bp, Artificial Sequence
  ENSG00000238063_9 (sequence is synthesized)
ttccccagccatgcttcttgtacagcctgtggaactgctggaacttaccattggctgtcctggtcctcaggccttcggagtcagactggaactacaccatcggctttccagggtccccag

SEQ ID NO: 903449 - DNA, 120 bp, Artificial Sequence
  ENSG00000238063_10 (sequence is synthesized)
cttgccaactgcagaccttggaatcagcctcataattgcaaaaaccaatttcttatccaaatattagtatatatatgtaatttcttacaagaaatttaagtaaacttcatatgtataata

SEQ ID NO: 903450 - DNA, 120 bp, Artificial Sequence
  ENSG00000238063_11 (sequence is synthesized)
acaacagatctctgaagaatggaacgcaggataagctttgaaagagcaagggtcgtttggaaaggcctggggtaggatgaagcccaggggatgatatactgagggagcccagtagagaag

SEQ ID NO: 903451 - DNA, 120 bp, Artificial Sequence
  ENSG00000238063_12 (sequence is synthesized)
aaaatagcacgagggccttcagcactgcctccaggaggggatggagtggaacaaaatggggtagggacgggggcatctctaaggctgaagattcctcactgcagtttcgccactagccag

SEQ ID NO: 903452 - DNA, 120 bp, Artificial Sequence
  ENSG00000238063_13 (sequence is synthesized)
ccctgtctttcaacagagtagttcaacggcattggtaatgctcgtgttgagctctagtttcaaagttattccactcatggagacactaaaagtaaaatggaagttcaactaaggaaaacg

SEQ ID NO: 903453 - DNA, 120 bp, Artificial Sequence
  ENSG00000238063_14 (sequence is synthesized)
tgaggagcttcttctggcaggatctgcctcccctggactaatgacattgtgcggaacgctaaagggagctccagggaaaggtcagtggctttcaagtttgagcaggatttcacaacaaga

SEQ ID NO: 903454 - DNA, 120 bp, Artificial Sequence
  ENSG00000238063_15 (sequence is synthesized)
cccagaaagatatggaagaaacaaagctcagatgggaaatgtaaggcacagaatggtagaaggactttggcaaaacctagtgacataaagctgtctgcttaattgtcactgtgcaggtgc

SEQ ID NO: 903455 - DNA, 120 bp, Artificial Sequence
  ENSG00000238063_16 (sequence is synthesized)
ccaagggaaatggcttatgtcaagtcaatggaaaaaagacttctttgattttctcatctggggcaagctgcttacacatataattatacctactcgtttaataaatatttatcgagtgcc

SEQ ID NO: 903456 - DNA, 120 bp, Artificial Sequence
  ENSG00000238063_17 (sequence is synthesized)
tgtctttctagaaaacctgtcttgttcaaagggcggcaagtgcagcctgagagccctccacggcctgattgctgaaagaatttccaaaaggaaagagtgtaaacagtaagtttcctgagg

SEQ ID NO: 903457 - DNA, 120 bp, Artificial Sequence
  ENSG00000238063_18 (sequence is synthesized)
agtcggagcattcttgtttaattgcgcgggcacaatggtggctctggggctaccccagcctcccccagaccccgcagagcttagcgggacgtgggaggccctcagataaagaagtcacag

SEQ ID NO: 903458 - DNA, 120 bp, Artificial Sequence
  ENSG00000238063_19 (sequence is synthesized)
cgagacaagtgagctttactctccggcccacggcatctttccgtgtgtgtccttgttcccttggcctccagaagaacaccctggaaacagggaggcgccttctttctcctgactggattt

SEQ ID NO: 903459 - DNA, 120 bp, Artificial Sequence
  ENSG00000238063_20 (sequence is synthesized)
ctccaggacctgggcccctgctctgcacagagggtcgcttggtaatcaggatgcaactagatggaaacttctgtgtcatttaagggttttctccaaagcaccaaatgaccattctgagat

SEQ ID NO: 903460 - DNA, 120 bp, Artificial Sequence
  ENSG00000238063_21 (sequence is synthesized)
accaggcaaaattgttggcaacgttttccctcccctttagaatgtttctcgctggcctctccggcctctccttttctgactctagtttgctactgggcaaaagtttcctccttttccatg

SEQ ID NO: 903461 - DNA, 120 bp, Artificial Sequence
  ENSG00000238063_22 (sequence is synthesized)
agtgtcagatggaagactttttagctacgagggtctaaaaaagaagtatcccaagtcacctacaagcggaaggaatgaggctacagatggaactctttgactctcattgactccctcagc

SEQ ID NO: 903462 - DNA, 76 bp, Artificial Sequence
  ENSG00000238063_23 (sequence is synthesized)
ctacagatggaactctttgactctcattgactccctcagcttttactgcaaggggtgccatgattttgaagtaaat

SEQ ID NO: 903463 - DNA, 120 bp, Artificial Sequence
  ENSG00000238063_24 (sequence is synthesized)
ttgctgcgagctaggtgagacgcgtcccagaaggaccgctgccagcccccgcagccgccttctcctgctcccgggaggctggggctggccgcggagcagcgaaaccggccggatccaggg

SEQ ID NO: 903464 - DNA, 120 bp, Artificial Sequence
  ENSG00000238063_25 (sequence is synthesized)
taactgcggcccactttgttttcagccggcccccgctgctgcggacaaatctttcattcatgaacaggagcttgttaggccaactccggactctaaagccacttaattaaattgtggaaa

SEQ ID NO: 903465 - DNA, 120 bp, Artificial Sequence
  ENSG00000238063_26 (sequence is synthesized)
agtatcccaagtcacctacaagtaatacacctacaccttttgctgttagagaagagcagatctttgattaagctcaatgctcatggccacccaggtttcttggcagtttgggatgtgtac

SEQ ID NO: 903466 - DNA, 120 bp, Artificial Sequence
  ENSG00000238063_27 (sequence is synthesized)
acaaccgctgtccttctgcatcccatatttagggccacaatgggaattatgacactcaagccttgtgtagcgctttatattttcagagtgctttcaaatatataatttgatccttatgac

SEQ ID NO: 903467 - DNA, 120 bp, Artificial Sequence
  ENSG00000238063_28 (sequence is synthesized)
tggtatcatgaaatttctcaaacaggtcaacacagtcactcactggagttttctcactaggatgagatagacatttgacaaggtgctaaccccacagagcaggggaagaggcagggaagg

SEQ ID NO: 903468 - DNA, 120 bp, Artificial Sequence
  ENSG00000238063_29 (sequence is synthesized)
agacaaggccaaatgttgcccccttctttctcttcttcataggagctctgctcctctgtttcctgttgattctggcaatttcatcatgctacatttgatcattacataaggataaagtca

SEQ ID NO: 903469 - DNA, 120 bp, Artificial Sequence
  ENSG00000238062_0 (sequence is synthesized)
gcagacaccagcctggtgtcctccttcatcccaggctgccaggctaggcaggggacagcggctgccctggtcctcacagccctggctacggggctggtgacagccagatcctcatgcttc

SEQ ID NO: 903470 - DNA, 120 bp, Artificial Sequence
  ENSG00000238062_1 (sequence is synthesized)
tgcgacctgagcgctgccttcagacacctctctgctggcgtgttcctgggtccatgatggaagaaggaaaagtatttttaaaagacaatctgaagctcatactgtgactgcaacataaaa

SEQ ID NO: 903471 - DNA, 120 bp, Artificial Sequence
  ENSG00000238062_2 (sequence is synthesized)
tgtgttcacctgaggagactgctttcatcgccagtgtgtcacagatggtggaaacctcagaaggccacagtccagagtaggggcttaatgcaagctgctggaactgaataaagaaggtct

SEQ ID NO: 903472 - DNA, 120 bp, Artificial Sequence
  ENSG00000238062_3 (sequence is synthesized)
ctgatggttctggtttcctgggcacctagaataagtgtgtcaccatttgtcctgaagctgacttctctgagctggatggcaccctggacatcaaccagcccttcaccttcacgtcacaca

SEQ ID NO: 903473 - DNA, 120 bp, Artificial Sequence
  ENSG00000238062_4 (sequence is synthesized)
ggagggacactggtccatagagaggatgcctgctctggtcaccagctggagagtggcagaccttgggtacctgacctttggactctgccacacagagcacttcctcagtccctcctgctg

SEQ ID NO: 903474 - DNA, 120 bp, Artificial Sequence
  ENSG00000238062_5 (sequence is synthesized)
agggcagctgatccaggaccgtccacttccaagccagcaggaggatggaaaagcagaatggaggggaaacaacctcctttgcagggcgtgactcggaagttggacacatcatttccagcc

SEQ ID NO: 903475 - DNA, 120 bp, Artificial Sequence
  ENSG00000238062_6 (sequence is synthesized)
acattccatggaccagaattagccctgtgaccaactctggctgccagaaaatctgggaaatacagtctctgcttgggcgatcaggcaggcagttatatctttgggaacatctctcacccc

SEQ ID NO: 903476 - DNA, 120 bp, Artificial Sequence
  ENSG00000238062_7 (sequence is synthesized)
ctgggaacacctgagcagaaactgaaggacatttaacagattctcctttgtgtctaataagaattgcccccatcagtcggggctgtcctaggtgctgggtacataggtcatctatacaca

SEQ ID NO: 903477 - DNA, 120 bp, Artificial Sequence
  ENSG00000238062_8 (sequence is synthesized)
acccagcaatggagagcacaccattcccaggctgcagatgcagaaactgtggctcggagagttaagcgtcttgttcagattcagtcagctggtagatggcaggtctgggattgagaccca

SEQ ID NO: 903478 - DNA, 120 bp, Artificial Sequence
  ENSG00000238062_9 (sequence is synthesized)
ggcctggctggtcctgccaggacacagtatcacagctttgactgggagcttctttttgtttacatatattttttatgctcaatgtgcattccttttgaaatacacagaaaagggaaagaa

SEQ ID NO: 903479 - DNA, 120 bp, Artificial Sequence
  ENSG00000238062_10 (sequence is synthesized)
tagaggtgtgcaccgggataaatctgcctcccgcgctggccctggccctggccctggccctggccctggccctgatcctgctcctgattctggtccttggggcctgggcggcgattcccg

SEQ ID NO: 903480 - DNA, 120 bp, Artificial Sequence
  ENSG00000238062_11 (sequence is synthesized)
gcgctggctgagcgtcaccggccaccagagggcgctgccgggctaccggtccggtcgcccggggatcacagcctcagcggacaggaaatgatcaacagcttctcctctcggatccacgtg

SEQ ID NO: 903481 - DNA, 120 bp, Artificial Sequence
  ENSG00000238062_12 (sequence is synthesized)
gactcaaggaatctccggggggcaggacaggtgcagagccgagtgcaaaggtggaattctattcccaaagcacatcccgcgcccctttcctctgcaaagtcccggaaccgcgtgactccg

SEQ ID NO: 903482 - DNA, 120 bp, Artificial Sequence
  ENSG00000238062_13 (sequence is synthesized)
gatgagttatcggggctggaaccgagggttcagccccctgcgcctctgtgtgtcccggtccctttcctccaagtagacaggaggcatctcctcatcggctcagttcacattcctccaggg

SEQ ID NO: 903483 - DNA, 120 bp, Artificial Sequence
  ENSG00000238062_14 (sequence is synthesized)
ggacaccaagtcaggcagactccaggagagaggaaggaagatgattcccgcgctcaggtgggcgggtcctgctccctctgttgaagacctgaagacaaagattgaccctcacccttcacc

SEQ ID NO: 903484 - DNA, 120 bp, Artificial Sequence
  ENSG00000238062_15 (sequence is synthesized)
tcccacctcttcctcaccttggaaaagaaaaacattcctgagaggggggatttgtcagcagaaggctttgggactagaactgcagcatcagctcttcctggttccccagcgcccaggcct

SEQ ID NO: 903485 - DNA, 120 bp, Artificial Sequence
  ENSG00000238062_16 (sequence is synthesized)
accctgcagatgtgggcttactggcctccacgatcagtgagccggttccttaaaatcaacctctctctcttcctctgtctctccctctctctctctccctgtccacatcccattggttct

SEQ ID NO: 903486 - DNA, 120 bp, Artificial Sequence
  ENSG00000238062_17 (sequence is synthesized)
gtttctctggggaaacctgactaataaggggactctcaaggccctggctgaggatggcaggcctgaagattctctgaggcattcagcattgaatgagcaccagctgggcgtggagctgtg

SEQ ID NO: 903487 - DNA, 120 bp, Artificial Sequence
  ENSG00000238062_18 (sequence is synthesized)
tcaggcgctgggcacaggactcagccccggaaccaagtgtgggcccacatggtgtgggcctttgtctgtccctgtcatggctttggacacacgcgtggcccagaggggacaacggatctg

SEQ ID NO: 903488 - DNA, 120 bp, Artificial Sequence
  ENSG00000238062_19 (sequence is synthesized)
ggtggcgaggtgggaaagctcaccccagtattcctcttggtggcagcagtcccttaaggggtcgcctgagtcgtgagacccacaggtgtggacctccccccccccttcctcccctctccc

SEQ ID NO: 903489 - DNA, 120 bp, Artificial Sequence
  ENSG00000238062_20 (sequence is synthesized)
ccagtgactttatccagcacctgccctgcccagccttgcacaggttaccctgtgacccactcacagggagatagggcagcttctttctgccctcaggagccttgttctcaaggcagctca

SEQ ID NO: 903490 - DNA, 120 bp, Artificial Sequence
  ENSG00000238062_21 (sequence is synthesized)
tccaagagaataacatacagtagattgccacacacatgactgtggcttagtccaggaaagccacttataaaatccggaggtgaaggaagaaaagattgaaatctctgtaacaaatccatt

SEQ ID NO: 903491 - DNA, 120 bp, Artificial Sequence
  ENSG00000238062_22 (sequence is synthesized)
tccctcctccctccctcccttcatctccaaagtagacctgccccagggccagggatcctctccctgcaaggctaggtaacaagcggatttttgcttttgagcttcaaggtcctggcttct

SEQ ID NO: 903492 - DNA, 120 bp, Artificial Sequence
  ENSG00000238062_23 (sequence is synthesized)
ggtggtttataggtgatctttgagggtggttttgacgagaggcttgttagcttctctacgcttttgaaacgcccactctccccacaagaatctgggactttgcagaaccggtccaaggtg

SEQ ID NO: 903493 - DNA, 120 bp, Artificial Sequence
  ENSG00000238062_24 (sequence is synthesized)
agagtaggattaattgccaaatgagttttctcataagcctggggtccaaagtacattggacagccagcaaatgcttatgaggggtttgaacaagtgaaatcaaggctcaaggtcatagga

SEQ ID NO: 903494 - DNA, 120 bp, Artificial Sequence
  ENSG00000238062_25 (sequence is synthesized)
ctcaatggagagtgaggcagctgggatctgggatgaccggcatgggcctcaaagcagggggcttggaaataggccctgaagagggggtcgcttgcgtggctaggaaggggttggggccca

SEQ ID NO: 903495 - DNA, 120 bp, Artificial Sequence
  ENSG00000238062_26 (sequence is synthesized)
ctagcatttctcagaatgcctattttcttcggcagtgagagctggagggagggatgggtttctcagcacagttccagtatgagtggctgtcaccacagggcgccattgccaagtcagaaa

SEQ ID NO: 903496 - DNA, 120 bp, Artificial Sequence
  ENSG00000238062_27 (sequence is synthesized)
gaaacaaagcttaaccgctgcctcctgtcccccatggtctgtgaaagtctcatactgtagtgcgtctaatggtggccccccaaaagatacatctacattataattcctgggacccagaaa

SEQ ID NO: 903497 - DNA, 120 bp, Artificial Sequence
  ENSG00000238062_28 (sequence is synthesized)
tgtgaccttatttggaaaaagggtctttgaccttatttggaaaaagcgtctttacaaatgtaagtgaccttatttggaaaaagtgtctttacaaatgtaatttacaacattgaatgagca

SEQ ID NO: 903498 - DNA, 120 bp, Artificial Sequence
  ENSG00000238062_29 (sequence is synthesized)
ctcaggaaaacaagacagaaagcatagaactcgtttgctgcccagcacgcggggtgagcagagtgtcatgatgaggcagtacggagggaacaaggacggtcacagagactggaaacccaa

SEQ ID NO: 903499 - DNA, 120 bp, Artificial Sequence
  ENSG00000238062_30 (sequence is synthesized)
tgccttcagacacctctctgctggcgtgttcctgggtccatgtgagctacctgttttgctctaagataccctggatgtgacgctcagctctgtcactggcttccacataccccctactcc

SEQ ID NO: 903500 - DNA, 120 bp, Artificial Sequence
  ENSG00000280418_0 (sequence is synthesized)
gggtggatggaggccaagggtgggccccttggagacagccttggggtgcagccagctctgccacctctccctggcttccttccctccaacctgtgactcccgggaagtccctgatgggcc

SEQ ID NO: 903501 - DNA, 120 bp, Artificial Sequence
  ENSG00000280418_1 (sequence is synthesized)
agccacttggggcccggaagtaactgtggtgtgtggtggtcaccctcaccagagttcatggggtggagcaagggggacagaatctcccccaaaatcaggtgtcttgttcccaggcccagc

SEQ ID NO: 903502 - DNA, 120 bp, Artificial Sequence
  ENSG00000280418_2 (sequence is synthesized)
acagagacctggcccccagacatctctggacatttgttaagagtggacgactgcttccattacacaggagaggaaaccgaggctctaaggggtcccagacttgcctggctgccacagtga

SEQ ID NO: 903503 - DNA, 120 bp, Artificial Sequence
  ENSG00000280418_3 (sequence is synthesized)
gcaggcaacaaataccaagtggctgccgcagtggggtaggtgggaggcagtggctgaaccagaaagtgctgccgtcaattctgctggttgcatgagtcttaggagatgatcaaagggcag

SEQ ID NO: 903504 - DNA, 120 bp, Artificial Sequence
  ENSG00000280418_4 (sequence is synthesized)
attgtggggagataaaaagtatgagtggggaacaggattggggggagcggaagagcctcaaagaccctgcgacattctcaacgtctccacggtgactcagagatagctccaacccgcatg

SEQ ID NO: 903505 - DNA, 120 bp, Artificial Sequence
  ENSG00000280418_5 (sequence is synthesized)
gcgggcagagtgtggaggggacggctttgtggctggattagtcatccccgtgcagctcaccccaaatcccggcttccagccctgggccgtccatgctgggatggaggaagggcagcctct

SEQ ID NO: 903506 - DNA, 120 bp, Artificial Sequence
  ENSG00000280418_6 (sequence is synthesized)
ccgcagggccacgtcctggagcctgatgaccctggccagcacacagctgaaagcagcccactgtgcaaatggtgcatgatacagggggtcggctctgtgttccccacggtggccaaggga

SEQ ID NO: 903507 - DNA, 120 bp, Artificial Sequence
  ENSG00000280418_7 (sequence is synthesized)
ccagctgtgcctcagtttcccttattctatcaaactttgaagaaggtccctgtaaaagcgcatctgttttcagggtaggggccagagtcagccacccacaccagagtgagaattggtggg

SEQ ID NO: 903508 - DNA, 120 bp, Artificial Sequence
  ENSG00000280418_8 (sequence is synthesized)
tgccctagccccggcaggatctggcattttactggacagagagaggaggcggcacccactggggctcgggcaaccatcccggctacccccgccccggcccaccaggagaggagggaagcc

SEQ ID NO: 903509 - DNA, 120 bp, Artificial Sequence
  ENSG00000280418_9 (sequence is synthesized)
ttgaagtgccaggactttgaatcgcccatctccatggcaacgcgtgggcacaaagggccgggccggcgagcaggcggcggctgcgcaagctggaaggaggaagggaatcttttatttatg

SEQ ID NO: 903510 - DNA, 120 bp, Artificial Sequence
  ENSG00000280418_10 (sequence is synthesized)
gggagggagagtcggggagccaggctgcgcccacgctcagggccaggccgcagtcttgaggctgggccccctgccccatagccagggcctctgagcagcacctgcccacacacccctgac

SEQ ID NO: 903511 - DNA, 120 bp, Artificial Sequence
  ENSG00000280418_11 (sequence is synthesized)
cctccgggcccggctgggtggacggagcatgggcaaatggagggcagaatggagtgagtgtccagcatgcacccaacctggagatcggcccagagggtccctgggagcctgccatcctcc

SEQ ID NO: 903512 - DNA, 120 bp, Artificial Sequence
  ENSG00000280418_12 (sequence is synthesized)
ataccccagtctctgtgatgtgggcacccgggcagataccatgctgagagccagctgggcctgcagtgaggaaatgtggcccaaagcagactgcagagctggaactcaggtggggctgct

SEQ ID NO: 903513 - DNA, 120 bp, Artificial Sequence
  ENSG00000280418_13 (sequence is synthesized)
gccataggctctgaagacagtgcaggagaccgggaggggtcaccagtgccaaggccctgaggcaagccggagctgggagcatctgaggatgggcattagcgcggggctccagggtatagc

SEQ ID NO: 903514 - DNA, 120 bp, Artificial Sequence
  ENSG00000280418_14 (sequence is synthesized)
cggtccactgcaggcagcctggcctccccagagacccagccacagctcctcaccttggacagggggccctgggccttgggcatcaaatgacctgcctgccgtggtggaggctgccacacc

SEQ ID NO: 903515 - DNA, 120 bp, Artificial Sequence
  ENSG00000280418_15 (sequence is synthesized)
aagacgccggcccacggcctccagcagcccatccccaccttcccaagcccctcccctcatggcttacaccctgttccctgagcccccaaacatgggaaatggcacctattgtgccccagc

SEQ ID NO: 903516 - DNA, 120 bp, Artificial Sequence
  ENSG00000280418_16 (sequence is synthesized)
gggggaattctgaccccagaccctgggggcagtgcagaaaccaccactgaatcagattttatttcatctaaaaaatatctgagccagattgaaagcagcagggaaagggtcccatggctg

SEQ ID NO: 903517 - DNA, 120 bp, Artificial Sequence
  ENSG00000280418_17 (sequence is synthesized)
cttcccccagccccaccctccacaggccctgggccctcccagcccccatttcctttccttgagaatgtctaaagtggggcaatattttgtgaaattggaggcaccgcgttagaaattcca

SEQ ID NO: 903518 - DNA, 120 bp, Artificial Sequence
  ENSG00000280418_18 (sequence is synthesized)
aacccgtgtttatgatgagctgcacgcgcgtttcgaacctgccctggttttgagctgagggaagtggagggtgcaggagttgcccactccagaggccctgggtgtgcgtgaggagccctg

SEQ ID NO: 903519 - DNA, 120 bp, Artificial Sequence
  ENSG00000280418_19 (sequence is synthesized)
aggctgggccgagagccgcttgtgggaggcactgtgccccctgcccccgagatcggggcctgggtgcccaggacactacagaccttttggggagcctggtggttgggaagcctagagctg

SEQ ID NO: 903520 - DNA, 120 bp, Artificial Sequence
  ENSG00000280418_20 (sequence is synthesized)
gaacccacaggccagagtctgagctttcatcccccacccccgaagacgctccgccagccactgcctgcgcatcaggggagacaagctccccccacgcccaccttgcctccagcagggctg

SEQ ID NO: 903521 - DNA, 120 bp, Artificial Sequence
  ENSG00000280418_21 (sequence is synthesized)
ttcctcccctcatctgcaggaatcagttttttctttaactgagccccatgctggggaagggagagctccaggggaccaggcagcagagaggggaggggagaagccatcaaacaggcgggg

SEQ ID NO: 903522 - DNA, 120 bp, Artificial Sequence
  ENSG00000280418_22 (sequence is synthesized)
ggctggggggccatgcactcagcacagagccccacatggcaggagggggctgggtggtcggcttagagcccattctctcctggacactgttctggaatggcccccggcccctctgttcca

SEQ ID NO: 903523 - DNA, 120 bp, Artificial Sequence
  ENSG00000280418_23 (sequence is synthesized)
aagatgggaccctccggcccagggaccccgtatgatgtcccccaaaccacctctcttcccagacctcatcaatggcaatgaatggtgcatcctggctggggccgccgcccctcactgtga

SEQ ID NO: 903524 - DNA, 120 bp, Artificial Sequence
  ENSG00000280418_24 (sequence is synthesized)
gacatcagcccagacgagcgcccagcccctcctggggtctcagatactcagaatgaaaggctcacagctgccatgaacttccacaggactttgtggttcctcctgcacccccggtgatgc

SEQ ID NO: 903525 - DNA, 120 bp, Artificial Sequence
  ENSG00000280418_25 (sequence is synthesized)
tttcatccctctccagcaccgttccagaggccagaaaaccatgatgtttggggtcaaacagctgggagaggcagttggaactcaggccaggcctgtctgactggacagtgctgagactgg

SEQ ID NO: 903526 - DNA, 120 bp, Artificial Sequence
  ENSG00000280418_26 (sequence is synthesized)
gaccccgctcccctacaagtgctgtcagtgcaccctcgatgccccccagagcttgccatgccccgacagttccttcatggccaaagtgtcccctggcacaggataccctggggtgccatg

SEQ ID NO: 903527 - DNA, 120 bp, Artificial Sequence
  ENSG00000280418_27 (sequence is synthesized)
tctgcaagagctcacacccttctctccccagctgctgctaactgctgccagaggtgggtgtgtggagggctcggggcctcttcaccctccctgcaccaactcagctccagaacattccca

SEQ ID NO: 903528 - DNA, 120 bp, Artificial Sequence
  ENSG00000280418_28 (sequence is synthesized)
gcagtgaggagagggtggccactgtgctgcagccccaagggatgggcaaggccatgccagctggagtcatccatgtcccctcggacatggtggcctcattcagagggcaccatggagaag

SEQ ID NO: 903529 - DNA, 120 bp, Artificial Sequence
  ENSG00000280418_29 (sequence is synthesized)
ggtacaatgagggtggctaccagagacagtggagatgaggcggtcaggaagcccagtgacgggcctggaggggacacacggccagctgggcacagggcacgaggcctttgttctgcgtgc

SEQ ID NO: 903530 - DNA, 120 bp, Artificial Sequence
  ENSG00000280418_30 (sequence is synthesized)
tgtggcatacggtgctggctctggcccatcttttgttagtggtgggttcagctctgttccttggagctcccttagcccaggggtccacctcccctctgggcagcgccaatcagcgcattc

SEQ ID NO: 903531 - DNA, 120 bp, Artificial Sequence
  ENSG00000280418_31 (sequence is synthesized)
ccacctggacctcctccctcattttaccatcctggaacatcacggtgcctggggcaggccatggagacctggctagcccatgatctgctcagtcctcatcagctgttgtgacagaaacaa

SEQ ID NO: 903532 - DNA, 120 bp, Artificial Sequence
  ENSG00000280418_32 (sequence is synthesized)
gtctgtgctgatgagctgagccgaccaggctgcagccctcacttcaggagagggtcaggcccagccaggcctggtgagcaggtgtggggacggacgggtgctcatgtgtgggaggtttct

SEQ ID NO: 903533 - DNA, 120 bp, Artificial Sequence
  ENSG00000280418_33 (sequence is synthesized)
taagagtgggtgagaggaggacggagaggggaccagtgaaggagagtggagggcactgcccccgtggggcaggacagggtggggctggtgttagctgggttgggtgtgtgggtctggcag

SEQ ID NO: 903534 - DNA, 120 bp, Artificial Sequence
  ENSG00000280418_34 (sequence is synthesized)
ggagccgggcatgggagtgggtcccgaggagtgcgaggttggagccaggaccatgggcctcaccatagaggcctcaccccagggcagagggagctgacagacggggctgacgggaagggg

SEQ ID NO: 903535 - DNA, 120 bp, Artificial Sequence
  ENSG00000280418_35 (sequence is synthesized)
ggcttcctgtcatcagaggacagcccatggccacctttgtggggaccccacagggagaggctggcccctgaggatgctcagacctggttcagcatggccaggccctggcctagcccaagg

SEQ ID NO: 903536 - DNA, 120 bp, Artificial Sequence
  ENSG00000280418_36 (sequence is synthesized)
tcagcactggccgctaccctgggggctgagtctccgtctcgccctgtgacatggtgcccacactatgagccagtgtcaaccctttgcccatgtcccgggagccttgtgtgtccatattca

SEQ ID NO: 903537 - DNA, 120 bp, Artificial Sequence
  ENSG00000280418_37 (sequence is synthesized)
cggctgagagcctgccgtgggggtctctgcactgggggaggtgggtccagggtgtgtggcccctgagattgtccatcatgagtgccacctggaaggtgccggagcctcaccctgtcctcc

SEQ ID NO: 903538 - DNA, 120 bp, Artificial Sequence
  ENSG00000280418_38 (sequence is synthesized)
agggcccagagtgttttggggagatcctgtgctggcatcttggctgggccaggatggtgtctaggagggacccttgggagggaagcaggggcatcagggggcctggtgctggggtgggtg

SEQ ID NO: 903539 - DNA, 120 bp, Artificial Sequence
  ENSG00000280418_39 (sequence is synthesized)
gcaggagaggcctggagggcggcggcccaagccagtggctgggcaggtgtcaggagggagaggggtgaggcctggcctccctgccgcagccaagccagggcctgggtgtcctggggggtg

SEQ ID NO: 903540 - DNA, 120 bp, Artificial Sequence
  ENSG00000280418_40 (sequence is synthesized)
ggacaagacccagggcagaggcagggctgcttgcatgcagggtggccacatcccggcctggtgagtgccggccgctcagttctgcggccctctgctgccctccgccggccgcctctgtcc

SEQ ID NO: 903541 - DNA, 120 bp, Artificial Sequence
  ENSG00000280418_41 (sequence is synthesized)
ctgcaggcccagccatctacctgcagatctggacagaccctcagaccccaggctgggaggtctcaggagccaagacggggttgaatcccatttgagggcatctgaaggcgtgagagccta

SEQ ID NO: 903542 - DNA, 120 bp, Artificial Sequence
  ENSG00000280418_42 (sequence is synthesized)
tgtcaagcccctgcccagccttgccttggccagcagctccaaggggactctggtgggcagtggctaaagatgacagaggggctcagagaggctgagctgctctgtaaggttgcacagtga

SEQ ID NO: 903543 - DNA, 120 bp, Artificial Sequence
  ENSG00000280418_43 (sequence is synthesized)
gcaggggccgagtggccttgggagaggcaacagcaggagggtcctcgtcatggccagagcccggggacaggaaacccctgctgggttcccccaccaagtagctcccattcccagccctta

SEQ ID NO: 903544 - DNA, 120 bp, Artificial Sequence
  ENSG00000280418_44 (sequence is synthesized)
gggtgtctcaggagaggttccgggggaggtcccacctgcctcctgccttctcccccaaccacaccctaaatgggtcccagctccccagcccctcccacaagggctcacccgccagagctc

SEQ ID NO: 903545 - DNA, 120 bp, Artificial Sequence
  ENSG00000280418_45 (sequence is synthesized)
ggggagaggccctgcagggcggctgtttctccgtgtgctgcagtcctctggacactgaaaaccaatcgcaaccatcttaatggcatttaatatgcacagtgaaagtcagcagccacagcc

SEQ ID NO: 903546 - DNA, 120 bp, Artificial Sequence
  ENSG00000280418_46 (sequence is synthesized)
acgggcgtgtgctcagggcaaggtttacatgaagatgccaccaggcttagcccatgagtggcctcctgggtcccaggagaagtgtggggtgggggtgcagctgggtgggccatggtagca

SEQ ID NO: 903547 - DNA, 120 bp, Artificial Sequence
  ENSG00000280418_47 (sequence is synthesized)
gagacctggggaggggaagtgggaggtaggaactgggctaggcagggactcaggggaggctgaggcctggaacagggagactgagacctcaaggaggctgggacattgggagtcaagact

SEQ ID NO: 903548 - DNA, 120 bp, Artificial Sequence
  ENSG00000280418_48 (sequence is synthesized)
tggggaagctggaacatgggcaggccgagacgcaggggtttaagaatgagggtctggtgcagacctgagttggagcccagccgctgctggcccgacgtagctggagagtgtgctgacccc

SEQ ID NO: 903549 - DNA, 120 bp, Artificial Sequence
  ENSG00000280418_49 (sequence is synthesized)
atggtggctagagaatgtgctgttgatagggaaggcaagtgctgggaagggaaaagtgtggtccatttaaatgatacggaagcagggaaaggaagtgctgggtagaggagggcatggtcc

SEQ ID NO: 903550 - DNA, 120 bp, Artificial Sequence
  ENSG00000280418_50 (sequence is synthesized)
cagactagggctccaaccccacggacctaggtgagaacaggcacttcctacccaaatgttgcatttctcacgaccaccctggcctgccacgcccccatcctgtgcttataaaatcccctg

SEQ ID NO: 903551 - DNA, 120 bp, Artificial Sequence
  ENSG00000280418_51 (sequence is synthesized)
agaccttagcaggcagacacaggcagctggacgtggagaggagcacatcagcggagacacacacgggcggctggatgtcgagatgaacgcactgataggcaccggcatgctggcaggcca

SEQ ID NO: 903552 - DNA, 120 bp, Artificial Sequence
  ENSG00000280418_52 (sequence is synthesized)
ctgactggcagaaccacgcggagtttggctggggcagttggaggacagcccgggtgcacagcggccccactccaggggaaaaccttcccactccacccccttctagcttcccctatctgc

SEQ ID NO: 903553 - DNA, 120 bp, Artificial Sequence
  ENSG00000280418_53 (sequence is synthesized)
tcaataaaaccttgcactcattctccaagtccacgtgtgatctgactcttctggtacacaaaggcaagaaccccaggatccagaaagccctctgactaacacaagccaccctacagacga

SEQ ID NO: 903554 - DNA, 120 bp, Artificial Sequence
  ENSG00000280418_54 (sequence is synthesized)
gccaccctacagacgacaaactaaaaaagcccccgtgacacacgcccactggggcttcagctgtaaaccttcacccctagacactgctgtggggtcggagctccacagcctgcccgtctg

SEQ ID NO: 903555 - DNA, 120 bp, Artificial Sequence
  ENSG00000280418_55 (sequence is synthesized)
taagctcccctagaggtttgggcagtggagcactgaagaagcgagccactccccttctcacacacactgctagggcaacaagggaactttttccgtttcactggcccaaggtggctggac

SEQ ID NO: 903556 - DNA, 120 bp, Artificial Sequence
  ENSG00000280418_56 (sequence is synthesized)
agtgtgctggccccacggtagctggagagtgtaccgtgctccctggctttcctcctgatgtataaaatgagttagcgggtcctgggggctgttcccacagtgacgtggtggaggctgacc

SEQ ID NO: 903557 - DNA, 120 bp, Artificial Sequence
  ENSG00000280418_57 (sequence is synthesized)
ctgacacccacccctgctgaatgctcagtgaatggtggttgctgtcaggaagcatcattgctgtcctccatcagtgtctgtggggatgggtgactcttggaggatgcttccagcaatgtt

SEQ ID NO: 903558 - DNA, 120 bp, Artificial Sequence
  ENSG00000280418_58 (sequence is synthesized)
gcactgccaggacagaggccatccacctgcctctgggcttcctggtgtgaacagatggatggatgggtgggcctgctgcgtgcagggagctgaggctgggtcttcacctatgggcaggag

SEQ ID NO: 903559 - DNA, 120 bp, Artificial Sequence
  ENSG00000280418_59 (sequence is synthesized)
gctacacagggctctgggagagacagcactgtggctgggacagagcccatgtgatgagatgccctcggtgcccctggcctccctccttgctcctgcccctccaggacatcacccagagcc

SEQ ID NO: 903560 - DNA, 120 bp, Artificial Sequence
  ENSG00000280418_60 (sequence is synthesized)
cccttgctcttttggggggatgcctggtgcctgcggtttctgtcactcttgatcccacccacccctgcaggttgctggcaggacaagtgcaggagtcatctcacggctttccctgggatc

SEQ ID NO: 903561 - DNA, 120 bp, Artificial Sequence
  ENSG00000280418_61 (sequence is synthesized)
tctgtacccgctgagaaccgggagctgcacacagcctgtccagcatcctgggaactcaccctgttgctgccacttgtcctgggtcatcctgcggctcactccttgccattcagacccctg

SEQ ID NO: 903562 - DNA, 120 bp, Artificial Sequence
  ENSG00000280418_62 (sequence is synthesized)
gccattcagacccctgtgaggagagcactggctgtgagtagctctgtggctagtgatggtgaggcagggcctggagtagatccatcactgagaattctttttctttttctttttcttttt

SEQ ID NO: 903563 - DNA, 120 bp, Artificial Sequence
  ENSG00000225028_0 (sequence is synthesized)
gcataagggggcctttcagccggcttcagggggcggccaggcgggcaggcgttgcgggggaccggctctgccccaggcctgccagtatggcctggcacccatgggatggagggctgggag

SEQ ID NO: 903564 - DNA, 120 bp, Artificial Sequence
  ENSG00000225028_1 (sequence is synthesized)
gccctggttgacctctggcttggactctgggtttgatgaagagttccagcggaagcatcagccagtcattaattccaggggagggtgcacgtggaaccagaaggggtggctggccaggca

SEQ ID NO: 903565 - DNA, 120 bp, Artificial Sequence
  ENSG00000225028_2 (sequence is synthesized)
ggaggctgtccctcaccagggagaggaaagagcgctcctctctccagccttgctgtggcctttaacttgcttcactgggtgtccagaatcacaggcgggtggaatgacagcagtttgaat

SEQ ID NO: 903566 - DNA, 120 bp, Artificial Sequence
  ENSG00000225028_3 (sequence is synthesized)
gacacctggtaggcagacagtttggtattgaagtgctgggatttcacatcctctgggttgtctcgctgtggctccgatgcctttgacgtgaacagctcacaagtccatcactcgcattct

SEQ ID NO: 903567 - DNA, 120 bp, Artificial Sequence
  ENSG00000225028_4 (sequence is synthesized)
gtggcgtctggccatctcccaatttggagtttctgattctgtggttagaccttatgtttccagggcctgggcttttcattctttctaattttttaaaaatgtatgattattgtctagaga

SEQ ID NO: 903568 - DNA, 120 bp, Artificial Sequence
  ENSG00000225028_5 (sequence is synthesized)
cattatttttaaaaagtataaaccatcccagtgctgacaagcctgttgtggggaggactcagcgtgataaggcatctcagggtgctggcatttagcctccaatacaatctagcagggcta

SEQ ID NO: 903569 - DNA, 120 bp, Artificial Sequence
  ENSG00000225028_6 (sequence is synthesized)
gggcacagggccagcggccaccctgcaggctcacagggacaggattccgctctgcagttagccccaaggatgggactctccagcacttttccctccagtcgctccagggcgggaggatca

SEQ ID NO: 903570 - DNA, 120 bp, Artificial Sequence
  ENSG00000225028_7 (sequence is synthesized)
tgccagtggagtgtaaggaaccccctggaaaagcggggcgcttgaatatcctgagtgtttggtctgcagtcaccaacacatcgctttcctggatctgattttatttattttgattggatc

SEQ ID NO: 903571 - DNA, 120 bp, Artificial Sequence
  ENSG00000225028_8 (sequence is synthesized)
tttaacagctctttacaaggctgaaaccgaagccgcctgaggtccccaggaggcttgctaaaacttcaactgcacccagtttagcagagcaacttgaaagttaatcagcggtgagggaca

SEQ ID NO: 903572 - DNA, 120 bp, Artificial Sequence
  ENSG00000225028_9 (sequence is synthesized)
atttgcctcattatttccagccctggaatttggcggcagatggaatttggggcctggtgtggacacggcaatgaacacagcaaggactgtcgccccttggtatggccttgtggggtctgg

SEQ ID NO: 903573 - DNA, 120 bp, Artificial Sequence
  ENSG00000225028_10 (sequence is synthesized)
gcctggatgggctgatactccctctgaagacgggcggtgccgggaaggatttcccacttgagagaacaagggcaatcaggctgccctatctcaggtccaggccagtgtggagtaatcctt

SEQ ID NO: 903574 - DNA, 120 bp, Artificial Sequence
  ENSG00000225028_11 (sequence is synthesized)
agatacacagttctgagcacgtattcgggctgaaccctgcactggattctggggaaacaagagtggaatccgatacagttgcatccaatataggacgcagaccagagacactggggtaaa

SEQ ID NO: 903575 - DNA, 120 bp, Artificial Sequence
  ENSG00000225028_12 (sequence is synthesized)
ttctcacaggagaggaacacctgtggctggcaccttctgcatgaatctgcgaaaaacaaatctgccccacttgccctcactttctcaataaggtccactcagacccttgactttaatgtt

SEQ ID NO: 903576 - DNA, 120 bp, Artificial Sequence
  ENSG00000225028_13 (sequence is synthesized)
aaccccctcccaggcactcccacctccacactctgccatactctccacagcacatagcactgaccaccttctaacacactatgttagttcctcacttatcatgtttattgtttatcacat

SEQ ID NO: 903577 - DNA, 120 bp, Artificial Sequence
  ENSG00000225028_14 (sequence is synthesized)
caccttccacaggaaggtaagaccctccttccatgagggcaggaatgtttgttttgttcattagtctatctccagccccagcacatatgatgcactcaataaatgtcgtgtgaacaaatg

SEQ ID NO: 903578 - DNA, 120 bp, Artificial Sequence
  ENSG00000287128_0 (sequence is synthesized)
accctgaactggaagcccagcccccaggctttaggttatccttgacttgatggttgggccccaccagggacctgccctgcctaggaacctgtctgcctcccgccaccaccgatagcatct

SEQ ID NO: 903579 - DNA, 120 bp, Artificial Sequence
  ENSG00000287128_1 (sequence is synthesized)
tttattaatgtgagaaaaaaacactagaaacagtcgccaaccaggaagtggatcctgtagggatgaggagacattcagctggatggcttttttaaatgcttcctccagaatcatctgtct

SEQ ID NO: 903580 - DNA, 120 bp, Artificial Sequence
  ENSG00000287128_2 (sequence is synthesized)
cattaacaacattctttgtcttagaagtcactttctgattttatgaactgagaagatttctgtttctgttatgagtgcacactgctttaggccttcaataagctcatcacttattttcac

SEQ ID NO: 903581 - DNA, 120 bp, Artificial Sequence
  ENSG00000287128_3 (sequence is synthesized)
catgttgtcgtgggctctttttctgcaacgtataaatcatcttcaagatcactattttcatgatcacgttgattcggaaccattttggctatttgatcatcagtcaatgaatgaaaatct

SEQ ID NO: 903582 - DNA, 120 bp, Artificial Sequence
  ENSG00000287128_4 (sequence is synthesized)
gcattctcattatcactgttaaaaacttcctaaattccacttcttccggcttactgagggactctgaaggtattttttgcatatgtaaggagatcagacatcgttttttttccctcactt

SEQ ID NO: 903583 - DNA, 120 bp, Artificial Sequence
  ENSG00000287128_5 (sequence is synthesized)
gatatgtggaatccttcaaacccaccaccttattcatcatcatcactaaacatggttacagactagaggctattccagacatgcacaactgtgtctttagtcactttattctaagcattg

SEQ ID NO: 903584 - DNA, 120 bp, Artificial Sequence
  ENSG00000287128_6 (sequence is synthesized)
ttcatgctaaacttcttttgaaaaccttctacagtcagatctctgttcactgctgctagcatgctcttcaaaaaaagtgtttttatatttactctttattgatctaacaatatcttggtg

SEQ ID NO: 903585 - DNA, 120 bp, Artificial Sequence
  ENSG00000287128_7 (sequence is synthesized)
atatgacagaattaatgaagtcatgtttggggaaaaacacatggcataaaattatttttgatgagaatttcaacaggaggatgaggagaacagttgtcaaggaataacaaaatcttgcaa

SEQ ID NO: 903586 - DNA, 120 bp, Artificial Sequence
  ENSG00000287128_8 (sequence is synthesized)
tcatcatccagtccagcgacgctgcagtgagcttgagctgctggtacaaaatgtttgtgaaaccagtcaaagaagacgccttgatgattcatgctttcttgttagcataataatggacta

SEQ ID NO: 903587 - DNA, 120 bp, Artificial Sequence
  ENSG00000287128_9 (sequence is synthesized)
agaaatttactccttgaaaagagtgaggatgcaagctttttcctatcacaggaagtttatacttatgtttgcctgttgcattagtacatcccagccacttattctgtccttggcatactt

SEQ ID NO: 903588 - DNA, 120 bp, Artificial Sequence
  ENSG00000287128_10 (sequence is synthesized)
aattcctatagtggctgtcttatcagctctagtcgatgtctttctagagcaacaacaccaaaacagaaatgaatgtttcatcagcattatagacttgttctggcatcaggtcttcatcag

SEQ ID NO: 903589 - DNA, 120 bp, Artificial Sequence
  ENSG00000287128_11 (sequence is synthesized)
cgataatcttggtatactcattaataaatttatctacagcctaatggtcagcagatgctttatccccataaatctttaaaaatgtaatgccatgacttttcttaaatttttgcaaccaat

SEQ ID NO: 903590 - DNA, 120 bp, Artificial Sequence
  ENSG00000287128_12 (sequence is synthesized)
ctgtttaatattcagagttctcttcaattttctagttcattgtaatagatctttgctaatgtcatgatccacacaccattaagtggcatgctttataaataaagcatatttatttttagc

SEQ ID NO: 903591 - DNA, 120 bp, Artificial Sequence
  ENSG00000286811_0 (sequence is synthesized)
catgcgccaatccaaaccgaaagccagaaggaagaagagtgaggagtttgctacatcccagctccacatcactggaaatgggatttgaggcaaaactacctggtgtgtctggaagtgtct

SEQ ID NO: 903592 - DNA, 120 bp, Artificial Sequence
  ENSG00000286811_1 (sequence is synthesized)
gtttctggaattccactcacaggggaaaattagcctgaaccagatggcttgaaacagtcctcatgggtgaggggtggaaggagacactggaaaaggggactgaaatcagctttaggaact

SEQ ID NO: 903593 - DNA, 120 bp, Artificial Sequence
  ENSG00000286811_2 (sequence is synthesized)
ttctgtcctttaatctcaagaatacagaaagtgaatgtaacatgttatgagaaacctcatattgcctgtagatcttcactttcaatacacacacacgcacacgcacacgcacacaggcta

SEQ ID NO: 903594 - DNA, 120 bp, Artificial Sequence
  ENSG00000286811_3 (sequence is synthesized)
tctccgcagccctcagctgcagcggactggtctgtggaatcacagcgaggaaggtgttgcgaggaaatcccttgcatgctgtgtggtgtgttaaaaatgcagcatcatcctctctgctcc

SEQ ID NO: 903595 - DNA, 120 bp, Artificial Sequence
  ENSG00000286811_4 (sequence is synthesized)
ttttcttcgctgaaaagcagaattcgagggcacagggaaactggaggggcgagaaggctgtctcctggagccctggggctgtctccctccatgccccactccttgggctctaattgccct

SEQ ID NO: 903596 - DNA, 120 bp, Artificial Sequence
  ENSG00000286811_5 (sequence is synthesized)
tgctccaatgggccagcagcaccttcaccatttatttcctcttcaattcactccagcggggagggaagagggaacacaaaactctaaaaataactgtcagcatcttaaaaaaagaaaaaa

SEQ ID NO: 903597 - DNA, 120 bp, Artificial Sequence
  ENSG00000227885_0 (sequence is synthesized)
ggccaaggcaaagtttggtcggaaactagtttttgcattagactctccatgggctccatagactctcctgtaccttacgactaggcacaggagcgtttccccggtgaaatggagaagagg

SEQ ID NO: 903598 - DNA, 120 bp, Artificial Sequence
  ENSG00000227885_1 (sequence is synthesized)
acacttggtcttttcaactttactaggagggctcctttcttcccagtccaaacatatgaagctcatttctgccacccttcctagaaaactggttcctgacagagacatgtggaaaggtaa

SEQ ID NO: 903599 - DNA, 120 bp, Artificial Sequence
  ENSG00000227885_2 (sequence is synthesized)
gtaaacctgggcccaagatcacagagcacacagctggaattcacagcaagacctgattgacttcgaagtcagtggtctttcccctgcttcccacgagacaggttactacatgaagagctg

SEQ ID NO: 903600 - DNA, 120 bp, Artificial Sequence
  ENSG00000227885_3 (sequence is synthesized)
ggactggaatacaggttttctatgttcacctggggatagcttttccatcatccctcctgagtctgtgaggtatcccagtttttaagccagaactttgaaaccagaagtaaatggttaagt

SEQ ID NO: 903601 - DNA, 120 bp, Artificial Sequence
  ENSG00000227885_4 (sequence is synthesized)
ttatctgtctatgcctatgtgtattctagccaaataaaccatgacacttaaaacaatttcaatatttcaaagatgtagtaaatttccttgaaccttttttattgttttttataaattaaa

SEQ ID NO: 903602 - DNA, 120 bp, Artificial Sequence
  ENSG00000227885_5 (sequence is synthesized)
ataattcaaacatttttaaaataggaaataacgtgatatgcatgtaccccatacccagatttaatagatgtttacattatgcagtatctgtttcttttttttttttttttcttgagacag

SEQ ID NO: 903603 - DNA, 120 bp, Artificial Sequence
  ENSG00000227885_6 (sequence is synthesized)
attgcaggcatgagccaccgcacctggccttcaattttttgatagaagtaagacatcacaggtacaatcaaagtttcctaatcttatatttcttctcacacttcccagaggaaaatgact

SEQ ID NO: 903604 - DNA, 120 bp, Artificial Sequence
  ENSG00000227885_7 (sequence is synthesized)
cacacttcccagaggaaaatgactattctaaagttagttacttctatttcttaattgtaatacatttattcatattcttaagacatttatgtaatattgtgttaagtatttttgaaatgt

SEQ ID NO: 903605 - DNA, 120 bp, Artificial Sequence
  ENSG00000227885_8 (sequence is synthesized)
gctccgctccgggttttcccggcgacctgcatccagagagggtcgactgacctgcgggccggctgctggcggtctgcttactccggcaaagacgggggcgcatcgggccgtttgaggaag

SEQ ID NO: 903606 - DNA, 120 bp, Artificial Sequence
  ENSG00000227885_9 (sequence is synthesized)
gcagactgtgaaaggacttgggacaaagatgaggcggagtagaggcggcctgagcagagcagaacaactttgatatttagttttatttaactcgcactcctctccttgctccccttcccc

SEQ ID NO: 903607 - DNA, 120 bp, Artificial Sequence
  ENSG00000227885_10 (sequence is synthesized)
aaaacaactttctcttccggggtcacacaggaccgccccaaagcgtaccttgcgcgccgggggcgccaggcgctactggattcggtgtagttttgaggtgtttgcaccaccctcgctgct

SEQ ID NO: 903608 - DNA, 120 bp, Artificial Sequence
  ENSG00000227885_11 (sequence is synthesized)
gctttcgtggctgcccgtgtgcccgctgctcacggctgccccagaagtgtgagctggccgcgcccggccctctggtcctcgggcaccgcctgcaggctttgtaacttgggagcacatctc

SEQ ID NO: 903609 - DNA, 120 bp, Artificial Sequence
  ENSG00000227885_12 (sequence is synthesized)
tggtgatcatggtttatgcagtgagtgatagtaaatcctcctccctgtaccagcaaaggcataggagtctgagagtctgcgagattctcatagatgtggttgcacctggcaaggagccca

SEQ ID NO: 903610 - DNA, 120 bp, Artificial Sequence
  ENSG00000227885_13 (sequence is synthesized)
gctgcagaaataagcaggcaaacgcgagtttctgagccagttccagcccggcccagatgttggcccctgacaactagctgtggctggtgcggagggaggagcgagggaagaggggcagat

SEQ ID NO: 903611 - DNA, 120 bp, Artificial Sequence
  ENSG00000227885_14 (sequence is synthesized)
cgaggctgccaggtgagcatcctccatacagctcctgcttttctgctacaaccccagtcccgtccagcccggatgaccggggaggctcactattgggttataacaaccattccctcgccc

SEQ ID NO: 903612 - DNA, 120 bp, Artificial Sequence
  ENSG00000227885_15 (sequence is synthesized)
cgactcattcctgcggaccacggccggaatcctgaactgcccctctttgcctgtaactgtttgcaacacagtccccatctccgaataaccaaattttctcctttaatgaagggttgctaa

SEQ ID NO: 903613 - DNA, 120 bp, Artificial Sequence
  ENSG00000227885_16 (sequence is synthesized)
agtcaaggtcaatcacaatgatgaatcatttccttgggggcttctctgattccccacccggccgccccttcgttccacactttccctttcaagcatactcaaactccaggtttccacctg

SEQ ID NO: 903614 - DNA, 120 bp, Artificial Sequence
  ENSG00000227885_17 (sequence is synthesized)
tggtcttttcaactttactaggagggctcctttcttcccagtccgtaaggaggggtctgactttcatttccaccccagcattatcaccttaactctcattccagtcaatcccgaaactcc

SEQ ID NO: 903615 - DNA, 120 bp, Artificial Sequence
  ENSG00000227885_18 (sequence is synthesized)
gttgccctacccacttcacccttcttttgtttgtcctgatttgattcctgcgttctcacagagggctacctggactttgaacctccacccccctttctacattcttgcattccagaaaca

SEQ ID NO: 903616 - DNA, 120 bp, Artificial Sequence
  ENSG00000227885_19 (sequence is synthesized)
tatgaagctcatttctgccacccttcctagaaaactggttcctgacagagacatgtggaaagtatctgcacccaaggacccacacccaaggagcagtaccagagggaacacatctgaaga

SEQ ID NO: 903617 - DNA, 120 bp, Artificial Sequence
  ENSG00000227885_20 (sequence is synthesized)
gccctatctggatttgccaacatgatttagatgataagatactggactttgagctggtgccataatgggatgaggctttgggagtccaaagggagataagtgtaagtgtatttcaccggt

SEQ ID NO: 903618 - DNA, 120 bp, Artificial Sequence
  ENSG00000227885_21 (sequence is synthesized)
tgcatagtcccctcccgcactgaatctgggttaactttgtgactttctctaactatcagaatgtgacagaagtaacaatatgatacatccctccatttagtgagatcatctttaatttct

SEQ ID NO: 903619 - DNA, 120 bp, Artificial Sequence
  ENSG00000227885_22 (sequence is synthesized)
cccaataatgttttgtagttttctgtgtagaggtcttacaaattttttagattgattctttgacatgtgacttttctatgctgttgataaatgatattttgttaaaatttttattttcta

SEQ ID NO: 903620 - DNA, 120 bp, Artificial Sequence
  ENSG00000227885_23 (sequence is synthesized)
attgcttgttactagcatatagaaacttaattacatatagaaactaagtacaggactttgtttattgactatgtattcagtggccttggttaattcctcttttaattgtaatagtttttc

SEQ ID NO: 903621 - DNA, 120 bp, Artificial Sequence
  ENSG00000227885_24 (sequence is synthesized)
tgtagttcttttggatttttctatgtgtataattatatatgaataatgacagattcatttcttaatttccagtcctctaatagggtttctttatttctttttctaactttgatgcactag

SEQ ID NO: 903622 - DNA, 120 bp, Artificial Sequence
  ENSG00000227885_25 (sequence is synthesized)
ctagaacctacaaaataatgtggaaaaaaagcaaccatccttgcctcattcctgattttagaggaaaagctcttaatattaactatgatgtttttaatggggtttatttagagatctttg

SEQ ID NO: 903623 - DNA, 120 bp, Artificial Sequence
  ENSG00000227885_26 (sequence is synthesized)
tgaaggcaagagtttttttaataaatgaatcttgagttttataaaaaatttttactgcatctatcaagatggtcatatgatttttaaattctgttactgcagtaaattatattgattttt

SEQ ID NO: 903624 - DNA, 120 bp, Artificial Sequence
  ENSG00000227885_27 (sequence is synthesized)
taatctaaaaacaatcttacatatctgaaataaacccactttggtcatgatgcattattctttttgtgtaacactggatttgattcttttatttatttattttagagtttttgcttatat

SEQ ID NO: 903625 - DNA, 120 bp, Artificial Sequence
  ENSG00000227885_28 (sequence is synthesized)
gttcacaagagacagtgacttgttatttttttcttgtatgttcttgtcaggtttgagaatcaaggatatgttggtcttacaaaattatttgggaagtacttgttcttttttaactttctg

SEQ ID NO: 903626 - DNA, 120 bp, Artificial Sequence
  ENSG00000227885_29 (sequence is synthesized)
gaaaagtttttataaatttgatatgattacttctttaaatatttggtaaacttcactagggaagcatctaggatgggaaaatttttagttatggactcaatttctttaatagatataaaa

SEQ ID NO: 903627 - DNA, 120 bp, Artificial Sequence
  ENSG00000227885_30 (sequence is synthesized)
ctattcaaatccttctatttccaacactctgattttggcacattgagattctctatgaatttgtctattttatctaaattttcaaaattactgacataaaagtcacatagacctcttagg

SEQ ID NO: 903628 - DNA, 120 bp, Artificial Sequence
  ENSG00000227885_31 (sequence is synthesized)
atttttttaaatgagttttcattcttgaaattatttatttgcacattctcactctctcttcttgatcaaactggccagatgtttgtcaatttaaggctcttaaaaaaaaagatacaacct

SEQ ID NO: 903629 - DNA, 120 bp, Artificial Sequence
  ENSG00000227885_32 (sequence is synthesized)
ttggatttgttaaacctcattatacatgtatttgtattttttccattggtttctagtttgttgtttataatttacctaatttactttttttgagttaaaatttgcttttctttttcaaac

SEQ ID NO: 903630 - DNA, 120 bp, Artificial Sequence
  ENSG00000227885_33 (sequence is synthesized)
ttcttgaaatggatacttacatgattctatttccctaatgctttatttaagcctataaatttcccttgaatcatagactcggattcagcccacccattttgatatgttacatttttaata

SEQ ID NO: 903631 - DNA, 120 bp, Artificial Sequence
  ENSG00000227885_34 (sequence is synthesized)
tattaaatataaaatgtcttctcattcctattgtgattttggtttgacctattgaatcatttagtagtacattattaacttctaaaactgggaggttttagtatggcatttttgttattt

SEQ ID NO: 903632 - DNA, 120 bp, Artificial Sequence
  ENSG00000227885_35 (sequence is synthesized)
attgctcgtttaattatatgtggtcagaaagcatattccatattatttcagtttcttaatctttgttaaggcttcctttatggtcaagcatatggtcaaatttttaaataaaattctata

SEQ ID NO: 903633 - DNA, 120 bp, Artificial Sequence
  ENSG00000227885_36 (sequence is synthesized)
gattttctggttctaatgagatcaaggacatgaagaggctgagtgcctccatgagcttcattattttccatgatctgacctctcattctcttaagctttggagttggatgaaggaagaac

SEQ ID NO: 903634 - DNA, 120 bp, Artificial Sequence
  ENSG00000227885_37 (sequence is synthesized)
tctgccacccttcctagaaaactggttcctgacagagacatgtggaaaggtatctgcacaagaaaaagtgaaaacatatgtccaagcaaggattgtttacaaatgtgcatagcagttttg

SEQ ID NO: 903635 - DNA, 120 bp, Artificial Sequence
  ENSG00000227885_38 (sequence is synthesized)
ataatagccccaaactggaaacaatccaaatattcatcaacagacggatacagtgtagtatagtgaaacaatggactagcattcaactaaaaggagcaagctactaatacatgtagcaat

SEQ ID NO: 903636 - DNA, 120 bp, Artificial Sequence
  ENSG00000227885_39 (sequence is synthesized)
gtgcataaatcgcaaaaactatgttgtgtacaaggcaaacacaaatgagtacatactatatgatcccatgtatataaaattctggaaaatgcaaactaatataaagtgacacaacctaaa

SEQ ID NO: 903637 - DNA, 120 bp, Artificial Sequence
  ENSG00000227885_40 (sequence is synthesized)
tacttacaggtaagtaaacctgggcccaagatcacagagcacacagctggaattcacagcaagacctgattgacttcgaagtcagtggtctttcccctgcttcccacgagacagttttga

SEQ ID NO: 903638 - DNA, 120 bp, Artificial Sequence
  ENSG00000286812_0 (sequence is synthesized)
agggttagcaggtcctccatattctaatgtgcacggaattccagggcactgaattataagctgaaataagcacacaaaaggccgacaggataaacttccccttctcctgatttctgggag

SEQ ID NO: 903639 - DNA, 120 bp, Artificial Sequence
  ENSG00000286812_1 (sequence is synthesized)
tcagaatgcttcaccctgtttctgataatctccttctcagatttctgcaatttgcatttcccattgttctacttattgggggcttggaggcatacaggcttaccacggagcatcccatac

SEQ ID NO: 903640 - DNA, 120 bp, Artificial Sequence
  ENSG00000286812_2 (sequence is synthesized)
ttccatctgccttgtggacacccattccacatttccagggattccctaaaggatgatatcatgggaaagagtgcagaatccaggagcaatgacctcatctttatcccaactttcagtgct

SEQ ID NO: 903641 - DNA, 120 bp, Artificial Sequence
  ENSG00000286812_3 (sequence is synthesized)
ggcagaagagcttcgggacctccatgtggccccactgaaaactgttgcttatggactactctgtgatgtcaacctttcacgggaaagacaggcagctcaggaagccacgttccatcttcg

SEQ ID NO: 903642 - DNA, 120 bp, Artificial Sequence
  ENSG00000286812_4 (sequence is synthesized)
ccaactactgggaagctccatggacagctggcaaatgaaatcaacttccatgttgcctctccctctccacctcctgtgcctccctgtcctcagctggggctgtcaggccaaatggtccct

SEQ ID NO: 903643 - DNA, 120 bp, Artificial Sequence
  ENSG00000286812_5 (sequence is synthesized)
gaggcctcacgcaccatctattttcaacacacatcactgttttcctctgcaaagtgggacttctgttaggccctatagaatcaatacggcagccctgagcctaagacacaggcgttcact

SEQ ID NO: 903644 - DNA, 120 bp, Artificial Sequence
  ENSG00000286812_6 (sequence is synthesized)
gcttccagcaaccaggtgtgcaaattagaacaagaaagattattgtgcattttaaaaaaaggtctttcctaggacttttttaaaaaccagagaacatgccttaggacatctaactatttg

SEQ ID NO: 903645 - DNA, 120 bp, Artificial Sequence
  ENSG00000286812_7 (sequence is synthesized)
tgaagtatttattttagcatgatctccctgtgaggggtgcagtcagggtgcatttcacctttctaccactagacagcacgaagcaaaggtgcactgcggtgagcacaaaagaatgaggct

SEQ ID NO: 903646 - DNA, 120 bp, Artificial Sequence
  ENSG00000286812_8 (sequence is synthesized)
gcagcttattggaacttgcagcaaaactgggcagaaactgcaggcctagggagagaggcaaaaaatcccatagaaatctgcaaaatccaggggagttccaggcaccctcaaagaacctga

SEQ ID NO: 903647 - DNA, 120 bp, Artificial Sequence
  ENSG00000286812_9 (sequence is synthesized)
gactaggccagccacaggatcagaaggccaggacacaggccaagccgaaatggtgggaaagagcaaggccaatgttagcaaagaaaatccaactgaaaataaggtagagaaagagaagga

SEQ ID NO: 903648 - DNA, 120 bp, Artificial Sequence
  ENSG00000286812_10 (sequence is synthesized)
gagccgagctctggggcctgctggtaacagagaacaggcaggaagggaggtccatggtaacctgccagagagcctgggggactcccacatgagaacctgtgctctgagagggcatgggga

SEQ ID NO: 903649 - DNA, 120 bp, Artificial Sequence
  ENSG00000286812_11 (sequence is synthesized)
tgaggattcctgagcagtcaggggcctcacttcctttggggaaaactaggggtgccttctcccaggagggctgtgaagtgttaggcatgtcagctcttggcatgggacagaagggactgc

SEQ ID NO: 903650 - DNA, 120 bp, Artificial Sequence
  ENSG00000286812_12 (sequence is synthesized)
ctataaatgctggcttgaggtggaggtgcaggcggtgacagctaaggggtgcgactgactccccgtggatccagaggggagtggacagtaagccatgtcagaccacgggacctgggggcc

SEQ ID NO: 903651 - DNA, 120 bp, Artificial Sequence
  ENSG00000286812_13 (sequence is synthesized)
gtgtggactgaggtggggccaccaaccagccccagcaactgaggcgaggccaagaatggcgctagctctgctccacttcctccagcagagcaggattgctcattttaaagctgtaccgcc

SEQ ID NO: 903652 - DNA, 120 bp, Artificial Sequence
  ENSG00000286812_14 (sequence is synthesized)
catgtcccagccactgttttagatattaacatgtttaatcctcacatcagccacaggaagtaggtgttgccatcatctctactgtaccattgagaaaaggcagatagcaatgaggtcatg

SEQ ID NO: 903653 - DNA, 120 bp, Artificial Sequence
  ENSG00000286812_15 (sequence is synthesized)
gatacaaacaccatgctgtccacagaatcccaggcctgggggtgtctgcaccctgtccacccttgtgtccccctgcaggggctccttaccagccctgcctcagcccctatgaagacccag

SEQ ID NO: 903654 - DNA, 120 bp, Artificial Sequence
  ENSG00000286812_16 (sequence is synthesized)
gggaagcgccaagcccaaagacccttctcccagtgactcccattcaagacagacccagcagaggggcagtgagaccttaagtgggcccctataataaatttccatttattaattacatct

SEQ ID NO: 903655 - DNA, 120 bp, Artificial Sequence
  ENSG00000286812_17 (sequence is synthesized)
gaaaatactggaaggaaaacatggtactttttccttccatgccagacacaagcgtctttaagaggttcagtgtactgcagaaggcgaaagtttactgtgccctttttacaccagctcaaa

SEQ ID NO: 903656 - DNA, 120 bp, Artificial Sequence
  ENSG00000286812_18 (sequence is synthesized)
tgttgcctttctcccataaaacatgcaccagacctcactagctcaaaaggcaaagaacaggatggctgtggggcaatcaatttcagtaccattttgaattaggtggttgctgttttgctg

SEQ ID NO: 903657 - DNA, 120 bp, Artificial Sequence
  ENSG00000286812_19 (sequence is synthesized)
tatgtgtggggacctcatgttctttcacactgtgtgacatcccaattggcctgtcccctgacttcttgtgcccacaggtccttactgaagtggattcagaggattctatcataacctaag

SEQ ID NO: 903658 - DNA, 120 bp, Artificial Sequence
  ENSG00000286812_20 (sequence is synthesized)
ttagcaggcacatggagattgtttgtagcgcacccagcaggagatgcactccaagagcgagctgcggggagaggaggcggtggagaaagaggcctggtcctcagggagcgaacacagcca

SEQ ID NO: 903659 - DNA, 120 bp, Artificial Sequence
  ENSG00000286812_21 (sequence is synthesized)
gccccatcattttctgatggcactgggaggtgggtttgatgaggtactgggcaggaatggtcacccagggtgcagggaacccaagtagaggctgccgtggaggaactcatgctgacctga

SEQ ID NO: 903660 - DNA, 120 bp, Artificial Sequence
  ENSG00000286812_22 (sequence is synthesized)
tttacacggtgggcttcagcttggttggttaaaaaaaagacacacacacgaaaacccacagcacaaagccttctagcaggagatagacacaggcttggagagggaacacagatattgtgc

SEQ ID NO: 903661 - DNA, 120 bp, Artificial Sequence
  ENSG00000286812_23 (sequence is synthesized)
ggaagaatctgaccgcattctggagattctgcacacatctcccaaggagaggcggcagcacacggcagcagccgctggagctctgcatggcactccctgggctgggcaccgcacttggct

SEQ ID NO: 903662 - DNA, 120 bp, Artificial Sequence
  ENSG00000286812_24 (sequence is synthesized)
ctctatgcagggcccaagctgcagtgggtgtaggccacttgctcagagtcacaccaggccgtctggctctcggggccttggcccaggccactgtggcctcctttgcctgcacactgaccg

SEQ ID NO: 903663 - DNA, 120 bp, Artificial Sequence
  ENSG00000286812_25 (sequence is synthesized)
aacactcagacgttagccacacagggtgcctcctgacttggggctgctgttggaaagtgacagagtagctctcacctgggaggaaggcaaaacactgacctctgctctctgggtaataat

SEQ ID NO: 903664 - DNA, 120 bp, Artificial Sequence
  ENSG00000286812_26 (sequence is synthesized)
ttaggaaacaccaggtggtaatggcaaagtactgaccaacagatcagactgcttttctgtttcttgtttagcctgatttatcctcttccccttagaaaaaactagcaaaatacaatttga

SEQ ID NO: 903665 - DNA, 120 bp, Artificial Sequence
  ENSG00000286812_27 (sequence is synthesized)
aaagagctaataaagtatccacattttaagaataaaaatgaaacaaatgaataactcaattgaattcaacagtgattttgcttggtatagtgctaaaggatttttggaggaggcaaccac

SEQ ID NO: 903666 - DNA, 120 bp, Artificial Sequence
  ENSG00000286815_0 (sequence is synthesized)
acaggattatctcatttcttacaaaagttacccatggtgctgagaaaactagaaactggactgtagatgatgcttgttgtgtttctacgcagaaattgcatggaactgaacatgaattgc

SEQ ID NO: 903667 - DNA, 120 bp, Artificial Sequence
  ENSG00000286815_1 (sequence is synthesized)
attacaattgaaactgtttctaatattattcactaatgggcaaatccattactttaggtccatttcttatacaaggaaattcagttactccgaggacaattcagctagccaagagtccct

SEQ ID NO: 903668 - DNA, 120 bp, Artificial Sequence
  ENSG00000286815_2 (sequence is synthesized)
gtacagtgagcaatcttttggggtcttatcttctcatcactgaagaatttctatgtggacactaaagtaatattaaaaccactcactctcacaggtggcaagaagaaaagtttaagaatt

SEQ ID NO: 903669 - DNA, 120 bp, Artificial Sequence
  ENSG00000286815_3 (sequence is synthesized)
tctttatgaactctgtcctcttttctcatacaatttatcttttccacatatggatggaaaaaaactgcagaaaatataatgaaatggataaccatatattttttaaaatagaaatttttg

SEQ ID NO: 903670 - DNA, 120 bp, Artificial Sequence
  ENSG00000286815_4 (sequence is synthesized)
agtattgacattcaaggttttaattctagatttaaaaatacattttatttacacactcatcagttaatggacgcttgaattattttcacttttggtctattatgaataatgctactatga

SEQ ID NO: 903671 - DNA, 120 bp, Artificial Sequence
  ENSG00000286815_5 (sequence is synthesized)
acattaatgtataagtatttgtgtgaacaaatagaacagacatggtcagttctcttgggtatattcgtacaagtagaatttctgggtcatatggcagctctatgtttgattttatgcaga

SEQ ID NO: 903672 - DNA, 73 bp, Artificial Sequence
  ENSG00000251310_0 (sequence is synthesized)
gacctcgtccaccctccttcctggtgcccttttaaaaacaggaagagggagagagtgatcttgctctagcaac

SEQ ID NO: 903673 - DNA, 120 bp, Artificial Sequence
  ENSG00000251310_1 (sequence is synthesized)
gcaacgaaccaattgatgctgaaatggatagaagtagcacgagtgaaaactgaagcagaggcatcaggaagacgcatcctcagaagctgtaagacagcatggcgtgggagacggcccctc

SEQ ID NO: 903674 - DNA, 120 bp, Artificial Sequence
  ENSG00000251310_2 (sequence is synthesized)
tgtttcgtctcctcaagttccgtggcagactagtaagactgagtttgacaccttgggagagacacgtctgccaagtttgtcatccattaaattcacattaaatgataagagttgaccaca

SEQ ID NO: 903675 - DNA, 120 bp, Artificial Sequence
  ENSG00000227880_0 (sequence is synthesized)
aaggaagctgctacattggagatgcctgtgtgaccaggaactgtcccagttcctgcaggaccctcagtcctacaatctgcaagaaatcgaattctgccagcaagcaagtgagtgagttta

SEQ ID NO: 903676 - DNA, 120 bp, Artificial Sequence
  ENSG00000227880_1 (sequence is synthesized)
agtcatgtcctgttccagccaagcctattaggatgatactgcagccccagaccttaatggtagactctgagagaccctaaaacagaggagccaggtaaacctcgatggctgacctacaga

SEQ ID NO: 903677 - DNA, 120 bp, Artificial Sequence
  ENSG00000227880_2 (sequence is synthesized)
aatcatgagatacccgtgctgttgtttcaagcatctctgctttgagttcatgctgcctattggatggaatctcagagggcgctatcagctggaacactgaacattggccttcccacgtgg

SEQ ID NO: 903678 - DNA, 120 bp, Artificial Sequence
  ENSG00000227880_3 (sequence is synthesized)
ggcagagcccggtgaaagcttcactgccttttgtaacctagccttagagctcatgcagagtcccttccaccaccctgcctctattcactgaggcagtcacaaagactgtccatattcaag

SEQ ID NO: 903679 - DNA, 120 bp, Artificial Sequence
  ENSG00000227880_4 (sequence is synthesized)
gggtaggggactggattccaccgtttgtagggagcagtgccaaagaatttgcggacatgtttcaaaacatacagcccctgctctgtggacactgattatccttgttctggtcccatgtat

SEQ ID NO: 903680 - DNA, 120 bp, Artificial Sequence
  ENSG00000227880_5 (sequence is synthesized)
actctgtgggctactcctttttactgggggatgggaggttgggatttttcagtcctgagtcaaacctcccttcctggggccagtgtgaatatatggggagaaggctgagactgtgaactc

SEQ ID NO: 903681 - DNA, 120 bp, Artificial Sequence
  ENSG00000286819_0 (sequence is synthesized)
gaaccgatttcggctccgcgtccaggagcaggccctacgtagggccgggggaattcagccggcaaaaatgagacgtcaactaagcgccgtttcagtcccagagccaggtcgtccatgggg

SEQ ID NO: 903682 - DNA, 120 bp, Artificial Sequence
  ENSG00000286819_1 (sequence is synthesized)
gttttcaagcgttttctcgatgactgatttttctagaagcgaatggattttattctcccaggtgtaaaggctacctcctgcttcacacccgggtaacataaaagacagcgctgggaccga

SEQ ID NO: 903683 - DNA, 120 bp, Artificial Sequence
  ENSG00000286819_2 (sequence is synthesized)
aactcgggtctcctgggtcctggttggctggagagaggggcaatgaacgtcccgaaaagaattctgtcttttctcaatatctgggaggactcataacagggtagataatcaggatggatg

SEQ ID NO: 903684 - DNA, 120 bp, Artificial Sequence
  ENSG00000286819_3 (sequence is synthesized)
tttggcaggtgggaatctttgagacggtctgtgcacacaattttaactctacttttgccagtttggaggacatgaaattcctgatgagtgtatgttaaaagggaatagagaaggtaatat

SEQ ID NO: 903685 - DNA, 120 bp, Artificial Sequence
  ENSG00000286819_4 (sequence is synthesized)
acacaacgttctaaaataattgcttttcgtggaggcaaagtggctaagcagtccaaagcgctggatgaaggctctaatctcttggggtgtggaggttctagcctgtttagccacagaagt

SEQ ID NO: 903686 - DNA, 120 bp, Artificial Sequence
  ENSG00000286819_5 (sequence is synthesized)
ataatgagttttgatacttaaaataaaatggaattattggagtgaattttgtttggttctgttgaatttgttattcttacacacactagccagattctacttatttgtgggcggcaagcc

SEQ ID NO: 903687 - DNA, 76 bp, Artificial Sequence
  ENSG00000286819_6 (sequence is synthesized)
ggccagcagcccgttgccgagcggacggtggtctagcagaagcctcagtgtcaagaaaaaacaccggctgcttagc

SEQ ID NO: 903688 - DNA, 120 bp, Artificial Sequence
  ENSG00000286819_7 (sequence is synthesized)
gcccgttgccgagcggacggtggtctagcagaagcctcagtgtcaagaaaaaacaccggctgcttagcagaccggaaaagggagtctccctctccccgggggagtttagagaagactctg

SEQ ID NO: 903689 - DNA, 120 bp, Artificial Sequence
  ENSG00000286818_0 (sequence is synthesized)
actgacaactgagagggtggaagaggagagaagaaaaggctgctgcagagacaggagcacaggaacccacagttgatagagagcctgggagcaaaggaaaggaaggaagcaaaacaaaaa

SEQ ID NO: 903690 - DNA, 120 bp, Artificial Sequence
  ENSG00000286818_1 (sequence is synthesized)
gacgaatgcagcaggacctccattagccagccagcttggggaatgggtcattatggttaatggaagtttctagttaactgtgaatgaagccaaaatcttttttgtcttaaccccttaatt

SEQ ID NO: 903691 - DNA, 120 bp, Artificial Sequence
  ENSG00000286818_2 (sequence is synthesized)
tagaaaagctttccacaaaatgtgacttcactttcttatctctgttacagatggggactatgagatcttacggcatctcaaagggcagaagtctggacaggaagaccagttgcatagtgg

SEQ ID NO: 903692 - DNA, 120 bp, Artificial Sequence
  ENSG00000286818_3 (sequence is synthesized)
agggaagtatcctaacctggattaaatatatgctgaattcctctgtttatcctaaaagctaaatccctgatataaacttgctttttcatgtttttatgatttagctttattttagggatt

SEQ ID NO: 903693 - DNA, 120 bp, Artificial Sequence
  ENSG00000286818_4 (sequence is synthesized)
taactttattttaaccatgggttactgagaatttttgttaaagtttaatggcattgtgtactcctattcactcttcagaatctcagttcaatatcacttcctccatgaagccttcctgat

SEQ ID NO: 903694 - DNA, 120 bp, Artificial Sequence
  ENSG00000286818_5 (sequence is synthesized)
tactttttcctttcttccctcaggccctcccagttatttccctctctaaggagcatactatgtttaaataatttgttaacatgagctacagggggcaggtggttgagggagggctttctc

SEQ ID NO: 903695 - DNA, 120 bp, Artificial Sequence
  ENSG00000286818_6 (sequence is synthesized)
tgtgagtctgcttattaagaagctgagctcccagtccttgccttgtgataataatcaagccccattacttgagagctcgcagagggcagaaaacaagggctgcttcactgttacatgcac

SEQ ID NO: 903696 - DNA, 120 bp, Artificial Sequence
  ENSG00000286818_7 (sequence is synthesized)
aggccatggcctgaaacaaggaagggaaggagggagaaaacaacgggaggacaaattctataaacaggtcagaggagagggagagacattatttatcagcttggtgatttcaacttaatt

SEQ ID NO: 903697 - DNA, 120 bp, Artificial Sequence
  ENSG00000286818_8 (sequence is synthesized)
ctgagaagacttaatccatgtctgtttccctctggtctgtaaaacaaaatgcctcctacaatgtttctgagttgtttcacaactcaggaagacgatatttctctttgccataagacaata

SEQ ID NO: 903698 - DNA, 120 bp, Artificial Sequence
  ENSG00000286818_9 (sequence is synthesized)
catttcctaaacgtactgtagtgggtaagggtagggtgggagtttaaaaaagaaaatcagtcagcagctatgaagagccaaaaggacacagtgtcagatctgtggaaattgaacctaagg

SEQ ID NO: 903699 - DNA, 120 bp, Artificial Sequence
  ENSG00000286818_10 (sequence is synthesized)
atagatctgagaccaacaagagttaaatggtcaactccactcaacatttgctgagtctctattctgtgggccctaatagaaagtcaccaaaacagttcttgaggggtcaggacctattgc

SEQ ID NO: 903700 - DNA, 120 bp, Artificial Sequence
  ENSG00000286818_11 (sequence is synthesized)
tgagagtggcaagtcaggagtaaagcaaaaagagggcaggactggcctcatgtccagttgcacagccctggttgtgccatgtctctgggctgggagacagctgcctggccactggccctt

SEQ ID NO: 903701 - DNA, 120 bp, Artificial Sequence
  ENSG00000286818_12 (sequence is synthesized)
gggccattaaaaacacagggccacagaaggagcaggcagggctcatatctgggggattagctccatctgccctgagtgcagtggaaaccgtgcatccttcctcttccctgggcctcatcc

SEQ ID NO: 903702 - DNA, 120 bp, Artificial Sequence
  ENSG00000286818_13 (sequence is synthesized)
ctgaaaaacaaataaaccaacagctctctgtcaccatgggttctacagacctggggatacacggcaaaggcctgtcgtggaggttgtaactctttgtcctttaggattcccaaggtagac

SEQ ID NO: 903703 - DNA, 120 bp, Artificial Sequence
  ENSG00000286818_14 (sequence is synthesized)
cacgtgtgtgccagcccagcaggcaaactgccccgtatgagtttgtccatcaactgtgcgtgcagatctttactcgcatgcatgacacaggaagcccacgggacacttccccagcacgcc

SEQ ID NO: 903704 - DNA, 120 bp, Artificial Sequence
  ENSG00000286818_15 (sequence is synthesized)
ccgcttcctctgcactcctggaaggaagacctgttcttgcttcttccgtactctcaggatctggcacagaacccgacaaaggaaatatttaatgaactatggcgtaggcctggccctgaa

SEQ ID NO: 903705 - DNA, 120 bp, Artificial Sequence
  ENSG00000286818_16 (sequence is synthesized)
cgacaccctggggacccagcagcagcaaggtgcagcttctgccctcagcaacctcacggtctaatggacgcggcacagtgggcaggaagtgacaccaaagagcatcaggattaggaagtc

SEQ ID NO: 903706 - DNA, 120 bp, Artificial Sequence
  ENSG00000286818_17 (sequence is synthesized)
tgttcggattagcatggaatcagagtctccctgccctgggaatcattgctggccatggcagttgctgagactgggagctaaaaggtgcatctgagttggagtcttgtcatgttccttcag

SEQ ID NO: 903707 - DNA, 120 bp, Artificial Sequence
  ENSG00000286818_18 (sequence is synthesized)
gtgtgtgttggaccaagctgcctaccatgtgtacgcatactgcccacacatgtggttagcaccctggatggttcgattccatgtcagcttggctgttggtgggaagtggatgagtggtcc

SEQ ID NO: 903708 - DNA, 120 bp, Artificial Sequence
  ENSG00000286818_19 (sequence is synthesized)
atggtgagttcactcatttcaaaatggcagcctgtgtttactaatggatcgaggcctcttgggtttttctaattgactgaggccattatttctctctagcactcaattccgggggtaact

SEQ ID NO: 903709 - DNA, 120 bp, Artificial Sequence
  ENSG00000286818_20 (sequence is synthesized)
agaagtgatgacttataatcaaatttaggatttttatctttcatttattattattatattcaaatttagaattattatcctattcgttgcagtttcactttgtcttatatctgtcttcta

SEQ ID NO: 903710 - DNA, 120 bp, Artificial Sequence
  ENSG00000286818_21 (sequence is synthesized)
cacaggccttaacaatatagttgtttctgactggttcactagagaagccttggtatgagtcaagggtgggatgtcttcctcagcctgtcatggaaagattcccatgaatcttcttcagga

SEQ ID NO: 903711 - DNA, 120 bp, Artificial Sequence
  ENSG00000286818_22 (sequence is synthesized)
gggcaggtggtcatgtttctggcccaccagctctgatggttgcactatctagggcccattaagctgccttagaagagcttggcactgcaggaggtagggccgagtatcctgtttattgag

SEQ ID NO: 903712 - DNA, 120 bp, Artificial Sequence
  ENSG00000286818_23 (sequence is synthesized)
ggccagaaagccctttcagagcctattcttctcatctgcacactttcagcagactctctggagcagcccagcttcccagaactgagatcactaaaccaagaagaggaggcaccttggacc

SEQ ID NO: 903713 - DNA, 120 bp, Artificial Sequence
  ENSG00000286818_24 (sequence is synthesized)
tgggtaaaggctcctttccaagctactgcacaaagaggcccaggagaaatcaaaagatcatggactgtttttgctattgcatgtgttccaccttcagtatggactgttgccctccttgca

SEQ ID NO: 903714 - DNA, 120 bp, Artificial Sequence
  ENSG00000286818_25 (sequence is synthesized)
ggtacttccctttaacttttctttttggctaagatcctttgcaatgtattgtagaacttctgcctgccagatgttttcccctaaagtctacatcaatgtcagtagtctattcttatggat

SEQ ID NO: 903715 - DNA, 120 bp, Artificial Sequence
  ENSG00000286818_26 (sequence is synthesized)
tcaataattcattacaattctgaactggatttgcaggatcactctattattataaaggagagaaaaccctataccaaaaggggcaatgcatgtagcattttttctttttttgaaacatgt

SEQ ID NO: 903716 - DNA, 120 bp, Artificial Sequence
  ENSG00000286818_27 (sequence is synthesized)
atgagtgggagtttacaacagttttcacattctgggagtaccaccgtgttcctgaggactcaggagactcagcgggctaacagtgttgtgtgtggaatggggttgttatactcaggaaag

SEQ ID NO: 903717 - DNA, 120 bp, Artificial Sequence
  ENSG00000286818_28 (sequence is synthesized)
tacagacccaggctgtcggaatgtgttgactgtttacttggggaaggagagctaactacagagccaatctcctcttgctggggagtgaagaaatgtcaactgcatttccaccctgtctca

SEQ ID NO: 903718 - DNA, 120 bp, Artificial Sequence
  ENSG00000286818_29 (sequence is synthesized)
tcagctttgtccctcccttctctactctatgtctcctcccacatccaaaacataaacataagtaaggacctcggcccagtcgcaagatcgtttcagttcctttcttctcgcacctctgcc

SEQ ID NO: 903719 - DNA, 120 bp, Artificial Sequence
  ENSG00000286818_30 (sequence is synthesized)
ttccacacccccacatgggcagctccggggagcaagcatagagtatttaagtccccccttcatggccgtttctcagatagctgggggaaggaccttcaatagtaggagggagtctgctca

SEQ ID NO: 903720 - DNA, 120 bp, Artificial Sequence
  ENSG00000266273_0 (sequence is synthesized)
ttttttttcttttgcctctagcccagttttagaaaggactatgtcttggtccttcttaatggtataaaagatatcctcagcccgccagatgctcctgcatttgagtgacgacacgcttct

SEQ ID NO: 903721 - DNA, 120 bp, Artificial Sequence
  ENSG00000266273_1 (sequence is synthesized)
caggacttcttgttcaatacttgctggatatgaagatccaacccagtgcctcccattgcatccactcctcacaccaccgtctccatggcgtgacagttcctcagtttttctttgttgttc

SEQ ID NO: 903722 - DNA, 120 bp, Artificial Sequence
  ENSG00000266273_2 (sequence is synthesized)
atgaccttcaccttttggaaaggtactggccagtcactttgcaaaatgttcctcaatttgtgtttgcttgatgttttctcctgattaaagtgatgcattttgggcaagaacatcataaaa

SEQ ID NO: 903723 - DNA, 120 bp, Artificial Sequence
  ENSG00000227888_0 (sequence is synthesized)
gacccgggctgcggggctccggggcgtctggcctgggtgggactgagcccatccagggactgggactctgggattctggtgtaggtggatccggggcaggctcaggaccaagtccctctc

SEQ ID NO: 903724 - DNA, 120 bp, Artificial Sequence
  ENSG00000227888_1 (sequence is synthesized)
cttccaccaaggagcgcccagaggccggcgggagctccaggttcacctcctcctcctccaggaaatcccacttccagctagatgtctgcatgaactactgaaagctgctgagtgtcttgc

SEQ ID NO: 903725 - DNA, 120 bp, Artificial Sequence
  ENSG00000227888_2 (sequence is synthesized)
tgttcacgccattttcaatccagaggaagaccttctaaaagaggtgatggatgggagagtgctgacatactatgtgaagctactatttggagttggacacgagtgcatgtgaccttgtgc

SEQ ID NO: 903726 - DNA, 120 bp, Artificial Sequence
  ENSG00000227888_3 (sequence is synthesized)
gagtgcatgtgaccttgtgccacagcgggaatcttgactaccacacaaatgaatccattcaaatgttggcaagtggagcagagtcccaggacagtctgcaatctctacaggtacagaaac

SEQ ID NO: 903727 - DNA, 120 bp, Artificial Sequence
  ENSG00000227888_4 (sequence is synthesized)
atgcgcggtctgcctcccgcggcgggccgggtctccagggaggacctgagttttcttcacccattgtcagggaggcgccatcgccctggctttggggctggggcctccggggaggttccg

SEQ ID NO: 903728 - DNA, 120 bp, Artificial Sequence
  ENSG00000227888_5 (sequence is synthesized)
gtaggggcgttggagaggccgctctttttgcaaggcccgagacggcgggccctgcgcaggccgccctattccgcgccctcagggcgtcagtatcagcctgaggctggatacccccgctgg

SEQ ID NO: 903729 - DNA, 120 bp, Artificial Sequence
  ENSG00000227888_6 (sequence is synthesized)
agtatcagcctgaggctggatacccccgctgggcccggatgaccccgctgggcccggagcatcctccggcgctgccctcccagagccacgcagaggctgaggtggcgcgggggcggcccc

SEQ ID NO: 903730 - DNA, 120 bp, Artificial Sequence
  ENSG00000227888_7 (sequence is synthesized)
tagcaggcccaggccccagaagtatggaaaaaatgaggtagggagggaggggacctcaggagaagactgaggtctacagaatcccagggtcaaggggatggtgcggtgtccgggcactgt

SEQ ID NO: 903731 - DNA, 120 bp, Artificial Sequence
  ENSG00000227888_8 (sequence is synthesized)
ccttgatgttccaagaggggtgagaatccatctcctgagtaaaaacttcacatggagtgaggaggggagaagtgaacagagaggaagcagggaaggccaagacagcgaccagcctcacag

SEQ ID NO: 903732 - DNA, 120 bp, Artificial Sequence
  ENSG00000261275_0 (sequence is synthesized)
ggggtctctagtaacccacctggtctgacactgaggaaacacctacaggctgctgatcccacagtgaggggtgtgtgccacctggggtatgggcgctcgtgaatgagggtccctgctgat

SEQ ID NO: 903733 - DNA, 120 bp, Artificial Sequence
  ENSG00000261275_1 (sequence is synthesized)
cccacagtgaggggtgtttcctgcctggggtatgggaacttgtgagtggggacccctgctgcactctgtccctgttggtgctcgcagctatgggtgtgggctggcacagacaggaccgag

SEQ ID NO: 903734 - DNA, 120 bp, Artificial Sequence
  ENSG00000261275_2 (sequence is synthesized)
ccctccaggggcttccagggttcttgtagggcaggaggggaagggtgtggtggggggcttggaggggtcttgccctcatcccctgccctgttactggggtgagtccagcacctgccctgg

SEQ ID NO: 903735 - DNA, 120 bp, Artificial Sequence
  ENSG00000261275_3 (sequence is synthesized)
ggcccagctggcctgtttttagaagcttcttagagaaggaagaggagaaggagaaggaaggcctggggagcagggatggagggtcctgggcactccccactatttactgtcttagatggt

SEQ ID NO: 903736 - DNA, 120 bp, Artificial Sequence
  ENSG00000261275_4 (sequence is synthesized)
gactcaggaggggacctggtgctagagaccaccttggggtcagtggtcatagtgcatctttctgagctcagccatggaggcctcaaagtgcttcacaatcacatcatcgtccatagccca

SEQ ID NO: 903737 - DNA, 120 bp, Artificial Sequence
  ENSG00000261275_5 (sequence is synthesized)
ggtatgggacagtgcatcttaggaaagctcccacaggacaaacaggagagcttcaggagagggtctaggtttggggctgggcatcaggccaggaggggtctcctgggaggggtctgtgac

SEQ ID NO: 903738 - DNA, 120 bp, Artificial Sequence
  ENSG00000261275_6 (sequence is synthesized)
ttcaccttatttccgccatgggcacctcacactaggcagtgctgggtcctttctagatacccctggggtccagctctgcacaggaggccactaatgggggaagttccagtcagggaagag

SEQ ID NO: 903739 - DNA, 120 bp, Artificial Sequence
  ENSG00000261275_7 (sequence is synthesized)
cttgccacactcctgcctttcatctgagttgtgtcaggggtaggttcggtttccaggaggactcatggtgccctgtccagtccaccaggcctggcttggtttggccgtccctctgggtta

SEQ ID NO: 903740 - DNA, 120 bp, Artificial Sequence
  ENSG00000261275_8 (sequence is synthesized)
aagcagagggtcctgtggacagtgtgagcactgccttcgggccaggtttggtgtgcttgtgtgcttccccagcacccttgggcacatggggacagggttctgtgcactttcaatgccgca

SEQ ID NO: 903741 - DNA, 120 bp, Artificial Sequence
  ENSG00000261275_9 (sequence is synthesized)
tgtgccctggctatgagcatgcacttgccctgcagaaggcagatgtaccagagcctgaggatgagcttgtgatgagcttgacgtaggggtttgtgggaacagcaggcatgggaggacctg

SEQ ID NO: 903742 - DNA, 120 bp, Artificial Sequence
  ENSG00000261275_10 (sequence is synthesized)
gcccttcacggtggagggctggtggcctgagcagggcctactggggcctcagtctgtggtgctgggggccccctctgcatgggatgagacctcccccaggaggctggatcagataaggtc

SEQ ID NO: 903743 - DNA, 120 bp, Artificial Sequence
  ENSG00000261275_11 (sequence is synthesized)
ctgcagctccttatgggggtgttctcatatccatcaaatgtgacccctgaaagagggggctccctgagtgctctcccaagatgagtcctggcccagtctgcccaggatgctggccctgag

SEQ ID NO: 903744 - DNA, 120 bp, Artificial Sequence
  ENSG00000261275_12 (sequence is synthesized)
tcccagccccagccgtgtgatgccccctctcaggcagggcatggtttgtgtgccctgcagggatctgcctctgcctcctgtgcagaggaggggagctgggtccttctggaggagccagac

SEQ ID NO: 903745 - DNA, 120 bp, Artificial Sequence
  ENSG00000261275_13 (sequence is synthesized)
tcctgggcagggtccctggactgggtctcctgtgcacacttgtcccatcaagcaagcactgtaggagtcagtttaaggtggcaatctgggtgcacaacatttgcttgtcttcaaggaagg

SEQ ID NO: 903746 - DNA, 120 bp, Artificial Sequence
  ENSG00000261275_14 (sequence is synthesized)
agcagaggtgttcagaatcccctggactgccctgaaaacctcactcttccaggcccctctgcagacccttcccaaggccagatctctaggcagtaggctgggctgtcaccctcttctctg

SEQ ID NO: 903747 - DNA, 120 bp, Artificial Sequence
  ENSG00000261275_15 (sequence is synthesized)
agaccctacccctgtcctgagacctccccactgcccctcagatgccccatccctgcggattgcccacctcccctggcaccctccatgccccacacgccttacttgatgctgcagcgctct

SEQ ID NO: 903748 - DNA, 120 bp, Artificial Sequence
  ENSG00000261275_16 (sequence is synthesized)
ctgaacatggcatggcttgtgaaggtgtggctcacatctaggtcattctggtgcatgttcagaggacatcttggcctgctccattttctatagagcagggccaagcctcagaacagacac

SEQ ID NO: 903749 - DNA, 120 bp, Artificial Sequence
  ENSG00000261275_17 (sequence is synthesized)
agccaggaaagtcatcagcacacagctcacctgtgttgcccatgccactgtctgcccaggatgtgtgactgaccccttccgcccctttggggttgactttccctccatctgggtagctgg

SEQ ID NO: 903750 - DNA, 120 bp, Artificial Sequence
  ENSG00000261275_18 (sequence is synthesized)
gcttctgacacagtctggcctatgcatcctgctctagctgggagtggaagggccagacctggtgtttccctgggttcttggcctttgtcttctcgacattcagtaggagtgaccgtgctg

SEQ ID NO: 903751 - DNA, 120 bp, Artificial Sequence
  ENSG00000261275_19 (sequence is synthesized)
ggccccagacctctgtgaggattcctttttagacccaatgagacatttgtggacagaagatgctctggtgagacagaccttagggtgactctaaaggggatctgagcctaaggattctgg

SEQ ID NO: 903752 - DNA, 120 bp, Artificial Sequence
  ENSG00000261275_20 (sequence is synthesized)
aagtttccagtctttggctccacagttcctcaggagaggttcagtctgcctaggactgggcctcccttttcacgaagagtgggcaagagctcaggttgtgaactctgatctggatttatt

SEQ ID NO: 903753 - DNA, 120 bp, Artificial Sequence
  ENSG00000261275_21 (sequence is synthesized)
ccttcctatgggatgtccagaaggtgttcctgttcctggcttagaagcagaccatgccaaggcatcagattcctcccagcaaggtgatgcttgcagggatgggcaggagggctagggacc

SEQ ID NO: 903754 - DNA, 120 bp, Artificial Sequence
  ENSG00000261275_22 (sequence is synthesized)
aggcctgttgtcctttcagtgaggaaagtgtgtcctgccctgtctgagaggcaggcagcaccaggaggcaaaaatgggctcctgtcctaaaccctgaagagcagtcatgggggaccctca

SEQ ID NO: 903755 - DNA, 120 bp, Artificial Sequence
  ENSG00000261275_23 (sequence is synthesized)
ctcacagctgtgccttcttgctgttcctagatttattccagttaagcatttataggcatttatctgtgtgtctgatgccctgacgtttttgctgtaggtaagaagtgatggagtgagctg

SEQ ID NO: 903756 - DNA, 120 bp, Artificial Sequence
  ENSG00000261275_24 (sequence is synthesized)
agctgccaggcttcctggagtgattcttggatgctgggtcacgtggttaggggccctgatgggactgaactggaaggaaccagaataggacagaaccaagcccctgattagtgggcactg

SEQ ID NO: 903757 - DNA, 120 bp, Artificial Sequence
  ENSG00000261275_25 (sequence is synthesized)
gtggcctggcctcatgaccacaggacacactgttcccagggcacagacaccctgggctttggttgggtcttggcctccaggtagggccctgttgggcagcgggcagcaactcctgagaca

SEQ ID NO: 903758 - DNA, 120 bp, Artificial Sequence
  ENSG00000261275_26 (sequence is synthesized)
ctactgtgattcttggtggtggctgtggtaaaaaacctgcagggctagagtttggggtgagattcagcagtaactgtggcctctcctagtgacagtatgtcactcccactcccagcacgc

SEQ ID NO: 903759 - DNA, 120 bp, Artificial Sequence
  ENSG00000261275_27 (sequence is synthesized)
atgcccacaggccacggcctccacatcacaaaccccccaccaagttgcccatctatggagcagctcccatacggcagggtcaggctcttacctccacctccagggcacagacagggggag

SEQ ID NO: 903760 - DNA, 120 bp, Artificial Sequence
  ENSG00000261275_28 (sequence is synthesized)
ctctgtctcactgtaaggcaatgaggagagttgagggcccagaccaggctaggggccatcccctttcccgagcaggcctcagggaaggaccagccccattcccatctgacctaggtctta

SEQ ID NO: 903761 - DNA, 120 bp, Artificial Sequence
  ENSG00000261275_29 (sequence is synthesized)
gcccaggagcctgcatagggaagaaaggacagacagggcctccttactggctgacactcaggaggggctggggcaagagagcagagggagcgcagggccaggcaggggctgctgaggatc

SEQ ID NO: 903762 - DNA, 120 bp, Artificial Sequence
  ENSG00000261275_30 (sequence is synthesized)
catgggagctcagggtgcacaagggggctgcccttcctgggctgcaggcagcatcccctatgggagctgagaaagtccaatcctgagatgggacagtgctgcccaggggtgtgtggctgg

SEQ ID NO: 903763 - DNA, 120 bp, Artificial Sequence
  ENSG00000261275_31 (sequence is synthesized)
gccctgacaacagtctccccaaaagtgaccacatcaccaggctcagttccaggaaggctgagaagtgcccagtacactgaggatgcacctcagttacataaaataaatgaaactggagta

SEQ ID NO: 903764 - DNA, 120 bp, Artificial Sequence
  ENSG00000261275_32 (sequence is synthesized)
ctaacgtacagtttaaaggttatagttactatttttatatgatatactagtaatttttgaatagggtaaactttaggtgttttgacaccaaaagaaaactacatgagttcatgcatgtgt

SEQ ID NO: 903765 - DNA, 120 bp, Artificial Sequence
  ENSG00000261275_33 (sequence is synthesized)
gcatgtgttaaattgctttactgtagtaatcatttacatgtatatgtatatatgaatataattatgggctcattaaatttaaatattataaataggtgacaaagaataaagttaactgga

SEQ ID NO: 903766 - DNA, 120 bp, Artificial Sequence
  ENSG00000281450_0 (sequence is synthesized)
acgaattctttcaggaatgccgcagatgtacatgctcccgcagatctatattttccaatgttgttaacatcagccagctggcaatctacaacctgtcttgtacaatgtttgaagagaggc

SEQ ID NO: 903767 - DNA, 120 bp, Artificial Sequence
  ENSG00000281450_1 (sequence is synthesized)
atcctccagacacggtcccctgtttcaatgctggcctcgaagagcttgttccagagccaggatgaattggtaaagaccccagtggcacctgaccccaaagctacatctatgacacctgtt

SEQ ID NO: 903768 - DNA, 120 bp, Artificial Sequence
  ENSG00000281450_2 (sequence is synthesized)
aaggtggtggcattgaggatgaccttcgggttaaatgtgtgcacgtaacagagcgcatcagccagtatgagcctcccctcagcatcagtgttaccaacctggatggtcttcctgttcctg

SEQ ID NO: 903769 - DNA, 120 bp, Artificial Sequence
  ENSG00000281450_3 (sequence is synthesized)
gctctaacaacatcccccagcttgttggccttgccgctgggcatgttttcacagaggggccagacctataatattaatgggcaaactgagatttgcagcagacacaatggctgagcatat

SEQ ID NO: 903770 - DNA, 120 bp, Artificial Sequence
  ENSG00000281450_4 (sequence is synthesized)
agttgtagctcctcccatgtcggccctcatgaggtccatatttgcagaagccttgatggagataccaccactgtcaaaggtaattcctttcccaacaaacaaggggtggtttgtctgcat

SEQ ID NO: 903771 - DNA, 120 bp, Artificial Sequence
  ENSG00000281450_5 (sequence is synthesized)
tggggctgcctatgtagtgaatttccaagaagactgagggctcgtcagatcctttggccacactgaggaatgatcccattgcctgttcctcaatccaagacctgggtctgatatgaaact

SEQ ID NO: 903772 - DNA, 120 bp, Artificial Sequence
  ENSG00000281450_6 (sequence is synthesized)
gctggctggcgtctccatcatgccaagttctgcccagaagcaaacaggactcctttctgccaggcctcctgatccccagttccatagagcttcaccgacatagccatcttctttttttgc

SEQ ID NO: 903773 - DNA, 120 bp, Artificial Sequence
  ENSG00000281450_7 (sequence is synthesized)
tttaggtcatcgtattcatagagaccaagcaccgcgccctcctcagcagcctgagcatctctacagggatccacctccacggaagagagctccaggtcttgaatctgcctgcatcctgct

SEQ ID NO: 903774 - DNA, 120 bp, Artificial Sequence
  ENSG00000281450_8 (sequence is synthesized)
gcaacagcagctctgatgttttctttgccttcctgccagttttcctgttcgtcgattctggctgcctttttgccgaggccaactagcaccacgctggggaagtcctgatgcagaccataa

SEQ ID NO: 903775 - DNA, 120 bp, Artificial Sequence
  ENSG00000281450_9 (sequence is synthesized)
aagtttcgagtcttgcctgccttcagaggtggtccagatatgttcaaagtctctctcagctttccagctatcaatttatcaagattctctcctgcacttgtgaactgtggcacatcatct

SEQ ID NO: 903776 - DNA, 120 bp, Artificial Sequence
  ENSG00000281450_10 (sequence is synthesized)
tctttttctttggaatagattcctaaaacaaggcccttcgtcatgtctgcagcggagagaccccggctcccgaaacatctcacggccagacgtcagacgatgactcgccccacccaatgt

SEQ ID NO: 903777 - DNA, 85 bp, Artificial Sequence
  ENSG00000281450_11 (sequence is synthesized)
cacggccagacgtcagacgatgactcgccccacccaatgtttgtattttagtagagagctcgacctcagttgatctgtctgcctc

SEQ ID NO: 903778 - DNA, 120 bp, Artificial Sequence
  ENSG00000281453_0 (sequence is synthesized)
ttctttcattattatgacataagctacctgggtccacttgtcttttcttttttttgtttcacagaaaagatgggttcgagttcagtggtcttcatcttccaagcatcattactaaccaag

SEQ ID NO: 903779 - DNA, 120 bp, Artificial Sequence
  ENSG00000281453_1 (sequence is synthesized)
tcagacgttaacaaatttttatgttaggaaaaggaggaatgttatagatacatagaaaattgaagtaaaatgttttcattttagcaaggatttagggttctaactaaaactcagaatctt

SEQ ID NO: 903780 - DNA, 120 bp, Artificial Sequence
  ENSG00000281453_2 (sequence is synthesized)
tattgagttaagaaaagtttctctaccttggtttaatcaatatttttgtaaaatcctattgttattacaaagaggacacttcataggaaacatctttttctttagtcaggtttttaatat

SEQ ID NO: 903781 - DNA, 120 bp, Artificial Sequence
  ENSG00000281453_3 (sequence is synthesized)
tcagggggaaattgaaagatatatattttagtcgatttttcaaaaggggaaaaaagtccaggtcagcataagtcattttgtgtatttcactgaagttataaggtttttataaatgttctt

SEQ ID NO: 903782 - DNA, 120 bp, Artificial Sequence
  ENSG00000281453_4 (sequence is synthesized)
tgaaggggaaaaggcacaagccaatttttcctatgatcaaaaaattctttctttcctctgagtgagagttatctatatctgaggctaaagtttaccttgctttaataaataatttgccac

SEQ ID NO: 903783 - DNA, 120 bp, Artificial Sequence
  ENSG00000281453_5 (sequence is synthesized)
tatcacttgtcgcttatttagctttaaaataaaaattaataggcaaagcaatggaatatttgcagtttcacctaaagagcagcataaggaggcgggaatccaaagtgaagttgtttgata

SEQ ID NO: 903784 - DNA, 120 bp, Artificial Sequence
  ENSG00000281453_6 (sequence is synthesized)
tggtctacttcttttttggaatttcctgaccattaattaaagaattggatttgcaagtttgaaaactggaaaagcaagagatgggatgccataatagtaaacagcccttgtgttggatgt

SEQ ID NO: 903785 - DNA, 120 bp, Artificial Sequence
  ENSG00000281453_7 (sequence is synthesized)
aacccaatcccagatttgagtgtgtgttgattatttttttgtcttccacttttctattatgtgtaaatcacttttatttctgcagacattttcctctcagataggatgacattttgtttt

SEQ ID NO: 903786 - DNA, 120 bp, Artificial Sequence
  ENSG00000281453_8 (sequence is synthesized)
gtattattttgtctttcctcatgaatgcactgataatattttaaatgctctattttaagatctcttgaatctgttttttttttttttaatttgggggttctgtaaggtctttatttccca

SEQ ID NO: 903787 - DNA, 120 bp, Artificial Sequence
  ENSG00000281453_9 (sequence is synthesized)
taagtaaatattgccatgggaggggggtggaggtggcaaggaaggggtgaagtgctagtatgcaagtgggcagcaattatttttgtgttaatcagcagtacaatttgatcgttggcatgg

SEQ ID NO: 903788 - DNA, 120 bp, Artificial Sequence
  ENSG00000281453_10 (sequence is synthesized)
ttaaaaaatggaatataagattagctgttttgtattttgatgaccaattacgctgtattttaacacgatgtatgtctgtttttgtggtgctctagtggtaaataaattatttcgatgata

SEQ ID NO: 903789 - DNA, 120 bp, Artificial Sequence
  ENSG00000228689_0 (sequence is synthesized)
atccaataaagaactaatatccagaatttacaaagagctcaaacaaatcagcaagaaaaaaaacaagtaatcccgtcaaaaagtgggctaagggcatgaatacagaattctcaaacaaag

SEQ ID NO: 903790 - DNA, 120 bp, Artificial Sequence
  ENSG00000228689_1 (sequence is synthesized)
acaaatggccaacaaacatatgaaaaaatgcaaaacaaaaccacaatgcaataccacctcactcctgcaagaacggccataatcaaaaatcaaaaaataattgatgttgacgtggatgtg

SEQ ID NO: 903791 - DNA, 120 bp, Artificial Sequence
  ENSG00000228689_2 (sequence is synthesized)
tgtggtgaaaaggaacatttcacactgctggtgggaatgtgaactggtacaaccactatggataacagtgtggggattccttaaaggactaaaagtagaactatcatttgatccagcaat

SEQ ID NO: 903792 - DNA, 86 bp, Artificial Sequence
  ENSG00000228689_3 (sequence is synthesized)
ttaaaggactaaaagtagaactatcatttgatccagcaatcccacaactggatatctacccaaaggaaaaagttattatatgaaaa

SEQ ID NO: 903793 - DNA, 120 bp, Artificial Sequence
  ENSG00000228689_4 (sequence is synthesized)
gaagaaattgtggtatatatacaccatggaataccactcagccacaaaaagaaatgaaataatggcattcgcagcaacctgaatgaaattgtaaaccattattctaagtgaagtaactca

SEQ ID NO: 903794 - DNA, 120 bp, Artificial Sequence
  ENSG00000228689_5 (sequence is synthesized)
catacgttctcgcttataggtggagctaaggaatgaggatgcaaaggcgtaagaacgattcaatgaactttggggactctggggaaaggatgcaaaagactgaaaggagactttagagaa

SEQ ID NO: 903795 - DNA, 120 bp, Artificial Sequence
  ENSG00000228689_6 (sequence is synthesized)
gagctgacagaagagattcattctaggatctctccattctcaccacaccatggacaagttccatgtgcaacattcagtattggatgatctggattcagtacagaaagcctggacttttga

SEQ ID NO: 903796 - DNA, 120 bp, Artificial Sequence
  ENSG00000228689_7 (sequence is synthesized)
gcctaaacaggatctgaagcagaaggatgaaaaacagatcaaccaacaacaagaatcaaccatcttggtttctcatttgtcaataatgggcaatagtcctgcccacatatcagggaatgt

SEQ ID NO: 903797 - DNA, 120 bp, Artificial Sequence
  ENSG00000228689_8 (sequence is synthesized)
agtggagataggaccatagttccctttccacactggctgtcttctgtgggccactcttagttctgagaggccacctgcatctcttgccaagtggcctgttccatcttcaaaggagcaagg

SEQ ID NO: 903798 - DNA, 120 bp, Artificial Sequence
  ENSG00000228689_9 (sequence is synthesized)
acacatgaaatcattcccaagtttgacatatctctgacttcctcttctgccatcagccagtaaacaaaaactctcttcttttaagacattcctgagatgagcctagttccatgtgcaaca

SEQ ID NO: 903799 - DNA, 120 bp, Artificial Sequence
  ENSG00000228689_10 (sequence is synthesized)
tcttcttaataagcaatgtatgacaattgaggaggcataaaaattagagaaaaataaaaaggaaaatgtctgtagttgcacattatatcataagtaatctgcattttattgtttttgtga

SEQ ID NO: 903800 - DNA, 120 bp, Artificial Sequence
  ENSG00000228689_11 (sequence is synthesized)
atcgagactgataaatgttctaaatagtcaaatttgctaaaccttttataaactgttttcctttatatttacttttattttctcttttattatatatttcattcctgtatctattaccta

SEQ ID NO: 903801 - DNA, 120 bp, Artificial Sequence
  ENSG00000228689_12 (sequence is synthesized)
atctatatctacctaattggggctatttccactaatgtgcccatatattcttgtaacagaatcacattatcttaagaatagtgacataaatattatttccctgatagggctacccatttc

SEQ ID NO: 903802 - DNA, 120 bp, Artificial Sequence
  ENSG00000228689_13 (sequence is synthesized)
cactatcataaaatctatttattttagaaaattggctttgtatcattagtctatattttctgatgaactttggaatccatcttatgctattcaacattgcaaagaatgattggaattgca

SEQ ID NO: 903803 - DNA, 120 bp, Artificial Sequence
  ENSG00000228689_14 (sequence is synthesized)
ttaatcccatttatttgagaaaaactgaggcatttgcaataatagtcaatctaattggaaacatactataattccctatgtattcaagtcttctctttatactatttaataaattatagt

SEQ ID NO: 903804 - DNA, 120 bp, Artificial Sequence
  ENSG00000228689_15 (sequence is synthesized)
ttatttttatataggttcaacataacactggttaagacttttttcaaggcagtatatcctttggtctctattgtacatttctttattttttttctaaatatataccattgacctatacaa

SEQ ID NO: 903805 - DNA, 120 bp, Artificial Sequence
  ENSG00000228689_16 (sequence is synthesized)
cacaggaagcttagatctcagacaaattagataaaaaatgaatttatagcagatacgtgtcctaaggcattcagctgaatgtttgggttttagggaaggaaggatattccatgtgcaaca

SEQ ID NO: 903806 - DNA, 120 bp, Artificial Sequence
  ENSG00000228689_17 (sequence is synthesized)
actgaaaggagactttagagaagagctgacagaagagattcattctaggatctctccattctcaccacaccatggacaagcctagttccatgtgcaacattcagtattggatgatctgga

SEQ ID NO: 903807 - DNA, 120 bp, Artificial Sequence
  ENSG00000228680_0 (sequence is synthesized)
tttctgtgctgagcttgctgcttcctgctgggaaaatgttagtggcggagtcacacccaggttccctgtgtcattgcaggaggctgtactgatgctcatgttttgtttcacaagctaagt

SEQ ID NO: 903808 - DNA, 120 bp, Artificial Sequence
  ENSG00000228680_1 (sequence is synthesized)
ccttgacagcatcagctgggatcccagtcttctctctcatgttacccagtgagaactcactcacataaatgtcaggggagaatacttggccttctgtttcctggatcactgaataaaatc

SEQ ID NO: 903809 - DNA, 120 bp, Artificial Sequence
  ENSG00000228680_2 (sequence is synthesized)
tgcgtatttggctttgctgtttggttccaggagttttatttcaaggcaaagcttgtatctgaagatgccatgagctgagattgtctaggactgagaagccctaacttcccaaggacacta

SEQ ID NO: 903810 - DNA, 120 bp, Artificial Sequence
  ENSG00000228680_3 (sequence is synthesized)
gtcctggaaagaagaaagaggcggcattcttcctgaatgtgaaatgcactcagaaggaactgcttggtatttaaaaactacttctcattctatctttaaagccaaagagaaaacaccgaa

SEQ ID NO: 903811 - DNA, 120 bp, Artificial Sequence
  ENSG00000228680_4 (sequence is synthesized)
gtgagcgactcaccaggacagttttatttctgtgctgagcttgctgcttcctgctgggaaaatgttagtggcggagtcacacccagaaacaaagtacatttgcttttgaaaagccaagcc

SEQ ID NO: 903812 - DNA, 120 bp, Artificial Sequence
  ENSG00000228680_5 (sequence is synthesized)
ttttggctgatgtcacagcaaatattcatcagccatcagccagactggatagcaggccaaaaacgtggccgtctggtctcacgttggaagttctgttttaaactttgtgaccttgattcc

SEQ ID NO: 903813 - DNA, 120 bp, Artificial Sequence
  ENSG00000228680_6 (sequence is synthesized)
ttttatttctgtgctgagcttgctgcttcctgctgggaaaatgttagtggcggagtcacacccagtttactaattgtttaactgcaaagcttgactctggaaataaaaaaagaatgagag

SEQ ID NO: 903814 - DNA, 120 bp, Artificial Sequence
  ENSG00000228680_7 (sequence is synthesized)
ataaactggagcccaaggaaatgaaggaatcagatggggaccaagtgacctgtccacacaaaagccatctgatgagtgcttctactccctgctcgcagcccaccttcagctacacagatc

SEQ ID NO: 903815 - DNA, 120 bp, Artificial Sequence
  ENSG00000228680_8 (sequence is synthesized)
tgcacggccccttgcttctgccatatgggatccagcctgacagcagcgaatgagtgcacagatttcaagtagaggaaatccccaggaaatggcaagggacagtattaggaatcgacaaag

SEQ ID NO: 903816 - DNA, 120 bp, Artificial Sequence
  ENSG00000228683_0 (sequence is synthesized)
cacaaggctgtttcctgcactggtcagggatgaggtcctggagtccagtgcaggggaagtgtgctatggggaagggctgtaggtggtagggacagtcttgctgctccctcctggggcacc

SEQ ID NO: 903817 - DNA, 120 bp, Artificial Sequence
  ENSG00000228683_1 (sequence is synthesized)
ctcactggtccctgccgatgccacctcctacctgtcccccatgtacctctcctctgtgttttcctctggtccaggcacaaactcttctcagtgtgccacagcaggcttgaatgggtccaa

SEQ ID NO: 903818 - DNA, 120 bp, Artificial Sequence
  ENSG00000228683_2 (sequence is synthesized)
agttcctggcaccgagttggttctgcaatcactgttttctatgggtcccttctgtgggctaagcctgtgagagatgtggctgtgcctgcctggcaaaccattggcctctgtttgccacac

SEQ ID NO: 903819 - DNA, 120 bp, Artificial Sequence
  ENSG00000228683_3 (sequence is synthesized)
agagccaggcacacagcaggtgctcaggaggacacgttgttagtctacgagtctctccttaccagtaacttactcagcacaaagggagaaatagtgatttcacagtggagaggccaagca

SEQ ID NO: 903820 - DNA, 120 bp, Artificial Sequence
  ENSG00000226594_0 (sequence is synthesized)
ggtcttctccacttagctccctttggtgacagggctggacagcagcagcaggggatggaagaaagaagcagctcttccttgaaatcttctgagacctcaacagaggaagcttatgggaat

SEQ ID NO: 903821 - DNA, 120 bp, Artificial Sequence
  ENSG00000226599_0 (sequence is synthesized)
atgggaagaaatgactctgaaatgggtcatgtgcgattacacttgattccattttgagtctttatgtatgttaatctgcagtacgcattttctttaatttttatcctttggtaacaatat

SEQ ID NO: 903822 - DNA, 120 bp, Artificial Sequence
  ENSG00000226599_1 (sequence is synthesized)
ttgtcattattctatacaaaatagttaaagacttttttttttcttttgagagagagtcttactctatcccctaggctggagtgcatcaactgtggtctgaaaatattacagtattttgag

SEQ ID NO: 903823 - DNA, 120 bp, Artificial Sequence
  ENSG00000226599_2 (sequence is synthesized)
tattcacataacttttatgacggtgtgttgttataattgttctattttattattcgttgttgctaatcttttactgtgcctaatgtagacatgaaaacttattatagatatgcatgtata

SEQ ID NO: 903824 - DNA, 120 bp, Artificial Sequence
  ENSG00000226599_3 (sequence is synthesized)
ggaaaaacaattcacatagagtcagtactatccatggtttcaggcatccacggggcgcttggaacatattccccacagataagggggactgctatacttgaaaatcgaaaaatgtgactt

SEQ ID NO: 903825 - DNA, 120 bp, Artificial Sequence
  ENSG00000226599_4 (sequence is synthesized)
acagagtacacttatacaaaaatactaacaaactgaaattatgaatacgttcagcttttaacatatgtttcatactcaaggggcaaaaaaatgaaaagagctcacttttatagttgaaac

SEQ ID NO: 903826 - DNA, 120 bp, Artificial Sequence
  ENSG00000228536_0 (sequence is synthesized)
aggtcatgttatccctggagtagaaaacccagagacggctactttccagggtcctgcatctggggtgcaagtgaggcacacgcagatgagactccacctgccctgggcagctttcctgag

SEQ ID NO: 903827 - DNA, 120 bp, Artificial Sequence
  ENSG00000228536_1 (sequence is synthesized)
ccttgagaaaccagctcaccatgaatccaaggtgtctgctgttccttgccaccatttcatggaacctgttgtatgtaacgcaaaagattcttcaaaatcaaactgtgtccggaattggtg

SEQ ID NO: 903828 - DNA, 120 bp, Artificial Sequence
  ENSG00000228536_2 (sequence is synthesized)
ggctcaggagtgaagctgcagatcttcacggttgctagtaacacaataataaagctgctttattttccagtgaagatgtatgtgatagggagtggaggaagaaaaaggccagaaaattcc

SEQ ID NO: 903829 - DNA, 120 bp, Artificial Sequence
  ENSG00000228536_3 (sequence is synthesized)
tggaggaagaaaaaggccagaaaattccatagttagcaaatatacctttcttacttaaaattctttttccaatgtgagccttctaaagagttactgagaaattaggtgagctcacctcat

SEQ ID NO: 903830 - DNA, 120 bp, Artificial Sequence
  ENSG00000228536_4 (sequence is synthesized)
ttaatgcaatagatatgtttctgaaaaataagcaatacataggacattggccaattaagaattctgatgaagaagaattttcacatccgaaagagtaaaaatgaaaaacggtacaaatgt

SEQ ID NO: 903831 - DNA, 120 bp, Artificial Sequence
  ENSG00000228536_5 (sequence is synthesized)
gttcgtcaaaatggagttagatggtctgtcccagactcccctgttgttagttctgagaacagaagtaatggtgcttcttcaggactggctcatagaaacctgccgtgttcagcccccaca

SEQ ID NO: 903832 - DNA, 120 bp, Artificial Sequence
  ENSG00000228536_6 (sequence is synthesized)
atcctctcccttctgctggctggaaacaaatgacaacgaagcctcacgtcttggagaaaccacactgctgaggaactcaagtcctagaagaaccatttgaagagacccatctcactaaag

SEQ ID NO: 903833 - DNA, 120 bp, Artificial Sequence
  ENSG00000228536_7 (sequence is synthesized)
aaaatcacacaagcaagaagtaaacttcattgtatctatgtatttaattgtcataacagtctaccttaactgatacagcaaaaattcgctccttttctggacacccagtttcaaaatctc

SEQ ID NO: 903834 - DNA, 120 bp, Artificial Sequence
  ENSG00000228536_8 (sequence is synthesized)
acacccagtttcaaaatctcagtgtcattttttacttctctcttttcaggttgtttaatataataaaatttgtgtgtgtgtgtgtgtgtgtgtgacaaggtcttgctctgttgcccaggc

SEQ ID NO: 903835 - DNA, 120 bp, Artificial Sequence
  ENSG00000228536_9 (sequence is synthesized)
ccagcccactacagccttgacctccaagctcaagtgttcctcccacctcagcctccagagtaactgggactacaggcatgggccaccacacccggctaatttttgtactttttgtagaga

SEQ ID NO: 903836 - DNA, 120 bp, Artificial Sequence
  ENSG00000228536_10 (sequence is synthesized)
tcttgaacccctgggctcaagcgatctgcccatctccacctcccaaaattctaggattacaggcgtgagccactacacccaaccattttatttttaaaagttttctttgcaatattgctc

SEQ ID NO: 903837 - DNA, 120 bp, Artificial Sequence
  ENSG00000228536_11 (sequence is synthesized)
tttaaaagttttctttgcaatattgctcacattgtttccttcctttttattcttattgtcactcccaagttcaggcttttacctcttttatttgaagtattaaagtatacttctaagtca

SEQ ID NO: 903838 - DNA, 120 bp, Artificial Sequence
  ENSG00000228536_12 (sequence is synthesized)
gtatttccagctctgaaaagcctgttttacttcattctcttaccaaagagtttggtgacacaaaatgaaaagtttgatggacaatctggaagagtcccactaagcaacacaagaaatacg

SEQ ID NO: 903839 - DNA, 120 bp, Artificial Sequence
  ENSG00000228536_13 (sequence is synthesized)
gaaatacgctctcacaaagacctattcatgttttccatgtttcaaatatgactgaacctgacatatataagaacgcaaaagattcttcaaaatcaaactgtgtccggaattggtgggttc

SEQ ID NO: 903840 - DNA, 120 bp, Artificial Sequence
  ENSG00000228536_14 (sequence is synthesized)
ggcattcaaaggctgaagggccacctgacactccagaggctgctggaaatgcagggctgtttcatcctgggtattttccagagagaagtactgagaagcttaaagtatttgaatgggagg

SEQ ID NO: 903841 - DNA, 120 bp, Artificial Sequence
  ENSG00000228536_15 (sequence is synthesized)
gaaggaactgtctttagaaaaatatctcaaaaagccactgaagtagaaagtttcagcatgctgaagatggaacttgagaagatagaaagttctgggtccttagtggcatgactgagtcgc

SEQ ID NO: 903842 - DNA, 120 bp, Artificial Sequence
  ENSG00000228536_16 (sequence is synthesized)
tggaccactgttggaaccaccctatgtcttagtttttaaatctctttactgtctaagacatttttagtggaagtatttatctctggcatccaataagacctttaaggatttgcagtttta

SEQ ID NO: 903843 - DNA, 120 bp, Artificial Sequence
  ENSG00000228536_17 (sequence is synthesized)
attgcacaaaaagctgggtatagttcaaattcctgactgtatattctgattcccctgggcatttacactctgccatcccacacagttccccctcctgtgtgagggtcctattgcaattca

SEQ ID NO: 903844 - DNA, 85 bp, Artificial Sequence
  ENSG00000228536_18 (sequence is synthesized)
agacggagtcttgctctgtccctcaggctggagtgcagcggcgccatctcagctgaatgcaacctctgcctcctgggttcaagag

SEQ ID NO: 903845 - DNA, 120 bp, Artificial Sequence
  ENSG00000228536_19 (sequence is synthesized)
aggcgtgagccacagcgcccggccttcagcgtgcttttttttttaatggtttgctatatttacatctggtttctccttctgaatgtattttccagagagaagtactgagaagcttaaagt

SEQ ID NO: 903846 - DNA, 120 bp, Artificial Sequence
  ENSG00000228538_0 (sequence is synthesized)
agatcattatagccacagggttctttagaggccactttcttcaagtctctaattttgcatatgagaaacactaagactcagcagataaggatggaggcgactcaacatcacactgagaca

SEQ ID NO: 903847 - DNA, 120 bp, Artificial Sequence
  ENSG00000228538_1 (sequence is synthesized)
ggtcatctgggacccatggtttctaacttctagaccgaatctctttctttcgaatgtccagatcatctctccttcttctaaaaaccaaagaggcctctgcatgcctctccctggatatga

SEQ ID NO: 903848 - DNA, 120 bp, Artificial Sequence
  ENSG00000228538_2 (sequence is synthesized)
gccctgcatttctgaatgccttgaaagaaaaaccagcaagttgggagggccgtgtctccttatcatcttccaggaattcaaaaccgtgatttccagtttccaaatgcaactcaagctcca

SEQ ID NO: 903849 - DNA, 120 bp, Artificial Sequence
  ENSG00000228538_3 (sequence is synthesized)
atcctgatcgccacctccagacccttctgatagattcattacctgaatctatttggtaactaatcatctgctgtatttatattcatgggacccacactttgactctgagctactccagga

SEQ ID NO: 903850 - DNA, 120 bp, Artificial Sequence
  ENSG00000228538_4 (sequence is synthesized)
gtagaggatgtggcttgcattgttcttatgtctttcacagggccaaggagatgagaaccatctatgcattattcacgcatttattccttaactatgtattcagcacctgctctctgctag

SEQ ID NO: 903851 - DNA, 120 bp, Artificial Sequence
  ENSG00000228538_5 (sequence is synthesized)
gactcattctagctactaaacttacagagatgaatatagggctcctgagtttgagagctctctcagcctagtgagagaatcagacatgtagacatgtaatgatcatacagtgcaacaaac

SEQ ID NO: 903852 - DNA, 120 bp, Artificial Sequence
  ENSG00000228538_6 (sequence is synthesized)
atgcttcagaagtgcaagcaaaatgagttctctgagaacactgaggagcggaggagagactccaagggaatggcagtgagattgtgtgccaaagcttctcaataaatatttgttcattaa

SEQ ID NO: 903853 - DNA, 120 bp, Artificial Sequence
  ENSG00000228538_7 (sequence is synthesized)
cccttctgatagattcattacctgaatctatttgctatttctttatatgaatgcaagaatggactaacacactgaccatggaacatagacagatgtgagaagatccagaaaagatgcagc

SEQ ID NO: 903854 - DNA, 120 bp, Artificial Sequence
  ENSG00000228538_8 (sequence is synthesized)
tggaatgggcacaagccagatcctgaactcctgctctcccttggctcaacctcatcacagccagaaaggatgagagctctttaatgaagtgcatacatgtcagtttcccaggacacaaac

SEQ ID NO: 903855 - DNA, 120 bp, Artificial Sequence
  ENSG00000228538_9 (sequence is synthesized)
caaagtaaagaagaatggagcatgctcctataaaggaaaataaaaggagatccataaagcaaatccaactcatggacacttactaaacatgcactgtgttcatgtaatggctccaagaat

SEQ ID NO: 903856 - DNA, 120 bp, Artificial Sequence
  ENSG00000228538_10 (sequence is synthesized)
cttagtggacatggacggaagtacacacctggagtggacctacagaagctcagagtcaaatggcagaaagatgatatgggcattgaatacattaaatgaaaataaaagtaataaatcaca

SEQ ID NO: 903857 - DNA, 120 bp, Artificial Sequence
  ENSG00000228538_11 (sequence is synthesized)
gtaactgagggtgtcactgggcagtacattagcaattaattaccagacacctatgcagttaaaatgtactgctggccttcaaaggtgaaggaatccatggcctggaatgaccataaaaaa

SEQ ID NO: 903858 - DNA, 120 bp, Artificial Sequence
  ENSG00000228539_0 (sequence is synthesized)
ggattcacttagtgatggggagaaagcagatgacgcagaacaggcctgctgcttccacaaggctatgactcctgcatccaggatgatgcccaagacctcccagaagctggccctgcgacg

SEQ ID NO: 903859 - DNA, 120 bp, Artificial Sequence
  ENSG00000228539_1 (sequence is synthesized)
aggatctgagtgcacttgggaggtggttccagaaagcactgggtaggggcaagaaaggcagttctctttgcccagcatttggccagggcgttggcccacctcaccaatgtgatcccatgt

SEQ ID NO: 903860 - DNA, 120 bp, Artificial Sequence
  ENSG00000228539_2 (sequence is synthesized)
gagtaccgtcaactttagaactcaattactctcgttttgtgcatgaagagagtgaagtcctagccctaggacttgatccttgttctgtccaaataaatccccaaggcacttttctaaggg

SEQ ID NO: 903861 - DNA, 120 bp, Artificial Sequence
  ENSG00000228539_3 (sequence is synthesized)
gccccagaccacaggctacattcccagactcgctgccattgcatgacagagaatccgtcagctcggggaactggatgaagcgggctgggactgatactccaaagtgctgtcaagctagtg

SEQ ID NO: 903862 - DNA, 120 bp, Artificial Sequence
  ENSG00000228539_4 (sequence is synthesized)
tcctttgctggtgttacagttggattttctactttgccatttgactgtaaggtcagtgtcagtgttgggtctgcacctggaagccactgagggaggtacatgtcacatcccctggcatca

SEQ ID NO: 903863 - DNA, 120 bp, Artificial Sequence
  ENSG00000228539_5 (sequence is synthesized)
ggaacgtgacggaccttgtcctgggtctgctatggggatggtgacaaggcaaatccctcctgcagcagggcatgctgctcaccctgtgcgcagctgtgccctgggccaggccctgcgctg

SEQ ID NO: 903864 - DNA, 120 bp, Artificial Sequence
  ENSG00000233817_0 (sequence is synthesized)
ctgtgggccagaggagagcactgggtaccagaatcacagatcaggagctgtggaaggcgctgcccgacaggatgggggaccctgggagagggatgcagccacatccaaactgtggcccag

SEQ ID NO: 903865 - DNA, 120 bp, Artificial Sequence
  ENSG00000233817_1 (sequence is synthesized)
aagagggagtgggaaaagtcctcgacctctctgtcttcctgctgtcttccaatatcctacctggaaagcaacgggtctgaaaggtaattctgttcttgatgagggtgcaggcagcagagg

SEQ ID NO: 903866 - DNA, 120 bp, Artificial Sequence
  ENSG00000233817_2 (sequence is synthesized)
gaattgtcatcctgctgaagacacacagctcttccatgctctaccctatgtgtaatttgttcttatctgctcctggagccaccacctgctacagtgtaaagagaccccacagactctctg

SEQ ID NO: 903867 - DNA, 120 bp, Artificial Sequence
  ENSG00000233817_3 (sequence is synthesized)
gatcaaactactcactgtccagaaggagaaaatgaggtcctatgtctgtggctagaacccaggcctctggggagcaacccagggctccatccagggtgacctgagcctgctctgctcatc

SEQ ID NO: 903868 - DNA, 120 bp, Artificial Sequence
  ENSG00000233817_4 (sequence is synthesized)
agagccagtctttaccacccttcatatcccgggagcccacaggtagaaagatgggcattgcaggtcaccgtggttcccccactgaagcaagttccctggctcgcgattagccagtgctct

SEQ ID NO: 903869 - DNA, 120 bp, Artificial Sequence
  ENSG00000233817_5 (sequence is synthesized)
gctggttcatgatgcgctccaaatgctagaccaagaaagaaactgggtcggtgggcaggacacaggaccagcgctctgggaggagagctgttctcaagcagtttggtggcatcagagcct

SEQ ID NO: 903870 - DNA, 120 bp, Artificial Sequence
  ENSG00000233817_6 (sequence is synthesized)
ctgtgtggtcagtcaagcagggcagccaatttcctctcctttcagccctaactctggactcctgtacctggaggggctccctttgtgctcctgcagcccagaagccctccgaggcttgac

SEQ ID NO: 903871 - DNA, 120 bp, Artificial Sequence
  ENSG00000233817_7 (sequence is synthesized)
atgaaagagtcgcgggatcttggactgttccggtggaagggctcctagcaaaacccagatgttttctcttcttgtatggatgggaggaccgaagtccagagaagtggaataacttgccca

SEQ ID NO: 903872 - DNA, 120 bp, Artificial Sequence
  ENSG00000233817_8 (sequence is synthesized)
gggttgtgctgagatttgtgaaggtgccggatgctggtgtgctggtggctggcatgctctgagcccttccttcccgctgtttccctggagttctgcttggcaaccacccgcctgcatttt

SEQ ID NO: 903873 - DNA, 120 bp, Artificial Sequence
  ENSG00000233817_9 (sequence is synthesized)
tgcaaagtgatgtcatctgcagataatggtttttccgttcctggtggagcaggagttccagatacagtgcttcgggggaggggctcaagagagctgattgtgcactcctcaggcaagtgg

SEQ ID NO: 903874 - DNA, 120 bp, Artificial Sequence
  ENSG00000233817_10 (sequence is synthesized)
gggctgcatagaccccctcccctctgacagtcacatctcagttgtaaggcaaggcaccgtctcaggcttcctggactccggaacctggaatgaccaaaatggcagaggccccagagacaa

SEQ ID NO: 903875 - DNA, 120 bp, Artificial Sequence
  ENSG00000233817_11 (sequence is synthesized)
gcctcccctgcctcctccttgtagagttgggaatctgaggcccagagagggcagagccttgcccaagctcacacagcatttacaggcaaaaccttgactcacatcccgactcctaacatc

SEQ ID NO: 903876 - DNA, 120 bp, Artificial Sequence
  ENSG00000233817_12 (sequence is synthesized)
cgttgacattttgggccaaggagttttgttgtgggggcagtccctttcatggcaggatgtttggcagcatccctggcctcgacctcctacaggccagtagcacccctctccagttctcaa

SEQ ID NO: 903877 - DNA, 120 bp, Artificial Sequence
  ENSG00000233817_13 (sequence is synthesized)
atccagacactgccaaatgtctttcacctaagttggggtgggagaaagtaaccctccagctcctaagacctttatccactgccataggcaggagaggtttcttgagtccaagcccaaagg

SEQ ID NO: 903878 - DNA, 120 bp, Artificial Sequence
  ENSG00000233817_14 (sequence is synthesized)
gtgctttgtctgaggctctgacttaacgtcaggcaccttcaggatgggaggcaggcctggagggggctatgaggggctggagatggtccaggccctccttctggttaggaacactgcttc

SEQ ID NO: 903879 - DNA, 120 bp, Artificial Sequence
  ENSG00000233817_15 (sequence is synthesized)
ctctgatcacttttcttggagcaaaactgccgatttattttcctggggaaataaaaataaatgctggctgttgtaatctcatccctgatcccatctggaaaaagcaggctcatgaatctt

SEQ ID NO: 903880 - DNA, 120 bp, Artificial Sequence
  ENSG00000233817_16 (sequence is synthesized)
ggccgcctgagctctgaggactgtgtctggcggaacctggagttacaatgggccttcgaacatcggaacagtcacggctgacatttcctttcccgttacatggctccttggaatgtgagc

SEQ ID NO: 903881 - DNA, 120 bp, Artificial Sequence
  ENSG00000233817_17 (sequence is synthesized)
cccagggggccgtccgtgggcaggcggaatttggtggaaagaagtgctgcacgggccggaggccagctcagcttctgacttgctgtgtgactttgggccacttttctgttcgtttctggg

SEQ ID NO: 903882 - DNA, 120 bp, Artificial Sequence
  ENSG00000233817_18 (sequence is synthesized)
ccttgatttctccatctgcagaatgaggggagccacgttcctcaacaaggggtccatggaccaccttgtatcagaaccatttagggaatgtgtttatggctattcctgatatttctgatt

SEQ ID NO: 903883 - DNA, 120 bp, Artificial Sequence
  ENSG00000233817_19 (sequence is synthesized)
cctcttccagacctcctaaagtttttatgcatctctaagtgatttcgatatatataagttttgggacccacaacaccaaggactttgaactttccacccagtttcaagtttgaacacatc

SEQ ID NO: 903884 - DNA, 120 bp, Artificial Sequence
  ENSG00000233817_20 (sequence is synthesized)
acagttcttcagcctccttccccctcataacgaagtgtagagttatgaagctagagggtaaaattatggggtgggctggaactgggcattgctcctaacaattatctgctttcaaactct

SEQ ID NO: 903885 - DNA, 120 bp, Artificial Sequence
  ENSG00000233817_21 (sequence is synthesized)
tggcagggtctctggggtccttgatccaactgaaatcactgttaaagcactttattcctccagtaatgaaactcgagctgctagttacagagtttggtttcaaaattgtgccatttatta

SEQ ID NO: 903886 - DNA, 120 bp, Artificial Sequence
  ENSG00000233817_22 (sequence is synthesized)
tttttgttggattggcttataaaccctcatatagtcatacatcatttataatgcattattccatgagaatgcattttccagatgagatttattttttctgttaaaaacttaaaactgttc

SEQ ID NO: 903887 - DNA, 120 bp, Artificial Sequence
  ENSG00000233817_23 (sequence is synthesized)
tttttttttttttaaatggcagtctttcgccatgtgttacctatttataccaccttaagtgaaggtcaggaaatgcaattttacttattctcaatgctccagggttgtcattgtgagttt

SEQ ID NO: 903888 - DNA, 120 bp, Artificial Sequence
  ENSG00000233817_24 (sequence is synthesized)
taactactgtatgcattgatgtaaattttagggactccaaaactcactgtgcctgaactatgaatgtcccccaagctgcttagcccttgtgtctgcttttaaaagttctgctttgcttct

SEQ ID NO: 903889 - DNA, 120 bp, Artificial Sequence
  ENSG00000286109_0 (sequence is synthesized)
gcgtcagcaccagcaacctgctggggtccagttccagtctgtgggaggtttgttctttcgctcttctcagtgactcttgctgttgctcactttttggggctgcgctaatctttatgagct

SEQ ID NO: 903890 - DNA, 120 bp, Artificial Sequence
  ENSG00000286109_1 (sequence is synthesized)
gtaacactcactgcgaaggtctgcacttcactcctgaagacagcgagaccacgaagggagaccaccgggagggacgaacaactctggagtgccagctttatgaactgtaaccctcaccgc

SEQ ID NO: 903891 - DNA, 66 bp, Artificial Sequence
  ENSG00000286109_2 (sequence is synthesized)
tgaactgtaaccgcagtaggaagaaactccagacacgtctgaacatcagaaggaacaaactctgga

SEQ ID NO: 903892 - DNA, 120 bp, Artificial Sequence
  ENSG00000286109_3 (sequence is synthesized)
taacactcaccacaagtgtccgcggcttcatacttgaagtcagtgagaccaagaacccgccaattccggacacagtagctgggattacatgcgcccgccaccacacccagctatcattcc

SEQ ID NO: 903893 - DNA, 120 bp, Artificial Sequence
  ENSG00000286109_4 (sequence is synthesized)
agaggtctatgtaagggtccttggcagaaggggccagcatccaaggcttcaactgcatgaccatttggagtgggatggcctgaaggcaagaagagacaaaccgggttattagaaaacatg

SEQ ID NO: 903894 - DNA, 120 bp, Artificial Sequence
  ENSG00000286109_5 (sequence is synthesized)
gggccaatatttctggctttcaaacttcattaaaggctcagagaaaggaaaattcaaggctgtttgtggaggggaagagaacagagagcaaaggttgcgtagataccaaaccagaaagga

SEQ ID NO: 903895 - DNA, 120 bp, Artificial Sequence
  ENSG00000286109_6 (sequence is synthesized)
ctcattccctacaccaggattgaaccccaggccaccattgtaaaatggcggaggccaaaacaaaaccattgtcacgtggttgcaggccacactcccaaagatgtgaaacaagatggaggc

SEQ ID NO: 903896 - DNA, 120 bp, Artificial Sequence
  ENSG00000286109_7 (sequence is synthesized)
ctgccacagagtttgctgcggactatacagaaagacatggaaagcacaccagattggctacaactcaagaccaacctcataaatcctttttcataattaaaactttacagagaatataaa

SEQ ID NO: 903897 - DNA, 120 bp, Artificial Sequence
  ENSG00000286108_0 (sequence is synthesized)
agacttgttctgttggctgccagggcaaaacacagtgtccaaaagaggacaagagtaaacccaccggccggacaggggctgtaaagccagccaggcctggggtcaacattccctctacta

SEQ ID NO: 903898 - DNA, 120 bp, Artificial Sequence
  ENSG00000286108_1 (sequence is synthesized)
cctgcccccaatcccccaattacatagctatatgatcctgggcaaatttcttagaacactaagaatctgtttagttttttataaattgagaagaaacacctacagcactggactgctcta

SEQ ID NO: 903899 - DNA, 120 bp, Artificial Sequence
  ENSG00000286108_2 (sequence is synthesized)
aggcttaactgtgacatacaaagcaccttgaatggtgcctggacactagagcagactgctactgggtgtgaattatgctaatgtctctggacaccactggcagctgtccaacacggtcac

SEQ ID NO: 903900 - DNA, 120 bp, Artificial Sequence
  ENSG00000286108_3 (sequence is synthesized)
aaggcagcctgtcaagaacatggacactggaaagagcatctggatgtaaacctaggccctgacctttctctagtgttgtgctggacaagcaacttgaccttgatggacactgacgttctt

SEQ ID NO: 903901 - DNA, 120 bp, Artificial Sequence
  ENSG00000286108_4 (sequence is synthesized)
gtctatttagtccacattcctggcagctgattcacccagagcacctcttacaggctgcagtgaagtaacatctattgtactgtaaccatctcttccattagactgggcactcacggtgga

SEQ ID NO: 903902 - DNA, 120 bp, Artificial Sequence
  ENSG00000286108_5 (sequence is synthesized)
atgaaatcaagtctctgggttccccacagtataccacatgcacacctaggtggtcgataagagggtgaaataaatcaagataaaagtcatgcgctggagaggtgtaaaaagagaaagaac

SEQ ID NO: 903903 - DNA, 120 bp, Artificial Sequence
  ENSG00000286108_6 (sequence is synthesized)
acagaaagtagtagtagggtatgcagaatatgcaagttaaagacaactaggtcaggatccagaatttagaagtcactaaggagggttcctagccctacagataccagcaaaggccacatt

SEQ ID NO: 903904 - DNA, 120 bp, Artificial Sequence
  ENSG00000286108_7 (sequence is synthesized)
gtgaatatgagcagactacaagttctacttaggaagcacccctcgagagtttatactataaaaagccttacccaacgcaaccccaattaaccaaagctctcaattaaggaagggctgctt

SEQ ID NO: 903905 - DNA, 120 bp, Artificial Sequence
  ENSG00000286108_8 (sequence is synthesized)
ctgtctcctggggctggtacctaaaatccccaatgcacataaaaagtagtcggtcaggagcaagaagtctgtgtggttgccccaagtcattcaagagtagagcagagagcaggtggggtc

SEQ ID NO: 903906 - DNA, 120 bp, Artificial Sequence
  ENSG00000286108_9 (sequence is synthesized)
cctggcagctgagacacacagaaggaaccaacagaaatcagcagtgccacaagcactgatcaatatacaactaaaaacaaagaggagccattagtttctttctttttttttggagacagt

SEQ ID NO: 903907 - DNA, 120 bp, Artificial Sequence
  ENSG00000286108_10 (sequence is synthesized)
tgggattacaggtgtgagccaccgcacacggcctgagccattagtttctgagtaaaatatgattatgcccattttacaaccaagaaaaacagaagaacctagaacttaagctacctgtcc

SEQ ID NO: 903908 - DNA, 120 bp, Artificial Sequence
  ENSG00000286108_11 (sequence is synthesized)
cagcagtaccccacagcagttaagaaagcatactcaagtttgaatgtctggccttgaatcctgacttggttacttgcttagctgttttacattgggcaatttcactaaccttggtacctc

SEQ ID NO: 903909 - DNA, 120 bp, Artificial Sequence
  ENSG00000286108_12 (sequence is synthesized)
agttgcctcacctataaaatgaagataatcacggtactgacttcacctgatacatagcaacctgcaagtttcagctcttatttacagggtgaaactgggattaaaaccttctgactctga

SEQ ID NO: 903910 - DNA, 120 bp, Artificial Sequence
  ENSG00000286107_0 (sequence is synthesized)
agctgcctcctttttgctagtgttgaaaatgaaattatattcttttttctgaaagcttataataaattatgactttcttttaaatgacaaatgctttgagtagtgaccttctattctgca

SEQ ID NO: 903911 - DNA, 120 bp, Artificial Sequence
  ENSG00000286107_1 (sequence is synthesized)
tcctaaatgcaatatgtgtagctgtgttttgctttcttgtcttctaaatgtttcagtgtttgaacattcacttgagcgatatttaattatcacagttggtcagggttgattgcagtgact

SEQ ID NO: 903912 - DNA, 120 bp, Artificial Sequence
  ENSG00000286107_2 (sequence is synthesized)
gaaacaggaccttgatgtttttagttttgatttttaccattttcaaatccatccggtttacattgtgtaatcagtagacgtttacagatcagcttcctgtcctaattgaagcacattgtt

SEQ ID NO: 903913 - DNA, 120 bp, Artificial Sequence
  ENSG00000286107_3 (sequence is synthesized)
acaaaccatttttcagtctcttctagtttacagaaaaccagatttactctgatggtcaaaaatatggtagtatttctgtctcattcgaaggcctagagtttgtgtctaggcagaagttac

SEQ ID NO: 903914 - DNA, 120 bp, Artificial Sequence
  ENSG00000286107_4 (sequence is synthesized)
tgagtatgtccccttataactaaatgatgtttgaagctggtggtagaaatgaaagtctctgcattcaatgtgaaatttaagaattttactgaaattagaaaagagaaaagtaacccctat

SEQ ID NO: 903915 - DNA, 120 bp, Artificial Sequence
  ENSG00000286107_5 (sequence is synthesized)
acttgctactctacgatagcatttaccccaatgttgatctggtagagcagggtgtgaaaacatccagggagaaaatttttttacctcacagggtctagcatcagctgatccaggcattgt

SEQ ID NO: 903916 - DNA, 120 bp, Artificial Sequence
  ENSG00000286107_6 (sequence is synthesized)
tgactcaaaactcatctagtcatctagtcttggcatctccagtttccctctccaaattgtttatcttatttaagtccatattggaagcctatagaaaatgaacctaatcaaagaagcaaa

SEQ ID NO: 903917 - DNA, 120 bp, Artificial Sequence
  ENSG00000286107_7 (sequence is synthesized)
cactgttactgaaaaggaagcagaaaaacacttcagtggcaaataaaacggctgttcatttcatttggtgtttcactgtattgatgacctcagtaatggcatgattatatttttctgagg

SEQ ID NO: 903918 - DNA, 120 bp, Artificial Sequence
  ENSG00000286107_8 (sequence is synthesized)
atttgaactccaccagatgcttctcataacttttgatggctgcttgaagctgtgttttttccactgctcccaggatggcacggacaatcatatctatgccaaggccaagaacagcaactc

SEQ ID NO: 903919 - DNA, 120 bp, Artificial Sequence
  ENSG00000286107_9 (sequence is synthesized)
caatactaccaaggagagaagcaccaatttgagctaacacagtgaccaacttgttaattatgccagttgtgacatttgagcccacaagtttaacagcgactgcactggctgcagatgtag

SEQ ID NO: 903920 - DNA, 120 bp, Artificial Sequence
  ENSG00000286107_10 (sequence is synthesized)
cttctcccaggatgaccgaaataaccttttgcactattgcaattttgtctgtttccttttccttaatatcctgaagttttctatagagggttggctctagcttatcttttagtgcttcat

SEQ ID NO: 903921 - DNA, 120 bp, Artificial Sequence
  ENSG00000286107_11 (sequence is synthesized)
caaccttctgcaattccttttggattttcataatggcttggatgatgaggtcacagttttctttgatggtcccatctcttttcatctcaatggaggccagcctgcaccccaagtgcatat

SEQ ID NO: 903922 - DNA, 120 bp, Artificial Sequence
  ENSG00000286107_12 (sequence is synthesized)
ttagaacctcagtcagcttattggtgacatcgaagctgtcagataagcaatcaagaagctgctggtgaagacgatttacttcttcccgcctttttgggttctctgggtaaaggaagtcac

SEQ ID NO: 903923 - DNA, 120 bp, Artificial Sequence
  ENSG00000286107_13 (sequence is synthesized)
tttgggccatatttccaatatgatcgctgaaaaataaaatggtaaatttttactgaaagtcttaaaaaatgtctgctaactgtgtagaagggactaggaaatctttttcttcatgcatag

SEQ ID NO: 903924 - DNA, 120 bp, Artificial Sequence
  ENSG00000286107_14 (sequence is synthesized)
ggaaatctttttcttcatgcatagcaaagaagcaagatgctgtctaaggataattcctcagaacactcaacaagtttttttaaaagagggagtatcgctgtgtcacccaggctggagtgc

SEQ ID NO: 903925 - DNA, 120 bp, Artificial Sequence
  ENSG00000286103_0 (sequence is synthesized)
agaatggtggggaagcatttcccgtgggacaacacaagtgtgagctcctgcaaaggggcccagaatggtggggaagcagaacttctgcctccaactcactttctcactgtgctactgcgg

SEQ ID NO: 903926 - DNA, 120 bp, Artificial Sequence
  ENSG00000286103_1 (sequence is synthesized)
atccagaggaatctctgcatgtgaggctctgccagggagctcaacctcacaagacagaccgtcatgtagagacaactgctacacaacatgggaagaactgctagagatgtaaagatgtaa

SEQ ID NO: 903927 - DNA, 120 bp, Artificial Sequence
  ENSG00000286103_2 (sequence is synthesized)
agacccaaaatgaagaagccagaacacatgaacacaaaaccagccaaccaacaaacacaagcagcatggagcatagagtctggggaccaactgcatggtgctgaggaatgcagcagttac

SEQ ID NO: 903928 - DNA, 72 bp, Artificial Sequence
  ENSG00000286103_3 (sequence is synthesized)
ctgaaggcaattgagaaaaagaagatgcgagaagagctgtttacccttcctttatctgcttaaaagcaagga

SEQ ID NO: 903929 - DNA, 120 bp, Artificial Sequence
  ENSG00000286103_4 (sequence is synthesized)
agagctgtttacccttcctttatctgcttaaaagcaaggaataaatttccattataaaggtgtccccttgttctcataccaagaagaggagacagcatcaagattactctacataaagaa

SEQ ID NO: 903930 - DNA, 120 bp, Artificial Sequence
  ENSG00000286103_5 (sequence is synthesized)
acccaactaaataacccttatctataatagtttctcccatatatttaccttcctacaatttaatgcccctagaagcccaagccccttttctttggttgcttccccacaatttatcgtact

SEQ ID NO: 903931 - DNA, 120 bp, Artificial Sequence
  ENSG00000286103_6 (sequence is synthesized)
ttgttaaaatggtaggtaagctcctaagtgtaaccacttctttggatttttttagttctttctctgcagttcccatgcatataaaaatattaacaacaaataaaatttgtatgctcttca

SEQ ID NO: 903932 - DNA, 120 bp, Artificial Sequence
  ENSG00000233818_0 (sequence is synthesized)
cccaaaatgctgggattacaagcatgaaccactgtgacttgccttcttggcaattttaaatgaaagaagaagatggaataatgcctactgaggactatgtttgaggggtgttgtatgacc

SEQ ID NO: 903933 - DNA, 120 bp, Artificial Sequence
  ENSG00000233818_1 (sequence is synthesized)
ccgttttccatacccagccaacttgtcatgtgacaagtccacagaaagatgttatatgacaggaatctatgaactagtcttccctgaaatgtacctgactacagctaacatcatatcaca

SEQ ID NO: 903934 - DNA, 120 bp, Artificial Sequence
  ENSG00000233818_2 (sequence is synthesized)
acgttaagatgctatttttcaacaaaattcattttaccaacctcaaaacgtatttcctccgaagaggatacgcactgacaaacaacacccgagtgtggcatgctagcaggagcactaggc

SEQ ID NO: 903935 - DNA, 120 bp, Artificial Sequence
  ENSG00000233818_3 (sequence is synthesized)
tgggagtcaagagacttaaattccacccggaagccaccacatgaccttggcatgagcccgtcaccaggctcctcagcgtcctcatcgcagcaccagggatttcccaagccctccggaaat

SEQ ID NO: 903936 - DNA, 120 bp, Artificial Sequence
  ENSG00000233818_4 (sequence is synthesized)
actgtaacttgacaacaatggagaaagactttcacccatgcggttggaatgctagccttaaaatatatacaattgttacatgtcaataaaaataaataaataaatgtttaaaaaaaaaaa

SEQ ID NO: 903937 - DNA, 120 bp, Artificial Sequence
  ENSG00000233818_5 (sequence is synthesized)
gagttcaagccgggatgcagctcctagtgttttcaagcgtcttacagatggagatcagccccgtcttcctccaacgtccccaccccgcatcggagtcaggactccacggtgctgtggtca

SEQ ID NO: 903938 - DNA, 120 bp, Artificial Sequence
  ENSG00000233818_6 (sequence is synthesized)
gcacggctgcatggtcctgcgaccctgagccccagtgggctctgactgtggttaccagcgccttaggagacagagtaacagtctggaagcagaaacagagactgtccatttcataaacag

SEQ ID NO: 903939 - DNA, 120 bp, Artificial Sequence
  ENSG00000233818_7 (sequence is synthesized)
ccacatccgcaaggtttattcctggatcacaaaccaaccccactgaccaaactcccaagtcactttatattaaacttgttatcaaatcacccacataaatatatataataaatacaaaaa

SEQ ID NO: 903940 - DNA, 120 bp, Artificial Sequence
  ENSG00000286101_0 (sequence is synthesized)
ccaccccaagggaacaatcagggaagaaggaacgcaagacggtggaagcatgccaacctattaaaccgcaagtcagagatcaaaccatatcctcatttgaaaatggaaaaagaaaagaaa

SEQ ID NO: 903941 - DNA, 120 bp, Artificial Sequence
  ENSG00000286101_1 (sequence is synthesized)
tggaggcattgtgtgatatttgcctaaatataactaaagagatccatttatttttagtgtttgattaaaaaccctcaaaggaaaagagaaattttgatctttgagaagagctgtttcatc

SEQ ID NO: 903942 - DNA, 120 bp, Artificial Sequence
  ENSG00000286101_2 (sequence is synthesized)
cctcaggaggcctgcagctgccattctgcttctgttggaacatgacctccttgagaacactcccaggcctgactgcagggtggggagaccacacagagcagagccgagccaccgggatga

SEQ ID NO: 903943 - DNA, 120 bp, Artificial Sequence
  ENSG00000286101_3 (sequence is synthesized)
ggcccctagatcacccagctcccagctgaccacagatcatgagtgatcccgtttctccctaggtcaagggtgatgttttgctcagagaaaactgaagtttggattgttccagtcctgcat

SEQ ID NO: 903944 - DNA, 120 bp, Artificial Sequence
  ENSG00000286101_4 (sequence is synthesized)
cacatcctgtttcaggctgccctaaaacaaaaccagaaacaaccatcaccacaaaacaccataccttcaatagtcttctcagtgttcagaataaaggctctggttttcccttgggctcaa

SEQ ID NO: 903945 - DNA, 120 bp, Artificial Sequence
  ENSG00000286100_0 (sequence is synthesized)
gggcgcagacggaagggaggaggaagaagagcgaaagtgccctcacgccccgctgaaacagaaatagacctgttgtgctaacttatttccggaagatggcgccagcagataacgctgcgg

SEQ ID NO: 903946 - DNA, 66 bp, Artificial Sequence
  ENSG00000286100_1 (sequence is synthesized)
ggaacaattttcactattcacagattacatatcaatttcacatgtgttatctcatttgattctcct

SEQ ID NO: 903947 - DNA, 120 bp, Artificial Sequence
  ENSG00000286100_2 (sequence is synthesized)
acatatcaatttcacatgtgttatctcatttgattctccttcaccaaccatttaccaaatgctgattattccatctttactgttttatcccttcgccaacaaatgcttactgagcactta

SEQ ID NO: 903948 - DNA, 120 bp, Artificial Sequence
  ENSG00000286100_3 (sequence is synthesized)
ctctagccaaagagcatctttaaatgccttctcaagcgcaatgactaagaaacaaaaaaggaaatagaattctaagcctctgctggagagctggactttccagagatgaataagacaagt

SEQ ID NO: 903949 - DNA, 120 bp, Artificial Sequence
  ENSG00000286100_4 (sequence is synthesized)
tccagccactgatttctttctggttctgggttgatgtcaacttgtgctctggaaggaggctgctttcataaagcagaagaagcttaattcaagtgaaactgagtcagaaagaaagcaatt

SEQ ID NO: 903950 - DNA, 120 bp, Artificial Sequence
  ENSG00000286100_5 (sequence is synthesized)
cctttgcaggagcagctagggtgcatctcagagactgtctgcagtacttcccaagggctattgatctgagagcagagcattcggtccttggactggtgaaaattgctgagcaggcaaaag

SEQ ID NO: 903951 - DNA, 120 bp, Artificial Sequence
  ENSG00000286100_6 (sequence is synthesized)
aagaataaaacccgtaaagggaatggagaaaagatgttgaagggcttccgggtagggaaggttagctggactgcattcaggagctccagacagaagtgactctgcagttccttgagcttc

SEQ ID NO: 903952 - DNA, 120 bp, Artificial Sequence
  ENSG00000286100_7 (sequence is synthesized)
gcaggcaggcctgcaagcaaacctggaaaccacgagaccagggcctggcgatccatttctttggtggggacagaggtgctcaccctcagccttctcacgctcactccagaactgtgacgg

SEQ ID NO: 903953 - DNA, 120 bp, Artificial Sequence
  ENSG00000286100_8 (sequence is synthesized)
ggtgagctcacgtgacaatcacctcagcagtgcaattttaggggtgtcaagaagggctccttctatggctgaaatctctttcaacagttactgtctggtgccccaaatgccaccactggt

SEQ ID NO: 903954 - DNA, 64 bp, Artificial Sequence
  ENSG00000286100_9 (sequence is synthesized)
ccactggtgtccttgcagggtcccactctgtcatctagactggagtgcagtggcgcgatctggg

SEQ ID NO: 903955 - DNA, 89 bp, Artificial Sequence
  ENSG00000286100_10 (sequence is synthesized)
aattctccagcacatgccaccgtgccaggctaagttttatatatttttgtagagatgagacttcaccatgttggccagactggtctcga

SEQ ID NO: 903956 - DNA, 69 bp, Artificial Sequence
  ENSG00000286100_11 (sequence is synthesized)
tgcgcacagcccattagtgtcctttaatatgaatattgcaagagttaaaaacaggacttctataaagaa

SEQ ID NO: 903957 - DNA, 120 bp, Artificial Sequence
  ENSG00000286100_12 (sequence is synthesized)
tggcttggagaaaattctgcaagtgtacacatcagttgttaacaggggttatcgtgagccagaaagtgtggagtaagtaagggagattaatggaggtcagaaaaggaagaagaaaaggat

SEQ ID NO: 903958 - DNA, 120 bp, Artificial Sequence
  ENSG00000286100_13 (sequence is synthesized)
agataagaaaaaaaaatcacacttaaaaagggtgctcttgattaaaagaatgtgtattatttgttatgatttatgaaaaaggttacttctattgcccatacgcgttaagacaggcatgaa

SEQ ID NO: 903959 - DNA, 120 bp, Artificial Sequence
  ENSG00000286100_14 (sequence is synthesized)
agatgcccagtaaaatattaacagtagttattatatgctgatgagatttcaaagaatgttactttcttccttataactttatatatttaaatttttatagggagcatttaaatcaggaaa

SEQ ID NO: 903960 - DNA, 120 bp, Artificial Sequence
  ENSG00000286100_15 (sequence is synthesized)
gtgggaaaaagcaaaattaagaacattattgcaagccaaatgagaaaagcaataacaaaaaaataacaaaagtaaaacaaaatttgagccattcaaattctaacttctctattccgtggc

SEQ ID NO: 903961 - DNA, 120 bp, Artificial Sequence
  ENSG00000286100_16 (sequence is synthesized)
ctattccgtggctgtgggactctaaagaaattacttaacttctttgatcctcagtttcttcctctttaatttttaatttattttatgagatagtgtattagggttctctagagggacaga

SEQ ID NO: 903962 - DNA, 120 bp, Artificial Sequence
  ENSG00000286100_17 (sequence is synthesized)
gatgtatatatgtaagggagtttattatggaatattgactcacacgagttttgttgaatgcatatggagtagattatagaatcacaggggaaccaaactcagaggttgagaagccaggca

SEQ ID NO: 903963 - DNA, 120 bp, Artificial Sequence
  ENSG00000286100_18 (sequence is synthesized)
tggtgtctccattcacatcaacagaattggcctggggacactactggccctctggttccagacagccagtgctgcccgtaaccccactggattgtcatctctggaactggatcttactct

SEQ ID NO: 903964 - DNA, 120 bp, Artificial Sequence
  ENSG00000286100_19 (sequence is synthesized)
ctcatcacacctgccagagaacagtctctatatgagtttgaaaatcgaagtccatggcagatgcacctgatgggcaacgcctaagtcacaacactgatgtcctccatgcagggaggacat

SEQ ID NO: 903965 - DNA, 120 bp, Artificial Sequence
  ENSG00000286100_20 (sequence is synthesized)
ggcattttctgcttcctctgcagaattgaactctgggttccaaggagttgaatgaagtaggtaattcccttacacacagaaagtgggttcagatgtaaaattgtgaactctcagtactca

SEQ ID NO: 903966 - DNA, 120 bp, Artificial Sequence
  ENSG00000286100_21 (sequence is synthesized)
agtttccctgtctgcaaaatggaaattatattagtacctttcttaaaatattattcacaggattaaaagaattaatacatgtaaaattcttagaattatgtcatccacataatgatttca

SEQ ID NO: 903967 - DNA, 120 bp, Artificial Sequence
  ENSG00000286100_22 (sequence is synthesized)
tgaatactagatctgatttttcagttatatgaaccttttggcttaaaccatttgagagttggttgttactttttttctacttgcaacttacagtcctgactaatatgaagactaatgata

SEQ ID NO: 903968 - DNA, 120 bp, Artificial Sequence
  ENSG00000286100_23 (sequence is synthesized)
ttgcaacttacagtcctgactaatatgaagactaatgatacacagggttgtaaagctggagtgaggaaatctatgtaaagttcttggtacatggtgatatggcttggctgtgtccccacc

SEQ ID NO: 903969 - DNA, 82 bp, Artificial Sequence
  ENSG00000286100_24 (sequence is synthesized)
tgatggttttataaaggggagttccctgcacatgccctcttgcctgctaccatgtaagacgtgactttgctgctcctcattt

SEQ ID NO: 903970 - DNA, 120 bp, Artificial Sequence
  ENSG00000226041_0 (sequence is synthesized)
ttctgtgggtgtgtctgtccttacaggtgtcacatcaggcctgctgcacttgcccctgcttgcccagggacttcccttctaacaacgagatctgacagcatctctaagttgaagaatgct

SEQ ID NO: 903971 - DNA, 120 bp, Artificial Sequence
  ENSG00000226041_1 (sequence is synthesized)
gcctgacacagggccttggaaagaccccacgctatcagaggcccgatgcccaaggtccattaacttctctgtggaatcatccctgggagccggggtgcgctcccgatgctggtcctccac

SEQ ID NO: 903972 - DNA, 120 bp, Artificial Sequence
  ENSG00000226041_2 (sequence is synthesized)
tggccttggtgctgagaccctacacacagactgcaggtccctgagcactcccagatagtcaagcatcagggtccccagccctgcctctggccatccccccacctgcagcccatgcacacg

SEQ ID NO: 903973 - DNA, 120 bp, Artificial Sequence
  ENSG00000226041_3 (sequence is synthesized)
aggtgaagaagcagcaagaggcacacagagggccaccttctcacaccaggatccttcagcggctcaagaacccaaagtcaccccagaccccaggcctggccatctttccctttccctcag

SEQ ID NO: 903974 - DNA, 120 bp, Artificial Sequence
  ENSG00000226041_4 (sequence is synthesized)
ctgagttctgatcagcttgctcctttccaagtaccattacctgccacttatgggctgcaaaaagaaatatatggcagttcatagattttcagacataataaaacacgcttgtcaaggcca

SEQ ID NO: 903975 - DNA, 120 bp, Artificial Sequence
  ENSG00000272316_0 (sequence is synthesized)
ccatatcttggctattgtgaaaaatgatgctataaatgtgggagtgcagatatctctacaagatcctgattttaattgttttggatatgtatctagaaataagagtgctggatcgcctgg

SEQ ID NO: 903976 - DNA, 120 bp, Artificial Sequence
  ENSG00000272316_1 (sequence is synthesized)
taattctattatttttagcttttggaggaacctccatactgttttcatagttgctgtatcattgtacattctcaatgtacagtgtatagaggttccaaattccctacatcctcaccattt

SEQ ID NO: 903977 - DNA, 120 bp, Artificial Sequence
  ENSG00000272316_2 (sequence is synthesized)
atcttttggttttttgaaaatcaacatcctaacaagagtgaggtaatatcattttgatattactatttgcaatcactttttgaatatgacatcaaaagcacaggaaacagaagcaaaaaa

SEQ ID NO: 903978 - DNA, 120 bp, Artificial Sequence
  ENSG00000272316_3 (sequence is synthesized)
taggcaagttggactatatcaaactaaaaacaaacaagaaaaacaaaaaccaagcaaacttctacacagctaaggatacaatcaacagaatgaaaaggcaatctataaaatgagagaaaa

SEQ ID NO: 903979 - DNA, 120 bp, Artificial Sequence
  ENSG00000272316_4 (sequence is synthesized)
tatttgcaatccatatatgtgataatggattaattttcaaaatatataagaaattcctacaatttaatagcaaaacatgcataatctgatttaaaaatgggcaaaggatttgaacagaca

SEQ ID NO: 903980 - DNA, 120 bp, Artificial Sequence
  ENSG00000272316_5 (sequence is synthesized)
tttcttcaaagaagatatgcagatggccaacaggtacattaaaaaatatgctcaacatctttaattatcaggggcatgcagattagtagaactttcaagtaaataaataaataactctac

SEQ ID NO: 903981 - DNA, 120 bp, Artificial Sequence
  ENSG00000272316_6 (sequence is synthesized)
ttcacagactaacctataaaatgctgaattttgttatgtaaaatgttacagaaataatttcctcacaattgtgttaattcgtttgtgctactattacaaaatatttactacctggtcatt

SEQ ID NO: 903982 - DNA, 120 bp, Artificial Sequence
  ENSG00000272316_7 (sequence is synthesized)
tataaagagcagaaattgatttttcacagttctgcaggctggaaatccaagatgaagtcacctgtagttcagtgtctgcgtctaagagagcactttgttgctgcacccgccagagggaag

SEQ ID NO: 903983 - DNA, 120 bp, Artificial Sequence
  ENSG00000272316_8 (sequence is synthesized)
aaatactgtatcttctcatgaaggaaggaaccgaaggtgggaatagggaccaacctccctctttcaagcctttttgtagtgacattaattcatttatgaggattccaccatcatgacata

SEQ ID NO: 903984 - DNA, 120 bp, Artificial Sequence
  ENSG00000272316_9 (sequence is synthesized)
atcatttcccaaaggatttcacctcctcccactgttgcattggggattaattttccaacacatgaattttgagggacacattcaaaccatagcaactggtatatagtaactaggtggcct

SEQ ID NO: 903985 - DNA, 120 bp, Artificial Sequence
  ENSG00000272316_10 (sequence is synthesized)
gatggtcttcataataaagttatattttactttagtataaaataaaaggtcaaggcttgtaactgtcatgagactgcttcatgtatatctcccctagtgactatcacagttgactgacag

SEQ ID NO: 903986 - DNA, 120 bp, Artificial Sequence
  ENSG00000272316_11 (sequence is synthesized)
ctcctggggttcatctttgtatccatcactacctatagtccaaaatccccatctcacagctgttgtcagccaatgacaaagcatagtgaggtgctgttcctgctcaatatggaggaaaac

SEQ ID NO: 903987 - DNA, 120 bp, Artificial Sequence
  ENSG00000272316_12 (sequence is synthesized)
tttggcttgataactctccattggcctgccaaaatatgttaagtattgtgctactatctgaaactcattttacctaaccttttttattttctttcctccttcataaggtttacaagtatt

SEQ ID NO: 903988 - DNA, 120 bp, Artificial Sequence
  ENSG00000272316_13 (sequence is synthesized)
gtggctgaaggctgtgtctattcctgcttcctccacctcaccttgcaaaagtgtttatccaaataaatccctcacacatctaatcccattttggcaaattcagtttcagaactttgcctt

SEQ ID NO: 903989 - DNA, 120 bp, Artificial Sequence
  ENSG00000272316_14 (sequence is synthesized)
cactactagtctcaaggaaaatatattaatacacacacacacacacacatgcatgcacacacacacacatatgtatatatttcccaatctattataggtaaaatatactcttatcacgaa

SEQ ID NO: 903990 - DNA, 120 bp, Artificial Sequence
  ENSG00000272316_15 (sequence is synthesized)
taaatccaaattgtgaatgcttaaaatatactttacagaatattaaaatttaaaagcatcacaggaaaaatattaatactgttttcagaatttcagtatgtgaataatatttacattaca

SEQ ID NO: 903991 - DNA, 120 bp, Artificial Sequence
  ENSG00000272316_16 (sequence is synthesized)
gtttcatatgaaccttttacttctctatttagtatgccttcatgtcactgcagaggtatgaaaaggagagctctcctagttgtgaaaaaagaaacatgttttattgggagctaagtggaa

SEQ ID NO: 903992 - DNA, 120 bp, Artificial Sequence
  ENSG00000272316_17 (sequence is synthesized)
ggttgaacatgtgggaatatctgggcatgcactgaagacaccttttgcatctcccccatccacatagcaaagtgaatgtggtttgtgtccatttatgcaggatactctggaaaaccaaac

SEQ ID NO: 903993 - DNA, 120 bp, Artificial Sequence
  ENSG00000272316_18 (sequence is synthesized)
tgaagcaaggttaacatacatttttaaaagaaaactaaaggaaaacaacacatactttattacctatcaaagtaaccacttcattatattttagtggaagctattatttattatcgaatt

SEQ ID NO: 903994 - DNA, 120 bp, Artificial Sequence
  ENSG00000272316_19 (sequence is synthesized)
atttgcttgggcaggaggatacagggtttttccatttgggttgtatatgttcctcatgagaaaagctgaagacaaaatcttacccttctgcccaaagtcaattgaatcaacatgtttacc

SEQ ID NO: 903995 - DNA, 120 bp, Artificial Sequence
  ENSG00000272316_20 (sequence is synthesized)
ttgctccacggagctgctaacctactggctgggtgttgtgtggcttggcaatggagttctgcatgacaggaacaatggtttttaagtggactaatcagagctattaatgcatatgcagtg

SEQ ID NO: 903996 - DNA, 120 bp, Artificial Sequence
  ENSG00000272316_21 (sequence is synthesized)
aaggcaggaactttgctacatgcagggcttatcattttgctaataacaatgcctggcacagattagcgatgtgttgaaataaaacatattctgggagatataagatagagaaagagagca

SEQ ID NO: 903997 - DNA, 120 bp, Artificial Sequence
  ENSG00000272316_22 (sequence is synthesized)
gctgtacataagttgaaggctttgagttaaaagactataggaattagatgagtgggggctatggagaacagagagaatttagagtgtggacaagtgttctatgagcagagactgggacta

SEQ ID NO: 903998 - DNA, 120 bp, Artificial Sequence
  ENSG00000272316_23 (sequence is synthesized)
gccaaaacgtgatgatgggcagctagcttggaaagaatgcttacaacgtgaaaattatatatttataaaaggccattacttctgttaaagaacaatagaccccagtgaaaagaaaggaaa

SEQ ID NO: 903999 - DNA, 120 bp, Artificial Sequence
  ENSG00000272316_24 (sequence is synthesized)
ttgaaaaatagagaaaatgtggagaaaactagaatctctatagacagcgtcaatgcagcatcaattatatgaaccacttttgagcacaaagaactattgttttgaccttggaggcaattt

SEQ ID NO: 904000 - DNA, 120 bp, Artificial Sequence
  ENSG00000272316_25 (sequence is synthesized)
ggtcttcattaggtttagctgtaggatagttgatgttcattattccctataacacttgtgatggcaaaaccttcacaaatttatatgatctaggtatgttttcaatccttacaacccaaa

SEQ ID NO: 904001 - DNA, 120 bp, Artificial Sequence
  ENSG00000272316_26 (sequence is synthesized)
taaccgatcataactctcactatgtcatttgaaaaaaaaaatgatcatcagaagtgtaattcaattagcaagtatcagtagtggagtataaattattattggttaatactaagtatgatt

SEQ ID NO: 904002 - DNA, 120 bp, Artificial Sequence
  ENSG00000272316_27 (sequence is synthesized)
gaaaaatcgtagtagatggaaatatgggaatctttattttggatgaataaactttatgcctaaaacatatgtttataaaaaatactttgtgaataaacccattgtctaatatttaaaaga

SEQ ID NO: 904003 - DNA, 120 bp, Artificial Sequence
  ENSG00000272316_28 (sequence is synthesized)
gttgaagtatgctattataagatcttccttaattgatgaaatgatgcaaagccaataatattgctccacttactgaagtatagagatgaagagaaaactttttctttattccatgttcta

SEQ ID NO: 904004 - DNA, 120 bp, Artificial Sequence
  ENSG00000272316_29 (sequence is synthesized)
tataagtcaagaactagagctcaagattaagatttttgttttttgttttttttccatttccctgggaacagagcaacagtctttctgggtctaaaacatccttttttcagtacaccccac

SEQ ID NO: 904005 - DNA, 120 bp, Artificial Sequence
  ENSG00000272316_30 (sequence is synthesized)
agcatcctatagaaatatgttgcaatcagttgccaagtcacatcctagcttaatgtcagcaattttctttctgaaccaattttgcactcagcattaagaggaaatattgaagggagacat

SEQ ID NO: 904006 - DNA, 120 bp, Artificial Sequence
  ENSG00000272316_31 (sequence is synthesized)
accttttatgtttgtaaaatttatacttcttgagataaaaaagcaactatatccattgtcgtgggatcttgagaagaaataagaaaatgaaatattatagaaaatattatattatttaat

SEQ ID NO: 904007 - DNA, 120 bp, Artificial Sequence
  ENSG00000272316_32 (sequence is synthesized)
tgtcctgttctaaaacactttctaagcctgcctgtttttttgccaaattaaattaatatttggatgtagacagcttttcagagtggcagtatcatagtcaatgaagatgacctgaggcac

SEQ ID NO: 904008 - DNA, 120 bp, Artificial Sequence
  ENSG00000272316_33 (sequence is synthesized)
agttattgctaattggacatagaaaccaccttcactcatatataaaaattattatgtgctacactagatatttcaggagaattgataaaagaaagactgttgtattcatatgcttgtctt

SEQ ID NO: 904009 - DNA, 120 bp, Artificial Sequence
  ENSG00000272316_34 (sequence is synthesized)
cctggctagaggatctgttttaattaatcagctcatggagtttggaaaatatttatagtatacatagctgagtgttcatgtaaattttgaatacattcatacatcttttttttaaaaaaa

SEQ ID NO: 904010 - DNA, 120 bp, Artificial Sequence
  ENSG00000272316_35 (sequence is synthesized)
gattgaacttcaaaaccattttcttacatactcagtagaagttgttatgagccaacattttttgtgagctatactattttaaacatctaaagtaaattatttgacatataaaaagacttc

SEQ ID NO: 904011 - DNA, 120 bp, Artificial Sequence
  ENSG00000272316_36 (sequence is synthesized)
ttcatttaaaaatatatcttttaaaaataattttacaagtgatggcatctcattttagaagaagaggcatcaatgacagcagttacagtaactcgatgctgaatatgtttttaaatacaa

SEQ ID NO: 904012 - DNA, 120 bp, Artificial Sequence
  ENSG00000272316_37 (sequence is synthesized)
gatgctgtgttcagcattgtacatacattatcaaattttattctgataatatgctgcatgatgtattaggctgggttctctcagacagaacctacacgtatacttatatatatatacaca

SEQ ID NO: 904013 - DNA, 120 bp, Artificial Sequence
  ENSG00000272316_38 (sequence is synthesized)
tgcatatacatacacatacagagagagagaaagagagagagagagagatctctacatttattagaggaattggatcatgcgattatgggggctgagaagttccaggataggttgtctgca

SEQ ID NO: 904014 - DNA, 120 bp, Artificial Sequence
  ENSG00000272316_39 (sequence is synthesized)
agctggagaaccagggaagagagtagagtagctttctccaagtcctgaagcttcagaactagggaaactgatggtataactctcagtcagaggccaatggactgagaactcagacagcca

SEQ ID NO: 904015 - DNA, 120 bp, Artificial Sequence
  ENSG00000272316_40 (sequence is synthesized)
ctttgcaactcctggaatcccaaggccagagagcctggagtttggatgtccaaaagcaccagaaggagggtgtcttaggtccaggagagagtgagctttcctatgcatttttgttttatc

SEQ ID NO: 904016 - DNA, 120 bp, Artificial Sequence
  ENSG00000272316_41 (sequence is synthesized)
catacccctgaccaattggatggtgcccacccgcattgagggtgggtgtccctctattaaatattttaactataattttaactgtgatataggcactgaattcttgttgctaataatctg

SEQ ID NO: 904017 - DNA, 120 bp, Artificial Sequence
  ENSG00000272316_42 (sequence is synthesized)
ttcttgttgctaataatctggtaagatccatctgaactatgaagtgagtacctggaggaactcctacattttaggctttcaaaggttacaggcttttcgtgtgtgtgtgtgtgtgtgtgt

SEQ ID NO: 904018 - DNA, 120 bp, Artificial Sequence
  ENSG00000272316_43 (sequence is synthesized)
gtgtgtgtgtgtgtgcgttttgagaaaaatggaattcaaacactgtgattagaatgtatgtttacttatatagaattaatgaatgtatataataataattactgtatataattttaaaat

SEQ ID NO: 904019 - DNA, 120 bp, Artificial Sequence
  ENSG00000283164_0 (sequence is synthesized)
ctgcccttgagcgccccgtgaggaagaaaccgtgtattgcctcatgccccagagaggtaaacggaggctagagaaattacgcagctgggaccaggcagtggtggtgaagacagatgacag

SEQ ID NO: 904020 - DNA, 120 bp, Artificial Sequence
  ENSG00000283164_1 (sequence is synthesized)
tacctgtctcagaaaacgttgttttaggagtcggcatggtaacagggccaattcttttagagccaccaagcttctccctgcagtcatcctgcccatggctgttgatggccctgatggggc

SEQ ID NO: 904021 - DNA, 120 bp, Artificial Sequence
  ENSG00000283164_2 (sequence is synthesized)
gttggacaaaggtggtcttcaaatgcaatggttgtcttatcaccgaaagcccacggcatccagaggaggccctttactacgaagtttacagagagcacaggtctctgtacgtcccaagtt

SEQ ID NO: 904022 - DNA, 120 bp, Artificial Sequence
  ENSG00000283164_3 (sequence is synthesized)
tcccctgctgccaaatgcaggggaggagagaattctggaagcccaccctgtcccatggctcccctggcacatggagccactgaatgtcttgtgaacattaaacaaatgcttccaagtgaa

SEQ ID NO: 904023 - DNA, 120 bp, Artificial Sequence
  ENSG00000254443_0 (sequence is synthesized)
gtgccagggtacagactcttaattccttctggaatactgagagtgccgggaaatgacagcttaatgttcagggtacgtcttagtttgtcttggatcttgtgacagggacagctgcattag

SEQ ID NO: 904024 - DNA, 120 bp, Artificial Sequence
  ENSG00000254443_1 (sequence is synthesized)
tcttggagtgaaagtgtatctgagtatgttgggccacatttgcagtagtttgttctgaactccagagctattgaccaagcccgtcctgccttctgaggtatggaagacactgaggcctcc

SEQ ID NO: 904025 - DNA, 120 bp, Artificial Sequence
  ENSG00000254443_2 (sequence is synthesized)
tgacccacggcacagcattctctgcttccagcgcgtctgccttgggccatcaccccagagagtttgatcaagacccaagcctaatccaggtcctacccttctcagcccccatcccacttg

SEQ ID NO: 904026 - DNA, 120 bp, Artificial Sequence
  ENSG00000254443_3 (sequence is synthesized)
ggtttatttacttattcaaacaaacatcaaatgagcatctacatattaggattctagataggggtgtggggtcagtgtgcagggacggcagcatagaagagggactttggttgagacttg

SEQ ID NO: 904027 - DNA, 120 bp, Artificial Sequence
  ENSG00000254443_4 (sequence is synthesized)
aaggatgaataggagtttgccaaagggtcaaaggataggaagctatttgaggaagaagaaactgcatatactacacaaatatacagaggaccctggtcagccatgtggttggagcacaaa

SEQ ID NO: 904028 - DNA, 120 bp, Artificial Sequence
  ENSG00000254443_5 (sequence is synthesized)
atgaatttttttcccctaggatggaaaaacacagaagttttttcaaatttccaagtaggaagttatgattccaaaaaaaagaaaaagaaaaagaaaagaaggctttttctaattagaaag

SEQ ID NO: 904029 - DNA, 120 bp, Artificial Sequence
  ENSG00000254443_6 (sequence is synthesized)
gtcaggttagtggcattgtggaagacggattggacaggggcaaaagtagacccagggagactagtcagtctagccagtcagccaacaagtgttttgtaagttctgtagtaggttaaatag

SEQ ID NO: 904030 - DNA, 120 bp, Artificial Sequence
  ENSG00000254443_7 (sequence is synthesized)
ttgcttcccccactccaaaagttatgcccatgtcccagaacccgtgaatgtgaccttatttggaaaacagaactttaaagatgtaatcaagttaaggatctcaggatccttgattatctg

SEQ ID NO: 904031 - DNA, 120 bp, Artificial Sequence
  ENSG00000254443_8 (sequence is synthesized)
atgggccttaaatccaatggcaaatgtccttaaaagaaacaaatgcaagagaaggccactgaagacagaggcagagattgcagtgatgcagccataagccaaggaatgcccggaaatgtc

SEQ ID NO: 904032 - DNA, 120 bp, Artificial Sequence
  ENSG00000254443_9 (sequence is synthesized)
agaagcagaaagagcagattctcccttcaagccttcagagggagtgtggccctgctgacatcttgacatcaaacctctagcctccagaacaatgagaataaatttatgttgccttatgcc

SEQ ID NO: 904033 - DNA, 120 bp, Artificial Sequence
  ENSG00000254443_10 (sequence is synthesized)
ctgagcctgtctctccgctgagcttcttcaccccaaggactgcctgctggctgcccacttctcatcaggcaaggccacagtgccatctgctggctattgggagccatgctggtcaggttg

SEQ ID NO: 904034 - DNA, 120 bp, Artificial Sequence
  ENSG00000254443_11 (sequence is synthesized)
ggagggcacaggagcatgctaggctgacaaggagcactgagctctccccacctcagctcaggaataacagaagtggcctttcccttaagcccccactgaccagagcccctcattcaggct

SEQ ID NO: 904035 - DNA, 120 bp, Artificial Sequence
  ENSG00000254443_12 (sequence is synthesized)
tcagtcaccagagccccctgctcaagtcctttagttaccatggcctctaggtcagtctcctcaggaatcagggccccttgtgcagcccccagtcccaccccccactgaccagagcctcag

SEQ ID NO: 904036 - DNA, 120 bp, Artificial Sequence
  ENSG00000254443_13 (sequence is synthesized)
tgaccagggcccctaggtcatgcatccaatgaccagggcctctttctaaggctctctactgaccagaacccctcattctagctccatggtggtgagggcacctcatttaggcttggcttc

SEQ ID NO: 904037 - DNA, 120 bp, Artificial Sequence
  ENSG00000254443_14 (sequence is synthesized)
acaatcaggtcattcaatgaccaggacctatagctcttgacccccaaagaccagggcctttctcagacccccacgaccaggtcctttcagtgacctatagtcctctcttttaggaccctc

SEQ ID NO: 904038 - DNA, 120 bp, Artificial Sequence
  ENSG00000254443_15 (sequence is synthesized)
tgtgcctaggttactaaagaccattactcagaggacataaggagtggtgtttgtgggggctctttgatccccaagagctggacaggtcccatctgtttcctctgtttatcgtccccttcc

SEQ ID NO: 904039 - DNA, 120 bp, Artificial Sequence
  ENSG00000254443_16 (sequence is synthesized)
cactggtctccagagaggcctctggccactggggctttccattttgttttgcctgtgctcccgggtccctcttcagacatggccacagctgtgcccaggtctcataacaaaggtggtctc

SEQ ID NO: 904040 - DNA, 120 bp, Artificial Sequence
  ENSG00000254443_17 (sequence is synthesized)
agcatggcagcccacctgggcctcgcatctgctggccctctaacaccagaccacacacccctgtgccatctcaccacctcccataggcaggcctcccatcacatctatctcaggccgtat

SEQ ID NO: 904041 - DNA, 120 bp, Artificial Sequence
  ENSG00000254443_18 (sequence is synthesized)
tacccaaaggccaaatgcttccagtcccagcatcccaccagtccctggcacctgtcctagataccaagtgtgacttttcccattttccttttcttccagacccaagcctaatccaggtcc

SEQ ID NO: 904042 - DNA, 84 bp, Artificial Sequence
  ENSG00000254444_0 (sequence is synthesized)
cttctctctattcggccatcttggctcctcaagaaaattttaataatcttttcatcctgtcctctctccagcctctcctctact

SEQ ID NO: 904043 - DNA, 120 bp, Artificial Sequence
  ENSG00000254444_1 (sequence is synthesized)
aatcttttcatcctgtcctctctccagcctctcctctactaccaagatgatcagttgcttccatttgaatcactgtcaagaaagaatgaagcagccaattcttttggaggaagttgatag

SEQ ID NO: 904044 - DNA, 120 bp, Artificial Sequence
  ENSG00000254444_2 (sequence is synthesized)
gcttctgctgagttcagcctcagcacagagtgaaggattacagcataggaagaaaataccagagccatatcactcccaaccaagacccatgctagcatcagttggtaaaatttgttcaca

SEQ ID NO: 904045 - DNA, 120 bp, Artificial Sequence
  ENSG00000254444_3 (sequence is synthesized)
gtgatgtcatcacaagccaggctgataacccccaagttagagcagaggcagtgctcgatttcattcctggaacagtagtgtctctgggcagccagtataggcactgggatggtcaacagg

SEQ ID NO: 904046 - DNA, 120 bp, Artificial Sequence
  ENSG00000254444_4 (sequence is synthesized)
ccattcctgagcatgatgaaccctgtggctttgaagacaaaagctttagtgactatggaggggtactgaagagggcgacagatggctatgtatctgtctactgccatgcagagaaagatg

SEQ ID NO: 904047 - DNA, 86 bp, Artificial Sequence
  ENSG00000278266_0 (sequence is synthesized)
ttgcatcactgcatggggaggaaaaaataaaaaaataaataaaaatttaaaaaaagaacacttgaagttactcagatcaggactca

SEQ ID NO: 904048 - DNA, 120 bp, Artificial Sequence
  ENSG00000278266_1 (sequence is synthesized)
ttaaaaaaagaacacttgaagttactcagatcaggactcatgcagagaaaagccaacaggagcaacaccccacattaggggaggaagacacctggggattcactgacttcagttgtgtga

SEQ ID NO: 904049 - DNA, 120 bp, Artificial Sequence
  ENSG00000278266_2 (sequence is synthesized)
attttaccctatgaccttgcttgctttatgagacagcagaggtggccaaggtcaatcctactgctctgtggtgaactctgcttttctctcgttaccataggtaaagggtcatgctcctat

SEQ ID NO: 904050 - DNA, 120 bp, Artificial Sequence
  ENSG00000278266_3 (sequence is synthesized)
gtaagccttcctgttccccagtcatttgtgcacggggtaggccatcatctcctgcctattcaagggaatgactagtcctgtcttctgtatcctcagtcaccaacttctcagttagtgttg

SEQ ID NO: 904051 - DNA, 120 bp, Artificial Sequence
  ENSG00000278266_4 (sequence is synthesized)
gaccaagcctatgttcaaaacatgactgagacagacctcaatccatagagatttatttagccaaggtccaaggacacatctaggaaaaaatacgggatcacaggagcatctgcgccttct

SEQ ID NO: 904052 - DNA, 120 bp, Artificial Sequence
  ENSG00000278266_5 (sequence is synthesized)
actttttccaaagagggttttgggaacttcagtatttaaaggggaaacagcaagcaggtgaggaaaaaaagcgaggaagtgtaggcaatgacagatgctcacattcttgtgaaactctgt

SEQ ID NO: 904053 - DNA, 120 bp, Artificial Sequence
  ENSG00000278266_6 (sequence is synthesized)
ttaccctagtaaatctgcattttacatgtgaaaagagggagtaaaggaaatagtcaataatgcattcctctcaggataggcccacgtggatttttaatcttgtccttgccctgtgaagat

SEQ ID NO: 904054 - DNA, 120 bp, Artificial Sequence
  ENSG00000278266_7 (sequence is synthesized)
aagctggtaactgacattgtcagggtgagattcagcagaactcagttttaggactaacttacagaggagctgtgtatcctgaagattcagcgactggcaaggaatttccttgggagcaat

SEQ ID NO: 904055 - DNA, 120 bp, Artificial Sequence
  ENSG00000278266_8 (sequence is synthesized)
gtgtgagggaggccatctgaggagatctgtggctttcttttgttgtgggaatctggcttatggatgaatctacgacacaggattgtgaaattacagctctttgggaacaaaaggaaggca

SEQ ID NO: 904056 - DNA, 120 bp, Artificial Sequence
  ENSG00000278266_9 (sequence is synthesized)
gtattgcatgacttagtttcccagcttcactttccctttggcatggtgagtttggggtcttgagagtctattttctttcacacccatcagcactgttaagtaagcaggaagacaacctga

SEQ ID NO: 904057 - DNA, 120 bp, Artificial Sequence
  ENSG00000278266_10 (sequence is synthesized)
ggttgtctctttactttgagttcctacataataaattgcagcctaatttagtacataaacccaaacctaatttaggagtaaattttttgtagcagatagccagatttcagccaatcacag

SEQ ID NO: 904058 - DNA, 120 bp, Artificial Sequence
  ENSG00000278266_11 (sequence is synthesized)
gcttccagctaacaagactatgcccaaataaggcaaatgcctcatcacatgatgctcaaataaggcagccacctaggcgaggccaatcaggtaacttttctactttgcttaattgttcag

SEQ ID NO: 904059 - DNA, 120 bp, Artificial Sequence
  ENSG00000278266_12 (sequence is synthesized)
tggtttggagtgctgccttatatatgaattgttctttggtcacataaaattggttaaatttaacttctctaaagttttgtattaaattgtatgtaaaacattggtagcacaatttggatt

SEQ ID NO: 904060 - DNA, 120 bp, Artificial Sequence
  ENSG00000278266_13 (sequence is synthesized)
cagatacccaaatattgactatgataatgtaaataatccttaagcagactgatttacaaaggcctgaacaagtttgatattctgaatattcacttcttctgatgaaaaaattgccaagac

SEQ ID NO: 904061 - DNA, 120 bp, Artificial Sequence
  ENSG00000278266_14 (sequence is synthesized)
cttacaattggcaggaaaaaaaatgtgtgttggttaaataagttatgttaacaacaagaacattaccacaattagaaaactcttactatgccaggcactattataaacacacctttgtac

SEQ ID NO: 904062 - DNA, 120 bp, Artificial Sequence
  ENSG00000278266_15 (sequence is synthesized)
cttttttaatcctgaaaaatttctaataaatatgcatttaatattatttgtatttaatattaagtgtatttaatattgcccctgttttgtgaattaatgcagcaataaactggcttgcaa

SEQ ID NO: 904063 - DNA, 120 bp, Artificial Sequence
  ENSG00000278266_16 (sequence is synthesized)
tggtgatgtattctataaggcagccattgttgtcataatgctacataacactacccgaatctcagttgcttataattcaagtacttatttttcttgtccataatctgtgaatcctgctga

SEQ ID NO: 904064 - DNA, 120 bp, Artificial Sequence
  ENSG00000278266_17 (sequence is synthesized)
aatcagctagactttgctccaggatgagggattggtccaattctgttccatctttccacgcatctttcatcaggttattaggaaagagtacacttcactggctgctctactgggaggctt

SEQ ID NO: 904065 - DNA, 120 bp, Artificial Sequence
  ENSG00000278266_18 (sequence is synthesized)
tatctccattaagtgaaccacagagaaaaaagaagagaagagttttacttctgtcatctggtgatacattgctttggtgaatacaagaaaccacaggataagcaacagggctctttggta

SEQ ID NO: 904066 - DNA, 120 bp, Artificial Sequence
  ENSG00000278266_19 (sequence is synthesized)
aattccacaggctctcctgatagggcagccaagtcttttcccagtagccagccctttgcactaaaacatgtggattttatttctatggatgttgtgagtgtggacctaaacttctctaag

SEQ ID NO: 904067 - DNA, 120 bp, Artificial Sequence
  ENSG00000278266_20 (sequence is synthesized)
agaacttgtatttctcaagcctaaagatgtattacatttttttgtatttgtatttgatccacataaagaaggggaaaaaaatttgtgtgtgtggatagcattccaagaaggaactctagc

SEQ ID NO: 904068 - DNA, 120 bp, Artificial Sequence
  ENSG00000278266_21 (sequence is synthesized)
cccaggaaagctgctatttctgctcttctccagctacctgccaacaatttgtcctcaaaagaggctctttctgactatttacagatctgtcacttacagattggcaattttcatgcattt

SEQ ID NO: 904069 - DNA, 120 bp, Artificial Sequence
  ENSG00000278266_22 (sequence is synthesized)
cattctgctttgctttacttcatactggcatcatctttatcagaaggatatataaatatagatatatggatatcgtttgtcttccctttctccacattaacatattccatgagtgcagga

SEQ ID NO: 904070 - DNA, 120 bp, Artificial Sequence
  ENSG00000278266_23 (sequence is synthesized)
agtgaaatggcatctttatttcattactctctggtccataatacattccctggcacaaagggaacacttaaatacttaactatcaaaataaaaaaataaataaaatcactggatatggaa

SEQ ID NO: 904071 - DNA, 120 bp, Artificial Sequence
  ENSG00000286049_0 (sequence is synthesized)
agtaaaacctcacagagctccaggctagaagaatccttggcttgtatcctgaatgtcagcaagctcctggcattgccatctaaaggttgctgtggtccttcatgtaacactagcaagctg

SEQ ID NO: 904072 - DNA, 120 bp, Artificial Sequence
  ENSG00000286049_1 (sequence is synthesized)
gaggactcatttgagaactgtgatttgaaaggactactttagatggcatattaaatagcacaaaaacaaaattaaatattgcccctcacttttgcatatggcacagaaccaagactctcc

SEQ ID NO: 904073 - DNA, 120 bp, Artificial Sequence
  ENSG00000286049_2 (sequence is synthesized)
ttcattcttaactgggccctgagttaaattagttccttgtgtgccaggttttttcttttttttagttttgcagttcattctgtacagccacagaaataaatgaataataaaagccgaact

SEQ ID NO: 904074 - DNA, 120 bp, Artificial Sequence
  ENSG00000286049_3 (sequence is synthesized)
aagtcttaccagaaaaacacaacaggattcaaaaaggaggtaattaaatctctcaactcttatgaggcaaacatttaaaaactatgaagatattggtctcccttttatattttggcatac

SEQ ID NO: 904075 - DNA, 120 bp, Artificial Sequence
  ENSG00000286049_4 (sequence is synthesized)
ctcatattatctgcatcagtgaagcttcttcaccagatcttaatcatttggcaaaactacttagaggctccgttcaaggactcactcatagttctgagctcaagccacgggaagaataat

SEQ ID NO: 904076 - DNA, 120 bp, Artificial Sequence
  ENSG00000286049_5 (sequence is synthesized)
atctgcttctcattgaattcaagtttatgatttccaagactggacctcccttaaaatagccattttgtatatgtgtgtatagtgttgaagataacatcaccaactgagcatttgtttaca

SEQ ID NO: 904077 - DNA, 120 bp, Artificial Sequence
  ENSG00000286049_6 (sequence is synthesized)
ctaagaaaatgtattcataaaaaatagaagtttaacaatattgggtactattatcaaggattaaaatactaaaaactaaccctgaattcattacctgatatgtgctatttatctccaaat

SEQ ID NO: 904078 - DNA, 120 bp, Artificial Sequence
  ENSG00000286049_7 (sequence is synthesized)
atacgatagtcttacctttgctattgtccatcacgagccactggcttaggaatttcccatatttttctgtaatccaataattaaaatatacctgatatatatcaatatgtttagggtttg

SEQ ID NO: 904079 - DNA, 120 bp, Artificial Sequence
  ENSG00000286049_8 (sequence is synthesized)
tattggctacagatttgaggaataagggtgtgtgagtgtatgcacgcatgtgtgtgtgtgtgtgtgtgctgtgtatgcacatttgatttctcttttgcttgctgaccatctgatatgaag

SEQ ID NO: 904080 - DNA, 120 bp, Artificial Sequence
  ENSG00000286049_9 (sequence is synthesized)
atctacaggtgaggcaaaggttagaaaggattacagttcttaaataagagggttttagttgtgaacatgatgttttgagaggtgattttcagactgttttccacagaccatagctcttaa

SEQ ID NO: 904081 - DNA, 120 bp, Artificial Sequence
  ENSG00000286049_10 (sequence is synthesized)
aggtgttttgagagatccgttgacacttgattccaatttaatattttaactgtattaattgctaaggcaaacattcaaatgtgttatataatacattttaatacattgtagaccaccagc

SEQ ID NO: 904082 - DNA, 120 bp, Artificial Sequence
  ENSG00000286049_11 (sequence is synthesized)
atattgactttcgctgccaggttaattcatttttgtgtaggccttaatgcaaaaatttttcttaccatcactgggactgtatttgaacttgaaaacataagtcaatgattaagatggtct

SEQ ID NO: 904083 - DNA, 120 bp, Artificial Sequence
  ENSG00000286049_12 (sequence is synthesized)
tagctctgcgttgggttttctttttttgtaactcacatctgtgcatgtgtatacacacacacatatacaatacaaggttgcactcctatttgtctgagagttaggatgtcctattttcta

SEQ ID NO: 904084 - DNA, 120 bp, Artificial Sequence
  ENSG00000286049_13 (sequence is synthesized)
aacaacctggtaaattataaaaataaattgaatgccaaggttgatgtgacttcaacagtcacctaaattactgtctgaaagttttgtgtgtgtcaaacagaattttcacatattttttta

SEQ ID NO: 904085 - DNA, 120 bp, Artificial Sequence
  ENSG00000286049_14 (sequence is synthesized)
cctcgtccacttccatgctgtttgaacgtttgcaagatatatatgccttattattgtcaaaaagaaaaaaaattaaaaattgtacttaacagtcatgttaattttaactgataagtattc

SEQ ID NO: 904086 - DNA, 120 bp, Artificial Sequence
  ENSG00000274902_0 (sequence is synthesized)
aggaaccacctgttttctggggctgtggcctgcagccttaggaacagtgctttgctctgggggaagctaaaagttgcaatggggctaagctaagagcagcaactccatggctcagcctcc

SEQ ID NO: 904087 - DNA, 120 bp, Artificial Sequence
  ENSG00000274902_1 (sequence is synthesized)
accttctccgtgggccaccagagtccagcctgcatgtgcaggctctccctccagcacacaggttgctcctgcagggctcagccccagcaacgctgagagggtgaaactggccacctacct

SEQ ID NO: 904088 - DNA, 120 bp, Artificial Sequence
  ENSG00000274902_2 (sequence is synthesized)
ctccctctgattcccaccctggatgccctgtgtcccaggacccctgtaacattctcccaccctaagtaatcatctctggaccttgccacctgatcatgccattaaattcccctaatgcca

SEQ ID NO: 904089 - DNA, 120 bp, Artificial Sequence
  ENSG00000227313_0 (sequence is synthesized)
tgaacactatcaaggctgctctgtgggcccagcactccagcaaatgaatagaaacataatgttcctgccaagctgatttatctatcatttaaccagagtgagcgagagaagaaacaaaca

SEQ ID NO: 904090 - DNA, 120 bp, Artificial Sequence
  ENSG00000227313_1 (sequence is synthesized)
gtgggagaagatgtctcacgcacactgaagttagaccactgcaaaactgagccagacggctttgttgtgcagctttctgatgcctccaggggacagctgcttatcggagggagactatta

SEQ ID NO: 904091 - DNA, 120 bp, Artificial Sequence
  ENSG00000227313_2 (sequence is synthesized)
tggggttggggctggagatgttccatgcagcatcctgcaaggggaagcagttactttatgagagcgatgcttcaaccagctaactggatagccctcccttttgcagctggtgtgggtgaa

SEQ ID NO: 904092 - DNA, 120 bp, Artificial Sequence
  ENSG00000227313_3 (sequence is synthesized)
ctctgatcaccccagcccagaaccactagtccccacttagtcttggagaggaggcaaggatgtgtgtcctctgcgtgtagccttacggtctgcaaatgcttatgaaaacctatgaaagag

SEQ ID NO: 904093 - DNA, 120 bp, Artificial Sequence
  ENSG00000227313_4 (sequence is synthesized)
agactattcattttagttccattttagagaaaaaaaaaaaaaacctgaagcttagaacatttaagaaattttccctaaatccatctagctagcaagaagtggggacaaaatgagagtcca

SEQ ID NO: 904094 - DNA, 120 bp, Artificial Sequence
  ENSG00000227313_5 (sequence is synthesized)
cttggctctcagatccagcctcaagtacctttgagagccacaggggttgcacaacatggacttcctctgctagagtgggaagacagtcttttttacatgaagagattaggataggctggg

SEQ ID NO: 904095 - DNA, 120 bp, Artificial Sequence
  ENSG00000260268_0 (sequence is synthesized)
agacaaccaaactccatcaatcaagaggaacttaatccagggagggttcttctgctcactgggtcagaagcatccgatttcctgtcatcggttgcggttcagccatgttaatactgaaag

SEQ ID NO: 904096 - DNA, 120 bp, Artificial Sequence
  ENSG00000260268_1 (sequence is synthesized)
tataagaatatcataatcccagagtgatataaagacctttccaaggaagatgagatacccggaggctgtgaaggagaagtctgaaggatttgaacgcgttcaaatgaaaacctttggttc

SEQ ID NO: 904097 - DNA, 120 bp, Artificial Sequence
  ENSG00000260268_2 (sequence is synthesized)
agcaaaacaccagaaacaaattcaaaagataaaatacactccggagaagcccattctctcaacgcatctgacagttcacaaagagcaactgcagtccaacttaaaaaataaagaaaatgg

SEQ ID NO: 904098 - DNA, 120 bp, Artificial Sequence
  ENSG00000260268_3 (sequence is synthesized)
taggaaaatgggcaacatgcactgaggcaatatataagaagaaggaatgcgcaattaatcaacaaaagcctgctctttcctaacgagtgaagatacaagcttagtaaatattaaaattta

SEQ ID NO: 904099 - DNA, 120 bp, Artificial Sequence
  ENSG00000260268_4 (sequence is synthesized)
ttgaagataaaaatggacacttccggccatatataaaagcattgttggtaagagagtggggtaattgacatgctcctgggaaataatacgcattcagacaacctctaatgagtgaatcca

SEQ ID NO: 904100 - DNA, 120 bp, Artificial Sequence
  ENSG00000260268_5 (sequence is synthesized)
ctgggggtatccactaggaatagaaaacgaccaccaatgcccaagtttgtggtccagaatttgagcagcgatctaacaaagtagagtctccccctgtgtcatgggccccacttcttaagc

SEQ ID NO: 904101 - DNA, 120 bp, Artificial Sequence
  ENSG00000260268_6 (sequence is synthesized)
tgtatctttgttttgttttgttttaatccttgaagtttattaccaaactacatcttggtgtttcttcaggatgtgaacaggcctttctattctcaattaagtgtttctttcctttaattc

SEQ ID NO: 904102 - DNA, 120 bp, Artificial Sequence
  ENSG00000260268_7 (sequence is synthesized)
aggaatcttctaatcatgtattttaatttctttttctgtcatccctccccacgccataagctaccagtcactatacatgttggagctctctttattgtgccatagatctctgatgtcatg

SEQ ID NO: 904103 - DNA, 120 bp, Artificial Sequence
  ENSG00000260268_8 (sequence is synthesized)
tctttagtcattattttgtgtcagaaatttttgttcttccggggacatctggcaatatctagagacatgctactggcacctatagaaatgctagtgacttattatgggtagaggctaaag

SEQ ID NO: 904104 - DNA, 120 bp, Artificial Sequence
  ENSG00000260268_9 (sequence is synthesized)
atgctgctaaatatcctacaatgcccaggacagccactgccacaacaaagaattatgcagtccacaatgtccatagtgctaaggagaagaaaccctgtcctagggtcaaggttggatgct

SEQ ID NO: 904105 - DNA, 120 bp, Artificial Sequence
  ENSG00000260268_10 (sequence is synthesized)
gacaagactaatttcaagtgatttcaaacgattgtggggaaaatacccagaagttgacaggagcaatatgtagatatttccttctgtaaattatatttccctaatgctaatgctggagca

SEQ ID NO: 904106 - DNA, 120 bp, Artificial Sequence
  ENSG00000260268_11 (sequence is synthesized)
tttggaaacacgtgtataaatatttgaagcacaaaaccagagagatgctcttatgtatttagcttctagttttaaataatagatactacaataaaccttgattaaaccttgattatctga

SEQ ID NO: 904107 - DNA, 120 bp, Artificial Sequence
  ENSG00000260268_12 (sequence is synthesized)
agacaaccaaactccatcaatcaagaggaacttaatccagggaggcatgtagaagagcctatttacatcattaacttgccaactttgtgtatatacatgtgcagacacgcatgcataata

SEQ ID NO: 904108 - DNA, 120 bp, Artificial Sequence
  ENSG00000287474_0 (sequence is synthesized)
gaggggcagggtatggcagacttttgtcagtcagggaagtacacaaacggggctgaaagaagtgaccctgagtggggattccccactggtgtgcattctcagcagctaacattcagtgtg

SEQ ID NO: 904109 - DNA, 120 bp, Artificial Sequence
  ENSG00000287474_1 (sequence is synthesized)
gagagcagcaccctcccctccagcttttgggaacagaaatagaggaagcgttgcaggcacaacgtctcacatcagcagatcctctgggttcaagtgtctgagtttcatgtcctccttaga

SEQ ID NO: 904110 - DNA, 120 bp, Artificial Sequence
  ENSG00000287474_2 (sequence is synthesized)
aaatttttccaacaataaaatttttcatcatgctaaagaaaaagaacagcagcagaaaaacagcttgagctgagctttcgctcgccatccaccactgctgtttgccgttgtgccggaccc

SEQ ID NO: 904111 - DNA, 120 bp, Artificial Sequence
  ENSG00000287474_3 (sequence is synthesized)
tgtgccggacccgccactgacttctatccctccggatccggcagggtgtctgctgtgctcctgatccagcgaggcgcccattgctgctcccgatcaggctaaaggcttgccattgttcct

SEQ ID NO: 904112 - DNA, 120 bp, Artificial Sequence
  ENSG00000287474_4 (sequence is synthesized)
tcgtcctaatcgagctgaacactagttactgggttccatggttctcttctgtgatccatggcttctaatagaggtataacactcacctggcatggcccaggattccattccttgggatcc

SEQ ID NO: 904113 - DNA, 120 bp, Artificial Sequence
  ENSG00000287474_5 (sequence is synthesized)
aggcttgccaccatcttggaagcggcccaccaccatcttggaagctgctagccaccatcttggaagttctgtgaacaaggacccccggtaacattttggcgaccacgaagggacctccaa

SEQ ID NO: 904114 - DNA, 120 bp, Artificial Sequence
  ENSG00000287474_6 (sequence is synthesized)
acccccggtaacattttggcgaccacgaagggacctccaaagtgtgtggaaatgggcacctttgactgaaccatgtttcttgctcggtattgaaaaatgacctcattcctttatctgtgt

SEQ ID NO: 904115 - DNA, 120 bp, Artificial Sequence
  ENSG00000287474_7 (sequence is synthesized)
ataagctgtcaatctgctatgctggtctccagaaatctagtcagattcaaatctgctccatgtgtttcatcattctggaacctgggacctggaagtgctcttcttatgaagatcacagga

SEQ ID NO: 904116 - DNA, 120 bp, Artificial Sequence
  ENSG00000287474_8 (sequence is synthesized)
aagcagatgagtaaaccaaactgtgcaagcacatttaagccctgtgctgcatcatgtttgctaatactcaattcaatattattgaaaatgaataaggaaacaagatgacagaataagatt

SEQ ID NO: 904117 - DNA, 120 bp, Artificial Sequence
  ENSG00000287474_9 (sequence is synthesized)
tgaatgtttggaatcttgggatctgaccaaaatgctttaacaaaattagctattttactgaagtggtgataatttttgtcagatatatgcaaatattttctcaaaggttttttttaatag

SEQ ID NO: 904118 - DNA, 120 bp, Artificial Sequence
  ENSG00000287474_10 (sequence is synthesized)
tttttaactatcattcataacattttagcttttctgaagatcttaatttttatgtaggttaaatgactttttttttcttttatggtttgtgcatttgggttgttgcatatacagactatg

SEQ ID NO: 904119 - DNA, 120 bp, Artificial Sequence
  ENSG00000287474_11 (sequence is synthesized)
tcctctcaaaggccagcaaagcccttcatagtctgttccctactcaccctccataactctctgtcctcattttctacttcctaatttctaagctccctctagactaccctcctcattata

SEQ ID NO: 904120 - DNA, 120 bp, Artificial Sequence
  ENSG00000287474_12 (sequence is synthesized)
cttcagatatacctagcgtcaacatacaattttctaagttaaaaacaagactccaatacaaatatgtagtgagcacattctaattattatttagtcattattgaaggaaccattagaatg

SEQ ID NO: 904121 - DNA, 120 bp, Artificial Sequence
  ENSG00000287474_13 (sequence is synthesized)
gtaaagctgattaaaaggaggctaggtgattagtataaagagtcataaaaaaaagaatgctggaataaaatggcagaattcgataccaaactggtcaatatcctcaagtgcaatgatatt

SEQ ID NO: 904122 - DNA, 120 bp, Artificial Sequence
  ENSG00000287474_14 (sequence is synthesized)
gtaacacacatatctttttctaaaaaaaaaattaatctgtctatttgggtaccagaaacatgctatttttgtacttgtgataataagctctcatactttttatttttaagttccagaata

SEQ ID NO: 904123 - DNA, 76 bp, Artificial Sequence
  ENSG00000287474_15 (sequence is synthesized)
atactttttatttttaagttccagggccgtggtggtttgctgcacctattaacctgtcatctaggttttaagcccc

SEQ ID NO: 904124 - DNA, 78 bp, Artificial Sequence
  ENSG00000287474_16 (sequence is synthesized)
tctcccacttatcagtgagaacatgtggtctttggttttctgatcacgtgttagttttctgagaatgatggtttctag

SEQ ID NO: 904125 - DNA, 82 bp, Artificial Sequence
  ENSG00000287474_17 (sequence is synthesized)
catctcccacttatcagtgagaacatgtggtctttggttttctgatcacgtgttagttttctgagaatgatggtttctagct

SEQ ID NO: 904126 - DNA, 120 bp, Artificial Sequence
  ENSG00000287475_0 (sequence is synthesized)
cgcggaagtcggcctggtccctcccctgggctggatgggcccgctcctcccgagcggtcgtgctctgagttgaatgcgatagaggcttctgggcgcgtcgcgggctaggtccaggagctg

SEQ ID NO: 904127 - DNA, 120 bp, Artificial Sequence
  ENSG00000287475_1 (sequence is synthesized)
tgatcctctccgaggtctcagtgtgcccgcagcgccccctgcagtgcgtctcctgcaaggggcccggaacacattcctgtccccgccaggcctggaggcccgagcgcctgcttttcatcc

SEQ ID NO: 904128 - DNA, 120 bp, Artificial Sequence
  ENSG00000287475_2 (sequence is synthesized)
actctgcccacccgcctctgcggtcggctgccttgggcgctggccttagcagttctgagtttgaattcaatcgccaatacacagaaagccacacaaatgtgaagatttgtgaattattat

SEQ ID NO: 904129 - DNA, 120 bp, Artificial Sequence
  ENSG00000287475_3 (sequence is synthesized)
caaatgaacacctttgtaaccactacccaagccaagaaacagtactttcccccagaataccttacccgtgctccttcccgatttcactcgactccctccttcccaaagtagccactctcc

SEQ ID NO: 904130 - DNA, 120 bp, Artificial Sequence
  ENSG00000287475_4 (sequence is synthesized)
tgcctttcatagtaattacttacccgagtttttaaaaaattgttgtcacccaagttcgcctctctagaggctataaattagacttgctcattttgttaatatattttaagtctctttaat

SEQ ID NO: 904131 - DNA, 120 bp, Artificial Sequence
  ENSG00000287475_5 (sequence is synthesized)
ttgtagtttctttctccatcactttcttttccttgcaatgtatccttggaagaatctgaagagatttctagtctggatttcactgattgcattctcctggtgcagttcaacacatctccc

SEQ ID NO: 904132 - DNA, 120 bp, Artificial Sequence
  ENSG00000287475_6 (sequence is synthesized)
tgttttctgcatttcctgcaaattgacagctggatccaaaggcttgatcagactcaggttcaagatttttggtgagactccaggtggtggagtgctgttttgtcaggaggcacataatgt

SEQ ID NO: 904133 - DNA, 120 bp, Artificial Sequence
  ENSG00000287475_7 (sequence is synthesized)
ctggttgtctctattttttgagatctgaggagagacgatgtccaatgcttacattcattaattcactgggggatgaaaatggtgatatactaattatataatttatttttcatttatcat

SEQ ID NO: 904134 - DNA, 120 bp, Artificial Sequence
  ENSG00000287475_8 (sequence is synthesized)
ctgggttgattttataaagagactcttctcctcatctgctatttggttacccagtggaaccgttcacagaggaaaggcggcagttgctgtccattgtggggtgcagtccggaagggagcc

SEQ ID NO: 904135 - DNA, 120 bp, Artificial Sequence
  ENSG00000287475_9 (sequence is synthesized)
ctcgcagatcagtgagagaattcacagaccttcagatcttaccgcagatctggtaagatctggagtgagacaaactgctggttctcacccggcccctgcactgtggatgaacagggccct

SEQ ID NO: 904136 - DNA, 120 bp, Artificial Sequence
  ENSG00000287475_10 (sequence is synthesized)
caggtgcccaggccctggtaagcatcattctactccatgcctccgtaagatccacttttttagctcccacatttgagtgagaacatgtgatatttgtatttttgtacctgtttatttcac

SEQ ID NO: 904137 - DNA, 120 bp, Artificial Sequence
  ENSG00000287475_11 (sequence is synthesized)
cttatccattcattcattggtggattcttaggttgatttcacttcttgactaatatgaacagtgctgtaataaacatgggagtgcagatagttcttaggtttactgatttcctgtctttt

SEQ ID NO: 904138 - DNA, 120 bp, Artificial Sequence
  ENSG00000287475_12 (sequence is synthesized)
ggatatatccagcagtgggattgctagatcatatggtagttctacttttagttttttgaagcgcctccatactgttgttcatagtggctgtcctagtttatattcccactaacagtgtat

SEQ ID NO: 904139 - DNA, 120 bp, Artificial Sequence
  ENSG00000287475_13 (sequence is synthesized)
gagtgttcccctttctccgaatccttgccaacgtctgttattttttgtctttttgataatagccgttctaacttgggtgagatggtatctcatcatggtttgatttgcatttccttgatg

SEQ ID NO: 904140 - DNA, 120 bp, Artificial Sequence
  ENSG00000287475_14 (sequence is synthesized)
attagtgatattgaacattttttcatatacctgctgaccgtttgtatgccttcttttgggaaatgtctattcaggtcttttgttcattttaaaaatgaagttatttgtttaaaaaggata

SEQ ID NO: 904141 - DNA, 72 bp, Artificial Sequence
  ENSG00000287475_15 (sequence is synthesized)
gatcacaccactgcactccagcttgggtggcagaaagaaactccatctcaaataaataaaatataggctggg

SEQ ID NO: 904142 - DNA, 120 bp, Artificial Sequence
  ENSG00000287475_16 (sequence is synthesized)
cagattgcttgagcccaggaatttgaggccagcctgagcaacgtggcaaaatcccatctctacaaaaataataataaaaaaaattagctgggcatggtggtatgcacctgtagtcagtgc

SEQ ID NO: 904143 - DNA, 120 bp, Artificial Sequence
  ENSG00000287475_17 (sequence is synthesized)
cagctactccagaggctgaggtgggaggctcacttgagcctgcaaggtagaggctgacagagagagactttctctcaacaacaataacaacaaaatatatatgtaggctgggagctgtgg

SEQ ID NO: 904144 - DNA, 64 bp, Artificial Sequence
  ENSG00000287475_18 (sequence is synthesized)
atctactaaaaatacaaaaaaactagctgagtgtggtggggtgtgcttatagtcccagctactt

SEQ ID NO: 904145 - DNA, 87 bp, Artificial Sequence
  ENSG00000287475_19 (sequence is synthesized)
aacatagtgagacttcatctactaaaaatacaaaaaaactagctgagtgtggtggggtgtgcttaaatcacttgagcctgggagtgg

SEQ ID NO: 904146 - DNA, 120 bp, Artificial Sequence
  ENSG00000287475_20 (sequence is synthesized)
gccaatccagcgggttctgccggtcctcggccgtgcgtctggggtctggattcccggctccactcgccgtgagcgcgcgtgtcagccgactcgccccggaccgcatggtgcagctcccgc

SEQ ID NO: 904147 - DNA, 120 bp, Artificial Sequence
  ENSG00000287475_21 (sequence is synthesized)
aggcgctctctctgcctccagaggcgccggcactgcggggccccagtcatgcccgctgcctcagtcttccaacccgaaaagtgggtgggcgaaggaaagctcggccgagctgcgtctcca

SEQ ID NO: 904148 - DNA, 120 bp, Artificial Sequence
  ENSG00000287475_22 (sequence is synthesized)
actccctgctctcccctaggggagcccaccagctccaatcgcgacctcttctgtccccaaaccacagaccctagcccgcctcggggacccggatatggaaggggcggtggagagccctgg

SEQ ID NO: 904149 - DNA, 120 bp, Artificial Sequence
  ENSG00000287475_23 (sequence is synthesized)
ccttgattctccctgggtcgggagggcgttccggcggccgtggggctgcagcccttcctccccgcctggaaggtgagggtgtgggaggagcgggagggggcgaggccgacacaatccccg

SEQ ID NO: 904150 - DNA, 120 bp, Artificial Sequence
  ENSG00000287475_24 (sequence is synthesized)
tgcgaccagcggcggagcccagagccaggttaggagcgcgctcaggcgagctcggcggaaggccgagaaggttcatcggaggcggcggcgagccgagaccaggagacagacggggcgggg

SEQ ID NO: 904151 - DNA, 120 bp, Artificial Sequence
  ENSG00000287475_25 (sequence is synthesized)
caggagcgcggggccacacggacaccggcgggcggtcttccccgggatgcgctgggattgcaggcctccagcggccccgcccgccgcctccgccctcccgctcctgagctgccaatccag

SEQ ID NO: 904152 - DNA, 120 bp, Artificial Sequence
  ENSG00000287476_0 (sequence is synthesized)
gacctcgcttggagattgtggtaggcaaagtcccccaaggatgcctgtgctctaatgcccagaacctgaaaagaaagtgcgtaagcaacataaatatacaactttgcgaatccagtggca

SEQ ID NO: 904153 - DNA, 120 bp, Artificial Sequence
  ENSG00000287476_1 (sequence is synthesized)
aattctcttctgttgcaaagcctacataaggtcctgaagaaagctcatgcgctttcctgaacagaggaagtatcctttgcctttcctgtggaattgatgagaccaaatgtcgtcaaacct

SEQ ID NO: 904154 - DNA, 120 bp, Artificial Sequence
  ENSG00000287476_2 (sequence is synthesized)
acttccaaggcttctgaagagccgccatagtataatgtgtcttgtaccatctcagtgattgatttgaagcaagcaaccacaaatcctacagctgtacagaactggatgctgccaacatgg

SEQ ID NO: 904155 - DNA, 120 bp, Artificial Sequence
  ENSG00000287476_3 (sequence is synthesized)
atgataccttgactgctgctctgaaagatcctaatcataggacccaaggaagctctgcctggactccggagtcacacaaacagatgtgttgttttaatccactacattcagtggtggtaa

SEQ ID NO: 904156 - DNA, 120 bp, Artificial Sequence
  ENSG00000287476_4 (sequence is synthesized)
attgtgttacacagcaatatataatgaatatcatgcatgtgaagatctcaagaattagaagagaataaaggctataaatcctctgaaatgaaaaccaaggaagatttggaaactttcaaa

SEQ ID NO: 904157 - DNA, 120 bp, Artificial Sequence
  ENSG00000287476_5 (sequence is synthesized)
aattcaatttggactaaaaatgcaaataatctgattgatgaaggaagaaaaaattagatatctaaaatgtgattaaataaaaactccctggtcatctcagattttttaaatattaaaaaa

SEQ ID NO: 904158 - DNA, 120 bp, Artificial Sequence
  ENSG00000287477_0 (sequence is synthesized)
ggcccgggagggggaggtaaccgccaggggaggagaacctctcccacccccgcctgcacagatccctctggataaagttaagagttcccacggctgacagcggatgagcccagagaaagg

SEQ ID NO: 904159 - DNA, 120 bp, Artificial Sequence
  ENSG00000287477_1 (sequence is synthesized)
caccccgccctccgtccctggtggctgccgggctcggggtccgcacagaccgcgctggaaagggatagtccgggaagatgcgcgtcccacgcaccacactgcttggaggtggaggagacc

SEQ ID NO: 904160 - DNA, 120 bp, Artificial Sequence
  ENSG00000287477_2 (sequence is synthesized)
cgcgcgctggcaggagctgacgctgcgtccccagcttgtccccctcgaatagcctccacctaccggggccaactgcttgaggtcagccagtgggcaggggagctcaccaccagccagccg

SEQ ID NO: 904161 - DNA, 120 bp, Artificial Sequence
  ENSG00000287477_3 (sequence is synthesized)
tcatccagccaagtcggtggcgagaatccaccctgtggttctggatgcaagccagacacacctccaggcttagggcggtctctgcaggcgtgttggacttcagtgcgctccgacacccag

SEQ ID NO: 904162 - DNA, 120 bp, Artificial Sequence
  ENSG00000287477_4 (sequence is synthesized)
cttttgaatgccctgctcccagcccggtaaacaagcacccatgaggcccgccgcccgaccggaaaaaagtagtcccctgcaactctcaaagcttctcccactcccgcttctctgggcgac

SEQ ID NO: 904163 - DNA, 120 bp, Artificial Sequence
  ENSG00000287477_5 (sequence is synthesized)
tggcaccccctctcctgtcctcaaggtgtcagacttcccttgcaagagctggaggatgcggcttgccactagtgtcaacaatcaaaacagtcgcaatgaataaatgatgagccacagcgt

SEQ ID NO: 904164 - DNA, 120 bp, Artificial Sequence
  ENSG00000287477_6 (sequence is synthesized)
tccaaccaccctcatccagcttggtctttccaaaaggcataggaaatcagcaagtttccaccaaatataccaaaaccctaagacgcgagccagcccaagggtgcaaggttctgcggctgc

SEQ ID NO: 904165 - DNA, 120 bp, Artificial Sequence
  ENSG00000287477_7 (sequence is synthesized)
aggtgcctatgaaactgcaataaatacataacagaagagaacaccaaggagagcactatatatgtcaaccatctgagcaggctgtattcccacggaaagaagaatttgtattgatcactg

SEQ ID NO: 904166 - DNA, 120 bp, Artificial Sequence
  ENSG00000287477_8 (sequence is synthesized)
agcctccttttcaacagtttcatgtgattattgattgctggtctcaggtctcctacaaaatgattagcaattacaggaaaattatttgaaatctgtttaaacaatctggtgaattgcata

SEQ ID NO: 904167 - DNA, 120 bp, Artificial Sequence
  ENSG00000287477_9 (sequence is synthesized)
tactacagtcattagcaatccaaagagtttatttttaacaatttaaacatatgagtttggcagcattctacgaacctgcactccacataaaatgcaattcattgaagtcaaagaaattta

SEQ ID NO: 904168 - DNA, 120 bp, Artificial Sequence
  ENSG00000287477_10 (sequence is synthesized)
caataaaatgttatatgctatctagaatttattttagtaccttattaaacagaacaagaaagcactcatgtttccaaattagcaagagacaagtgacccaagaaatgatagcagtaaaac

SEQ ID NO: 904169 - DNA, 120 bp, Artificial Sequence
  ENSG00000287477_11 (sequence is synthesized)
aattctctgtaatgtctatttatagctaaagtatattgtagaattgggatcacaattgttttaggaatacaattttcactttactcctaaaggttattgttctgtttaggagctgacatg

SEQ ID NO: 904170 - DNA, 120 bp, Artificial Sequence
  ENSG00000287477_12 (sequence is synthesized)
attcatgcacatgtgtcaccatcagcatttttatgtgccagtaatgcatctgtgtatgatgccatcatgaagtatatgatattggcctttctgatgctaagataaattaagaaataggtt

SEQ ID NO: 904171 - DNA, 120 bp, Artificial Sequence
  ENSG00000287477_13 (sequence is synthesized)
atcattgtctttgatgcccatgtgacctgtcttccacctttgtgaccaggcctttacctcctactgcacaagggctcacccaaactcactgaaggggctccacctcagcttaacttttgg

SEQ ID NO: 904172 - DNA, 120 bp, Artificial Sequence
  ENSG00000287477_14 (sequence is synthesized)
atttggctcctgctccaggttttagaatcctctgttctgtcatcaatgtaatgaggcttcaatctaacctacatggccatgctatacacacagcttttacctgcctattttttaaaaaaa

SEQ ID NO: 904173 - DNA, 120 bp, Artificial Sequence
  ENSG00000287477_15 (sequence is synthesized)
tatcaaaatgttattcaaaaatgttaattttaatgaatcactacttatttctatgaaatacttaagtatttttcaggtcttgaaagtgtaattgtttttatactattattccctactggt

SEQ ID NO: 904174 - DNA, 120 bp, Artificial Sequence
  ENSG00000287477_16 (sequence is synthesized)
attattccctactggtatacttttgttgaaagccgttacacaagcatttttgtctgtatctctaattatgtcctcagaatagattcctagtaatacagccctgtgtcatgatgcagaaat

SEQ ID NO: 904175 - DNA, 120 bp, Artificial Sequence
  ENSG00000287477_17 (sequence is synthesized)
attttaaagtacatgctgtatgttataagggagcttgttgcattgaaccctcatcaatacggggcatccttaaggtcctttttcttcttttctttttttattttgactgatttcctactt

SEQ ID NO: 904176 - DNA, 120 bp, Artificial Sequence
  ENSG00000287477_18 (sequence is synthesized)
gaaagaaaatggtatctcaatgagttgtgttaactagaaacggtgacttttatattttgtgtactttgctacttgtttctttttgtgagtttacatactttttcaatacttacggggttt

SEQ ID NO: 904177 - DNA, 120 bp, Artificial Sequence
  ENSG00000287477_19 (sequence is synthesized)
tgttgctattcccccatttggtttataataactcttaatatttgaacattagtacattcccatatttatggaagatatttctcagtttttaattctttgttaaatttggaggtaatgtta

SEQ ID NO: 904178 - DNA, 120 bp, Artificial Sequence
  ENSG00000287477_20 (sequence is synthesized)
tttattttaaagatgtttcattcttacaaacattaaactatcaaattttccctgataatttattttagtgctttaatgctcctaatatctttttcctctcatattcacttattttttcaa

SEQ ID NO: 904179 - DNA, 120 bp, Artificial Sequence
  ENSG00000287477_21 (sequence is synthesized)
gcttttaaaaaatgatttcatgtttaaggcaattgcttagtcattaacttcatagaccctggaatcatgttatctaaatttaaaatcccagtctcaacattcattcaacgaatatttaca

SEQ ID NO: 904180 - DNA, 120 bp, Artificial Sequence
  ENSG00000287477_22 (sequence is synthesized)
gagtctatgtttaaatattttatggagtgcaaagcattgtactaggtgcttcccatacatctgtgagcaaaacagataagatactgccgttgctgaactgatattttgaagaggacagac

SEQ ID NO: 904181 - DNA, 120 bp, Artificial Sequence
  ENSG00000287477_23 (sequence is synthesized)
atattttgaagaggacagacaaaaataataaatatattaaataagttaattacatactatattagaaggcaattaaaagaacagggtatgggggctgggcacggtggctcaagcctgtaa

SEQ ID NO: 904182 - DNA, 120 bp, Artificial Sequence
  ENSG00000287471_0 (sequence is synthesized)
acccggataaagcagcacttaccttaattgaaattttctctgtgaacgaggtgagaaatccgtcaaatcaaccgtgaatggggtggggagatcgaagttttcaatcaacaccctccaagt

SEQ ID NO: 904183 - DNA, 120 bp, Artificial Sequence
  ENSG00000287471_1 (sequence is synthesized)
agctgcatcctgtgctccttttccctgttatgttgagctcctcactgtctaaggagagaaaaacatcagctgaaatcctccgaggttcccacctaatggatgaactacaactatgattat

SEQ ID NO: 904184 - DNA, 120 bp, Artificial Sequence
  ENSG00000287471_2 (sequence is synthesized)
gatttgcaaggagattagctgccgtgctagccatcgcaggacttaaacaaatgtgctttctcctgctgtttttcaaggtgccttcgtgtaagatattaggtacagtgaagcaattaatag

SEQ ID NO: 904185 - DNA, 120 bp, Artificial Sequence
  ENSG00000287471_3 (sequence is synthesized)
actgatagagctgatttgtaagacaagcttaaagctgaaaaatgtttaaagcgatgtgatcaaagagatagctgcacttgtctctgccgctcgcctgctacatacttcaacctttgtcga

SEQ ID NO: 904186 - DNA, 120 bp, Artificial Sequence
  ENSG00000287471_4 (sequence is synthesized)
tgctacagacacaagcactcaaaccacggcatgaacacagccttgcttgtgtagttttccaaacggcattttcaattagcattacacttgcaaaaaatgtttgcattgtacccttaacca

SEQ ID NO: 904187 - DNA, 120 bp, Artificial Sequence
  ENSG00000287471_5 (sequence is synthesized)
gagtaatgtaggagaatacagcactacacctaaccgaatcatctctttgattatctgttgaaatactgatttcctaaaacaaaaacaagcaagcatatgagaggatcgaaaatatctaac

SEQ ID NO: 904188 - DNA, 120 bp, Artificial Sequence
  ENSG00000287471_6 (sequence is synthesized)
aactttttaaacgtagctatgtgccgttaccaacctgctggtccccatccgtcatccgctctttctgccactgaccaccttctcagcacttcctcatcaagttcctagttccctgaagag

SEQ ID NO: 904189 - DNA, 120 bp, Artificial Sequence
  ENSG00000287471_7 (sequence is synthesized)
atctaactctctggaaaaggtcacataactgaatgccaaagccccaaatggttaatttttgacagctctcacttttgcaggataaaattatgcaaataacataaaaagaacagatgaaaa

SEQ ID NO: 904190 - DNA, 120 bp, Artificial Sequence
  ENSG00000287472_0 (sequence is synthesized)
agcacagcagcagtttccaagacagttactgggagcttctggctgagatctctggttgctttcctgaaatttttgctgaattacttgctgtttagagttagcttccctgacctttcctct

SEQ ID NO: 904191 - DNA, 120 bp, Artificial Sequence
  ENSG00000287472_1 (sequence is synthesized)
catagttcctctaatatttctctaagcctttaattccgatattaacttccaaacctggaaaacttaaagtggcttttatttactgttggatgttagattgactatagttttggtaacagg

SEQ ID NO: 904192 - DNA, 120 bp, Artificial Sequence
  ENSG00000287472_2 (sequence is synthesized)
agtgaggttgatttgccaactcctggcacacatgtgctatcaaagcatctggggtatttaaaactttatgcttacaagtcaatcagcaaccttagacaagtatgtccatagctacccacc

SEQ ID NO: 904193 - DNA, 120 bp, Artificial Sequence
  ENSG00000287472_3 (sequence is synthesized)
agatgttaaggggccatccagacttaatgctagtaaagaggccggatttgtaacagtgactctagtttgaaacaacgtggaatagttcatgataactcactaatatcctccaagctctct

SEQ ID NO: 904194 - DNA, 120 bp, Artificial Sequence
  ENSG00000287472_4 (sequence is synthesized)
caaatctctccacttctttactctccaaacaggctaagttcaacagagacatggtcagctggagtcagaagatctaagatggcctcactcacatttctaccagttgccaggctgttggtt

SEQ ID NO: 904195 - DNA, 120 bp, Artificial Sequence
  ENSG00000287472_5 (sequence is synthesized)
actcatcacctgcaggctatcctgggcttctttacaaggtggcagacatgttccaaaaatagaaagtgagcaatcctgaatttgttaacatcccactctcctaagcaaatcacagacctg

SEQ ID NO: 904196 - DNA, 120 bp, Artificial Sequence
  ENSG00000287472_6 (sequence is synthesized)
cccagagtgaagagaaagaaaagtagactttgcttgaaaggtagaattcaaagttacatttcaaaggaacattcatatagagttcagtaaaactcctgattttttccccaattaatcaca

SEQ ID NO: 904197 - DNA, 120 bp, Artificial Sequence
  ENSG00000287472_7 (sequence is synthesized)
gttctcaaattttaatttaccatagtgcctaacctgccaacctaagctcccaatatggtaatactcactgaaggaaaaagcaagctactttgtggcatattgattacattggattcattc

SEQ ID NO: 904198 - DNA, 120 bp, Artificial Sequence
  ENSG00000287472_8 (sequence is synthesized)
tattaagaaatgggctgtgaatttttcctttctgttatagataactaatctacacatggatttgcctttttgctgataatgtttctgctaaaatcatatctttgaacttatacagggtcc

SEQ ID NO: 904199 - DNA, 120 bp, Artificial Sequence
  ENSG00000287472_9 (sequence is synthesized)
tgtaattctgaccatgaacatagtttgtagaaattagtggcaccagtgggctcatgaccatgaaatttgctggttttactgtgtatcccattaccttaatatagcaagaacctgaattgc

SEQ ID NO: 904200 - DNA, 120 bp, Artificial Sequence
  ENSG00000287478_0 (sequence is synthesized)
agacttccgtttatccttgctgcctatcttttccagatgtggctgaaggcaaacagtaattgcccggtttaatggaagatggttaagcctgtgttggacatctgctgtctttgccgccct

SEQ ID NO: 904201 - DNA, 120 bp, Artificial Sequence
  ENSG00000287478_1 (sequence is synthesized)
agtctgcatttcccagtattctgccagcagaaaccgctgaagctcatgatgtgaggcaaatcctctccgactgcaattcctccctaactacattcccctggacgctttcctttacctggc

SEQ ID NO: 904202 - DNA, 120 bp, Artificial Sequence
  ENSG00000287478_2 (sequence is synthesized)
acaccactgaaaaaaagaagaggaacccatgtttcaaaccaacggattgtttagcagccacatctgtacaagctcaaaaaaaaaagaaaagaaaaagcctgggtgctttctcctttggca

SEQ ID NO: 904203 - DNA, 120 bp, Artificial Sequence
  ENSG00000287478_3 (sequence is synthesized)
ccagcgagacatccaaaccatggaaacctctgcccatatggaatgctcaccctggtcccacggtgaatcataatagagacccaagccagtcacctttcctggccctcacaaaccatttct

SEQ ID NO: 904204 - DNA, 120 bp, Artificial Sequence
  ENSG00000287478_4 (sequence is synthesized)
tgcccggttctcccagagacctcaattatcctttcagagctggatgcataagtcaagcagcatcaatgccaatgacctgtgaggaaacatttaagaaggagacactacctctcttttctg

SEQ ID NO: 904205 - DNA, 120 bp, Artificial Sequence
  ENSG00000287478_5 (sequence is synthesized)
aagaatcaaatcagtgactcattctaattctcttgggtgtgtggaaggaggatgagagctttgaacctacagctactgtttagtaactacgaggcgatgtcctgagatttcctactaggt

SEQ ID NO: 904206 - DNA, 120 bp, Artificial Sequence
  ENSG00000287478_6 (sequence is synthesized)
ctctgtctgaggatgtagtcagtatttgaaaaaagaacagagggataaggagaaaaatcatctgtagcatgactcaagttgctggatctagcctcacctgaagagatacatcttggactt

SEQ ID NO: 904207 - DNA, 120 bp, Artificial Sequence
  ENSG00000287478_7 (sequence is synthesized)
ttctgttacatgacctgacatcttctctttaaatattttttgtagacacaattcttcatgtggacttatgtattaaattttagctgaatccatgaaataaatttttataaatggctcaaa

SEQ ID NO: 904208 - DNA, 120 bp, Artificial Sequence
  ENSG00000287479_0 (sequence is synthesized)
atacggagttggatgcacacggtgggcttgagatcccgcacgccccagctccagcgcatctccacccacagcccctggcccccaccacctctgccatcgcagtccagcctggaaagcagc

SEQ ID NO: 904209 - DNA, 120 bp, Artificial Sequence
  ENSG00000287479_1 (sequence is synthesized)
ctggaaagcagcctgcagtctcaggtcacaagttggagggtacaaagagcctccattcaggcttcaaaaataacaacaaggctgggcacaatggctcatgcctataatcccaacactttg

SEQ ID NO: 904210 - DNA, 120 bp, Artificial Sequence
  ENSG00000287479_2 (sequence is synthesized)
ggaaggatcacttagggccaggagtcccagatcagcgtgggcaacatagtgagatcctgtctctaccaaaacaaaacaaacaaacaaaaacaagacgagcaacaaacaaacaagcagaaa

SEQ ID NO: 904211 - DNA, 120 bp, Artificial Sequence
  ENSG00000287479_3 (sequence is synthesized)
ccccggtcggttgccaagttacgcagaaggggctgctacttcatcagtcttcctgtcaaacattctgtgtctacatgaaatgaaactgcaggcagatgagttaagggaagatggataaag

SEQ ID NO: 904212 - DNA, 120 bp, Artificial Sequence
  ENSG00000287479_4 (sequence is synthesized)
ataataacgcatctgacataacgcagtaatgtgctcaccgcagtacctggatcttcaactacaaggtttgccacttgggaaaatgcagtggaagtattgttctcaggggcgcctgcaccg

SEQ ID NO: 904213 - DNA, 120 bp, Artificial Sequence
  ENSG00000287479_5 (sequence is synthesized)
aagaagcagagggcgtcctgctctcagtcgcggtctataaaataggttctgattcctaaaactggaggcatcattgaacttttggagagtgttgccttaaagtaattgtgtttaactctg

SEQ ID NO: 904214 - DNA, 120 bp, Artificial Sequence
  ENSG00000287479_6 (sequence is synthesized)
tgtgtgtgtgtgtgtgtctgtctcactcacatttacatacaaacttttcaaaacacttacatctctaagcgatacagatggcgacacttcacatgttttaaactcctacatgcgttcctc

SEQ ID NO: 904215 - DNA, 120 bp, Artificial Sequence
  ENSG00000287479_7 (sequence is synthesized)
tagacatcagggcagggaaaacataagaggcttcatttccagcaaaaacaaactgcagagccctggcaacgccccctttctcactccccctttccggagcaccttcccactttctcctct

SEQ ID NO: 904216 - DNA, 120 bp, Artificial Sequence
  ENSG00000287479_8 (sequence is synthesized)
tttgccaactcctgtgcctccatcagtgtcgctctgaaacatcttctcaccctagaagcttccctggcatcccaggcacggttaggagcctctcctaaaagaagacttcttagaagatgt

SEQ ID NO: 904217 - DNA, 120 bp, Artificial Sequence
  ENSG00000287479_9 (sequence is synthesized)
atttcttgcctggctgatggaggcacctctgctggaatgtggcagacagtgtcgagcaggagagcacagctgcaaatgcaacacgacagcagtgtctctgtcacatgcgtcctgtgggca

SEQ ID NO: 904218 - DNA, 120 bp, Artificial Sequence
  ENSG00000287479_10 (sequence is synthesized)
ggggctttactatctactaagggatttaatatctcatttgaatcctcccagaggtaggtgttcatacccccaacttacagataaggaaactgagacttggagaggattaaaaaatgtcct

SEQ ID NO: 904219 - DNA, 120 bp, Artificial Sequence
  ENSG00000287479_11 (sequence is synthesized)
gagtcaaacacctatcaaatggcaaagcaggtgtttaaacacaagacttgggctaaagcctatgtttttaccatggtgttaagtgacttcccttgacatgtccaacaggcttttagggtg

SEQ ID NO: 904220 - DNA, 120 bp, Artificial Sequence
  ENSG00000287479_12 (sequence is synthesized)
ttttctcagtccacacaagttgacaaagattctaaaacaaagcagtgtggccattttatgccagcaacttcttgcctcctttgtaagccttggacacaatcctggcagcagcagatcaag

SEQ ID NO: 904221 - DNA, 120 bp, Artificial Sequence
  ENSG00000287479_13 (sequence is synthesized)
agctcgattctgaagaacctaggccaggccgccactggcccatgcaaagtcctgggagatcacccagggaaggtgcgtgctttgcttagagcccatcagtgttgctgtttcatgctccac

SEQ ID NO: 904222 - DNA, 120 bp, Artificial Sequence
  ENSG00000287479_14 (sequence is synthesized)
tgattcctatccaaaatttttgcaagtcctaaatgctagaagctccacctcaggtttaacccacgcacagtcttttctttcttacttctgaggtttaaaattattctttgattcaaagtt

SEQ ID NO: 904223 - DNA, 120 bp, Artificial Sequence
  ENSG00000287479_15 (sequence is synthesized)
gtgtttctaatgaagatgactgaaagctgatttgaaaatatcaggcatcattcgctgtgaagagagagccaaaggggctggctggtgcaccagacacagatagtttcagaagacagtggt

SEQ ID NO: 904224 - DNA, 120 bp, Artificial Sequence
  ENSG00000287479_16 (sequence is synthesized)
ttcctatttaatgcaatggaggaatgtcgttctgagaggtggctgtgttgttcctcattccacaccctgcccaccccaagatgatgtcatagccagaggtaagatgggcaccagtgaaga

SEQ ID NO: 904225 - DNA, 120 bp, Artificial Sequence
  ENSG00000287479_17 (sequence is synthesized)
gcagcgcctttggacaaacctgcctcctctgtagttacctttgtgagcctaagtgagtccattttgaatctcagattcctcatttgtaaaatggggccgccaatgctcctctcatagaga

SEQ ID NO: 904226 - DNA, 120 bp, Artificial Sequence
  ENSG00000236830_0 (sequence is synthesized)
actcaagtggacgggtggggagcctgcggctggccacctccgcaccctcggagcgctccagggggccccaacccaagccctgcacctactcttgaaggcgacggccgcgttgttgaccag

SEQ ID NO: 904227 - DNA, 120 bp, Artificial Sequence
  ENSG00000236830_1 (sequence is synthesized)
tacgttgagccccccgtactccttgcgcaggaagtcgcgcagggcgcggatgctctgcaagtcgtcgatgtccagttggtggaagcgcgggctcaggccctccgcctgcagctgctgcac

SEQ ID NO: 904228 - DNA, 120 bp, Artificial Sequence
  ENSG00000236830_2 (sequence is synthesized)
ggccgcctggccccgcgccacgtcccgcgcggtgagcaccacatccccagagaactgtcggcacagttcgcgcgcgatggccaagccgatgcccctgttggccccggtcaccagcgccac

SEQ ID NO: 904229 - DNA, 120 bp, Artificial Sequence
  ENSG00000236830_3 (sequence is synthesized)
gcggctgcaggacgacatggctgagcggggagcgcggggcacctgcgtggagggcggaccgggcttcggaccacctggggcgcgccccgaggagcccagctagtgtcaatgccgccgcgc

SEQ ID NO: 904230 - DNA, 120 bp, Artificial Sequence
  ENSG00000236830_4 (sequence is synthesized)
agactaagttctgggatccagtgctgcgagtcttaaagaaaaaggccccggctccggtccctcccctccgaggaggggccgtctgtgccctctgttccaactcccgggcccgccccctgc

SEQ ID NO: 904231 - DNA, 120 bp, Artificial Sequence
  ENSG00000236830_5 (sequence is synthesized)
ggtgatctgcgaggtgtccgaagccaaatcggaccttgatgggtcagtcgggggctccagattcttggcaactggactgaagaaattattttgggaaaaccccaaagaaaactagacaat

SEQ ID NO: 904232 - DNA, 120 bp, Artificial Sequence
  ENSG00000236830_6 (sequence is synthesized)
ccaccagcccaggaggggacaagcaggcttattcctcctcctcgtcatctctggctccagccccaccctggcccttgctggcattcttcctcttcacgtggctggggttggccaccccaa

SEQ ID NO: 904233 - DNA, 120 bp, Artificial Sequence
  ENSG00000236830_7 (sequence is synthesized)
tagggaagcagagggagaagtcaatgtgcttctgggaatccaggcggacagtgaagaacaggatatttaccacctgctcacggacacggatatgacactgttgaatcagcacatgagcgt

SEQ ID NO: 904234 - DNA, 120 bp, Artificial Sequence
  ENSG00000236830_8 (sequence is synthesized)
ggcggatggacttagccaagccaagcttgaagacctgggtctgtaggaatctctaagaaatcattgatcttcaggcccaggatgtaatccagcttcatcttgccctcatccagcacccca

SEQ ID NO: 904235 - DNA, 120 bp, Artificial Sequence
  ENSG00000236830_9 (sequence is synthesized)
gtgcggaccagccactgcagcagggcaatgccttcgaacagacgccgtgggtccttctcatcaagcgtcagcagctcccgggcggccttatggatcttgaccagggtaaatttgaccctc

SEQ ID NO: 904236 - DNA, 120 bp, Artificial Sequence
  ENSG00000236830_10 (sequence is synthesized)
cagacctcacatttgttctggagcccatactcaccaatcagctttagcttttggtcgagatgaggtttctcgaagggtctctgcagggtcacataagtttggcaacaaacccagctctgg

SEQ ID NO: 904237 - DNA, 73 bp, Artificial Sequence
  ENSG00000236830_11 (sequence is synthesized)
catccagacgcctggccaggatcctcgataagaccgtgacccccaacttggacaccccatttccgggttcaag

SEQ ID NO: 904238 - DNA, 120 bp, Artificial Sequence
  ENSG00000236830_12 (sequence is synthesized)
agtcgcctcagccgcggtgtgagggagcgggagtcttccttagcttctccgccatgggtgtcgcttcgtagccgggctgctccgggaaaggcctcgtacagcacgcattcaccagaatcc

SEQ ID NO: 904239 - DNA, 120 bp, Artificial Sequence
  ENSG00000236830_13 (sequence is synthesized)
tgtcagctttcctcttctcatccagacgcctggccaggatcctcgataagaccgtgacccccaacttggacaccccataaggttcccagatgatgtgacagctactggtctccagccaca

SEQ ID NO: 904240 - DNA, 87 bp, Artificial Sequence
  ENSG00000236830_14 (sequence is synthesized)
gagtttgcatttctaggttcccagatgatgtgacagctactggtctccagccacaccttgagaacacttggctttgactaccacttc

SEQ ID NO: 904241 - DNA, 120 bp, Artificial Sequence
  ENSG00000236830_15 (sequence is synthesized)
gaaaagaaaaaaaaagaaaagaaaatttcttttgggttttctgaatcaacttgagaaagtatggtataagaagaaaggaatataggaaaagttgtaatgctaaaacagataccaaggtcc

SEQ ID NO: 904242 - DNA, 120 bp, Artificial Sequence
  ENSG00000236830_16 (sequence is synthesized)
gtccagagatgagctagatgtgggcccatcaccttggagggctggaggactcatgagattgaccagaggcaagcggcctttggggactcacagcattctatcattctaggattgagttca

SEQ ID NO: 904243 - DNA, 120 bp, Artificial Sequence
  ENSG00000236830_17 (sequence is synthesized)
aggtgttgattctattgatacccttatccttttaacatgcccttatccttttaatgttggtaatgatgctacctgtcatttctgagactggtttgtgtctttcgtgtttttttctgatct

SEQ ID NO: 904244 - DNA, 120 bp, Artificial Sequence
  ENSG00000236830_18 (sequence is synthesized)
gtctggctagaggtttaccaattgatttgattttcctcaaacttctggttacaatgattctctctctctctcttttcctgattatattaatttctgttctgatctttgtttcctttcttc

SEQ ID NO: 904245 - DNA, 120 bp, Artificial Sequence
  ENSG00000236830_19 (sequence is synthesized)
tgcttactggattttatttgctctttttctggtttcttactgtaaaggcagaagtcattgatttgcattgatttgagacttcttttctaatgtaggcagtaagtggtgtaaattcccttt

SEQ ID NO: 904246 - DNA, 120 bp, Artificial Sequence
  ENSG00000236830_20 (sequence is synthesized)
tagtatgactttagtggcatctcacattgatatgttttcaatttcattcagtttatttttatttattttttaaattatttatttatttatttattttgagttgtgtagccctttattagc

SEQ ID NO: 904247 - DNA, 120 bp, Artificial Sequence
  ENSG00000236830_21 (sequence is synthesized)
aactaaaatagaaggtatctgttgtacaacatgggtagtaattgactataactggagatttattatattctaatacagatcatttataaatgcaatttctttattaaaaagcttccacct

SEQ ID NO: 904248 - DNA, 120 bp, Artificial Sequence
  ENSG00000236830_22 (sequence is synthesized)
aaaacctatagctggagcagtcaacagaggcaaggtcaccttgtggcagctgcagctgcaaacatgggaaggaagcagggggcaggggagggcaggagatcatattttggaagagggtgc

SEQ ID NO: 904249 - DNA, 120 bp, Artificial Sequence
  ENSG00000236830_23 (sequence is synthesized)
tgggcagaccatccaataagggctaatggcagcccttctctaagaatgagaaatgtcattctgaccagcagttgacagttaagggtcatccaaatgagctacatgcttatcctaaaagga

SEQ ID NO: 904250 - DNA, 120 bp, Artificial Sequence
  ENSG00000236830_24 (sequence is synthesized)
ttggctagagacaaaagaggaagtgggttacacacttatccaaaaaggattggttagagacaaaagaggaagaagaaataaaagggactggctcatttcttctgaacttcctgtctgtaa

SEQ ID NO: 904251 - DNA, 120 bp, Artificial Sequence
  ENSG00000236830_25 (sequence is synthesized)
ctttgtcaggcagagcctgaagtgctctgtggttcctgggctattgcccggcattagcaggactggagtttggctgcagagggaggcgagagtacaaaagatactcgggaagctgattga

SEQ ID NO: 904252 - DNA, 120 bp, Artificial Sequence
  ENSG00000236830_26 (sequence is synthesized)
aagccattaaattgtttttagagccaggaaaggagacattaaaatgtcttaggagctgtagcctgagatgaataccataagagcatgttggatttaatcagtgacatacaaataggctaa

SEQ ID NO: 904253 - DNA, 120 bp, Artificial Sequence
  ENSG00000236830_27 (sequence is synthesized)
tttaatcagtgacatacaaataggctaaaggaagtttttgttgttgttttaggcttttttttgagacagggtcttgtcctgtcactcaggctgaagtgcagtggcgcaatcatggctcac

SEQ ID NO: 904254 - DNA, 90 bp, Artificial Sequence
  ENSG00000236830_28 (sequence is synthesized)
atcctcccaacctcagcctcgtctgcctgatctttttgaatttttgtagagaggggtctcgctatgttgtccaggctggtctcaaacttc

SEQ ID NO: 904255 - DNA, 120 bp, Artificial Sequence
  ENSG00000236830_29 (sequence is synthesized)
atgctgggattataggcatgagccactccatctggcctcaagatgttaaatgcagtctaggtgggattcagacttccccctaccccaagtggatgaaaaagtgggtgcaggctgtgagag

SEQ ID NO: 904256 - DNA, 120 bp, Artificial Sequence
  ENSG00000236830_30 (sequence is synthesized)
ccaagtggatgaaaaagtgggtgcaggctgtgagagttaaactgacactttgaggtgctgccattgtaaatcagagagttaagaaaaacaaatagctacatactgtgatgaaccagaaat

SEQ ID NO: 904257 - DNA, 120 bp, Artificial Sequence
  ENSG00000236830_31 (sequence is synthesized)
aaccaggtcatcctgtgcagttcagttcccccaaataaaagaaacttgagcattcccatactttactgattccctaaggaaaaacggcattatctcttatgactgcagtgcttacctatg

SEQ ID NO: 904258 - DNA, 120 bp, Artificial Sequence
  ENSG00000236830_32 (sequence is synthesized)
tcaggggatatgatgtgacatttgtgggtttgataatcaagtgacaacatttctaatttcacacagtgagcagcctatcataaacttggtaaccttggcaaatttgtagttatttccctt

SEQ ID NO: 904259 - DNA, 120 bp, Artificial Sequence
  ENSG00000236830_33 (sequence is synthesized)
tggtttttttccatctttcaatggattcgttttctttttaagtagagacagggtctggctgtgtcacccagaatgctgcagtgcagtggcacgaccatagctcactgcagccttgaactc

SEQ ID NO: 904260 - DNA, 120 bp, Artificial Sequence
  ENSG00000236830_34 (sequence is synthesized)
ctaggactacaggtgtgtgccaccatgtctggctaagttttgtttgatttgtttgcagacatggaggcctgctgtgttgcccaggctggtttcaaacacctgacctcaggtgatcctcct

SEQ ID NO: 904261 - DNA, 120 bp, Artificial Sequence
  ENSG00000236830_35 (sequence is synthesized)
gcctcagcctcccaaagtgctgggatcagagacttgagccactgtggccagccggaatgtaaattccactgaatttttttgtgtgattagccttcttgccgaagccttgacactcttgca

SEQ ID NO: 904262 - DNA, 120 bp, Artificial Sequence
  ENSG00000236830_36 (sequence is synthesized)
gtgtgattagccttcttgccgaagccttgacactcttgcaagcctttgcgagtacatttcttctatttcagaagactccttgctctccaagacttttttctacaaggtgtaaccagaagc

SEQ ID NO: 904263 - DNA, 120 bp, Artificial Sequence
  ENSG00000236830_37 (sequence is synthesized)
ccagaagccaggaggcctgttgcaaaaccaatcccatttgaaagcagagaatgtgaactcacctattgtcataatgattataaaagaggctttggctcactcctgtaatcccagcacttt

SEQ ID NO: 904264 - DNA, 120 bp, Artificial Sequence
  ENSG00000236830_38 (sequence is synthesized)
aaaaaaaaaaaaattatgaaagagggtgggtgcggtggctcatgtctggaatcccagcgttttgagaggcaaaggagcgaggatcactttagttcaggagtgctagaccaacctgggaaa

SEQ ID NO: 904265 - DNA, 84 bp, Artificial Sequence
  ENSG00000236830_39 (sequence is synthesized)
ggctgaggtgggaggatcacttgaggttttagtcatggaagtctcttgccctggaggtcgaggctgcagtaacaagcaagacac

SEQ ID NO: 904266 - DNA, 120 bp, Artificial Sequence
  ENSG00000236830_40 (sequence is synthesized)
aaaaaaaaaaaaaaggcttagggagttactgaagaatcaccctgggctgtagttcacagggagtgtgcataggttaaggagaagacatctgcatgagtttcagtaaagagatacagttgc

SEQ ID NO: 904267 - DNA, 120 bp, Artificial Sequence
  ENSG00000236830_41 (sequence is synthesized)
ggtggctgggcaacctcgtaaacattctgggaaggaatgcagaatgcaaaacccagctgaaaaatctagaagaaatcatgtcccagttaaagaagatattcctcctgagtccttcaagct

SEQ ID NO: 904268 - DNA, 120 bp, Artificial Sequence
  ENSG00000236830_42 (sequence is synthesized)
ctgctactttaatgagatgcaaagaaagcttgcagagctaaggaaatagaggataaagcatcacccttacagaatcaaaaaactggaaacagcaaggaacagctagaaaatggctccata

SEQ ID NO: 904269 - DNA, 120 bp, Artificial Sequence
  ENSG00000236830_43 (sequence is synthesized)
gttctgaaaccacttgctacaccagtggttctaagtgcagtcccagcaccagcagtgtcagcaccacctgagaacttgttagaaatgaagtgaattggtgtggggagtggaaccggcaat

SEQ ID NO: 904270 - DNA, 120 bp, Artificial Sequence
  ENSG00000236830_44 (sequence is synthesized)
ctggcttaatcagccctccaggtggtcccgatgcccactaaaatttgagactatgttcttctccctctcaggctgaagagttgggcatagcaatgttgttcagctccagattccagaact

SEQ ID NO: 904271 - DNA, 120 bp, Artificial Sequence
  ENSG00000236830_45 (sequence is synthesized)
ttgggcatagcaatgttgttcagctccagattccagaactagacacgtttctcccagggagattcttatgaacattccttttcaagaacagaaagaggccaggcgtggtggctcatgcct

SEQ ID NO: 904272 - DNA, 78 bp, Artificial Sequence
  ENSG00000236830_46 (sequence is synthesized)
agaaagagaaaaaaaggccgggtgcagtggctcatgcctgaaatcccagaactttgggaggccaagttgggcagatca

SEQ ID NO: 904273 - DNA, 77 bp, Artificial Sequence
  ENSG00000236830_47 (sequence is synthesized)
cagaaataatcaaaccacagcatcaattcattcattcattccaccaacatttattaagcagcaagctccgaagcaga

SEQ ID NO: 904274 - DNA, 120 bp, Artificial Sequence
  ENSG00000236830_48 (sequence is synthesized)
attccaccaacatttattaagcagcaagctccgaagcagacgtttaccagttttgcacaactttgtcatggaccaactggccttgtggctcagtggcatctggaggcaagagggccaagt

SEQ ID NO: 904275 - DNA, 120 bp, Artificial Sequence
  ENSG00000236830_49 (sequence is synthesized)
aaaaacacagatcatagaagctgtgccttcgaggaaataaatcctcttaaggggaggaggtgtcctctttgatctgagggcacacctctgggagagaggccagaggctgacagtcagcct

SEQ ID NO: 904276 - DNA, 120 bp, Artificial Sequence
  ENSG00000236830_50 (sequence is synthesized)
cgtcagccagatgcgtcatcagccctgggaagggctgcacccacaccaccctccactgaggtccaggtggccccaccggtcccgaaacacctgctgccttactctagaaagagtaggcaa

SEQ ID NO: 904277 - DNA, 120 bp, Artificial Sequence
  ENSG00000236830_51 (sequence is synthesized)
gttgcgccctctagtggcttagtagttgcttgtcctattgactcagaaccttgaacaaataagcaagtcaaatacagatagatggtccctgccctctgatggttccacttaggacttact

SEQ ID NO: 904278 - DNA, 120 bp, Artificial Sequence
  ENSG00000236830_52 (sequence is synthesized)
gacttcactgatggatgaggaagcgatatgcattctgcagaatctgtacttggaggccccatacaaccattctgcatttcactttcagtacagattcaataaattacataagatactcaa

SEQ ID NO: 904279 - DNA, 67 bp, Artificial Sequence
  ENSG00000236830_53 (sequence is synthesized)
accgagattgcaccactgcactccaacctgtgcaacagagtgagacttttcaaaaaaaaaaaaaaag

SEQ ID NO: 904280 - DNA, 120 bp, Artificial Sequence
  ENSG00000236830_54 (sequence is synthesized)
ctgcactccaacctgtgcaacagagtgagacttttcaaaaaaaaaaaaaaagatcatttggaaccttgttttaaggatatggggctatttaggctttctatttctgtttttttttttttt

SEQ ID NO: 904281 - DNA, 88 bp, Artificial Sequence
  ENSG00000236830_55 (sequence is synthesized)
gcgtgagccaccacacccggcctgcctggataaagagatgggagtctcactgtgttgctcagactggttgaactcctgggctacatcg

SEQ ID NO: 904282 - DNA, 120 bp, Artificial Sequence
  ENSG00000236830_56 (sequence is synthesized)
aaaacaagtgctgagtaattttcttgggtgtgcgcccatcatgcactgcaaaatgcgaatgtttgctttttcctaagatgcagtgacttacttagacacagtaactgcttctctggacat

SEQ ID NO: 904283 - DNA, 120 bp, Artificial Sequence
  ENSG00000286042_0 (sequence is synthesized)
actattgtctgtaaaaggtacaactaccttgctgatgctgtacatatggctcacttgtgcccagagagagaataaagccatgtcgaaactatctacgattccttgagtgtttttccagct

SEQ ID NO: 904284 - DNA, 120 bp, Artificial Sequence
  ENSG00000286042_1 (sequence is synthesized)
acctgccacttgcccacccactcccctcagatctcagttagaacatgacaattgggctcatgaacaggatcctgagtggttgcaggtgaacaagcagttggcacaagggcaaagtgatca

SEQ ID NO: 904285 - DNA, 120 bp, Artificial Sequence
  ENSG00000286042_2 (sequence is synthesized)
catcctgattgagtggctatggacagccatacagactgtgtggaacaacgctggtgaaatacccaaaccatttagaagcagtaatgcctctcttgcctgggactgggatggtgtggctga

SEQ ID NO: 904286 - DNA, 120 bp, Artificial Sequence
  ENSG00000286042_3 (sequence is synthesized)
gactgccttactggcagccaggtgcgctattcagcagccacaagccctacaagtaattaaccaggggcacctgtttgagctggaggtgcatgtggccacagacggttttggttgaggctt

SEQ ID NO: 904287 - DNA, 120 bp, Artificial Sequence
  ENSG00000286042_4 (sequence is synthesized)
gtggcaatgcacagagcgcctaagaatgccagtaggcttttggtcccaactatggaaaggagctgaactccggtattcattgatagagaaacagctagcagctgtatatgctggccttcg

SEQ ID NO: 904288 - DNA, 120 bp, Artificial Sequence
  ENSG00000286042_5 (sequence is synthesized)
ggctcatgagagcatgacaggacaggctgcagtcatcatatggacaacttacccaataacaggatggatgcgtctatgtgtaatgaccacctggagtgggatagcacagatgtccacttt

SEQ ID NO: 904289 - DNA, 120 bp, Artificial Sequence
  ENSG00000286042_6 (sequence is synthesized)
ggcaaaatggggcaactccttgcagcagtggagtaagctgagtacaagtcccatagcagcagagttgcaagaggtcttgggacgtgtagtcctaatgcaagataaggccatgcggcctga

SEQ ID NO: 904290 - DNA, 120 bp, Artificial Sequence
  ENSG00000286042_7 (sequence is synthesized)
ggcacccctagatcctgagtcttcaccatttaaggaagggcatcccaggattcctgagggggcatggtacacagtagatgaggtgctactgctgcctggaccactgttgcagtccaacct

SEQ ID NO: 904291 - DNA, 120 bp, Artificial Sequence
  ENSG00000286042_8 (sequence is synthesized)
agtactgacaccatatggtttgaaactgggtgcggacaaagtagccaatgggctgaactcagagcagtgtggatggtgatcaccaaggaggtgacacctgtggtaatctgtactgatagc

SEQ ID NO: 904292 - DNA, 120 bp, Artificial Sequence
  ENSG00000286042_9 (sequence is synthesized)
tgggcagtctactgaggcttaaccttgtggttaactacttggaaaatacagaattggctagtgagccacagacccatttgaggccaagccatatggcaagacctttgggaaataggtcat

SEQ ID NO: 904293 - DNA, 120 bp, Artificial Sequence
  ENSG00000286042_10 (sequence is synthesized)
caaaaagaggtaactatttatcatgtgtcaggccatatgcctttggccacccctagtaatgatgaggcagatgccttggctaaggtcagatggtcagagtcagcaccaacacaagatgtg

SEQ ID NO: 904294 - DNA, 120 bp, Artificial Sequence
  ENSG00000286042_11 (sequence is synthesized)
accttgtggctacaccggaaactgggacatgcagggggtaaactgatgcaacaattcaataagtgttggggtctgtcccttcccaagcaagacatttgtgaggcttgtcagaaatgcctg

SEQ ID NO: 904295 - DNA, 120 bp, Artificial Sequence
  ENSG00000286042_12 (sequence is synthesized)
gcatgtgttcagacatatcctaaaaagaggcagctgcccggtgttatacaacaagtaacaatagggtgagtgcccttgaccaggtgggaagtagactacatcgggccgctgccaaagtcg

SEQ ID NO: 904296 - DNA, 120 bp, Artificial Sequence
  ENSG00000286042_13 (sequence is synthesized)
cgagggtatacgcatgcactaacggctgtagacatggccacaggcctgttgttcacctacccttgcagggtggccaaccaacagaacaccatccaggccctgcaacacttatgttccctg

SEQ ID NO: 904297 - DNA, 120 bp, Artificial Sequence
  ENSG00000286042_14 (sequence is synthesized)
tatggttgtcctctggccattgagagtgataggggaacacatttcactggacaacaggtacaatgatgggcacagcaaatggacataaagtggggattccatgtgccatacagcccacaa

SEQ ID NO: 904298 - DNA, 120 bp, Artificial Sequence
  ENSG00000286042_15 (sequence is synthesized)
gctgaggtattattgaatgatataatgggatcttgaagaatggattacgcttgcatgtcaaacccctgtctttgcggagctggagttccaggctggacctggtgctccaaaccttaaatg

SEQ ID NO: 904299 - DNA, 120 bp, Artificial Sequence
  ENSG00000286042_16 (sequence is synthesized)
actaggccaccacccccattcaattggagatacataccaaggatgacctcctccgatcaggtatggggacaaatggtaacctgttgttgcctgccccaacaaccctgaaggcaggggaac

SEQ ID NO: 904300 - DNA, 120 bp, Artificial Sequence
  ENSG00000286042_17 (sequence is synthesized)
agaaaacctggctgtggccatggaccctccaagctctccactgctggtggttggccatcatagctccctgtggggagggcctacagtatgacttgcatgtcactttttgagtgttcaata

SEQ ID NO: 904301 - DNA, 120 bp, Artificial Sequence
  ENSG00000286042_18 (sequence is synthesized)
catggcttccaaggttgactgtttgtagaggaacagccagggaaggagccctcctctgagggacatatgtactatctgatgggcctattatgagctacgctgtgactttggcatggatac

SEQ ID NO: 904302 - DNA, 120 bp, Artificial Sequence
  ENSG00000286042_19 (sequence is synthesized)
aggattcaaaggaaccatggagatttgagaaggtgtggtaccatcacccagggcaaaagcccttggtggctgcattgttatccagggatggaaagttagcctatattttgcctgagggat

SEQ ID NO: 904303 - DNA, 120 bp, Artificial Sequence
  ENSG00000286042_20 (sequence is synthesized)
gtgatttacctctgttagtacctgtgcctgctctgtcatttcaaccgtaggttaacatgctccaattgcattgtggactgaccccacacctatgctgaggtgaccaatgtttccaactgt

SEQ ID NO: 904304 - DNA, 120 bp, Artificial Sequence
  ENSG00000286042_21 (sequence is synthesized)
tggacctgcactgcctttccagcagcagctgcagacagctttccctgacacatacatcccgtgtctgcagagaactggacatgcctggagacttgagatcccatggctgatgcctggaac

SEQ ID NO: 904305 - DNA, 120 bp, Artificial Sequence
  ENSG00000286042_22 (sequence is synthesized)
acaatgtggcaagctttggacaaaggacacagcaagacccatggctggaccgtagcattcgtgatgagtggggctggctagtaggggaacatgtagtagcccaagcccaggcattgcagt

SEQ ID NO: 904306 - DNA, 120 bp, Artificial Sequence
  ENSG00000286042_23 (sequence is synthesized)
gcacagagcaacattggggtaacaggatgggtacctgtcacggcctgtgcaaacataacatgtgtcaccacactgaaggtatggtggaacaagtggcctcaccaaggtcggaccccaatg

SEQ ID NO: 904307 - DNA, 120 bp, Artificial Sequence
  ENSG00000286042_24 (sequence is synthesized)
gactttttgcctcttgggagcttatgggtctatgaggacacagtagcctttcctatcagcaaactggagtggatgttgtatctgggggtggccttatgtacctgctactgttctccccac

SEQ ID NO: 904308 - DNA, 120 bp, Artificial Sequence
  ENSG00000286042_25 (sequence is synthesized)
attgcccagatgcctgtataactgggaggcactgtgctctcagtttttgcgaatgtgatgagccccctggtgtttctaccctttggcaatgactatccctggagcaggtgtcaaaactgt

SEQ ID NO: 904309 - DNA, 120 bp, Artificial Sequence
  ENSG00000286042_26 (sequence is synthesized)
agaagcacaatttactgctcttgcggagcacaccgctcaggctctgaattacacctgagtgtccctcctcctgttaatgaatgaggttgatcagatcaaaaagtggtgttgcaaaaccaa

SEQ ID NO: 904310 - DNA, 120 bp, Artificial Sequence
  ENSG00000286042_27 (sequence is synthesized)
gtggccttagacataactgctgcccaaggagccacctgtgcccttttaggaacacaatgttgtaccttatccctgacaatcagcagaacataacagcagccctgcaaaggggtcttccag

SEQ ID NO: 904311 - DNA, 120 bp, Artificial Sequence
  ENSG00000286042_28 (sequence is synthesized)
gagattaaggtgactgagagcctcactgtcaaccccctgcagagatggtgagcatccctaggttctggcgtacattgggccctaatagtcataagtatcatagctgagatcctagtagtg

SEQ ID NO: 904312 - DNA, 120 bp, Artificial Sequence
  ENSG00000286042_29 (sequence is synthesized)
agctgttgctctctgtattgttgttgtgggttatggactcagggctccgccatataggcatgtgtccctgcctggaggacgccctcagcctagggggtgtagtgtaagggaaatggctgt

SEQ ID NO: 904313 - DNA, 120 bp, Artificial Sequence
  ENSG00000286042_30 (sequence is synthesized)
gctttagtcaggagtaggctgaggcagccttctggtgcagcatgactcagtgggtttggagtgcaagcacacaaccttgctcgttatgtaaccacaccacatgaggcacattaggtaaca

SEQ ID NO: 904314 - DNA, 120 bp, Artificial Sequence
  ENSG00000286042_31 (sequence is synthesized)
actcacatgagctcgtgtttggctcagagccactattgtctgtaaaaggtataccttgctgatgctgcacatatggctcgcttgtgcccagagagagagtaaagccatgttgaaactgtc

SEQ ID NO: 904315 - DNA, 120 bp, Artificial Sequence
  ENSG00000286042_32 (sequence is synthesized)
gtccattgtctcagccagagatccccacttggtctgatacagagaaagaagaactcttgttgtgggctcacccagtggtccaccagaagtggttgcaggtgaacaagcagttggcacaag

SEQ ID NO: 904316 - DNA, 120 bp, Artificial Sequence
  ENSG00000286042_33 (sequence is synthesized)
ctagctactgtcctcaacctgtacatagggtaccacatacatgaagtgaccactgctatggtgactctcagggaagcagaaggccatcggcaggaccgaggggtccatgctgtaaagaag

SEQ ID NO: 904317 - DNA, 120 bp, Artificial Sequence
  ENSG00000286042_34 (sequence is synthesized)
gggaagatgccccacccacagggggtccccccatggtaaaaagggggcgccaacgagtgacacactcacagacatgtatagattttattttggccgggttgactgagagaaaattgataa

SEQ ID NO: 904318 - DNA, 120 bp, Artificial Sequence
  ENSG00000286042_35 (sequence is synthesized)
gcaacccaatgaagtgcttttaactttgtggagacagttgtctctggaggagcaattccagaaaatgcccaagggggagaaggacattgctgtgtaacctggtcccacccaggcgcttca

SEQ ID NO: 904319 - DNA, 120 bp, Artificial Sequence
  ENSG00000243176_0 (sequence is synthesized)
aaaacgcgggcacccctcgagctagttcatcgccttttaacctgttgttggatctttccagatcaccacaccacatcacccagccactctgcccaatgggagggcagacagtgttccagt

SEQ ID NO: 904320 - DNA, 120 bp, Artificial Sequence
  ENSG00000243176_1 (sequence is synthesized)
gtaggaggaaggggtgtaaggtgcgggcagtttgtgaggagggcaccaacgagagctactgtgagaaagtctgcatggtcaaaaagtggattaccaagaacaaagcatcataatgttgtc

SEQ ID NO: 904321 - DNA, 120 bp, Artificial Sequence
  ENSG00000243176_2 (sequence is synthesized)
gaaaactcttcagggcctctcagagatacctaagataagtaccttattttagtagctctcaaataaagcttcttttatgctctgtctttttcatatataaaataaggtctaattagaaag

SEQ ID NO: 904322 - DNA, 120 bp, Artificial Sequence
  ENSG00000243176_3 (sequence is synthesized)
ttttataatggaggcagtcaattccccaattccttatttgtttgaattaacttttaaaaaattggggtgttcactctggcgttggctcaatccagactctgtaatcagccaacaatctgt

SEQ ID NO: 904323 - DNA, 120 bp, Artificial Sequence
  ENSG00000243176_4 (sequence is synthesized)
atggctgatactgcttccttgataaccacatatagaaaactgacaactgtttagaacaaagccaaagatgaaaccaaatataaaaccactgatgaaaactaagtgaaaaatataagcaaa

SEQ ID NO: 904324 - DNA, 120 bp, Artificial Sequence
  ENSG00000243176_5 (sequence is synthesized)
tcttgctcacctgccacttccagccttggtattttccagttgtcgggtaaggagtttagcaatggcggtgaagctgttgctcatgcggaagatgtctctgctctgagggcccaagattga

SEQ ID NO: 904325 - DNA, 120 bp, Artificial Sequence
  ENSG00000243176_6 (sequence is synthesized)
gtcttagttcggctctattgccgcgagcttgactcttcctgggtctgaggaaaagtaaaagtaattttgtcatttcctgaaacttcaagttaaacctttaagctgttcatttcctaaaag

SEQ ID NO: 904326 - DNA, 120 bp, Artificial Sequence
  ENSG00000243176_7 (sequence is synthesized)
cgttatttcaagaaaacgaaagacagtcaatgctgttctttgtattcacatacaatttggttcacaccaaaatgtgagttgttctctatgagatgttattaaatgttcctaagaagactc

SEQ ID NO: 904327 - DNA, 120 bp, Artificial Sequence
  ENSG00000243176_8 (sequence is synthesized)
gctttagaaaaaaacagtattcctaaggcatgtccaatctgtctcttttcttaattgctatagttctactttattattataatgtattcagcattaaaattcattatttcccaataagct

SEQ ID NO: 904328 - DNA, 120 bp, Artificial Sequence
  ENSG00000243176_9 (sequence is synthesized)
tgactttatcttataatgaaatacaactgtcttcttggtgatttttataggagatattatggaaatattttattaacagaagtaaataaagtgtcatatcatttggcttttcagccgtgt

SEQ ID NO: 904329 - DNA, 120 bp, Artificial Sequence
  ENSG00000243176_10 (sequence is synthesized)
tataacatttgcattttgttttttctgcctttaccctccctgcttctagctgcataaaataatgcattttaaaaataaaaatacattatttttcaacatatgtgtgacaataaaaagatc

SEQ ID NO: 904330 - DNA, 120 bp, Artificial Sequence
  ENSG00000243176_11 (sequence is synthesized)
actgggtcaggggtcagacgatctgagttctgccctttcattttcttatctgtaaaaatgattcctaagattccttctattactaacattttataatctacattcaaattttatgtgaaa

SEQ ID NO: 904331 - DNA, 120 bp, Artificial Sequence
  ENSG00000243176_12 (sequence is synthesized)
gtttagtgcatccgagataactattttcaaataagaatctcttttgatgctaacatctatgcatcaaattcttcattctcaagttgtaagttgctctttacataatttcacctatgtaca

SEQ ID NO: 904332 - DNA, 120 bp, Artificial Sequence
  ENSG00000243176_13 (sequence is synthesized)
atatactgacactaacattaactggagattggaagactagacaaatcaaggctagaactacataagggaagctattctcccaaatacgctgtttttgctgttgtttaaccaaagatatct

SEQ ID NO: 904333 - DNA, 120 bp, Artificial Sequence
  ENSG00000243176_14 (sequence is synthesized)
tccctttcattcttcttttttaaagctaaggatatttaagacattaatatgtttggctaactgattaataattccttcttttataaggaaactatcctaaaatataaaaaaccgaggtta

SEQ ID NO: 904334 - DNA, 120 bp, Artificial Sequence
  ENSG00000243176_15 (sequence is synthesized)
aagttattaatgaaatatgtatgtattgctgttatctacatatcaactctggccaaagaataattcaataaaaatgattataagcccatatcccagaagctcattaaagagcctgatgaa

SEQ ID NO: 904335 - DNA, 120 bp, Artificial Sequence
  ENSG00000243176_16 (sequence is synthesized)
cacaaattatacaaacctgctgaaatagaaacatgatctggatccatggctgaggttcttggctgatgagaataaaactggacttactgtataggcagtaatgacccttcagggagcagg

SEQ ID NO: 904336 - DNA, 120 bp, Artificial Sequence
  ENSG00000243176_17 (sequence is synthesized)
tgaagaacaactttgctacacaacttctcacagtgtctagaaacaaatacatatagcgttaaacgttatggtctttccagagttacactttatattgatacttcaacacacaaatgcctt

SEQ ID NO: 904337 - DNA, 120 bp, Artificial Sequence
  ENSG00000243176_18 (sequence is synthesized)
tataaaatatccttcagttttcaaactgtgagctaataactacaaacaactatatatttgagaggggatccatttcatggaaagtagatttaaataaagattttaaattattattattat

SEQ ID NO: 904338 - DNA, 120 bp, Artificial Sequence
  ENSG00000243176_19 (sequence is synthesized)
tgttttaattaacaatgtttgaagactcagcaactcccatggggggaaaaccctctcaccaataaaatgggagatactatatcattttcatctgatgggataccttgaagtgataacctg

SEQ ID NO: 904339 - DNA, 120 bp, Artificial Sequence
  ENSG00000243176_20 (sequence is synthesized)
ggaaaaataaacaaatggattaagaaaacccaggcattttctgggtagtaaatgacttgccatgaaccatggatgctgttctcttggttgtgcaggggcctcagagatagcttccaaaat

SEQ ID NO: 904340 - DNA, 120 bp, Artificial Sequence
  ENSG00000243176_21 (sequence is synthesized)
aactctggctgaggtgtagcttcctgtgaactgtactggtcgggtttgaaaaggtcatctcgccttgaaggatttcagctgggagtcttaatgagattatcctttagggacaaggaagta

SEQ ID NO: 904341 - DNA, 120 bp, Artificial Sequence
  ENSG00000243176_22 (sequence is synthesized)
gtgggtgagtggtgtagaggtggtgaggcaccatgtgtagagaaagaaataatgaataaatgaatgaatgaagcaaatatgggttgagattctatgggctaggcactgtgttaagtactg

SEQ ID NO: 904342 - DNA, 120 bp, Artificial Sequence
  ENSG00000243176_23 (sequence is synthesized)
agtgccaaaactctaagttgttttttgtagggtgtaagaacaaaggcatctcatgtgtctcgagaaatgagtgaaagtcatgacccagttcttcctcctactttaacaaaatgtgactga

SEQ ID NO: 904343 - DNA, 120 bp, Artificial Sequence
  ENSG00000243176_24 (sequence is synthesized)
agaggaagccagatgtgttctaggacagaccagctgactaactcttactgtcaacatacactgtgcaattccaagacacaagggcaactgataaagaagattagcttggttttccagaaa

SEQ ID NO: 904344 - DNA, 120 bp, Artificial Sequence
  ENSG00000243176_25 (sequence is synthesized)
cagaaattttctaatcttctactctgaacttttataaaatgattatcagaaaatgaatcagcagttggaagaataggaaatagattctactgtaatcatttcctgcaagtaataatttct

SEQ ID NO: 904345 - DNA, 120 bp, Artificial Sequence
  ENSG00000243176_26 (sequence is synthesized)
cacacattatcataataaagtctctgttcttctttaagtagagtaagtcatcgaggaagtagatcacttctaaaaaattaaacttgtctctgggtctttataatatattataacattact

SEQ ID NO: 904346 - DNA, 120 bp, Artificial Sequence
  ENSG00000243176_27 (sequence is synthesized)
gaatgattgctcttgaaatttccaatatttcatgtccttaacttgaattttccctacaggttgaaaagtcaggttctggaattggctgtctggattaaaatactggttccatcactgaga

SEQ ID NO: 904347 - DNA, 120 bp, Artificial Sequence
  ENSG00000243176_28 (sequence is synthesized)
agctgtgtgaccttgcgaaaattacttaatctctttgtgtttcagttttctgatctgtaaaatgaagtcaataatggtgagaaaatgagaaaaatgcatgcaagcttagcatattattag

SEQ ID NO: 904348 - DNA, 120 bp, Artificial Sequence
  ENSG00000243176_29 (sequence is synthesized)
agtgataaatgctaacaattataaatcatgtcagggcctctacattattttagcatttactttcctctgactatctgtacattactggataaaaatattttattgatcaccagatattaa

SEQ ID NO: 904349 - DNA, 120 bp, Artificial Sequence
  ENSG00000243176_30 (sequence is synthesized)
actcctgtgaatttctgtgtgttgatggtgaagttggtgggaggatggtgatgagacttacttgaagacaggaatgtatgtgagttgaccatgtcagtaagctgagatactgtcaatttc

SEQ ID NO: 904350 - DNA, 120 bp, Artificial Sequence
  ENSG00000243176_31 (sequence is synthesized)
tgaaggattcctctggctgagtctacacagttaagaagtattatatatttcttgatgtctttcctaatgtctaactgaaattctctaattgtctcatgttttattcctcatttatggaga

SEQ ID NO: 904351 - DNA, 120 bp, Artificial Sequence
  ENSG00000243176_32 (sequence is synthesized)
gtaaacataaatcccaacctggattcttccctgggctgacggagttcagggagaaaggtagcagtagataagtcatatgctggaaaagcttggactctaccctgtcatgaaaactttcag

SEQ ID NO: 904352 - DNA, 120 bp, Artificial Sequence
  ENSG00000243176_33 (sequence is synthesized)
ctatgttgcccaggctggcctcgaactcccgggcttcagcagtcctcccgcctcaccctccgatgtagctaggactacaggaccgcgacccggcgctgcctaagaactgtttttaaacgt

SEQ ID NO: 904353 - DNA, 120 bp, Artificial Sequence
  ENSG00000243176_34 (sequence is synthesized)
gcgacccggcgctgcctaagaactgtttttaaacgtgaaagccacggctatcatttgctttttgctctgctcttcatcttctggataaacctcgtaacacactgcttgttttgggtggta

SEQ ID NO: 904354 - DNA, 120 bp, Artificial Sequence
  ENSG00000243176_35 (sequence is synthesized)
gtctgctgcctacgccccgtcagacaagtggcctgagtcccccgcaacccctgcaggtccggccgccggcgccaagcctcaaggcatccaagccaggaacgatcgcggtcagctctgcca

SEQ ID NO: 904355 - DNA, 120 bp, Artificial Sequence
  ENSG00000243176_36 (sequence is synthesized)
cggaacatgtgcaagacccggcagcaggttccgggggaggcgaattgatttcacaacggtcgagaaggaggaccccgcccacttcgtcatttctcggaagcccagggactcgccggaaga

SEQ ID NO: 904356 - DNA, 120 bp, Artificial Sequence
  ENSG00000243176_37 (sequence is synthesized)
gcggctcaaaagccggaaaactggcaaatccgagtctcccggcgcatgcgcggcgcaatcggcttcgcgtggttgcagtagagaggatccctccgccagccactgcatccggcggccgga

SEQ ID NO: 904357 - DNA, 120 bp, Artificial Sequence
  ENSG00000243176_38 (sequence is synthesized)
gggcacccctcgagctagttcatcgccttttaacctgtgagttctgttaaaaggaagtaactgcaaaatgtcttcgctgttaggtttctttggaagttttgggttgtgttcatgcgttct

SEQ ID NO: 904358 - DNA, 120 bp, Artificial Sequence
  ENSG00000243176_39 (sequence is synthesized)
ctcggcgtgtgaactgggagaaagtggagtgccagccatatgaaatgacaactgtatatggaggctgggaagtataatgcgcattctggcttgatgaaattaatgaaattttaattaagt

SEQ ID NO: 904359 - DNA, 120 bp, Artificial Sequence
  ENSG00000243176_40 (sequence is synthesized)
ttaattttcatttgaattacccaggaatagcatcttgaaaggcggggcataaaaagcagttaaagagcttcgagaaacggttactcgttttgtaaactaaagaccaaatgaaaatccagc

SEQ ID NO: 904360 - DNA, 120 bp, Artificial Sequence
  ENSG00000243176_41 (sequence is synthesized)
tgcactagaaaagaaagaaacttataagggccgaaggttttgtctgcaatttacagctaattagtctcaaagatttctgtgatttgcccaagagaggtggagttggggccactgctttac

SEQ ID NO: 904361 - DNA, 120 bp, Artificial Sequence
  ENSG00000243176_42 (sequence is synthesized)
ccaggacaccgccgcggcccgcttgaatactgccgccgttaggacccgccgtacctggccgtccagggcctcttttcttgtcttccactctcacttgtcttttctcccctttccatgttt

SEQ ID NO: 904362 - DNA, 120 bp, Artificial Sequence
  ENSG00000243176_43 (sequence is synthesized)
ttggttcctttcctgagtttcccttgtctccactcccctgcccctttgcttcctctatctctttaacttctgttttcttgatggtggagccaactttagtttcccttaaaaggccataaa

SEQ ID NO: 904363 - DNA, 120 bp, Artificial Sequence
  ENSG00000243176_44 (sequence is synthesized)
cctgttttttggtggggggtgaaaaagttcatatgcagatagacataaacttcttttggtaaaagctgccctctattttcttccatagctgtcctgtgaaagtaggagtgtgtgtgaatg

SEQ ID NO: 904364 - DNA, 120 bp, Artificial Sequence
  ENSG00000243176_45 (sequence is synthesized)
tgtgaatggtgaagcaaagagagggagacatggggtcaggagaagagggagcacagcgtgtgtaaggagttaattagaaccagagggcctgggtctgtggctcatgcctgtaattccagc

SEQ ID NO: 904365 - DNA, 120 bp, Artificial Sequence
  ENSG00000243176_46 (sequence is synthesized)
cagcctgagcaacagagtgagacccagtctcagaacaaaaaaacagaaacaggagaaaaaccatccatataagcagagaggtacttaaaatgttgcaaaactaaattccaaataacgtct

SEQ ID NO: 904366 - DNA, 120 bp, Artificial Sequence
  ENSG00000243176_47 (sequence is synthesized)
ttaaaatgttgcaaaactaaattccaaataacgtctgtggattctacaaaatctaggaaatacacatttccaataaatctttgtacattcatctgtaatgcatttccttaggtgatttga

SEQ ID NO: 904367 - DNA, 120 bp, Artificial Sequence
  ENSG00000243176_48 (sequence is synthesized)
gtcctttaggagtaaatctgtatctttagctgtcccagaagtaatcacaggcgttcattgtctattcaatgacaaagtattgtgaactattctatgaaataataaaatatcagtgttttc

SEQ ID NO: 904368 - DNA, 120 bp, Artificial Sequence
  ENSG00000243176_49 (sequence is synthesized)
agagtacatggccttttcagtagccttttcagtgtggtggcacgtgttcccagttctgccagtggatattgttatctttgatctacaactgggaagctaaaacccagaaagttacttgtc

SEQ ID NO: 904369 - DNA, 120 bp, Artificial Sequence
  ENSG00000243176_50 (sequence is synthesized)
taagactatacacctccaagaaggcagaactgtggctgctatttccaactttctagtctctgaacatgtaataaagaactgatttccaatttacaatgaataatagaatttacaatgaat

SEQ ID NO: 904370 - DNA, 120 bp, Artificial Sequence
  ENSG00000243176_51 (sequence is synthesized)
gatttccaatttacaatgaataatagaatttacaatgaataatataatttactataatataacaaccgaccaaagtgtgctgttttattaccaatttctctctctctctctctctctctt

SEQ ID NO: 904371 - DNA, 85 bp, Artificial Sequence
  ENSG00000243176_52 (sequence is synthesized)
gtggtgaggtctcggctgaactgcgtcagactccccagtagctgtgactacaggcaggcgccactacacctggctaatttttgta

SEQ ID NO: 904372 - DNA, 72 bp, Artificial Sequence
  ENSG00000243176_53 (sequence is synthesized)
gcactcaccatgttggtcaggctggtcccaaattccttgcctcaagtgatttgcccgcctcggcctcccaaa

SEQ ID NO: 904373 - DNA, 120 bp, Artificial Sequence
  ENSG00000243176_54 (sequence is synthesized)
tgcccaccccaatttgcttctttggtgtttgtaattctgcttggtcaaccgtaacttgcagaaattgattggaacatatattttgataaagtatttgaaggtattcctgaagtttgattt

SEQ ID NO: 904374 - DNA, 120 bp, Artificial Sequence
  ENSG00000243176_55 (sequence is synthesized)
atgtttcagctgcctatactgaaagaaaataaactgctgtgtattccataatttaaaaataattgttcactttagtgacattttgtagttggatagtggagacaaaagatgatactctct

SEQ ID NO: 904375 - DNA, 120 bp, Artificial Sequence
  ENSG00000243176_56 (sequence is synthesized)
gtgatcttcaatctaaacatttatgttaggacaaattattcccatatctgtataatgctatatttcttccctgacctctacaaatcacagaagcaccgttattcgatcttgttctctttt

SEQ ID NO: 904376 - DNA, 120 bp, Artificial Sequence
  ENSG00000243176_57 (sequence is synthesized)
tcaaaaaattctaccttccaaggtggtggttctttaagtttataagtgaaccataaagtagttggaaacctggatcccaggatggtagaaacatgaagcttgtttattccaaggacagtt

SEQ ID NO: 904377 - DNA, 120 bp, Artificial Sequence
  ENSG00000243176_58 (sequence is synthesized)
ttatatatgtataggactttattatccttactatatacagcattttaatggggagggggaaccaggagcattgttgggggttaatttaatttttgtagttttaaaatacaaacgaatgat

SEQ ID NO: 904378 - DNA, 120 bp, Artificial Sequence
  ENSG00000243176_59 (sequence is synthesized)
ttgatgtatgtcttagtctgtttatgctgctataacaaaataccttaggctgggtaatttataaagaacagaagtatatttctcacagttatggaggttggaaagtccaagatcaagatg

SEQ ID NO: 904379 - DNA, 120 bp, Artificial Sequence
  ENSG00000243176_60 (sequence is synthesized)
ctgcagaccgaagtgacatcacatttgaggtgcaatcaatataattaatcaccttggaggtgagacatattggttctcaagaactgggtctgacgtcaaaggagagcaatcttgcaagtg

SEQ ID NO: 904380 - DNA, 120 bp, Artificial Sequence
  ENSG00000243176_61 (sequence is synthesized)
cagaagaaaggagtatcaaacagtgcacctatcttggggacctcgaccttccaataaatcacatcatagcacacctaccatgacaatatttcacattttcaaaacaattttggtgttgtt

SEQ ID NO: 904381 - DNA, 120 bp, Artificial Sequence
  ENSG00000243176_62 (sequence is synthesized)
ctctgagagccctacacatctccatctggccaaataaacatacttttactattcagcctcaacatcttggcagttaacaagaggacagacttgccacaatgggtaatctttaagatgcat

SEQ ID NO: 904382 - DNA, 120 bp, Artificial Sequence
  ENSG00000243176_63 (sequence is synthesized)
ctgctcttgtgatcctaaatgcagttcctgagccgagtcagcattgagagctctctcctctcaaagggcacattagtgatgaaatatttcacttccaatgacagcataactttttggata

SEQ ID NO: 904383 - DNA, 120 bp, Artificial Sequence
  ENSG00000243176_64 (sequence is synthesized)
taggcttattagcaacgtgtttccactggttggattgagcaagtgtaaccagaaggcagaatggtgaaatggttaagagcatgggttctagagtcaggctgcgttcaaattctgctgctg

SEQ ID NO: 904384 - DNA, 120 bp, Artificial Sequence
  ENSG00000243176_65 (sequence is synthesized)
ttaatttatctttgtgaccttgggcagttaccatacctctctgtgcctcagtttcctcatcagtaaagcagagataatgtcagtattttcctcataagagtattgcaaggactgattaaa

SEQ ID NO: 904385 - DNA, 120 bp, Artificial Sequence
  ENSG00000243176_66 (sequence is synthesized)
tgagataaggtgtctgatatgtttagcacagggcatgacttgtatttgctaacaattatttttaggcaaggtcagtagaccaaataacttgagcagcagaaaggaagtggaaggcgaata

SEQ ID NO: 904386 - DNA, 120 bp, Artificial Sequence
  ENSG00000243176_67 (sequence is synthesized)
accagctatgaggttatttctcagataatttcttcctatttcaatgcttcactttttacagtttaatcatcaagcaacagtgttagggattacgtgagataatatggtctgtgtgctgat

SEQ ID NO: 904387 - DNA, 120 bp, Artificial Sequence
  ENSG00000243179_0 (sequence is synthesized)
ctggctgccccctggtggccggaggccgttactgtcgcggctgagggggcgtcccggtgtatccgcagcgcgccctgtcccgccatatacattccgtgcttttcaaacacccgccgtggg

SEQ ID NO: 904388 - DNA, 120 bp, Artificial Sequence
  ENSG00000243179_1 (sequence is synthesized)
ctaagcatgggacccacgtggggcggggacacacggcgataaagagccaggccctcgctgccaaggagctttcccgtaacaccgatgcatcaaacaaaagatattaaagacattggcggt

SEQ ID NO: 904389 - DNA, 120 bp, Artificial Sequence
  ENSG00000243179_2 (sequence is synthesized)
aacactggaatggatgtgaagatgggagaggtctacccatagcccattctacagagcagaactgaggctcagatattgaggtagattaaagatggctgccagttcagtgccacttgtccc

SEQ ID NO: 904390 - DNA, 120 bp, Artificial Sequence
  ENSG00000243179_3 (sequence is synthesized)
aaggttagatcagaagaagccttgaagttcctgccttggtctcttgaaacaacttaccgtgtaagaagtctgacaccctgagaccgccatgttggcacagttatgggtggatgctccagt

SEQ ID NO: 904391 - DNA, 120 bp, Artificial Sequence
  ENSG00000243179_4 (sequence is synthesized)
agatggatccagctgagcccagccctccagccattcccacccccaaaccatgggtgaaactgtcttggaccctccagtccagcccactcaacatctaaataccacagactgacctcagct

SEQ ID NO: 904392 - DNA, 120 bp, Artificial Sequence
  ENSG00000243179_5 (sequence is synthesized)
gataccatcacccagttaaaatgtgcctgaaactgacccacaaaatcatgagataaactaaaatggttgttgtcctaagccactaagataatagagcagatatatatgcacttaacactc

SEQ ID NO: 904393 - DNA, 120 bp, Artificial Sequence
  ENSG00000277200_0 (sequence is synthesized)
gccaagccttcttcctccccaggagaggcccaggctaggggctggtccttctacccccaccctgaccctgccgataggtccttgcaggtgagcacggaacactttagaagacacgtcctc

SEQ ID NO: 904394 - DNA, 120 bp, Artificial Sequence
  ENSG00000277200_1 (sequence is synthesized)
ccagagcccctggtgggaaaagtgcgcctgatggaagcctaacttccatgggccctgggagaggattacagaaccgcctggttggccggacttggtctagagccgtctccagctcagctc

SEQ ID NO: 904395 - DNA, 120 bp, Artificial Sequence
  ENSG00000277200_2 (sequence is synthesized)
ttcccgagtcgccaccccgctgggtatgcagggactgggagctctgctggggaagggaggtgacaggcctgctgctggccaggcttctggaaggcaggagctgtcttccttctcaggagg

SEQ ID NO: 904396 - DNA, 120 bp, Artificial Sequence
  ENSG00000277200_3 (sequence is synthesized)
cagccccaggcgttttcctggtcctgtttattggtgctaatgttgctcggcttcctaatcagctggctgcacccagagacaagaagaagagagccttggctgggcgcggtggctcactcc

SEQ ID NO: 904397 - DNA, 120 bp, Artificial Sequence
  ENSG00000277200_4 (sequence is synthesized)
acaagagcaaaactccgtctcaaaaacgaaaaaaagaagaagggcctggcttcttggaagtggcagctactgataggagtttgggtttgtgtttgctggggggatggtgggagcacaggt

SEQ ID NO: 904398 - DNA, 120 bp, Artificial Sequence
  ENSG00000277200_5 (sequence is synthesized)
tagtccccatcctggccccctccacggatgcccctaaacctatcagaatctggcagtggcgggctgctcagttccctgctgtctagcctggggaatggcgacgtggaaaggggaaagccc

SEQ ID NO: 904399 - DNA, 120 bp, Artificial Sequence
  ENSG00000277200_6 (sequence is synthesized)
cacctcctaacgccccttctcccaagctccccgtccaccaccaaaggcaggaaggacagtttcagcgcagcttattcccccacccccagcccagcctagaaggaaacacaaacccctcca

SEQ ID NO: 904400 - DNA, 120 bp, Artificial Sequence
  ENSG00000277200_7 (sequence is synthesized)
gcccgtgccatccctcctgtgtgggtcctgcatcaagtcctaagtgcctgtgaggtcttccaggggcttcgaggggaggacgtggggcagggagaggcctttgcctccctcacagacacc

SEQ ID NO: 904401 - DNA, 120 bp, Artificial Sequence
  ENSG00000277200_8 (sequence is synthesized)
cctttcctgacaggtcctgaccctggctgaggccacacattctgtcacgcaggggtctgggaggtgagcagagtcaagctctaggggtgacgagctcttctcccatcacagccccatgaa

SEQ ID NO: 904402 - DNA, 120 bp, Artificial Sequence
  ENSG00000277200_9 (sequence is synthesized)
gaagggggagtcccagatcacaccccctttctctccatttgttggagcaggaaattggcaagaagtagaaaccagtgagcgagcgcactcagggccaagcaatgtgcggctctcccagct

SEQ ID NO: 904403 - DNA, 120 bp, Artificial Sequence
  ENSG00000277200_10 (sequence is synthesized)
gacgccactcgggactgcccaagaccactgagcaataaccacgcctggtctggggtgtccagctcctgggatgcagatggctgaggttggggcacccttgggacagtgctctccagtcca

SEQ ID NO: 904404 - DNA, 120 bp, Artificial Sequence
  ENSG00000277200_11 (sequence is synthesized)
ccttgctctgcctgcccccacctctactctctactagtcctgtggttgcgcctgtaccatctctgtcccccctcaagtgtgtgtaactcactgcacccctattctgtccccctccctttc

SEQ ID NO: 904405 - DNA, 120 bp, Artificial Sequence
  ENSG00000277200_12 (sequence is synthesized)
agaacctgtcttgtgtgtgagggcctcactcctctctcggaggtgcccagaggactgtgggaagaagggcaaagtctctttccagaggagcgtgcacagaccctcatctcccacgaccac

SEQ ID NO: 904406 - DNA, 120 bp, Artificial Sequence
  ENSG00000277200_13 (sequence is synthesized)
acttttggggtgaacagggtgactttgttaggtcgattcttctgcagagatggtgaagtactctatctgcccacccacccactaaaagccatagctccgtccgcctggcctccccccagc

SEQ ID NO: 904407 - DNA, 120 bp, Artificial Sequence
  ENSG00000277200_14 (sequence is synthesized)
tctatagcaatagcccccttcccccttccctcctgggcatccagggtgtccagctaggggcccccaccgcactctggtcccagggatcttccagtggcctgcctgcttctcccgaagtga

SEQ ID NO: 904408 - DNA, 120 bp, Artificial Sequence
  ENSG00000277200_15 (sequence is synthesized)
ccccatcagctccacccaactcccatccctcttccagcaaccacagataatgacaattgtttgtgaggtgcttggagatcccctagatgaaaggttctgggtgctggggcagctgactca

SEQ ID NO: 904409 - DNA, 120 bp, Artificial Sequence
  ENSG00000277200_16 (sequence is synthesized)
ctgactctcagctgaggtgctggaggtgcctgggaaaggaaataaggcaagctgggggagcacctgtagcagatacagggttccagttttcacagaaattcccctcctcgccctcctgga

SEQ ID NO: 904410 - DNA, 120 bp, Artificial Sequence
  ENSG00000277200_17 (sequence is synthesized)
aataatggaaacccctccacccgcctgcacagaaccctctgtgcagcagaacgagactgggagctggagtgcatggcccgctcttggccacaggggcccaactctcctcagcctcagggc

SEQ ID NO: 904411 - DNA, 120 bp, Artificial Sequence
  ENSG00000277200_18 (sequence is synthesized)
cctggagaggccccaccctccctgggtctggcttgagagcccacctggccaaagggaaacctcgcacccccacgcgctcctggcccctggaatatcttggtgactaagaagggaaaggac

SEQ ID NO: 904412 - DNA, 120 bp, Artificial Sequence
  ENSG00000277200_19 (sequence is synthesized)
tgcatttctctctcctctgctgcacgaatccccattgggagagagagtgttgaagaggacactcaggtccctaggcggagctcctgccacaccccaagtatggacagctccaggacacag

SEQ ID NO: 904413 - DNA, 120 bp, Artificial Sequence
  ENSG00000277200_20 (sequence is synthesized)
agctgcaggtggggacctccccctgctctggaaatcagccagggagcactgggcagtgcggtttgaggctctgtacccctggcccccacagctcagccacagcaccctctagcttggggg

SEQ ID NO: 904414 - DNA, 120 bp, Artificial Sequence
  ENSG00000277200_21 (sequence is synthesized)
actagtccagggccaaaatgggataacccttccccatataagcagtaggatggcgtcccccctggtggagagaggaaggaggcctagagggtgtggggcagcttcgaagcgcggggagcc

SEQ ID NO: 904415 - DNA, 120 bp, Artificial Sequence
  ENSG00000277200_22 (sequence is synthesized)
gggggtctccaagcaccttctcctggacatgccagccttgaatgggggatgtgcagggcttcaaacccacctggcaggagccctgtggcagggcagagggaccctgctccaaattctctg

SEQ ID NO: 904416 - DNA, 120 bp, Artificial Sequence
  ENSG00000277200_23 (sequence is synthesized)
ttggctgcgcttttgtatccaatgcttttcagagtgtattcactcacccacagaaatagagccctgtgctttaggggtgactgtcatatgccttattcttaataaaatctctgaaaaaca

SEQ ID NO: 904417 - DNA, 120 bp, Artificial Sequence
  ENSG00000241990_0 (sequence is synthesized)
ctccccaggcaccaccctcaccccgcagctcccccccatacacaccctcgctggaaagttcgccctgcccgggctgggctcccaggcagcctggcaccgtgccaggctcgccgccgagct

SEQ ID NO: 904418 - DNA, 120 bp, Artificial Sequence
  ENSG00000241990_1 (sequence is synthesized)
tctagagcctcagagatggaattcgccgttttgccgcgatttggcgttaacttattgacccatggggaggagggtcacttcccgtgaaaagaaggcagagatgttttgctgtgcccagtg

SEQ ID NO: 904419 - DNA, 120 bp, Artificial Sequence
  ENSG00000241990_2 (sequence is synthesized)
tgaggaagcgaaggaaaagaaagatcttttgaaaatgtgtacatctacttgcagcttgaaaattccaagtgccagacatttttcttggaggaaataaatgtcttcaatttattcatctta

SEQ ID NO: 904420 - DNA, 120 bp, Artificial Sequence
  ENSG00000241990_3 (sequence is synthesized)
ctccctgggaagggaaaggccagagcagccgatgccggttctgggggacgccggaaagcccagcctcctctgcacctccatccagaaccgggggccccgcagcacctgcagcaggggtgg

SEQ ID NO: 904421 - DNA, 120 bp, Artificial Sequence
  ENSG00000241990_4 (sequence is synthesized)
agggtgggaggcagaaggggcctggtgctctcggaggctgcacctcacggtaccagtcgctacccagagcagcacgcctgtttgctggcctgctcttgggtgttaaacatggtgtccagg

SEQ ID NO: 904422 - DNA, 120 bp, Artificial Sequence
  ENSG00000241990_5 (sequence is synthesized)
tccccggttggagaccccagccctgtaccgggtgagggtcttagctcccactgacttggggccttcaaccacactggcatcccaggccttcctcctgactgacttctgttttaaaaataa

SEQ ID NO: 904423 - DNA, 120 bp, Artificial Sequence
  ENSG00000241990_6 (sequence is synthesized)
cactgtttactgagggcaggacttaaggaatgagttcagaaggtatctatctggtcactggacaaacggcaggcaagccccctgtgctcctcgctgggagaaagcagccttcaaggtccc

SEQ ID NO: 904424 - DNA, 120 bp, Artificial Sequence
  ENSG00000241990_7 (sequence is synthesized)
agcacccccaaacccacgagctcacacaaaacaacgcgagccacaaatgcaagccacatctgtcatttaacaccttctaatagccacattttcagaaagtgaaaataagcggattgagct

SEQ ID NO: 904425 - DNA, 120 bp, Artificial Sequence
  ENSG00000231509_0 (sequence is synthesized)
cttagggagttacaagtttggtagctcatggagttgccatagacatagaatatattgatttttaatcacagcacacaacaagatgtacatttatatccttgtgagtaagtgaatatggtt

SEQ ID NO: 904426 - DNA, 120 bp, Artificial Sequence
  ENSG00000231509_1 (sequence is synthesized)
gagagaagaggttaggttgacaaagcaactactaaaaaattgtctttttccctctgtcttatgggtaacttggatgaaaacatagaagatgagcttataatatatgatgattaataaagt

SEQ ID NO: 904427 - DNA, 120 bp, Artificial Sequence
  ENSG00000231509_2 (sequence is synthesized)
gaagatgagcttataatatatgatgattaataaagtagggagagagagtcagttggatagaagagtttctatttcaaaatcccaggttgccacagtggctcacacctgtaatctcagcat

SEQ ID NO: 904428 - DNA, 120 bp, Artificial Sequence
  ENSG00000231509_3 (sequence is synthesized)
aaagccaagatcttaatctggaatgggaaggttaagaccattcattaattcaacaaatatttactgagcagccctgagactgttttccttggggtctgggaaggggagccatggtcaatg

SEQ ID NO: 904429 - DNA, 120 bp, Artificial Sequence
  ENSG00000231509_4 (sequence is synthesized)
gactcttgttatctgtaggaatattgatccctaccacaaggtagagggacagggaataaaggggagatagtcctcctatgagataaaggtaggggatgttctacagggcccagttttata

SEQ ID NO: 904430 - DNA, 120 bp, Artificial Sequence
  ENSG00000231509_5 (sequence is synthesized)
tttttcttttctgccttgttatttcttctcatgattttctttcagtaaaatctctttcccacatctctttcagtaaaattttgttaaatgatagtcttgttctctgttttggggaattac

SEQ ID NO: 904431 - DNA, 120 bp, Artificial Sequence
  ENSG00000231505_0 (sequence is synthesized)
agatgcgtgcaaacactttgagcactgaaggtccgcaggcctccgcaatcactgagcatttgagactcctctggggccatgcatccaccagctctcagcgcaggtgatggcagccctgga

SEQ ID NO: 904432 - DNA, 120 bp, Artificial Sequence
  ENSG00000231505_1 (sequence is synthesized)
cctcagcaaacaaccttggtctatgtggcattggcctggaaatgagtgtctgcagcctggaaatttagatcttaagtgtgctcttgttgcagtgtctgacatgcccccaaacgactgtcc

SEQ ID NO: 904433 - DNA, 120 bp, Artificial Sequence
  ENSG00000231505_2 (sequence is synthesized)
aggtgaaggaggagaaacaagcgagtgagatccggggatcagcttcatgaagatgggtggcactgtctgaagagctttcaaagatcttccctgaatgtgggcagctgcggacttcatgtt

SEQ ID NO: 904434 - DNA, 120 bp, Artificial Sequence
  ENSG00000231505_3 (sequence is synthesized)
tcttctccacgcatcagagcagcggtcctcagccgagcatgctccaggccagcaactgcactgtccctgggaaactgttagaagtgcagacccccaggccccacccagacactccatggt

SEQ ID NO: 904435 - DNA, 120 bp, Artificial Sequence
  ENSG00000231507_0 (sequence is synthesized)
ggtgtgcacgcccaagctcaccggcagagggcgccaggcctccgcttggtgctcgagcctcgaggcccagaaaagatgaaaacatcgaggcttagaggggtttctgagtagctgagaagt

SEQ ID NO: 904436 - DNA, 120 bp, Artificial Sequence
  ENSG00000231507_1 (sequence is synthesized)
caggacttcacactcccgatctttcccctggcctccagtttgcctggcaaagtcacaggaagtatctccatggcaccgcatcagccctcacagagcaggaaaccttgatttctacagagg

SEQ ID NO: 904437 - DNA, 120 bp, Artificial Sequence
  ENSG00000231507_2 (sequence is synthesized)
ctgtttcctcccagccttgtgcaaggcccactgcagagacaaaattatggtggccaaagtgtgaatgccaaggccacactggcctccatccctgggatttgctggtagaagaaagggaat

SEQ ID NO: 904438 - DNA, 120 bp, Artificial Sequence
  ENSG00000231507_3 (sequence is synthesized)
gcatatttcctgccctgaggaggcgtctataggggaagtcggaattaaggcacctccagaattctgaggtcaagggaatgtcaacagagctgtgaacaaaatgcccaaagccatgaaaat

SEQ ID NO: 904439 - DNA, 120 bp, Artificial Sequence
  ENSG00000231507_4 (sequence is synthesized)
ctacagagagagactcgaaggggaggaatggggccaggctgaggtcgggatggtggaggaggtggtggaggtgatgaggtaccagagcaacctcgaagaaagctgagaggcaggagaccg

SEQ ID NO: 904440 - DNA, 120 bp, Artificial Sequence
  ENSG00000231507_5 (sequence is synthesized)
ccaaaggcaaacttggaacacctggtgactccgactaactctccatgtggtgtccttgaggacttttatgatactgctaccactgctaatagtaataaaagccactatttaatgtgttta

SEQ ID NO: 904441 - DNA, 120 bp, Artificial Sequence
  ENSG00000231507_6 (sequence is synthesized)
ttctcccagccttgggatcgctgagtaaaaccagtcagcaccatgtcaccctatggagactggcctccatccctgggatttgctggtagaagaaagggaatcagcgctgactgagctcct

SEQ ID NO: 904442 - DNA, 120 bp, Artificial Sequence
  ENSG00000231507_7 (sequence is synthesized)
gattcacaacagaaaatgagcacaaaacccctctatagccagagagtgattgtctacaaagtcctatgtggtagaaataaggctttgccccaaggagccatctggctgtgtgccctctcc

SEQ ID NO: 904443 - DNA, 120 bp, Artificial Sequence
  ENSG00000231507_8 (sequence is synthesized)
cacacgcacacttccatttggcacacttattgttatcctgtgctgtgagggaacagaggtactggccacggatccattgcagaggagccagcttatactcccacggtgctaggaaggagg

SEQ ID NO: 904444 - DNA, 120 bp, Artificial Sequence
  ENSG00000231507_9 (sequence is synthesized)
gatccaggcattccctgggcctgggggagcagcgagaacctgtctctccctctcagggtactctagagccaggacccaggaccctgcccccatgacccagctcacatatctacgaatccg

SEQ ID NO: 904445 - DNA, 120 bp, Artificial Sequence
  ENSG00000231507_10 (sequence is synthesized)
gtattttcacaaacgtttattctcttgactctcacaataaacgaagccagccagaaagtattctccccatttcagtgataaggaaatggaggctcagaagggtggaatggcccagggcag

SEQ ID NO: 904446 - DNA, 86 bp, Artificial Sequence
  ENSG00000179743_0 (sequence is synthesized)
gccgggcgtggccctggcggaaggatctcttgacgtcaggacttccaaaacagttgggcaacacagcaagaccccgttcccaggct

SEQ ID NO: 904447 - DNA, 120 bp, Artificial Sequence
  ENSG00000179743_1 (sequence is synthesized)
gaaggccctggcggaaggatctcttgacgtcaggacttccaaaacagttgggcaacacagcaagaccccgttcccaggctgggggcaaagccgggctcggtggctcacgcctgtaattcc

SEQ ID NO: 904448 - DNA, 120 bp, Artificial Sequence
  ENSG00000179743_2 (sequence is synthesized)
gcagtgagccgagactgcgccactgcactacagcctggatgacaagagactcccgtctcaaaaaaaaaaaaaaaaagacacctttctttgggcttagtgagcaaacattctacgcagtgc

SEQ ID NO: 904449 - DNA, 120 bp, Artificial Sequence
  ENSG00000179743_3 (sequence is synthesized)
cttagtgagcaaacattctacgcagtgcctaatataagccggcccaggcaccacccaagccttcggccaggactgttttcccgtttcgagaaggctccatcacactccacacgggatcca

SEQ ID NO: 904450 - DNA, 120 bp, Artificial Sequence
  ENSG00000179743_4 (sequence is synthesized)
gtcaacagccgttccaaacatggcgcgggaaggggtggaagacaagccagcgcgacgccgtccagcctcatccccggggcacaaaggggagactaatctccaggaaactcggggtacaga

SEQ ID NO: 904451 - DNA, 120 bp, Artificial Sequence
  ENSG00000179743_5 (sequence is synthesized)
atcgataaccccacaagaaactagtttccgcgagtgggccttaaggaaaaagtaggtcgggcacaagcgagctgttcagacgcacttcacagcaaagactcgcggacaacacagcgagac

SEQ ID NO: 904452 - DNA, 120 bp, Artificial Sequence
  ENSG00000179743_6 (sequence is synthesized)
gaaaacggccccgtgcgcaggcgcgcggaaacacgactagcgcgcttcgggacgacccctcccccttccctcaaaggccaaggaagtggctccgacgcgcttgcgcgaggacggaatgtt

SEQ ID NO: 904453 - DNA, 120 bp, Artificial Sequence
  ENSG00000179743_7 (sequence is synthesized)
gaggggagggggaattctttcccttcattgtcagagagaaccgcccccgcacggcgagcgcgcgcgcgctcacgcaccactctcacactccggcgcgccaaaggctttccgcttggcgtc

SEQ ID NO: 904454 - DNA, 120 bp, Artificial Sequence
  ENSG00000179743_8 (sequence is synthesized)
tcgcgcatgcgcggagggggaagcagtggcgaaattggatgctttttgctgagtttctcagagaagtttctggaaagatggagccaaagggacgctggggggtggggagcgccaggaagc

SEQ ID NO: 904455 - DNA, 120 bp, Artificial Sequence
  ENSG00000179743_9 (sequence is synthesized)
agcccaaggccactgagaccctcacgccagagaaaaagcacagggaccgcggcagccgctcctccctctgccactgctcagcccccgagactccccagcacggggagagggcagggggta

SEQ ID NO: 904456 - DNA, 120 bp, Artificial Sequence
  ENSG00000179743_10 (sequence is synthesized)
gccatgagaaacctagagcgctcactggacttttgcgaggtggaaggaaagccgaaacccgccctttggagccgcctgtgcgcacgggccccgtcgagtgggctcagtacgttaggactc

SEQ ID NO: 904457 - DNA, 120 bp, Artificial Sequence
  ENSG00000179743_11 (sequence is synthesized)
agcgtggccgccaaagcattggttgggggcgtctttcactaatttttcctaggttttctcttctatcgggctctgtggtcctttcaccacccatcttcactttggtggcctgacgctaac

SEQ ID NO: 904458 - DNA, 120 bp, Artificial Sequence
  ENSG00000179743_12 (sequence is synthesized)
gctgcgagttggggaaaccgtagtaaccccgggcctgaggggcgtcccgggcggcggtgctccgtttcttccagcggttgcccctttaagaaaaagccccccggagaggggcccgtgtgg

SEQ ID NO: 904459 - DNA, 120 bp, Artificial Sequence
  ENSG00000179743_13 (sequence is synthesized)
ctgagtaaaggtggcgtgcgcccgcacaaaggcgccgcgttgttggcgggctccggaccctgttgcccctgggcggggcggcgtgggaagaccggggcgcctgggcggggagaacgacgt

SEQ ID NO: 904460 - DNA, 120 bp, Artificial Sequence
  ENSG00000179743_14 (sequence is synthesized)
tggcgctagcggggcagggcagggggagggagtcacgggatttagcaggtgcttctccgcgaccgagcgactgccattttgtggtgcggccgccgccatttcgcgcggccgaggggcggg

SEQ ID NO: 904461 - DNA, 120 bp, Artificial Sequence
  ENSG00000179743_15 (sequence is synthesized)
gtgtgggcggagcggcgggcgcgcccgggctgtccctcggggcggcgggctaacgcggccgctttgttcttcgcttctcggctcgaggccccagtctcgaccgccgaccgcctcggaacc

SEQ ID NO: 904462 - DNA, 120 bp, Artificial Sequence
  ENSG00000179743_16 (sequence is synthesized)
gggctgcatccgagctgccacgcggcgtgtgaaccttgaagcgcggccggggaatccgcaaggcgccgactctcttcctccttgcaagcccttcgaaagtgagatttctcaccccaccct

SEQ ID NO: 904463 - DNA, 120 bp, Artificial Sequence
  ENSG00000179743_17 (sequence is synthesized)
tgcagggtggagagaacacgtttcaaaaaggggatgcctagaactcagccgtgggaagtgcctgtctaaagccttgtgctggtgccagtagcaaacccgtgcgcgtgctcggctttgagc

SEQ ID NO: 904464 - DNA, 120 bp, Artificial Sequence
  ENSG00000179743_18 (sequence is synthesized)
gatcatggagctctgcaaatagctcaactgcagagcgtgccccttagagctcctgtgctgctgggaggcctcataaaggtgccaaaaccaggtgtccccagcggttggcctctttaaaaa

SEQ ID NO: 904465 - DNA, 120 bp, Artificial Sequence
  ENSG00000237903_0 (sequence is synthesized)
ccagcctcctggcgctttgtatggtggctggaagtgcttgacaaatcatagcaccatcaaatttatacagtcgtccctaggtgtctgcaggccattggttgcagaatccctctctgatac

SEQ ID NO: 904466 - DNA, 120 bp, Artificial Sequence
  ENSG00000237903_1 (sequence is synthesized)
tacacaagtcccgcatcccaaatttgattgtggatgcagaacccacagaaacagagggccgactgtatttattgaaaaaaatccacatataagtgaaccagcacaactcaaatccatgtt

SEQ ID NO: 904467 - DNA, 120 bp, Artificial Sequence
  ENSG00000237903_2 (sequence is synthesized)
tccatgttgttcaaaggtcaactgtaggccgggcgcagtggcccacgcctgtaatcaccacactttgggaggctgaggcaggccgatcaacggagcaagactctgtctcaaaaaaaaaaa

SEQ ID NO: 904468 - DNA, 120 bp, Artificial Sequence
  ENSG00000250866_0 (sequence is synthesized)
gacgttctcaccattgtccttgcctgtggtgtcaaggggagggtcaggtggaggcagccagctgtgagtgaggaacagcacaagactgctgagaagctgatattaagaaggcagagccag

SEQ ID NO: 904469 - DNA, 120 bp, Artificial Sequence
  ENSG00000250866_1 (sequence is synthesized)
attcaggttcttaccaagccagataagtggttgtcatggagacgatacgttgtgacaacaactgtggtgccaggtgttcagagcagcacactggcaccccactcccagagaggatgctga

SEQ ID NO: 904470 - DNA, 120 bp, Artificial Sequence
  ENSG00000250866_2 (sequence is synthesized)
agcagattgaatcactttaggagaaaagcacacttaggcacgaagccctggcttttcttcttctttcttctgtgtctataatgtgttttatcttaaataaaacttcataaatgccataaa

SEQ ID NO: 904471 - DNA, 120 bp, Artificial Sequence
  ENSG00000249479_0 (sequence is synthesized)
tgaggtcaaagatagtgagacaaaaaggaattgctcaaatactgagatgcatgtcaactcttccaacaacctccagaatttactgagcctgtaacacagcttttgtaatccttttctgtg

SEQ ID NO: 904472 - DNA, 120 bp, Artificial Sequence
  ENSG00000234474_0 (sequence is synthesized)
aattattacgtggtaataacccctcagagagtcgccgggagaattagctcggcgcggtgcatggggctagaactcagggcccagcaggtctgacaatgcaggtttccccgctcgcctgtt

SEQ ID NO: 904473 - DNA, 120 bp, Artificial Sequence
  ENSG00000234474_1 (sequence is synthesized)
gggtttttgaaacgccctcagcggggttttcctcctaattctggtttggaggagccatctctctccatcccgtctgccagcggggtttgcttcacacacagacgtgggcagatggcatcg

SEQ ID NO: 904474 - DNA, 120 bp, Artificial Sequence
  ENSG00000234474_2 (sequence is synthesized)
gggacacagggaaacctgaccttagaggaaatggaaaagttggagagacactgagcactgatacgaaataattctcttgctgaaatacacgaaaggagtcccagcagccatattagtatt

SEQ ID NO: 904475 - DNA, 120 bp, Artificial Sequence
  ENSG00000234474_3 (sequence is synthesized)
tccacgtcctgtgtcagccccaagtagagagaacttggaatgggaggggaaatggcagccatcaggaaatgaaatgctggcccagagaattctaagcaagtcaatcaccagtccaagtaa

SEQ ID NO: 904476 - DNA, 120 bp, Artificial Sequence
  ENSG00000234474_4 (sequence is synthesized)
tttgtttttgtttttgtttttgtttttaaatatccacttgccatttgttttacccaattcaaaattttttcccaagaaaaaaaaatacacttgtaaaatgcctcattaacagcaaagatg

SEQ ID NO: 904477 - DNA, 120 bp, Artificial Sequence
  ENSG00000234474_5 (sequence is synthesized)
attaacagcaaagatgaattggacctcaacttttgaatgccatgctgctttaaaggaaactgtagaagttcgtggaatgaaagaatactgccagcatgcattcggactattttccatctg

SEQ ID NO: 904478 - DNA, 120 bp, Artificial Sequence
  ENSG00000234474_6 (sequence is synthesized)
tgtggtagagtctgagctgtgtgttctacagaagctccagttggcagaaggacgactttggccctgaattttcatttatttttgtttcaaaaatgaaaggatagttgctatttttccaaa

SEQ ID NO: 904479 - DNA, 120 bp, Artificial Sequence
  ENSG00000234474_7 (sequence is synthesized)
atttagaattttaaatcactacccacttttgatctctgatttaaatcttgttttgagagacacattagacagtctctacatattatattatcttgcaagggaaaaaaggagaaagatcgg

SEQ ID NO: 904480 - DNA, 120 bp, Artificial Sequence
  ENSG00000234474_8 (sequence is synthesized)
aaagtgctgactttctgtgtcaaatgaatggattattggcttcattcttctttattttataaaggttttcttttcaagaaatgcagaactttaccaatacaatatatatcagtctaatcg

SEQ ID NO: 904481 - DNA, 120 bp, Artificial Sequence
  ENSG00000234474_9 (sequence is synthesized)
gcagtcataaaatgggtggcatgagggtggaatatggcagcagggagatctcagctggcagcaaagcatgaagtggtgattgtgtttttatggaaagcctgttttgtccagtggctgatg

SEQ ID NO: 904482 - DNA, 120 bp, Artificial Sequence
  ENSG00000234474_10 (sequence is synthesized)
gccagcagttcagaagcagtagagctagcggctctcttaacatctgtaccctgccccctatttacccagcgacaccccagcccagagcacctccaaatgtaagacttaatataaccaaat

SEQ ID NO: 904483 - DNA, 120 bp, Artificial Sequence
  ENSG00000234474_11 (sequence is synthesized)
ggaagctgctaggaggtactcagttccaggatcaacagtttttgctttaaaaagaaggtagcagttcagccccttgtttgtttttgcctacgcatttccctaccagcgggagaccattac

SEQ ID NO: 904484 - DNA, 120 bp, Artificial Sequence
  ENSG00000234474_12 (sequence is synthesized)
ccgggacaatgttttattccattgtcattatctcctacggaactaaaacaatgctctgtttggcctcccaggcaagggggatttgttccgctcttctttaagcagagtttccaactgagt

SEQ ID NO: 904485 - DNA, 120 bp, Artificial Sequence
  ENSG00000234474_13 (sequence is synthesized)
ttctgacccagtcacttgatatccagcagggatacctggtgacaattttttaaaaatctgctatcttgtgttttgtaatttcattctctgagaagtagcctagaaactcgattctcaatc

SEQ ID NO: 904486 - DNA, 120 bp, Artificial Sequence
  ENSG00000234474_14 (sequence is synthesized)
aagaggaatcacaccatggctaagggaagagggtttgctcaagctgcatgagctctataatttaaatcagccagataggatttatttatagttgttttatctttttttgttttgttattg

SEQ ID NO: 904487 - DNA, 120 bp, Artificial Sequence
  ENSG00000234474_15 (sequence is synthesized)
aatagcaaaccccaaaaggtttcataacattgtgttgttgattctcaaaccccaaaaggttgggaaccactagagctgagatgttttccattagaccagggtgtttttttctatttcttt

SEQ ID NO: 904488 - DNA, 120 bp, Artificial Sequence
  ENSG00000234474_16 (sequence is synthesized)
ttaaatacataagtaaattataaatgtagatagagatgagattgagatagagataaatgatgccaagatttctaacatttatgacagatgttgatgaacaataactcgttggagctattt

SEQ ID NO: 904489 - DNA, 120 bp, Artificial Sequence
  ENSG00000234474_17 (sequence is synthesized)
tgtcatacttgagattttccagaaaatagaacaagcccacagaatgggtttaatctgccaaagcatctccctctttacaagcatctacacaggcctccagccctaagtactttcacctgg

SEQ ID NO: 904490 - DNA, 120 bp, Artificial Sequence
  ENSG00000234474_18 (sequence is synthesized)
acaatgttatgaagcttaatccagtactagtagcagaaagacttgtttactttggagctaaggagtgagtaggacacttaagactttgttttgtccttggactcaaggcaaactaatggt

SEQ ID NO: 904491 - DNA, 120 bp, Artificial Sequence
  ENSG00000234474_19 (sequence is synthesized)
tagcatcactccagttgttgctatcattttattactcatatgtagctatgagtaacttgagaaactgaaatgtaactgctgcatataataaaaaatcaatggccaagactggctacctga

SEQ ID NO: 904492 - DNA, 120 bp, Artificial Sequence
  ENSG00000234474_20 (sequence is synthesized)
gcatgctgtgtcatgggttccagtccgtggagctccgtcatactctgttgggcatcctgtgtcttattcctctctttaggtccagtttctacataccttatctgtgttatctcaggcttc

SEQ ID NO: 904493 - DNA, 120 bp, Artificial Sequence
  ENSG00000234474_21 (sequence is synthesized)
agaagcttctccgtaacgtgggctactttcccctcatcactgggtatttatttatttatttttactgaagcctgagccctgtaacgttaccacactggccacagcttcaggagagagatc

SEQ ID NO: 904494 - DNA, 120 bp, Artificial Sequence
  ENSG00000234474_22 (sequence is synthesized)
actgctctcaagaacttacagtctagtgatggatacaaaggtacatgaaaaaataactagcaatggaaaacaaagcatgaaatgcgatgaaacgtggtcaggatgctaagtgctatgaca

SEQ ID NO: 904495 - DNA, 120 bp, Artificial Sequence
  ENSG00000234474_23 (sequence is synthesized)
tatcacactcggaacctcactttgctcatatgaaaagctggagagaatcttcccaagcttagcacatcctcataggattttggtgaaaatcagatgagatggtaggtatggaagatttct

SEQ ID NO: 904496 - DNA, 120 bp, Artificial Sequence
  ENSG00000234474_24 (sequence is synthesized)
gtcaactacaagtcaattacgccaaaaaattaagaggtcttgtcaaatcataaaattaacagaattattattaaaccttaagagggcacttgagataataaatgccagatttagtagcat

SEQ ID NO: 904497 - DNA, 120 bp, Artificial Sequence
  ENSG00000234474_25 (sequence is synthesized)
gacaaccaaccacctgttgtcaatttccattcaccaccctaagtgttaatgtatctctggtttcctaaagtattgaataagtatgaagccaatcaagctttgccatggagtacctggacc

SEQ ID NO: 904498 - DNA, 120 bp, Artificial Sequence
  ENSG00000234474_26 (sequence is synthesized)
aatcagttaccttggttgactcttagttccttcttggtatctctggttctatttaacacaatgcacccgggttctatggctccataagagatgctcaaataaagactctaatagcaaata

SEQ ID NO: 904499 - DNA, 120 bp, Artificial Sequence
  ENSG00000234474_27 (sequence is synthesized)
gacagccatctataagccaagaagaaagccctcactagaaaccaactctaatggcaccctgatcttggatttctagcccctggacaatgagaaaataaatgtctgttgtttaagcaccta

SEQ ID NO: 904500 - DNA, 120 bp, Artificial Sequence
  ENSG00000249859_0 (sequence is synthesized)
attgaaaaaaaatgtttaaggggacatttctctctcctaaactttttatgttccattgaagacctggaaaacatgttaaataaaaatgctttgccacagctgacctatgtcttctggctt

SEQ ID NO: 904501 - DNA, 120 bp, Artificial Sequence
  ENSG00000249859_1 (sequence is synthesized)
gtaccccacaacatcttatctaatgggctacagagaaacaaggagacgggagagccttgaaatggaccttcaagattacaatgtgtagctgacattgtcagttaagttgggcagatctga

SEQ ID NO: 904502 - DNA, 120 bp, Artificial Sequence
  ENSG00000249859_2 (sequence is synthesized)
cttcgctgattaagtggatgtatgagccgatcctccccagaagctgggatcagcttccccatctgatgagccagtcttggtgctctgtgttcacctggttcatctgaggagctgcatcta

SEQ ID NO: 904503 - DNA, 120 bp, Artificial Sequence
  ENSG00000249859_3 (sequence is synthesized)
taagctcttcacacctgtacccatatggactgtgggagagtttctctgatatggactgtgatgcggaaggacagaataacgggctcccagattcacaagccccaccaagaggatcacccc

SEQ ID NO: 904504 - DNA, 120 bp, Artificial Sequence
  ENSG00000249859_4 (sequence is synthesized)
aggaacgcttggaggctgaggagttcactgaggctactgcatcttgagactcaggatgaagacccagcttggggctgtcaaaggttttttgcatgtctgacacccatgactccacctgga

SEQ ID NO: 904505 - DNA, 120 bp, Artificial Sequence
  ENSG00000249859_5 (sequence is synthesized)
ccttatggctccacccagaagcaattcagcccaacaggaggacagcttcaacccattacgatttcatctctgccccaaccactcagcagcaagcacctgttacctgtccacccccacccc

SEQ ID NO: 904506 - DNA, 120 bp, Artificial Sequence
  ENSG00000249859_6 (sequence is synthesized)
ttcccccaaactgcctttgaaaaatccctaacctatgagctttgaataagatgagtacgaacttcatcgcccacgtggcgtggccggcctcgtgtctattaaattctttttctactacaa

SEQ ID NO: 904507 - DNA, 120 bp, Artificial Sequence
  ENSG00000249859_7 (sequence is synthesized)
acgacgagctgcgagcaaagatgtgccccgggacccccggcaccttccagtggatttccttgcggaaaggatgttggcggtccctgtgacctgtggagacacggccagatctgccctcca

SEQ ID NO: 904508 - DNA, 120 bp, Artificial Sequence
  ENSG00000249859_8 (sequence is synthesized)
gtcctgtggtcatagcgaatctttctaaagctctgatcagtcaagaagggggttgtatcaatcctcagaaccctgagtggaactttctacaggatttattaggagaaaaaccttcccgga

SEQ ID NO: 904509 - DNA, 120 bp, Artificial Sequence
  ENSG00000249859_9 (sequence is synthesized)
agctgcagaaggacaaatacagaatccgtgtctgggagaaacctcgtggcctggtctccattatttgagatgagttacatcttggaggcctgatcttttggccagaaggagattaaaaag

SEQ ID NO: 904510 - DNA, 120 bp, Artificial Sequence
  ENSG00000249859_10 (sequence is synthesized)
atgcccctcaagatggctgtgcctgtcagctgcatggagcttcgttcaagtattttctgagcctgatggatttacagtgatcttcagtggtctggggaataacgctggtggaaccatgca

SEQ ID NO: 904511 - DNA, 120 bp, Artificial Sequence
  ENSG00000249859_11 (sequence is synthesized)
ctggaatgacacacgcccggcacatttcaggatactaaaagtggttttaagggaggctgtggctgaatgcctcatggattcttacagcttggatgtccatgggggacgaaggactgcagc

SEQ ID NO: 904512 - DNA, 120 bp, Artificial Sequence
  ENSG00000249859_12 (sequence is synthesized)
tggctgagagggttgagatctctgtttacttagatctctgccaacttcctttgggtctccctatggaatgtaagaccccgactcttcctggtgaagcatctgatgcacgttccatccggc

SEQ ID NO: 904513 - DNA, 120 bp, Artificial Sequence
  ENSG00000249859_13 (sequence is synthesized)
actttcaatctgaaaaaatacatatcctttcagcactctggacggacttgagaactgtccttacgtgacctaaagctggagtattttgagattggagaattaagagccagtcttggtgct

SEQ ID NO: 904514 - DNA, 120 bp, Artificial Sequence
  ENSG00000249859_14 (sequence is synthesized)
ctgtgttcacctggttcatctgaggagctgcatctaccctgcccatgccatagatcctgccctgtttgcttctcctgttgctgctagtggacatgaggtaaccacagcctagttctgtga

SEQ ID NO: 904515 - DNA, 120 bp, Artificial Sequence
  ENSG00000249859_15 (sequence is synthesized)
ccttctggaagccttgcctgaccactggcctgccccttctatgggaatcactactgaccttgcagcttattatagacttatatgttttttgcatgtctgacacccatgactccacctgga

SEQ ID NO: 904516 - DNA, 120 bp, Artificial Sequence
  ENSG00000249859_16 (sequence is synthesized)
cttctcccgaggtgcgcgggtgaccttggcacatacagccatcatgatggtactttaagtggaggctgaatcatctcccctttgagctgcttggcacgtggctcccttggtgttcccctt

SEQ ID NO: 904517 - DNA, 120 bp, Artificial Sequence
  ENSG00000249859_17 (sequence is synthesized)
ccttggtgttccccttttactgccaggacactgagatttggagagagtctcactctgtggtccaggctgaagtacagtggcatgatcccaggtcactgcaacccccacctcccgggttca

SEQ ID NO: 904518 - DNA, 120 bp, Artificial Sequence
  ENSG00000249859_18 (sequence is synthesized)
agctcacgagaaaccagaaggaagtcactgtgcatagccatcccctaagaagagggcattcctgctcttccttctccatggctagaggatctacatgaactatttagattttttctacct

SEQ ID NO: 904519 - DNA, 120 bp, Artificial Sequence
  ENSG00000249859_19 (sequence is synthesized)
gggagatttaactcctctctcctatttatttatttatatatcagcatggacttgcaggccaacagagattttgagaaacacattgaaggatctgttaacacttgatatacccaataaaag

SEQ ID NO: 904520 - DNA, 120 bp, Artificial Sequence
  ENSG00000249859_20 (sequence is synthesized)
cagtggttgtgccagtgctgatctgtcttgatgtgaatgtgaacaatgggaacctgagctgagcagttaatgctagggtgacagaaactggacctctcccaagacatgtgacagagtaat

SEQ ID NO: 904521 - DNA, 120 bp, Artificial Sequence
  ENSG00000249859_21 (sequence is synthesized)
ggattgagccggtgaagccctgagggatttcatcgctgaggtggatggagaagcagctgggggccttggctgtaaggacccctaagggctgttggctcactgcaacctccactgacttcc

SEQ ID NO: 904522 - DNA, 120 bp, Artificial Sequence
  ENSG00000249859_22 (sequence is synthesized)
gaggacttcgcaggtgagcagtaacggaaatcagccccgtttattcctcccagcacctgccttatccaactccccacgctgtggctgagtcccagcctgctatggaagcatcactggact

SEQ ID NO: 904523 - DNA, 120 bp, Artificial Sequence
  ENSG00000249859_23 (sequence is synthesized)
cccattgaactctgtgcagattcgctgttcgtagacatggtacctgatggacaccaagctacgtacagcttcaaggccccttctttctttgctaataaaaaataaaaaataaaaacataa

SEQ ID NO: 904524 - DNA, 120 bp, Artificial Sequence
  ENSG00000249859_24 (sequence is synthesized)
gccgctccaatgtgttcgggaagctggctccccataacctctccccgacctggttctcagagtctagtccacttattcattgtgcctaggaagctctccctctgtccctagtggagggag

SEQ ID NO: 904525 - DNA, 120 bp, Artificial Sequence
  ENSG00000249859_25 (sequence is synthesized)
gagcccaccatctcctagtgaatgcgccacttgtagcagaaggtgcaggatgctccagctgtcttgtgaaaacatgtggagacagccttggggaaaagaggaaaaggtgaggtgagggtt

SEQ ID NO: 904526 - DNA, 120 bp, Artificial Sequence
  ENSG00000249859_26 (sequence is synthesized)
atataatcagattgaaacacctttgggacatccagaacatgagctcttcctcctttcccagccaatccgtgcttcctcctttcacctccttgaattctatgctccttccacactaaggct

SEQ ID NO: 904527 - DNA, 120 bp, Artificial Sequence
  ENSG00000249859_27 (sequence is synthesized)
gagggtgcaggaggtaaagggttagaggttaagactgagtgcttcaggtagacttgggttttcttggttttgctacttgcctcattttggacaagtcactcagcctctcaaagccttggt

SEQ ID NO: 904528 - DNA, 120 bp, Artificial Sequence
  ENSG00000249859_28 (sequence is synthesized)
ctcctcattagtaaaatagggatggtattagtgcctgcctcatgaagatgttgtttgtgttgagtgagatattggagcaaaacagcttagcaggctgccttgcactgaggaagaaatgct

SEQ ID NO: 904529 - DNA, 120 bp, Artificial Sequence
  ENSG00000249859_29 (sequence is synthesized)
ccaaaagggaagagagtttttgcaaattattcctcaattatgccatttagaattccttccatgtatcaggctattttgaagtctttcatttgctgtccccccagcctttcacctatcacc

SEQ ID NO: 904530 - DNA, 120 bp, Artificial Sequence
  ENSG00000249859_30 (sequence is synthesized)
aagtcagcctgggaaacagctgagaatcaccttcccagttgtgcccagccccttacccaaagcagagttgattcccccctcccctggacggcagcgggctagtgaaggcatgtctccact

SEQ ID NO: 904531 - DNA, 120 bp, Artificial Sequence
  ENSG00000249859_31 (sequence is synthesized)
ataccatggctactgcactgggttgaaatgtcccttgccccttcccctgcccattccccctattgctggtgaaattgcttagagcaaggactgtcttacacatcacaggatctggcatag

SEQ ID NO: 904532 - DNA, 120 bp, Artificial Sequence
  ENSG00000249859_32 (sequence is synthesized)
tctggtattaggttttccagagagaggctgttagcctgtctctcgcccactccaccactgtgaatcctggctactggggctagttccttgctaggaaaaaaaaactctagagaaatgtgt

SEQ ID NO: 904533 - DNA, 120 bp, Artificial Sequence
  ENSG00000249859_33 (sequence is synthesized)
ttgtgtgtggtgggtgggcgggggccctgaggatgcagggactgtgtctgctgtgttgtctgttataagatgtttcagacctattttgcatactggcagcgacaagttgagacttgttca

SEQ ID NO: 904534 - DNA, 120 bp, Artificial Sequence
  ENSG00000249859_34 (sequence is synthesized)
ccttctcttgagaggcaggcgggccctagctgcagcgtcaaggtctggggattctgtggctctgtagggtgaagggcactggagacctaccaggggctgggccattggagtggtgggtgc

SEQ ID NO: 904535 - DNA, 120 bp, Artificial Sequence
  ENSG00000249859_35 (sequence is synthesized)
tggggagcttccgtgggcccctccaggtccactccttgctcttctctgccttgttttgtgcccagaaggctgacctgtgtggatgcattatcagggtggatgcaacacagggctgccatg

SEQ ID NO: 904536 - DNA, 120 bp, Artificial Sequence
  ENSG00000249859_36 (sequence is synthesized)
ctctctggtatcagtttggaaggcactggcaggatgggaaggcaggcggggagtgaggtcagggggcctatccttccactgcctccctgctgctccctgactgattcagagccagtcttg

SEQ ID NO: 904537 - DNA, 120 bp, Artificial Sequence
  ENSG00000249859_37 (sequence is synthesized)
agttcaagtcagcagccgagttacaggaaagcagccagggcaatgattcagcaagtccaggcaggagtgaaccaggcaagatttcgggaggagagggctgggtcgcgtgtcctggcaggg

SEQ ID NO: 904538 - DNA, 120 bp, Artificial Sequence
  ENSG00000249859_38 (sequence is synthesized)
gagagtgggcctcccacccaggccttctcactctgactcctgttctccacgtcattgcatatggcgacatgcgggtcacgtgatcacacatccctagccgatatggaattgtgagcttct

SEQ ID NO: 904539 - DNA, 120 bp, Artificial Sequence
  ENSG00000249859_39 (sequence is synthesized)
cctgggtcttccgaggaaggatgctttcaggagtgctttggaatgaaggcagtggaggccaagagacctctaggtcaaagccaggcgggagggtcctctcaggggcccagccgacaagtt

SEQ ID NO: 904540 - DNA, 120 bp, Artificial Sequence
  ENSG00000249859_40 (sequence is synthesized)
gcatttctccctcagaggcctgaagaggcagaacaccccagaggagcctggggccaccacccagcatcactgtgggaaaacggcagcaggaaatgtcctctcgcctgcgtgctccacctc

SEQ ID NO: 904541 - DNA, 120 bp, Artificial Sequence
  ENSG00000249859_41 (sequence is synthesized)
attacttttatattgctccgagagtgataccaaatcatgatagaaaatttaaataaacaaaatagccaaattaataccagtaatcaccccagtcaaatatacccagctcacattttgatg

SEQ ID NO: 904542 - DNA, 120 bp, Artificial Sequence
  ENSG00000249859_42 (sequence is synthesized)
taaaatcttccagtacagtttctatgtacatatatatatttttaggaaggagattatattttacatgctgttttctagaacgttcttttaaaactgtatcataaacatcttgccttataa

SEQ ID NO: 904543 - DNA, 120 bp, Artificial Sequence
  ENSG00000249859_43 (sequence is synthesized)
gggcactgaggctcaggggatgaagccataggctttgagtcccagagtcagtgatggaatcaccagggagcccaggcatcgtgtctatgctctgtgccatgtgacaagtctctgccttct

SEQ ID NO: 904544 - DNA, 120 bp, Artificial Sequence
  ENSG00000249859_44 (sequence is synthesized)
cttcatcctgaagagaccctgggttcttgcctccctgggctgtggcaccatgcaaggtggccaaggtaggggccctggtgttctggcccccagctaggttctcagcactactgagtgctg

SEQ ID NO: 904545 - DNA, 120 bp, Artificial Sequence
  ENSG00000249859_45 (sequence is synthesized)
gctcatgtccaggagcaacttggacatcagctctgcctgtcacactggggtcggcgcacctggcctgttccaggacagatcacaaggctgagggacaaccatgtcgtgatgatgatgatg

SEQ ID NO: 904546 - DNA, 120 bp, Artificial Sequence
  ENSG00000249859_46 (sequence is synthesized)
acgacgatgacagcgatggcggtggtgaaagaggaagacatcccttcatttcatgtagcaatctgcttcttgctgggatttcaaatccattttcattgttgatcctgagaacaagccttg

SEQ ID NO: 904547 - DNA, 120 bp, Artificial Sequence
  ENSG00000249859_47 (sequence is synthesized)
cgagcagtcattcggtggagtctgtgaggcccagagctgaggaggaggacatgggtgtagaaacggtcgcagcccacactgctgtgcctacagctctggatcctgactgtagccagtctt

SEQ ID NO: 904548 - DNA, 120 bp, Artificial Sequence
  ENSG00000249859_48 (sequence is synthesized)
gagaattaaggccttcagtgggttgaatgaggcccaacccacattgaagaggaccatctgctttactcagtctcctggttgaagtgataatctcatctggacatactcagaaatgctgtt

SEQ ID NO: 904549 - DNA, 120 bp, Artificial Sequence
  ENSG00000249859_49 (sequence is synthesized)
taaccagctctctggaaatcctgtggcccagtcaagttgacacacaaaattaaccatcacactgcagagacacagtctatcccaatacctgtatttactgggtaacgtgcatctcagctc

SEQ ID NO: 904550 - DNA, 120 bp, Artificial Sequence
  ENSG00000249859_50 (sequence is synthesized)
accaggctggtttgattgacttggcccaaagctgccctttgagtgttgagccccagctgacccctttgatccttcacagccccatcattaaaacaaggaccctgaatcaagtgactgtaa

SEQ ID NO: 904551 - DNA, 120 bp, Artificial Sequence
  ENSG00000249859_51 (sequence is synthesized)
gaggtaaagttccgcttttatgaaatcaagggtaggcaccatcagcatgacctatcactgatgttgactttgattacctggctgctgtagtggttgtcaggtttgtccactttaaagata

SEQ ID NO: 904552 - DNA, 120 bp, Artificial Sequence
  ENSG00000249859_52 (sequence is synthesized)
agggctgggcgaaggtgatttccaaaaactcagtaactccgtgttttgagactttctcagtttttgcatcgcatgtgagggtttgttgggtgctcctaaaccctcatcatggtcattctt

SEQ ID NO: 904553 - DNA, 120 bp, Artificial Sequence
  ENSG00000249859_53 (sequence is synthesized)
cttggctgggctgttgatttaattaggtttgccttctcttgctaacgtgctcttatttatgccagtgtttgtggttctgggtgtagactttcaggaagcacagccatgaagctgcatgcg

SEQ ID NO: 904554 - DNA, 120 bp, Artificial Sequence
  ENSG00000249859_54 (sequence is synthesized)
tctgtgtgtggatgcctcatgccttttcctggtggtttgcaggcatggaagattcttctgttcatctaagctcctgactttaggcccttctagaacattagagaggagaagaaatcacgt

SEQ ID NO: 904555 - DNA, 120 bp, Artificial Sequence
  ENSG00000249859_55 (sequence is synthesized)
atctgtaccatggggatgataccatctaggtcgaaggtagttgcaggagattctcatgcacggaggcccttggccgtcatttgtttctttgtctctacaagcagagaggctgagtcatac

SEQ ID NO: 904556 - DNA, 120 bp, Artificial Sequence
  ENSG00000249859_56 (sequence is synthesized)
agatcctgaggggagatcactttctcttccctcctttcgtgtgtcatctccacctgggtgtggtgagccccaggaataatgctgtgacatcaagccccgtgaacacctcctttcacacgg

SEQ ID NO: 904557 - DNA, 120 bp, Artificial Sequence
  ENSG00000249859_57 (sequence is synthesized)
gagaattaagagtgtgggcaccctggcttcaagctcacgagaaaccaggtcgggatttaaacaatgttgggttaaagcaaagtttcataaagacagaatcaagaaaaaaagaaagagaaa

SEQ ID NO: 904558 - DNA, 120 bp, Artificial Sequence
  ENSG00000249859_58 (sequence is synthesized)
tgctgctagtggacatgaggtttgggtaactccacgcaagactgtctttacctgcctttgcaaaactttgtggtttctgctctgaatgtcagggtaaccctgtctgaggatgatcacgga

SEQ ID NO: 904559 - DNA, 120 bp, Artificial Sequence
  ENSG00000249859_59 (sequence is synthesized)
tttcattttcccttgtttgttagcgttgcggtcagccgcaagttgaaaacaaggaaccagcttgagaaggacagaataacgggctcccagattcacaagccccaccaagaggatcacccc

SEQ ID NO: 904560 - DNA, 120 bp, Artificial Sequence
  ENSG00000249859_60 (sequence is synthesized)
aggtgaggacgtgcctcgtggtctaaagcttcggcacaagggcccaactggaattccacttacggagctttacagaaattccatgctgccttcagcttcctttgccgctctgcatcatgt

SEQ ID NO: 904561 - DNA, 120 bp, Artificial Sequence
  ENSG00000249859_61 (sequence is synthesized)
ttgcagattctatcgagtctcatctggcagcttcaaggatcatccgcattctttcatcttcatggaatgtcactagattgagatgattctaagggtgaggtcaagcatttggagtttgga

SEQ ID NO: 904562 - DNA, 120 bp, Artificial Sequence
  ENSG00000249859_62 (sequence is synthesized)
actctgccttttgtagagatgctcccgtgggacttgccctgcacccagttcagcttgcttgggatgcatctgctgagcctggaagagaagtatgggttcaaggccagcggtccagcactc

SEQ ID NO: 904563 - DNA, 120 bp, Artificial Sequence
  ENSG00000249859_63 (sequence is synthesized)
ccacagacctgatctgtaatagggaagggttgcctctgtgtgggttgggagtttaatcagcaagagtggattagcagcaggctcattctgtttactccagtaggtcacggggccaagggc

SEQ ID NO: 904564 - DNA, 120 bp, Artificial Sequence
  ENSG00000249859_64 (sequence is synthesized)
aaacatacacccctcccagcccagaaactgatagctgcaaagttgcacacccttctccccaaattgacaaatatggttttcattgttggagtaataaattatgctttttaaggataaaaa

SEQ ID NO: 904565 - DNA, 120 bp, Artificial Sequence
  ENSG00000249859_65 (sequence is synthesized)
ggtggcctgggaggctgctagctctgagcgatgagtggtgccaaggtgcctgaaggagagttgcagctcaaacagcaagtggtccagctctcagaccacttgaggccacctggcatgtgg

SEQ ID NO: 904566 - DNA, 120 bp, Artificial Sequence
  ENSG00000249859_66 (sequence is synthesized)
cggccaagaccacagttggggcggggccttgagtctgattttgattggattcctagttcggctcatgcctgacagcactttctcagacaggcttccctgacctcctaagattcctgggaa

SEQ ID NO: 904567 - DNA, 120 bp, Artificial Sequence
  ENSG00000249859_67 (sequence is synthesized)
gatggacctgcattcgtattctggagctgccatattgtcagtcatgtgatcttaaccttgtgacttctagctgcaatgttcccatcatggggtagcaacatccatggcagacgctgtctc

SEQ ID NO: 904568 - DNA, 120 bp, Artificial Sequence
  ENSG00000249859_68 (sequence is synthesized)
ttgttacctcaaaaccattgcctcccactgtacagaacatcaatatgttcaaagggttggcaggaggcaccaagtctcagggaagtcagactcttatcccaacctggtgactggtttaaa

SEQ ID NO: 904569 - DNA, 120 bp, Artificial Sequence
  ENSG00000249859_69 (sequence is synthesized)
ctagatatggtaatggcaggcaagttacccagtcttgttaggaacagtatgctgaggagggagtctcttctcaaatgaaaaggcaaagccccttacaaaggaagcttattactcctttcc

SEQ ID NO: 904570 - DNA, 120 bp, Artificial Sequence
  ENSG00000249859_70 (sequence is synthesized)
tttcttcctccctagatcttggacatgatacctggatgtgcagcagccatctggtaattatgaggtgacaagtcaatagactgagatggtggagcagcaaagatagaaaagcaaaatgta

SEQ ID NO: 904571 - DNA, 120 bp, Artificial Sequence
  ENSG00000249859_71 (sequence is synthesized)
aagtgaagaatgaggtatcgttttgttcatcaaggaatccacagaaaccagaacattctgtagcagaaggacagaataacgggctcccagattcacaagccccaccaagaggatcacccc

SEQ ID NO: 904572 - DNA, 120 bp, Artificial Sequence
  ENSG00000249859_72 (sequence is synthesized)
gcagggctggcagggaggctgggaggggctggctgggtctggtagtgggcatcagctggccctcatttcttaagacagcacttctgttagctgacctacacagaagcaggtcatttcgag

SEQ ID NO: 904573 - DNA, 120 bp, Artificial Sequence
  ENSG00000249859_73 (sequence is synthesized)
atgtttgcgtcttggagccactgatagaagcagggcaagggagagtgaatgaggaaggaaggcgggagtgtgatgacgcatgcccagctttgcgcggaggcagagcacttgcctgtgtgg

SEQ ID NO: 904574 - DNA, 120 bp, Artificial Sequence
  ENSG00000249859_74 (sequence is synthesized)
gctgctagtggacatgagatcttggacatgatacctggatgtgcagcagccatctggtaattatgaggtgacaagtcaatagactgagatggtggagcagcaaagatagaaaagaaggac

SEQ ID NO: 904575 - DNA, 120 bp, Artificial Sequence
  ENSG00000249859_75 (sequence is synthesized)
ggctgtcaaaggtgcgacctgccagctgagacctccaggggtcgagcccaggcccctttgccttgttcatggcttaggccagtgcttagcatatagtaaacaacttgtaaatgtttatta

SEQ ID NO: 904576 - DNA, 120 bp, Artificial Sequence
  ENSG00000249859_76 (sequence is synthesized)
gggcctggcctttggcggtggacagtctgtggctgggtgggaacgtcaggagtggggcctgcctctttgctgggaatgccgtgcactcccagcccacttgccccatgccagcactcgagg

SEQ ID NO: 904577 - DNA, 120 bp, Artificial Sequence
  ENSG00000249859_77 (sequence is synthesized)
actcaccctggagcctttcccaagcacacatcgtggacccctccagggctgcacatgtgctttgtaagggctcttcaggtgactggagctttaagagctactgaactaagtggtaataaa

SEQ ID NO: 904578 - DNA, 120 bp, Artificial Sequence
  ENSG00000249859_78 (sequence is synthesized)
agtgaacaaagtaaccagtctggaaatgtcagtagaatggaaagaaagaacaggtgggagagttctccattttttcacggtgggaagtgagtgatgaccctgaagtgaggactcatctct

SEQ ID NO: 904579 - DNA, 120 bp, Artificial Sequence
  ENSG00000249859_79 (sequence is synthesized)
agatctccaagggctgcagctcagccagcactttacaagggtgatctggagccaaactggcctgttggctgaccataggtgactctgggtagcccatacccaggctcagcagcagttggg

SEQ ID NO: 904580 - DNA, 120 bp, Artificial Sequence
  ENSG00000249859_80 (sequence is synthesized)
gagctgcctcgatttctggttacagaattcctggaactgagtcactgcagtaattgctgtgatgaattgtgtttactttgtgtgggattccaaactgtagcagcagtgactacagctgga

SEQ ID NO: 904581 - DNA, 120 bp, Artificial Sequence
  ENSG00000249859_81 (sequence is synthesized)
cttccaaggcagagcctggcgtcagaaagctgcattgcgctaatgctgaagcctgtgggagcctgttggagagacacttggatgtttagcgagctggtgactctccttgtcatgagtaag

SEQ ID NO: 904582 - DNA, 120 bp, Artificial Sequence
  ENSG00000249859_82 (sequence is synthesized)
cttaggaccttgggcaagtcatccaaactcttctgggcaagtcattctcctgcttggatgccttgaggcagagaggcagtgaggtgaagtggtcagtgcgtcgactctgcctctagcctg

SEQ ID NO: 904583 - DNA, 120 bp, Artificial Sequence
  ENSG00000249859_83 (sequence is synthesized)
ctggggtttgaatccacctgtgtgatgttgtatgatattgacctttctggctctcagcatcctcttgtgtgaaataggagattttaacagtatctatttcgtagggttggtgtttgaatg

SEQ ID NO: 904584 - DNA, 120 bp, Artificial Sequence
  ENSG00000249859_84 (sequence is synthesized)
agttaacatatgtaaagtgaatggtacagtgcctggcttcctggcaagattgctatcaggattaaggcaggttaagcccttggcacacactaagagctcaataaatgtgagctgatgtta

SEQ ID NO: 904585 - DNA, 120 bp, Artificial Sequence
  ENSG00000249859_85 (sequence is synthesized)
ccaacttcttcgccaaattaaagttttacaagatttaacctgtcatcaagacctgggattttggtgaaggacagaataacgggctcccagattcacaagccccaccaagaggatcacccc

SEQ ID NO: 904586 - DNA, 120 bp, Artificial Sequence
  ENSG00000249859_86 (sequence is synthesized)
agtaacttgttcaacctgggaatggcagagctgggatctgaagtccgggagcctggctccgtaggcctctgtttaagccactgcatctgttgccttgtggaatgttcttagaactgtagg

SEQ ID NO: 904587 - DNA, 120 bp, Artificial Sequence
  ENSG00000249859_87 (sequence is synthesized)
atactggttcccacatggccgagagtcttctctcactagttcgtgctccatggtgatggagaagcatagttctaatctgtcattctgttgctctggagcctacacagccccccatcgcat

SEQ ID NO: 904588 - DNA, 120 bp, Artificial Sequence
  ENSG00000249859_88 (sequence is synthesized)
ctggagggagaagcccagctccttagcacagcacctgagaaataccctttacagtctggccactggctgaacattctttcactctccatgccacactgctctagccagtcttggtgctct

SEQ ID NO: 904589 - DNA, 120 bp, Artificial Sequence
  ENSG00000249859_89 (sequence is synthesized)
catgggccagaggaggcagggataagaggagtggtttcttggccaccagaatggaaacgtttttgttttcttgtgtgcttttgtggaaatggtggcagttgctcactaaagagaactaaa

SEQ ID NO: 904590 - DNA, 120 bp, Artificial Sequence
  ENSG00000249859_90 (sequence is synthesized)
acccttttactagagccccaccaggtctgaagaggatgggcgcgtgggagccattatcttgtaaaggacgctattgagaccttgctactgctgcagtgaagagcacaggaaaagccaagc

SEQ ID NO: 904591 - DNA, 120 bp, Artificial Sequence
  ENSG00000249859_91 (sequence is synthesized)
ttaaaaaacactgggcgaatcctaagaacttttcatgcagaaacacatgcatgatgagaagagaatcttcattacaacattgtttgacacagaaaaacgagactcagcttaaatgctcat

SEQ ID NO: 904592 - DNA, 120 bp, Artificial Sequence
  ENSG00000249859_92 (sequence is synthesized)
tagttagtgattggttgattaagttgtgataaaatggaacactaatacagctgtttaaaaaattagtaaaaaaaaatcagtatgtgagatgatgcacctgttaattaactcaacttagcc

SEQ ID NO: 904593 - DNA, 120 bp, Artificial Sequence
  ENSG00000249859_93 (sequence is synthesized)
agccattccacaatgtatacatcattcaaaacttcacatcatatattataaatatatacaatttttatttgtgaattaaaaattaatctaaaaaaattagtggctatatgaagtaattgg

SEQ ID NO: 904594 - DNA, 120 bp, Artificial Sequence
  ENSG00000249859_94 (sequence is synthesized)
aatcttgaagctatattaactaccaaagagcaaagtcaaccttaacaatgctgactttttaaagaatagtgcctagaacactgtgtggagtatgctaacagctacacactaatgcacagc

SEQ ID NO: 904595 - DNA, 120 bp, Artificial Sequence
  ENSG00000249859_95 (sequence is synthesized)
caccaaccccagatcagttacgtgaacttctgcattcacaaacacacttaacacactctgtggctattgcctctttactgacctgtaagtcagttctagaagacagacgatccatgaagg

SEQ ID NO: 904596 - DNA, 120 bp, Artificial Sequence
  ENSG00000249859_96 (sequence is synthesized)
cctagcctgcccatttgcattggtatctccaaggccaagctagagaaggcacacaataggctttccactaatatttgtgaatgaatgaatgaacagagagaggagttttctttccacagt

SEQ ID NO: 904597 - DNA, 120 bp, Artificial Sequence
  ENSG00000249859_97 (sequence is synthesized)
ttccttctacctgctactccttgagcatatgaggctggaatctaagccctgaggtcactcactgctctcctgggtactatccctggcctcccgtccttttccttgagcttctgtgctctg

SEQ ID NO: 904598 - DNA, 120 bp, Artificial Sequence
  ENSG00000249859_98 (sequence is synthesized)
cccggcctttccaggatgccttttggagcccctgctggccaccacatatcatgttctgaagttctacagccctctgagttggacactgaccatctgggggctcgagtcatcctcagattg

SEQ ID NO: 904599 - DNA, 120 bp, Artificial Sequence
  ENSG00000249859_99 (sequence is synthesized)
ataaccaagcaggagatagatgatttcgttctggtctctggattttggctgcattttctctcatagtaggaattattcccggaagatccaaatgctcagctttgtcctcctctcatcctg

SEQ ID NO: 904600 - DNA, 120 bp, Artificial Sequence
  ENSG00000249859_100 (sequence is synthesized)
ctgccataggggaaatgataacccattctacagctgctgaaactgaggcccagggagtgtccagagctttctgaggtccaccatgtactgttgaccaggatgagtgatagccacctggtg

SEQ ID NO: 904601 - DNA, 120 bp, Artificial Sequence
  ENSG00000249859_101 (sequence is synthesized)
acaatgttgaaggttctcattcagtagagctgggttcaattctgacttgcctgaccagctggtgcctcattttgctctaagtattggagcctccagctttattttctttcagtgggaaag

SEQ ID NO: 904602 - DNA, 120 bp, Artificial Sequence
  ENSG00000249859_102 (sequence is synthesized)
actgtgagattcagtccctccttgaagctgcgcatcgactctcctgtcctgggtactctttaggtagtggctgttctgaagtggctttggaaaccctggaatgaaactgtcatgtccaat

SEQ ID NO: 904603 - DNA, 120 bp, Artificial Sequence
  ENSG00000249859_103 (sequence is synthesized)
gctgagatttgtataaactgtcattttaactgtgattattattccttaggatttgagaaataaaatctgaggagggagcaggacctgcctcagggcctcctctccaagttgagtgaccca

SEQ ID NO: 904604 - DNA, 120 bp, Artificial Sequence
  ENSG00000249859_104 (sequence is synthesized)
cctctctgatgccagagagacactctaggtctttcgcgccctggtcattttacagaactgtggctggatgccaggcattcagagatacattcctcaatctcggtccgccttacaggatcc

SEQ ID NO: 904605 - DNA, 120 bp, Artificial Sequence
  ENSG00000249859_105 (sequence is synthesized)
atcgcatctggagggagaagcccagctccttagcacagcacctgagaaataccctttacagtctggccactggctgaacattctttcactctccatgccacactgctctgctacagagaa

SEQ ID NO: 904606 - DNA, 120 bp, Artificial Sequence
  ENSG00000249859_106 (sequence is synthesized)
gcagtaacattgatgcagagaaaatggaatactttttacaagagaccagaagacacatgaagctagaaaaaggagcccagaaaactgccacattttgcccatatagaaaagcatatcccg

SEQ ID NO: 904607 - DNA, 120 bp, Artificial Sequence
  ENSG00000249859_107 (sequence is synthesized)
ggctcacgcctgtaatcccaggactttggaagcccaagatgggtggatcacaagaaggacagaataacgggctcccagattcacaagccccaccaagaggatcaccccaggaacgcttgg

SEQ ID NO: 904608 - DNA, 120 bp, Artificial Sequence
  ENSG00000249859_108 (sequence is synthesized)
aggacactgagatttggagaggcaactacacagccagtggtgggaaagcacctaatttacatcttcatgcattgaaactgatgtcactcacctctcccccttgacctggaagagcccctg

SEQ ID NO: 904609 - DNA, 120 bp, Artificial Sequence
  ENSG00000249859_109 (sequence is synthesized)
agtccctgttgctccaaatcctctaccagaatttggtattcatgttttggatttcagcattctaatagaaggacagaataacgggctcccagattcacaagccccaccaagaggatcacc

SEQ ID NO: 904610 - DNA, 120 bp, Artificial Sequence
  ENSG00000249859_110 (sequence is synthesized)
ggactttggctctttctctgttgagatgggaccatcggaaactttttggcaggttctgatttgcattttaatgagatccttctggctgctgtgttgaaagtggactggaagtggcaaaga

SEQ ID NO: 904611 - DNA, 120 bp, Artificial Sequence
  ENSG00000249859_111 (sequence is synthesized)
tggaaagacagaccaatcaggaggctattgtggtaatccagggtattgcagtaatcctggcctggtggaagcagaggagattgtgagacatgatcagattcagaatatatctcaaagagc

SEQ ID NO: 904612 - DNA, 120 bp, Artificial Sequence
  ENSG00000249859_112 (sequence is synthesized)
gacctgggattttggtggagacagcacgaattctcctacaggctcaccacacaactggtgctgtgagggagacgaagatgagtcatgcctgtactgctctttaaacactcacaattgaat

SEQ ID NO: 904613 - DNA, 120 bp, Artificial Sequence
  ENSG00000249859_113 (sequence is synthesized)
aagctacccaggtgacacgacatggttatcctggccagaaagccatggcttttcctaatcagagcttcagtgctgtggaaacttgaagtttggagggtctgatgtctcagtctggatgag

SEQ ID NO: 904614 - DNA, 120 bp, Artificial Sequence
  ENSG00000249859_114 (sequence is synthesized)
acttgaagtttggagggtctgatgtctcagtctggatgaggatgagttccctgccattcctgggttagcagctcccatcctcttagattccaagatggtggctcatgcctgtaatcccag

SEQ ID NO: 904615 - DNA, 120 bp, Artificial Sequence
  ENSG00000249859_115 (sequence is synthesized)
gagttcaaggcaaaactgggaaacacagcaagaccctgtctcaaaagaaaaagaaaagtttccaagatggtgtagaacatcagagaggggctcttggagattatctggccatcgtcaccc

SEQ ID NO: 904616 - DNA, 120 bp, Artificial Sequence
  ENSG00000249859_116 (sequence is synthesized)
cacctgcttatagatggaaatgcatagactcagagaggttgggggacatatgggcagctatagaaatccagtggacctcaaatcccgacatttctaacctgaattaaattctctcaccct

SEQ ID NO: 904617 - DNA, 120 bp, Artificial Sequence
  ENSG00000249859_117 (sequence is synthesized)
gcatctggagggagaagcccagctccttagcacagcacctgagaaataccctttacagtctggccactggctgaacattctttcactctccatgccacactgctctaaggacagaataac

SEQ ID NO: 904618 - DNA, 120 bp, Artificial Sequence
  ENSG00000249859_118 (sequence is synthesized)
tcccctgtcattttactggagaaaggacttagaatccaagatctgggtgctagatgtgcttgaggtgttgtttcctccagatcttctcaactgacagagcagtgaaatatatgtgtgtag

SEQ ID NO: 904619 - DNA, 120 bp, Artificial Sequence
  ENSG00000249859_119 (sequence is synthesized)
ggaggatggggagaacaatttttttaacacatatgaatacttacctggcaggggagataccatgatcacaaaggtggtttccccagggtgaggcttatccattgcactcccgatgtgctg

SEQ ID NO: 904620 - DNA, 120 bp, Artificial Sequence
  ENSG00000249859_120 (sequence is synthesized)
acccctgtgattcccccaaatgtgggagacttgactgcataatttgtggtaatgggggactgcatttacacttttccctgtaaaaatttttaaaaataaataaatacataaataaataaa

SEQ ID NO: 904621 - DNA, 120 bp, Artificial Sequence
  ENSG00000249859_121 (sequence is synthesized)
aactcctgacctcaagtgatccactcactttggcctttcaacgtgctgggattacaggcgagagtcaccgcacccggacgactctgacatttttgaagagtccagaatcctgttacacct

SEQ ID NO: 904622 - DNA, 120 bp, Artificial Sequence
  ENSG00000249859_122 (sequence is synthesized)
gcctaagacagttgactatctccagacttcttgttatgtacaacatgtcctgttgtttaagtcactctaacttggattgtttcttattttcagctgaaattatttctaatagatatacag

SEQ ID NO: 904623 - DNA, 120 bp, Artificial Sequence
  ENSG00000249859_123 (sequence is synthesized)
atttccaacaaagcacagtgtagagcagcttaacatggtacctatgtgccaaagttccagagcaagagttcctgggttctaatcttggctctgtggcgtgactttagacaagtcacttag

SEQ ID NO: 904624 - DNA, 120 bp, Artificial Sequence
  ENSG00000249859_124 (sequence is synthesized)
cttctctgtgactcgcttttctcatgtataaaatgctcagtaactgtgtattgactgttgaataaaggataatagtgatactgaattcatatgattgttaggatcatcgaatggctaaac

SEQ ID NO: 904625 - DNA, 120 bp, Artificial Sequence
  ENSG00000249859_125 (sequence is synthesized)
attttataaaatgattagaacatcgcttggcgcattgtaattggctgcagatgtgcttgtcaaagtaaaattaaaagaaaagtagtcactattataggcctgggtttgcatcttgatccc

SEQ ID NO: 904626 - DNA, 120 bp, Artificial Sequence
  ENSG00000249859_126 (sequence is synthesized)
atcccttttaatctgggctggctttgtgactggttttaacaaataggctgaagcaaaagtgatttggggtgagttccagaggtcttgtgatttttgccttgacctttttggaatgcttct

SEQ ID NO: 904627 - DNA, 120 bp, Artificial Sequence
  ENSG00000249859_127 (sequence is synthesized)
gacttcatgtaaaggagcctgcactggcctactggaagccttttggagagaaagatacaaccaacagtcattaccaaccaggacgagctgacattgacagactacaaatgtacaatgagc

SEQ ID NO: 904628 - DNA, 120 bp, Artificial Sequence
  ENSG00000249859_128 (sequence is synthesized)
ccaatcagcaccacttggagcagaagaactgcctaggcctccaggtgtctgcattctgatccttgaagagttcatggacctaagttaagaacctctcctcaagagactgaatgcaggcag

SEQ ID NO: 904629 - DNA, 120 bp, Artificial Sequence
  ENSG00000249859_129 (sequence is synthesized)
agatggcttattggttcatcacaggttatgtgaactacccactattaaaaaacgaagtcacatggaagataaataacatgctcaacatcacccagccagaagtggtggagacatggccaa

SEQ ID NO: 904630 - DNA, 120 bp, Artificial Sequence
  ENSG00000249859_130 (sequence is synthesized)
taaagtaaacataagaaaggaaaacttttgtacggtgaacttgggctaaaaagaagaatgatgtctctggaacttttgctgcttataggaatgagagcaaaatcctggcatgaccatgat

SEQ ID NO: 904631 - DNA, 120 bp, Artificial Sequence
  ENSG00000249859_131 (sequence is synthesized)
ccttcaatgagcaccactgtgttgctgcattctgtctggccaatctagtctataatagttttttgttttgttttgatttttgtgtgtttttttgtttgtttgtttgttttgatggagttt

SEQ ID NO: 904632 - DNA, 120 bp, Artificial Sequence
  ENSG00000249859_132 (sequence is synthesized)
tcacggagggttcactgggatgtggctggtgttctcaacgaggtggcatttaatgagcaccctctgtgtggttggcgtgatgctgggtgcctgggggagacagatggaactaaagaggtc

SEQ ID NO: 904633 - DNA, 120 bp, Artificial Sequence
  ENSG00000249859_133 (sequence is synthesized)
cttcctggaagccgttactgttccctgccctgacgtgtgttattgtacctgtcaccattttctgatgttcccagtttacgtatctgtcaccatctacctccctataaagtgcctctgctg

SEQ ID NO: 904634 - DNA, 120 bp, Artificial Sequence
  ENSG00000249859_134 (sequence is synthesized)
ctaggaacagccagtcttcctgaattcatgataaagcaagaatactacatcaggtggtggtgtatacttccatccagaggcaaatgatatcttcttgtctctctgtaatacacaaaacaa

SEQ ID NO: 904635 - DNA, 120 bp, Artificial Sequence
  ENSG00000249859_135 (sequence is synthesized)
ttttcaaccagaaatgtagatgagtgaggattctgacgtacctagaatatttggatgactgctgcttgaatggatggccttgagacacctgaagaccctgatgtgccttctgaatcatac

SEQ ID NO: 904636 - DNA, 120 bp, Artificial Sequence
  ENSG00000249859_136 (sequence is synthesized)
cacgattcaattacatccatcatttaacaacaacaacaactctagaaggtgaaaaggcagatctcatccctgttactccaatttggccagaagtagaagtttcctctacttccagggttt

SEQ ID NO: 904637 - DNA, 120 bp, Artificial Sequence
  ENSG00000249859_137 (sequence is synthesized)
ctgtatttactggagtgtgggcaccctggcttcaagctcacgagaaaccaggtcgggatttaaacaatgttgggttaaagcaaagtttcataaagacagaatcaagaaaaaaagaaagag

SEQ ID NO: 904638 - DNA, 90 bp, Artificial Sequence
  ENSG00000249859_138 (sequence is synthesized)
agagtttcactcttgttgcctagggacaagctctgcctcccggggtcaagcgattctccccagtagctgagattacaggcatgcgccacc

SEQ ID NO: 904639 - DNA, 120 bp, Artificial Sequence
  ENSG00000249859_139 (sequence is synthesized)
gggattacaggagtgagccaccgagcctggccgcttccggtctttggatttgattttcctcaagtgtaattgaaagcaggggcctggatggccgccatagtccctcccagcttcgacatt

SEQ ID NO: 904640 - DNA, 120 bp, Artificial Sequence
  ENSG00000249859_140 (sequence is synthesized)
atagtccctcccagcttcgacattacacattcctgccaatccatttttcaggctgataacattgttcagagtttaatgggagcagggtaagatagtcaccgtgtggagcaaaaattgaag

SEQ ID NO: 904641 - DNA, 120 bp, Artificial Sequence
  ENSG00000249859_141 (sequence is synthesized)
gaaatattccagatgtcatgattttttacctgtagcccctctgctgccacacccttgtgcacatcctccagacacttttaaagaataaactctattttcagaagagttttagatttacag

SEQ ID NO: 904642 - DNA, 120 bp, Artificial Sequence
  ENSG00000249859_142 (sequence is synthesized)
gagaattgtgaaaacagttcaaaaagttctcatataccctgctcccagttttccctgttactaacgctttgcattagtgtggcacatttgccacaattaatggaccaatattgatacatt

SEQ ID NO: 904643 - DNA, 120 bp, Artificial Sequence
  ENSG00000249859_143 (sequence is synthesized)
attatttactgaagttgaaacattactttagtttttacctggtccaggatcccatctgggatcccacatcacatttagtgatcatgtcttcttagattgccctgggctgtgccgctttct

SEQ ID NO: 904644 - DNA, 120 bp, Artificial Sequence
  ENSG00000249859_144 (sequence is synthesized)
cagactctcctggtttgtgatgacattgacagtcttgagttttgatgaccagttttgactggtcaggtatttcatagaacgtacctctgtgagggttgtctgattcttcttcttattaga

SEQ ID NO: 904645 - DNA, 120 bp, Artificial Sequence
  ENSG00000249859_145 (sequence is synthesized)
agctccctgcagggacctctcagccctgcaggggagcccaggctatgtgccaggcctggccttgctgtcagctttctaagccagtcacaaacattctcctctcaactttataatggatgc

SEQ ID NO: 904646 - DNA, 120 bp, Artificial Sequence
  ENSG00000249859_146 (sequence is synthesized)
cccccagcctcctctcccctctcagggtgctcctgaggctatgagcagctggcagttccctgtctgagaggtccttcgtaccgcaggagaggcagctctcacctgaaggcctccctggac

SEQ ID NO: 904647 - DNA, 120 bp, Artificial Sequence
  ENSG00000249859_147 (sequence is synthesized)
accggtctcaactttgtgtgttaccagttatggagaattatttttagtgagttacactctgttagggccaaacacaaggaggaaagagtgactgaatactgctctgagtcagtgactgtg

SEQ ID NO: 904648 - DNA, 120 bp, Artificial Sequence
  ENSG00000249859_148 (sequence is synthesized)
gggagatttaactcctctctcctatttatttatttatatatcagcatggacttgcagatgcttagggcttatcttgtatatttccagccccagttatagaatcagccatttcttcaagga

SEQ ID NO: 904649 - DNA, 120 bp, Artificial Sequence
  ENSG00000249859_149 (sequence is synthesized)
gggtggggtgttggcagggttctccaccacgtaagcttgagggagcagggttttgtctttttctgcactgaagcccagcttctagaacagtgcctggctgcgggtgagcactcggcaaat

SEQ ID NO: 904650 - DNA, 120 bp, Artificial Sequence
  ENSG00000249859_150 (sequence is synthesized)
acctgccttagaaaggtgattaaaagatgtagagttcctggcacacgatagaatctcattaagtggtcacattgccattgtctgtactcaaccaggaattggcacactatggcccacagc

SEQ ID NO: 904651 - DNA, 120 bp, Artificial Sequence
  ENSG00000249859_151 (sequence is synthesized)
gtaaataaagttttattggaacacagctatgcccatttctttacatattgtctgtgactgctttcctgctatagtgggggagtggaatcgtgagacagacctgtgccctgccgagcctaa

SEQ ID NO: 904652 - DNA, 120 bp, Artificial Sequence
  ENSG00000249859_152 (sequence is synthesized)
tgcggtcagccgcaagttgaaaacaaggaaccagcttgaggtacgcattctcgatgccctttctaagatacttatggagacttttcttttccactccaattctgccatgctctttcggca

SEQ ID NO: 904653 - DNA, 120 bp, Artificial Sequence
  ENSG00000249859_153 (sequence is synthesized)
tggtcagagctggcttctctgtgccctccagatctcatatgtaagatggtgttactttcatttctttgtaaaaagaaactcaacccacctgtcaattgctggtatattcattagggatta

SEQ ID NO: 904654 - DNA, 120 bp, Artificial Sequence
  ENSG00000249859_154 (sequence is synthesized)
tacaactgtgctttgtaatattatagaatagaatgctgatggggttcaggaaggagtccactgtgtttgtggggcacaggatacataagattctgatttacttttccatcatggtgaatg

SEQ ID NO: 904655 - DNA, 120 bp, Artificial Sequence
  ENSG00000249859_155 (sequence is synthesized)
gcatgatcttagacaccttagttagctttattcaaactcagtttttcaatctgtaaaatggcaatgttcactatatgttgtcactctctttgatgggcagggcccacagttaggagcctc

SEQ ID NO: 904656 - DNA, 120 bp, Artificial Sequence
  ENSG00000249859_156 (sequence is synthesized)
tcgaggccttggtatctagaatggtgaaggagagctttctggaatgagtgaacatgtgtcaaatgctctgacgtcctcatttgaagggggccctgtcccctgtaccagctgagcaatgcg

SEQ ID NO: 904657 - DNA, 120 bp, Artificial Sequence
  ENSG00000249859_157 (sequence is synthesized)
agtgggccactgtcctgctaccattttatagtcagcggatctttttttttttctctttctctccagaaggacagaataacgggctcccagattcacaagccccaccaagaggatcacccc

SEQ ID NO: 904658 - DNA, 120 bp, Artificial Sequence
  ENSG00000249859_158 (sequence is synthesized)
gatttctgtttccctctgtcctcgccagcacctggtattggcagatgcatcaaaaaggatgcatttgacagctcaaccacctcagagcacttgattagcatccctgtgatggccctttct

SEQ ID NO: 904659 - DNA, 120 bp, Artificial Sequence
  ENSG00000249859_159 (sequence is synthesized)
gctgcagacatcactttgtcataacagcattttgagcaggaagaagcatcaggcaggaaaaaaggggcccttttactgtgactccctatcttctgttagggaagaaaattttccccagaa

SEQ ID NO: 904660 - DNA, 120 bp, Artificial Sequence
  ENSG00000249859_160 (sequence is synthesized)
atccccagtagacttcccctatgtctcagtggccaaactgggccaggtaagctcccagccagtccctgacagagataacaagattgtcatggctgtttcaagccagggccaattcttccc

SEQ ID NO: 904661 - DNA, 120 bp, Artificial Sequence
  ENSG00000249859_161 (sequence is synthesized)
cctgccatggactttttttgagcacattgctatctcccttgtccctgaatagaactgggaatattttaataaagaagaagagaccagtggctgatcagtaacttggcagccaacagagtc

SEQ ID NO: 904662 - DNA, 120 bp, Artificial Sequence
  ENSG00000249859_162 (sequence is synthesized)
ttctacatcagagttctgcatttgccaactttttgcatgcatgctgcctcttctatataagggatcttcccccacatctgtttgatttgcagagaatgtcagaagcggcgagtcactcat

SEQ ID NO: 904663 - DNA, 120 bp, Artificial Sequence
  ENSG00000249859_163 (sequence is synthesized)
acatgtccattgctttggggattagatccatccagctcattttggaaacggcaattctttttgccaggcagacatgagacccatttccacaccagctgctccagctgaggttcccatgca

SEQ ID NO: 904664 - DNA, 120 bp, Artificial Sequence
  ENSG00000249859_164 (sequence is synthesized)
ggttctgcgtgacagaaatcaatagaaagattcgaagggcagagcaccaaagttcctgccctgcaccatgatgtcaaagcagaatgcctgctgaggacaggtgcagatgaatacctgtca

SEQ ID NO: 904665 - DNA, 120 bp, Artificial Sequence
  ENSG00000249859_165 (sequence is synthesized)
gagagtatcacttctgcaagcagcaacttccccttcttgtcagccacgtggatgccatagtaaccttgtgtttctggctagctcaagaaattaatttataggatgtgtgcagcaggtcat

SEQ ID NO: 904666 - DNA, 84 bp, Artificial Sequence
  ENSG00000249859_166 (sequence is synthesized)
gcctgtaatcccagaacttttattaataccaccctaggcaactaaggagacccccatctctataaaaatttttaaaaaaaaaaa

SEQ ID NO: 904667 - DNA, 82 bp, Artificial Sequence
  ENSG00000249859_167 (sequence is synthesized)
ccaggcggaaattatttcaactgggtcctgagaactgggcacttttcaaggattgtcagcaaggagcaacttcccaaatata

SEQ ID NO: 904668 - DNA, 120 bp, Artificial Sequence
  ENSG00000249859_168 (sequence is synthesized)
ttttcaaggattgtcagcaaggagcaacttcccaaatatacatctaaaaagatgacaaactcatgtggaatgtggatttaaggaggaaggcctgatcttttggccagaaggagattaaaa

SEQ ID NO: 904669 - DNA, 120 bp, Artificial Sequence
  ENSG00000249859_169 (sequence is synthesized)
ggcctaagaccagacctaagggtctgtacattttccacatactttccatatctttagaggcctgaccaaagcagatcttttcctttcttctaggtaagtccaaaggcacctgcctgctgg

SEQ ID NO: 904670 - DNA, 120 bp, Artificial Sequence
  ENSG00000249859_170 (sequence is synthesized)
gcccactgttttctaactttcctaactttctgatcccttggaggtgataatcaaatattctagtctgaggcattgggatacatggtgctaggttctgagactctgcgtcaggcctgaacc

SEQ ID NO: 904671 - DNA, 120 bp, Artificial Sequence
  ENSG00000249859_171 (sequence is synthesized)
ctgcattttgtggaggtgggtgggagaatgttcccctggggaacatgcctagacacgggggacaacagttgccctcatggggaggtacctgtttactcgctgttatgggaccgctttcac

SEQ ID NO: 904672 - DNA, 120 bp, Artificial Sequence
  ENSG00000249859_172 (sequence is synthesized)
aaaaccactgcaggtgagtgagttcctgctgaatatcaggcctggtgtctctagactcattatttcccccacccaacccctatgttagttcatctcgagccacatttttattgccataat

SEQ ID NO: 904673 - DNA, 120 bp, Artificial Sequence
  ENSG00000249859_173 (sequence is synthesized)
ccaggcctggacaggccaagatcttttaacaattttaattactgaaaataataactgcattttttttaaagcccaacttttggtagagtcagcccaaaatacagtctttgtgttgccatc

SEQ ID NO: 904674 - DNA, 120 bp, Artificial Sequence
  ENSG00000249859_174 (sequence is synthesized)
tgggaactggatttggaattgttcttccatgagactgcagagcagaacggcagggccagaggtcccacgagctggtcagacccggttctgctccttgctggctgagtgaccttgggcatt

SEQ ID NO: 904675 - DNA, 120 bp, Artificial Sequence
  ENSG00000249859_175 (sequence is synthesized)
cacaggaagagcatacacatctcctgcgtcttcgtattttgtgagtgtcttgaaatgaccttgagaatctacgcaataccatgaagaagcaggagcaggaataccatttatccattggca

SEQ ID NO: 904676 - DNA, 120 bp, Artificial Sequence
  ENSG00000249859_176 (sequence is synthesized)
cagggtagcatgctcagtgtgcactgaggttgtgaattcttgtcctgacccaaagatgctgatgctgtccttatacccatttcacggttgaagaaactgaaggtgtagtaggagaagata

SEQ ID NO: 904677 - DNA, 120 bp, Artificial Sequence
  ENSG00000249859_177 (sequence is synthesized)
ctgactcagaggcacagagttagaaagcagcatgtctgggatttgaccccagacctgtctgactcagtttactattttaaactacccgattcaagttaagtttctctcctctctctctgt

SEQ ID NO: 904678 - DNA, 120 bp, Artificial Sequence
  ENSG00000249859_178 (sequence is synthesized)
tggaaatgtcccatggaccatctcgtgactcagtaagatgatgtgtgtcctctggggacagaaggaggtcctgcacagagtgttcctgcccgttgatgccctccccagatcctaacgcga

SEQ ID NO: 904679 - DNA, 120 bp, Artificial Sequence
  ENSG00000249859_179 (sequence is synthesized)
agtctgacacatagtagcctcccggtaatcttaataagcaaaaggacacatttctcaagtgatcttagcaccatttcatgcaatcaattccagcccagccctttattctggccagccctg

SEQ ID NO: 904680 - DNA, 120 bp, Artificial Sequence
  ENSG00000249859_180 (sequence is synthesized)
gtgggtccattagctgcaaaaattagtcgtgctcagttttaatgcaaatgactaagtattactttattgaattgattaataaagaagctctctttgtatgatatcaagaccatgaagaaa

SEQ ID NO: 904681 - DNA, 120 bp, Artificial Sequence
  ENSG00000249859_181 (sequence is synthesized)
gtctgtatcctggctttgagtgtttatctaagctaagcccaattgactgttgtcattctttgtctcttccttgctcagacatcagttaggtatttattgaacactcctgtgttcacagca

SEQ ID NO: 904682 - DNA, 120 bp, Artificial Sequence
  ENSG00000249859_182 (sequence is synthesized)
tccggctcctgggattagagacagctcttgactcctggttttgctctttgaaacctattggactgcttttcttttaagatacaccccccacattataggaatctatccatttctttgttc

SEQ ID NO: 904683 - DNA, 120 bp, Artificial Sequence
  ENSG00000249859_183 (sequence is synthesized)
atttctttaattgtgcattatatcagtccgtcagtcagttttcctcctgaaatatgctaagtattgagaattataatagattctattaagcaccgctaataaagtactatccttatagta

SEQ ID NO: 904684 - DNA, 120 bp, Artificial Sequence
  ENSG00000249859_184 (sequence is synthesized)
ttatacaacctgcactccaggccaagtccggtactcgtcccagctgtcggctaagcctgcactgctatggaaggacagaataacgggctcccagattcacaagccccaccaagaggatca

SEQ ID NO: 904685 - DNA, 120 bp, Artificial Sequence
  ENSG00000249859_185 (sequence is synthesized)
ttacatgcttttttcatatcagtgttcatgtagatgtttaagctcttgcagtaggtttttgcaagctagtgaacgctgccaaattatgctcgccacacaattgcagccacctattcccag

SEQ ID NO: 904686 - DNA, 120 bp, Artificial Sequence
  ENSG00000249859_186 (sequence is synthesized)
gcagtataaatatatggctgaactaacattaatacctatcactgttttatcaagtgacataatcaagataattatgaagtatccaaatattaattttcatagattaaaagcagataaagt

SEQ ID NO: 904687 - DNA, 120 bp, Artificial Sequence
  ENSG00000249859_187 (sequence is synthesized)
attagaaatctgcttatatcattagcagaaacatttttgggggccacagggtaaggaaaagaggggaaaatattgtccttcaacaaaagtaatcatattctagtaagtataataaaagaa

SEQ ID NO: 904688 - DNA, 120 bp, Artificial Sequence
  ENSG00000249859_188 (sequence is synthesized)
atgacaagcttttcagaatttccacgactaaaaattgttttagctgcagctaaaaaagcatcacataacaaaatatctcttgtttaaaatatttgctacaaaaaagtcctattctatatg

SEQ ID NO: 904689 - DNA, 120 bp, Artificial Sequence
  ENSG00000249859_189 (sequence is synthesized)
tcctgcataagaacaagtatctttatataagaaatgtgtttaatagccctctttcattctttttctgaagccctccctgttaaattgcacccaaaggggaaacattaattgaactgtaaa

SEQ ID NO: 904690 - DNA, 120 bp, Artificial Sequence
  ENSG00000249859_190 (sequence is synthesized)
gctttttttttttctgtctaaagacattaaagacatataggtggtattaaatgaacctttaactagagctctgtgagttttcaaaatagattttatttttctttaccataggccaacaga

SEQ ID NO: 904691 - DNA, 120 bp, Artificial Sequence
  ENSG00000287782_0 (sequence is synthesized)
ggtgcccgttctgactgaagtgcagccgtcttaactgaggggcgttcctggtggctaacagcttaggaaaacgagggcccaagaggcaggaaccagcttggagccacacggctgccacct

SEQ ID NO: 904692 - DNA, 120 bp, Artificial Sequence
  ENSG00000287782_1 (sequence is synthesized)
gtggagggcagagcccagtggttaagagcagggctaccgtgtccgccagtcattcatggtcctcagtgaaacaccggtccccggccctggctggggacagtaaggacatcaccgcaggag

SEQ ID NO: 904693 - DNA, 120 bp, Artificial Sequence
  ENSG00000287782_2 (sequence is synthesized)
ggacactgaagaggctgtcgaggactgcagaggcatctggtgtggccagaggcgtggtgtcaggggcatctgatcccttgcctgttcccacccagggagccggacggcacggacacaggt

SEQ ID NO: 904694 - DNA, 120 bp, Artificial Sequence
  ENSG00000287782_3 (sequence is synthesized)
ggcagcgaagcagagaacatgcaggtggaactgccagctgaaacctacacttgctacttaagaaacggaaagaccatgtctggctgggagtgcagcgtgcctgaggaccagccaccgccc

SEQ ID NO: 904695 - DNA, 120 bp, Artificial Sequence
  ENSG00000287782_4 (sequence is synthesized)
ctcctcctggcaccccacactgtccacgcagctcctgggctctgaggtcagaagctggggtgtgctgaaggggaaagtgacacggccttggacacaccactaggtctctgttcctaactt

SEQ ID NO: 904696 - DNA, 120 bp, Artificial Sequence
  ENSG00000287782_5 (sequence is synthesized)
ttagtaagacactaccctcgaagcaaatgcactcatttaaacaaatggcatagttaaaactattgactaagacctaaacatttcttctgagaaatcgaaccatagcttttccaatctgcc

SEQ ID NO: 904697 - DNA, 120 bp, Artificial Sequence
  ENSG00000287782_6 (sequence is synthesized)
tgttcaatatgggaacagattttaaagagagtaacataatcaatcctccgccccaaagaatggtccatcataccaaccatgataaagagtacacctgtttattaaaaggaaaaacagaaa

SEQ ID NO: 904698 - DNA, 120 bp, Artificial Sequence
  ENSG00000249854_0 (sequence is synthesized)
gcgccggttcagccggagaccgctgtgggaaccgcgccgaacacgctttgggcggccattttgtaactcgaatctacccccaaaaccaattcgaaaaaaagggaggaaagaaacgccccg

SEQ ID NO: 904699 - DNA, 120 bp, Artificial Sequence
  ENSG00000249854_1 (sequence is synthesized)
acagtgttctgaactgggttgaacacacaaaggatgctacaattttccacttgtatacagggtgcttcctgccctctaacattggactccaagttcttcagttttaggactcagactggc

SEQ ID NO: 904700 - DNA, 120 bp, Artificial Sequence
  ENSG00000249854_2 (sequence is synthesized)
cttgctcctcagcttgcagacagcctattttgggaccttgtgatgataggtcatcaaattttagatggtgatgcagatggcaccccacatggacaagtccttcttccgaggcctgctaga

SEQ ID NO: 904701 - DNA, 120 bp, Artificial Sequence
  ENSG00000249854_3 (sequence is synthesized)
tagaccaccctctgcatgactcttgactgccacacaaacaatgtcccctcacagcttgagcagctagtgtggttttcttcccttttccctaaaccgcaattagggtcactactccagaat

SEQ ID NO: 904702 - DNA, 120 bp, Artificial Sequence
  ENSG00000249854_4 (sequence is synthesized)
agagagaggcaatattcacatgaacaaccatggacagcacctaaactgcctatgcagctaaagggaagaaatgtggttaagagcttccccttaagccagggtgctgctcacagggactgt

SEQ ID NO: 904703 - DNA, 120 bp, Artificial Sequence
  ENSG00000249854_5 (sequence is synthesized)
cccaacttaggggcaggcacaattcatcaaaataaatatctttgtcttaaccttgctaaatataatattgttaacatgatatcagcattgtgtgtttagcccctccatggattttggtta

SEQ ID NO: 904704 - DNA, 120 bp, Artificial Sequence
  ENSG00000249854_6 (sequence is synthesized)
agcattcatgggtaataaccaagagggagtcagtcagcccaaactcaagcatgtgcagatgcaacacccataggaggaacatttacctctcccatttggagaaaaacctacagaagactt

SEQ ID NO: 904705 - DNA, 120 bp, Artificial Sequence
  ENSG00000249854_7 (sequence is synthesized)
cctggcttctgccacataacatatcaggaactcagtcctgtttctggaaacttgctttccagccccctctctttgctgataactttccttttgcttaataaatcctactctactcactct

SEQ ID NO: 904706 - DNA, 120 bp, Artificial Sequence
  ENSG00000249854_8 (sequence is synthesized)
tgggttgaacacacaaaggatgctacaattttccacttgtatacaggtccctccaagacttcgcttctcaccatgattctgacattgatatgaaaacacacaagatttcacttctcacca

SEQ ID NO: 904707 - DNA, 120 bp, Artificial Sequence
  ENSG00000249854_9 (sequence is synthesized)
tgattctgacactgatatgatcactgaatgaccgttttcagcaattcgggcctataaaagtgtgaaatagattttttttgaaagtcctattgtatattcaaaattctgtaacactagtgg

SEQ ID NO: 904708 - DNA, 120 bp, Artificial Sequence
  ENSG00000249854_10 (sequence is synthesized)
ttttcttcaccttgtagcttattatgataagcactaattttgactctgacatttcaacaggagcacttagttatagacaaccaggaatgttcaagaatgactcaggagtattttattgac

SEQ ID NO: 904709 - DNA, 120 bp, Artificial Sequence
  ENSG00000249854_11 (sequence is synthesized)
aaggtaatctttgagaccagggggtcctcctccccccagctggaggaattacacctgggcccaacttcctgaagtctcaaggtggaatatatctggtattctttgtaacatatttcaata

SEQ ID NO: 904710 - DNA, 120 bp, Artificial Sequence
  ENSG00000249854_12 (sequence is synthesized)
acagtattaaactgtccctataatattagaaaagagaagaagggtctcttcactggaagagaatattacagagtgttcagccttaagtgttttcaggtatgcttcaagtcaagcatgctt

SEQ ID NO: 904711 - DNA, 120 bp, Artificial Sequence
  ENSG00000249854_13 (sequence is synthesized)
ctctaaaggtgatttagacaatgaggttcacaggcaagtaagcccttctgcctacaagttgtggcctgttttgaagattgtttttgtttagccaagccctttatgtggcatacttatctg

SEQ ID NO: 904712 - DNA, 120 bp, Artificial Sequence
  ENSG00000249854_14 (sequence is synthesized)
agcttacttctaaacacaattagttgatgtctataaaaaaaatttgaactcgatcattcctggaaacttatttaaaatgtaaatatataactggaattcttattcaaaagttatgtactt

SEQ ID NO: 904713 - DNA, 120 bp, Artificial Sequence
  ENSG00000249854_15 (sequence is synthesized)
cttcatatttggtcccaataagagcagggtatttgttatgttttactctcagaattgacacaacttatttccatcttccactaccctcagtttctttaactatatcatctactttgtctt

SEQ ID NO: 904714 - DNA, 120 bp, Artificial Sequence
  ENSG00000249854_16 (sequence is synthesized)
ttcacaattcttaagtgagattattgatttttctttttacttcttgtcaactctttgctggtaagaatagacatataaaatcattcttgtaataaaaggtcattcctggtgaacgcttaa

SEQ ID NO: 904715 - DNA, 120 bp, Artificial Sequence
  ENSG00000249854_17 (sequence is synthesized)
tcggccgcttccggtcctgcgctgcgggcctcagaggacttggtgctcggcaaacccagagactcaaacgccatgtccggggggtggggggagcggcggtaggggagatcctcacgctgt

SEQ ID NO: 904716 - DNA, 120 bp, Artificial Sequence
  ENSG00000249856_0 (sequence is synthesized)
gcagcaaagcacgccctcctggagcaccctcggttgaatcatgcataagacaaacagccagaaaagaatctcagggaaaatcatggccaggaacctggatccatcagaaaattgaagtca

SEQ ID NO: 904717 - DNA, 120 bp, Artificial Sequence
  ENSG00000249856_1 (sequence is synthesized)
caggacaaacctcactctgaaaattggagacacaggcaaataaagaggatcccaacttaccaagagtagaagcccacatctggagcacacaggtggctgctgcgtctccaggcttcctgt

SEQ ID NO: 904718 - DNA, 120 bp, Artificial Sequence
  ENSG00000249856_2 (sequence is synthesized)
ccctgtgccatcagaaaagaaggtgtgagggaggagtgcaggagggcaagagaaaaatgtcttcccagaaactcagcgtatgtctcagtggtcagaaaaaattagctgctatgtgccact

SEQ ID NO: 904719 - DNA, 120 bp, Artificial Sequence
  ENSG00000249856_3 (sequence is synthesized)
ggtactgagaatataatgatgagcaaaaccagacactgtccccagccttacagagctcacacctgtgacatccatcctagcatatataagcagactttcagaaaattcaccctaacagac

SEQ ID NO: 904720 - DNA, 120 bp, Artificial Sequence
  ENSG00000249856_4 (sequence is synthesized)
ggctttgccttgttaggagacatcatgcgcagcccacaagggatgtgtctgctgctctaagatccagaacattgtctctgtgacccatgactacatcctactgtgtcggcaaggccagga

SEQ ID NO: 904721 - DNA, 120 bp, Artificial Sequence
  ENSG00000249856_5 (sequence is synthesized)
cttggaatgagtttcccgatggagcctgccactcactgggtcctttgtgggaatcagcacatggagaagactaagttttatggactgaattgtgcccctccccccagaaaatcatgctgg

SEQ ID NO: 904722 - DNA, 120 bp, Artificial Sequence
  ENSG00000249856_6 (sequence is synthesized)
aatcctaacccacagtgtctcaggataggactgtactgaagatatgatgattaaattaaacaagttgattaaattaggatgaggtcctatgggtgggccctaatccaaagtgcatgtgtc

SEQ ID NO: 904723 - DNA, 120 bp, Artificial Sequence
  ENSG00000249857_0 (sequence is synthesized)
agctttacaatttgttgtaagggcatcacaactgagcagcatgtttcttggtggaatggtcttgagaagcatggaaggcactgctccatgagatgagaagccatgaccagacagccacag

SEQ ID NO: 904724 - DNA, 120 bp, Artificial Sequence
  ENSG00000249857_1 (sequence is synthesized)
ttccactttaagctgtcatgtgctgtcagtgtagtcccactcatccccttctctggaaactatactctttcacccacctggccaccaggacattcgagggtcacatgacttgccaccctt

SEQ ID NO: 904725 - DNA, 120 bp, Artificial Sequence
  ENSG00000249857_2 (sequence is synthesized)
ctgttaggagtagcaaatccatatgggtctacagcaacctccatttttgccttgtcagaagaaagcattcaaccaaggggcataaggcagagtgagaaactgaggcaagttttacagcag

SEQ ID NO: 904726 - DNA, 120 bp, Artificial Sequence
  ENSG00000249857_3 (sequence is synthesized)
gaatgaaagtttattgaaaagttttaggtcaggaatgaaaggaagtaaagtacaattggaagagggcgaagtgagctgcttaagagattcaagtacctggtttgactgttgacttgggat

SEQ ID NO: 904727 - DNA, 120 bp, Artificial Sequence
  ENSG00000230679_0 (sequence is synthesized)
gacggctgcagtagcgtggaaaggggggtgacgtcccgcggacttgaggcgggcagatctggggggccccgactccccagcggccctgtagtggtgcgggcgaaactctggccccagata

SEQ ID NO: 904728 - DNA, 120 bp, Artificial Sequence
  ENSG00000230679_1 (sequence is synthesized)
aagttcaagacgggtcatattccgtggaatacggaaggagttggagtgatttcacttttctgatcaagaactgatagccattaaaactcagctccgcaatatatccccccactccaaggg

SEQ ID NO: 904729 - DNA, 120 bp, Artificial Sequence
  ENSG00000230679_2 (sequence is synthesized)
agggctgagatgatcacttcgttttctgttacggctacttttatatttttcaacattactgctggtctgtaagagaactaaaacatctgattttcctcatttccttgtaaagaggtgttc

SEQ ID NO: 904730 - DNA, 120 bp, Artificial Sequence
  ENSG00000230676_0 (sequence is synthesized)
gaccctgcgctctgccccgagggacccaccagccaggatgcagcagaagcgacgctgtgtgacttccgaggctgaggctgcagagatttgaggcatctgctctcacccagcttgaagtgc

SEQ ID NO: 904731 - DNA, 120 bp, Artificial Sequence
  ENSG00000230676_1 (sequence is synthesized)
gccactcacatgaagtgaacctttgtggaccttccagcccagctaccagcaaaacgcaagcagcgagtgtccccagtcaacgcttctctctataggagacctgtaaatggggtggcgggg

SEQ ID NO: 904732 - DNA, 120 bp, Artificial Sequence
  ENSG00000230676_2 (sequence is synthesized)
ggagcaggaggaattttctgatctcacacactgttatgagttgaattgtctccccacccaaattcatatgttgaagcccccaccttcagtactttacaaagtaatgtatttggagataat

SEQ ID NO: 904733 - DNA, 120 bp, Artificial Sequence
  ENSG00000230676_3 (sequence is synthesized)
gtagcaatggggcaggatggataatcctctcactgaggggatggtgaataactggaaacagtgaccaatctgctgccgttcaccatcttggttgcaaatatcactcccgtctcttgcatg

SEQ ID NO: 904734 - DNA, 120 bp, Artificial Sequence
  ENSG00000230676_4 (sequence is synthesized)
ggcgtggtggattggagatggctgcagattcttagtcattactctcagcaagacctggagtcttttcctcctccccttggatctgggctgactccaggactggctttcatcaacaggatg

SEQ ID NO: 904735 - DNA, 120 bp, Artificial Sequence
  ENSG00000230676_5 (sequence is synthesized)
agcgagtctccaggcccagcctgcttttaacaagacagtgaagagtggcagttaaaggtctggctggcatcagacagtgctgaattcaaacaccagctgagctgaaaacggcctgactgg

SEQ ID NO: 904736 - DNA, 120 bp, Artificial Sequence
  ENSG00000230676_6 (sequence is synthesized)
gtgaccttgagcaagcagcctgccctctctgaggctcagtttattttctggaagggagaagacggtgtctacttccaatgaccgccatgatgtttcaggttcagcccgaagggtgagcag

SEQ ID NO: 904737 - DNA, 120 bp, Artificial Sequence
  ENSG00000230676_7 (sequence is synthesized)
ccaataaagagtgccgagaacggcctctggcctgccaggtagagaaatgacctgattccttccagaagtttccagtgttcccaagctgatgaggctcctgggagatgcctccagatctct

SEQ ID NO: 904738 - DNA, 120 bp, Artificial Sequence
  ENSG00000230676_8 (sequence is synthesized)
ttttatttttaaaggagttgaggccactttgcaatcagagccttcgtggctggagctgggcgagctgaggaaggagtattaatcaaggcgctttaaggacatgcaaatcaggagaaagct

SEQ ID NO: 904739 - DNA, 120 bp, Artificial Sequence
  ENSG00000230676_9 (sequence is synthesized)
caagtgattagggtgtgatggggcctggagtccagcctatatccccatctgagaagagagagccagagtgccaggcaaggtggctcaggcccagctgggggcggcagccaaggggctgcc

SEQ ID NO: 904740 - DNA, 120 bp, Artificial Sequence
  ENSG00000230676_10 (sequence is synthesized)
atggggccaggaactgtgggttgggagcaattggaggcagagggaagggagccactccaaggtggctgaagggtccctgatgcctgcgctgtccacatggtactctggctggcttccccg

SEQ ID NO: 904741 - DNA, 120 bp, Artificial Sequence
  ENSG00000230676_11 (sequence is synthesized)
cctcccccacagctgcagaggggctgctctggcatgatcccctgcctggctgggacaggcccctcttcctaaggatacagaatggttatttgggtgagaggggcccaccggcgctgctgg

SEQ ID NO: 904742 - DNA, 120 bp, Artificial Sequence
  ENSG00000230676_12 (sequence is synthesized)
gggcgggatggcgaatgtgacgtcagcgatctgcggtatcttcagggtgacagccgtaccccccgcgtgggacccagggctccacatctatagacctgacccaaggaaagactcaggcct

SEQ ID NO: 904743 - DNA, 120 bp, Artificial Sequence
  ENSG00000230676_13 (sequence is synthesized)
gtgcacaaggatgccatctcggggactgcgtattcataagaagctgaatcaaacagtgtccaacaaggggggttgttcgagctggttatgggacgtgtttaccacggacgttcaggtcct

SEQ ID NO: 904744 - DNA, 120 bp, Artificial Sequence
  ENSG00000230676_14 (sequence is synthesized)
cctgagaaatgacgacctagacatgggaagatggttgcaatgtattgttccgcaaaggagaaaaaaagcaggttgcaaaaccctgggaactgtctgcccaccttcaaaaagtcggtcata

SEQ ID NO: 904745 - DNA, 120 bp, Artificial Sequence
  ENSG00000230676_15 (sequence is synthesized)
tatctagaaaaatctggaagggtagccacaaaaacatcatcagtaggtactttggagaggttattgttactttccccttttatgttaatttttgtgcaataaacatatatgtatttgtaa

SEQ ID NO: 904746 - DNA, 120 bp, Artificial Sequence
  ENSG00000275119_0 (sequence is synthesized)
tatattgactattctaggtctttggttctccttataaattaataatcaacttgtaaatatttgcaaaatgtttgcaaaactctataaagaagattaaaaatagaaggttagtggtttcct

SEQ ID NO: 904747 - DNA, 120 bp, Artificial Sequence
  ENSG00000275119_1 (sequence is synthesized)
ggagggagggagagaggagggttgaataggtgaagcactagggattttttagggtggtgaaaatatcctgtacaatattgtaattgtggccaaatgacactttgccaaaacgcattgaac

SEQ ID NO: 904748 - DNA, 120 bp, Artificial Sequence
  ENSG00000275119_2 (sequence is synthesized)
tcaaagagtgaaaatccatataaattttaaaaatcatttaagagtttgggagaatgtcaggatgaaatgcaaaatgtgacaatataatttctttattatttatttatttttatttttatt

SEQ ID NO: 904749 - DNA, 71 bp, Artificial Sequence
  ENSG00000275119_3 (sequence is synthesized)
atttttctgcatccttgccagcatctgtaaattaattgggttatatggtcatttttatgatattgattctt

SEQ ID NO: 904750 - DNA, 120 bp, Artificial Sequence
  ENSG00000248107_0 (sequence is synthesized)
gcttaggagaccaaaaccaaactcaaagaccatgaccacactaatatccgctggtgtggttattatgcaatgaaaactacaaatacatatggaccaaaagcctactaaaacttgaagaaa

SEQ ID NO: 904751 - DNA, 120 bp, Artificial Sequence
  ENSG00000248107_1 (sequence is synthesized)
ataataaattaaagaaattccaagctttaccataaacagctgtaacttaaatcttaaatcccttggacacactttacaggaggaagtcaatgggatgaagccagagcagaagatgactga

SEQ ID NO: 904752 - DNA, 120 bp, Artificial Sequence
  ENSG00000248107_2 (sequence is synthesized)
cctggaacaactaatctcgggagtctgtgcttcctctagagtaccagtcatttggaaagttatgtgtgttacccttggcactggatgattgcaacagtaagtggcaactgggatatttct

SEQ ID NO: 904753 - DNA, 120 bp, Artificial Sequence
  ENSG00000248107_3 (sequence is synthesized)
ccagagcttctacaacaacaaattgagagtttcacaagcacctggggcccagcagacgttgggaagcctattctgggactcgcctccatctaaatgatttgaaaattcagctcctgaaca

SEQ ID NO: 904754 - DNA, 120 bp, Artificial Sequence
  ENSG00000248107_4 (sequence is synthesized)
cagccagattgctgtcagcaattcgaataagttttaacaacactggatccacctcaaggttatttcttcaatatcatacagaaaatattgtaaatgaaggaaatatgatgcaaagtggta

SEQ ID NO: 904755 - DNA, 120 bp, Artificial Sequence
  ENSG00000248103_0 (sequence is synthesized)
aatgtgcatgctgaggaggcctcacgccagtttaggctctccagtatctcccactgagctactctgtccccgacttagaggaccaggagaagggggagctggaggctggagcctgccaca

SEQ ID NO: 904756 - DNA, 120 bp, Artificial Sequence
  ENSG00000248103_1 (sequence is synthesized)
ccgtggctcgtctcactctggatggtggtggcaacagagatggcagtgtggctggagttttaggagggcggcctgagccgtaggagggggctggagcagtaacatggcggcctgagcggt

SEQ ID NO: 904757 - DNA, 120 bp, Artificial Sequence
  ENSG00000248103_2 (sequence is synthesized)
gaggttgtagcctgaagatggcacagctctgtgattcatctcctgcggttgtggcggccacggtgatggagactgcagctcaacaggagtggtaggagggtacccgtggaggccaagtag

SEQ ID NO: 904758 - DNA, 120 bp, Artificial Sequence
  ENSG00000248103_3 (sequence is synthesized)
taggagccttggagggtgggtaggtgcatggagggtgacagcagcgctggttccgttggcgtcggcgctaatggtggcagcagcagcaagtctaggggccaggaagggggagtaggagag

SEQ ID NO: 904759 - DNA, 120 bp, Artificial Sequence
  ENSG00000249279_0 (sequence is synthesized)
ggattgccttgagtacaccctcacagcgctgctcgtggggcaagcatgcctgggagatgacctggggcaccacgccctgcctatctcagacaaggaactccaggcagcagtggcgaagct

SEQ ID NO: 904760 - DNA, 120 bp, Artificial Sequence
  ENSG00000249279_1 (sequence is synthesized)
aagcagctccatccttaaggggcggaggccggctcatatttgcctattagggccgtgggacgccgaggttctgctgggtccctcctggaaatagatccttcccagccagcacccgaagtc

SEQ ID NO: 904761 - DNA, 120 bp, Artificial Sequence
  ENSG00000249279_2 (sequence is synthesized)
agctggacatcattcaccactgggaacagcatattgttcctggaagaggcaaaagcctagggcttcaagatgccggggctttaagaaaccaaggcatgacctcaagtgatttgccggagg

SEQ ID NO: 904762 - DNA, 120 bp, Artificial Sequence
  ENSG00000249279_3 (sequence is synthesized)
tggcctcggtggcagcagtcattgaagaaaggaagacagctgcccagccagtctgacagaccatacacagacagccctgttcacagggaggtaagtgtctctgcacaacccgcggccacc

SEQ ID NO: 904763 - DNA, 120 bp, Artificial Sequence
  ENSG00000249279_4 (sequence is synthesized)
acggcggcttcaggaaaggctcccacattcccagagcctctgctgcggctcactgacaaatcagcccctcaataatcttattgtatgttttcaaaataattctcagtaatgccccaagaa

SEQ ID NO: 904764 - DNA, 120 bp, Artificial Sequence
  ENSG00000249279_5 (sequence is synthesized)
acttattaatggtaaggcaggcttcggaaatgagaatcatgcaaataatgatttcattttttacccgtgtttttaagggactgagatatctttgtcatttacctgggatttacagggacc

SEQ ID NO: 904765 - DNA, 74 bp, Artificial Sequence
  ENSG00000249279_6 (sequence is synthesized)
gacaaatatgatttaattaaacacacaacctatagaacgggagaacacttttgcaatctatccatctgacaaag

SEQ ID NO: 904766 - DNA, 120 bp, Artificial Sequence
  ENSG00000249279_7 (sequence is synthesized)
aacagtgcttcactgtcacatccaggatctggaaagttgtatttgagtgctgggtttgatatacgttaactagaagataaaacatgccgactatggctagcagacacagtgccccatcat

SEQ ID NO: 904767 - DNA, 120 bp, Artificial Sequence
  ENSG00000249279_8 (sequence is synthesized)
gcctgaacaaaaagatattttataccagaagtgcggaacaggattttttgcagttttgctagaatccttgtcacagtgcttaataatgttacatcatttagataataatttttctagttt

SEQ ID NO: 904768 - DNA, 120 bp, Artificial Sequence
  ENSG00000249279_9 (sequence is synthesized)
tcagtttacctaatagtacgtgttcaattattttatggagctttttcaatcagaacaacatcgtacctgtcttttcagtgtattattcccaaataaaagtttaacctcttttcggaatct

SEQ ID NO: 904769 - DNA, 120 bp, Artificial Sequence
  ENSG00000249275_0 (sequence is synthesized)
gtgatcacagctcactgcagccttgaaatcctggtctcaaataatcctctagccttggcctcccaaagtacaagaattacaggcaatggtcactgcacctggcctggatccacttttaaa

SEQ ID NO: 904770 - DNA, 120 bp, Artificial Sequence
  ENSG00000249275_1 (sequence is synthesized)
ctgcacctggcctggatccacttttaaatttgtcaagaggttatgaccaagaaaatttagaatgatttatcattctaaatatataaaaatattatgtattctcatgcaatgtatcgactc

SEQ ID NO: 904771 - DNA, 120 bp, Artificial Sequence
  ENSG00000249275_2 (sequence is synthesized)
tacaaaagagatgccctcccccacagacacacacacactcacactcactcttatctttacttccactaaaacacactcctgtctcaattttaactgtagttggtatctccagtagaaaga

SEQ ID NO: 904772 - DNA, 120 bp, Artificial Sequence
  ENSG00000249276_0 (sequence is synthesized)
ggtaatgccaacatttatggggaaactgaaggaaatggagcagggaagggagcttagaaactgcagccacagatcggggagcagtaggacagagcggttctgagcaacccaggcaagagt

SEQ ID NO: 904773 - DNA, 120 bp, Artificial Sequence
  ENSG00000249276_1 (sequence is synthesized)
taataggaactaggatggaacctacatatgacacttatttgaaaagaaacccatcttcaaactatagatttactgagaaaaggctagtactctgttggactttggaagacatgacttttg

SEQ ID NO: 904774 - DNA, 80 bp, Artificial Sequence
  ENSG00000236204_0 (sequence is synthesized)
cacttttcaaataagagacctgggggattttagaacagggctttcaaggtaatgaaggaagagaatcttctttggacttc

SEQ ID NO: 904775 - DNA, 120 bp, Artificial Sequence
  ENSG00000236204_1 (sequence is synthesized)
ggagtctctaccagtgagaaggctacagaatcatgggcagataaggtctcgctctgtggctatagctcactgcagcctcaaattcctgcgctcaagtaatcctcccacctcagcttccca

SEQ ID NO: 904776 - DNA, 120 bp, Artificial Sequence
  ENSG00000236204_2 (sequence is synthesized)
agtagatgggactacagataacattcttctaccacgaagagggagattgactattttatcagtcattaattttgctccaaataaccccgtgattttggatgattgattatgggaatgctg

SEQ ID NO: 904777 - DNA, 120 bp, Artificial Sequence
  ENSG00000236204_3 (sequence is synthesized)
gtagatgggactacagctccaaataaccccgtgattttggatgattgattatgggaatgctgctttcactgtacatccaagctctcctggcctcagcggataagtatatgagagcacagt

SEQ ID NO: 904778 - DNA, 120 bp, Artificial Sequence
  ENSG00000236204_4 (sequence is synthesized)
actgcgcaagcgccacgcgcaggcgcaaaaggaactcgcaggccagtgctgctggtgccggagtccggaagctgacggcgttgcctaggctggattgcagcggtgcgatcaggactcatt

SEQ ID NO: 904779 - DNA, 120 bp, Artificial Sequence
  ENSG00000236204_5 (sequence is synthesized)
tcctcccacctcagcctcctgagtagcaaggctacagagacctgggggattttagaacagggctttcaaggtaatgaaggaagagaatcttctttggacttctttttgctccagatgcgg

SEQ ID NO: 904780 - DNA, 120 bp, Artificial Sequence
  ENSG00000236204_6 (sequence is synthesized)
cagcagtgcactttctccaaccttacagtcatacgcaagttgtggttctcctgtccagcctgccaccactggaccatccctgtatacattccttctccctttgaagaaatccacaaaaga

SEQ ID NO: 904781 - DNA, 120 bp, Artificial Sequence
  ENSG00000236204_7 (sequence is synthesized)
aaaagcaaaatactgacaagttttcaaagccatgatttacaggaatgaattctgaaaagcaagtggctaacatccgagttcatcatcaaataatatttctaaagcaccctctagtgtctg

SEQ ID NO: 904782 - DNA, 120 bp, Artificial Sequence
  ENSG00000236204_8 (sequence is synthesized)
gccccaagccagatgattcaacgcctggagaagctacagactttttaaaagtaaaatagactcatgtctgctcatgagaagcaagtcagcgtcatttaggatgccttaggaatgtctctc

SEQ ID NO: 904783 - DNA, 120 bp, Artificial Sequence
  ENSG00000236204_9 (sequence is synthesized)
acaagtacaaacactaataatattgaatgcaatttaaattccattttaaaatagataatagggtttaaaataacatgttgaaaattacactggaattagcaaaatttaaaatcttaggaa

SEQ ID NO: 904784 - DNA, 120 bp, Artificial Sequence
  ENSG00000236204_10 (sequence is synthesized)
gaaaaatcctaatttgtatgtgaaaatgttttgaactgaggaaaattaagactagcaagagtagataggggttgtctagtaggaatgttagacccatcagccatctgattatgctgcgac

SEQ ID NO: 904785 - DNA, 120 bp, Artificial Sequence
  ENSG00000236204_11 (sequence is synthesized)
tgatactagcgtgtagttttcacccagtaaattatcaagtggtgcagtagaaaaagcatggtatgtagaatcataagactcatagtctggggtcacctctactactcacttggccatgtg

SEQ ID NO: 904786 - DNA, 120 bp, Artificial Sequence
  ENSG00000236204_12 (sequence is synthesized)
gtttggaacacatcacaaaagatttatgagccttcgcttcttcacatctaaaatcgtgattattttgccaactccatggaattgtttagactttagaggattacataggatacaatggac

SEQ ID NO: 904787 - DNA, 120 bp, Artificial Sequence
  ENSG00000236204_13 (sequence is synthesized)
tagttccttgaacaagtacttgcccccaaaatgttaccattttttctggttgtgtgactgattttgcaatcagcaatttaataataatgcattcaacaggtttataatatgcattcaatg

SEQ ID NO: 904788 - DNA, 120 bp, Artificial Sequence
  ENSG00000236204_14 (sequence is synthesized)
tgactcttgcatatatctcataaaaacaaatttgaatatttttctcattttatcactcacatatctttgagaatgggatcatagttttattttgataatgaagtaatagagtcaattcct

SEQ ID NO: 904789 - DNA, 120 bp, Artificial Sequence
  ENSG00000236204_15 (sequence is synthesized)
gaacaggctagttgactttaatgagaaatacccatttattcactcattcatttcattttcaactcttaaatccataatggccccttcactaactgcactaactggggttcttatattaat

SEQ ID NO: 904790 - DNA, 120 bp, Artificial Sequence
  ENSG00000236204_16 (sequence is synthesized)
aagatggaccagatgcttctatcacctccaaaaaatctttgtaggcagagcaataaagagtactgaatcattttaagaagtcgcatagacaatgacttttgaccatggaaggactgggct

SEQ ID NO: 904791 - DNA, 120 bp, Artificial Sequence
  ENSG00000236204_17 (sequence is synthesized)
tgatcaagcaaattctatttcaaagttttacttgcaaggttatttattactgtgtggaatctcactcctgtggctggggtcaagaaaaatggggacacaggtgtctgcctatttgcacag

SEQ ID NO: 904792 - DNA, 120 bp, Artificial Sequence
  ENSG00000236204_18 (sequence is synthesized)
agaatatatatgtaatatatagcttttttttttttttttactttaacatatgttcccacatagccaaatgattcaactcagtacagttaacaacttagaaagggattcattgaattttcc

SEQ ID NO: 904793 - DNA, 120 bp, Artificial Sequence
  ENSG00000236204_19 (sequence is synthesized)
aggtctcttcatggccagagttgctttgtaaggagaccctaaatgtggaataatcaacatgttaaagtaatctagatgtttatgatttgataactctttagtgcattgtttaacaacatg

SEQ ID NO: 904794 - DNA, 120 bp, Artificial Sequence
  ENSG00000236204_20 (sequence is synthesized)
ggctggtctcaaactacagtggctcaaacaatccttccagtactgcctcccgaggtgctgggattataagcgtgagccacagcacctggccacagagtacattttaaatgtcttaataaa

SEQ ID NO: 904795 - DNA, 120 bp, Artificial Sequence
  ENSG00000236204_21 (sequence is synthesized)
acgtgacagaaagtctaggtagaaagcagctatctttgatgacagaatgataaagaaacccacctttctcccaacaatccataaacaccctgaggagatgtcaccttctatgtaatatca

SEQ ID NO: 904796 - DNA, 120 bp, Artificial Sequence
  ENSG00000236204_22 (sequence is synthesized)
cttggatactgaaaattctccatgaactggaagaatgtatgcttcagtgtggtaaacagaatttctaaaatgacctcttcctccctgagatatcctgacataataccctaaatttgtaaa

SEQ ID NO: 904797 - DNA, 120 bp, Artificial Sequence
  ENSG00000241469_0 (sequence is synthesized)
aacagcagcgtagctgaacatcttacggatggcccagggctccaaaggctcgtttcctaagtgagagagagcctggctgaagctgtattaccattcattctccagcctccgaagtctcaa

SEQ ID NO: 904798 - DNA, 120 bp, Artificial Sequence
  ENSG00000241469_1 (sequence is synthesized)
agcatcacttccaccatactctaactgtcaagacaaacacaaaggcccagacattacatgtaaatggaatcatacaatatgtgatcttttgtgactggcttctttcacttagcataacgt

SEQ ID NO: 904799 - DNA, 120 bp, Artificial Sequence
  ENSG00000241469_2 (sequence is synthesized)
tttcaaggtttgttcgtgttgtagcagaaactgccagactgtcttctgaagtggctataatatttacactcccatcagcagtgtagaaggggtctcactatgttgtctggagtgctgtgg

SEQ ID NO: 904800 - DNA, 120 bp, Artificial Sequence
  ENSG00000241469_3 (sequence is synthesized)
tggagtggagtggctattcacagagcctgttctgctgggacacagaatcacttgctccatctcatacattgatgatgattaatttgtatgtgtaccttccaaaaaagatggttgtgtttg

SEQ ID NO: 904801 - DNA, 120 bp, Artificial Sequence
  ENSG00000241469_4 (sequence is synthesized)
aatggaggccttctggacaggaaaattgcaaagtacaattaacatttgagtctgtctgagtcatgaagaaatggagattactgaaaataattcattttggtatcttcttacatcctgaga

SEQ ID NO: 904802 - DNA, 120 bp, Artificial Sequence
  ENSG00000241469_5 (sequence is synthesized)
gactaatctttccaagttcatctgaggctcctcttctccatgacaacctcatccagggatttcttcctgtcctggtgttttatgacataatcacatccttcctgagataatgagcacaca

SEQ ID NO: 904803 - DNA, 120 bp, Artificial Sequence
  ENSG00000241469_6 (sequence is synthesized)
gatgcatagaaatagatctggattagctgagcttgaaacagtccatctcacacacacacaaaagaatttcagatacagtgaacccacatgttgaagctttctagtataataaaaatttca

SEQ ID NO: 904804 - DNA, 120 bp, Artificial Sequence
  ENSG00000241469_7 (sequence is synthesized)
actgttctgttgaatcatctgcctgattggaggctacagaaaagatgtcatcttaggagtgcttgctctgagtgaggctcatcttcaaatctgaatgaccacaaggagatttgattatac

SEQ ID NO: 904805 - DNA, 120 bp, Artificial Sequence
  ENSG00000241469_8 (sequence is synthesized)
atgtgaacacctcagaaggcacagcccacccagaaggcagacaggtcaggctgctttttcttcattgcttggattcaatcctccgggcggctcaggctcaaacataacttaagcatgatt

SEQ ID NO: 904806 - DNA, 120 bp, Artificial Sequence
  ENSG00000241469_9 (sequence is synthesized)
aaactttagaagaagctgccaggaagactgtgaaatcttcatgcccaaggatccctaaaattaggagcaacaaccacttggctcagacggtttatggaggcaaaggtttggatgggatta

SEQ ID NO: 904807 - DNA, 120 bp, Artificial Sequence
  ENSG00000241469_10 (sequence is synthesized)
gagatttctaaatgtgagttcgtgtcctctgccagaccaccttacttccaccattcctcagcaaatcaagaaaaacaggagaaaagacatgcctttccataagttaaatctattctgttt

SEQ ID NO: 904808 - DNA, 120 bp, Artificial Sequence
  ENSG00000241469_11 (sequence is synthesized)
taattctatattatatctgctgtacaacttcttttgtttgtaacaccatattgttgctagtaactggaaattaattttcacatgcctcagcttagaaaaataaaaagcagccctgcatca

SEQ ID NO: 904809 - DNA, 120 bp, Artificial Sequence
  ENSG00000241469_12 (sequence is synthesized)
gagagtgcgtgctttggattcaagactgggaatgaggggaccagaaacctattctgtggctgtttcttgttaggactttcctaagcctctggaaaagtgcaaagtacaattaacatttga

SEQ ID NO: 904810 - DNA, 120 bp, Artificial Sequence
  ENSG00000241469_13 (sequence is synthesized)
ccttcctccaaacctcacacacttttggaggagatcactttttttaaagtgcatggaaatgttttgaaacagtgaaatctataatgataggtttcataattctaacatccacaccatatg

SEQ ID NO: 904811 - DNA, 120 bp, Artificial Sequence
  ENSG00000241469_14 (sequence is synthesized)
aaggcagccagctaacccttcagccaggaagagggtcctcatcagaacctggccgtggtggcatccagatcttgaacctccggactccagactgtgagaaaataagtgtgttgtttaaac

SEQ ID NO: 904812 - DNA, 120 bp, Artificial Sequence
  ENSG00000241469_15 (sequence is synthesized)
gagaacagcatgtgggaaaccagggaaactgtccccatgatccagtgacctcccaccaggtccctcccttgacacaacagagattacaatttgagatgagatttggatggagacacagag

SEQ ID NO: 904813 - DNA, 120 bp, Artificial Sequence
  ENSG00000241469_16 (sequence is synthesized)
tgtgtcagaaagtgaatacttgtatatttccgcacggttagagctgagctttccgagcaaattttactgggacccggttgaaagacaggtcttggaagtgaaatgatgactgactagatg

SEQ ID NO: 904814 - DNA, 120 bp, Artificial Sequence
  ENSG00000241469_17 (sequence is synthesized)
tgctgtggtggagtggagtggctattcacagctgagtttgcagagtaaaccactaccctgaaatctggaaaggcaggtgcacccacagatcctcagctgagatccaattacctgaaatag

SEQ ID NO: 904815 - DNA, 120 bp, Artificial Sequence
  ENSG00000241469_18 (sequence is synthesized)
tcttggaatggactgtaaaagtctggaatcaagactttgtgtttcctctctaacatgtaaagagcttagaagttgtcgctattgcccttacaacaaaatgaagctggacaaactgaaaat

SEQ ID NO: 904816 - DNA, 120 bp, Artificial Sequence
  ENSG00000241469_19 (sequence is synthesized)
ctctgtaacattgttgcttttgaaccttattggatttgtggcaaactgggtgcttttgggacatgagtctcctaccactcacctgcctctgagctctcctctgaggccggtcactgccca

SEQ ID NO: 904817 - DNA, 120 bp, Artificial Sequence
  ENSG00000241469_20 (sequence is synthesized)
gaagggatgcacctgtcttctgtcctgtggtctctgggtagcccctgggtcagcattttgggtgctagcatctgatgcaactgctacagttgctgatgagaaagtagctaccctcctcca

SEQ ID NO: 904818 - DNA, 120 bp, Artificial Sequence
  ENSG00000241469_21 (sequence is synthesized)
ctccacccctgccgcccaggccctgccactcctgctaacctgtcaggctacattttcaattactggctttgaaaaatgtccaggtggattaaatcaatgaatgcgatgagctgaacacaa

SEQ ID NO: 904819 - DNA, 120 bp, Artificial Sequence
  ENSG00000241469_22 (sequence is synthesized)
taatcacatccttcctgagataatgagcacacaattgcctggatacctgaaggaatggagacagcggcagaaaacactgcagagagatacagtgaacccacatgttgaagctttctagta

SEQ ID NO: 904820 - DNA, 120 bp, Artificial Sequence
  ENSG00000241469_23 (sequence is synthesized)
ctggtgttttatgacatgtaagtgaagacccacatgctgctttgtatatttttgtcaaaagaggaaaaactgtcttgtcgaggacaggaactaaattatatgcagtatttctttagaagc

SEQ ID NO: 904821 - DNA, 120 bp, Artificial Sequence
  ENSG00000241469_24 (sequence is synthesized)
ccattcagcatcttaaagtgttaggtacagagaaggccctccataaaaatttgctaaattgaaactaggagcaaacgttaagtcaagatcaaactcaggaataactatggctattaatca

SEQ ID NO: 904822 - DNA, 120 bp, Artificial Sequence
  ENSG00000241469_25 (sequence is synthesized)
tcttttacccagaatttaaataatttcataagtattgcctgaaatctttttctttatgtcaatagtagcatgttttactggtggtaggatgtctggggtgaatatcaaagatctggccca

SEQ ID NO: 904823 - DNA, 120 bp, Artificial Sequence
  ENSG00000241469_26 (sequence is synthesized)
agttgttcctgggagctgggggttagggagtaggagagaaagatatttaactcttccaaatacctagtggattaggatcccacagggaactactgaaaatgcaaatggggctggggtagg

SEQ ID NO: 904824 - DNA, 76 bp, Artificial Sequence
  ENSG00000241469_27 (sequence is synthesized)
atggggctggggtaggggatcacttgaagccagtagttcaagaccagcctagccaacctggtgaaaccctgtctct

SEQ ID NO: 904825 - DNA, 120 bp, Artificial Sequence
  ENSG00000241469_28 (sequence is synthesized)
gtgtgagtggcttatccagaatactgccatctcgaggaagttcttgagataggtcccgttactgatctatgtgctagagtgtcttctgtaaggcttgttacaggcatgtgtgcgtaaagg

SEQ ID NO: 904826 - DNA, 120 bp, Artificial Sequence
  ENSG00000241469_29 (sequence is synthesized)
cttcttcttcatggcctcccctgactcactctgttttgttacagtttgacataagtgactccattttggcaccagcacctttcacacatggtagggaaagaaaggtaggaacccacagag

SEQ ID NO: 904827 - DNA, 120 bp, Artificial Sequence
  ENSG00000241469_30 (sequence is synthesized)
aacaactgaacagaattcttaaacagatgcctccaaatttttactcaaatacggcttagggaaaaccatccttccatccttgtaggtatcatcagtgtttattctcagaaatgttttaat

SEQ ID NO: 904828 - DNA, 120 bp, Artificial Sequence
  ENSG00000241469_31 (sequence is synthesized)
tcctccattcagaatcagcagaccttcactctgggttactcacataaaagcaccacatagctcatttcttactgaaattagagggttgccctccacgaagagcattagggcttattcgtt

SEQ ID NO: 904829 - DNA, 120 bp, Artificial Sequence
  ENSG00000241469_32 (sequence is synthesized)
tatccatcagacacagacagctcttgaggtatctgaagcctgtctcttcaggtacacaaagcattacagcattaagtcagcagagcgaaggaccatgattttgcaatgaaaataataatt

SEQ ID NO: 904830 - DNA, 120 bp, Artificial Sequence
  ENSG00000241469_33 (sequence is synthesized)
gaaactggcatgggtccgcctgaggagaaactcggagagatgggccctccagaacaaatacgtttattttgcaacagcaggggatggcaatacaggatatgtgtgccatgacagatcaca

SEQ ID NO: 904831 - DNA, 120 bp, Artificial Sequence
  ENSG00000241469_34 (sequence is synthesized)
cgcacatccaagggggtcagggcaaaggggaagcttttaaagacaaagagaagtccatatggagagtgcgtgctttggattcaagactgggaatgaggggaccagaaacctattctgtgg

SEQ ID NO: 904832 - DNA, 120 bp, Artificial Sequence
  ENSG00000241469_35 (sequence is synthesized)
gtgttgccagagtagactctgtagagttcttccttcttcaagtcactgtatttaattcaaacacgagctggtgcatcctgcaggcagagcctacagcttgagccaatgtactggtttcag

SEQ ID NO: 904833 - DNA, 120 bp, Artificial Sequence
  ENSG00000241469_36 (sequence is synthesized)
gagaagcaagggagaaactgtctatttcatcccagagtgggagaatgtcacctgtggcatcacatgcagaagattccagattctggattcttttgcgtttgctttagttctgctaaagtc

SEQ ID NO: 904834 - DNA, 120 bp, Artificial Sequence
  ENSG00000241469_37 (sequence is synthesized)
agggataaatgaactccattgggccgcttttataagggcaccaatcccattcatgagggctccgtcctcaagacctaatcacttcctaaaagccccatctcttaatactattgcactagg

SEQ ID NO: 904835 - DNA, 120 bp, Artificial Sequence
  ENSG00000241469_38 (sequence is synthesized)
aaatttcccacaataactgcaagtgactaaaaagatgctgtgtctttcatccctgtctctgtcatcatcatgctttcttaactaacataatttttgagaaatattgggaaaatgccaaca

SEQ ID NO: 904836 - DNA, 120 bp, Artificial Sequence
  ENSG00000241469_39 (sequence is synthesized)
aagaaatataatttgaaattccaccatccagagaaaatcacttttcctagggaatagagacatcttccaacttatgcaatttatacaatcatctgtttttcaaaggtcttaagtaaatca

SEQ ID NO: 904837 - DNA, 120 bp, Artificial Sequence
  ENSG00000241469_40 (sequence is synthesized)
tatttcatatacattgaaatgctttcgatttgcttctgcggctttttgtatcaccattcatggtgttacagttcctttttaaaatgatttaaaaaaaaaaaaaagacaaggtctttgaaa

SEQ ID NO: 904838 - DNA, 120 bp, Artificial Sequence
  ENSG00000241469_41 (sequence is synthesized)
ttattgagccacccatgcctagccaccaactttgtactaggggtgctgtatctttccctttacgccttcaaatagactgctagcctctgtccttatcagcactttccagttgaaattaga

SEQ ID NO: 904839 - DNA, 120 bp, Artificial Sequence
  ENSG00000241469_42 (sequence is synthesized)
aggcagtaaaggcgaaatgacacaaacaacatggaattagcgtggctgacacacagagatcacagcaggtaatggagacaggtgaggacccagtgaggggcatggggaaggggctgtgga

SEQ ID NO: 904840 - DNA, 120 bp, Artificial Sequence
  ENSG00000241469_43 (sequence is synthesized)
gctctgaagtgcatttcccacatttagccttgcactggatgtacaaatgtccacatctctaaaattaaattatgtaccttatggagcaatttgcataaaacaattttgtatctgttgtgt

SEQ ID NO: 904841 - DNA, 120 bp, Artificial Sequence
  ENSG00000241469_44 (sequence is synthesized)
gtttcataacctgcggtacatctgtacatttatagattttaaaaaatagtatatatcctgctttgtaacatgctttttttgttggcacatgcctctttatgtccataaataaatacagac

SEQ ID NO: 904842 - DNA, 120 bp, Artificial Sequence
  ENSG00000241469_45 (sequence is synthesized)
gtcataattgccgatgactacaaaaccctctgctgtgtgtatctataagaattatttaaacagtttccagtgagtggatcttctgggtgtttccagttcggcttataatggacgcctcgg

SEQ ID NO: 904843 - DNA, 120 bp, Artificial Sequence
  ENSG00000241469_46 (sequence is synthesized)
gttcccagggttgtgttctttggtctgcctctggtttcagccatagctgcaatgaacatggtcatgagagctcagactcacatggaaaagctagcaaaggggcttttccgatgctaaaga

SEQ ID NO: 904844 - DNA, 120 bp, Artificial Sequence
  ENSG00000241469_47 (sequence is synthesized)
gccttgaggcaaaggagagtctttctccttgctcctagacaaccttaaaccagtggggacggactggtgaataaatgcttcaggagaccttgtgagtgtttcgcgagagggcgctgtgga

SEQ ID NO: 904845 - DNA, 120 bp, Artificial Sequence
  ENSG00000241469_48 (sequence is synthesized)
gttgagtcccagcagcccaaggcatcagcctcactaagtttgcttttccctcttccctactctctccctcctgcttcccaggatcatgttggaaataaactacctgtatccagacaagtc

SEQ ID NO: 904846 - DNA, 120 bp, Artificial Sequence
  ENSG00000241469_49 (sequence is synthesized)
ctaatctctcctgttctgagccaagatagggactctgataaacaatgatgtggacaatatccttgaatgcacatctctgccgtggatctagttatttccttaagacaaatctctagaaat

SEQ ID NO: 904847 - DNA, 120 bp, Artificial Sequence
  ENSG00000241469_50 (sequence is synthesized)
gctcattgctgatctggttatttccttaagataaatctctagaaatgttcactgctgagtcaaagggcatggacttttaaaaacaagctcaaacaagtgctctgtttaacagagctctta

SEQ ID NO: 904848 - DNA, 120 bp, Artificial Sequence
  ENSG00000241469_51 (sequence is synthesized)
tcatgaagctctcttccatcaagaagcaaaacattgatactaacttcctgtagtcttttaagccaccctctccagaggccccagaaatccctccccgttgctgtcctgcaaacacgatga

SEQ ID NO: 904849 - DNA, 120 bp, Artificial Sequence
  ENSG00000241469_52 (sequence is synthesized)
atggaatagttggaatgcacacccactgtctctcaaatagacagctcactttattgcctggtagttattaagaatgagtagtaattttgctgtagaaaagactacttatagggaaagtaa

SEQ ID NO: 904850 - DNA, 120 bp, Artificial Sequence
  ENSG00000241469_53 (sequence is synthesized)
gaaacgagagaaacattcactcataatttaacacaaggaaataaaaccaaccagaagataaaatgtctgtttctcaaacagctcaatccttatatcactagtagcactggagctcttaat

SEQ ID NO: 904851 - DNA, 120 bp, Artificial Sequence
  ENSG00000241469_54 (sequence is synthesized)
tatagatagtaaagcctctggatgttattttttacccaacatcagtggtaacagacgcataaggaactgctcagagtagtacagaaggaactctaatgcgcaggcgcttcggtggggcag

SEQ ID NO: 904852 - DNA, 120 bp, Artificial Sequence
  ENSG00000241469_55 (sequence is synthesized)
cagcaaatgtgcgtgatctggctaaagagggaacccagaaagggtgtcagctccaaatatggattagccacagcctttccacgagggggaatggtgaccatatgtttgcaagtataattt

SEQ ID NO: 904853 - DNA, 120 bp, Artificial Sequence
  ENSG00000241469_56 (sequence is synthesized)
acagaaacatatatgtgattattttttaaaataagtgaactatttataaatcttagccaatgaatctttgtgacatctcctttcaggaagcctaattttaaaaggtatataaaaccgttc

SEQ ID NO: 904854 - DNA, 120 bp, Artificial Sequence
  ENSG00000241469_57 (sequence is synthesized)
tcctggccaacacttgcaggttctgcccgcttggatggcttccctaaaaaaggaaaaaacaaacaaaaccaaccttccttggctgtgtttgccatcaacatcaagaactgcagcaaaggc

SEQ ID NO: 904855 - DNA, 120 bp, Artificial Sequence
  ENSG00000241469_58 (sequence is synthesized)
atttcctttttagttttaatgagccttgaaatccgaaatttcggaaaccattggtctagataatcttcattcaacaaatattcattcagctgcctgttcttatgtcatacaaagggaaaa

SEQ ID NO: 904856 - DNA, 120 bp, Artificial Sequence
  ENSG00000241469_59 (sequence is synthesized)
taactttttccacaggattatgaaaataattaaatgaactaatattcattgcgcatggcaccatgttaagcgctttacatatgcaaattattttatttaattcttgcaaaaaccctaaga

SEQ ID NO: 904857 - DNA, 120 bp, Artificial Sequence
  ENSG00000241469_60 (sequence is synthesized)
caaagacaaccaacaaaaagcatggagggtgggattcctgccaggtcacctctggcataggctgccataattaacctagtttttactctgctaagaaaatgactggtgtttgcagggagg

SEQ ID NO: 904858 - DNA, 120 bp, Artificial Sequence
  ENSG00000241469_61 (sequence is synthesized)
ttctgatttgacagaacggtgtaagatatattcactcaagtgagaaaaaaagaaattgaggtctgtttgtatttcctttaggctataagcttcttaagcagagactgtcacgtttttact

SEQ ID NO: 904859 - DNA, 120 bp, Artificial Sequence
  ENSG00000241469_62 (sequence is synthesized)
ccttagtggactgtaacggtagcataatattctgcatctaattagtcatttcattaattttattggaaccagaatggtgactactggcctaattagaaggaatcgcccttggcttctagg

SEQ ID NO: 904860 - DNA, 120 bp, Artificial Sequence
  ENSG00000241469_63 (sequence is synthesized)
cttaaagataagctcttgtcgttcagagagagaaatgcactttacaaaagacgtgactatcagaggcacaaccctgttctctctgctttgcatttctcatttccttcaggttcaatcctg

SEQ ID NO: 904861 - DNA, 120 bp, Artificial Sequence
  ENSG00000241469_64 (sequence is synthesized)
gctttgggatagctggtgtcagttttatcaatgtatgattgggttttttaaattatgaaactatttgaatatacatatgtgtgtatgtgtgtgtatatatgtggatatgtgtgtgtatat

SEQ ID NO: 904862 - DNA, 120 bp, Artificial Sequence
  ENSG00000241469_65 (sequence is synthesized)
atatatatatatattttttaatcaaaagacattgctgtcagtaaagatgacaattgtttaagagcctttaccaaatttataatctacataatggtgaatattcaaactgactttcctcaa

SEQ ID NO: 904863 - DNA, 120 bp, Artificial Sequence
  ENSG00000241469_66 (sequence is synthesized)
aacacttcttagctaatttttcaagcttgcccaagagtgctcatgacaagcctctgccaacacccaggggagttctgttgtgtccactacaattccaaagctaaaagtagaaggagattt

SEQ ID NO: 904864 - DNA, 120 bp, Artificial Sequence
  ENSG00000241469_67 (sequence is synthesized)
cattttcacacctcagagagtttattttgctgttctcagaggccagttcctgcccccagtttcccataacaattaattataaaaaggtgatttcccaaggaacaaatggttaagcacaaa

SEQ ID NO: 904865 - DNA, 77 bp, Artificial Sequence
  ENSG00000241469_68 (sequence is synthesized)
agaaggggtctcactatgttgtctggagtgctgtggtggagtggagtggctattcacaggagatgacagctccgtgt

SEQ ID NO: 904866 - DNA, 120 bp, Artificial Sequence
  ENSG00000233379_0 (sequence is synthesized)
gccctgtggaacattccggtgggggactctggccagcccgagcaacgtggatcctgagagcactcccaggtgaaattcatcttagcttctgggattggctcctactcaacatgcaagcac

SEQ ID NO: 904867 - DNA, 78 bp, Artificial Sequence
  ENSG00000233379_1 (sequence is synthesized)
tcactctgttgccaggctggagtgcaatgatgccatctcgactcgccgcaacctccacctcccgggttccagtgattt

SEQ ID NO: 904868 - DNA, 120 bp, Artificial Sequence
  ENSG00000233379_2 (sequence is synthesized)
aggcatgagccactgcgcccagcccatacataagaattttaagtccagcatgctaccataatataaaaaacatctaggaaagagaatcagatattttcgttgagtgcttacaatgtatga

SEQ ID NO: 904869 - DNA, 120 bp, Artificial Sequence
  ENSG00000233379_3 (sequence is synthesized)
tttagcatcattatctcatttaatttgcaagcaatttttaagataggcatcatggaacacctacaacatgcaaagcagttttcattcatgacttcatttaatcttcccaatgaatttatg

SEQ ID NO: 904870 - DNA, 120 bp, Artificial Sequence
  ENSG00000233379_4 (sequence is synthesized)
aagaaagtattattttggcaaatacacacatgacaacactaaaactcaaattagagaattttctaaagatcaaacaagtttaaagtgccaaatttaggattccaactatttctctgtgtc

SEQ ID NO: 904871 - DNA, 120 bp, Artificial Sequence
  ENSG00000233372_0 (sequence is synthesized)
aaagccacctctgtctggaaggttctcacggggagagagctggtcctaccacgggagctccagagcagagaatagcagctgaaggcctctccactgaacgctgaaacctcaccttcactg

SEQ ID NO: 904872 - DNA, 120 bp, Artificial Sequence
  ENSG00000233372_1 (sequence is synthesized)
gctgctttataattagcatttataggtcaccgtggctatgatggcttctgcaatttttcaggaactttggccagctcctgtgcagttcaaacttgttggtaccactgatccttcaactga

SEQ ID NO: 904873 - DNA, 120 bp, Artificial Sequence
  ENSG00000233372_2 (sequence is synthesized)
tgtcaccattttctgtacacacatcctatgaaatgccatgaattccagctatgcttgtgcagaacgaacctgttacttggttgttccccactgccaatcaccttccccacaccttagacc

SEQ ID NO: 904874 - DNA, 120 bp, Artificial Sequence
  ENSG00000233372_3 (sequence is synthesized)
atccacttccctaatctatgaatattcctaaggcttatcttcagggaggcagatttgggagctgttctccttcctcctcactctgtgccctggcaaataaatcttttctcttttgcaaaa

SEQ ID NO: 904875 - DNA, 120 bp, Artificial Sequence
  ENSG00000233376_0 (sequence is synthesized)
tatgcccctgcaccgatacggccttccatgaagcccggcccagaaagctttggagtctggttacatctctgccatgcaggcctggccttcccaggacaagagccccctgcagcttccaga

SEQ ID NO: 904876 - DNA, 120 bp, Artificial Sequence
  ENSG00000233376_1 (sequence is synthesized)
ccttctcatcctccaagtcccatcttagtcatcttcctccgggaaacagaacgccggggtcctcctctgtccccccatagcccccaaagctttacatcatcatcgtttagtcagatggta

SEQ ID NO: 904877 - DNA, 120 bp, Artificial Sequence
  ENSG00000233376_2 (sequence is synthesized)
attagactggttgtgtgcctcctccactggactgtgtcccatctaccattgtattcccaggacccacttgatataaataggctggatgaataactgagtgaataaaggatggaaatcgtc

SEQ ID NO: 904878 - DNA, 120 bp, Artificial Sequence
  ENSG00000258949_0 (sequence is synthesized)
cagatctcctccgggagtggtgggcagctactgtgaaaggcctggttcaaaaacctcacagcggttgttttcagagttgtccctcctgtgtactctcaaagccccagaatgaagcaaagc

SEQ ID NO: 904879 - DNA, 120 bp, Artificial Sequence
  ENSG00000258949_1 (sequence is synthesized)
atcctcccttttcaaactggcactcttccccaaccttgaggaccactaggcactttgtttttaaagccacagttacttttatggagaagtattgttatgaaaaaagggaggcatctgagg

SEQ ID NO: 904880 - DNA, 120 bp, Artificial Sequence
  ENSG00000258949_2 (sequence is synthesized)
agtggaaacagagaaatgagtgactgagatcagtgtcttattttgaccatcttttccaagtgctgcatcctcccaaacacaacatgaactcaacacttaataaagctgcagtcctacgtg

SEQ ID NO: 904881 - DNA, 120 bp, Artificial Sequence; identical to SEQ ID NO: 848007
  ENSG00000278198_0 (sequence is synthesized)

SEQ ID NO: 904882 - DNA, 120 bp, Artificial Sequence; identical to SEQ ID NO: 848008
  ENSG00000278198_1 (sequence is synthesized)

SEQ ID NO: 904883 - DNA, 120 bp, Artificial Sequence; identical to SEQ ID NO: 848009
  ENSG00000278198_2 (sequence is synthesized)

SEQ ID NO: 904884 - DNA, 120 bp, Artificial Sequence; identical to SEQ ID NO: 848010
  ENSG00000278198_3 (sequence is synthesized)

SEQ ID NO: 904885 - DNA, 120 bp, Artificial Sequence; identical to SEQ ID NO: 848011
  ENSG00000278198_4 (sequence is synthesized)

SEQ ID NO: 904886 - DNA, 120 bp, Artificial Sequence; identical to SEQ ID NO: 848012
  ENSG00000278198_5 (sequence is synthesized)

SEQ ID NO: 904887 - DNA, 120 bp, Artificial Sequence; identical to SEQ ID NO: 848013
  ENSG00000278198_6 (sequence is synthesized)

SEQ ID NO: 904888 - DNA, 120 bp, Artificial Sequence; identical to SEQ ID NO: 848014
  ENSG00000278198_7 (sequence is synthesized)

SEQ ID NO: 904889 - DNA, 120 bp, Artificial Sequence; identical to SEQ ID NO: 848015
  ENSG00000278198_8 (sequence is synthesized)

SEQ ID NO: 904890 - DNA, 120 bp, Artificial Sequence; identical to SEQ ID NO: 848016
  ENSG00000278198_9 (sequence is synthesized)

SEQ ID NO: 904891 - DNA, 120 bp, Artificial Sequence; identical to SEQ ID NO: 848017
  ENSG00000278198_10 (sequence is synthesized)

SEQ ID NO: 904892 - DNA, 120 bp, Artificial Sequence; identical to SEQ ID NO: 848018
  ENSG00000278198_11 (sequence is synthesized)

SEQ ID NO: 904893 - DNA, 120 bp, Artificial Sequence
  ENSG00000258940_0 (sequence is synthesized)
cttaaaggggccggcgctctacctggcgaagccacccagccctggtagtggagaggcttgggactagaggatgagattcggcctcatactccgcgctgtcgtgtgagccgcacaacccca

SEQ ID NO: 904894 - DNA, 120 bp, Artificial Sequence
  ENSG00000258940_1 (sequence is synthesized)
aagaccagggctatgtcccaagggcacccgcctcgggcggccgcggtggcggcggcggcgagacttctcctagaggcgtctcggcgcaacccccacccccccgacccaggggccgacgcc

SEQ ID NO: 904895 - DNA, 120 bp, Artificial Sequence
  ENSG00000258940_2 (sequence is synthesized)
aggcccagccccgacacccaaggctttccttccgcagcctcgctggagcctgctgtctgcgccctgcagaagtcctgacggcggcgtaccccgggagaccccggcagccccgagaagcca

SEQ ID NO: 904896 - DNA, 120 bp, Artificial Sequence
  ENSG00000258940_3 (sequence is synthesized)
gccgccgccgtcattccagtcagaaaaatggcctgcggggcacgcgccggtgcgccctgccaaccacgtccggactttggactttagacaggaaggcgtcccggctcagctgtggtttgg

SEQ ID NO: 904897 - DNA, 120 bp, Artificial Sequence
  ENSG00000258940_4 (sequence is synthesized)
tcagagtttaacctgtcccacgcaagagaacctcgatctggtttcctcgcttacctgagtcacctgggcacttgttaggcccagctgtcttcagttccattagcggccagttacccaaat

SEQ ID NO: 904898 - DNA, 120 bp, Artificial Sequence
  ENSG00000258940_5 (sequence is synthesized)
cgtgctgttttcctccgagaagaggagctaaaagtagcaccttgccttctaaatttaggactctatttttaggaccgtcgaataaagtgccaagtgctggatttgttcgtaggagacggt

SEQ ID NO: 904899 - DNA, 120 bp, Artificial Sequence
  ENSG00000258940_6 (sequence is synthesized)
tttagctgacgtaggtgtaaaggataacccatctcatatatatgtcttccttgccagcatgatcattctcattatattctgccttctcactcaagtactttggtgaagcaactcaaaaag

SEQ ID NO: 904900 - DNA, 120 bp, Artificial Sequence
  ENSG00000258940_7 (sequence is synthesized)
gagcagatacttcctcctaaacaaatcacccaaaagaactcaatagatgaacaaaatcttaaatccttaggaaattttcctgatgtaacctcttgtagcaacgaactgttatgccattta

SEQ ID NO: 904901 - DNA, 120 bp, Artificial Sequence
  ENSG00000258940_8 (sequence is synthesized)
aaaaatcaaaaactggcccaagttcacagcaagtgatttttcaggaccaaaatgcggcctagcttttcagaactcaagattgctatttctcctttgccacatcagcctgaggagtttcag

SEQ ID NO: 904902 - DNA, 120 bp, Artificial Sequence
  ENSG00000258940_9 (sequence is synthesized)
gaaatgctaatatcagagtagccaaaattgcttagtaattctccattgttaaggtataaggtattacacaactttcatacgtgttagacactgtgtattaaaattatgtgaatagttcat

SEQ ID NO: 904903 - DNA, 120 bp, Artificial Sequence
  ENSG00000258940_10 (sequence is synthesized)
taaagtcaaaacaagcataatcaaacttttatctttagaatttcacagactcctagaacaacgtgtatgcctcaattagaacattgtattactcaataaaaattcttaaatgtgtctgaa

SEQ ID NO: 904904 - DNA, 120 bp, Artificial Sequence
  ENSG00000258940_11 (sequence is synthesized)
cttaaaggggccggcgctctacctggcgaagccacccagccctggtagtggagaggcttgggactagaggatgagattcggcctcatactccgcgctgtcgtcctcgctggagcctgctg

SEQ ID NO: 904905 - DNA, 120 bp, Artificial Sequence
  ENSG00000258942_0 (sequence is synthesized)
aagctagtaaggttcatgaagaaataatgaagactttttccaggtaccatgtgactttgtccacttatgctcacacccaataacaaagaagaaaaaaaggagaaaaggatcagaaagaag

SEQ ID NO: 904906 - DNA, 120 bp, Artificial Sequence
  ENSG00000258942_1 (sequence is synthesized)
aagatgaggcagtggcagcagaagaagagatagctggaaaagcttccgtcttttgttgccttatatacaccaatccgaccttgctcaactctgcctgagctgcatagtcacctctaagct

SEQ ID NO: 904907 - DNA, 120 bp, Artificial Sequence
  ENSG00000258942_2 (sequence is synthesized)
ttcccaaaccacagatgattggaggccaccccagaattactgagtctgaatctgctgcagttgtgcccaggtgtgtgtgcagtgtttaagttccccatggaccattctaatgcacaacca

SEQ ID NO: 904908 - DNA, 120 bp, Artificial Sequence
  ENSG00000258942_3 (sequence is synthesized)
cttataaacaatgaatccaagtcgctgagaagttaaaaacttgctcagggtaacacgagacagaatctgactctgtcgcccaggctggagtgcaacggcgcgatatcgactctgcaacct

SEQ ID NO: 904909 - DNA, 89 bp, Artificial Sequence
  ENSG00000258942_4 (sequence is synthesized)
tcgccaggaagatgaccatcttttactgcccaacgacatctttctaccaatgtgaacagagactagcagcacagtgatcacctgcagat

SEQ ID NO: 904910 - DNA, 120 bp, Artificial Sequence
  ENSG00000258942_5 (sequence is synthesized)
atgtgaacagagactagcagcacagtgatcacctgcagatagacctggctttatctgtacataacaccaaaagaaaaaacctggattccagaaggaaataaagattttcagtccctgcaa

SEQ ID NO: 904911 - DNA, 120 bp, Artificial Sequence
  ENSG00000258943_0 (sequence is synthesized)
tgtggtagaagcccttttggctgcttgcatcagtggttacaaggaagaaatcagggatacatttgcaataaagagaaataatctgctgggcacggtggcttacatctgtaatcccagtac

SEQ ID NO: 904912 - DNA, 72 bp, Artificial Sequence
  ENSG00000258943_1 (sequence is synthesized)
aagacaaaattagctgggcgtgagccactgtgcctggcctttaaaagcttttcagttgaaaggtaatcttgg

SEQ ID NO: 904913 - DNA, 120 bp, Artificial Sequence
  ENSG00000258943_2 (sequence is synthesized)
cctggcctttaaaagcttttcagttgaaaggtaatcttggaacacaggtgggttccagttgcttggagcatgaggaacacctgattgaatgtcctaacgtcagacgtgtgtctgcaagtg

SEQ ID NO: 904914 - DNA, 120 bp, Artificial Sequence
  ENSG00000258943_3 (sequence is synthesized)
cttcctagaaggggtgggcctttaatgactgcacctgcacagtgctatcaggtccttattgtgggaccgaatcactgacatcctaatgaaaaaattagctaggccatttgcaggtacaag

SEQ ID NO: 904915 - DNA, 120 bp, Artificial Sequence
  ENSG00000258943_4 (sequence is synthesized)
agcacaggtggtccttgtgctcttttttgattcgtttgaaggtaggtgtgatttgccttcaggacttcatcagcaacaataggatttgaataagtggataggctgctgtatgtggttgtg

SEQ ID NO: 904916 - DNA, 120 bp, Artificial Sequence
  ENSG00000258943_5 (sequence is synthesized)
tacaatttttaaagggctcttgtacacagggtggggtgtgggcagggagaacaaagcatggtccccagtgatgtttagtaaaaatatgtctagaaagttaataaaactctggtctgtgct

SEQ ID NO: 904917 - DNA, 120 bp, Artificial Sequence
  ENSG00000258943_6 (sequence is synthesized)
taaggcaataacaacatgagtctctggcatgaatctgtgtcctgtttagaggacaggttgtttgtaatcaacccttattctgtcatctagagttccgtgttttaagcaatgaagacagaa

SEQ ID NO: 904918 - DNA, 120 bp, Artificial Sequence
  ENSG00000258944_0 (sequence is synthesized)
cagattcctacttaaggaagagaggggctcctcattgtcactgtacagagcaggctggtcagctttacacaggtgtcagatgaaccgtcacagccagatttgcatgttggcctcaggagg

SEQ ID NO: 904919 - DNA, 120 bp, Artificial Sequence
  ENSG00000258944_1 (sequence is synthesized)
gcttcaaggtccaacatctcgacattgctcttcttgaaaacagcagcctgtggttatgtcagagatgcaaacactgctgaaggctacagagagaagctggtaactggctgccgttgaggc

SEQ ID NO: 904920 - DNA, 120 bp, Artificial Sequence
  ENSG00000258944_2 (sequence is synthesized)
taaacactggccctatgaactattttggactggggctggaactagccttcatccctactgccagatgggctgagcgtgaggctggaaacgtgaacagctggcacagcagaagctggagta

SEQ ID NO: 904921 - DNA, 120 bp, Artificial Sequence
  ENSG00000258944_3 (sequence is synthesized)
ctggtcgacgcagtccctgccagggtccctgggctgggcggtgggtgctgcagaacgacaggggagagagaaggtggtgaggaagctctgtgtatgctgaaaattctcacctgccatttc

SEQ ID NO: 904922 - DNA, 120 bp, Artificial Sequence
  ENSG00000258944_4 (sequence is synthesized)
atttccttcaaaggaacacagcattataactgccagattgaaaacgaagtgcacttaccctgtaaccttttaaccatacgtacaaactctatgagggatgatgatttctacctgtttctt

SEQ ID NO: 904923 - DNA, 120 bp, Artificial Sequence
  ENSG00000258944_5 (sequence is synthesized)
ggcctcacttcaacatgcagtggtcctcccattattatttgtggcctcagcccactgaatagctcttcctagactcccaaatatttattgactggataattaaacatctcttgaagttaa

SEQ ID NO: 904924 - DNA, 120 bp, Artificial Sequence
  ENSG00000258945_0 (sequence is synthesized)
atacttatgtacacttacatacgaaaatggatgtttaaatgcaggtagatgagtatttgtcctaaaatgtgatcttccttgttgatgctggagcttgaggagctatccctatgctctgct

SEQ ID NO: 904925 - DNA, 120 bp, Artificial Sequence
  ENSG00000258945_1 (sequence is synthesized)
gccaccttggaaactcagaaggatttacaacggagttctgcacaggggaagctggaagcagcattcccacagcctcttctggggctggcaaggctcagagaggcatttgaaatggctatt

SEQ ID NO: 904926 - DNA, 120 bp, Artificial Sequence
  ENSG00000258945_2 (sequence is synthesized)
attcggttgaagatgtccctgtgtggatctcagtttgcgctctgagcgacgtcctggctcatttgggtgtgacggtgagagcagaggcgctctgctgacagttttttcttgtctaagctt

SEQ ID NO: 904927 - DNA, 120 bp, Artificial Sequence
  ENSG00000258945_3 (sequence is synthesized)
ccattccgcatccacaatatgactcgccttccactccagttaacttcttggaagtccagagcacttagtcaaagctgtttacaaaatgcaaagcatctgggcggccaaggcagaggctcc

SEQ ID NO: 904928 - DNA, 120 bp, Artificial Sequence
  ENSG00000258945_4 (sequence is synthesized)
tgtgttctctatgtaaccgcctccaaaaaagctgggaaatttcgcggatcaaaatgtaggcgcttaaagctgaccctctgctgtcaatgttgggacttagatacattttttgcatcgtca

SEQ ID NO: 904929 - DNA, 120 bp, Artificial Sequence
  ENSG00000268713_0 (sequence is synthesized)
ctaaggcatgcatgttgttttaggtgtgtttgagatgcctgaagaacatcagtgtatccccctaatttctgtcatgttactcaaaccagacacattgtggccatttctttttcctttatc

SEQ ID NO: 904930 - DNA, 120 bp, Artificial Sequence
  ENSG00000268713_1 (sequence is synthesized)
attcccacgtccggccactgccccattcctttttgttccgtagtagaccctcaatatatatgtgtgtgttggtaaatggccatacacagcagggtattttttattattattttcagttcc

SEQ ID NO: 904931 - DNA, 120 bp, Artificial Sequence
  ENSG00000268713_2 (sequence is synthesized)
ctcagcgcgtttaccacaaagctgtgcatataggtggcaccatatatggcgtaccttgacctcgaagagaatctacatggacttttatggacctacgtacacaattttagaaatcataat

SEQ ID NO: 904932 - DNA, 120 bp, Artificial Sequence
  ENSG00000268713_3 (sequence is synthesized)
aaatgaatgctggagtcctcaagaccccttccagatttgatttgctaggaagactcacaggactcagcattttgtcatactcaatggctatgatttaccacaccgaaagaatccagagca

SEQ ID NO: 904933 - DNA, 120 bp, Artificial Sequence
  ENSG00000268713_4 (sequence is synthesized)
aactcagcaaaaggctcaaacccaagtccagaggaaaccaggcacaatctttgagaatcttaatgaaatcacacaggatgtgcttcattgaagctccatctgggacttaaaacaacacac

SEQ ID NO: 904934 - DNA, 120 bp, Artificial Sequence
  ENSG00000268713_5 (sequence is synthesized)
ctagcacataccacaattgtagacctccagaagaacaggaggtgttcagcgtaagacaatttaggcacacggagctacttctcattactgggaacaatgggaaacttcccaaaacctaaa

SEQ ID NO: 904935 - DNA, 120 bp, Artificial Sequence
  ENSG00000268713_6 (sequence is synthesized)
gtacagactccagccaaggatgaaccttgcaagatcaaagaatagcagtctctggcctgctctgttctctttttcacagtaacttaaatggaaaaatgctgagttagcttaagtttctgt

SEQ ID NO: 904936 - DNA, 120 bp, Artificial Sequence
  ENSG00000268713_7 (sequence is synthesized)
aacaaacattaagcaaataaaattttctataacagaaataagccatagctttgagatgaaggcttatatacgtgtaaaccattgtaaccaagaaaaaaaaaaaaagtcagagtcacagtg

SEQ ID NO: 904937 - DNA, 120 bp, Artificial Sequence
  ENSG00000268713_8 (sequence is synthesized)
aaaatacttaacaaactagccaggatttaattcagtgatgacagggaacagaggaagtcttgtgagaaaggatcttgcctctgcctagtatctttcacagataggcttcaagtggtttga

SEQ ID NO: 904938 - DNA, 120 bp, Artificial Sequence
  ENSG00000268713_9 (sequence is synthesized)
tttgcagatacaccctttcttggcctttatttcggcaaagatgtgatgggtaggtaaatgccgtgttctttccctagcacgtatgtcagtttctcatccactctttgttcttgctattga

SEQ ID NO: 904939 - DNA, 120 bp, Artificial Sequence
  ENSG00000268713_10 (sequence is synthesized)
aagttgtagcttctggctacaacagagatagttgaagaatatggagttcgccataatttatcattaaatgtggataatttgagattaaagaatatgttgttgcaggcttagtcactttga

SEQ ID NO: 904940 - DNA, 120 bp, Artificial Sequence
  ENSG00000253372_0 (sequence is synthesized)
gaggagagtgacctgtcagattaccaaaaatattccatctaacaggaagagagaccagaagctgtgaggttcttggaaaggaatggaagggcccgggagactcagcccctgaagtgatgt

SEQ ID NO: 904941 - DNA, 120 bp, Artificial Sequence
  ENSG00000253372_1 (sequence is synthesized)
tggcagttacatcataacagagagatgggagatgtctgcagtggctggagaaggacaaacctgaagacactagaaagaggagttgggtccagatacagcttcctgaaagatctcagcaga

SEQ ID NO: 904942 - DNA, 120 bp, Artificial Sequence
  ENSG00000253372_2 (sequence is synthesized)
caagaagaatggagcaaatgcagcaattcagagaacagcatcaagtcccacatgagcaggaaacgcggccctgaggtgtcacgtcctgcgtgggctcttgggttcaaaacagaaagagat

SEQ ID NO: 904943 - DNA, 89 bp, Artificial Sequence
  ENSG00000253372_3 (sequence is synthesized)
agaattagaagtggagcctgaagatgtgaatgaactgctgcaatctcatgataaagttgaacaaatgaagatttgcttcttatgaatac

SEQ ID NO: 904944 - DNA, 120 bp, Artificial Sequence
  ENSG00000253372_4 (sequence is synthesized)
aagaaagtggtttcttgagatggaatccactcctggtgaagatgctgtgaacattattgaaatgacaacaaaggatttagactatgacttaaacttagttgataaagctgccgcagggtt

SEQ ID NO: 904945 - DNA, 76 bp, Artificial Sequence
  ENSG00000253372_5 (sequence is synthesized)
gcagggtttgatgctatcaaacagcatcgcatgctacagagaaagcttttgttaaagagtcaatcgatgcagcaaa

SEQ ID NO: 904946 - DNA, 120 bp, Artificial Sequence
  ENSG00000253372_6 (sequence is synthesized)
cttctcgggtggatactgccattagacccattttgcagataagcaaaccgaggcactgggagaagaagtaatttgctcaaggccacccaggtgatttacagctgaggaatccattacaga

SEQ ID NO: 904947 - DNA, 120 bp, Artificial Sequence
  ENSG00000253372_7 (sequence is synthesized)
acactagaaagaggagttgggtccaggctcttgggttcaaaacagaaagagattccttctctcatggaacttacatttttggactgaggagagacagacatggtctggaactgaagtctc

SEQ ID NO: 904948 - DNA, 85 bp, Artificial Sequence
  ENSG00000253372_8 (sequence is synthesized)
ggactgaggagagacagacatggtctggaactgaagtctcaatagctccaaagtatgcctgtaataataaacataataatgaatc

SEQ ID NO: 904949 - DNA, 120 bp, Artificial Sequence
  ENSG00000272669_0 (sequence is synthesized)
gacacagccaacacagaaagaaagggaaaagattccagagacgttccagcataaggccatgcagggccggctggagctcgtgggcaggggctgccgacctctgagctgggtgtgctggga

SEQ ID NO: 904950 - DNA, 120 bp, Artificial Sequence
  ENSG00000272669_1 (sequence is synthesized)
gccagggatcactgggtgccggccacagaggaaggtccctgaggacacagtaccgaagtctgatcccagaggaggaaggaaggtgggccggggagaaggtctgagtgcagggatggtcca

SEQ ID NO: 904951 - DNA, 120 bp, Artificial Sequence
  ENSG00000272669_2 (sequence is synthesized)
ggaagctgcaggatggctgcagggggccgtggaccctcctggcctgaagctcactccttccccgcctcctacaggggcaggggagccagggctgcgagttctgtctgtggactctcaatg

SEQ ID NO: 904952 - DNA, 120 bp, Artificial Sequence
  ENSG00000272669_3 (sequence is synthesized)
gctttcactccttccctaggtaactatggctaagagacagaataatttgaaaatacgttctttttcctctttagctggatgtcccacagagaaaatggaataaatgtcatttggactgag

SEQ ID NO: 904953 - DNA, 120 bp, Artificial Sequence
  ENSG00000272668_0 (sequence is synthesized)
gcagggcgccagggccacgtcctcggggccgccgcaggggggaggcgcgtacttgcggcgcagggagcggctgacgttctgcgtcgggtaccccaggagccaagtcgccgcaggcccctc

SEQ ID NO: 904954 - DNA, 120 bp, Artificial Sequence
  ENSG00000272668_1 (sequence is synthesized)
gaccccgccgccgttgccgtagccgaaggcaccgcgggcgccgccagccccggagcccccgcagcagcagcagacgagcccccagatgcctacggccaggcagcccagcgcgagcagaga

SEQ ID NO: 904955 - DNA, 120 bp, Artificial Sequence
  ENSG00000272668_2 (sequence is synthesized)
gagagcccaggacgatgccgatgatcacgcctatacgccgggagtctgtggagagaagtggaggcaggtcaggctttctcacagcctgctccaggccaagagaacaacagctcattcctg

SEQ ID NO: 904956 - DNA, 120 bp, Artificial Sequence
  ENSG00000272668_3 (sequence is synthesized)
agataaggatcctgctgccatctgccagatcctgaggctgctcaaggcaagccagggatgagccagaactcggctgagagcagaggctccaccctggagaagcaccgctggaagcaccca

SEQ ID NO: 904957 - DNA, 120 bp, Artificial Sequence
  ENSG00000272668_4 (sequence is synthesized)
cacaggaaggactctctccatgccataggagcctgccaggcaggatgcactaaggaagtactacagggaatgtgagaggagaggctggagagagggaagaaaggcaaagtggaagagaga

SEQ ID NO: 904958 - DNA, 120 bp, Artificial Sequence
  ENSG00000272668_5 (sequence is synthesized)
gctggatgggagacttgaggagagacaggaatggaggaatcacatgggctctccaaggaagaggacagtggtgattctttgccccccaaaagcaccagaaactggccatgctttacgggg

SEQ ID NO: 904959 - DNA, 120 bp, Artificial Sequence
  ENSG00000272668_6 (sequence is synthesized)
tgtcatctcaatagtggtgcctactctctgcttgcaaattctttctgaatcttcaaggtgcttccagaactcctgatcttccctctggaggtaagggaggggagaaaaggcggctccagc

SEQ ID NO: 904960 - DNA, 120 bp, Artificial Sequence
  ENSG00000272668_7 (sequence is synthesized)
tgagggtattgatgcgttaatgcagccagtgctgagttgtcctcacacacccattgacacaccacacagggggaagtccgggtccccacagcacagctggagcctcccgagtggactctg

SEQ ID NO: 904961 - DNA, 120 bp, Artificial Sequence
  ENSG00000272668_8 (sequence is synthesized)
ccagccctgctctcatcagacagagaagggctgcagctatcctgccggaaatgtcatcattcccatgcaggtgcacgcacccacacactcacatacacattcacgctcacacaaaggctg

SEQ ID NO: 904962 - DNA, 120 bp, Artificial Sequence
  ENSG00000272668_9 (sequence is synthesized)
aaaatgtcaccccgccttcccaaattcctccttcatgccccttcatcccaaatccagactgcaagagggactcggagccctttccagtgatgttggcatagaatgccccttggtggaact

SEQ ID NO: 904963 - DNA, 120 bp, Artificial Sequence
  ENSG00000272668_10 (sequence is synthesized)
tgccccaacctgggcaggaagccacaatgtccaaacttgagccctgccctgtggacctgtcctggtggggtgagaagtctctggagttgccatccccaccaccctcaggcctcatcctag

SEQ ID NO: 904964 - DNA, 120 bp, Artificial Sequence
  ENSG00000272668_11 (sequence is synthesized)
agtggggcactgccctgtcatagcacagggggcccaaggctgaggtctcaggcctgagctgtcactggccatgatggaagaaaccactcagacttacaccagacttagtctcttgccctt

SEQ ID NO: 904965 - DNA, 120 bp, Artificial Sequence
  ENSG00000272668_12 (sequence is synthesized)
tcaaggcaagtgacttccctgccccttggccctggccttgggagagaaggagtagcgttgggaatagcacacagtctgatgaaaattgatccttcccaagctcctcctgagccctcaccc

SEQ ID NO: 904966 - DNA, 120 bp, Artificial Sequence
  ENSG00000272668_13 (sequence is synthesized)
aatgcccgtgcttacccctctcctaccccacctccagctcctgcagagcaatcaatccctctcctcctagtcacggcatgagcttgcagggcacctgcacacatgtgtgagcccgacagg

SEQ ID NO: 904967 - DNA, 120 bp, Artificial Sequence
  ENSG00000272668_14 (sequence is synthesized)
ggacatataaagatccactcaaagacctctgcactacagacacacaccctgaacatcaggcacagggtctcctggggaaaggtcccctggtaatacccacacccggctgcagcagggcaa

SEQ ID NO: 904968 - DNA, 120 bp, Artificial Sequence
  ENSG00000272668_15 (sequence is synthesized)
gggtgggcagcaccctgccaggcaactcaggcagccccaggctccactgtgagcccttgctgcccctttccttcccacctagcctcatgctggctaccctgccccctgcccagccccgta

SEQ ID NO: 904969 - DNA, 120 bp, Artificial Sequence
  ENSG00000272668_16 (sequence is synthesized)
cctgggctcaggcacacgagtagaaggtggaatgctcctccaactctcatgtctctaggctcggtgtttcctccgtctgggctgggtatcccgtggggtcgtagtggtgggtgtgagggg

SEQ ID NO: 904970 - DNA, 120 bp, Artificial Sequence
  ENSG00000272668_17 (sequence is synthesized)
gtaggtggagggagggggagctgagggcccagacactgcctggggtggcaggaaggtgcaatgagtgcccagctggggagcagctggagttatttctatgggagggagggggcctggtcc

SEQ ID NO: 904971 - DNA, 120 bp, Artificial Sequence
  ENSG00000272668_18 (sequence is synthesized)
ccgccttggggaggagtcccaggaaccctaattagcagggtgacagggtggcctacctgggcattacccagccctcacccaagctcttccctgtcctaagagtggcacaggacagccagc

SEQ ID NO: 904972 - DNA, 120 bp, Artificial Sequence
  ENSG00000272668_19 (sequence is synthesized)
gggacttgtaattaggcacctgttaaacttcacttcctcctggccacatcctcagggtgacaacagtcacctcatttacagcttccaagggctcccctcaccactcatttgctgcctcct

SEQ ID NO: 904973 - DNA, 120 bp, Artificial Sequence
  ENSG00000272668_20 (sequence is synthesized)
tccctgggggaagtggggaagaggaaggagaagccaggcttgggagaaagagtggccaggacctgaagagttaatcctgatcccagggcatagggttccccaggagtgtccagcccacct

SEQ ID NO: 904974 - DNA, 120 bp, Artificial Sequence
  ENSG00000272668_21 (sequence is synthesized)
tcccccaggcttcaggcctttcaaagggactcaggcctcctgagctgaaagaggagagaaggggtgtgtgcaggaacagagtctcctcctggctgtcccctctggaactgtcctccacac

SEQ ID NO: 904975 - DNA, 120 bp, Artificial Sequence
  ENSG00000272668_22 (sequence is synthesized)
ccatactcgactcaaggccatccccaagtgtaggggacccctgggagcaggggtgctatggggggtccagggtgtgtgctaggagtaaggtgactgatgggctagtgagggagtgttgga

SEQ ID NO: 904976 - DNA, 120 bp, Artificial Sequence
  ENSG00000272668_23 (sequence is synthesized)
gagaacagcgccaagaggaccagggaagggggtgcctgtgtaagcgtgtgcacccctcagcaatgtctgtgggagggaggcaggatgtctgtgtcagggtgtctctgtgaggatggctaa

SEQ ID NO: 904977 - DNA, 120 bp, Artificial Sequence
  ENSG00000272668_24 (sequence is synthesized)
gcccctctgagtgaacttcttgagggatcgcttggtgtcctggcttctctgcccagaaagagtagccaggtcttgagggttaatgcagtcccagtattaactgggtccttgagaccaagg

SEQ ID NO: 904978 - DNA, 120 bp, Artificial Sequence
  ENSG00000272668_25 (sequence is synthesized)
accctcataacctggactggtcatcgggctgactaaaccagcacagttctgggtaagttcgtgctggggtggggagggtcctggtaggcatggggagcaagtgaagggccaccccttgtt

SEQ ID NO: 904979 - DNA, 120 bp, Artificial Sequence
  ENSG00000272668_26 (sequence is synthesized)
ggcttgtctaagggggacagaatgggcatgtgccttgttggactccatggtgggagtcaggacatgagtgaccccattcaatagctcaactccctcaaaggagtcagggactgcccccat

SEQ ID NO: 904980 - DNA, 120 bp, Artificial Sequence
  ENSG00000272668_27 (sequence is synthesized)
ccctaccatggggcacagaaagggcagaggaggaagagtgttagggagagttatggggctcagggatgctgccagggcccacccctctggggaaaaataagtcagaacattaaggaaaca

SEQ ID NO: 904981 - DNA, 120 bp, Artificial Sequence
  ENSG00000272668_28 (sequence is synthesized)
caaggagtccacgcgtctctgcattccaagccgttgcacctgaactcccaacaataacagggcgctctgagacctaccagatgtacacaatgaatatctttatttccttatttattttta

SEQ ID NO: 904982 - DNA, 120 bp, Artificial Sequence
  ENSG00000272668_29 (sequence is synthesized)
tacagatggggaaacagagacctggagaaacatggggattcagccaatgcggctggtgcctaagctgggatacccaggtacccagggtgtcagtccagagaggtccaaaaaatggtcttg

SEQ ID NO: 904983 - DNA, 120 bp, Artificial Sequence
  ENSG00000272668_30 (sequence is synthesized)
gtgatcctgtggattactagacccactcacgaacaagaaccatggaaggtcagggtgagtgggagggaaaacaggtcagaccacgaacagagagattgaggagaaagcagtaacattgtg

SEQ ID NO: 904984 - DNA, 120 bp, Artificial Sequence
  ENSG00000272668_31 (sequence is synthesized)
gttccactaaactacagtgcaggcttcagatttaattgggttctggatgtgggctaatgttagagctggggttaagtttggggttagttgaattatgaatgaggttgaggtcagatttga

SEQ ID NO: 904985 - DNA, 120 bp, Artificial Sequence
  ENSG00000272668_32 (sequence is synthesized)
ggttgggattagagttaaggttgggattagggttagaaatacagctagaattgaggctcaggtttatggctgggatttgtgttacgataaggaatagagttttagtttcatttacagctc

SEQ ID NO: 904986 - DNA, 120 bp, Artificial Sequence
  ENSG00000272668_33 (sequence is synthesized)
tgcctgggaatacagttagggctaaatcaaaggctgggtttagattgatttagcattgggttagaactaagtttgagattcacattgaaataggctgtggttagggttggaacatggttt

SEQ ID NO: 904987 - DNA, 120 bp, Artificial Sequence
  ENSG00000272668_34 (sequence is synthesized)
aaagacacgtaagcagcgggagttgatggggatcaaagatgaggttttatttctaatatagaaagacttcagcctccatctgctaaatccaggtttggctagaattttcaatccttagtg

SEQ ID NO: 904988 - DNA, 120 bp, Artificial Sequence
  ENSG00000272668_35 (sequence is synthesized)
cggggagactactaatggcacatgttgattggggtcccaagacttggaggaggaagccaaatgtacacgagcccatctaaggggtatgaggcaactaaatcccatagagaatggaccctc

SEQ ID NO: 904989 - DNA, 120 bp, Artificial Sequence
  ENSG00000272668_36 (sequence is synthesized)
tgaagtcctgctccactactaaagctcaccacctggccaagctccagaaaaacatctggggaggagacgcaggaagctactgacaatgagttgggctctgacaccaaaccgaactagaag

SEQ ID NO: 904990 - DNA, 120 bp, Artificial Sequence
  ENSG00000272668_37 (sequence is synthesized)
atggggtccatcagagggagtcttactgagtggggaggaggggtggtctggatttggagtccttaggagatgggagttgggagaaactgagggcctacatgctcctagaacagccacttt

SEQ ID NO: 904991 - DNA, 120 bp, Artificial Sequence
  ENSG00000272668_38 (sequence is synthesized)
atggggcaccacatgggggtctttcaaagcctgaaagggcagagtgccattgttgtttccccttgaccctctgaggcttaattgctaccttcttgcaatttgagtcctataaaagaagct

SEQ ID NO: 904992 - DNA, 120 bp, Artificial Sequence
  ENSG00000272668_39 (sequence is synthesized)
gtcagccttccagccctaaaccctgagccctgcagggttttcagggagggcagcagtggggaggctgtggatggggtgaaggcactggggtgtcagcatagtttccaaagcatatgtcac

SEQ ID NO: 904993 - DNA, 120 bp, Artificial Sequence
  ENSG00000272668_40 (sequence is synthesized)
agtcctacagtcccctccctctgggcccagctcacagtccgtgtaagtctctgggccttatcctcagcagtggaagagggccccactcctaggaagaccccgtcccaattcctccctctc

SEQ ID NO: 904994 - DNA, 120 bp, Artificial Sequence
  ENSG00000272668_41 (sequence is synthesized)
atttttccccaaccagtctccagcccaaacatctcatttccccacccacttccttttcaggttttataaaggtctggtccaggagactactggggttccccctgtgaccccagagagaga

SEQ ID NO: 904995 - DNA, 120 bp, Artificial Sequence
  ENSG00000272668_42 (sequence is synthesized)
gaagaaagagattgggagagatagtgatgagttaaggggcaaagacagagacagggacagaggcagacagaaagacacatggtctaaatggcccctccagagactcagagggatacagag

SEQ ID NO: 904996 - DNA, 120 bp, Artificial Sequence
  ENSG00000272668_43 (sequence is synthesized)
gaggcagagggcccaggccacgagctgggaaccaatacaaatttccaaaagggccccttgctttttcctaagaaatccatgactctccagggaagaatggccctgctttgactggtattt

SEQ ID NO: 904997 - DNA, 120 bp, Artificial Sequence
  ENSG00000272668_44 (sequence is synthesized)
gcttctattctaagacagtaacagaaaatcaaagactggcttagaaaggagtaaacagggagatacaggaggtaggaagaggctggacaaaaactcagagaaggccacagattgcttacc

SEQ ID NO: 904998 - DNA, 120 bp, Artificial Sequence
  ENSG00000272668_45 (sequence is synthesized)
agatgaagtgcagcccagccccagaacctttctgggaaggacggacagagggcttgggctgcctactcttcctccaaagcctattcttcctccaaagtccctttcatggcaactccaccc

SEQ ID NO: 904999 - DNA, 120 bp, Artificial Sequence
  ENSG00000272668_46 (sequence is synthesized)
cactcctctaagccctgccctcccctgcctgtacttgcccaccccaacccctctcagtggccgccagactccctgggctcaggctcaatcaagctccccacaacccctgccttggctggc

SEQ ID NO: 905000 - DNA, 120 bp, Artificial Sequence
  ENSG00000272668_47 (sequence is synthesized)
actgcaatttgactcattctaaactcctccccacacagtcagcaagctcctcagccccctctcccaagtccccatgtagcccagggctcaccctgcagcacccagggaggagctgtcctg

SEQ ID NO: 905001 - DNA, 120 bp, Artificial Sequence
  ENSG00000272668_48 (sequence is synthesized)
cagaggaaacctctgaggtaagactctgggagcagaagctgtgagtgacaatggataggcaaagagtcacagagaagccaaggagccttgcagctgctgtctgtccacccagctttcagt

SEQ ID NO: 905002 - DNA, 120 bp, Artificial Sequence
  ENSG00000272668_49 (sequence is synthesized)
gatgatttggaggtggaggtctgccaggtgaggccatggttgcatgagaagggcagggggctcagaggttgcatgggtggtgatgggacaacgtcggattctggttacagagagggatga

SEQ ID NO: 905003 - DNA, 120 bp, Artificial Sequence
  ENSG00000272668_50 (sequence is synthesized)
gatcgacatgtggggctaagtttgagggtgtgggttgggttcgaaactaaggctcaaatcaaagctggcagggaagagccgtgaacacaggtgacacagggactccccaagctcctgctt

SEQ ID NO: 905004 - DNA, 120 bp, Artificial Sequence
  ENSG00000272668_51 (sequence is synthesized)
aggtttcccaaacctcagtggttctgactggtacacttcagaagaagtgggattctaggaggagcctggatatgcccacatctctcccatcaagcaatgtcctgaagctgacagactcag

SEQ ID NO: 905005 - DNA, 120 bp, Artificial Sequence
  ENSG00000272668_52 (sequence is synthesized)
aagagcaagcagcacacacatagtccccatcaattaaaggagtggctggagttgtcactacatcaacaaagcacaagagcaaagggaggcgattgaatgccaccaactgaattgttagca

SEQ ID NO: 905006 - DNA, 120 bp, Artificial Sequence
  ENSG00000272668_53 (sequence is synthesized)
agagaatgagtggaggcgagaagaaatcgcttgtaaaggctatgtgattccctgatgacagatctgaggaagaatgaagaggctttgaagataaaggtatcttcacctcgccaagatcaa

SEQ ID NO: 905007 - DNA, 120 bp, Artificial Sequence
  ENSG00000272668_54 (sequence is synthesized)
ccacatcctgcagaaccttcattcattcagcaaacagccaggctttgtgctaggccctggggaaatggcaattaaggagactcagtccctatcctcacagaacaccccatctgacacgga

SEQ ID NO: 905008 - DNA, 120 bp, Artificial Sequence
  ENSG00000272668_55 (sequence is synthesized)
aatagctcctggcccgcaatgtggtaagatgcagtaatacgtgcaaggcccctgacttagtggcaatgatgtttaagccgagatctgaaggataactaacaacggcgtgccagagaaaag

SEQ ID NO: 905009 - DNA, 120 bp, Artificial Sequence
  ENSG00000272668_56 (sequence is synthesized)
agtagcgggtggagagaggaggccaggggaatatttctgggcttggtaagtaagccaggtccctgccagacatggactgagaagagcaaagccaggagtgacagctgacgattatttttt

SEQ ID NO: 905010 - DNA, 120 bp, Artificial Sequence
  ENSG00000272668_57 (sequence is synthesized)
aactgaggaaggaagatccttgagaacggaacctcttgggaccttctacccagaacaccagagcacctcactgggatcagagccaggccatcgggtggattaagcaactaaaattgattg

SEQ ID NO: 905011 - DNA, 120 bp, Artificial Sequence
  ENSG00000272668_58 (sequence is synthesized)
tcctgaaccatgagtctgtctgtttatggggagagaaactttgagatgaattaatccacaggtccaatgggactttgacattttaatttgtagaaataaaacttgcctttgattttgcca

SEQ ID NO: 905012 - DNA, 120 bp, Artificial Sequence
  ENSG00000272667_0 (sequence is synthesized)
gtcgagcgttagccacccagcattgagctgccagcggctgttctccctaagcaccctcgctcacgtcgcctcgcctcgcctcgcctgaccggccgcagccttggataccagccttaaatc

SEQ ID NO: 905013 - DNA, 120 bp, Artificial Sequence
  ENSG00000272667_1 (sequence is synthesized)
gagccgactacggcccagccccgcccgcggcgaagtgcgcggggttcggtgccagccgctcgcccctggccgggccagcctcttgatgcaccggggacgggcgcgcccatccgactcttc

SEQ ID NO: 905014 - DNA, 120 bp, Artificial Sequence
  ENSG00000272667_2 (sequence is synthesized)
cgctctcgagcccccagctagagttggcttcagcggaatacctactgtgcaggattattcaacaagccgattgatcacattcttcagctctagcagtgcaaaggcttcactgaaaaagaa

SEQ ID NO: 905015 - DNA, 120 bp, Artificial Sequence
  ENSG00000272667_3 (sequence is synthesized)
cattacaaattttttttgaaagaaatttgggggtaaatttaattttaaatactgatttttgataacatttgatcttatgacagcatttgtatttttaattacagataggattacactaaa

SEQ ID NO: 905016 - DNA, 120 bp, Artificial Sequence
  ENSG00000272667_4 (sequence is synthesized)
agtcatttctgacctgctcccttacccttatggctaaaataaactgctaggccctgaagcaaaggcgagccatgttctagagcaatgtctttcttgtattaaaatacggccccatgctca

SEQ ID NO: 905017 - DNA, 120 bp, Artificial Sequence
  ENSG00000272666_0 (sequence is synthesized)
ttcttaggcgtcctcatcccttttcacctcggagctcagcgtcttcctcagcagcacttccatgtcatctgccccgtgaaatcagcctaacgccgtttctcaatgacgtggatcgcccta

SEQ ID NO: 905018 - DNA, 120 bp, Artificial Sequence
  ENSG00000272666_1 (sequence is synthesized)
ggccaccgcaaccttccggaagctctctcagctcagttcccattctcccaccatctcttggttctccttctacctcaccggttgctagtcctccgcttcgcagctgaaaatgtgcccggg

SEQ ID NO: 905019 - DNA, 120 bp, Artificial Sequence
  ENSG00000272666_2 (sequence is synthesized)
ctactgtgggcctagccaggcctgcttacgcagtgcagtttcccatgaatgatgcccagtcattatcacataacctgtggcaagccagcaagatggccctggtgacagcaaaagaaactg

SEQ ID NO: 905020 - DNA, 120 bp, Artificial Sequence
  ENSG00000272666_3 (sequence is synthesized)
cactaggacctgaatgtagatctcagtcatgttccttactaacagcacgttttgcaaccatgcgttaaagaaacatctgactcacaacaaaattttaaagggtttatttgagtgaaaagc

SEQ ID NO: 905021 - DNA, 120 bp, Artificial Sequence
  ENSG00000272666_4 (sequence is synthesized)
aatttatgaattggggaacacctgactgaaagagcgttagtattccagagacaaaacatcaagtgcaagtttttattgggaaaatgtagaagcacaataaagaaattatttgattggtta

SEQ ID NO: 905022 - DNA, 120 bp, Artificial Sequence
  ENSG00000272661_0 (sequence is synthesized)
tgagaagcaagctggggccacctcacctgatgacatggttgatgacaattgggtcagggggcaatagcagggctgtgaggcgctggggaatctcagaaaacttcagccggggacaatcaa

SEQ ID NO: 905023 - DNA, 120 bp, Artificial Sequence
  ENSG00000272661_1 (sequence is synthesized)
aaatctgaagcaggacaattggggagagagagatcactcttcttgaagagatcatcatgcagttgtagatccttttgttctagaaaggccacaagaagctgagaggaagtctgattcctc

SEQ ID NO: 905024 - DNA, 120 bp, Artificial Sequence
  ENSG00000272661_2 (sequence is synthesized)
gttgagagtgcgggccctgggtcagcctgcttatgtatcagtcctgcctctgccacttactatgcaacctggagcaagttaacacctcagggctcagtgtcttcatctctagagtgggga

SEQ ID NO: 905025 - DNA, 120 bp, Artificial Sequence
  ENSG00000272661_3 (sequence is synthesized)
tgaaaagaatacctatctcccagggctgccgtgagaagtcagtgaactaatacacataaagtgcttgggacagtgcctggcacatggtaagtgcccaataaatatcaactgctattttta

SEQ ID NO: 905026 - DNA, 120 bp, Artificial Sequence
  ENSG00000272663_0 (sequence is synthesized)
ctgagcgagagaatcaagacgggaagagactcatgagagcctatagaatgggcgggggacctaggagagggacgataattgcgaagaccagagggccggaagaagaaacattctaagcgc

SEQ ID NO: 905027 - DNA, 120 bp, Artificial Sequence
  ENSG00000272663_1 (sequence is synthesized)
atcaagaattctggccgactccccacagccccgggttcccatggcaaccgcctggcgcttgatggttacatctttcagcacaagcgtggaaagatttgtgtattcggctattttgtcatc

SEQ ID NO: 905028 - DNA, 120 bp, Artificial Sequence
  ENSG00000272663_2 (sequence is synthesized)
ccactggccccggctccaaaccttcagtgtcctgtattttgacatttctttgtgtccgtctctacccacttcattctcccactcctacccctttacacacaccacatcagagcttttttg

SEQ ID NO: 905029 - DNA, 120 bp, Artificial Sequence
  ENSG00000272663_3 (sequence is synthesized)
tggggactgagtaaaagacctttaggaaatttcaggtatcgattccttctatgcatgcagagtagatatgaacagcaaaaataaaaaataaaaaaattgaagcagaaatagtctgcctga

SEQ ID NO: 905030 - DNA, 89 bp, Artificial Sequence
  ENSG00000272662_0 (sequence is synthesized)
aaaaaaaaaggcaggaatcccgcttcagtaaggaagaaagtgcaatattcagtgcaagtggagtagggaaagagggaaaggcgatttgt

SEQ ID NO: 905031 - DNA, 120 bp, Artificial Sequence
  ENSG00000272662_1 (sequence is synthesized)
cagtgcaagtggagtagggaaagagggaaaggcgatttgtgcaaaaacaagtccaacctactctgccaacattagagaagccttccaggctgggcggggtccgtttgtaccttgtcagtt

SEQ ID NO: 905032 - DNA, 120 bp, Artificial Sequence
  ENSG00000272662_2 (sequence is synthesized)
ggggatgggtgttggtgccagttacactaagatttcgagaacacttttttgaagaatcagctttttggcaggtcttcctaaggtggatttcactccctttagttcatatgcctactgctt

SEQ ID NO: 905033 - DNA, 120 bp, Artificial Sequence
  ENSG00000272662_3 (sequence is synthesized)
ctcaaaaggcaggagaatttctggaatttctatcaagtgtttgtataatttgccgtcactacaacctctgctaacatatgcttcgaagtacagttttcattaaaatgaatgcatttaaaa

SEQ ID NO: 905034 - DNA, 120 bp, Artificial Sequence
  ENSG00000271314_0 (sequence is synthesized)
gaacagtcttcttgccattatccagcctgggcctctcttcattggcctcccacttgagccgacatgggggagaagacaatgcgagtctccaccttcgcacgcaggctccctggcctccgg

SEQ ID NO: 905035 - DNA, 120 bp, Artificial Sequence
  ENSG00000271314_1 (sequence is synthesized)
tgttgccatcaggattagctggattaggggccagtacataaggaccccctggtgccgtgaggaagtttcatcaccgggtcagcatggtgtgaactatattctgtcaacaccaccacttct

SEQ ID NO: 905036 - DNA, 120 bp, Artificial Sequence
  ENSG00000271314_2 (sequence is synthesized)
tatagccaccaaccaaaaaacggaagggtggaggtgggggcgtggcagagaaaatacctcaagtgcaaaatgtataaactcatcatagcaataaattcccgcatcatgcatttcaaagta

SEQ ID NO: 905037 - DNA, 120 bp, Artificial Sequence
  ENSG00000274797_0 (sequence is synthesized)
gctaggaactaataattttaggtagacttctaatgaaatggataaaatagaataaaatttgatgcctcaaataacagctaacatttactgggggcttaccatgtattaggaactattctg

SEQ ID NO: 905038 - DNA, 120 bp, Artificial Sequence
  ENSG00000274797_1 (sequence is synthesized)
ccgcaaaggcactgggtaaggcatcattgtgttattacagttttctgcatccagtcaaggcttgtacttacctatagggacaaagggggagtctctagatttcctgattagtcgggataa

SEQ ID NO: 905039 - DNA, 120 bp, Artificial Sequence
  ENSG00000274797_2 (sequence is synthesized)
ttggccttcatcctcatctgctgaccactggttatctgaagacatttttttctctagtaacaataggatataaatgtggttgccgtgaatcattaaaaataatttgtttttcctctccca

SEQ ID NO: 905040 - DNA, 120 bp, Artificial Sequence; identical to SEQ ID NO: 655760
  ENSG00000274792_0 (sequence is synthesized)

SEQ ID NO: 905041 - DNA, 120 bp, Artificial Sequence
  ENSG00000274792_1 (sequence is synthesized)
ggaaattttctcattattttcaccataaggtcagaccctgggctcacagcccccctctatttctttctgggcaacttggccttcctggatgcatcctactccttcattgtggctcccagg

SEQ ID NO: 905042 - DNA, 120 bp, Artificial Sequence
  ENSG00000274792_2 (sequence is synthesized)
atgttggtggacttcttctctgagaagaaggtaatctcctacagaggctgcatcactcagctctttttcttgcacttccttggaggaggggagggattactccttgttgtgatggccttt

SEQ ID NO: 905043 - DNA, 120 bp, Artificial Sequence
  ENSG00000274792_3 (sequence is synthesized)
gaccgctacatcgccatctgccggcctctgcactgttcaactgtcatgaaccctagagcctgctatgcaatgatgttggctctgtggcttgggggttttgtccactccattatccaggtg

SEQ ID NO: 905044 - DNA, 120 bp, Artificial Sequence
  ENSG00000274792_4 (sequence is synthesized)
gtcctcatcctccgcttgcctttttgtggcccaaaccagctggacaacttcttctgtgatgtccgacaggtcatcaagctggcttgcaccgacatgtttgtggtggagcttctgatggtc

SEQ ID NO: 905045 - DNA, 120 bp, Artificial Sequence
  ENSG00000274792_5 (sequence is synthesized)
cctgtgctttctggggcttctggcttcctatgcagtcatcctctgccatgttcgtagggcagcttctgaagggaagaacaaggccatgtccatgtgcaccactcgtgtcattattatact

SEQ ID NO: 905046 - DNA, 120 bp, Artificial Sequence
  ENSG00000274792_6 (sequence is synthesized)
tcttatgtttggacctgctatcttcatctacatgtgccctttcagggccttaccagctgacaagatggtttctctctttcacacagtgatctttccattgatgaatcctatgatttatac

SEQ ID NO: 905047 - DNA, 120 bp, Artificial Sequence
  ENSG00000274792_7 (sequence is synthesized)
ccttcgcaaccaggaagtgaaaacttccatgaagaggttattgagtcgacatgtagtctgtcaagtggattttataataagaaactgagaaggaggaattctggctggaattcatatcat

SEQ ID NO: 905048 - DNA, 120 bp, Artificial Sequence
  ENSG00000274792_8 (sequence is synthesized)
tcatttaacaagtcctgtttttcactgagtacctcccatttgccaggtaccattgtaggcaatggaggagagttatgcataatgagagaataaacttattatatttaaagaatataaagg

SEQ ID NO: 905049 - DNA, 120 bp, Artificial Sequence
  ENSG00000274792_9 (sequence is synthesized)
aaaccccagagtggttgaagtataatgagtaagtgtgagaaatttaagggttaagttttatgtgactgcaagggtctttcagtctgaggtaagaattttttcatattttaattgtggtaa

SEQ ID NO: 905050 - DNA, 120 bp, Artificial Sequence
  ENSG00000274792_10 (sequence is synthesized)
gaacccattttaatgttttaagcaaaggagcagttcatctacaatgctttcctctactggttagagcaacatcagcaagattttaggcagagattaataaactgtaaaatatcaaaaacc

SEQ ID NO: 905051 - DNA, 120 bp, Artificial Sequence
  ENSG00000264876_0 (sequence is synthesized)
gagcccagaaaagcaacgttccaccaaagtcaagggaggctggaatgtcaaattggaggtgtctaggagtgtcaaatattgcagaaggtgttaaaaaggaccgaaaagtgtctgctgaga

SEQ ID NO: 905052 - DNA, 120 bp, Artificial Sequence
  ENSG00000264876_1 (sequence is synthesized)
tttgctatccagaagctcaaaatggcctctgcagaataaatggaatgagctaggtgtggaactccaggcacagcggtcaattaagggctgttcattaacatttcaagcactgcagatagg

SEQ ID NO: 905053 - DNA, 120 bp, Artificial Sequence
  ENSG00000264876_2 (sequence is synthesized)
gcatcaggtgcagcatatccacagaattaaaatgaaattttcttcttatcattattattattcaagattttttgaagaaacacggtgatgaccccagccctgaggatctcactaatattt

SEQ ID NO: 905054 - DNA, 120 bp, Artificial Sequence
  ENSG00000264876_3 (sequence is synthesized)
cttgggttttaaaagatcttttcaatctttgaagtattcccttggcctggctagtttggtgtcccttgaaggactttttataaaacatgagacttcctccacattaggcatttgaaatcc

SEQ ID NO: 905055 - DNA, 120 bp, Artificial Sequence
  ENSG00000264876_4 (sequence is synthesized)
aatctttttttttaaagttgcaaaatacatattttttgcagaccatctgttatttagtaatgtgcaaattaccaataaataattccagattctttttttgcaagcatagctataaacaaa

SEQ ID NO: 905056 - DNA, 120 bp, Artificial Sequence
  ENSG00000264876_5 (sequence is synthesized)
ctgatccacatgcagaaatggaagtcattttctctttgaaaattcattaacttctgcacgattggaagagctcgggagagaagcttcccggcagatgtccatgagtgttattactgtaca

SEQ ID NO: 905057 - DNA, 120 bp, Artificial Sequence
  ENSG00000264876_6 (sequence is synthesized)
caaacaataacatgaggccaaacactgacattctttgcaaatcttcctcttgtttagcattcacttcagtggtctcatcatacggggtttatacgtgtgactataaaaccctttaagatg

SEQ ID NO: 905058 - DNA, 120 bp, Artificial Sequence
  ENSG00000264876_7 (sequence is synthesized)
agagctaacaagcgttgagtcgatactattttagctatattgtgtgactttttgtaccagagaacttacaaaaatcatcagggccagatggcctgcaagatattggatcattaggacata

SEQ ID NO: 905059 - DNA, 120 bp, Artificial Sequence
  ENSG00000264876_8 (sequence is synthesized)
aaaattaggtagaatcaagaacgtcggtgctcacccagtatgaggatcatacgaattggtggttggaaaagcattgaaatgtcactgactttgactgtcagatgtgtggggtcaggcagg

SEQ ID NO: 905060 - DNA, 120 bp, Artificial Sequence
  ENSG00000264876_9 (sequence is synthesized)
catgtgtttctcggatgctcattgtagctcttgcttatccatttttattaactgatccagtgactcacaaggaagttggcattattgtgtgtggaacagcagcagagcttactaacattc

SEQ ID NO: 905061 - DNA, 120 bp, Artificial Sequence
  ENSG00000264876_10 (sequence is synthesized)
tcagctacaaaacaaaaaataacgaaccagagacttcagctcagttcttgtgattggagttgtgtttcctccagagtgacgagcatggtataagacgcctcgccctgcaccccatcacgg

SEQ ID NO: 905062 - DNA, 120 bp, Artificial Sequence
  ENSG00000264876_11 (sequence is synthesized)
aacacacaagaccctgagactctgagaggtagacactgcactctacagctgcgattcacacctggatctgctggctcaaggtctgcactctttccactgcaccacagtaacccacatgaa

SEQ ID NO: 905063 - DNA, 120 bp, Artificial Sequence
  ENSG00000264876_12 (sequence is synthesized)
tcagcaatgaaaaggcaagacggagtaaggtaatttgggtggggttcaggaatcttcatttaagaaaaatacctccagtgacagacagatggccatcaaccacaatttgaggaaaaaaaa

SEQ ID NO: 905064 - DNA, 120 bp, Artificial Sequence
  ENSG00000233590_0 (sequence is synthesized)
gtttcaggacaacatttgggaaacacactttggaggaccaacaaagctgatctagataaagtaccagcactcaagagcagaaaattgaagcaaaaataagcaggagtgggtgactattct

SEQ ID NO: 905065 - DNA, 120 bp, Artificial Sequence
  ENSG00000233590_1 (sequence is synthesized)
tcatgctggagatcattaatgttcaattgcttcctattgtcttcatgtcattcaacttcatttcattgtcattgcttcagctgggggattaatcaactatttatgagaagacaggacttg

SEQ ID NO: 905066 - DNA, 120 bp, Artificial Sequence
  ENSG00000233590_2 (sequence is synthesized)
gagtcagggcggtcacaatggggttatagtctgagcaatggtggggaaagcaagtcacggttaaaagactactagtttgtgacagtttgttgacattttaataaacatatttgagaataa

SEQ ID NO: 905067 - DNA, 120 bp, Artificial Sequence
  ENSG00000233590_3 (sequence is synthesized)
ctgtgctgaaatgatggtgtgagccactgcacccagcctgttttttaagaagtcattctgcattcaaaatgtgcagctagctcccgttccctacaggactgctgttcccaaccaagactg

SEQ ID NO: 905068 - DNA, 120 bp, Artificial Sequence
  ENSG00000233593_0 (sequence is synthesized)
gggcgggcgcaggactgcaggctggggctccgctccccggcgggagcccgcgcgtggttcccagcgaagtccccgcgcggctgggcccagcgtgagtattctccgcccgctgtcctcccc

SEQ ID NO: 905069 - DNA, 120 bp, Artificial Sequence
  ENSG00000233593_1 (sequence is synthesized)
ctggaggcggcagcgcccgtttatttgaggcttctaatgtgaggaaaaacacggaatgacaagtgtgggaaagagcaagcactaaattactgtcagaaaaataaacggagtagcacagtg

SEQ ID NO: 905070 - DNA, 120 bp, Artificial Sequence
  ENSG00000233593_2 (sequence is synthesized)
ctgctcggtgatttacgggggcaattagtcaccaccccacggcgctgctgaggacagcacggcagcagacaagtcaggcccatgaggaagaagaggctttgcactgctctccagacaact

SEQ ID NO: 905071 - DNA, 120 bp, Artificial Sequence
  ENSG00000233593_3 (sequence is synthesized)
aggatatttgagcacattaggttttgtgtcttcattctgggtcggctgcctccaatcctgaggtcatcactcatcaagaggggataatcccagggacagcaggatctgcttcgttacttg

SEQ ID NO: 905072 - DNA, 120 bp, Artificial Sequence
  ENSG00000233593_4 (sequence is synthesized)
gatttaggagccagaaacccatcaggcaactaaacagtaacaatgacccgccattaaacacactgagagaagagcatgatgaagagtttgtacaagaagaagccaggagcacttgctgac

SEQ ID NO: 905073 - DNA, 120 bp, Artificial Sequence
  ENSG00000233593_5 (sequence is synthesized)
aatgcttacagagacgcaggcttctatgagctctgcctgttgaactgcagtaaaaatagatctccttccccagagaggcttggatgtgggcacaatatcagttcagacgatggtcaatgc

SEQ ID NO: 905074 - DNA, 120 bp, Artificial Sequence
  ENSG00000233593_6 (sequence is synthesized)
atgtacttaatagagtgaaaagactttggactgtgaagtcagattacctgggtctgaattgttattcttctacttctttgtagtatgctttcaccacattaaaaattgtctgagcctcaa

SEQ ID NO: 905075 - DNA, 120 bp, Artificial Sequence
  ENSG00000233593_7 (sequence is synthesized)
tgtgaagatgtgcctgcttcgccttccatcatgactgaagtttcctgaggcctccccagctatgctccctatacagcctgcagaacggtcggctgcctccaatcctgaggtcatcactca

SEQ ID NO: 905076 - DNA, 89 bp, Artificial Sequence
  ENSG00000233593_8 (sequence is synthesized)
gacaaaagattatcctggcgtggtggtgtgcacctgttatctaagctacttgggaggttgaagcaggagaattgctggaacctgggagg

SEQ ID NO: 905077 - DNA, 120 bp, Artificial Sequence
  ENSG00000233593_9 (sequence is synthesized)
gggggtactgtctaacccacaagtctctgccaggaatgttgctgtccacactggagtgtaagacacctgcggagctcgtctatggggctcatgttggctgaggctctgaactacagaact

SEQ ID NO: 905078 - DNA, 120 bp, Artificial Sequence
  ENSG00000233593_10 (sequence is synthesized)
aacctgttctatgtgtgtttaaaagcctccagcagcaacttttttctctcccactgtccaaagttgggttttccccatcccttaaaaaacaaaacaaaaaaacctttcttcactccaaat

SEQ ID NO: 905079 - DNA, 120 bp, Artificial Sequence
  ENSG00000233593_11 (sequence is synthesized)
tgtccccctggtgtgtggttttggtctttctcattacttcttgcatcttgctacatgttctgcatttgctcagagccactgggtgctaaggaatttggtctgctgctcctctgggaaagt

SEQ ID NO: 905080 - DNA, 120 bp, Artificial Sequence
  ENSG00000233593_12 (sequence is synthesized)
ttggtaagctggtacaaggaggtgatgaacaaggctaaatgaaaatcatacataaacttcccaatatttgtgaacatgttctttaacataccatacatagtttctatgtatatgtaacat

SEQ ID NO: 905081 - DNA, 120 bp, Artificial Sequence
  ENSG00000233593_13 (sequence is synthesized)
agcaaaacaaacttgctaaggtataattaattggtatgcatgccttcataaatattcaccatcagaagaaacctagaatgaaaggttgtgaaagaacccaggaatgagaaagactttatt

SEQ ID NO: 905082 - DNA, 120 bp, Artificial Sequence
  ENSG00000233593_14 (sequence is synthesized)
gactaaaggccatgtctatgtaggggcaacaatgaagctgtgggtgagcaaatgaagcttcatcaggagtttagtatccttatgtagcattacctaagaatgctaccatagtaaatttct

SEQ ID NO: 905083 - DNA, 120 bp, Artificial Sequence
  ENSG00000233593_15 (sequence is synthesized)
gaagtactttacctgttacaaagaacgtttgtaatctccttttcttatttgatcttgccctggctttagtcaggaacacctgctcagttagaaatgtattcggtgggtatgtacgcagtt

SEQ ID NO: 905084 - DNA, 120 bp, Artificial Sequence
  ENSG00000233593_16 (sequence is synthesized)
tgataaagagggtcacaactgggagaaacctcagattctacttgcttctcttctccacgttattagactttttttcccctcttgaattttataagcacactccttttaaaacaattaatt

SEQ ID NO: 905085 - DNA, 120 bp, Artificial Sequence
  ENSG00000233593_17 (sequence is synthesized)
aataacgagcactgggatttgatgtagaattgcgtatttgtaactgcaatggcactggttttcaactaccctgtaacaaggaagcaattctaaccagcaaaagaggcagacgtgtttctg

SEQ ID NO: 905086 - DNA, 120 bp, Artificial Sequence
  ENSG00000233593_18 (sequence is synthesized)
tgcaacatcacaggcgtgtgaaattgttcagatattgagatatcaggagtgatataaattggaaatttaaccaaaaatattttccatcagtgaacaaagccgattttaaagtgcctcttg

SEQ ID NO: 905087 - DNA, 120 bp, Artificial Sequence
  ENSG00000233593_19 (sequence is synthesized)
catttttcagatctttctctttctttttcccaaagtcacattgtagtttctgataaaggaacacactgggaaaactaagcacatatttaatcaatgaaatttaaggtgtaaaaattctgc

SEQ ID NO: 905088 - DNA, 120 bp, Artificial Sequence
  ENSG00000233593_20 (sequence is synthesized)
atttctgacaaatttaatgttcacttttttcttgatttaaatagagcattctaaaaatattacccctataggggataaatttttatatgcatgttatttttctttacaaagtgtgggcta

SEQ ID NO: 905089 - DNA, 120 bp, Artificial Sequence
  ENSG00000233593_21 (sequence is synthesized)
gtaaagagtgaaaaagaccttggctattgtacttatttcttgaaagaaataatagcatcttaatgactggattcaaatctctgcttatcacacaacttccgtacagttcaaagagaggac

SEQ ID NO: 905090 - DNA, 120 bp, Artificial Sequence
  ENSG00000233593_22 (sequence is synthesized)
ttggattgaatgaaaacagagagctggggcttcctacattcccctgtgtttgtgttcatacagaatatttatgcaatattctgacttggccataatctgtaattcctgcctattattctc

SEQ ID NO: 905091 - DNA, 120 bp, Artificial Sequence
  ENSG00000233593_23 (sequence is synthesized)
agttgcaactataaattctagattaatggttataattttggtaaggcatacatgaaaagttatatgttcctgcttgaaaggaggatcattaaatattcattattaccactcaaattagtt

SEQ ID NO: 905092 - DNA, 120 bp, Artificial Sequence
  ENSG00000233593_24 (sequence is synthesized)
gtcatgctctgtgtaatagttacccgttatcatttcactagtttggattcagcagtaagtgaacagcaatatatagctcatagcgccagaggactttttttgtcggggaacagggagaga

SEQ ID NO: 905093 - DNA, 120 bp, Artificial Sequence
  ENSG00000233593_25 (sequence is synthesized)
aatgattttaaaacccatttgacatatttatgttgacaaattatttaaaggaattactgtgttgtaataaacatgtttgtatgttggaataggattgtggctaaatttgcttctagctgt

SEQ ID NO: 905094 - DNA, 120 bp, Artificial Sequence
  ENSG00000233593_26 (sequence is synthesized)
ttaattactcttattatgattgtgaaaaacagtgcttcttcaagtagttccaaggaaaaaaatagaaaatggaaaagttgagctatttcagtcttttgcaggtatctaaccttgccatga

SEQ ID NO: 905095 - DNA, 120 bp, Artificial Sequence
  ENSG00000233593_27 (sequence is synthesized)
aaaagcacttttcatttttgtaagtagatattgaaatcttgctttttcagcgaagctagattgtataatttattagttttctccacctggtaacacatccttaagaaaaaaattgccaaa

SEQ ID NO: 905096 - DNA, 120 bp, Artificial Sequence
  ENSG00000233593_28 (sequence is synthesized)
aatggagctaatacctacacaggggcttttaagagaatcaaatgcaacaatgtttgaaaagcaacatactcccctttatggaaaaagagcctgtaaaggaaccaatacaatggctgggcg

SEQ ID NO: 905097 - DNA, 120 bp, Artificial Sequence
  ENSG00000233593_29 (sequence is synthesized)
tccagcctgagtgacacaagactgtgtctcaaaaataaataaatgaataagtaaataaatacaaaataaataaaataaaggaaccaatacaacaaaggctgctctcaacattttccctgc

SEQ ID NO: 905098 - DNA, 120 bp, Artificial Sequence
  ENSG00000233593_30 (sequence is synthesized)
tcctaggcactcaatatcagaatataggcttctttcttttgctcagataccagggataagaaatgagagagagagagacagagtaatgtggaaagacaggaagccagattctggctctta

SEQ ID NO: 905099 - DNA, 120 bp, Artificial Sequence
  ENSG00000233593_31 (sequence is synthesized)
gaggaaaaaattcactctaaataattttcagacaatgttactctcctttctcaaacactggggccacaggcattatgccaaaggagtcagcagcctggcagatattttaaactgattctg

SEQ ID NO: 905100 - DNA, 120 bp, Artificial Sequence
  ENSG00000233593_32 (sequence is synthesized)
agactgaacgacagcccatttgcaccatatgccactgacacgttaatctaggcaaggatgctaggcacctggggaaatccatgctgaaatgccatttaggcaggacataccaactccagt

SEQ ID NO: 905101 - DNA, 120 bp, Artificial Sequence
  ENSG00000233593_33 (sequence is synthesized)
ggcagaagttcatcaaaacaaacaggcagggtggccaagaagatagaagtggaaagcaggagtgaaggggacatgcagtgtccaaggcacaaaatgtgttctgagttgcagacacttcat

SEQ ID NO: 905102 - DNA, 120 bp, Artificial Sequence
  ENSG00000233593_34 (sequence is synthesized)
tgtgcttctaggagagctgcagattcagcaagacattaaaactgggtatttgcagtctggacaaacgagtatctgctacttttgcatcagttattctacatggcctcaaaccctgtgacc

SEQ ID NO: 905103 - DNA, 120 bp, Artificial Sequence
  ENSG00000233593_35 (sequence is synthesized)
cttctatccattggcaaatactgggcgatgctccagttcaccagaatggcctcctttatccctgcagtttcactgtaaaaagcccgagcaagcggctgccgagtgactctagtagttgct

SEQ ID NO: 905104 - DNA, 120 bp, Artificial Sequence
  ENSG00000233593_36 (sequence is synthesized)
ccggtgtcagactttccaggatccaatttggtgggagcactctgggcctttggtctccctctactctttgccaggccctgtttcttggttactctgagcagtaatgagcttctccacccc

SEQ ID NO: 905105 - DNA, 120 bp, Artificial Sequence
  ENSG00000233593_37 (sequence is synthesized)
agcatgaggacaggctcacagccagcacatgaaaagggctgtgctcatgtgtggcaaactactctatttcatgggcagctcacacgtctgtttttttttttccttcttctgtgatgcaac

SEQ ID NO: 905106 - DNA, 120 bp, Artificial Sequence
  ENSG00000233593_38 (sequence is synthesized)
tacactaatgattttttaaagtaggaataaggcagtactatggctttctgggggaaaaaaagtcacacagcaggaaaactgcagcagatatcatcaaagaagctcagaataaaatgccca

SEQ ID NO: 905107 - DNA, 120 bp, Artificial Sequence
  ENSG00000233593_39 (sequence is synthesized)
cccattcttgttattggcccaaatgattttccaggagcaaaaggatcattctaacaggcatcttaataaacaaatagaatcattaccttagttattttcctccaggcaaatgaggcttaa

SEQ ID NO: 905108 - DNA, 120 bp, Artificial Sequence
  ENSG00000233593_40 (sequence is synthesized)
aaaatcagctcttcctgttaatgttagttatttttcatagtcagaagaatctgaaagatcataaaaataagattaggccaccaaagaatgtggataagcagttcagagatgttaagcgcg

SEQ ID NO: 905109 - DNA, 120 bp, Artificial Sequence
  ENSG00000233593_41 (sequence is synthesized)
tctacccccagtctctgtttcttcatacagaaacttgtatgaataacttatacagaataaccccacctgtaccttgtaaagaataacctcacctgccagggttgttaagaggattaaaag

SEQ ID NO: 905110 - DNA, 120 bp, Artificial Sequence
  ENSG00000233593_42 (sequence is synthesized)
agaaggtatgtgtgtagcaaggagcacatttcctagcacatggtctgggtacttatgttcaaatgataggcctgatcttggaaaccacatgtcacttatgtgttgtaatgtagacagatt

SEQ ID NO: 905111 - DNA, 120 bp, Artificial Sequence
  ENSG00000233593_43 (sequence is synthesized)
gtttctatggattcttcgcaaagactaagtagatgttcaaatgagaaaatcacaggcattttctgcgcattcaccactacacacatagggctgtgctgtgtattaggaaagatttataag

SEQ ID NO: 905112 - DNA, 120 bp, Artificial Sequence
  ENSG00000233593_44 (sequence is synthesized)
aagtagaagagttagtttttactcaggagtagcttaaagtcaaccctgaagaacagtaataccactcttaattcaagacctgatgtccagcaaccccatgcctttaccctatgcacccag

SEQ ID NO: 905113 - DNA, 120 bp, Artificial Sequence
  ENSG00000233593_45 (sequence is synthesized)
aaacccatctgaaatgagatctaaacacgctaccacagtagtggcctaactgatctccccgcacccctccttgacttcatatagccaatccacagagcagcagaggactctatataatgt

SEQ ID NO: 905114 - DNA, 120 bp, Artificial Sequence
  ENSG00000233593_46 (sequence is synthesized)
aaaataaatcatatcatctcagaatccactgatggctccctacctcacacaaaatgggacccaaagtcctcattctacctgcaaagcccatcatggtttgagccccgttaccttcctgat

SEQ ID NO: 905115 - DNA, 120 bp, Artificial Sequence
  ENSG00000233593_47 (sequence is synthesized)
cacttctcttcctgcttccctcctttgctcgcccccttccagccacactaccctcctcaaacacaccgagcatgctctcacttcagaacatctggactgctactttctctctctggaatg

SEQ ID NO: 905116 - DNA, 120 bp, Artificial Sequence
  ENSG00000233593_48 (sequence is synthesized)
ctcttgtcctatgtactcatatggcttgctcctttacttcatttaggtttctgctcaaatgtcacctaatcggagaaagcttccttgaccattctttttaaatagtcacccaatcctgct

SEQ ID NO: 905117 - DNA, 120 bp, Artificial Sequence
  ENSG00000233593_49 (sequence is synthesized)
attctccgtctccctactctgctttatttttcttcacagagccttcaagacttcataaaggaaggttaatgtaatgaggtccagtcctcactgctacaactgatctcaatgccataatta

SEQ ID NO: 905118 - DNA, 120 bp, Artificial Sequence
  ENSG00000233593_50 (sequence is synthesized)
atatttgtcaccttcatcttccacccctattctagttttgcctcaccctttaccaacacctcagctggtctagggtgcctcccagcaacctaggagtcatctaagagtgactcagacctt

SEQ ID NO: 905119 - DNA, 120 bp, Artificial Sequence
  ENSG00000233593_51 (sequence is synthesized)
cacccacaaggggactgggttgcgttagcccctgtgggctgaggttgctgcagttgccaatttacagttatcaatggactttggagttatcaccaagagatgccccattaaatcgctggg

SEQ ID NO: 905120 - DNA, 120 bp, Artificial Sequence
  ENSG00000233593_52 (sequence is synthesized)
tcctagacgtactcccttctgccctattgcctccattgtgtaatagcaaccctatttcctcataggaatcggggtcaattgcttaacaaatgtttcacaagtggatcattgagaatgatg

SEQ ID NO: 905121 - DNA, 120 bp, Artificial Sequence
  ENSG00000233593_53 (sequence is synthesized)
gtgaaaagaaccaatcttatttccaccagttgattcctggacccatatattatagctaggagaaaatcaccactgtttgttctgtgcatatactgcatgttggagtatacagttcaaccc

SEQ ID NO: 905122 - DNA, 120 bp, Artificial Sequence
  ENSG00000233593_54 (sequence is synthesized)
catagggtattatgcccaagctagcaccttaactaggctcttccattattctactaggctggctgcctctaggtgaagaagtacattgtaagatcaatcaatcccatgatcatgtgccca

SEQ ID NO: 905123 - DNA, 120 bp, Artificial Sequence
  ENSG00000233593_55 (sequence is synthesized)
ttgtcacaaccctcttaccatcaaatggatcccttagtctgaggcacagttgtgtggattcccatttcagtaaagaacacattccgtaagtcctcaggtagcagtgtcagcaacagcact

SEQ ID NO: 905124 - DNA, 120 bp, Artificial Sequence
  ENSG00000233593_56 (sequence is synthesized)
gacatcagggaaggcaaagccatatccaactaggtgtcaattcttataatggaattaggtgtgatgtcatcaacttgccaccaagtgcctggctagtatctctgaggatggtgccttatc

SEQ ID NO: 905125 - DNA, 120 bp, Artificial Sequence
  ENSG00000233593_57 (sequence is synthesized)
tatgccagcctgtcctctggcaggaaaaatattcagcaatggcaggagctatatcagccctggtgagaaggacttgatactgttgtgtccatgcctagtctctactcctgtcaccatggc

SEQ ID NO: 905126 - DNA, 120 bp, Artificial Sequence
  ENSG00000233593_58 (sequence is synthesized)
catgccattaatgagccaattgcaaaagtactggaatggccatggagagacactgacatccagaagacaaaagtcatcctgtctacttggttgttgatgctctattgattcactatggtg

SEQ ID NO: 905127 - DNA, 120 bp, Artificial Sequence
  ENSG00000233593_59 (sequence is synthesized)
gatgctcatggacattaacataggatttaaaaaatcctcaccctttatgcctatcctcataggtccatccatatgccttggccctatacctccttatagagaaagctgataaaagcagac

SEQ ID NO: 905128 - DNA, 120 bp, Artificial Sequence
  ENSG00000233593_60 (sequence is synthesized)
attagaaagctagtcattattgtaggcctctgaatgtgactcagagttttctgcccaaaagccagaaagggcagctctactcaccagatcctatctttattagtcaagggttgccccagg

SEQ ID NO: 905129 - DNA, 120 bp, Artificial Sequence
  ENSG00000233593_61 (sequence is synthesized)
gaatgttaattctctcaaatgtctagatttgcattctaggtttgcatatgtgtgagtgctcaggagattctagcagacatctattcagcttagaaaaactcaggctagagagtggaacag

SEQ ID NO: 905130 - DNA, 120 bp, Artificial Sequence
  ENSG00000233593_62 (sequence is synthesized)
attcacagtgcagctgagacaagatccttatctggttatacctgggcatagctgcttgctgcagcaaaagttggaaaaaaaggtgggttgagaggatatgagatgaagcctaagaggtgt

SEQ ID NO: 905131 - DNA, 120 bp, Artificial Sequence
  ENSG00000233593_63 (sequence is synthesized)
tcatcaatgaatggcactaccattgtcctcatacaggaatatggatacctattcctgaagattcatcctttgctattcctcccaaatatggctagacattttcacttctggttacagtat

SEQ ID NO: 905132 - DNA, 120 bp, Artificial Sequence
  ENSG00000233593_64 (sequence is synthesized)
catatttcagggtgcattcagatgtagatttccaacctgtcctgaacaacatattaacattactctagtacaggcctacaatctccatatgcatctcaactcctctttctgccactgcaa

SEQ ID NO: 905133 - DNA, 120 bp, Artificial Sequence
  ENSG00000233593_65 (sequence is synthesized)
tgcagtgcccatggcctatagttacctatgtgggctaagtactatgctaagtgttttatatgggtcttttcatttgatgcaaacaatgatgctaagaggtaggcactctttttataccag

SEQ ID NO: 905134 - DNA, 120 bp, Artificial Sequence
  ENSG00000233593_66 (sequence is synthesized)
tttccaggtactttgctcatggtcacatagctagaggaactgggatttgaatcaagatatttgcatttatcattccaattcttcaccccttcctgtgtccttgccttttgccatgtgact

SEQ ID NO: 905135 - DNA, 120 bp, Artificial Sequence
  ENSG00000233593_67 (sequence is synthesized)
ttgtagttcccctatgaagaggtggaatccattttcctaccccttgattctaagctcagccatgtgacttgctttggccaatgggatgataatggatgatataaacagaagcttttaagt

SEQ ID NO: 905136 - DNA, 120 bp, Artificial Sequence
  ENSG00000233593_68 (sequence is synthesized)
cccacccaagcctcatgtcaaattgtaatccccaatgttggagaaggggtctggtgggaggtgattgggtcatgagggtggatttcccccttgcggttctcatgatagtgagtgagttct

SEQ ID NO: 905137 - DNA, 120 bp, Artificial Sequence
  ENSG00000233593_69 (sequence is synthesized)
ggcggtgctggggcgggcgcaggactgcaggctggggctccgctccccggcgggagcccgcgcgtggttcccagcgaagtccccgcgcggctgggcccagcgaggatgaggctgtcacta

SEQ ID NO: 905138 - DNA, 120 bp, Artificial Sequence
  ENSG00000233593_70 (sequence is synthesized)
tacagcctgcagaacggtggtcaatagcattagagtgcaaccagtctccaaggtcagacagaatggattcatgcacaggtcctacttctctgttcccatctgattggctggtaaattctg

SEQ ID NO: 905139 - DNA, 120 bp, Artificial Sequence
  ENSG00000233593_71 (sequence is synthesized)
tcattttactgtggaactgtcctctgggatggccctttcctcccattcctactgtcacttcctcagtcaagttttcagcacttcttgccttgagtataggagcagcctccttattagagc

SEQ ID NO: 905140 - DNA, 120 bp, Artificial Sequence
  ENSG00000233593_72 (sequence is synthesized)
tcctggcctgactctcatctcttctcattccagtacatgtgcctcacggtcactgctcattttcctgaaagcaggcttgatctttgtattcttctcgtgtaaaaattacctgtgacaaca

SEQ ID NO: 905141 - DNA, 120 bp, Artificial Sequence
  ENSG00000233593_73 (sequence is synthesized)
aagtctatttgactggatgccagggtatatcaggttttactttcctaatacacttggctaaagggtggtcttcagagtgggtgctctggtctcatgtggccctgggccaacaggcagaat

SEQ ID NO: 905142 - DNA, 120 bp, Artificial Sequence
  ENSG00000233593_74 (sequence is synthesized)
aagattacctaactacacagtcaaaagatagagtttacctgggatgtataggctacatgacagaaaaaaattctggatttctttaaagtggaatctggaagagcagactgcccccagcca

SEQ ID NO: 905143 - DNA, 120 bp, Artificial Sequence
  ENSG00000233593_75 (sequence is synthesized)
ctgtagattatgctaaagtgtttctttttccactccaactcactctatacttctactttgcctctggaagagtttcctagcatagaacctaccacaagaagtataccagtgattctcaat

SEQ ID NO: 905144 - DNA, 120 bp, Artificial Sequence
  ENSG00000233593_76 (sequence is synthesized)
gaggagcaattttgtccccaggagacatttggcaatgcctagagacatttttggttgtcacaaattgggggtgagagccactggcatctagtgagcattcagggatgctgctgaacatgc

SEQ ID NO: 905145 - DNA, 120 bp, Artificial Sequence
  ENSG00000233593_77 (sequence is synthesized)
gacaggcacaatgtagctttagtaatatatgtaataatttctctatataatgtccctgagaagcttataggggtatctcttccatgaccatttgcaacctgagatcactgcccagatgga

SEQ ID NO: 905146 - DNA, 120 bp, Artificial Sequence
  ENSG00000233593_78 (sequence is synthesized)
gtcagcctctcatatggctacacaataaagctcagactctcagacctgatgttggagccccttccggatgtgctcctgcttccatcagcttcattgtcctccccttattgctgcctgcct

SEQ ID NO: 905147 - DNA, 120 bp, Artificial Sequence
  ENSG00000233593_79 (sequence is synthesized)
tatcttacactacattaaactcccactgtcccctgaaatgccacactcttcaaatctttgtgtggactcttctctgattggcctaccctctcttttaatttacttagcagatgtctactt

SEQ ID NO: 905148 - DNA, 120 bp, Artificial Sequence
  ENSG00000233593_80 (sequence is synthesized)
atctttaaagactcagctcaattaaagccctccctgacaccctctcctgtctgtgcacacctattcctcagactttctatttcttttatagtacttgtttatttgtctttcttactgctc

SEQ ID NO: 905149 - DNA, 120 bp, Artificial Sequence
  ENSG00000233593_81 (sequence is synthesized)
tgtggatttttaaaatcttttatattaatttgattgacagcaattagcactgggcctggcacttggtaagtgctcaaaaattatccatcaagtgtatatatgcgtgtacttgtatgtgta

SEQ ID NO: 905150 - DNA, 87 bp, Artificial Sequence
  ENSG00000233593_82 (sequence is synthesized)
gccaaagaaaaagactggctgaagagagactttatcgccattgctgtgcaagatttcttctcccagacacttgcatagtgttcctgg

SEQ ID NO: 905151 - DNA, 120 bp, Artificial Sequence
  ENSG00000233593_83 (sequence is synthesized)
gcaagatttcttctcccagacacttgcatagtgttcctggggtaggaatttaaatcaagattcaaataaccaatatgaaaaatcatctatgtacacataggtgttcagatgcttgcctat

SEQ ID NO: 905152 - DNA, 120 bp, Artificial Sequence
  ENSG00000233593_84 (sequence is synthesized)
tgttcaaatgccaaaatgttgccaatgcaacaggtacatctccagccaaaggagacctggtacaacattccagaattgtatatggaataggatttcatcaatagtacaatcaaagttgcc

SEQ ID NO: 905153 - DNA, 120 bp, Artificial Sequence
  ENSG00000233593_85 (sequence is synthesized)
tgtgtttttcctagagtgtaaccaagactgagaaatcacccctgaatctactcaccgagagctgagaatgctgagacacagagtgtgtgttctgtgtgcacatataaaggaacaatgctt

SEQ ID NO: 905154 - DNA, 120 bp, Artificial Sequence
  ENSG00000233593_86 (sequence is synthesized)
ggggcacgtggccgcagacagtgcccgtgccggggcggggaggcgagttctccctgcggccgcggaccctggatggtggcgtcgcccgaagacgcgcctcaccggcctgggtggggttgc

SEQ ID NO: 905155 - DNA, 120 bp, Artificial Sequence
  ENSG00000233593_87 (sequence is synthesized)
cttttgccctcgaggctggcctaagcgctggggggccgctggctaaccctgaggtagatactcgggaaatgggtggaatagggaaagggactcagcccttccgcccttttccccagtcga

SEQ ID NO: 905156 - DNA, 120 bp, Artificial Sequence
  ENSG00000233593_88 (sequence is synthesized)
ggcccgcgtcactgccctgtgggtgcagacgcctccagtgtcactcccctggatttcgcttgggcagaagaagagattgtaggccggaccccaacgccgaagccctgaggcttctaatgt

SEQ ID NO: 905157 - DNA, 120 bp, Artificial Sequence
  ENSG00000233593_89 (sequence is synthesized)
gtctctctcacttccgctcaatcggcttttggccaaagacgagtatcttcttcctggactgccttctcccaccccaacccagacaccaaggggacgcgacagcggttttgggacgctggc

SEQ ID NO: 905158 - DNA, 120 bp, Artificial Sequence
  ENSG00000233593_90 (sequence is synthesized)
tgatcatctgagaggaggcgatcccggccccgctgggcgttcaggatcccgatctggatgccgtccaccccgccccgccgggggctggggcgaaagcggaacaagtcggcggggctggtt

SEQ ID NO: 905159 - DNA, 120 bp, Artificial Sequence
  ENSG00000233593_91 (sequence is synthesized)
ttcctaaaccttagatcagagccatttgcagcacagagttgtgtgctgtttcaaaaccacagaccctgtatatacgcccctccattgcagaggtggatgtcttggcaaatgtaggacgag

SEQ ID NO: 905160 - DNA, 120 bp, Artificial Sequence
  ENSG00000233593_92 (sequence is synthesized)
gattgaaaattaaaaaacaaacacaccgtgttcagggtgaaaattacatacattgacaatactgtctcttttcctccacaatcttactgccaccaggcagcctcagtcagtccgtgctta

SEQ ID NO: 905161 - DNA, 120 bp, Artificial Sequence
  ENSG00000233593_93 (sequence is synthesized)
tttcactgaaaatgtacttaatctcagaaaagctatctatatgtaagaacatattttgttaatcaattttatgaaaacaaaacccctctcaccttagttgaataaagtgctaatttgaaa

SEQ ID NO: 905162 - DNA, 120 bp, Artificial Sequence
  ENSG00000233593_94 (sequence is synthesized)
ggaagatatgagtaaaaataaatccagagatattttaatgtaaaaacattttgcttttgtcttccacatacgttggtatgccagttcagttatgtgaagatattagggcagccacatttt

SEQ ID NO: 905163 - DNA, 120 bp, Artificial Sequence
  ENSG00000233593_95 (sequence is synthesized)
ttttggatcacaggtatgaatcattccatactcctcagtaattttaaattggttcttttcccatggaaaataaccataaatttgattctgatctcatctttagagctttctgttttaaag

SEQ ID NO: 905164 - DNA, 120 bp, Artificial Sequence
  ENSG00000233593_96 (sequence is synthesized)
agtcaaattgcagctgatgaacacattttgcattttttcacattgcatctggactcttcataacgatggtttattttatcttttctgcacagaggagaggaaaaatatataggtccatga

SEQ ID NO: 905165 - DNA, 120 bp, Artificial Sequence
  ENSG00000233593_97 (sequence is synthesized)
atcaatctagataatggggaaggctgactgtaataaataatacagtaacaaccctaaactaatgagctgttgctaaggtacatttcataggctcatcctgtatataaaaagtcactaata

SEQ ID NO: 905166 - DNA, 120 bp, Artificial Sequence
  ENSG00000233593_98 (sequence is synthesized)
accccttggtgtaatcagatgataaagctttgccataaggcaacacctgtgcaattagaactgcagattcttttgcacgtttcattaatttcaggattttgtaaaggcacaatgactaca

SEQ ID NO: 905167 - DNA, 120 bp, Artificial Sequence
  ENSG00000233593_99 (sequence is synthesized)
ctaataatctagtctacttgactccatgtctactggaaacaaagtgtctaattagataaaggtaattaattagagataaatggagctaatcaggctcagttaacactaattctctgaatt

SEQ ID NO: 905168 - DNA, 120 bp, Artificial Sequence
  ENSG00000233593_100 (sequence is synthesized)
aagacattttgggacacctactatcccgctgactttgatattttgcattaagaataggtttagaggagtcagaaaatactagcatttgagaattgagcagtcttttgatgacatatttag

SEQ ID NO: 905169 - DNA, 120 bp, Artificial Sequence
  ENSG00000233593_101 (sequence is synthesized)
gtatctgaagctaaagaagagttttttttttttcatattgtactatttcaccacctttcgatagcagcttaaagaattcactttgtagttattccaatctatgctagtctccgtataaat

SEQ ID NO: 905170 - DNA, 120 bp, Artificial Sequence
  ENSG00000233593_102 (sequence is synthesized)
ggcgccgcttgaaagtgggcccaacccgtgggggcgccgggctggtctaggctctgccctggggcttctgcggcctggagctgaggagccggggccttcgcgcctctcggcgccggctcc

SEQ ID NO: 905171 - DNA, 120 bp, Artificial Sequence
  ENSG00000233593_103 (sequence is synthesized)
tcgcgttgctcgaaagcccgtctgagtaatagtcaactgtttttgtcactttcttaagatgcatcatccctggtctctcttgtttcattacgaaaaatcccagagaaaccacccggcagg

SEQ ID NO: 905172 - DNA, 120 bp, Artificial Sequence
  ENSG00000233593_104 (sequence is synthesized)
atcaatcagacgcaggcagccagacagttttcttgtactttattaaagtgtaatcaaacatcggttaagtggaaaataaatatccagatctaataagctgctcagtcagatcgtgtaaat

SEQ ID NO: 905173 - DNA, 120 bp, Artificial Sequence
  ENSG00000233593_105 (sequence is synthesized)
gcaaattacaagctggttcccatcttcccgccaggggattgaacaagccacagcaattgcttcatccactgcgattgtaaatcaactaaaataatggctggataatgaccagtttgcggt

SEQ ID NO: 905174 - DNA, 120 bp, Artificial Sequence
  ENSG00000233593_106 (sequence is synthesized)
ttcaagcagattgaatgataacaaactgcgtgtgtcgcaccagcttttcatttagcatctcatcatggagcgagcagcccgcctaacagcttggctccctcattaggttgttgtctgcag

SEQ ID NO: 905175 - DNA, 120 bp, Artificial Sequence
  ENSG00000233593_107 (sequence is synthesized)
cttgtaaattcacactgcagccagcagattacctgacaaacttcttgataggaaaagctagacaattcaatccggcccatcaatccctccctgcgaaggcaggcacattgatctattgct

SEQ ID NO: 905176 - DNA, 120 bp, Artificial Sequence
  ENSG00000233593_108 (sequence is synthesized)
gcatgtatacatgcagaaatatatagggaagcacactcatgggtacgcacgcgaacaagagccgtgtgtgcaggagagaggggtgcgccacagacacgccgcccaccgcagccccagcct

SEQ ID NO: 905177 - DNA, 120 bp, Artificial Sequence
  ENSG00000233593_109 (sequence is synthesized)
ctcgcgtggggcctctgcccgcacacacgcagccaggcactgtaagcatcttcactttttgttttttgctgatgttgatttagttgctaattggtgacagaaattgtcaaataggtggca

SEQ ID NO: 905178 - DNA, 120 bp, Artificial Sequence
  ENSG00000233593_110 (sequence is synthesized)
gatagcgactgcggaaacttccgttgaaggaggtgagaaaatcctttcaaagatgaactgccgcctgaaaagggatggctcactaaatttctcccagatatttattgctcgtattaaaaa

SEQ ID NO: 905179 - DNA, 120 bp, Artificial Sequence
  ENSG00000233593_111 (sequence is synthesized)
ctgactaaacgcccccaggggcgaaaaccgctcctcctccccagttcctgcgctcggtggcctggggctcggggtttgggggttgctcctcgtctgcctcgaggccactcgctcgcgctc

SEQ ID NO: 905180 - DNA, 120 bp, Artificial Sequence
  ENSG00000262099_0 (sequence is synthesized)
aggtacaaccaggaaaaggcccggagctacaaccgggaaacacaggatccagactctcaagttctctacatggctgtgcaaccccatcacagacacttcagtgaagattcagaactgcag

SEQ ID NO: 905181 - DNA, 120 bp, Artificial Sequence
  ENSG00000262099_1 (sequence is synthesized)
agcttcagctcatgtgaagggtatcttctgaagctcgtttccatgaaactcgccctgttaaatatctcccttcccgtgattcgtgagagagctagtctaaaaacaaaaaacctccccttt

SEQ ID NO: 905182 - DNA, 120 bp, Artificial Sequence
  ENSG00000262099_2 (sequence is synthesized)
gctccaggtcggagataattttcctctagttgctgacagtttggtgaccaggcattactgaaaatgtgcacgttgaaccagcagcagatttgtgtttaagaataaactgacaaattttca

SEQ ID NO: 905183 - DNA, 120 bp, Artificial Sequence
  ENSG00000235435_0 (sequence is synthesized)
ctgaccaggaagtgatcttctgtttagaactgcgatatgcagaaggtccgtctgtcttcctttgatattcacctgtgaaaagaaagtgacagggtgaggaaacatggaattaagacgtgt

SEQ ID NO: 905184 - DNA, 120 bp, Artificial Sequence
  ENSG00000235435_1 (sequence is synthesized)
agccttcaaagggttctgcatagcaaacaacagacatggaaccatgaacaagcaaactaaagggagccttaatacattcaccctatgtgagaccagccagaatgaggactcctcaaggac

SEQ ID NO: 905185 - DNA, 120 bp, Artificial Sequence
  ENSG00000235434_0 (sequence is synthesized)
cgggggcccaagggcagaaagggctgcagggatagcctcatcagagggcactcaggcaatggaagagatgtggctgtgtttctgctctctgcagaagagagtcctggaggagggccagca

SEQ ID NO: 905186 - DNA, 120 bp, Artificial Sequence
  ENSG00000235434_1 (sequence is synthesized)
tggtgactgattcggccaatgcttcttgaagaggagtgaatatgggcagagtctgaggtggagcctgaagcagatctaccccaggggaattcaaaagtgtctccggagacttaaaatgtt

SEQ ID NO: 905187 - DNA, 120 bp, Artificial Sequence
  ENSG00000235434_2 (sequence is synthesized)
aaattcatctaggtttcacattcttctccatgttctatttgtgcttactgcaacattagaatcccgaagcatgcacgaatccttccaaatctccaaataaaacatatttgtttgttttaa

SEQ ID NO: 905188 - DNA, 120 bp, Artificial Sequence
  ENSG00000235437_0 (sequence is synthesized)
aagtcacgtgagaacctggggacgctaggttccggaacctgacctgagctggggcctgtgcttccagcgggtggtggggggcctggtgtgctggcatcaagtaagccgactacctcggca

SEQ ID NO: 905189 - DNA, 120 bp, Artificial Sequence
  ENSG00000235437_1 (sequence is synthesized)
aaggcttagggacaagagaccagcagcctgaactggctggggcatccggaaggcttagatcttgtggccaagagttcagaccgtggcgaagtggagagtgacatgcagttggatggcggt

SEQ ID NO: 905190 - DNA, 120 bp, Artificial Sequence
  ENSG00000235437_2 (sequence is synthesized)
gactgcgtggtcctgcaaccctggttccagtctggcaagcattgtagacctggctgctgaagactgacggggcccagggtccgctgcccccaccgccatcaccacctcggaacccagggt

SEQ ID NO: 905191 - DNA, 120 bp, Artificial Sequence
  ENSG00000235437_3 (sequence is synthesized)
tgatcaacgacgccctttttcctttttatactaaagtaagaaataagaatgttagcccaaactgcactattttgcagacccctaccattttacaaactggtcagagtggaaaattccacc

SEQ ID NO: 905192 - DNA, 120 bp, Artificial Sequence
  ENSG00000235437_4 (sequence is synthesized)
agggcctgagctgtgagaaacatcctgtcaggcaggtcccaggcctaacccctggctgcactaaattccttcattatcagcagccaaacacaccgcccccaccccattttcacaacaatc

SEQ ID NO: 905193 - DNA, 120 bp, Artificial Sequence
  ENSG00000235437_5 (sequence is synthesized)
ccagacctctcctgcccgggactgtaactggtccagcctgtaagcgggaagggggctctggcactagctggtaccccctctccgcaggtctttctcccaataaatctgtgttgccattga

SEQ ID NO: 905194 - DNA, 120 bp, Artificial Sequence
  ENSG00000235437_6 (sequence is synthesized)
cgtggtatggaagaaaattcagctgaaatttgctagaaaatgagttgttttggaaagagactgtagagaaaggcaaatggaagaagaaagcttctgtgcccccacagataccgactgaaa

SEQ ID NO: 905195 - DNA, 120 bp, Artificial Sequence
  ENSG00000235437_7 (sequence is synthesized)
agtgttagcatgagcaaaagttcctatctaatattatatgctttcctttgctcccagcattccacaatcacgggctacttcaattctgcctgctgagctgatttaataatctggaagagg

SEQ ID NO: 905196 - DNA, 120 bp, Artificial Sequence
  ENSG00000235437_8 (sequence is synthesized)
cccatccgaaaggcactggcccatgacactctccacttccaatcttaaatcttttacttcataccttgtctcagatctctcctggtaccccttccccacgcccttagataatccatctca

SEQ ID NO: 905197 - DNA, 120 bp, Artificial Sequence
  ENSG00000235437_9 (sequence is synthesized)
attcctcatgctaattgaggagctatggctgcaaggcaccttccaggatttcacacctacacaaatctcctttttctccttttgccttctctgcttatgggatattctgagtccccaccc

SEQ ID NO: 905198 - DNA, 120 bp, Artificial Sequence
  ENSG00000235437_10 (sequence is synthesized)
ccaatcactgacagctgggcccccttcatcagcctcacacaccacgtattaagtcagtcacaatctcccctctcctctaactgctggatttgtctttctacacacacccaatgattcacg

SEQ ID NO: 905199 - DNA, 120 bp, Artificial Sequence
  ENSG00000235437_11 (sequence is synthesized)
gctcttccggctgacctacttacatggacacagtccaacgtgagcttacacatttcttacttggctataccattcttggctgattcattcctgaaaccggttcataacctggaaactcag

SEQ ID NO: 905200 - DNA, 120 bp, Artificial Sequence
  ENSG00000235437_12 (sequence is synthesized)
ctaaacacctttccttcaaactcagctctctcagcatggtttcaggtagggctgttgccctccttcacctaatagcttctggactaacatccatacaaaccaacacagcatcatctaaac

SEQ ID NO: 905201 - DNA, 120 bp, Artificial Sequence
  ENSG00000235437_13 (sequence is synthesized)
caccaatatgggggtaccatttctactcaaacttccttcatatccccaccccccttatgtctcagccgaacctaccctaatccagcccacgccacaatggtgggacaggttccccagtcc

SEQ ID NO: 905202 - DNA, 120 bp, Artificial Sequence
  ENSG00000235437_14 (sequence is synthesized)
gaaggtgttatgcttttctggctcgcctaccatccacacatccctacacctcaccaccggatcctcttttctttccttccatccaattcctggcttccccgctgccaactctgctctcta

SEQ ID NO: 905203 - DNA, 120 bp, Artificial Sequence
  ENSG00000235437_15 (sequence is synthesized)
tgtctccagtttaaaggtgccccctggaaaaaatgtaacaattccctcacctgtgactggtacctgacagccaccacaccggggcagcaatggctaacggttgacaaagacaatttcttt

SEQ ID NO: 905204 - DNA, 120 bp, Artificial Sequence
  ENSG00000235437_16 (sequence is synthesized)
ctctctccaaaaccaaacagccttcatcaactccctagccaagactccctatcaggcccttacaggtgccgctctggctggcagttacccaatttgggaaaacgaaaataccctatcatg

SEQ ID NO: 905205 - DNA, 120 bp, Artificial Sequence
  ENSG00000235437_17 (sequence is synthesized)
gctacctaccttcacctacaacttctgcctgtccacccccagtctcttctttttgtgtgatacaaactgatatctttgcctaccagccaactggtcaggaacttgcaccctggtctttca

SEQ ID NO: 905206 - DNA, 120 bp, Artificial Sequence
  ENSG00000235437_18 (sequence is synthesized)
ggctccaaccatcaacatcctaccccctaaccaaactattctaatttctgtagaagcctctatctcctcttcacccataagaaataaatgggctctacatctcatcaccctgctaacagg

SEQ ID NO: 905207 - DNA, 120 bp, Artificial Sequence
  ENSG00000235437_19 (sequence is synthesized)
attaggcatcactgctgcacttggcactggaatagcaggcataaccacctcaatcacctcataccaaacactattcacaaccctttctaacaccgtagaagatatgcacacttccattac

SEQ ID NO: 905208 - DNA, 120 bp, Artificial Sequence
  ENSG00000235437_20 (sequence is synthesized)
cagtctccaacgacaattagacttcctcgtgggagtcatccttcaaaactggagagtcctggacctcctaaccactgagaaagggggtacctgcatatacctccaggaagaatgctgttt

SEQ ID NO: 905209 - DNA, 120 bp, Artificial Sequence
  ENSG00000235437_21 (sequence is synthesized)
ctgtgttaatgaatctggcattgttcatatcgcagttcgtaggcttcatgacagggctgcagagctttgacatcaagtcgctgactcctggtggcaaggatcatcccttctaagatggat

SEQ ID NO: 905210 - DNA, 120 bp, Artificial Sequence
  ENSG00000235437_22 (sequence is synthesized)
accctgggttgcccccttcctaggacccctgatcttcctcttcctgttactaatgattgggccatgcatatttaaccttgtatcccgcttcatttcccaaaggctgaattgttttatcca

SEQ ID NO: 905211 - DNA, 120 bp, Artificial Sequence
  ENSG00000235437_23 (sequence is synthesized)
ggcaagcatgcaaaaacacattgataatatatttcacctttgccacgtctaataccagagcctacgaggaaaccattcggaagctccagaacccaggccctaatcacaacgcccctatcc

SEQ ID NO: 905212 - DNA, 120 bp, Artificial Sequence
  ENSG00000235437_24 (sequence is synthesized)
ctttcctttgctcccagatgatgtcagaagtgggatccaaagtagagcttataatgacacctaggagtgctgagtgaccaagcaaggtacccaccaggccgattatgtccattgttctct

SEQ ID NO: 905213 - DNA, 120 bp, Artificial Sequence
  ENSG00000235437_25 (sequence is synthesized)
tggagcagctggtcatcatggtaagttctctctcagattcagaagctccgcatatttgtgttttgagctctccaagtttctatgagcccatttctaatccaaactgcgtttggaagtcat

SEQ ID NO: 905214 - DNA, 89 bp, Artificial Sequence
  ENSG00000235437_26 (sequence is synthesized)
tatgagcccatttctaatccaaactgcgtttggaagtcatgccaaaaactgaactgggtccagaatcaaattagatctggtaattaagt

SEQ ID NO: 905215 - DNA, 120 bp, Artificial Sequence
  ENSG00000235437_27 (sequence is synthesized)
gcaaggataaaatttggctttcactcttgaacaagattttcatgtaatattaaagaataatgaatgttttttttcaactttgaataaactacaggaaaaaaaaagaaagatacaacaaaa

SEQ ID NO: 905216 - DNA, 120 bp, Artificial Sequence
  ENSG00000235437_28 (sequence is synthesized)
gattgtttggaaagctaagtcttccctctattaatgaataaaggtttttgccttttcaaaattttcaaattatcattctggctagataaataacttatggtgacctggaatcctattcta

SEQ ID NO: 905217 - DNA, 120 bp, Artificial Sequence
  ENSG00000235437_29 (sequence is synthesized)
caatattaagtgttttaaatctttaacatagttgacaggcttcccaaaatcaaatttcaccttcaaaattaagtattttttaacctctaactgtgggatgctgcagagggcccatgaagc

SEQ ID NO: 905218 - DNA, 120 bp, Artificial Sequence
  ENSG00000235437_30 (sequence is synthesized)
atcaaaaagagaggtaaacagaattatttgacatgctaacttacaagagaagcattgtcaaaataagaaataatgtttaacgttttgaaggttatatttcagtaaatgttattaatatat

SEQ ID NO: 905219 - DNA, 120 bp, Artificial Sequence
  ENSG00000235437_31 (sequence is synthesized)
gttgtaaaattatattacattcatcaaattataatatgtttgagtatatgctatcaatcatgattatggttattatgttgttattgtaggccacagaaataaccaaatttccttgtcatt

SEQ ID NO: 905220 - DNA, 120 bp, Artificial Sequence
  ENSG00000235437_32 (sequence is synthesized)
cctagaatatggtgtgttttaggaggtttatgaaaggatggaagggaccctgaaaagcactcttgaatacatgtttctgataactttagaatcatatcatttggactgggtaagaattcc

SEQ ID NO: 905221 - DNA, 120 bp, Artificial Sequence
  ENSG00000235437_33 (sequence is synthesized)
tggaacttggataaaaagactggtttataaaactgccaacccaagtagtacaaaaattaattgaataccatgaaaataccttgccagattttcatgctaaatcagccaatactgaaattg

SEQ ID NO: 905222 - DNA, 120 bp, Artificial Sequence
  ENSG00000235437_34 (sequence is synthesized)
aacaccatggtgtaagtcaaattacctgtgataacctatcagttttcagtgctatgcacctaaattgaagaaacaactggtattcaagagaacataagtccaatgttaagcacggactct

SEQ ID NO: 905223 - DNA, 120 bp, Artificial Sequence
  ENSG00000235437_35 (sequence is synthesized)
tggagatccaggacagccaccttgtacttcctgagttcttaaaccttttgttattaaaagttatgcattccacgacacatcgtggaaaaaataaaatgatccaaattaaatatatattgg

SEQ ID NO: 905224 - DNA, 120 bp, Artificial Sequence
  ENSG00000235437_36 (sequence is synthesized)
tatagtgacttctcaattgctaaaatagtttctgaccaatgtttggtttgtcaaacccatattgctgggaagacaatgcttcaggtacattctgttacctgatggcccactgaaacattt

SEQ ID NO: 905225 - DNA, 120 bp, Artificial Sequence
  ENSG00000235437_37 (sequence is synthesized)
acagagggatttcattcaattattatttccaatgcatgttttctggttttataaaagctttcccatgcaagatagctaattttacaataggatcatgttgtgccacagtgtattttcacc

SEQ ID NO: 905226 - DNA, 120 bp, Artificial Sequence
  ENSG00000235437_38 (sequence is synthesized)
aagtaaagaaagctttgcatggttcactgactgagaacaataaacctcttcttaatcgagaacctgaagatcagatcttctgagaacatcagaaaaagacttcccttgccatccacactg

SEQ ID NO: 905227 - DNA, 120 bp, Artificial Sequence
  ENSG00000235437_39 (sequence is synthesized)
cagcaaaacttcaggaccttaaatgctgggttcataatttcacaactgagaagggaccctccacactcttggaactgtacacctagaccaaactaaaatacagtcactcttgctaaatgt

SEQ ID NO: 905228 - DNA, 120 bp, Artificial Sequence
  ENSG00000235437_40 (sequence is synthesized)
taatcaaactaagactttaaggaaacaagcaaatcctagaaaagaccaggtttttgtattttttttcctcctgtaaacagtaccttccaacataaggaggtaccctctactctaacactt

SEQ ID NO: 905229 - DNA, 120 bp, Artificial Sequence
  ENSG00000235437_41 (sequence is synthesized)
acttacaaaaataataagaataataacctggagtccttgtaaggtgaaaccttacaaaacccactgctctgctgtttcctagtgggtttcaagaggaaataagtacttttacagtggtga

SEQ ID NO: 905230 - DNA, 120 bp, Artificial Sequence
  ENSG00000235437_42 (sequence is synthesized)
tgaaccaaccagtgatctcttatggctgttcaaaagtaacaagagagatatcaccttttgtcataactcaagtcttatgaatggccctcaccataatgatgctttttgactgagctcttc

SEQ ID NO: 905231 - DNA, 120 bp, Artificial Sequence
  ENSG00000235437_43 (sequence is synthesized)
tgaatcttcctctctctacagcccttaggattaagggttctcttactgaatgtattcttaaactgaacacttattaatcttccagatatcaccttttgtcataactcaagacttatgaat

SEQ ID NO: 905232 - DNA, 120 bp, Artificial Sequence
  ENSG00000235437_44 (sequence is synthesized)
tgatgggatcaatcatactccaaaccttgacactgcacaatatacccatgtaacaaacctacacatgtacctcctgaatctaaaataaaagttgaaattctaaaaaatgaaattattctg

SEQ ID NO: 905233 - DNA, 120 bp, Artificial Sequence
  ENSG00000235437_45 (sequence is synthesized)
gagctttaagattcaatgcctctctgctgggttttatacttgcttagaacctcttacttctttctttctttgattcatttctcccttttggaatggaaatgtctaaactatgtgcattcc

SEQ ID NO: 905234 - DNA, 120 bp, Artificial Sequence
  ENSG00000235437_46 (sequence is synthesized)
accattttatctcagaactaaataactttttttataggctcataactggactttggtcttttaagttggtgctgaaacaagttaagactttagagactgatggaattattgtattttgta

SEQ ID NO: 905235 - DNA, 120 bp, Artificial Sequence
  ENSG00000235437_47 (sequence is synthesized)
ttcgagaagaacatgacttttagggggccaggaacagaatgctatggtttgggtatagtttgttctgttgaaactcgtgttggaatttgatttccaatgttgcactgttgggaggaggat

SEQ ID NO: 905236 - DNA, 120 bp, Artificial Sequence
  ENSG00000235437_48 (sequence is synthesized)
tccagtgggaggcatttgagctatgggggtgaatccctcattaatacactaataccttttcatggggatgaatgagttctccctctcatgggaatggactagtttctaagatattgtgat

SEQ ID NO: 905237 - DNA, 120 bp, Artificial Sequence
  ENSG00000235437_49 (sequence is synthesized)
ggcaaaatattctggctcctttagtttctatatcttgcttcctctgttgccatgtgctcctttgcacacacactctcctgttcctctttccaccatgagtgctagccatacctttcctat

SEQ ID NO: 905238 - DNA, 120 bp, Artificial Sequence
  ENSG00000235437_50 (sequence is synthesized)
tcctttcctcctataacctgtcttgccatgcttcaagtctgaaaccctcatcagatgcagctgtccaatcttgaacttttcacccactagaattgtgaagcaaataaacttattttcttc

SEQ ID NO: 905239 - DNA, 120 bp, Artificial Sequence
  ENSG00000235437_51 (sequence is synthesized)
atgaatatcatcccccctgttcagcctgaagaagttacagaagatgaatcttccactctctacagcccttaggattaagggttctcttactgaatgtattcttaaactgaacacttatta

SEQ ID NO: 905240 - DNA, 120 bp, Artificial Sequence
  ENSG00000235437_52 (sequence is synthesized)
atcttccagatatcaccttttgtcataactcaagacttatgaatggccctcaccataatgatgctttttgactgagctcttctctaacctgaatgcaagaggttaggcatgaatatcatc

SEQ ID NO: 905241 - DNA, 120 bp, Artificial Sequence
  ENSG00000235437_53 (sequence is synthesized)
gccttgcccttggatttctctgccaaacccgtggcaacactccagaagccattgcatacttctgaaaactggactctatcatccaaggctggcctccatgcttgaaagttctggatgcag

SEQ ID NO: 905242 - DNA, 120 bp, Artificial Sequence
  ENSG00000235437_54 (sequence is synthesized)
ctacattgctggcctcagaggcacaaaaactcaccctctaccagcacattactattgcatcttcccataacttatgggaccccatgagccattgatctcttcttttcctcctgccatcca

SEQ ID NO: 905243 - DNA, 120 bp, Artificial Sequence
  ENSG00000235437_55 (sequence is synthesized)
gcttacagcaaccctctaacaccttccagagatgtaaaattctaaatccaaccaccctcctccctataagtacttccaattctgaatcccccactcttgcctagacctcttagcctccct

SEQ ID NO: 905244 - DNA, 120 bp, Artificial Sequence
  ENSG00000235437_56 (sequence is synthesized)
ctcctcccctttccaacacatttcagaagcccctttgcggaaggaacccacatggttcattgatggaagctcttttaaggaaccatatctggcagctggctatgccatcattgccgaaaa

SEQ ID NO: 905245 - DNA, 120 bp, Artificial Sequence
  ENSG00000235437_57 (sequence is synthesized)
caaactcctataatccaatgctctctcatcacatatcacctcacaacaagcggaactatttgccctaaccaagaccctcactctagcaaagggaaagagggtcaacatttacaccaattc

SEQ ID NO: 905246 - DNA, 120 bp, Artificial Sequence
  ENSG00000235437_58 (sequence is synthesized)
caaatatgcataccatgtcctacagtctcacactgtaatctggcaggaaaggggtttttctaactacaaaaagaaccgccataataaatggcaaactcatacacaagccgctggaggcag

SEQ ID NO: 905247 - DNA, 120 bp, Artificial Sequence
  ENSG00000235437_59 (sequence is synthesized)
ctaaactaccactagaggccgtcattatccattgcaagggacaccaaaaggctacagatgccataaccaagggaaacttcttagcagattcggcagcctggcaggcagcccttagaacac

SEQ ID NO: 905248 - DNA, 120 bp, Artificial Sequence
  ENSG00000235437_60 (sequence is synthesized)
tattgttattgcccattttccctagcatacacccaagaagaaaaaggtgccttgctggctccagggctgttcataacgaaagctgaatttacttagactacaaactcatcctacccaaga

SEQ ID NO: 905249 - DNA, 120 bp, Artificial Sequence
  ENSG00000235437_61 (sequence is synthesized)
cccaaaaactttctgttctcacccacatccataaccaattccatgcgggttatctcccgttgctccaatttctaaaaacctgtatacattcccttaccatggccatcagcttggaccgcc

SEQ ID NO: 905250 - DNA, 120 bp, Artificial Sequence
  ENSG00000235437_62 (sequence is synthesized)
tcactaaaggttgctctgcctgcagtcagacttcccctcaggggcccttagaccacctccttttccctcccttcaggcccaaaggccagttgccgggacaggattggcaaattgacttca

SEQ ID NO: 905251 - DNA, 120 bp, Artificial Sequence
  ENSG00000235437_63 (sequence is synthesized)
ctcatacgttcccccataaagaaagtctgatatctcctcacgatggtagataccttttcaggtggatagaagcctttcttactaccactgaaaaggcacacaccattgcctctaccttcc

SEQ ID NO: 905252 - DNA, 120 bp, Artificial Sequence
  ENSG00000235437_64 (sequence is synthesized)
tcacacacatcatcctttgattcagcctcccctcatctatacaactggacaattgaccagcatttatctcccaagtcactcaacaggtttctaagtctttaaacatcatatgggtttttc

SEQ ID NO: 905253 - DNA, 120 bp, Artificial Sequence
  ENSG00000235437_65 (sequence is synthesized)
acattctctatcacccccaatcctcgggtaaatttgaacaggcgaatgccctcttaaaacaacagttaaccaaactttccctagagatcaaaatgaaaactgaatatcacttcttccctt

SEQ ID NO: 905254 - DNA, 120 bp, Artificial Sequence
  ENSG00000235437_66 (sequence is synthesized)
ggcccttatgtgcctcagggccctcccccgaaaacctctaaatctaagtccttttgaacttttgtatggacgttctttcgtcctacagaactttgctccatcccctcccttacaggacac

SEQ ID NO: 905255 - DNA, 120 bp, Artificial Sequence
  ENSG00000235437_67 (sequence is synthesized)
ctggccagcactgcacctcactcaacacttagtccgacagtacactgacactcacctccccaaacctgaggattcttcccaattcactttcttacccttacagccaggagactgggtctg

SEQ ID NO: 905256 - DNA, 120 bp, Artificial Sequence
  ENSG00000235437_68 (sequence is synthesized)
ggtagcacacccctcctcccctttccaacaaaatggaagggtccctatcaggttatattcaccatccccgctgctgcaaagttaacatcctttccctattgtatacaccattccaaattt

SEQ ID NO: 905257 - DNA, 120 bp, Artificial Sequence
  ENSG00000235437_69 (sequence is synthesized)
tggcaggggaaaagtggcagcactcaaccatcaaaggcaaggaaaccaaaatcatggtattctgaagaccagagatatgaatctccttcatttggcatcccaccggccccgatctgtttc

SEQ ID NO: 905258 - DNA, 120 bp, Artificial Sequence
  ENSG00000235437_70 (sequence is synthesized)
actgctaatgttctgctgccaaaactatacaagctgcctcacccctaggcccagggactatcacagaagagagccaataaaacttttcttttgagtgatttgcagcttttaacaaatatc

SEQ ID NO: 905259 - DNA, 120 bp, Artificial Sequence
  ENSG00000235437_71 (sequence is synthesized)
tcagagaccacatcattgaacatctatgtgcgcatcctggagaagtcccacttactgaaagccaataaaacttttcttttgagtgatttgcagcttttaacaaactgaacctgcttattt

SEQ ID NO: 905260 - DNA, 120 bp, Artificial Sequence
  ENSG00000235437_72 (sequence is synthesized)
ccccaaggccaagcccctggctatataaaagaagcctttgagattcccaccttgtggtgaagtatctaatcatgaaagactctgtggatgactgattgtcagacgatgatgtcagaagtg

SEQ ID NO: 905261 - DNA, 120 bp, Artificial Sequence
  ENSG00000235437_73 (sequence is synthesized)
cttaatcaaggtggtaaaaatcttatacactaaaaaccatatataattgcttttttaaaaaaatcaaaaaacaggaaataaatgaaatgtcatccagagttcatggattggaggactgaa

SEQ ID NO: 905262 - DNA, 120 bp, Artificial Sequence
  ENSG00000235437_74 (sequence is synthesized)
actattcccttggatctggcttcccaaagtctttttgctttcacctggtcagacccagatactcacacatctacctaactaacagactgtactcccacaggggttccgggatagccccct

SEQ ID NO: 905263 - DNA, 120 bp, Artificial Sequence
  ENSG00000235437_75 (sequence is synthesized)
cctatttgggcaggctctcaccaaggaactaatcgagcttccccttgctcctagcagcctccttcaatacatcaatgacctccttatgtgtagtccctcctttgatctatccatcaacac

SEQ ID NO: 905264 - DNA, 120 bp, Artificial Sequence
  ENSG00000235437_76 (sequence is synthesized)
atcacccaacttctaaatttcctctatggccagggatatcaggttttacctacaaaggctcaagtagcccaaacccaagtcactaaccttggactcaccctaacccctaattcttgagcc

SEQ ID NO: 905265 - DNA, 120 bp, Artificial Sequence
  ENSG00000235437_77 (sequence is synthesized)
atgccagcccgatggaaggagctaatacaggatgtgccccttccccacaccaagaaggacccttcctttttgggccttgttgggtacttccagctgtggatcattaactttggcctgttg

SEQ ID NO: 905266 - DNA, 120 bp, Artificial Sequence
  ENSG00000235437_78 (sequence is synthesized)
accaaaccactctgcacggcatcacgtgggtccatcctagaacatttggacccagcttgcccattaactcccacttctaaaaactgaaagatgcccttttaatgtcccagcactaggact

SEQ ID NO: 905267 - DNA, 120 bp, Artificial Sequence
  ENSG00000235437_79 (sequence is synthesized)
cctcatggggagatccctatgatcagttgacagaggaagacaaaagactagggcctgtttcacacattgttctgcatgatatgcaggcactaccctaaagtggacaactgcagcactaca

SEQ ID NO: 905268 - DNA, 89 bp, Artificial Sequence
  ENSG00000235437_80 (sequence is synthesized)
aaatcttcccagtgggcagaacttcgagtagtcgatggccagatgtgcgattatagactgattcatgggccgtagccagtggtttggct

SEQ ID NO: 905269 - DNA, 120 bp, Artificial Sequence
  ENSG00000235437_81 (sequence is synthesized)
ggctggatggtcagggacttggaaggagaatgattggaaaatgggtgacaaagaaatttgaggaagaggcatgtaaatggaccactctgaatggtcaaaaacgttgaagatatttgtatc

SEQ ID NO: 905270 - DNA, 120 bp, Artificial Sequence
  ENSG00000235437_82 (sequence is synthesized)
ctctgaatggtcaaaaacgttgaagatatttgtatcccatgtggctactcactaacgggtgacctcagcagcggaggattttagtaataaagtggataggatgacccgttctgtggacac

SEQ ID NO: 905271 - DNA, 88 bp, Artificial Sequence
  ENSG00000235437_83 (sequence is synthesized)
gacctggctacagccaccactgagtaaacttctatatggcagcacctctcagagtgattagccagctacctggtggcaggttgattat

SEQ ID NO: 905272 - DNA, 72 bp, Artificial Sequence
  ENSG00000235437_84 (sequence is synthesized)
ttatattggactcttccattttatgggtttgcctatcctgcatgaaatgcttctgccaagactaccatctgt

SEQ ID NO: 905273 - DNA, 120 bp, Artificial Sequence
  ENSG00000235437_85 (sequence is synthesized)
ccatctgtggactcacggaatgccttatccatcgtcctggtactccacacagcattgcctctgaccaagacactcactttatggctaaagaagtgcagcagtgggctcctcctcatgaaa

SEQ ID NO: 905274 - DNA, 83 bp, Artificial Sequence
  ENSG00000235437_86 (sequence is synthesized)
atggctaaagaagtgcagcagtgggctcctcctcatgaaattcactggccttaccatgttccccatcatgagaatggattggt

SEQ ID NO: 905275 - DNA, 71 bp, Artificial Sequence
  ENSG00000235437_87 (sequence is synthesized)
gctggggcaaagttctccagaaggctatgtatgctctgaataagagaatcaagggatggaagtggaagtgg

SEQ ID NO: 905276 - DNA, 90 bp, Artificial Sequence
  ENSG00000235437_88 (sequence is synthesized)
atcaagggattcctagtgatctactagcaaaatttttgcttcctattcctgtgacattactttctgctggcctagaggtcttagttccag

SEQ ID NO: 905277 - DNA, 120 bp, Artificial Sequence
  ENSG00000235437_89 (sequence is synthesized)
cattaaactggaagccaagattgccacatggacactttgggctcctcctgcctttaagtcaacaggccaagaagggagttaaagtgttgactggggtgattgaccgagattatcaagatg

SEQ ID NO: 905278 - DNA, 120 bp, Artificial Sequence
  ENSG00000235437_90 (sequence is synthesized)
tgaccgagattatcaagatgaaaccagtctactattccacaacagagttcttcagttttgggactccgactggctctccttgcttcttagcttccagatggcctattgtgggaccttgtg

SEQ ID NO: 905279 - DNA, 120 bp, Artificial Sequence
  ENSG00000235437_91 (sequence is synthesized)
tcaaaggcaaggtaagcatagctatcataatggacactagagaaaaaacagtaatcagaatagtctgactcatgtagagctctgggattggctaattaatcatggtgttcctagaagtga

SEQ ID NO: 905280 - DNA, 120 bp, Artificial Sequence
  ENSG00000235437_92 (sequence is synthesized)
aactgataggaagcctactgcattcctacttaatttatgtaagcagaaaacttctaggtagaatggacaaaagactaatttgaattgtaaaaacagaatcacggcccctcaatcaatttc

SEQ ID NO: 905281 - DNA, 120 bp, Artificial Sequence
  ENSG00000235437_93 (sequence is synthesized)
ccaacttgaaccagtttacacgcccagaaccccttgaatgaagggaaggccaggaccccttgaggaaaggctccactacactaccgatttaccagagtaactgtgcattggggaaaggga

SEQ ID NO: 905282 - DNA, 75 bp, Artificial Sequence
  ENSG00000235437_94 (sequence is synthesized)
atgttgattccaggggacccataatcaattaatggggttttagctcaggtccgacttacagtgggtccagtgagt

SEQ ID NO: 905283 - DNA, 120 bp, Artificial Sequence
  ENSG00000235437_95 (sequence is synthesized)
cagttaaagtaggggcttatggaggtcagtcaattaatggggttttagctcaggtccgacttacagtgggtccagtgagtccccaggctcatctgtggtcatttccccagtgccagaatg

SEQ ID NO: 905284 - DNA, 82 bp, Artificial Sequence
  ENSG00000235437_96 (sequence is synthesized)
aaaagtggcagcactcaaccatcaaaggcaagagccaataaaacttttcttttgagtgatttgcagcttttaacaaactgaa

SEQ ID NO: 905285 - DNA, 120 bp, Artificial Sequence
  ENSG00000235437_97 (sequence is synthesized)
cagtgatctcttatggctgttcaaaagtaacaagagagcagcaacatggatgcagggggaggccataatcataagggagttaacacaagaagaaacaacaaaattccacatgttttcatg

SEQ ID NO: 905286 - DNA, 120 bp, Artificial Sequence
  ENSG00000235437_98 (sequence is synthesized)
tgttggttgaaaaactacttattgaacgttaggctcactacctgggtccaaaattgccatgtaacaatcctacacatgtaacccctgtatctccctgtatcttaaacaaaagttgaaatt

SEQ ID NO: 905287 - DNA, 120 bp, Artificial Sequence
  ENSG00000235437_99 (sequence is synthesized)
cggaaaagaaactgccttcacggtatcccttatgtgttgctatatcgtgttttcagtttcatttgtctcaagatatttcatgatttcccttttttgatccattgcttattcatgtgtgtg

SEQ ID NO: 905288 - DNA, 120 bp, Artificial Sequence
  ENSG00000235437_100 (sequence is synthesized)
ttgttttgtttccacatatttgtgtattttccaattgtcctgttgttattaatttctagatccatcttattctgattgaaaaagaggtttgctattatttcaatcttcttaaatttgtta

SEQ ID NO: 905289 - DNA, 120 bp, Artificial Sequence
  ENSG00000235437_101 (sequence is synthesized)
agacttggtttgtggtgtaacatgtaacttgtcctggagaatgttccaggtgtgcttgaaaaggatgtctattctgcaaaatggatatgcaaaaatggctagcattcctatacaccaaca

SEQ ID NO: 905290 - DNA, 120 bp, Artificial Sequence
  ENSG00000235437_102 (sequence is synthesized)
ataggcaagcagggagccaaatcatgattgaactcccattcacaatttctacacaaagacggaaatacctagaaacacagctaacaagggaaatgaaggacctctttaaggagaaccaca

SEQ ID NO: 905291 - DNA, 120 bp, Artificial Sequence
  ENSG00000235437_103 (sequence is synthesized)
aaccacttctcaaaggaatcagagagaacacaaaaaaaatagaaaagcattccatgctcatggccaggaagaatcaatatcataaaaacggccatactgcccaaagtaatttctagattc

SEQ ID NO: 905292 - DNA, 120 bp, Artificial Sequence
  ENSG00000235437_104 (sequence is synthesized)
actatttgtgagtattcttaacttatgacaatatagttatttgcataagtgcaataagaatgttttcttttgtaacaggacaaaataaaagaaaccagttattttaccaaggctttgact

SEQ ID NO: 905293 - DNA, 120 bp, Artificial Sequence
  ENSG00000235437_105 (sequence is synthesized)
aaggctttgactggaatggcatgctttcctttaaggaatcgaatttggcttacagggccaataaaagccccttgggaaaactggcctcataccctgtctacactgtcccgtacagggttc

SEQ ID NO: 905294 - DNA, 120 bp, Artificial Sequence
  ENSG00000235437_106 (sequence is synthesized)
ctgacctgtagtaaataaagaatgtcactttctaacaggcccaggagccctaggttatcttgggacctcgaaaaaagaggaatttacctaactgataaatatttgatagtacaaacctat

SEQ ID NO: 905295 - DNA, 120 bp, Artificial Sequence
  ENSG00000235437_107 (sequence is synthesized)
ggctaggcttggctttggaaaaaaaccttatctgagattccttttgtggaacaaagtccaatcaaagccaatttaaaaagcctatgtgaaaaatgattatttttgctgtactttacacaa

SEQ ID NO: 905296 - DNA, 120 bp, Artificial Sequence
  ENSG00000235437_108 (sequence is synthesized)
ataatcaggctaagtgtaagactatggcgtatttttgcaaacaaatcagccctgttaggatttgtctttagtaaaaatgggagaatggagagatagaaaaaacatattttaaaaacaatg

SEQ ID NO: 905297 - DNA, 120 bp, Artificial Sequence
  ENSG00000235431_0 (sequence is synthesized)
gcaacaggctaggagaaacgaactttgagtagatgacctgggttctaaattctagttctgatcaggggagctaggataaggtgcatggatcccctgagcctacattttctcattttataa

SEQ ID NO: 905298 - DNA, 120 bp, Artificial Sequence
  ENSG00000235431_1 (sequence is synthesized)
ataaggagactaaaaccaataatgtctcaggaaacactggacaagctgtttgggctctctagccttggattcctcatttgtaagacaaagaagataatcctaccctattgcccatgttgg

SEQ ID NO: 905299 - DNA, 120 bp, Artificial Sequence
  ENSG00000235431_2 (sequence is synthesized)
tgtgggaatccacaaagaaggacacggcactgttccaagtcaaggttacagggagaatggaacaagtttcagtagaagaaacttcacctaacctctttaattccaacagttcttgaattt

SEQ ID NO: 905300 - DNA, 120 bp, Artificial Sequence
  ENSG00000235431_3 (sequence is synthesized)
cctgaaaaatctattgatggtttcacagcagtttcaatgttttaaacgatagtagtttcaccacctaagaagttgtctttcaataagaagaccaaagaggaagatataaaaagacttatt

SEQ ID NO: 905301 - DNA, 120 bp, Artificial Sequence
  ENSG00000235431_4 (sequence is synthesized)
ttggtgtatctctagggtattccctaagaactggtatacaatgggtctagatatttgaggaagtctgagttgatgcataggcaggtatggtcaatatgaaattaggcttatcagcctgat

SEQ ID NO: 905302 - DNA, 120 bp, Artificial Sequence
  ENSG00000235431_5 (sequence is synthesized)
ttgattcttactcagactggtaagaactgaggatataagggctgaggacataaaggtcaccccagatagccatcttgtgctgaacctgctttttggcaggtaagttcttgccaaccctaa

SEQ ID NO: 905303 - DNA, 120 bp, Artificial Sequence
  ENSG00000235431_6 (sequence is synthesized)
tgtatttccagtaccaccgtactcaattaaagatccagactcatctcttacaatagtaaaacatacctaagatcaggctataatgtttacacaagtttattattacctttagtattttat

SEQ ID NO: 905304 - DNA, 120 bp, Artificial Sequence
  ENSG00000235431_7 (sequence is synthesized)
tcaaataatatcacaaagcattaaaaatttcagaaataaacctatagacacacccctaaaactttatatgaatatctctgaggcaataggccatggttctctgcaggttagtggtgcatt

SEQ ID NO: 905305 - DNA, 120 bp, Artificial Sequence
  ENSG00000235431_8 (sequence is synthesized)
gttcactagctgttaaattattcagtgcttacacagtctccaaaccaaatgtatacttttcttttttcactcccattatctaagtagtcaccataaaatagcaatatttaccaaaaatat

SEQ ID NO: 905306 - DNA, 120 bp, Artificial Sequence
  ENSG00000235431_9 (sequence is synthesized)
ctctcatatctgttccatcttctccaattcaatagaattgtcagtgctaaaaaatctactatttagcttaagcctccttcaattatttatttttcataatgggagacactgtagcacaac

SEQ ID NO: 905307 - DNA, 120 bp, Artificial Sequence
  ENSG00000235431_10 (sequence is synthesized)
tgttaaatacacaagttctagacttagactgtgcgtggttcaaattaacgtctgactagtggtgtcatcattgccaaattacttaatttctctgacccattgcagaattaacaaaaagta

SEQ ID NO: 905308 - DNA, 120 bp, Artificial Sequence
  ENSG00000235431_11 (sequence is synthesized)
caataattatgatgcctactcctgcaagcattaaaacaaacatgcctatatacacatatatgtaaaatgtgttttataatatctggaacaaaatgtccattcaataaatattagctacta

SEQ ID NO: 905309 - DNA, 120 bp, Artificial Sequence
  ENSG00000272716_0 (sequence is synthesized)
cttcccggctgtccctgcactccgtggcggaaggcggctagagcggctccctctgagctctccgagagattggtcgggacctgaagcgttgaggttaagggcaaggcaaggagcaacgag

SEQ ID NO: 905310 - DNA, 120 bp, Artificial Sequence
  ENSG00000272716_1 (sequence is synthesized)
gagtttttcgttacgttagaaaaatttcgttgcgtgctgaagcgcttttacctgtgttgtatgatttaaccttatgaaaatggacagtattccagttttacaagtgaggaaagaagatta

SEQ ID NO: 905311 - DNA, 89 bp, Artificial Sequence
  ENSG00000272716_2 (sequence is synthesized)
aaacttgccttgagtcctacatatagtttgctgtagtagcagaatttgaactcggaccgactaatggtctacttaataaaatgctattt

SEQ ID NO: 905312 - DNA, 120 bp, Artificial Sequence
  ENSG00000272716_3 (sequence is synthesized)
actcggaccgactaatggtctacttaataaaatgctatttggattctctataaaattaataatatagaagtaatgttaattatagaaaacttggaaaatattaaattcattcgataaaga

SEQ ID NO: 905313 - DNA, 120 bp, Artificial Sequence
  ENSG00000231992_0 (sequence is synthesized)
gcagtatggaggtggagtcaccatctgttctcaaggatgggaaacagactttaactgaacattaggaatgagctgtattcacctggcattggtatcaggcgctggatggattacaccaga

SEQ ID NO: 905314 - DNA, 120 bp, Artificial Sequence
  ENSG00000231992_1 (sequence is synthesized)
gactgttttttgatgtgaagactgaattagccctggcagtgctgtttcccagggccctatctctgggagtcctcctgctggaagggaagtgctctcatagctgatagttaagacatgtac

SEQ ID NO: 905315 - DNA, 120 bp, Artificial Sequence
  ENSG00000231992_2 (sequence is synthesized)
agtcatgcattgcttaacaatggggatacattctaagaaatgtgtccttaacacaattttatcattgtgtgaacatcatagagtgcacttaacacaaacctagatggaatagcctaccac

SEQ ID NO: 905316 - DNA, 120 bp, Artificial Sequence
  ENSG00000231993_0 (sequence is synthesized)
cgtcctaccagtgccaggactgccagagcgggaggagcgcggcgcgggccagccgggactgctggacagcggggtccaggctagaggcgagcgagcggtcagtgacggctgtggaggagg

SEQ ID NO: 905317 - DNA, 120 bp, Artificial Sequence
  ENSG00000231993_1 (sequence is synthesized)
agaaaaagactgtttaaccaatttttaggtacggaattacaacctgaaatcaagccttcatttccctctcaacttaattaccacttcctataagaacttgattatatgtctgagaaccga

SEQ ID NO: 905318 - DNA, 120 bp, Artificial Sequence
  ENSG00000231993_2 (sequence is synthesized)
gatagtaaaatgaggagtctgactgaacaatcgagattactaccattggacaaaccctgagaggaattactcttcaattctcctggctttcgttatcaattatatgatattaaagagaga

SEQ ID NO: 905319 - DNA, 120 bp, Artificial Sequence
  ENSG00000231990_0 (sequence is synthesized)
agggccagcgggcccaggagctcctagtcatgggatttcatggacctatcactttttaaaagttaggtctgctcactctgtgtcatcaaggacagacccaatggccctaacacgaaccca

SEQ ID NO: 905320 - DNA, 120 bp, Artificial Sequence
  ENSG00000231990_1 (sequence is synthesized)
ctgccatttgttatctccaagcagcagagctctcagcatcaaggactttctaagaaaggaccatggtgatggctttgtgacctgcctggcactcctgatacttcccatggttgaaacaga

SEQ ID NO: 905321 - DNA, 120 bp, Artificial Sequence
  ENSG00000231990_2 (sequence is synthesized)
aatgggtctcctgccagtgaacccaagaggatgaggaagttggtttaccaccttgatcttattttttccagtatttttccaacttgctacagtaacagaacctttggtccagagcctggg

SEQ ID NO: 905322 - DNA, 120 bp, Artificial Sequence
  ENSG00000231990_3 (sequence is synthesized)
caggaggccagcgaagccaagtccttcagtacagcctgggagcctccaggaagctgttaggagttgccatgatgggtgcatttggactcacagaatctgccttccaatctcagtgctgct

SEQ ID NO: 905323 - DNA, 120 bp, Artificial Sequence
  ENSG00000231990_4 (sequence is synthesized)
tctactcctttgctaccttaggtctttgaagacaggtccataccttgggtgtttgtatttggacaaccacagacattgccaagaaatgtatctgttctacttgcacaccttcaccacctg

SEQ ID NO: 905324 - DNA, 120 bp, Artificial Sequence
  ENSG00000231990_5 (sequence is synthesized)
gatgctgcttgaggacacagatctggtccatcagatttctctctgtactcctctctatatttcgccatatttgatatagacccatcaatggctccctagaataaaatctcaactcttcac

SEQ ID NO: 905325 - DNA, 120 bp, Artificial Sequence
  ENSG00000231990_6 (sequence is synthesized)
caggtgaggtcagcctcaggatacctccaccactgaccagctgccgaacctctctgggccacaatgtcctcctctgaaaatgaaaatcgtggtgttaccacctcacgggaccgacccgag

SEQ ID NO: 905326 - DNA, 120 bp, Artificial Sequence
  ENSG00000231990_7 (sequence is synthesized)
gatgaaggagctggccacagaggtgcttccaggacagactggtgcccagaagactccaggacaacagctgctggtatcactgcgtggggcagtgagacatcggggctgttcccgctgcat

SEQ ID NO: 905327 - DNA, 120 bp, Artificial Sequence
  ENSG00000231990_8 (sequence is synthesized)
gattgccccgtcccaggttgttgcccacaaagtcccctctatatgcgctgtgcccccagaattgcgcagcgtcagttataaacgtaatactgtgtggccggtgccgttgtaagcactgta

SEQ ID NO: 905328 - DNA, 120 bp, Artificial Sequence
  ENSG00000231990_9 (sequence is synthesized)
gatgagtgtgtttattctgtttctccacacctctgtgaggtgggcattcttgtgacccctattccatcggcgagaatcgggggcagccagatccaataacttgccgcaggctgggctggc

SEQ ID NO: 905329 - DNA, 120 bp, Artificial Sequence
  ENSG00000231990_10 (sequence is synthesized)
gtagcatttcagctgtatgactctaacagcaattacagtcatggccttcgccgccgccaccattcccgttccggttggagaacacaatgcaccgcgcacaggctgtgccaaagtccacag

SEQ ID NO: 905330 - DNA, 120 bp, Artificial Sequence
  ENSG00000231990_11 (sequence is synthesized)
gcacccttcggcctccatcatcgcgccctcttcacagatgagcaaacggaggccagacgtcaccggcaggcggcgctgcggtgcgcgaggcctcgcacctgcacgggaagcagcggagag

SEQ ID NO: 905331 - DNA, 120 bp, Artificial Sequence
  ENSG00000231999_0 (sequence is synthesized)
ggctcagccaccgcagctcctcccctgggatgaaaaagcactctgacgtcttgaaagctggcagctctctgtttggaaaatctctgcccagtgaaaaaatgtaccgacaagattactaag

SEQ ID NO: 905332 - DNA, 120 bp, Artificial Sequence
  ENSG00000231999_1 (sequence is synthesized)
taacacagtcttctgggaatgccttatcaatgccagctatttgaagagcacccaaagtcaaactagtgctccgcgctggcagtctggaaaaggcagatctctcctatagccacaatgtgg

SEQ ID NO: 905333 - DNA, 120 bp, Artificial Sequence
  ENSG00000231999_2 (sequence is synthesized)
gcattcattagctatgccaatcagttgctcagactcggactttgaaccggggctaacattacaaagaagtggaagccatgaagaatctattctgtgggaggcctagggtcacaacagcag

SEQ ID NO: 905334 - DNA, 120 bp, Artificial Sequence
  ENSG00000231999_3 (sequence is synthesized)
caacatcaagttttcaagaacagaagcagtgctctgagctgatatactctataaatgatgtccttctgctccacatgcatgcggaatcttttcactttttcaaagatggctttggcctgt

SEQ ID NO: 905335 - DNA, 120 bp, Artificial Sequence
  ENSG00000231999_4 (sequence is synthesized)
tcaccctccttcttgtccaggacactggaagttgggctttctatgccagctgactccaaacctggctgtgggtagggcaatgactgtttgccggaatctatgtcagctgaacaccctgag

SEQ ID NO: 905336 - DNA, 120 bp, Artificial Sequence
  ENSG00000231999_5 (sequence is synthesized)
gacgaaagcaaaatcttggacttggagagtttcagaggcctcactgactgctcagccactgtttctgaaagggcgcgggtggtccatggagaatcgaagcacttgtgaaggatggccaca

SEQ ID NO: 905337 - DNA, 120 bp, Artificial Sequence
  ENSG00000231999_6 (sequence is synthesized)
aaatgctcgagcctggaactggtactggggtagtgaagccaaaagttgctgcaggctgcaaagatgagcgtgtgcaagagcaccagataggggaaaaactttgcaaaccaatggagctgt

SEQ ID NO: 905338 - DNA, 120 bp, Artificial Sequence
  ENSG00000231999_7 (sequence is synthesized)
ttctcgtaacagacggcatcaatataggagtactgctgtcggtggaggtcattctgaattcggagggggagcggaagcggtgtcccaggattagaggatgtgttcatgctggctttcagg

SEQ ID NO: 905339 - DNA, 120 bp, Artificial Sequence
  ENSG00000231999_8 (sequence is synthesized)
atgtcccaaggcacggcacagtgattgtcaaattccactttgcatggaagacagcacagaaccctgctctgcgtcagctggagagctccggccagcacggccaccagcagcatgatcagt

SEQ ID NO: 905340 - DNA, 120 bp, Artificial Sequence
  ENSG00000231999_9 (sequence is synthesized)
gtgatgtaataccagaagacgtcccaccatggttttaagatgtgataagatgactgggcatctgctaagcattttagctcagttagtgtaatcatgactttcccttgtaggaggacagaa

SEQ ID NO: 905341 - DNA, 120 bp, Artificial Sequence
  ENSG00000231999_10 (sequence is synthesized)
taaaagaaacactactgaagcaagtactcaaataagcattttactctaatattcatacacacatgccctccttcccaagtaggatttagctctggggtaaaacctaaaaggaagagctga

SEQ ID NO: 905342 - DNA, 120 bp, Artificial Sequence
  ENSG00000231999_11 (sequence is synthesized)
ttaaggggcacataagtcttctggtttcatttgaaactataggccatccaactctgaaccatagtctcttagatgggggaccatttagtgatactgactagaaagaaatttaggggtagc

SEQ ID NO: 905343 - DNA, 120 bp, Artificial Sequence
  ENSG00000231999_12 (sequence is synthesized)
ccttgaggtaattatctcgttacctcttgtatctcaactccaggctaggctactaaaaaccaggagccaatttttcttcaactgacatttgaaaaacttgttcctatgctactaatattt

SEQ ID NO: 905344 - DNA, 120 bp, Artificial Sequence
  ENSG00000231999_13 (sequence is synthesized)
ctttctttttttcttccttttttttttgagacagggtctcacaggcctcagactcttggcctcaagtgatcctccctgcttggcctctgaaagtgctggaattacagctatgagtcacca

SEQ ID NO: 905345 - DNA, 120 bp, Artificial Sequence
  ENSG00000231999_14 (sequence is synthesized)
tatgagtcaccacagccagccacctaatttccagtggtcacattttaccttccaaaatgtctgagtaagctcctttccacaccttgtcccatgtctgaagcatcacttacagcccaagag

SEQ ID NO: 905346 - DNA, 120 bp, Artificial Sequence
  ENSG00000231999_15 (sequence is synthesized)
ttgttttagtcaccacaaggagcctcttttaagcaagctctgctttgtgaaattaccccttaggcttagtggggtctacaattctatgcccagaacaacctgtcactgaatgcattatct

SEQ ID NO: 905347 - DNA, 120 bp, Artificial Sequence
  ENSG00000231999_16 (sequence is synthesized)
cctttccacacaagctttcgctttgtaatttaagtacatgagtatgaaaaaacttagagtatttaaaagttgggaagtatttaaaagttatggcttaaaaaagaataagaaagaaaagct

SEQ ID NO: 905348 - DNA, 120 bp, Artificial Sequence
  ENSG00000231999_17 (sequence is synthesized)
ctgctagaatattctatcatggggactccctctcatgtttaatgttgtgatggcaaagtactaaaaggataaacgatggaggcatattccattattaaattacttttgccttcaggaaaa

SEQ ID NO: 905349 - DNA, 120 bp, Artificial Sequence
  ENSG00000231999_18 (sequence is synthesized)
caagattatcttgtattttcatactgaaaagtattcagacaacattcctgagaatttctatgttgagtcttacatacatcaattgtttcaaaaattgctaatcagtaaaatccagatgat

SEQ ID NO: 905350 - DNA, 120 bp, Artificial Sequence
  ENSG00000231999_19 (sequence is synthesized)
ctataagatggcacagagtaaagtaaaaggaaatatgtgggtcttagaaaatatctgataagaaaaagaagaaaaataataatggtagcatggtgcccccttgctggtagtccagctcta

SEQ ID NO: 905351 - DNA, 120 bp, Artificial Sequence
  ENSG00000231999_20 (sequence is synthesized)
atctattttcaagggtttctcttggattttcttgagtctgaagtcttatcatttattctgggccagagttactctctagacactctagtattagtagcatccccaaggaagccttttttt

SEQ ID NO: 905352 - DNA, 120 bp, Artificial Sequence
  ENSG00000231999_21 (sequence is synthesized)
aagaagacctaggtgtaaattggactggtctaagatttcagcaaacctagctcaatcctttcccatgccttgtgcttctctccattacaatcaatgccaccataatccaattactctttg

SEQ ID NO: 905353 - DNA, 120 bp, Artificial Sequence
  ENSG00000231999_22 (sequence is synthesized)
gcactgtgatagggatggatcttgcctccatttctcccaccttccatgtccacccacatataccactgtaccccatgtggaatcacttggattgatgcataggagacacagtagaagaat

SEQ ID NO: 905354 - DNA, 120 bp, Artificial Sequence
  ENSG00000231999_23 (sequence is synthesized)
agtagagtagaaatcagaatgtttgggttccatcctagcccccttgccaggaaacttcagacctcaggtgaattgctctgagcctcagtaaaataagggcagtggactagagtaggggct

SEQ ID NO: 905355 - DNA, 120 bp, Artificial Sequence
  ENSG00000231999_24 (sequence is synthesized)
ggtaaagtttttctccaaaggaccagaagaataagtattttaggctttctgggccaagaggcaaaagtgaaaatattatgtaggtccttatataatagaaaaaatattccatatattttt

SEQ ID NO: 905356 - DNA, 120 bp, Artificial Sequence
  ENSG00000231999_25 (sequence is synthesized)
aagtaatgaaattcaaaatataacaattgaatataattttgttgtaatacaggcccactaataaaaatgatggaatctatttgtagaaattgaaatttgagtttcatataatttttacgg

SEQ ID NO: 905357 - DNA, 120 bp, Artificial Sequence
  ENSG00000231999_26 (sequence is synthesized)
gtcacaaaacattcttttgatcttcttcccccaaccatctaaaaatgtaaaatcctttcctagcctaggctgtataaaaacaggcagtgggtagacttgacccccaggctgcagtctgcg

SEQ ID NO: 905358 - DNA, 120 bp, Artificial Sequence
  ENSG00000231999_27 (sequence is synthesized)
gactcagtgttcctttcaggtatgagagtctttgtctcttgttttaaatctatactcctacctctaaatcataactgattcaacctttccatggggttttgtttcttggctgtcctctcc

SEQ ID NO: 905359 - DNA, 120 bp, Artificial Sequence
  ENSG00000231999_28 (sequence is synthesized)
taagccttttatatgctacaatcagagcctcctttgaaggtaccagttcaggctaactagcactttcaagctcaagtctcaccctagtcactatccaatgaatcaaacatgaatttgact

SEQ ID NO: 905360 - DNA, 120 bp, Artificial Sequence
  ENSG00000231999_29 (sequence is synthesized)
ggcagacttccaggcactctccattctgacccaccttactaaatggtctcatctcttattatatttggttatgtttttttcagtcctctgtggatgacctctattttttaacgcttccct

SEQ ID NO: 905361 - DNA, 120 bp, Artificial Sequence
  ENSG00000231999_30 (sequence is synthesized)
aatccagtgttcttagggtatgcttcacagaacacaagagtcactctataaaaaaaggtgtcttgctcaaacacatttgatgaatattgcataccatctctccttggagaagcacaatgc

SEQ ID NO: 905362 - DNA, 120 bp, Artificial Sequence
  ENSG00000231999_31 (sequence is synthesized)
atattcatatgttaaaggctctgaagaatcctgcagcaaaaatatgatcaaaagaaacatttaatgttttttgtggtgacacctattaccgtcctatggaagacaccctgaagtgcctgc

SEQ ID NO: 905363 - DNA, 120 bp, Artificial Sequence
  ENSG00000231999_32 (sequence is synthesized)
tcagtgaatatccgccacccagggactgcccagcacgttcccatgtcgagggaattccctaccttatgagtcttggtgggtagtagagctcactttctactagagaaactactgacacca

SEQ ID NO: 905364 - DNA, 120 bp, Artificial Sequence
  ENSG00000231999_33 (sequence is synthesized)
caggagagaaatcctctctccgcttcacgacgcggccactcccacccctgagacgcccacctggcggactctgagggaggattcggctgcgtctaataccacctccacccctcatccctc

SEQ ID NO: 905365 - DNA, 120 bp, Artificial Sequence
  ENSG00000231999_34 (sequence is synthesized)
cagtctggaaaaggcagatgtatagtgaattaagaagtttaagagaagcaagtatgaatctcctgatcttgtgaaatctcaagtagctaaaaggaagtattgacattttttaactggaag

SEQ ID NO: 905366 - DNA, 120 bp, Artificial Sequence
  ENSG00000231999_35 (sequence is synthesized)
tatttgaatttacctggatttaaacctgcattggcattttttataacatatatgatgactgaatttctgtagacccagtaggaaatcgcctatttttttttttttttttttgaaaaatca

SEQ ID NO: 905367 - DNA, 120 bp, Artificial Sequence
  ENSG00000231999_36 (sequence is synthesized)
tcttcccgaactttgcagttctttaatcaaatttgcacatggctctgatgggtttatagttctttactgcctccctgattttgcatgtgtctttataccatcttctaatttcttacttcc

SEQ ID NO: 905368 - DNA, 120 bp, Artificial Sequence
  ENSG00000231999_37 (sequence is synthesized)
atgttcacttcaaattctatcttcataaagtttttctcacactttcttttctgtaaatgctttcctatggtttgaatgtttgtgtcccctcaaaattcatatgttgaaacctaattccca

SEQ ID NO: 905369 - DNA, 120 bp, Artificial Sequence
  ENSG00000231999_38 (sequence is synthesized)
gtgtgatagtattaagaagtggggcctttgggaagtgattaggctatgagatttccagcatcatgaatgggattaatgccctcatgatagaggctttagggagcttatcccttttgccat

SEQ ID NO: 905370 - DNA, 120 bp, Artificial Sequence
  ENSG00000231999_39 (sequence is synthesized)
atgaagatgcagcaaagagacagcaaaaaggtaccatctatgaagcagagaagcccttaccagccaccaaatctgctggtgacttgacccgaacttctcagcctccaaaactaaggcaat

SEQ ID NO: 905371 - DNA, 120 bp, Artificial Sequence
  ENSG00000231999_40 (sequence is synthesized)
aaatgtttataaattattcagtctaaggtattttttcacagcagtccaaagggactaaactactctatagtcattaatcatcactcttaccttccatacctatgagaacctaaataagct

SEQ ID NO: 905372 - DNA, 120 bp, Artificial Sequence
  ENSG00000231999_41 (sequence is synthesized)
gcttaacttctctgagcctcagtttcctgagaaataaatgggggtaattatagtgtctactttatagtctggttgtgagggttagattatttaatacatataaaatattagaacagagcc

SEQ ID NO: 905373 - DNA, 120 bp, Artificial Sequence
  ENSG00000231999_42 (sequence is synthesized)
tgacatattgtaagcatgtgacaaacattaatttttattaatatttaacagctaattgcatccttattttaaagttttccatttttttctattttccatatggtagaggttaaaatttgt

SEQ ID NO: 905374 - DNA, 120 bp, Artificial Sequence
  ENSG00000231999_43 (sequence is synthesized)
catctgtccctgatgaattccaaggaaagacgggcccactcatgagagatctactaccccccgcaacccatgtattctaggatccacgcagctcttttcagaagtttcatcagttatacc

SEQ ID NO: 905375 - DNA, 120 bp, Artificial Sequence
  ENSG00000231999_44 (sequence is synthesized)
acaactagttgctggccagttggcctgttttcgtgctacaagccttcagaaaacagtcgcctccttttaccacgtttctatttctaaaccaaaatgaaaaggacgtttgttcaaaagata

SEQ ID NO: 905376 - DNA, 120 bp, Artificial Sequence
  ENSG00000231999_45 (sequence is synthesized)
ccttccatgttgatgaacaagaacacattcacctgctgtaggggtaggtgtaccccaaaactccactgatacagaagcttctatactcaagacccttctatactcaagaccctggatctt

SEQ ID NO: 905377 - DNA, 120 bp, Artificial Sequence
  ENSG00000231999_46 (sequence is synthesized)
tctagtaaatgattaaacctgaggaggagttatgggaacctttgatttgtagacaagttggacaaaagtggtatatatcctaatataacatgggaacctgccacttatgattggcgtgtg

SEQ ID NO: 905378 - DNA, 120 bp, Artificial Sequence
  ENSG00000231999_47 (sequence is synthesized)
aaattgggggatggggaagcagtcttgtgggactgagcccttagcctgtggggtctaatgctatcttcaggtaatatcagaactgagttaaattataggataccagtcagtgtccattgg

SEQ ID NO: 905379 - DNA, 120 bp, Artificial Sequence
  ENSG00000231999_48 (sequence is synthesized)
agaactgaattattgtgaggagaaacccacacatttggtggctaaaagtattgatgtgagtagtagcatataggagttttttgctatatacatatgtagtgtaagtttaaagtaaaaagt

SEQ ID NO: 905380 - DNA, 120 bp, Artificial Sequence
  ENSG00000231999_49 (sequence is synthesized)
tttgtattgtcaggagtgacttctttgcacctaaatatcactgctataactgcgttactaaggaatagttgcttgcttttatgtatttggcacctgcagctactgttctaaaaagtttgc

SEQ ID NO: 905381 - DNA, 120 bp, Artificial Sequence
  ENSG00000231999_50 (sequence is synthesized)
atgtgttaacctattaattaaatctacaaatgactggctgtacccatgaagtgagttattctaaagacaatggaacatttaaatggtttagaaattttttgattaaaaatacattaataa

SEQ ID NO: 905382 - DNA, 120 bp, Artificial Sequence
  ENSG00000231999_51 (sequence is synthesized)
gtatatttcagtcagtaatggatattaccaccagcatttaatcaaggaagcaggaagtgatccatcactgctagctgctatctacaggaattctgtctacaggcagggcagaccagtcag

SEQ ID NO: 905383 - DNA, 120 bp, Artificial Sequence
  ENSG00000231999_52 (sequence is synthesized)
ccagtatcttcccgaagtaccttggtcttccaccatccatcccactgagagagccgttcctctaatgaggcatttctaagcagctgtccattgaactctaccccttgagatatcctgaga

SEQ ID NO: 905384 - DNA, 120 bp, Artificial Sequence
  ENSG00000231999_53 (sequence is synthesized)
aataggaatctatggttcctattgtttggaaagtagtatatcttccttgaagattcacaatgcgtattaatatgcttagggctctgataagtcctgtattaaaaatgcttgttaaacttt

SEQ ID NO: 905385 - DNA, 120 bp, Artificial Sequence
  ENSG00000231999_54 (sequence is synthesized)
gctttacattgctttccccctgctcactcagcaaaatcctacactttttttccaattccaatgctgctgttgggtgtccttcccagaagacaaccttaaattctcttaggccttaggagc

SEQ ID NO: 905386 - DNA, 120 bp, Artificial Sequence
  ENSG00000231999_55 (sequence is synthesized)
tgaatctaacaccagtcttaattaacctacaacaagacaaaaatttaggtccgggcttacctcctagtcagcagatgggaaaaattcctagagagtctctgggaaaaaggcaaaggctaa

SEQ ID NO: 905387 - DNA, 120 bp, Artificial Sequence
  ENSG00000231999_56 (sequence is synthesized)
ctttagcagtttgctagaaaaaaaaaaattcaagtaccttgtaagtcaccagggtagatgcagcaatactctctaaggtagctttacctcttcaattctcttaccttacctgaatttaaa

SEQ ID NO: 905388 - DNA, 120 bp, Artificial Sequence
  ENSG00000231999_57 (sequence is synthesized)
cacagtgaggcaagtaccaaggtcacaaccctcctgtggagggccttattctgcaagggctctctgatatacttctatctttgtaccgttggcacctgaccacaagcttaggcatccctg

SEQ ID NO: 905389 - DNA, 120 bp, Artificial Sequence
  ENSG00000231999_58 (sequence is synthesized)
aaatgctcccttgctacccagtgtcaaggaatcattgaaccttagactttgtactcaggtgaaccaggatgaaatccctattcttccagtttaaacttaggaaatttactgttcttttta

SEQ ID NO: 905390 - DNA, 120 bp, Artificial Sequence
  ENSG00000231999_59 (sequence is synthesized)
tctgccccctccccaccacccacatccccttatcatccctataggtatagtactacagggtgctgtgagaattagctaatatgctcaaagcaccaagaacagtgccaatcactttgtaag

SEQ ID NO: 905391 - DNA, 120 bp, Artificial Sequence
  ENSG00000231999_60 (sequence is synthesized)
tagtcagtaaatgagagctactattgtacttaactactcttcactgaaagcaaaagaaccaggaatagcaaaaaggtttggaaacctgggatctgaatcccctgcaagttgagtccaccc

SEQ ID NO: 905392 - DNA, 120 bp, Artificial Sequence
  ENSG00000231999_61 (sequence is synthesized)
caagttgctttattgcaatacttttggctactcttgtgtctgccttctaattggatcaactgggtagttcttcacgtgtaggcaggtgattcacatgcacattaatgcttgaaagccact

SEQ ID NO: 905393 - DNA, 120 bp, Artificial Sequence
  ENSG00000231999_62 (sequence is synthesized)
agtctaaaaactatgctacactggttagttcacctcttcttattttgtagcatgtaaaccttaaatctagtgatcttacctcagtccacctaattcacattaacatccacacttagcaag

SEQ ID NO: 905394 - DNA, 120 bp, Artificial Sequence
  ENSG00000231999_63 (sequence is synthesized)
ctctctgtaaaggactggtagaattagcaatcagtcaacttgagtgagggtcttaaagaagtacaaggcttattctccgacttcagggtgttcatagttcatgggaatcatgcatacaca

SEQ ID NO: 905395 - DNA, 120 bp, Artificial Sequence
  ENSG00000231999_64 (sequence is synthesized)
caaaccagaataaaccattttgaagcaaatgtgcttgaagttcagcacatctccaggaaggagagggtactgtgagctagatgaactgggtgcacagactctgtcttgacctttcacttt

SEQ ID NO: 905396 - DNA, 120 bp, Artificial Sequence
  ENSG00000231999_65 (sequence is synthesized)
atacccaattctttaggctaaattttgacattctaattggacttccagagttagtagttctcacactaaagactgtgtaattacaagttaaccatgtacaggttggtgatagaagcagaa

SEQ ID NO: 905397 - DNA, 120 bp, Artificial Sequence
  ENSG00000231999_66 (sequence is synthesized)
gtagatatttctgggctatgcagggctatggtaagggatttggaatgaaataggtctgggcttaaatcttgtatctctagctatgaacttcagtttcctcatcagtctattggaatataa

SEQ ID NO: 905398 - DNA, 120 bp, Artificial Sequence
  ENSG00000231999_67 (sequence is synthesized)
ctaccttttagggttgtggtgagacttagaatatctgtaacccctctagtgggttgtatggtaacagcaattgtgtcacattgttgttttgttgttagctgtaagaaaactcaggctggg

SEQ ID NO: 905399 - DNA, 120 bp, Artificial Sequence
  ENSG00000231999_68 (sequence is synthesized)
ctgagttgttccttgaaggcgtaattaattaattttttctgagacagagtctcatgctgtgtgatctcgctgactgcaacttccgccttccaggttcaagcaattctccttgcctcatcc

SEQ ID NO: 905400 - DNA, 68 bp, Artificial Sequence
  ENSG00000231999_69 (sequence is synthesized)
ttccgccttccaggttcaagcaattctccttgcctcatcctcctgacttattttttttagtagagatg

SEQ ID NO: 905401 - DNA, 89 bp, Artificial Sequence
  ENSG00000231999_70 (sequence is synthesized)
gaaggcataatttaaaagtcaccttctctatgaagcctccacaggttctaggcaagtataactcttccttccttgtgtgaccacagcac

SEQ ID NO: 905402 - DNA, 120 bp, Artificial Sequence
  ENSG00000231999_71 (sequence is synthesized)
aggcaagtataactcttccttccttgtgtgaccacagcacttaccatggcatgctctcatttgtctctttacatgcctcttcactacagagtctgggagcctctccagggcagggctgta

SEQ ID NO: 905403 - DNA, 120 bp, Artificial Sequence
  ENSG00000231999_72 (sequence is synthesized)
tcttgattcacttttatgtccattatcaataccctgcacaggacctgatattaaatattgaaataatgagtttttaagtgtttcagtttcttgtattggttctgactttcagtataactc

SEQ ID NO: 905404 - DNA, 120 bp, Artificial Sequence
  ENSG00000231999_73 (sequence is synthesized)
ttattatactacaggctctaaaacctgaaccctttagctcataaataattcatactaaatttatgtattatgtatatgtatctgcttaaaccttgatgatgtcaatgctgggattgttct

SEQ ID NO: 905405 - DNA, 120 bp, Artificial Sequence
  ENSG00000231999_74 (sequence is synthesized)
ttcagatcaacctgctattcttgttttgttttgcatttgatttcagttgatcctacctggtaagagtgcaagtaaaatctacattctaaaccaaaaccaccagcaggattttacgctgca

SEQ ID NO: 905406 - DNA, 120 bp, Artificial Sequence
  ENSG00000231999_75 (sequence is synthesized)
ttaagtttcagttgtttagactgttgcaaccattagcactttctgaattaatacctgcaagataaatgctacctttagcaacagttttgaaatccttgactctgtgccattaaaaatgct

SEQ ID NO: 905407 - DNA, 120 bp, Artificial Sequence
  ENSG00000231999_76 (sequence is synthesized)
agacagggaaaaataaaaccttccctagaaaattcttttgcccagaaagttgcctgagaggtaatgtcaaatgtggacttgatcccaaaatggcagttgaatttgtaccagaggagatgg

SEQ ID NO: 905408 - DNA, 120 bp, Artificial Sequence
  ENSG00000231999_77 (sequence is synthesized)
tggtctattggggctaaaaatgataccccaaaatgaaggaataaaaagcagcctcagaagcaaagtctctgtctagctttctcctgccctcctgtctctcactctcttattctcccttga

SEQ ID NO: 905409 - DNA, 120 bp, Artificial Sequence
  ENSG00000231999_78 (sequence is synthesized)
agcaagccatagaaactggaatccttcttccctgaggtgggtcatataaaccagaaccttttccccaaaaccagccttagagcctaaacattttactctaatcttctccctcccttccct

SEQ ID NO: 905410 - DNA, 120 bp, Artificial Sequence
  ENSG00000231999_79 (sequence is synthesized)
ttctctttcttgctaactgctggccataaagaaattaagaccctcattccagggggtcctaccccatacctgggaggaaggaatgttatatcgaaaggccaagaagaaatctgaacagac

SEQ ID NO: 905411 - DNA, 120 bp, Artificial Sequence
  ENSG00000231999_80 (sequence is synthesized)
aggccttgctggatttccccattccccttgctggatcataccccttttgtccaatcatatttctacacagctttccatacttcattgaacccaagcataaaaatgggccaagagaaggtg

SEQ ID NO: 905412 - DNA, 120 bp, Artificial Sequence
  ENSG00000231999_81 (sequence is synthesized)
gctcatacctataaccccagcattctgggaggccgaggtgcaacatcacttgggcccagaagttacaggttacagtgagctatgatcaggacattgcactccagcctgatctacagagtg

SEQ ID NO: 905413 - DNA, 120 bp, Artificial Sequence
  ENSG00000231999_82 (sequence is synthesized)
agaccctaaatcaaaaataaaaataataataaaggaatagttgcccctatatcttggggtcttcattctgaaggctcctgtgtcacacaaaactacgatcaaataaatttgttatgcttt

SEQ ID NO: 905414 - DNA, 120 bp, Artificial Sequence
  ENSG00000231999_83 (sequence is synthesized)
tctcttgttaatttgcctttgttagagaggtgtcaactgttatgataggaaggaaaggaatcacccctttttgctccctacagtaccaaggacctaaaaataggattctataaaactttg

SEQ ID NO: 905415 - DNA, 120 bp, Artificial Sequence
  ENSG00000231999_84 (sequence is synthesized)
aatcagattcttctaaaacaaaccttatttattttaccaccccaagacagaattgtttgatcccactaacttgtgaaattttctttggaaatagtaaagaataaacacttatgaggtaca

SEQ ID NO: 905416 - DNA, 120 bp, Artificial Sequence
  ENSG00000231999_85 (sequence is synthesized)
cattatgtgctaaatgcaggttgaatatctgttacccaaattccttgggaccagaagtgttctggatttcagattttgaatatttgcactatacttaccagttgagcataccaaattcaa

SEQ ID NO: 905417 - DNA, 120 bp, Artificial Sequence
  ENSG00000231999_86 (sequence is synthesized)
aagtctaaaatgctccaatgagaatttcctataagccttatgtcagtgttcagaaaatttggagcacctcagatttgggatgctcaatgtgtgctagctttatatgcattgtctcattta

SEQ ID NO: 905418 - DNA, 120 bp, Artificial Sequence
  ENSG00000231999_87 (sequence is synthesized)
ttcaccatagctatccattacacaggcagtattattttctcatattgacagatgagaaaacagaggcccattgtaatccagtagctagctgaaggtcacataatcagtgagtagaagagt

SEQ ID NO: 905419 - DNA, 120 bp, Artificial Sequence
  ENSG00000231999_88 (sequence is synthesized)
tgggatttgggcctaggcaagtcaatttcagggttctcatgcttactcactacttaatcctataggaaaggagtatttatttttaaatggaacccatcagttatttcagtaaggttaata

SEQ ID NO: 905420 - DNA, 120 bp, Artificial Sequence
  ENSG00000231999_89 (sequence is synthesized)
atgtactttttcagtatttcaaaattgcattgatttgtgctttttccactagtgtactcatatcccatatgtgccttcatgagctggttttacagcttactctttaattgaaaagcactt

SEQ ID NO: 905421 - DNA, 120 bp, Artificial Sequence
  ENSG00000231999_90 (sequence is synthesized)
tacaactgaaagcaaacttcttaatcaaagatcataatgtgtccgtagctccgagttaaggcaacatgaactataaccagacagagagtctcattcttagaattattgttcagatgggtc

SEQ ID NO: 905422 - DNA, 120 bp, Artificial Sequence
  ENSG00000231999_91 (sequence is synthesized)
ggtcgatagataagtaactttcacatgagaaatattattatattatgatataataagaaatatatatatatattggtcattgtctatggttcctggcttacagcttctaaaactcttgta

SEQ ID NO: 905423 - DNA, 120 bp, Artificial Sequence
  ENSG00000231999_92 (sequence is synthesized)
cctcagtgattagagctataggatcatttttgattatatttgggttttgtctttagttcctgaaatagctccagataaaggtgaaaaaagtgtcttttattactcataagatgtcttctt

SEQ ID NO: 905424 - DNA, 120 bp, Artificial Sequence
  ENSG00000231999_93 (sequence is synthesized)
gtcttcttcaaccacacctgggtttatgttaatgaagcaatttttggaaagcccctagataactgcaggatgggagctggttgctatggaaacttaaacgtgtgtgtgtgtgtgtgtgtg

SEQ ID NO: 905425 - DNA, 120 bp, Artificial Sequence
  ENSG00000231999_94 (sequence is synthesized)
tgtgtgtgtgtgtgtgtgtctagactagagggttggaattttcagccccacctggacctttgaccttttgggagtgtagaggaactggaaactgacttaattaccaacgctaatgattta

SEQ ID NO: 905426 - DNA, 120 bp, Artificial Sequence
  ENSG00000224330_0 (sequence is synthesized)
agggactactgcagtttccgtcaaccaagttgacacttcagggatacttttgtgaccaccaggcattacaaggatcctcaaagttccccaggagaatcctgttgaaaatgaagccactat

SEQ ID NO: 905427 - DNA, 120 bp, Artificial Sequence
  ENSG00000224330_1 (sequence is synthesized)
gttatgttgcttccttcacaatgttgaccaagaatcccttcaccccttttcttgttaacattgcagtcaaacattgattatcatgcactttaataaaataatagccaaattgttatctca

SEQ ID NO: 905428 - DNA, 120 bp, Artificial Sequence
  ENSG00000224330_2 (sequence is synthesized)
gttgcccaggctggggtgcagtggcgctatctcagctcgttgcagcctcgacctcttgggctcagatcatcctgtcacctctgcttctcaagtagctgagactacaggcttgcgttgcca

SEQ ID NO: 905429 - DNA, 120 bp, Artificial Sequence
  ENSG00000224330_3 (sequence is synthesized)
ttctcaagtagctgagactacaggcttgcgttgccaagcccggataactttttgtatttgtttttttcttttattgtagagacgcggttttgccatgttggctaggctggtttcagactc

SEQ ID NO: 905430 - DNA, 120 bp, Artificial Sequence
  ENSG00000224330_4 (sequence is synthesized)
ctgagctcagtgatccgcctttcttggctttccaaaaggctgggattacaggtatgagccacactgcccatcttacagcaaacattttttgatgtctgttgaataccaggcaacatgata

SEQ ID NO: 905431 - DNA, 120 bp, Artificial Sequence
  ENSG00000224330_5 (sequence is synthesized)
gactttggggtaaagtaacaaattgagaaatacacaatccctgatttcaagaaattggtcatgaagtggaaagaaggaatggttactaagaggctcagcagaggaaaacatgtcagccta

SEQ ID NO: 905432 - DNA, 120 bp, Artificial Sequence
  ENSG00000235298_0 (sequence is synthesized)
gtcctgcttcataccaatccttctaacatcatcatcaaacaaaatgcagtgaggcataaactgttgggacataccgctcggggccactgctgtctgggactgaaacactggcattgtact

SEQ ID NO: 905433 - DNA, 120 bp, Artificial Sequence
  ENSG00000235298_1 (sequence is synthesized)
cattgggcatgggcattcaatcagaagttgtcaagtatggtacccgtttggcaacgagcacatttttgggcatagccaaccagggttttcacatgggcgttcaggggcggatgggccaac

SEQ ID NO: 905434 - DNA, 120 bp, Artificial Sequence
  ENSG00000235298_2 (sequence is synthesized)
gtcatggtgggcaacgcaggggtaagtcgatccagtacatgggcaacggagatatatggccaaaaaaacaaggagagggaaaagggggaaaagcaataaattttaatttaatacaaacta

SEQ ID NO: 905435 - DNA, 120 bp, Artificial Sequence
  ENSG00000261542_0 (sequence is synthesized)
aaattacagaattgttttgtgttgtcaaaaccagcaggctacatataacactactggtctgtgacccgggttcagcaggcttgtgtgccaatacacttttttttttttttttttttttgc

SEQ ID NO: 905436 - DNA, 120 bp, Artificial Sequence
  ENSG00000261542_1 (sequence is synthesized)
ctatatatttttagaacactccctcccattttcccctcattttcaacagggcagtcggatattggaggaattgtaatgaagacttacttatacatatttcttgaattctaaagacttata

SEQ ID NO: 905437 - DNA, 120 bp, Artificial Sequence
  ENSG00000261542_2 (sequence is synthesized)
tgtatttcttgaattctaattgtgtgtgtattaaagggattgaagttgtagtcacagagaatacttagataaaagcaaaatatcttgatcttatggtataggtagaaacagtcattcaga

SEQ ID NO: 905438 - DNA, 120 bp, Artificial Sequence
  ENSG00000261542_3 (sequence is synthesized)
tttagctgggggagataaaccataatatattatggttagaatggtgcattcccttgaaaaaacattccaaatcgcttggcatctgctttttgatgtaattcttttgaaatacttttgagc

SEQ ID NO: 905439 - DNA, 120 bp, Artificial Sequence
  ENSG00000261542_4 (sequence is synthesized)
ctgctgtgtaatataatggccaagaccttgaattttagagactaattgatctatcctggaatcctaggttcacttcttaactaactctaagcctcaattttctggtcaattaaaaaatat

SEQ ID NO: 905440 - DNA, 120 bp, Artificial Sequence
  ENSG00000261542_5 (sequence is synthesized)
gaaagaatgataacagaacctatttcagaaaggttaaatgaggtaattatcaagtgtttagtacaatgcctggacccatttcaagccctcaaaagttagttgttaactaccttcttttgt

SEQ ID NO: 905441 - DNA, 120 bp, Artificial Sequence
  ENSG00000261542_6 (sequence is synthesized)
ttctttgggagaatttagaatttattgattgccattgaagattttttaggattcagtgacagccatgccttttccaagtaaaatatagcaatatagagcttatcctgctagagcagatga

SEQ ID NO: 905442 - DNA, 120 bp, Artificial Sequence
  ENSG00000261542_7 (sequence is synthesized)
cagaaccaaaggtggattggattaaaaggaaagcaaacatgggggaataatggtaagaaaacatataaacaatagaataaaattaaagaaaccaaaggtaaaaattagatgaagatgtat

SEQ ID NO: 905443 - DNA, 120 bp, Artificial Sequence
  ENSG00000261542_8 (sequence is synthesized)
tacaaatgccccttgatatttagtgtcatttaaatatataagtaaattgtaagtacttcattatgtctggtatcattacagaatggaaacactaatgcagatgtgttacttccatatttc

SEQ ID NO: 905444 - DNA, 120 bp, Artificial Sequence
  ENSG00000261542_9 (sequence is synthesized)
ctcagtgaagttgtgtaactttaaagggaagaggtatttggtatacacaaacttagatggcaattctattgtagtaaatattcaaaaggaagattatataagtttacacatgaaatatga

SEQ ID NO: 905445 - DNA, 120 bp, Artificial Sequence
  ENSG00000261542_10 (sequence is synthesized)
aagctccaacataatgctgttgcatgctaatattaaagctactatccccaacaaatatattgtttgctattactactttgccagattaagtgacttggtgtccgctggaaagcagccagt

SEQ ID NO: 905446 - DNA, 120 bp, Artificial Sequence
  ENSG00000261542_11 (sequence is synthesized)
gctgagagtacaattggtacttgtatctcagctattttctagtttgctcgtgtttgtatgccttcctagagtcatttgtgcttctttctgaacttgttgattccagtcgtacttgttttg

SEQ ID NO: 905447 - DNA, 120 bp, Artificial Sequence
  ENSG00000261542_12 (sequence is synthesized)
ttatgaaatttaaatatgtaagttgataaaatgtgacggaaaaagaattgtttctaagaagactaagttgactgctttggaaatacctggtaagggtgagttgtctgattaggtagatga

SEQ ID NO: 905448 - DNA, 120 bp, Artificial Sequence
  ENSG00000261542_13 (sequence is synthesized)
aaacgattaaaagccatgggacaatcataaaaacgtagaagtttttaatttgcaagtgttttttcacttctcattacactgagaacacttagaggatacatcacaagtgtgcttcagaga

SEQ ID NO: 905449 - DNA, 120 bp, Artificial Sequence
  ENSG00000261542_14 (sequence is synthesized)
agaaaagtattaaggagttgaaataacagacttatttaaagaaaaagtcttggacctgtatcaaataattgaactaaagtgtcttttaaattaaaatctttaagataggtttgtatcact

SEQ ID NO: 905450 - DNA, 120 bp, Artificial Sequence
  ENSG00000261542_15 (sequence is synthesized)
taaaatccaaaaacgtttttcctctgcgttaaacaagttgaccatcttctgcatgtggctgcatgtgaacataatgtaatgataagctgttatgatatctttgtaaataaatgtaataaa

SEQ ID NO: 905451 - DNA, 120 bp, Artificial Sequence
  ENSG00000261542_16 (sequence is synthesized)
aagaagtattcatgctacttagaaaatataatgtgctaacgcttacataattaagtgtctaaactgtaagaaatattttgtgtatgaaatgttggagagaagaaattaacccaacatcaa

SEQ ID NO: 905452 - DNA, 120 bp, Artificial Sequence
  ENSG00000235292_0 (sequence is synthesized)
acatcagcctgccccacagagcaagccggatgaaagggggaaaaccctctggggcagaggatacggaacctgggctgaatctattgcttggagtctgagaaaggaaaaccttgggcagcc

SEQ ID NO: 905453 - DNA, 120 bp, Artificial Sequence
  ENSG00000235292_1 (sequence is synthesized)
cagatcctagttcccactgcaagcagcaaacaccattggatcttctggcatgggtatagatttccagggaggaagaatgaaaaacaggaagagtcaagaaaggaagttgaaaagagcctg

SEQ ID NO: 905454 - DNA, 120 bp, Artificial Sequence
  ENSG00000235292_2 (sequence is synthesized)
cgttatagagacggctgctgctggggagaccgattacttaatcatggactgaagcctttggaagccatataagctacaacccaggactgatgaggctgggtgtagcaagaaagaggaaat

SEQ ID NO: 905455 - DNA, 120 bp, Artificial Sequence
  ENSG00000235292_3 (sequence is synthesized)
catgcaactactggctcccatcaccaatggcccaaaggccagattccagaggacggttactgggaaaagtggacagagttgatcttctcatggttgtctgatctctcacgcccaataatg

SEQ ID NO: 905456 - DNA, 120 bp, Artificial Sequence
  ENSG00000235292_4 (sequence is synthesized)
aagaaaatggagggaaatggatggtgacctcagactcaatctttccttctcacttcttcaataggtggagtgtcctgactttccagaggcccatgtaaggtccctgtactttggtccttc

SEQ ID NO: 905457 - DNA, 120 bp, Artificial Sequence
  ENSG00000235292_5 (sequence is synthesized)
ttcagcccaagccagcatgcagaccttcttcaacagcagctcctgagaagaggccacttctgaaaccactgtcacatcatcccacactcttccatcctacttctgagtcacactaggctc

SEQ ID NO: 905458 - DNA, 120 bp, Artificial Sequence
  ENSG00000235292_6 (sequence is synthesized)
tttctaaccttgctcaccctccataaaagaaaaatgatttttgcctaactcttgagaagcttgcagatcttgcggtcagagcattcctcttattctaatagtctttccctgtacccttat

SEQ ID NO: 905459 - DNA, 120 bp, Artificial Sequence
  ENSG00000235292_7 (sequence is synthesized)
acccttataatgctcctttccagtgaagtccctcccttcctgagtcctgatgtgttttttacttgacatggctgagcatgggcactggtagttttttttgtttgttgtttttttgtttgt

SEQ ID NO: 905460 - DNA, 68 bp, Artificial Sequence
  ENSG00000235292_8 (sequence is synthesized)
tttgtttgttgtttttttgtttgtttgtttgtttgtttgagactccacaacctccgcctcctgggttc

SEQ ID NO: 905461 - DNA, 80 bp, Artificial Sequence
  ENSG00000235292_9 (sequence is synthesized)
gattttccagtcatgccaggctaatttttgtttgtttgtgtgttttgttttgttttgtatttttgtagaaatggggtttc

SEQ ID NO: 905462 - DNA, 120 bp, Artificial Sequence
  ENSG00000235292_10 (sequence is synthesized)
accatgtaccagaatcccctggaggccttgttaaaaaacacagatgttgaccactgccccaaaggttcagattaactaagtcatggaggaccctggcatttgcctttctaacaacttccc

SEQ ID NO: 905463 - DNA, 120 bp, Artificial Sequence
  ENSG00000235292_11 (sequence is synthesized)
aggagagtcaggctgctcaattggcacctcaccttcagattcactgtagaacccaacagagagaggaaagtgatggggcagctgctggaacatgcaggaacatggagactttaatctcag

SEQ ID NO: 905464 - DNA, 120 bp, Artificial Sequence
  ENSG00000235292_12 (sequence is synthesized)
atggaaagtagcttcccatgaggaagctgcctcatggtccaggtgggaaatgacagtggcttggcctgaggtgggcagtgcagtgccagtgatcgaagagaagcagagattcaagtggtt

SEQ ID NO: 905465 - DNA, 120 bp, Artificial Sequence
  ENSG00000235292_13 (sequence is synthesized)
tttaagcagcaacaggcatgaggctcaggggctgactggaggtggagaatgaggaggagaaaggagtcacgtgtgatccttagcgttcaggtgataaatggtgtgcattatgccaggagg

SEQ ID NO: 905466 - DNA, 120 bp, Artificial Sequence
  ENSG00000235292_14 (sequence is synthesized)
aaagccaagaagaggagaagctcaggaggaaaagctgaggctgttgctacctggagtttggtctgctggagaaaccgggaatgaggatggacagtaggcaaaaagaaggttctggagggt

SEQ ID NO: 905467 - DNA, 120 bp, Artificial Sequence
  ENSG00000235292_15 (sequence is synthesized)
cagagtttggtccgggccggtgagtggcttagagaccatcagtgaaatacatatggcaagtgaagccgtggtaatgggtgatgtcacaccaaagagaggacagagtcataaggaaaaaga

SEQ ID NO: 905468 - DNA, 120 bp, Artificial Sequence
  ENSG00000235292_16 (sequence is synthesized)
tgaaaagcagacaaatagaggagggccctcccgggcccagactaatgccagcctcagtgcctttctcaacacagtctcatacttttcatgctcccattttcctcataattttacaggact

SEQ ID NO: 905469 - DNA, 120 bp, Artificial Sequence
  ENSG00000235292_17 (sequence is synthesized)
ccgttttctctcccctactagaatctacctggataactctcccatttattagtagtttgtgccagcttttccaggcagtgcttatttttcttggaaaaggtatttggcaagataaaccat

SEQ ID NO: 905470 - DNA, 120 bp, Artificial Sequence
  ENSG00000235292_18 (sequence is synthesized)
atttatttgtgaatgtttattttttaagctataaaaagaaagttgaccaatatgagaaatgtcttctccctctgctcttttcttctggtgccatgcaacagatagaagagtcagagttga

SEQ ID NO: 905471 - DNA, 120 bp, Artificial Sequence
  ENSG00000235292_19 (sequence is synthesized)
agggccaacccaaggatgaaggcactgcccgcccgcctgtggtgggcatgtggatgaggaatccgtgcctgcacatagcactcaagatccaccacactgacttctttaagggaaataaaa

SEQ ID NO: 905472 - DNA, 120 bp, Artificial Sequence
  ENSG00000235292_20 (sequence is synthesized)
tggagctctctgccccagaaattgttcatcatatggttgtgcatatttatatagagactgttatatttttagttggaagaaggtgggtttttttctcagtttctatggtaaattgcttgt

SEQ ID NO: 905473 - DNA, 120 bp, Artificial Sequence
  ENSG00000235292_21 (sequence is synthesized)
aaagtttgcatttgtataatgaaagtaataacactgaatcggtccatttgcccaagcaggaaatgcaccctattgtcaggtttcgaaatacatgaacctttaaaaacagaagccatatga

SEQ ID NO: 905474 - DNA, 120 bp, Artificial Sequence
  ENSG00000235292_22 (sequence is synthesized)
atggaaaaacatggaatgcttttttaaaaaatgtagtatcctctgacatgaagttaaagtccccagatgctcccaactgtacagttccctggggcagtggatgtgcacttattcttcttg

SEQ ID NO: 905475 - DNA, 120 bp, Artificial Sequence
  ENSG00000235292_23 (sequence is synthesized)
gggaagtggggagcagggcccttcccgcatgactcagctcatcttagacttgtgctgtccgatggggaacaagccgcacatggttactgagcacttgagatgcggtgagtccacattgag

SEQ ID NO: 905476 - DNA, 120 bp, Artificial Sequence
  ENSG00000235292_24 (sequence is synthesized)
atgtgctgtaaaagtcaaacccacactggatttggaagaatgtaaactatttttatgttgatttcatgtggaataataataattttgatatattaaatattatcaaataggttaaataaa

SEQ ID NO: 905477 - DNA, 120 bp, Artificial Sequence
  ENSG00000235295_0 (sequence is synthesized)
aggagggaccttgataaactagagttcatccaccagaggaggaggctgcaggccttgggcactgctcagcaggatgaggggccactgcagttgagcatgtctagcctggagtcttctgaa

SEQ ID NO: 905478 - DNA, 120 bp, Artificial Sequence
  ENSG00000235295_1 (sequence is synthesized)
gaacatgattattgactttatgtataggaatggctgccaatgaagaagagaatattgaaagtcagaagcatgctatcacataactctgcatttcatcgggccgagaaagcacaggttttc

SEQ ID NO: 905479 - DNA, 120 bp, Artificial Sequence
  ENSG00000235295_2 (sequence is synthesized)
aggaccacagttcccatttctcctgttctgcagtcctcgtctgattggccaacactatgggcactccctgctctggtggccactggcagtgggccagggtgagggcagctcacagcccgt

SEQ ID NO: 905480 - DNA, 120 bp, Artificial Sequence
  ENSG00000235295_3 (sequence is synthesized)
ctcctctctgttaccttgggacgtcactcagcagttgcatcaccggctgctctctccctctgaaacatgaagcccttcctttcttattccaccttagggaagcctgggcctgcgacagac

SEQ ID NO: 905481 - DNA, 120 bp, Artificial Sequence
  ENSG00000235295_4 (sequence is synthesized)
cagaagacctcacattccacagagaagacctcggtttccccccaagctctgtccagtatggagtgacaaatcgctgtacttatgagacaaaggcatgaagtccaggtcaaggcatgactt

SEQ ID NO: 905482 - DNA, 120 bp, Artificial Sequence
  ENSG00000235295_5 (sequence is synthesized)
ttcggcagcaacttttctagatgtgaggtatcagtaaacatttatggtgcttctgttatggatacaatacaaggatgtaaaagaaaataagtatgaggctcatcctcctgggaactcaca

SEQ ID NO: 905483 - DNA, 120 bp, Artificial Sequence
  ENSG00000235295_6 (sequence is synthesized)
ttttcactggggctacaagacccccggagcaaatgccaggcacaagatcggggataaaagcctaactttgagaagcttgctttggctaaaaccgaaatcaattatgaagcaaaggaagtg

SEQ ID NO: 905484 - DNA, 120 bp, Artificial Sequence
  ENSG00000235295_7 (sequence is synthesized)
gattagagggagatcttatgaaatcccatcagatttggatcatgctactgagtttttttcttcctggctgtattttaggttttctctcccactgaaactgattaatcgttgtcaaaattc

SEQ ID NO: 905485 - DNA, 120 bp, Artificial Sequence
  ENSG00000235295_8 (sequence is synthesized)
ctcccttgtacccttctctctatgggagggctgtcccttggctggcctgggatgcaggaatagcttttgtgcaccctttggtgtccacttctgtgtgtctctcttggtggcactgcttcc

SEQ ID NO: 905486 - DNA, 120 bp, Artificial Sequence
  ENSG00000235295_9 (sequence is synthesized)
acatctcagttagtgctatggaaaaaactagcctcagaaacgaatattcactgacatgtcaaggtctagtagtttgtagagccattttattggaagggacttcagaaaggaattagttta

SEQ ID NO: 905487 - DNA, 120 bp, Artificial Sequence
  ENSG00000235295_10 (sequence is synthesized)
cctactcatcaggtgaggagacccacagaggggaagtcacctgcctgactcccagagacagaaacagtgctgggactaaaacccaagaagggtcctgactcccaagtcccaggaacttaa

SEQ ID NO: 905488 - DNA, 120 bp, Artificial Sequence
  ENSG00000235295_11 (sequence is synthesized)
ttttcccccagggaatggcccaccacccacccagatgtaaaaactagagactctgggcagcattctatctctatgccagcctccagtctcctgtctattttgcctccaagatacatctct

SEQ ID NO: 905489 - DNA, 120 bp, Artificial Sequence
  ENSG00000235295_12 (sequence is synthesized)
aatttgcccacttttcttgaacttcacatcaccgatctggtacaagccatcatcatctccttgcttgggcctaccaagacactaatcactgttctttttgttttgttttgtttgtttttg

SEQ ID NO: 905490 - DNA, 120 bp, Artificial Sequence
  ENSG00000235295_13 (sequence is synthesized)
cgaagtgctggcattacaggcatgaaccaccatggcaggctgactttcattctttctctagtattattagaatattcccaaataatattccattgtgtatatattccacattttgctcat

SEQ ID NO: 905491 - DNA, 120 bp, Artificial Sequence
  ENSG00000235295_14 (sequence is synthesized)
tggtttctcatggtccgatctgagctttgggtagatctggctataggcagataatccctgagacatactgctaaatgggaacagcagatgcagaacagtgtgtatgatacgctaccactt

SEQ ID NO: 905492 - DNA, 120 bp, Artificial Sequence
  ENSG00000235295_15 (sequence is synthesized)
ctgctggaaaacgtcaaacaggcacgtgtgcatacatatgtacgtggacttggaaaggcatagaccgtctttgagaatactcaagaagtggttatcttgggtaggagagctggtggcggg

SEQ ID NO: 905493 - DNA, 120 bp, Artificial Sequence
  ENSG00000235295_16 (sequence is synthesized)
ggacagaaatggaaaggagacttatttttcactggatatgcttttgtacattttatggcttattaataatgattttataattatattaccatgatcaaataaaacccttggtgaatcttc

SEQ ID NO: 905494 - DNA, 120 bp, Artificial Sequence
  ENSG00000261546_0 (sequence is synthesized)
attttgactgtgatgatgtttcttaagacacacagagctgcacgccagaggggtgaatttttactgggtctgcaggtaagcagctgcacagacagatgtgcgggatggtctcactttaag

SEQ ID NO: 905495 - DNA, 120 bp, Artificial Sequence
  ENSG00000261546_1 (sequence is synthesized)
tctgcactgagatctctcttctactctagacagactggaagggctgcgcagaaagcagcagggtggccccccagctgtgggctctgttcccagaagtcccagcggaggacccagggctca

SEQ ID NO: 905496 - DNA, 120 bp, Artificial Sequence
  ENSG00000261546_2 (sequence is synthesized)
aatggttgggtcagatgaaagtcagaatgggatgtgttagggaaggctggacaagaggggcccggtatcaggagcccacatctagagaaggaagacaggtgcttgactcatcccaccctg

SEQ ID NO: 905497 - DNA, 120 bp, Artificial Sequence
  ENSG00000261546_3 (sequence is synthesized)
cccaccacacccacctctcctggcactgctgctggcgctgtgtggcacccggactccagacagacggaggctgccaccactgctgatgtggtctggagccaacagcatggccccccgcct

SEQ ID NO: 905498 - DNA, 120 bp, Artificial Sequence
  ENSG00000261546_4 (sequence is synthesized)
tcctctgagacatgcactgacgcctgcattccaggcattgctgttcttcccattgtctccccagtcatacagccaggggccagcacagacacctcccccatccacccgactgagacttgg

SEQ ID NO: 905499 - DNA, 120 bp, Artificial Sequence
  ENSG00000261546_5 (sequence is synthesized)
gagaaggctgatctacccagaggggacaggtcgcagtgcatcctgagtgctctcctggccgagtggcctgtcccacgggggagcatcctccatgccgcccttcagtccgaatgtgggtgg

SEQ ID NO: 905500 - DNA, 120 bp, Artificial Sequence
  ENSG00000261546_6 (sequence is synthesized)
ttcgagactggcccaccttggggggctcagagcacagtggaagaggaacgcagctgtgggaagtgctcgtacctggcaggcgcacggcagtggtcaggggcccggacagagccatgccga

SEQ ID NO: 905501 - DNA, 120 bp, Artificial Sequence
  ENSG00000261546_7 (sequence is synthesized)
tctcggtcatgccataccgctccagcagggtgtggcccgtgatgttcttccacttctccagcactgggaggggcagggcagctgagcctgagaccatcagcctacgcggcacaaccaaag

SEQ ID NO: 905502 - DNA, 120 bp, Artificial Sequence
  ENSG00000261546_8 (sequence is synthesized)
cggcccttgcttgcaaaagtggcagctccttcacgagtgcaggagccccaggccgtgggtacagcaccactgtgcgacacccgggaccaacgctgcagtctgcgctacggcgtgactttg

SEQ ID NO: 905503 - DNA, 120 bp, Artificial Sequence
  ENSG00000261546_9 (sequence is synthesized)
ttttttgaaaacgatctgttgggtgtattttagaaggaagcaggtccaacagctaatgagggtaaacaatgtgcttagggtccgcggtgtcccctgcaaagttcctgcgctgttcacaac

SEQ ID NO: 905504 - DNA, 120 bp, Artificial Sequence
  ENSG00000261546_10 (sequence is synthesized)
cacgctcaagaacagcagtgaccgtgcagctgccgaccacggagctgatcacgggtgaacagccacggcgctgcaggctgcggccaggcacatccggggactacagccggctcagcttgc

SEQ ID NO: 905505 - DNA, 120 bp, Artificial Sequence
  ENSG00000261546_11 (sequence is synthesized)
aggctctgcagcagaacgcggacatgggtgaatggccgcggcacccaaggggtggggccgggcacacccaaggggctcagaaccacccgcagaactgcagccatcttggcccacagggtc

SEQ ID NO: 905506 - DNA, 120 bp, Artificial Sequence
  ENSG00000261546_12 (sequence is synthesized)
agctcaggcttggcaggagaacacgggccctgagaactccgagtccccgcgctctcacacagcatttcccgcagcctcacgggcagtagggaaggcgcttttgtttgcggtctgagcgga

SEQ ID NO: 905507 - DNA, 120 bp, Artificial Sequence
  ENSG00000261546_13 (sequence is synthesized)
gtggtccctgctgctgcccctgctttacgaggaggcaccactgacaggacccccgctgggagatccagatggccgaggtctcattgcctctgtcaccccagaaatcacctgatcctctcc

SEQ ID NO: 905508 - DNA, 120 bp, Artificial Sequence
  ENSG00000261546_14 (sequence is synthesized)
ttcactgacctcgttcttgcccttggttccttagatttggtaaaacgttgtgctcaccctgctcagcttggggcctgcccagccccagggtatcccagcagtagcagcagcaaaaccatg

SEQ ID NO: 905509 - DNA, 120 bp, Artificial Sequence
  ENSG00000261546_15 (sequence is synthesized)
ggctccggtggcctcacagaaaaggggcaagggaacggcaaagagagcgaagcggttcagacatgtgccttggacaacccggaattctctccaggaacaaaggtgccgcttccctgtgca

SEQ ID NO: 905510 - DNA, 120 bp, Artificial Sequence
  ENSG00000261546_16 (sequence is synthesized)
cttcctggggactgggaggagcgcgcggcagccacagacacacacatcccactggaaactggatggcagtggagccttcagttcctgcagtgcaccctccacgccacccctccctctcac

SEQ ID NO: 905511 - DNA, 120 bp, Artificial Sequence
  ENSG00000235296_0 (sequence is synthesized)
attgcagcagggcagcctctctgctgtctatgtgaggcggctccccccagcgctataaatagacagccgtgatcagagccccggaatagcagcttgcgtgcctgtccccatcttagagag

SEQ ID NO: 905512 - DNA, 120 bp, Artificial Sequence
  ENSG00000235296_1 (sequence is synthesized)
acatctgacccctggtcccctgtggagcccctgccgggaccattaacccattggctgctggcaccacccccacctccgcctcccgcgcacctgcatctgtcaatccgggactctggcctt

SEQ ID NO: 905513 - DNA, 120 bp, Artificial Sequence
  ENSG00000235296_2 (sequence is synthesized)
actcttgtgggactgagaccttagcctgcaggatcgggtactgtctccagggagaaagcgtcacaatggaacagggttggaggacgcccagcgggtgtccgcggagactggatggaaccg

SEQ ID NO: 905514 - DNA, 120 bp, Artificial Sequence
  ENSG00000235296_3 (sequence is synthesized)
ggttggaggacgcccagcgggtgtccgcggagactggatggaacagggttggaggacacccagtgggtgcctgcggagactcgctggagcagggttggaggatgcctagtaggtgtccac

SEQ ID NO: 905515 - DNA, 120 bp, Artificial Sequence
  ENSG00000235296_4 (sequence is synthesized)
tggagacttgcttggtgtttggggaaaatccccacacacattttggtgaccagagatgaagtattccatgttggatgttgactgttgagtgtgtgagagcagggaaaacactgttttttt

SEQ ID NO: 905516 - DNA, 120 bp, Artificial Sequence
  ENSG00000269397_0 (sequence is synthesized)
cttaaatttgataaaacttagtatgtgtcctaacagaatacaccagctgcaaataagaatattgtgtattttcttgcttttgactggaaagttctgtactcatctgttaaacctagttgg

SEQ ID NO: 905517 - DNA, 120 bp, Artificial Sequence
  ENSG00000269397_1 (sequence is synthesized)
tctataatatggttttgatgttcatgtcctccaaaccttatgattaaatgcaatttttaatgttggatgtgagacctggtgggaggtgtttgggtcatgggggcaaagtcctcatagata

SEQ ID NO: 905518 - DNA, 120 bp, Artificial Sequence
  ENSG00000269397_2 (sequence is synthesized)
gcttggcaccatcctctcagtaatgaaaatgtttatactccattaattcaaatgaaagcaggtttattagaagaacctggctccttcgcctcatacttgctctgtctctcatcatgtaat

SEQ ID NO: 905519 - DNA, 120 bp, Artificial Sequence
  ENSG00000269397_3 (sequence is synthesized)
atgtgcagttactcttcgccttcaatcatgactgtaagcttggtgacactctcaccagaagcagatgctggcacactttctacagtctgctaaattgtgagccaaataaatattatttct

SEQ ID NO: 905520 - DNA, 120 bp, Artificial Sequence
  ENSG00000269397_4 (sequence is synthesized)
ttataagttatccactctccagtattcacctatatgcaaaataattgatacagtctataatgttgtctaggttttctgttttcttattttttgtttaatgtgaattttctattacggaaa

SEQ ID NO: 905521 - DNA, 120 bp, Artificial Sequence
  ENSG00000269397_5 (sequence is synthesized)
atggggtcttgatgtctacaattattatgttgctatgtatttcttgctttacttttgtcaatatttactttatatattttggagccctgatattgtacatacacatacagatagatagag

SEQ ID NO: 905522 - DNA, 120 bp, Artificial Sequence
  ENSG00000269397_6 (sequence is synthesized)
caatatatactaccaatgtttgtctcacgttagcacttgacttaaaatatattatgtctaaaacccaagtgtagttactattttcataaaatacaggtttttgcactatgtaattttcag

SEQ ID NO: 905523 - DNA, 120 bp, Artificial Sequence
  ENSG00000269397_7 (sequence is synthesized)
cctatttgactcagtgctaaaatgagtcccttgtaggtggcatatggtttgctttttcttaagccactaaagcattttattttttctttttataatttcatttatttacttgtttattca

SEQ ID NO: 905524 - DNA, 120 bp, Artificial Sequence
  ENSG00000269397_8 (sequence is synthesized)
tttatttttgagataggtctcactctgtcaaccaggctggtttgcagtgttgtgatcatggctcacagcagcctcagtttctcaaactcagaagattctctcatttcagcctctcaggta

SEQ ID NO: 905525 - DNA, 120 bp, Artificial Sequence
  ENSG00000269397_9 (sequence is synthesized)
gctgggttacaagtgtgtagcatcacacctagctagttttttttgtatttatggttgagacagttttgccgcgttgccaaggctggtctcaaacttctgagatccagtgatcagcccatc

SEQ ID NO: 905526 - DNA, 120 bp, Artificial Sequence
  ENSG00000269397_10 (sequence is synthesized)
cctctcaaagtcctgagattatatttttttctattaagtagtttaatttatatttaaaattatttattaaaaatgaagttactacttttattgtgattgttttatgtgttcctcagtggt

SEQ ID NO: 905527 - DNA, 120 bp, Artificial Sequence
  ENSG00000269397_11 (sequence is synthesized)
tggtattttttatatgttggtttattgccttaaatttcattttaattgtgtagtgatgtgcttcaattattttttatatcttgttttgcatagtttctataaatattatcttcataatca

SEQ ID NO: 905528 - DNA, 120 bp, Artificial Sequence
  ENSG00000269391_0 (sequence is synthesized)
atagacacctctgccctaataagaggactcaccctgtaagaggggcatgtggaatgggagctcactccaaaagtggaaaggagaagcaatgtcacaggaaaatcggaaagtgattaccag

SEQ ID NO: 905529 - DNA, 120 bp, Artificial Sequence
  ENSG00000269391_1 (sequence is synthesized)
aagtgggataagaccagacaggaaaaataccccaaacaaaggaaagtaaagaccatagaccatataagaatcactaacatgagctgcatacgctggaggcccctctgctgtcattatttt

SEQ ID NO: 905530 - DNA, 120 bp, Artificial Sequence
  ENSG00000269391_2 (sequence is synthesized)
cagcccagtcagatggggatggcctggaataggagccaggatctcttggcatacatttacctcagccgcactcttcagtgctctgcatccaggctacgcggaggctgcatgttacaggag

SEQ ID NO: 905531 - DNA, 120 bp, Artificial Sequence
  ENSG00000269391_3 (sequence is synthesized)
ccgtgcatccctgaagacttggaataagtcaagatttacataatcccagagacatccttccaaagcgtgatagtaactctgttccatggctggagtggctcctccaggtgccagcagcat

SEQ ID NO: 905532 - DNA, 120 bp, Artificial Sequence
  ENSG00000269391_4 (sequence is synthesized)
aaacccacctttcaatcagtctgcagctcagaaatactacctgattctagacaggcttttcaacgtaataggttgaattattatgtcttgtacataaattaagactttacatttttatac

SEQ ID NO: 905533 - DNA, 120 bp, Artificial Sequence
  ENSG00000269391_5 (sequence is synthesized)
cggggataggggctcagaaaagttcctgagccaatgatgtggacctaaggtctgaaggatgaataaaagtttactgggtgaagaggggagggaagagtgttcctggcagagggaccagca

SEQ ID NO: 905534 - DNA, 120 bp, Artificial Sequence
  ENSG00000269392_0 (sequence is synthesized)
aaagacgatgcgaggcatctgggctgattacttggtgtctgcagcttcaagaaccaggttcaattcccctccaagtgcacctgggctgcctcctcttaatcttgctgcaccgcagcagcc

SEQ ID NO: 905535 - DNA, 120 bp, Artificial Sequence
  ENSG00000269392_1 (sequence is synthesized)
ctggtctctcccacttggccaaggaaacacttgtggttaataagtctcagaaaagttatgtgaaagttaaaagtaaaactgacagcagctgaaggatgggggggtgggaggtggtgacgg

SEQ ID NO: 905536 - DNA, 120 bp, Artificial Sequence
  ENSG00000269399_0 (sequence is synthesized)
tggctggttgctacctccgggcgaccaggggcctggggacttcgtgcctgggccagggtctctttcctttcgcgggcacagtgaggagactgcgaggtgaggtgcgtccgggtggatccc

SEQ ID NO: 905537 - DNA, 120 bp, Artificial Sequence
  ENSG00000269399_1 (sequence is synthesized)
gggctgcggcgactgtcacattctccccggccagaccggaggtggagcagaactgggggcgacgagcttgactgggattgcagctggacgtatttaggttcaaaacatcctcctcctggc

SEQ ID NO: 905538 - DNA, 120 bp, Artificial Sequence
  ENSG00000269399_2 (sequence is synthesized)
tttcttccgctccactctttggtcaggaagactggggcggggtaccccccaacccatgccctcaaattgctggcctagagggcacagcgcctttctaaaagctgcagttgggttgcctct

SEQ ID NO: 905539 - DNA, 120 bp, Artificial Sequence
  ENSG00000269399_3 (sequence is synthesized)
aaaataatgaagctaacccttgctaattgtggggaaaagatagccagaagcagcaaatttctgctgtggacgtccgatataaactgatcctcttgagatggttaatgcttagttggctat

SEQ ID NO: 905540 - DNA, 120 bp, Artificial Sequence
  ENSG00000269399_4 (sequence is synthesized)
acctgccccccgcccccgccgcttttttttcctttatccgtttttttttttcttttttcttgagacaaggtcttgctctgtggcccacgctggagtgcagtgtcatgatcatagctcact

SEQ ID NO: 905541 - DNA, 88 bp, Artificial Sequence
  ENSG00000269399_5 (sequence is synthesized)
tactttacccagcctgtttttttctgtgcaaataaatgcacatgtattttagattagtttcatttttattgttaacagcatttttcca

SEQ ID NO: 905542 - DNA, 120 bp, Artificial Sequence
  ENSG00000269399_6 (sequence is synthesized)
ttagattagtttcatttttattgttaacagcatttttccaccagatgcttatggattgacaactctacatcaagtgttgctgtaggctaggaatcaacaaaactttttgtataaaaggga

SEQ ID NO: 905543 - DNA, 120 bp, Artificial Sequence
  ENSG00000269399_7 (sequence is synthesized)
cagaaagcaaatattttagactctgcaggtcaggaggcaagatcaaggatttttttttttctaaatgtcctctagttcatattttctcatgaagatcgaggatcttaattgtttggtttt

SEQ ID NO: 905544 - DNA, 64 bp, Artificial Sequence
  ENSG00000269399_8 (sequence is synthesized)
tgctcaagcaattctcctgcctcagcctccaggggagctgggactacaggtgcgcaccaccacg

SEQ ID NO: 905545 - DNA, 80 bp, Artificial Sequence
  ENSG00000269399_9 (sequence is synthesized)
ttcaccagtgcctgccttggcctcccagactgctgggattacaggtgtgagccaccctacccagccttatttaggtattt

SEQ ID NO: 905546 - DNA, 120 bp, Artificial Sequence
  ENSG00000269399_10 (sequence is synthesized)
acaggtgtgagccaccctacccagccttatttaggtatttctataaccagaaagaaaagttcataaaatttttgttggtgaaaatcaaaatatgataactgagtagtttcttaaatacaa

SEQ ID NO: 905547 - DNA, 120 bp, Artificial Sequence
  ENSG00000269399_11 (sequence is synthesized)
gttgctacagtttgaatgtttgttcctaatccccagtgaaacagtattaagaggtggagcctttaagaggtgattgggttatgaggtcgtgccattcatgtgttaatggataaataggtt

SEQ ID NO: 905548 - DNA, 60 bp, Artificial Sequence
  ENSG00000269399_12 (sequence is synthesized)
atgaggtcgtgccattcatgtgttaatggataaataggttatcatgggagtgggactggt

SEQ ID NO: 905549 - DNA, 120 bp, Artificial Sequence
  ENSG00000269399_13 (sequence is synthesized)
aataaaataaataaaataaaataaaaagaggaagaaaggccaggctcagtggctcatgcctgtaattccagcaccttgggaggccaaggcacgcagatcacctgaggtcaggagttcgag

SEQ ID NO: 905550 - DNA, 72 bp, Artificial Sequence
  ENSG00000269399_14 (sequence is synthesized)
gggcatggtggcggagacccagaaggcaaaggttgaggtggaggttacagtgagccaaagtcgtgccactgc

SEQ ID NO: 905551 - DNA, 88 bp, Artificial Sequence
  ENSG00000269399_15 (sequence is synthesized)
ttcaaaaaaaaaaggaagagagacctgagcttgcacacagcctgctagccatgtgatgccctgtgctacctcaagactctgcagagtc

SEQ ID NO: 905552 - DNA, 120 bp, Artificial Sequence
  ENSG00000269399_16 (sequence is synthesized)
ccatgtgatgccctgtgctacctcaagactctgcagagtccccaccagcaagaaggcccttgattttggatatctcagcctccagaactgtaagaaataaatttctcttctttaaaaatt

SEQ ID NO: 905553 - DNA, 120 bp, Artificial Sequence
  ENSG00000267252_0 (sequence is synthesized)
acggcaactgtgcagagaggcttgcaggtccaaaccactggtagcagcccctggtatatccaggacatcagcacatagaaccagtgaaagggtcctccctcatagtgacgcatgtcatag

SEQ ID NO: 905554 - DNA, 120 bp, Artificial Sequence
  ENSG00000267252_1 (sequence is synthesized)
actcagatttatacaaacaaatgctgagcaaaccatgaagagtctctggtattttcaacaatatcatcacagaggaactgtattgatttccttccttcagtggtccaagaacctgctgct

SEQ ID NO: 905555 - DNA, 120 bp, Artificial Sequence
  ENSG00000267252_2 (sequence is synthesized)
ctacccacagcctgttccccagacccaggaacttttcaaatgtagaggagcctttagaaggaagccttgagcatgaggacagacccccctcatccaaccaccacctgactctgtgtgaac

SEQ ID NO: 905556 - DNA, 120 bp, Artificial Sequence
  ENSG00000267252_3 (sequence is synthesized)
ctggaactgttagaatgtctgtgctgtgataaaaggtcatctccctacaatgttatgatacagacctcaaacctacaaacatgaggaacttctgcctccaggttaactgcttacccactg

SEQ ID NO: 905557 - DNA, 120 bp, Artificial Sequence
  ENSG00000267252_4 (sequence is synthesized)
tacaagacacgttacacacagtccaggaggcggagcttctgagatatctagaaacagcttagaggcaaaatgacaaaataaagcagcaacaacaaataaaaccaatcttctcgaactggc

SEQ ID NO: 905558 - DNA, 120 bp, Artificial Sequence
  ENSG00000267252_5 (sequence is synthesized)
aactgtattgatttccttccacagtgagtctctgagacctagttttggcagaaggaagtaccagagggagctgagctgttgaacattatgtgcgatcatgtaataactgcaatcggaagg

SEQ ID NO: 905559 - DNA, 120 bp, Artificial Sequence
  ENSG00000267252_6 (sequence is synthesized)
tcacctaacttaaaatttcatattcaaaggacatcatcagctctcttgttagaaggggtccaggctgaacaccctcttttctctcaatgatcccagctatgacacagttttctgatcttc

SEQ ID NO: 905560 - DNA, 120 bp, Artificial Sequence
  ENSG00000267252_7 (sequence is synthesized)
aacatcctggaggcccaagactattcaaatatgtcacaaatatctctaatcacatcttgtgattatgacttggatagaagataaacattatttccataatgatgaacataagacatttga

SEQ ID NO: 905561 - DNA, 120 bp, Artificial Sequence
  ENSG00000267252_8 (sequence is synthesized)
gggacttcacagtgtgacgggaatgttcaacctgcacctgttccttgcaccatactccatccagctctccgctcttccagtcatttatgctcctgtcttccgtggaggaagtctggtagt

SEQ ID NO: 905562 - DNA, 120 bp, Artificial Sequence
  ENSG00000267252_9 (sequence is synthesized)
atctccccgggacactggctcaaatttccagccacctgcccaagacagatgggaccaggggccagatgatgtggacaatgatgatgtcacaaagagaagtaagaaataaaggaggcaact

SEQ ID NO: 905563 - DNA, 120 bp, Artificial Sequence
  ENSG00000267252_10 (sequence is synthesized)
gaatagttcctgtcacctaacttaagtatcattactcaagtactaattaacttaggtattatgcagagaagtcgaataattagaaaagtggcatgacttatacaaggcaacataacagct

SEQ ID NO: 905564 - DNA, 120 bp, Artificial Sequence
  ENSG00000267252_11 (sequence is synthesized)
agaatttaaatgtaaaactgcccgattccaaatccacactctttctactacaaggccttgcccccttctctgggccacaccaacatcgcagttgcaggcgaagaggccatgtctaatgac

SEQ ID NO: 905565 - DNA, 120 bp, Artificial Sequence
  ENSG00000267252_12 (sequence is synthesized)
tgccccctttacatgccaacctagtcatggtcatggtggtgtgatatctaaaaacaaaatggaaccaccatgaaaaatttgtctctgaggacccagagtagtaaaatcccaggataagga

SEQ ID NO: 905566 - DNA, 120 bp, Artificial Sequence
  ENSG00000267252_13 (sequence is synthesized)
aggcctttagcggatatatggcctgctgtcccgttcagtctagaaaacgcctcctcagggtccctgcagatggtcacctccctctgcaggaggacgtccagtgggaggagagccacttcc

SEQ ID NO: 905567 - DNA, 120 bp, Artificial Sequence
  ENSG00000267252_14 (sequence is synthesized)
ccaggtctccctgacactaatgtcagaaggtgctttcttaggttgaatcaaaatctctctccctgtgtcttctctttgcttcctgttcttttctctggagcaacatgatgtaaataagtt

SEQ ID NO: 905568 - DNA, 120 bp, Artificial Sequence
  ENSG00000267252_15 (sequence is synthesized)
gggacaggtgtgagagtgaggaaaatggggagaaaaaagaactttgaagacaaggatttgaagttagcatgaagcatggaaaggaggaagggcaagctttctgcagtgaggacagtgcct

SEQ ID NO: 905569 - DNA, 120 bp, Artificial Sequence
  ENSG00000267252_16 (sequence is synthesized)
gccagagaaaaccagatcctggggaggggtttctccagaaagagaaagtcaaagctgcaggtaggctctggagacaaggagctcgcatgcagtgaaggtggcggccacattgagaaatca

SEQ ID NO: 905570 - DNA, 120 bp, Artificial Sequence
  ENSG00000267252_17 (sequence is synthesized)
ctccaggctgaaggacatgcaccaaaggcgggaggggtggcaccatggacagagcttcggatgggtgcaggtggggctaagaaggcagcatggggcagatgctgcaagtatggaagccag

SEQ ID NO: 905571 - DNA, 74 bp, Artificial Sequence
  ENSG00000267252_18 (sequence is synthesized)
tgcagcctcaaactcctgggctgaaaggatcctgtacccagctaatttttttattttttgcagatacggggtct

SEQ ID NO: 905572 - DNA, 120 bp, Artificial Sequence
  ENSG00000267252_19 (sequence is synthesized)
atcatacccagctaatttttttattttttgcagatacggggtctccctatgttgcttaggctggtcttgagctcctagcctcaagtcattctcttaccttggcctcccaaagtgctggga

SEQ ID NO: 905573 - DNA, 120 bp, Artificial Sequence
  ENSG00000267252_20 (sequence is synthesized)
aggtgtgagccatggtgcctggcgacctcaccatttttgctgactgaatcacttgactaacctaactatagcttgctgctgaagatgctggcaacctagtagacaatacgtcaagatgtg

SEQ ID NO: 905574 - DNA, 120 bp, Artificial Sequence
  ENSG00000267252_21 (sequence is synthesized)
aggatgctccatagtaatgtaataccttccattcaaccaaggttaaaagtgtcaactaaatgctaatgtctccaccaaccacagatggggtttgcaggagcaatggctgtagggacacta

SEQ ID NO: 905575 - DNA, 120 bp, Artificial Sequence
  ENSG00000267252_22 (sequence is synthesized)
agatttcaccctccagaagacagcatcttcctgtgccatggctagatcaccagctacccacagacagcctgaactccaattgtcttcctgcacatgtgcctttaaaggttttactggcat

SEQ ID NO: 905576 - DNA, 120 bp, Artificial Sequence
  ENSG00000267252_23 (sequence is synthesized)
tggtgttctgtgccgctgtataaagagtctgaccatcctaagaccaccatgttgtgaggagcccaagccacatggagaggtcacatagatgttccagtgacagccccaaatgagggtctg

SEQ ID NO: 905577 - DNA, 120 bp, Artificial Sequence
  ENSG00000267252_24 (sequence is synthesized)
ctgacaaccagcatcagccaccacacacacagatgataacatctccaggactctagttcccagatgcctgcatatccccaggctctgaatcctccagcggaggcccagacattgtggagt

SEQ ID NO: 905578 - DNA, 120 bp, Artificial Sequence
  ENSG00000267252_25 (sequence is synthesized)
acatgcaacccatgccagccctgtcatgtcctgtctgaattcctcacccacagtagtcagagcatataaaatggttgttctatgccactacattttggagttgttggtttcccagcagca

SEQ ID NO: 905579 - DNA, 120 bp, Artificial Sequence
  ENSG00000267252_26 (sequence is synthesized)
caaaatggaacagaggcttaagtttactcttaccctagaattccaggagatcctactgtattctcttttagtcttctgtagattttgaggatttctactaggttgtgaggatttctatca

SEQ ID NO: 905580 - DNA, 120 bp, Artificial Sequence
  ENSG00000267252_27 (sequence is synthesized)
cttgctgtcaaaccactgaaattcatattaaattggtattcaaaatggggttgcagagaaaaagtgtcagagtggattgggaccagcaagaagttattgtcctgggatagagagctgcaa

SEQ ID NO: 905581 - DNA, 120 bp, Artificial Sequence
  ENSG00000267252_28 (sequence is synthesized)
tgcacgtttaacgatagcagtatgtcttgttccttgggaatcagatgtcttacttcatcagatagctagactttagaggaattcatcattttaaatgtcagaatatcagattgagttatc

SEQ ID NO: 905582 - DNA, 120 bp, Artificial Sequence
  ENSG00000267252_29 (sequence is synthesized)
cctcagccgacgctgctccatggaagtcaccagaagagaatagaggacagcccactgacgcagagaatcagagcacagcatccactattagtttggacaaactgtggtggccaccagggg

SEQ ID NO: 905583 - DNA, 120 bp, Artificial Sequence
  ENSG00000267252_30 (sequence is synthesized)
tgtatgtgtgtgagagagagagagattatgaactgattgaaaaactgaagattaccagcaactggaatgaggatatataggaaggaggagccagaaatgtgagcaagcccttcagaatgt

SEQ ID NO: 905584 - DNA, 120 bp, Artificial Sequence
  ENSG00000267252_31 (sequence is synthesized)
accttctccaccaccaagtgaaaatgaagattcctccccttgtaatactcggttggctgtgatgcaacattttggcaagactccaaagcagatttgcgaagaaatgcaccctgaaaccca

SEQ ID NO: 905585 - DNA, 120 bp, Artificial Sequence
  ENSG00000267252_32 (sequence is synthesized)
tgccaatactccaatctataatatcctgctcatgctctgaggtcattaaggaaaaaaatcatgaaaataggtggagccccagaatttcctctaaaaatcagaagactcacagagagaatc

SEQ ID NO: 905586 - DNA, 120 bp, Artificial Sequence
  ENSG00000267252_33 (sequence is synthesized)
tccgagatgctctggaagaacaatggccaagcaaaattctcccggaggacagagtctgtggcagtctttctgggtgaccaggaaaataaatagagccattcgccttcatctccttgagct

SEQ ID NO: 905587 - DNA, 120 bp, Artificial Sequence
  ENSG00000267252_34 (sequence is synthesized)
agctgtcagactatatcgactaatatggagtccgtctagttgtgtatgagtctgtgtacaattgcatgtgtgtatttgcagctttgatccggaagccttctaaaaaagaaactgatggtt

SEQ ID NO: 905588 - DNA, 120 bp, Artificial Sequence
  ENSG00000267252_35 (sequence is synthesized)
ggctgccatcaacacatttcctttcctccagttctgtatgcaaccaagcctgtgtgtcaagggttcccctaagtgtggagctccagttccagcatcaaagacaaagcatatcagaaatgc

SEQ ID NO: 905589 - DNA, 120 bp, Artificial Sequence
  ENSG00000267252_36 (sequence is synthesized)
cggcaggtctgtcttgtccattcctcaacaaatgctgaagtgcctcagctgcggccccacgctcaggttccagccaaggctgacttcactggagcatgctgcgctcagcaaagacagcga

SEQ ID NO: 905590 - DNA, 120 bp, Artificial Sequence
  ENSG00000267252_37 (sequence is synthesized)
caaggatcccatcattcgaccacacagcaatactggaggaggcaagacctaattcatctacaatacttggcccactgttttaatcactgcgacaaccaaataaaatcgttaggtatctaa

SEQ ID NO: 905591 - DNA, 120 bp, Artificial Sequence
  ENSG00000267252_38 (sequence is synthesized)
cctcaccagttaaacccaacagctgaggaactgtcagcctgtactgagcctttctatcaaagaaaggatagaaagttattaaaaaccttcagtggtccaagaacctgctgctcccgggtc

SEQ ID NO: 905592 - DNA, 120 bp, Artificial Sequence
  ENSG00000267252_39 (sequence is synthesized)
cttcttgcagatctgaggctgatttcccaactcccaggaacaccctacccacagcctgttccccagacccaggaattcttgaccaagactacaaatgtagcccatttgacatcgaaaaca

SEQ ID NO: 905593 - DNA, 120 bp, Artificial Sequence
  ENSG00000267252_40 (sequence is synthesized)
ccaacgggcgtctggagctcttggctggagaggctgcctctgccccagtgccaggtgcgctggagaaaacaggcatgggagcacaggaaggatcacggctgtcgcacaggaggcatggag

SEQ ID NO: 905594 - DNA, 120 bp, Artificial Sequence
  ENSG00000267252_41 (sequence is synthesized)
ggatggggtcaggataggcgaggacctttggatggcaggagatggcagagcattgagaaagaacagattctgcggagctgcgaggaaaataaatagagccattcgccttcatctccttga

SEQ ID NO: 905595 - DNA, 120 bp, Artificial Sequence
  ENSG00000267252_42 (sequence is synthesized)
acccaccgacagggtgaaggaaactcaagaggactcaccttaagtggagacagcaaattaatttatttagaatatgccagctctttatcatttggctaaactatagcctctcaaggtttg

SEQ ID NO: 905596 - DNA, 120 bp, Artificial Sequence
  ENSG00000267252_43 (sequence is synthesized)
tttccctgggactgaaggattctctaaagaaaaatgacatcaagaaaattatctcaagaggcagaactttcaaacagcaatgggaggctttccaagtgatgttttggactttgatctgca

SEQ ID NO: 905597 - DNA, 120 bp, Artificial Sequence
  ENSG00000267252_44 (sequence is synthesized)
caaatgcttctgccttctgagaaggaagagatggaggaggccccattacatgatggaaattagagagtcttagtacacagtgggcggggggtcaagaatgagctgaacagagacagcaga

SEQ ID NO: 905598 - DNA, 120 bp, Artificial Sequence
  ENSG00000267252_45 (sequence is synthesized)
gtgaccaaatagagcacacagcctggacggcaaggcctgaattctcatctccatcaagctggggctctctgacttacagggccccatctataaaacaaaactgtgtgaaatgatgctgaa

SEQ ID NO: 905599 - DNA, 120 bp, Artificial Sequence
  ENSG00000267252_46 (sequence is synthesized)
gtctcttccttctctaaaattgtgcatcttgaattgctctcgattctgatcttggtatgtcttttaatggacatgaaaaaatgcctgtatctgatgcaatgttgtctaagtcaacgatta

SEQ ID NO: 905600 - DNA, 120 bp, Artificial Sequence
  ENSG00000267252_47 (sequence is synthesized)
caaaaatgttagaattttatgagcaacctgggaaaatcctaacacagagtaaaataaaaccatggcttcagactttttaaaatgacaataaataaaagattaacaaagagatcaataaaa

SEQ ID NO: 905601 - DNA, 120 bp, Artificial Sequence
  ENSG00000267252_48 (sequence is synthesized)
agatacagcattaattccagccgaatctaacagcaacaaggggagggacgtttataacactagacctttgttacatgcatatggcttgtgaagcagtcacacttcatcaacagagcctgg

SEQ ID NO: 905602 - DNA, 120 bp, Artificial Sequence
  ENSG00000267252_49 (sequence is synthesized)
ttcctaatttctctatcctactctcaagcaggatcaacctcccaaacgcattgcttatcaggctgtgataccaaactgcacaggaaaagcttaatcttcaagaacctgtagctgttctcc

SEQ ID NO: 905603 - DNA, 120 bp, Artificial Sequence
  ENSG00000267252_50 (sequence is synthesized)
cagacatccatatctccttgtcctaaccctttgatttatgttattgtttttaagtcccattttccaggcatttgctaagccaatagagaactgggccaatttccaaagtcctgctaagaa

SEQ ID NO: 905604 - DNA, 120 bp, Artificial Sequence
  ENSG00000267252_51 (sequence is synthesized)
tcctctaaaaatcagaagactcacagagagaatctccgagatgctctggaagaacaatggccaagcaaaattctcccggaggacagagtctgtggcagtctttctgggtgaccagccttc

SEQ ID NO: 905605 - DNA, 120 bp, Artificial Sequence
  ENSG00000267252_52 (sequence is synthesized)
caatatcatcacagaggaactgtattgatttcctttgacagatttccttatccatctatcccgccaacatccaggcacgttcagggtactgggagaggcaacagggatggaggtcccatg

SEQ ID NO: 905606 - DNA, 120 bp, Artificial Sequence
  ENSG00000267252_53 (sequence is synthesized)
ggctccccatctcgactatcagactgtgggacactttcattggaaattctgagaagcacagccttaggtgttggaggtttatgataatgaagaaagaaaactcagaggacatctctgaaa

SEQ ID NO: 905607 - DNA, 120 bp, Artificial Sequence
  ENSG00000267252_54 (sequence is synthesized)
ctacacagccaggcctagtggagaaatgaagtaggctccgtactgtctgagccccacacagctcatggtctctccccatcttactggaccatgaggacccttcatcagcagatgcccacg

SEQ ID NO: 905608 - DNA, 120 bp, Artificial Sequence
  ENSG00000267252_55 (sequence is synthesized)
actgcccctccactgatgccattattgccatgatgcagcttctctgtctctgccccctcctccatccaagtctttcccttctccctcttatgatacaacccctttgtttttactgattga

SEQ ID NO: 905609 - DNA, 120 bp, Artificial Sequence
  ENSG00000267252_56 (sequence is synthesized)
ttggataaaatatgtccctgccattggattacacattaatttctgaagtcaatcttcctgaggttaccgagaatcttttatgacattgaaaaaatgtcagatgtgtcaactgataactac

SEQ ID NO: 905610 - DNA, 120 bp, Artificial Sequence
  ENSG00000267252_57 (sequence is synthesized)
tcaatatgcaacctcaccacagaacggctgaagcaccttgtaaacaaattacatctcatattcggccactgttggttaatgccccaagctgggccagtcagtttgaggcaatgcacctgg

SEQ ID NO: 905611 - DNA, 120 bp, Artificial Sequence
  ENSG00000267252_58 (sequence is synthesized)
cctttgtgagtgtgcagcttgtcttgagaaaagacattgggcgtacataagattcccaaaagttctcatgacttgcagacatgtcaacagcattgctctagtgaagagtgctttagagaa

SEQ ID NO: 905612 - DNA, 120 bp, Artificial Sequence
  ENSG00000267252_59 (sequence is synthesized)
gagagaggcttgtaacaccagctgccatctgcactggtgccgcgccaggcactgtgctgagaactttacagccatgatctcatttaattcctcttaaacatccaagttgaagttgtgtcc

SEQ ID NO: 905613 - DNA, 120 bp, Artificial Sequence
  ENSG00000267252_60 (sequence is synthesized)
tattttatatcataaatgtcattatatcaaaaaatatatttttcctgtgcaacatatatgttgtgcatattccagtacataaacttttaacagcttgcatagcatcctcagatttcaata

SEQ ID NO: 905614 - DNA, 120 bp, Artificial Sequence
  ENSG00000267252_61 (sequence is synthesized)
tgatttttaaataccccactcagaagaaatttaatgtttctttcatcatactctgagtcagcttaaatcactatgtttttaattattccactttcacggaaaaatacaaagtgatgaaaa

SEQ ID NO: 905615 - DNA, 120 bp, Artificial Sequence
  ENSG00000267252_62 (sequence is synthesized)
agtttgtcaaagcaagttcaagaggtgatgaacactgccaggtgaattggaaagcaactcataagaataaggaaagaagtatgaaataggtgtaaagaaactgttcgtgtacttgatggt

SEQ ID NO: 905616 - DNA, 120 bp, Artificial Sequence
  ENSG00000267252_63 (sequence is synthesized)
ttgcaaatatcatggggaggctccagattgtgttttccaaagatgactaaaacagtatcatctcccattccctatgctcttctaagaccttgctattcattttcccattaagagagagaa

SEQ ID NO: 905617 - DNA, 120 bp, Artificial Sequence
  ENSG00000267252_64 (sequence is synthesized)
tctaactagttatgcactacttggataactatatcaagttcccttgagtcgtcttttactttaaaatgttattgtaggactgactcatccattccttatcatgcccagtgtactgttcat

SEQ ID NO: 905618 - DNA, 120 bp, Artificial Sequence
  ENSG00000267252_65 (sequence is synthesized)
atctcatagtcaacttggtgctaaaagtagtgacgagccatttacaatgccagaaatcaaattttgtatcagttagaatcaggtttgtctccaaacaataaataataatgaatgtgataa

SEQ ID NO: 905619 - DNA, 89 bp, Artificial Sequence
  ENSG00000267250_0 (sequence is synthesized)
cgtctcttcacacggacacacatgacatttggtgccgaagagctgggacaggaggactccttcaggagaccagttcccttgtcctcgcc

SEQ ID NO: 905620 - DNA, 76 bp, Artificial Sequence
  ENSG00000267250_1 (sequence is synthesized)
ccaaaatccacagtgatccacataatactcaggaatcacccagaagggatttctatctgaaaggagaaagaagctc

SEQ ID NO: 905621 - DNA, 120 bp, Artificial Sequence
  ENSG00000267250_2 (sequence is synthesized)
cacccagaagggatttctatctgaaaggagaaagaagctctggggcatgaatatacgttgtcttgtaaaaaaataaatcagtaattcatgtgtgtatattttatactcaatgggaaaaaa

SEQ ID NO: 905622 - DNA, 120 bp, Artificial Sequence
  ENSG00000267251_0 (sequence is synthesized)
tcaaaaccagccctaacaatttttatacaacttttaaataaaaacagtggaaaatacaataaataagtcctctaaataaagctgtggtatgaagtttaaatgccccaagtcagaagtcaa

SEQ ID NO: 905623 - DNA, 120 bp, Artificial Sequence
  ENSG00000267251_1 (sequence is synthesized)
ttggatgtctctgtctgagctgagagcacatgacatacaacgaaaccacatggacagacacaaccccgaatgccaattccagtgtcctgtgcagtgatgaccacactgttagaagcattt

SEQ ID NO: 905624 - DNA, 120 bp, Artificial Sequence
  ENSG00000267251_2 (sequence is synthesized)
taactcttgtttttacaaactttctttttacatatatgttagcggtcaaagaactctgtttttcttggtccaaaccagaggaaatttattgtccaaaccagacccaccccaatgcatttg

SEQ ID NO: 905625 - DNA, 120 bp, Artificial Sequence
  ENSG00000267251_3 (sequence is synthesized)
cctctgatgtgagaaagaaacactagggcttcaaccagatgaggggcgtttaggaaaacccacagctgaagtcacattcaatgcggaacactgggcacctccccctaaggtcaggaacaa

SEQ ID NO: 905626 - DNA, 120 bp, Artificial Sequence
  ENSG00000267251_4 (sequence is synthesized)
gacgagggtgtccgctcttattcctttcagcctcggcactgatggtcctagggcaactctatgttgacgcctctgaggaactgccgggctgcagtgaatccaggtgacctcacagaaact

SEQ ID NO: 905627 - DNA, 120 bp, Artificial Sequence
  ENSG00000267251_5 (sequence is synthesized)
caggaggtggaaacaaccccgatgtccatcaactgatgaaccaaccgatgaacacagggtgacctgtccatacagtggggtctcagccacagagggagcaaggccgtgaaacctgcagcg

SEQ ID NO: 905628 - DNA, 120 bp, Artificial Sequence
  ENSG00000267251_6 (sequence is synthesized)
ggagcaaggcggtgaaacccgcagagggagcaaggccgtgaaacccgcagcgggagcaaggcagtgaaaccctcagagggagcaaggccgtgaaacccgcagcgggagcgaggcgcggaa

SEQ ID NO: 905629 - DNA, 120 bp, Artificial Sequence
  ENSG00000267251_7 (sequence is synthesized)
acaggccatgacacggacgagccacaccatggatgaccccacggacacgccaccaaagcaccatcatgctgagtgacagaagccaggcacccagaccatgcaccgtatgattcctttcac

SEQ ID NO: 905630 - DNA, 120 bp, Artificial Sequence
  ENSG00000267251_8 (sequence is synthesized)
gtgaaatttccagaacagggaaatgcagagcgacagaaagcaggttagaggttccaggggctgggggttgggggaatggggagagactacttaacaggcagagacttgtttttggggtgg

SEQ ID NO: 905631 - DNA, 120 bp, Artificial Sequence
  ENSG00000267251_9 (sequence is synthesized)
tgaaaatgttctaaactgactatggctgcacaactctgtgaacacactaaaaacactggcttggacaacctaaatggtcggatgctgacttaggtctcaataaagctaaaaaataaggtg

SEQ ID NO: 905632 - DNA, 120 bp, Artificial Sequence
  ENSG00000267251_10 (sequence is synthesized)
cagaaagcagggtcaggccccgttcggagagattgccatggttctgagaaacgcatcatttggtgactggtcatcatgcaaacatccttgagcgcactcacacaacctggaggatgtagc

SEQ ID NO: 905633 - DNA, 120 bp, Artificial Sequence
  ENSG00000267251_11 (sequence is synthesized)
tcactggatgcccaggctacgtggagtagcccattgctctggggctacacacccatacatcgtgttactgtgctgaatacactaggcaactgtgatacaatggagatcacagaaggccaa

SEQ ID NO: 905634 - DNA, 120 bp, Artificial Sequence
  ENSG00000267251_12 (sequence is synthesized)
caaagaggcctggggcacgtcaacgtggtcctcatcggactggccaatggttccttcctaactcaaccaagggccactgcgccaccgcagctgtgggaccgtatctctggatgataagct

SEQ ID NO: 905635 - DNA, 120 bp, Artificial Sequence
  ENSG00000267251_13 (sequence is synthesized)
gagtccaacacaaacacaacagaacccaaaagaatgcccagaatgccaagaacagtgaacagccatacgcaaacgggcaatactgatgttagctttaaaagtaaggagttcagagtgctc

SEQ ID NO: 905636 - DNA, 120 bp, Artificial Sequence
  ENSG00000267251_14 (sequence is synthesized)
tgtgctgaacatctttcggtgtaattaagccttcatattcctgaggaggagctactaagacaccctaccaagtcctgggctgtgcctggaggttagaaaacgaaccacatagtcctgtaa

SEQ ID NO: 905637 - DNA, 120 bp, Artificial Sequence
  ENSG00000267251_15 (sequence is synthesized)
tgacagaaaaaattgaaaactgtattttaaaaatgatttctcaacaagaccagccggccactcaaccacttcagtacctcgtttctggatgaagaccctgagcaggggatttgcactaga

SEQ ID NO: 905638 - DNA, 120 bp, Artificial Sequence
  ENSG00000267251_16 (sequence is synthesized)
aaccgccttgcagaagttgtcatcattgttgatgggcagcaggtctccgtgcacatctgcatagccaatagttacatcactgttggagatatggtgggtgtgcacaaccagcttgtagaa

SEQ ID NO: 905639 - DNA, 120 bp, Artificial Sequence
  ENSG00000267251_17 (sequence is synthesized)
atcttcaaacttcccaggcttatgacggtccagagagaaccttcggaattccgccccaaactacaatgcaagagacggggtggggggaggggcattaataaataccagagaaatatccag

SEQ ID NO: 905640 - DNA, 120 bp, Artificial Sequence
  ENSG00000267257_0 (sequence is synthesized)
atagttccccttttctgtgaaacaggaaacacatactgacgctttctgggctcaactatgtcattttcagggacgtcatgaatttggcctgtggagttgtgcgtgtcaaccccaagagaa

SEQ ID NO: 905641 - DNA, 120 bp, Artificial Sequence
  ENSG00000267257_1 (sequence is synthesized)
gcgtgagtcattattggaagacaactagaaagagggtccacggatgactccaggagtctgggttggctgaaaccccgggaagaaagacttctccaatgtacactgatggtgggctcttcg

SEQ ID NO: 905642 - DNA, 120 bp, Artificial Sequence
  ENSG00000267257_2 (sequence is synthesized)
cctttatggctttctctgctatcagcaagggctgactcagcatcctctggactgtgagccaatgctgctatttcagagggggccaattcaggcacaacagcatctgcctttagactatca

SEQ ID NO: 905643 - DNA, 120 bp, Artificial Sequence
  ENSG00000267257_3 (sequence is synthesized)
ggtacagcccagaccttgtcaggaattatgagaccaccgtctgatgccttgctctcagaatttgtcagttgtcgtggtggccagatttcagaagcggaagcctctagagttataatcttc

SEQ ID NO: 905644 - DNA, 120 bp, Artificial Sequence
  ENSG00000267257_4 (sequence is synthesized)
agcttgttgcctgcctcccaatttccaggtctatattctttagactcttccaaaaggatatcagagagagatggaacgttgctcagagcctgactgtcttcttccccagcagtttcagcc

SEQ ID NO: 905645 - DNA, 120 bp, Artificial Sequence
  ENSG00000267257_5 (sequence is synthesized)
accacggagaccctcgtcccccaacctgagcgctgccctgctccttccctagagcttgcgggtgagtgggccgtgggcaccaagtttctttcctcttgtgcagcagatgtcgtaggcaaa

SEQ ID NO: 905646 - DNA, 120 bp, Artificial Sequence
  ENSG00000267257_6 (sequence is synthesized)
ctttgttggaaatcaggtgcagaaagagaaccctgctgggacaggctctgctgctggaccccctgctttgtttcacttcctctttcttggaaattctcttcatagctcctaaagtctgct

SEQ ID NO: 905647 - DNA, 120 bp, Artificial Sequence
  ENSG00000267257_7 (sequence is synthesized)
ctgtccacagtctggctcttatctccagacaggttatcaacctgaagaggggaattactgcagaaaccctctccctctgggagctgcaggacatggtgtgggactcctggcacactgggt

SEQ ID NO: 905648 - DNA, 120 bp, Artificial Sequence
  ENSG00000267257_8 (sequence is synthesized)
gccctgcaaagtagctcttttgtagatttgatggtagcaccacttaaaatatgatccaactgcacttgggaaggaaattgggaaaccttttcatgggatgcacgagggaacctctcctca

SEQ ID NO: 905649 - DNA, 120 bp, Artificial Sequence
  ENSG00000267257_9 (sequence is synthesized)
gtgccacctgcatgcttgtcctcaggaattgacacagcaaggtatttggctgggtggacttcggtggcaatggtaacagttgatgtgtcctcagtctccctggtcgcttgaaagcactca

SEQ ID NO: 905650 - DNA, 120 bp, Artificial Sequence
  ENSG00000267257_10 (sequence is synthesized)
ggaaaactcacaattgaactataactggctggtgtggctgtggtgtctgcggcactaggactggggctcttgtcacctccttctttaaattgcactaaaggattgttctcagaagaaagg

SEQ ID NO: 905651 - DNA, 120 bp, Artificial Sequence
  ENSG00000267257_11 (sequence is synthesized)
agctgtgtttcatcaagccctcctgagttgctggggcttggctgctcctggccagcatgtactgtggaggccagtgggtaggtggaattctccaccttggctagattttctcctgtggca

SEQ ID NO: 905652 - DNA, 120 bp, Artificial Sequence
  ENSG00000267257_12 (sequence is synthesized)
ccttcactagctgtgtgtgaaatgttcaaggtgaaagtactggtaaaaagaggggacatgactgagttgccgtccttgctgcttttgcacgtagacactgaagtctcagacacttgtgtc

SEQ ID NO: 905653 - DNA, 120 bp, Artificial Sequence
  ENSG00000267257_13 (sequence is synthesized)
tgaaaaaagacttccagtgtcttgtcattagaagaacataaatcagatactttgttttgaccttctgccagttccgtatctacagagcaaatttcttgaggcgaatatttatcaactggt

SEQ ID NO: 905654 - DNA, 120 bp, Artificial Sequence
  ENSG00000267257_14 (sequence is synthesized)
ctcccaacaagagaatctatggtatcaaaacacgttccttggtcaccagcctcaaaacactccattgcacacactgcttctctgtcccttggctcatcacacacattttccagggtgagg

SEQ ID NO: 905655 - DNA, 120 bp, Artificial Sequence
  ENSG00000267257_15 (sequence is synthesized)
gcagtatctgtgggttcaggggaagcaacagagacagccacaggctccctgaagtcagcacgagcatccttggggagatgccttgagaacacacctggggacatagtctcatcattggct

SEQ ID NO: 905656 - DNA, 120 bp, Artificial Sequence
  ENSG00000267257_16 (sequence is synthesized)
tctgagatgctctgctcatattttaggtcttccctgaaattgtcaggtatgttgccatctctgtcttgtttttcttcatgctgtggaccacaggtacagggtttgacctccgagtgttga

SEQ ID NO: 905657 - DNA, 120 bp, Artificial Sequence
  ENSG00000267257_17 (sequence is synthesized)
gctaatgatgcattttccttgtggacccctcctaagtttgagaaggaaattgttgtggtcccagtgaatggggactcctccccagcaggctctgagaaagctggcatctggctgcaagag

SEQ ID NO: 905658 - DNA, 120 bp, Artificial Sequence
  ENSG00000267257_18 (sequence is synthesized)
attgtctctctgactgtttcctgaacttgtacctaggaagatgaaaagtgatattagtagaattgttcatgggagagcccacaatagggcataactgcaatcccaagagtgttaatcctc

SEQ ID NO: 905659 - DNA, 120 bp, Artificial Sequence
  ENSG00000267257_19 (sequence is synthesized)
aatgaccgtaataatggacaagaatgattgaaatctaaacattaatcccccaactccctctagctattagagatttcctagaaaactgcaaatttaagcaactctgtgttccagggggcc

SEQ ID NO: 905660 - DNA, 120 bp, Artificial Sequence
  ENSG00000267257_20 (sequence is synthesized)
ctttgtcaaattcatcattataagcaaaaagcctcctgacaaccatcatttatttaatgatttctttctctcttaggaaatagatggaaataaatcgaatgttaactgttttgatcaagt

SEQ ID NO: 905661 - DNA, 120 bp, Artificial Sequence
  ENSG00000267254_0 (sequence is synthesized)
gcaggcgctgggtctgcagatggcgtccaggtacacagtggcgagtgtgattccgcagtcttgggctgtttggccaagcgcccgccggacatggtacgccgaagggtcatcggcgtggag

SEQ ID NO: 905662 - DNA, 120 bp, Artificial Sequence
  ENSG00000267254_1 (sequence is synthesized)
tcctcgctttcagcgtccgcggctgggaaatcggccatcgctacggcgggaactgggactcgggctgcgtcccggcccttccacatcggtccaccgcactcgtgggcgcccgcattggtg

SEQ ID NO: 905663 - DNA, 120 bp, Artificial Sequence
  ENSG00000267254_2 (sequence is synthesized)
ctgacataatttcctgacctctgacccgtattgtctcgcgattaaaggtccagatttggaacaaatctctctagagattgaacagagctgcgcctggatccctcagcagtgaggagacct

SEQ ID NO: 905664 - DNA, 120 bp, Artificial Sequence
  ENSG00000267254_3 (sequence is synthesized)
gagctgcgcctggatccctcagcagtgaggagacctgaagaccagaggaaacacagcaaacggagccttgctctgttgcccaggctggtgtgtagtgatctcagctcactgcaagctcca

SEQ ID NO: 905665 - DNA, 62 bp, Artificial Sequence
  ENSG00000267254_4 (sequence is synthesized)
tccaccttccgggttcacaccattctcccacctcaacccccggagtagctggaactacagcc

SEQ ID NO: 905666 - DNA, 120 bp, Artificial Sequence
  ENSG00000267254_5 (sequence is synthesized)
cctcggcctctcaaagtgctgggattaaaggcgtaagccactgcgcctggctgttttttcatttctattatgatttgtcctgtggaatgtcagtgacttagcggtatttttatcacacgt

SEQ ID NO: 905667 - DNA, 120 bp, Artificial Sequence
  ENSG00000267254_6 (sequence is synthesized)
tcacacgtttataaagctgaatagttttgtatgtcagctcagcacccttagtgtcagccatgctagtctcctgctgtgcatagatcgaggcctgtccatacccgaatctcctgggttccc

SEQ ID NO: 905668 - DNA, 120 bp, Artificial Sequence
  ENSG00000267254_7 (sequence is synthesized)
actgtcagcacctgaaggtacccaccagatgtgtctgtcacttccctacatccacctctattgtggttctcatgtttctgcctccctagagaccatttctctgtagagcagcgctttcga

SEQ ID NO: 905669 - DNA, 120 bp, Artificial Sequence
  ENSG00000267254_8 (sequence is synthesized)
atagaaatacaatgccagacacataagttgttttagattttctagtagtcactttagaaaagttaaaaagaaacaggtgaaattaatgttttatttcacctaaaatgttagcattatcca

SEQ ID NO: 905670 - DNA, 120 bp, Artificial Sequence
  ENSG00000267254_9 (sequence is synthesized)
aaatatcacttcaacatcttatcaaaataaaattattaatgagattggttaccgttccgataaataggtgaactgagagcatacacagtagtattctgttctaatttctgcttcactgtg

SEQ ID NO: 905671 - DNA, 120 bp, Artificial Sequence
  ENSG00000267254_10 (sequence is synthesized)
gtgaaatattatacatgtaactcataacctctacaattctgcagttgtaattggttgtcttacctaataatcagttgctttgcttcataatatttaaattggcatctctattttccaaaa

SEQ ID NO: 905672 - DNA, 120 bp, Artificial Sequence
  ENSG00000267254_11 (sequence is synthesized)
ggcataaatactagtatagttttttagttaagccaggagaaagttcactttatttacataacttatacgtaaaaatttaataaatctccctgcttcttttcttttgcatcataacaacca

SEQ ID NO: 905673 - DNA, 120 bp, Artificial Sequence
  ENSG00000267254_12 (sequence is synthesized)
ctgaaaataatatttctatggcagttgggggtaaatggacaatagcttttgtgaccagaggtgaatggcccagggtctccagcactccaggtcccactgagcctgccccacagctgaggg

SEQ ID NO: 905674 - DNA, 120 bp, Artificial Sequence
  ENSG00000267254_13 (sequence is synthesized)
catcggtatttccacacacctataatgtacagtgccccagaacagagatcggatgctctgctttattcagatggggtgttgagagtattgtcattgtaattgaattagtaagtaagtatt

SEQ ID NO: 905675 - DNA, 90 bp, Artificial Sequence
  ENSG00000267254_14 (sequence is synthesized)
ttaacataattgactacatctgcttctatgagctgctgttctaacatttaactagaatctaatttgaaattagtcaataaaaagtttatt

SEQ ID NO: 905676 - DNA, 120 bp, Artificial Sequence
  ENSG00000267254_15 (sequence is synthesized)
tctgcttctatgagctgctgttctaacatttaactagaatctaatttgaaattagtcaataaaaagtttattcaactgaattatatttagactttttgttgttgttgttgttttgagatg

SEQ ID NO: 905677 - DNA, 89 bp, Artificial Sequence
  ENSG00000267254_16 (sequence is synthesized)
gttcagtgggattactggtgcctgccaccacgcccagcgtgaagcactgcacccggccttcatagattattttactttattttagttac

SEQ ID NO: 905678 - DNA, 120 bp, Artificial Sequence
  ENSG00000267254_17 (sequence is synthesized)
cacccggccttcatagattattttactttattttagttacttatttttatgactttattgttataaaaatgcttgtttttaaaaaaaatcaaccagtataacaaagaacaaagaagataa

SEQ ID NO: 905679 - DNA, 120 bp, Artificial Sequence
  ENSG00000267254_18 (sequence is synthesized)
tcaacaagcattcccacctccatgatttagaaataactgtcatcaatacaggaaaataccatgccattctttctcctctaggcacatggacagacagatagaaggatgggaaaatagata

SEQ ID NO: 905680 - DNA, 67 bp, Artificial Sequence
  ENSG00000267254_19 (sequence is synthesized)
ggcacatggacagacagatagaaggatgggaaaatagatagatggtccaggctacctgaggtcagga

SEQ ID NO: 905681 - DNA, 120 bp, Artificial Sequence
  ENSG00000267254_20 (sequence is synthesized)
atcaagcaaagatatttttgtgcattcaaggaacacagagaggaaagacagtggcagatggagacgtataaagcagggatcctgttatgaaaagccctaaaaaatagggtatagagtttg

SEQ ID NO: 905682 - DNA, 120 bp, Artificial Sequence
  ENSG00000267254_21 (sequence is synthesized)
ggccatatttcagaggtaataagaaagcattctgcatttttaaagtaaggtttaaaaatgtttctaattagagatacagcaaagttggtgtgagaggataaagactgatatacataatct

SEQ ID NO: 905683 - DNA, 120 bp, Artificial Sequence
  ENSG00000267254_22 (sequence is synthesized)
gaggagttcatgaaaattccatgtaaagcctgtagtatgaattggtcctaggagacagacagcttcaggggcatagagaactttaagcacttttccaagaagagtgaagggctggagaat

SEQ ID NO: 905684 - DNA, 120 bp, Artificial Sequence
  ENSG00000267254_23 (sequence is synthesized)
aaattgtgaactaaaatatattttgtgtttgagaacatgaagtacttgagagtgattattacacggttttaagaaaaaactagttcttttaaataaaacttttttttagctgagcacagt

SEQ ID NO: 905685 - DNA, 89 bp, Artificial Sequence
  ENSG00000267254_24 (sequence is synthesized)
tgaggagacctgaagaccagaggaaacacagcaatcggagtctccctctgtcatccagatcaacctccgactcccaggttcaagcaatt

SEQ ID NO: 905686 - DNA, 120 bp, Artificial Sequence
  ENSG00000267254_25 (sequence is synthesized)
ctgtattccttaattatagtagaagacactgggtgaactcagagctgataataggagtcctcctgaaccagttgagcttctgaatggtaaagaaggcctggctattcaaagggaaccaaa

SEQ ID NO: 905687 - DNA, 120 bp, Artificial Sequence
  ENSG00000267254_26 (sequence is synthesized)
acatgaaaataccagtgacagctattccaggaaaatctattacatcctctccaaaatataaattagatataacatgcgtaagatagttagataaaagttttaggctggtgcagtggctca

SEQ ID NO: 905688 - DNA, 120 bp, Artificial Sequence
  ENSG00000267254_27 (sequence is synthesized)
caaaacaacaacaacaacaacaacaaaaaacacacaaagttttaaaagtgtgtcaaaatcccccatgtacaaaaaaactcactaaaaaaatcagagaagatgaaaatcatcacccaacat

SEQ ID NO: 905689 - DNA, 120 bp, Artificial Sequence
  ENSG00000267254_28 (sequence is synthesized)
tgaaaatcatcacccaacatttcagtctgaattaaaaaaaaagtatgatgcaattgcagctctaaaagcagaccacaagcaaaaatatacgatctcaggagagagaagaaagtaatagat

SEQ ID NO: 905690 - DNA, 120 bp, Artificial Sequence
  ENSG00000267254_29 (sequence is synthesized)
agaccatagatgggagttagtggaattcaagactgaaagagaaaataggctaagtcacatcagaaatgaagaataaactagctagtgcagcggcatgtgcctgtggtcccagctacttgg

SEQ ID NO: 905691 - DNA, 85 bp, Artificial Sequence
  ENSG00000267254_30 (sequence is synthesized)
gtgcctgtggtcccagctacttgggagactgagtctagaagattgcttgagtccaggagttcaaggttgaggggcgcataagatc

SEQ ID NO: 905692 - DNA, 120 bp, Artificial Sequence
  ENSG00000267254_31 (sequence is synthesized)
tgttcagacctcagcatataaaatgacccatctgtagacctcaggctccaaccataccccaagagttgtctggttttgtttaaattactgccaggtttcaactgcagatatccctggaag

SEQ ID NO: 905693 - DNA, 120 bp, Artificial Sequence
  ENSG00000267254_32 (sequence is synthesized)
gaatattccagattccctgagtagtttccaggttaaagtcttataggcttcttctgttttgaggaggagttcctgtcagagaaaagcctgatttggatttttaactttaatgcctgtgaa

SEQ ID NO: 905694 - DNA, 120 bp, Artificial Sequence
  ENSG00000267254_33 (sequence is synthesized)
atgctataaaaaataattttctacccctaacattaaagtactgttagtgagaaattaaaattccctcaggaggattaaactgccatttcagttacctgaattccaaatgttttggttgtt

SEQ ID NO: 905695 - DNA, 120 bp, Artificial Sequence
  ENSG00000267254_34 (sequence is synthesized)
ctggtcacaaaccagccagcctcagctgatctgccagcctcagccccccaaaatgctggaattacaggggctcaccagagaagacagggcaaggtgagggggatctcctagcagaggaaa

SEQ ID NO: 905696 - DNA, 120 bp, Artificial Sequence
  ENSG00000267254_35 (sequence is synthesized)
caagagcaaaaccccttctcaaaaaaaaaaaaaaggaaaaaaaaatttttagggacagtgtctcaaactgtcagtcatgctggagtagagtggtgcaatcacagtttactgttgcctcaa

SEQ ID NO: 905697 - DNA, 120 bp, Artificial Sequence
  ENSG00000267254_36 (sequence is synthesized)
actgctaggctgaagcgatccttccacctcagtctgctgaatagggtgggactacaggaatgcaccactgtgcctggctaatttattttatttttgtcgagacggggtccgctatgttgc

SEQ ID NO: 905698 - DNA, 120 bp, Artificial Sequence
  ENSG00000267254_37 (sequence is synthesized)
cccaaagtgctggaattacaggtgtaggccaccatgtccagccaaaaactaattctaatcctgatattcctcctcctggaaaccatgtagacagaaacaagaaaatcaaagtaaatccca

SEQ ID NO: 905699 - DNA, 120 bp, Artificial Sequence
  ENSG00000267254_38 (sequence is synthesized)
agaaacaagaaaatcaaagtaaatcccaaccatcaggaaacagaaaatgaacagattccaaattatttggagatgtgaaaagaaaatgaaagaacaatgtctgtggaagccacagtgatg

SEQ ID NO: 905700 - DNA, 120 bp, Artificial Sequence
  ENSG00000267254_39 (sequence is synthesized)
ctacaaagaaaaacaaatgaggaatatccattcccatggggagtagaccatatcctgaatgaaagtttctgtgagcaggaatgatgtcaaaaggaggtggtaaaaggaggcccgaagatg

SEQ ID NO: 905701 - DNA, 120 bp, Artificial Sequence
  ENSG00000267254_40 (sequence is synthesized)
tcagggggattcaaggtggcaaaacacattggttgtattttttttttaaagctttattgaaatataattcacataccatacaattaagccatttacagtgaacaattcaatggttcttag

SEQ ID NO: 905702 - DNA, 120 bp, Artificial Sequence
  ENSG00000267254_41 (sequence is synthesized)
tatattcacaaatacgtgcaaccacagtcaatgttagaatattttcatcatttcgaaaagaaactctaaccctttggctatcactccttggcttccccactgccacatgtgccccatact

SEQ ID NO: 905703 - DNA, 120 bp, Artificial Sequence
  ENSG00000267254_42 (sequence is synthesized)
tagcctcaaataatgactaatctactttctgactctatggattttcctattctggactttcatatgaatggaataacatatgtggacttgttactggcttctttcacgtagcataaggtt

SEQ ID NO: 905704 - DNA, 120 bp, Artificial Sequence
  ENSG00000267254_43 (sequence is synthesized)
ctcaaggtttatccaaattgtagcatgaatcagtacttcattccttgctatgcctgaataatatctctgcaaatgaatagaccaccttttgtctacccattcgtctattaatggacattt

SEQ ID NO: 905705 - DNA, 71 bp, Artificial Sequence
  ENSG00000267254_44 (sequence is synthesized)
accaccttttgtctacccattcgtctattaatggacatttgggttgtttccaccttttgacaattactatt

SEQ ID NO: 905706 - DNA, 89 bp, Artificial Sequence
  ENSG00000267254_45 (sequence is synthesized)
gcccggctgacaattatttttaaaatgctgcaatgaacattcatgtaaaagtttttgtttgaatatcatctattttgtagttttcagag

SEQ ID NO: 905707 - DNA, 120 bp, Artificial Sequence
  ENSG00000267254_46 (sequence is synthesized)
agtttttgtttgaatatcatctattttgtagttttcagagtataagttttattttctatatagaaaatcatgccatctgcaaatagagatgctcttagctgtgttccgttcttttctcca

SEQ ID NO: 905708 - DNA, 120 bp, Artificial Sequence
  ENSG00000267254_47 (sequence is synthesized)
gtgtcttttatttcttttacttccccatttgccctagcccaattgccagtacaatgttaaacagaagtggggatccttgtctggtccctgatcttagagggaagacatccagtcttttac

SEQ ID NO: 905709 - DNA, 120 bp, Artificial Sequence
  ENSG00000267254_48 (sequence is synthesized)
cattaagtgtgatgttggctgtgggtttttcctagatatcaggttgaattcctctttattcctagtttgtagaatgtgtatgttttaaaaaaaatcataaagggtattggctctggtcaa

SEQ ID NO: 905710 - DNA, 120 bp, Artificial Sequence
  ENSG00000267254_49 (sequence is synthesized)
cgattaaagagctgcgcctggatccctcagcagtgaggagacctgaagaccagaggaaacacagcaagtccaggcactcccactcctcctgagagaaatctacagccacatccctgaaca

SEQ ID NO: 905711 - DNA, 120 bp, Artificial Sequence
  ENSG00000267254_50 (sequence is synthesized)
aaatttttaaacatatatataacaagttcttctagcattgtttgttaaaaagattacctcttctttaataaatttcctttgcaccactgtcacaaatcagttgtccatgtatgtgtgttt

SEQ ID NO: 905712 - DNA, 120 bp, Artificial Sequence
  ENSG00000267254_51 (sequence is synthesized)
ctcaactctctattttattccatgaataccacacagtcttgattactgtagctttataataagtcttaaattcaggtaacatatgttctccaactttttctttttttttttttgagtcgg

SEQ ID NO: 905713 - DNA, 70 bp, Artificial Sequence
  ENSG00000267254_52 (sequence is synthesized)
tcctgacctcaggtgatctgtccaccgattttccaactttcagaattatttttaaaagttgttttcacta

SEQ ID NO: 905714 - DNA, 120 bp, Artificial Sequence
  ENSG00000267254_53 (sequence is synthesized)
ttccaactttcagaattatttttaaaagttgttttcactaatctaggtcctttgcatgtccatatgtattttagaattgagttcccaatttctacaaaacaaaaagcctcctgaatattc

SEQ ID NO: 905715 - DNA, 120 bp, Artificial Sequence
  ENSG00000267254_54 (sequence is synthesized)
aaaatgggatttcactgaatctataggtcaggttggaaagaattgacatattaatggtattgagtcttgtagtctctgaacatagtatatctctatttaggtcttttttaaagttctccc

SEQ ID NO: 905716 - DNA, 120 bp, Artificial Sequence
  ENSG00000267254_55 (sequence is synthesized)
agaagtgtttttaatttttatactatacatcttgcacttcttttgccagatgcatcactatgtatttcatattgtttatggtgttataaatggcatttaaggttttaaggttcagattgt

SEQ ID NO: 905717 - DNA, 120 bp, Artificial Sequence
  ENSG00000267254_56 (sequence is synthesized)
tcatggctagttcatgcaaaatcatctgctttatatatattgatctttattttgcagtctcactaagctcatttagttctaatagtgttgtagataccttcagattttttttatatagac

SEQ ID NO: 905718 - DNA, 120 bp, Artificial Sequence
  ENSG00000267255_0 (sequence is synthesized)
agctcgggtggtttccagccttctaacccacagaccatggccacgctccctcaccagggtgtctgctcctatggctcccctcgcttgcaagctcctcctacgtctgccaccctcccagac

SEQ ID NO: 905719 - DNA, 120 bp, Artificial Sequence
  ENSG00000267255_1 (sequence is synthesized)
acggtgagcatcggcagaaagcccactaggtcacagcagctgggcagtcaggaggaaatggtgtgcagcaggcccgcaggaggcaagagggggctgtggggccacggtgcagatgcggac

SEQ ID NO: 905720 - DNA, 120 bp, Artificial Sequence
  ENSG00000267255_2 (sequence is synthesized)
aggtttcagaccacacagcaggtcaaacaccagctgtcagtgagtgaacacagctgggctgcatccttagcccctcactgtgggacagagactcaaacacaagccgtctgtgagtgaaga

SEQ ID NO: 905721 - DNA, 120 bp, Artificial Sequence
  ENSG00000267255_3 (sequence is synthesized)
cagctggggcacatccttaccccctcactgtgggacagggactccccaggctcctcttcttcccactcctcatcactgtccacctcatagtccaggagcttctgagaaaagaaacacatg

SEQ ID NO: 905722 - DNA, 120 bp, Artificial Sequence
  ENSG00000267259_0 (sequence is synthesized)
aaaggaaaaacttatgtcagccccagccctggggctatccgatctgacaaagccttttacattgtatgtgtcagagagagaaaagatggcagttggagttttaacccaaactgtggggcc

SEQ ID NO: 905723 - DNA, 120 bp, Artificial Sequence
  ENSG00000267259_1 (sequence is synthesized)
ctggctgaggccggtggcctatctctctaaacaactagacggggttgctaaaggatggcccccatgtttgagggccttggcaccaactgccctgctagtacaagaagcagataagctgac

SEQ ID NO: 905724 - DNA, 120 bp, Artificial Sequence
  ENSG00000267259_2 (sequence is synthesized)
taaaggccccccatgctgtggtgactttaacgaatactaaaggacatcattagctagcgaatgctagactcactaagtaccaaagtttgctctgtgaaaatccccgtataaccactgaag

SEQ ID NO: 905725 - DNA, 120 bp, Artificial Sequence
  ENSG00000267259_3 (sequence is synthesized)
tccccgtataaccactgaagtttgtaacaccctgaaccccactaccttgctcccggtatcagagagccctgtcaagcatgattgtgtagaagtattggactcagtttactctagcagacc

SEQ ID NO: 905726 - DNA, 120 bp, Artificial Sequence
  ENSG00000267259_4 (sequence is synthesized)
atcagtagactgggaactatacgtggattggagcagcttcatcaacccacaaggagagagatttgcagggtgtgcggtggtaaccctgggcactgttgttgaagccagatcgttgcccca

SEQ ID NO: 905727 - DNA, 120 bp, Artificial Sequence
  ENSG00000267259_5 (sequence is synthesized)
ccagaaagctgaactcattgctttcattcaggccttagaactcagtgaaggtaagactgtcaacatttacactgactctcggtatgcctttttaacccttcaagtgcatggagcattata

SEQ ID NO: 905728 - DNA, 120 bp, Artificial Sequence
  ENSG00000267259_6 (sequence is synthesized)
tgcctttttaacccttcaagtgcatggagcattatataaagaaaagcgcctattgaactctgggggaaaggacataaaatatcaacaagaaatcttgcaattattagaagcagtatggaa

SEQ ID NO: 905729 - DNA, 120 bp, Artificial Sequence
  ENSG00000267259_7 (sequence is synthesized)
agaggacaccagcgagcttccaccttggtgggtttgcggaattcccgcgctgacttagaggctcgaaaagcagcatctgcccccttccgggcatcagtcacagcacccctgctccctcaa

SEQ ID NO: 905730 - DNA, 120 bp, Artificial Sequence
  ENSG00000267259_8 (sequence is synthesized)
ttccgggcatcagtcacagcacccctgctccctcaagcgcctgatcttttacctacttattctaaagaagaaaaggactttctccaggcagagggaggacaagtgatggaggaaggatgg

SEQ ID NO: 905731 - DNA, 120 bp, Artificial Sequence
  ENSG00000267259_9 (sequence is synthesized)
accagatgggagagaagctgtgccacagctgctaggagccgcagttgtgctggctgtgcataaaaccacccatctaggccaggagtcacttgaaaagttgttagtccggtatttctacat

SEQ ID NO: 905732 - DNA, 120 bp, Artificial Sequence
  ENSG00000267259_10 (sequence is synthesized)
cttgcatttgtcagcccttgccaaaacggtgacgcagcggtgtgttacctgcccaaagcataatgcgaagcaaggtccagctgttccgcccgtcatacaagcttatggagcagccccctt

SEQ ID NO: 905733 - DNA, 120 bp, Artificial Sequence
  ENSG00000267259_11 (sequence is synthesized)
tatttactagttcttgtgtgtacctactctggtgggtggaggcttatccagcacaaactgagaaagctcgtgaagtaacctgtgtgcttcttcgagatcctattcctagatttggactgc

SEQ ID NO: 905734 - DNA, 120 bp, Artificial Sequence
  ENSG00000267259_12 (sequence is synthesized)
ccttacggatcggctcagataatgggccagcatttgtggctgacttggtacagaagagggcaaaggtattggggaacacatggaaactgcatgctgcctaccggcctcagagttccagaa

SEQ ID NO: 905735 - DNA, 120 bp, Artificial Sequence
  ENSG00000267259_13 (sequence is synthesized)
ccggcctcagagttccagaaaggtggagtcgatgaattggactatcaaaaatagcttagggaaagtatgtcaggaaacaggattaaaatggatacaggctctccctatggtattatttaa

SEQ ID NO: 905736 - DNA, 90 bp, Artificial Sequence
  ENSG00000267259_14 (sequence is synthesized)
aacaggatattccccttatgaaatattgtatcataggccccctcccatattgcagggacttccaggcactccccgactacaggctttagg

SEQ ID NO: 905737 - DNA, 120 bp, Artificial Sequence
  ENSG00000267259_15 (sequence is synthesized)
taggaaaaattacacaaacaatctcagcctgggtaaatgagagatgccctgttagcttattctccccagttcaccctttctccccaggtaatcgagtgtggatcaaggactggaacgtaa

SEQ ID NO: 905738 - DNA, 120 bp, Artificial Sequence
  ENSG00000267259_16 (sequence is synthesized)
cttctttgtgcccacggtggaaagaccgtagtctgtcgtcctgaccactcccaccgctgtgaaggtagagggaatcccagcctggatccaccacagccgtgtaaaacctgcagcacctga

SEQ ID NO: 905739 - DNA, 120 bp, Artificial Sequence
  ENSG00000267259_17 (sequence is synthesized)
cctggatccaccacagccgtgtaaaacctgcagcacctgaaacctgggaggcaagaccaagcccagacgacccttgcagagtgaccctgaggaagacgacaagccctgctccagtcacac

SEQ ID NO: 905740 - DNA, 120 bp, Artificial Sequence
  ENSG00000267259_18 (sequence is synthesized)
agctcatcgtgggattcatttttcttaaattctggacttacacagtaagggcttcaactgaccttactcaaactggggactgttcccagtgtattcatcaggtcactgaggtaggacagc

SEQ ID NO: 905741 - DNA, 78 bp, Artificial Sequence
  ENSG00000267259_19 (sequence is synthesized)
tatgggaatgttaaaagagggaaatgacccacctgatgtgtgttataacccatctgagccccctgcaaccaccatttt

SEQ ID NO: 905742 - DNA, 120 bp, Artificial Sequence
  ENSG00000267259_20 (sequence is synthesized)
tgtgttataacccatctgagccccctgcaaccaccatttttgaaacaagattaagaactagccttttcctaggtgacacaagtaaaataataactagaacagaagaaaaaggaatcccca

SEQ ID NO: 905743 - DNA, 120 bp, Artificial Sequence
  ENSG00000267259_21 (sequence is synthesized)
aacaaataattttaagatttgatgcttgtgcagccattaatagtaacaaactaggaacagaatgtggttctcttaactgggaaaggagctacagagtagaaaataaatatgtttgtcatg

SEQ ID NO: 905744 - DNA, 120 bp, Artificial Sequence
  ENSG00000276411_0 (sequence is synthesized)
ccctctttcccagcgggccccaaggccacctgcaggcactcagccccatccatcatcacgacagctctccagatgagtaaaccaaggctgagaaaagctgcgtgacttggacaagccgta

SEQ ID NO: 905745 - DNA, 120 bp, Artificial Sequence
  ENSG00000276411_1 (sequence is synthesized)
agacaaatgagcagcaggagccaagacctgtcctcacctcttctgactgcaagcccagcatcacaccaacctagaccttgggaggctaagcacttggaggattcttccaaagagaagcag

SEQ ID NO: 905746 - DNA, 80 bp, Artificial Sequence
  ENSG00000276411_2 (sequence is synthesized)
aattcccatgtgttgtgggagggacctggcgggagataattgaatcatggaggtcagaggtctgatggttttataagggg

SEQ ID NO: 905747 - DNA, 120 bp, Artificial Sequence
  ENSG00000269978_0 (sequence is synthesized)
cagccttgatctctacaaaggaattttaccacagtgattaaagttcgagatgcacaacagaaagtccacatcaactgatttcattacacctgttacatttcaatacactccagggaaatg

SEQ ID NO: 905748 - DNA, 120 bp, Artificial Sequence
  ENSG00000269978_1 (sequence is synthesized)
tctctggttgctatccctgggggtgctttgcactggcctgtaccctttgaagttagatgtgaccatgtgactttcttgagccaatgaaacatgaataaatctgatgtgtattattacaga

SEQ ID NO: 905749 - DNA, 120 bp, Artificial Sequence
  ENSG00000269971_0 (sequence is synthesized)
catgtgtttgggtgacttcatacacagttcttcctgtaatgaattcggaaatcagacacaatgactggtatttgaaaggtgggatgacttcattttaataaagagaattcaccaacagca

SEQ ID NO: 905750 - DNA, 120 bp, Artificial Sequence
  ENSG00000269973_0 (sequence is synthesized)
atttttgtaactttttataatgagacttacacattgatttaaattatatacaggatgctcagccagcacaaagctgtggtgagatttgggcccaagtctccgactccagattccaaacca

SEQ ID NO: 905751 - DNA, 120 bp, Artificial Sequence
  ENSG00000269973_1 (sequence is synthesized)
cattaaaaaaaaaaaaatcacctgcagactgcctatagctttaacagtctctgtctccccttcttcacatccttccggtggagaaaagtttgtgaatattaagtaaatttgattcaatag

SEQ ID NO: 905752 - DNA, 90 bp, Artificial Sequence
  ENSG00000269973_2 (sequence is synthesized)
gagaaaagtttgtgaatattaagtaaatttgattcaatagacattttatttttttgtaaagatgatggggtcttgctatgctgctcagga

SEQ ID NO: 905753 - DNA, 120 bp, Artificial Sequence
  ENSG00000269973_3 (sequence is synthesized)
agccactgcgcccagcctggtttggtagtttcttaaaagtgaaaattagacctaccatgtgacccagccattccactactaggtgtctacccaagaaaaataaaagcatgtttccacaca

SEQ ID NO: 905754 - DNA, 120 bp, Artificial Sequence
  ENSG00000269973_4 (sequence is synthesized)
aagacttgtatacaaatattcatagcaactttatttggaatagcaaaaaaaagggaaaacaacccaaacagccatcagcaggtgaatggataaacacatggtggatatccatacaatgaa

SEQ ID NO: 905755 - DNA, 120 bp, Artificial Sequence
  ENSG00000269973_5 (sequence is synthesized)
acactgctcagctgtgaaaaaggaacaaactattgaaacaatatccctgttcaggagcaggatttggagaatataagaagcatatcttttataatttaaaaacttgctttctaagatttg

SEQ ID NO: 905756 - DNA, 120 bp, Artificial Sequence
  ENSG00000269973_6 (sequence is synthesized)
aactgaaagatcttttttgaagatgagtgtcatggaattgacatgatttgaagtgttatggcacttcctttgaataaaaaaatcaaagttgctaacaagttccatgtacttaaaaatatt

SEQ ID NO: 905757 - DNA, 120 bp, Artificial Sequence
  ENSG00000269973_7 (sequence is synthesized)
gggacagagcgctcaaagctatgaaaagttttgggccacccatgaatatgagataagattaacaagagaggagaaggaagtgaaaaatatggctttccatgcatttccaattgtatgaat

SEQ ID NO: 905758 - DNA, 120 bp, Artificial Sequence
  ENSG00000269973_8 (sequence is synthesized)
taccattgaaggctagtgatgaaatgttactctctaggagtcagtgttttcacatctaaaaatggtatcagtcatagaaaaagcttatctgtctactgccaaaaagggaagagggtaata

SEQ ID NO: 905759 - DNA, 120 bp, Artificial Sequence
  ENSG00000269973_9 (sequence is synthesized)
gcacgtattgagcacctactgtatattcagatgaggtcctgccatacgaaattcagtccccactgttctgggggccatgcaatcgtctttagataataggtgtggggctaggggttccgc

SEQ ID NO: 905760 - DNA, 120 bp, Artificial Sequence
  ENSG00000269973_10 (sequence is synthesized)
tgtgaagttaccttccttcccagggtgctcagccagcacaaagctgtggtgagatttgggtccaggtctcagactccagattccaaaccacatttaaaaaaataaaatcatcacctgcag

SEQ ID NO: 905761 - DNA, 120 bp, Artificial Sequence
  ENSG00000269973_11 (sequence is synthesized)
actgcctatagctttgacagtctctgtgtctccctttcgtttgcatccttcgggtggagaaaggtttatgaatattttagtaaatttgattcaaaagacatttcttgattatcacattgg

SEQ ID NO: 905762 - DNA, 120 bp, Artificial Sequence
  ENSG00000269973_12 (sequence is synthesized)
ttctcaaagtgtggtccctggaccagtgacatcagcattacctgggcactcattagaaatgcacattctcaggcctactcctgactcccaatccagaaacacagtgtgggtccaacaatc

SEQ ID NO: 905763 - DNA, 120 bp, Artificial Sequence
  ENSG00000269973_13 (sequence is synthesized)
ctcctaacggctcctctcagttcccgtggtcccaaaagccctctgtcccgtgcagggctgccccacagtggccttccacatcctcctgatagcagaggcccccgccacccccagggccac

SEQ ID NO: 905764 - DNA, 120 bp, Artificial Sequence
  ENSG00000269973_14 (sequence is synthesized)
ctctgcagctgtgccgcagcttctctgcccaggcacctgcactgacacggagcaccctgtaggttgtctgcttgaggcctttacctaaatgcttgccgcagctgtttctaaactacaaaa

SEQ ID NO: 905765 - DNA, 120 bp, Artificial Sequence
  ENSG00000269973_15 (sequence is synthesized)
gcacacaatcatgaaatgaggcagaggtgggctgagtgccacaatggatgccaagaggaagagagatggacatggcgctgggaggctctgggcaccactggaggggggcgctgagttccc

SEQ ID NO: 905766 - DNA, 120 bp, Artificial Sequence
  ENSG00000269973_16 (sequence is synthesized)
gggctgccccggctgggagaggagtcgagtcttaatctcctttaaggaaacataataaataaactactttgccactagagtgatttatgtgttgatttgggtggaatctctttcatgaac

SEQ ID NO: 905767 - DNA, 120 bp, Artificial Sequence
  ENSG00000269973_17 (sequence is synthesized)
ttatgtgttgatttgggtggaatctctttcatgaacacattttatgtctttttaaaaaaattagattatttcttggccaggtgtgggcacagggtggctcatgcctgttatcccagcact

SEQ ID NO: 905768 - DNA, 86 bp, Artificial Sequence
  ENSG00000269973_18 (sequence is synthesized)
atgagactccatcttataaataaataaattagatttcctaccactacagtgaagcataattttatgatttaggcaactaccctaaa

SEQ ID NO: 905769 - DNA, 120 bp, Artificial Sequence
  ENSG00000269973_19 (sequence is synthesized)
cagtgaagcataattttatgatttaggcaactaccctaaagggaaataaaactaagtgagattccacatggtctcagtaatacctgtagtgcaaaatcaaatgcttatagggagtgaaac

SEQ ID NO: 905770 - DNA, 120 bp, Artificial Sequence
  ENSG00000269973_20 (sequence is synthesized)
agaatgcggccgatacctgtggaaaagagtgcttcaattgtcttatgtctacgaccagcctaagctcatagccatacaaatatatataccatacatgtgctgaaactaagttaaatttct

SEQ ID NO: 905771 - DNA, 120 bp, Artificial Sequence
  ENSG00000269973_21 (sequence is synthesized)
tgtttttaattgtcttaagtatcaaacttggatcatcagaacatgttggaaaaacacggctctgaagccaacttattaagcacctgtgctgtatcgaacattttacatttgttcatttaa

SEQ ID NO: 905772 - DNA, 120 bp, Artificial Sequence
  ENSG00000269973_22 (sequence is synthesized)
catatctagataaatctactcatttacagctatagtgatccaagatttcatcacagcagattaaaacaaaacctttaagttaaaaataatttaaaatcagtgaatatattaatactatga

SEQ ID NO: 905773 - DNA, 120 bp, Artificial Sequence
  ENSG00000269973_23 (sequence is synthesized)
gagtctttgcctatgagaatacagaactttggcccaaatgtttcattaatctacagggttatatacatttggagcacagttttgttgtttgtttgtttgtttttaatcctcttcccaaaa

SEQ ID NO: 905774 - DNA, 120 bp, Artificial Sequence
  ENSG00000269973_24 (sequence is synthesized)
atgggtttctttaggcagctcgagactcctgtgttagacaagaggaaaaggagtgggtgcctctcgactgggaccagtggacattattatgggaatataccagtggtggcaggttgatga

SEQ ID NO: 905775 - DNA, 120 bp, Artificial Sequence
  ENSG00000269972_0 (sequence is synthesized)
aatggtccttcctgttgtgaacattgagtcctagtgggtgagtctaattgcagcaacatgtgaaaaaggcaggcaagagctgagtcaggaaaatagacaagcagggtaccttcagaaagg

SEQ ID NO: 905776 - DNA, 120 bp, Artificial Sequence
  ENSG00000269972_1 (sequence is synthesized)
tgatctggaagaaccagcagatcaataaggaagttctgtaaattagtttttactctgggtactcaggggttaatccatagggcttattctggatacagttttctgatcttacagagccag

SEQ ID NO: 905777 - DNA, 120 bp, Artificial Sequence
  ENSG00000262011_0 (sequence is synthesized)
ggggaaaaaacatccttttaaatccaatttgaagcttcttttggaagacaaatggatatttgaggttattatgagagaccactggtccaggaccaaagagagtactttctgaacggtatc

SEQ ID NO: 905778 - DNA, 120 bp, Artificial Sequence
  ENSG00000262011_1 (sequence is synthesized)
aggaaggagaaacggaacataaagtctgccgaatgtgcaccgagcactgtgccagatactgaacacataccatgcaatcatcccaacatggggtaagtattattatggtttccactttcc

SEQ ID NO: 905779 - DNA, 120 bp, Artificial Sequence
  ENSG00000262011_2 (sequence is synthesized)
atcttatctggaaaggagaagtcatccttgaagagaagtttggaattacagacaagaaattttccaaaatgttgaagccaaggagggggatatttgtgatggaggagagcagatgaagta

SEQ ID NO: 905780 - DNA, 120 bp, Artificial Sequence
  ENSG00000262011_3 (sequence is synthesized)
gcaaagtgggaacactgaaatatatgcattcttctttaaaaaaaattaacacactctatggaacttaagtcattttgtaagatttgaaacataaaaatgtattatgtataatgtgatttg

SEQ ID NO: 905781 - DNA, 120 bp, Artificial Sequence
  ENSG00000262011_4 (sequence is synthesized)
tttgctcataaaattatcatgtttggtatatttaaagacatgagatcatagaaagaagaagagtttggataaatagctttttttttttacagaaaaattaaaatgttttaaaaatcatat

SEQ ID NO: 905782 - DNA, 120 bp, Artificial Sequence
  ENSG00000265043_0 (sequence is synthesized)
tatccatagtttctttaaaatagtaatattttaagccactcaaaataagaaaaagtcaaagttcacaataaaaagatcctgatatacctgaataagatttgaaaagtgaagaacaattcc

SEQ ID NO: 905783 - DNA, 120 bp, Artificial Sequence
  ENSG00000265043_1 (sequence is synthesized)
ttccacctgaaaagggtgttgacccagaatccacctctgacgaccctctagagctggcaagtcagcatcattcccagtgcacctgtgactgatgacacatctcacccagctgccataggg

SEQ ID NO: 905784 - DNA, 120 bp, Artificial Sequence
  ENSG00000265043_2 (sequence is synthesized)
atgtcaaagacacgggatacagtgctggaaagggaaaaagcatcagtgcaaaagtagatttcaggatttggagcacggaggcaagtgccctctcctggcatccccgcatggggccatggt

SEQ ID NO: 905785 - DNA, 120 bp, Artificial Sequence
  ENSG00000265043_3 (sequence is synthesized)
gaggaggctctgcagtcttccaggacgactggaccatggataggaaatacccaagacatggattctctggggacatgggcgattccaaaagcaccgaggagtgtgcccctagagaagcag

SEQ ID NO: 905786 - DNA, 120 bp, Artificial Sequence
  ENSG00000265043_4 (sequence is synthesized)
tccattgggtccatagtaaaatctcatagcataaccaacagtggagaccagagactaaaaatctgtaacatccttggagtccatggacctcgaagccaaacacaacagccccacgagcat

SEQ ID NO: 905787 - DNA, 120 bp, Artificial Sequence
  ENSG00000265043_5 (sequence is synthesized)
ctgccatccaggcatggagagctaggggtgagcttcttagagtaaaggaggcttcttccctgttcagatgtgtgaacggttgggtttacagataatggaggtgtctgtgtatgttgtcat

SEQ ID NO: 905788 - DNA, 120 bp, Artificial Sequence
  ENSG00000265043_6 (sequence is synthesized)
gaaaatataaggcaagtggcaccaaatgtgatttagcggtcccagaaattcagtgctgcgtgctttctacatgacattaattttaattatatgtacacaggagaaaatttaaaattgaaa

SEQ ID NO: 905789 - DNA, 120 bp, Artificial Sequence
  ENSG00000265043_7 (sequence is synthesized)
tgtcttatcattgctagaaaaacagaagttttttccctacgagttagaaatcttgatctctgcgtttttctatggatcgattctcaaagtttgtgcaaatacagtcggtgtttctctcta

SEQ ID NO: 905790 - DNA, 120 bp, Artificial Sequence
  ENSG00000265043_8 (sequence is synthesized)
agtgtctttggttatgaactaaggatgtaaccaactcctgcttattaggtaaagggatgaggcaagagagatccagcaacagggtatggttatttttcagtctttggcaacatttttctt

SEQ ID NO: 905791 - DNA, 120 bp, Artificial Sequence
  ENSG00000265043_9 (sequence is synthesized)
cgtgatgtcaaaagtagtgaactccctgactagggtttcagacatgggctgttctaatccaccaaacaccaaacggctggggaagaagagatttggacatggataaccagtgtcacctac

SEQ ID NO: 905792 - DNA, 120 bp, Artificial Sequence
  ENSG00000265043_10 (sequence is synthesized)
aacatggaatggagggtcgtcaaaatggtctgagtcactttaatatgtggctggagagatgcgagaacaacagaaagagccctcaggaggcatccccacccaaggtcagtgaagctcagt

SEQ ID NO: 905793 - DNA, 120 bp, Artificial Sequence
  ENSG00000265043_11 (sequence is synthesized)
gcagctgcagggtgtggggtcatagggtgaccaggtgaccgggctgatggggaggaaaaatgctctgttaagggtgttgtctctgtcacctcttcaagaagcagcacagtctcaggcaca

SEQ ID NO: 905794 - DNA, 120 bp, Artificial Sequence
  ENSG00000265043_12 (sequence is synthesized)
tgttccctcctgctccccgccacacacacacacagacccactgcagctcttccaagattcttccctccattctgggacctccccttcctcctgagcccctgtggcctctatcttactccc

SEQ ID NO: 905795 - DNA, 120 bp, Artificial Sequence
  ENSG00000265043_13 (sequence is synthesized)
tttccccagttctttgtacctccctcctctccctcactcatgtcccctcccatgcaaagcccctactggttcccccttccccacttcacctccactcacactccatcttcaccctccatt

SEQ ID NO: 905796 - DNA, 120 bp, Artificial Sequence
  ENSG00000265043_14 (sequence is synthesized)
ccagtccttcccttcctctcctcactctgactcccctgataaactcacttcccatcccctctgtccatgtccctgcctcagtttacctcccttcccctctcctcacctcccttggatgca

SEQ ID NO: 905797 - DNA, 120 bp, Artificial Sequence
  ENSG00000265043_15 (sequence is synthesized)
tgttgacctctccaccctcccgcagtcccctgccctctcctgctaaggccatccctcccagccatccccgccctccctacgtcatctcagttggctccatgtccctcagctcccatcccc

SEQ ID NO: 905798 - DNA, 120 bp, Artificial Sequence
  ENSG00000265043_16 (sequence is synthesized)
tccttcttccctgccctgagagccatccgggtttcctttccagtctccctctgctcctgtgctttcttccccttccctcacttcccctgctctgtcttctcctcagttccccgccctccc

SEQ ID NO: 905799 - DNA, 120 bp, Artificial Sequence
  ENSG00000265043_17 (sequence is synthesized)
tctctgcacctgcccagtttcccccatctcccctccatgctcccttcctccccagctcctgagttggaccacctcagctcagcgccctacttcctgtgcctgcccctgcctgctgcccac

SEQ ID NO: 905800 - DNA, 120 bp, Artificial Sequence
  ENSG00000265043_18 (sequence is synthesized)
catccctgcacacagctcactcctccctctggccctcctgctgagcaggcggctcccccactgccctgggcctgcccaccttccccagcccccgcagtcaaggctctccaactccacacc

SEQ ID NO: 905801 - DNA, 120 bp, Artificial Sequence
  ENSG00000265043_19 (sequence is synthesized)
accggggtgagggcagagaggcaccctctccagggctgcgcttcctccagcaggtaccagctcctccccctcaactaagctccatggcccatccctgccctgggggcgacaccacaggga

SEQ ID NO: 905802 - DNA, 120 bp, Artificial Sequence
  ENSG00000265043_20 (sequence is synthesized)
ccttccgctcaccttgccaggcttttcagaggcctcggagctgtggtcaggcaggcgaatggggagcaagccaggggttacagatccagagcctagggcagtccaggcagggggggctgt

SEQ ID NO: 905803 - DNA, 120 bp, Artificial Sequence
  ENSG00000265043_21 (sequence is synthesized)
ggtcccctgtgaccacttctgtgaccttgccacttgaatcctccagggcctgtgtcctcacctccaacgtgaagatcaggctgggccattattgcagagctgtgctgagtgttgaagaag

SEQ ID NO: 905804 - DNA, 120 bp, Artificial Sequence
  ENSG00000265043_22 (sequence is synthesized)
gtgcgtgtcacgcgttattataggtagctggtgtttcctgagcgtttggaaacgacgctttgtaaaatactgtgaactaaccgcagagctgggcacagcatgcttcatgatctcatttta

SEQ ID NO: 905805 - DNA, 120 bp, Artificial Sequence
  ENSG00000265043_23 (sequence is synthesized)
tactgacgtgtttagtcatcgtgctgtcaagtattctccagccacatcatttgttagtagtttgacctgcataggagggcactgtcaccctccctcctgctgtgctgatttcagctggag

SEQ ID NO: 905806 - DNA, 120 bp, Artificial Sequence
  ENSG00000265043_24 (sequence is synthesized)
ccgccaggccaggccgcctcacgcgccccctgctgactaacccgggaactgcccgcagcctgctctgagctttctgatgtgggcgggaccgggccgggcagggccaggcgcctgcgggga

SEQ ID NO: 905807 - DNA, 120 bp, Artificial Sequence
  ENSG00000265043_25 (sequence is synthesized)
ggggcggggcccggcgactgaggggaggggcggggccaggcgcctgcgggaggagacctggtccaggatcaaggagtcgctcagtgcaggaccggcccagagttcacatccctggcttga

SEQ ID NO: 905808 - DNA, 60 bp, Artificial Sequence
  ENSG00000265043_26 (sequence is synthesized)
tcagtgcaggaccggcccagagttcacatccctggcttgatctacaggtaaatttttttt

SEQ ID NO: 905809 - DNA, 73 bp, Artificial Sequence
  ENSG00000265043_27 (sequence is synthesized)
tgtgccatgttggcttgctgcacccataactcccccacctcccctactggccctggtgtgtgatgttccccgc

SEQ ID NO: 905810 - DNA, 76 bp, Artificial Sequence
  ENSG00000265043_28 (sequence is synthesized)
agatggtttccagtttaatccatgtccctgcaatggacatgaattcatcttttttatggctgcatagtattccgtg

SEQ ID NO: 905811 - DNA, 120 bp, Artificial Sequence
  ENSG00000265046_0 (sequence is synthesized)
ccctaacttacaatcaccgaacccatgaggtcaccctatctcccagccctccttcaccagatacaggcagaaaccctcaagccagctgagcaaggctttacggaggcaagggagttagcc

SEQ ID NO: 905812 - DNA, 120 bp, Artificial Sequence
  ENSG00000265046_1 (sequence is synthesized)
cagcaagagccaccacgaaggccagaaggcagggtcatgcctggctcgctccagcaacacgaaaaaggggtggagtgtggagagccaagcaaaaaagatgaagtcacataagtagcagaa

SEQ ID NO: 905813 - DNA, 120 bp, Artificial Sequence
  ENSG00000265046_2 (sequence is synthesized)
gacccggttgtacaaggcctggtgtgccaccgtaaaaacatggactcctcctcggaaatatggagccactgggggagtttgagcaggggaagaagatctaacaaagaactttcacacttc

SEQ ID NO: 905814 - DNA, 120 bp, Artificial Sequence
  ENSG00000253807_0 (sequence is synthesized)
catccagcgagatctgattgttgaaaagtgtgtagcacctcccacttcactcgcttcttcattccccagccatgtaagatgtgcctgcttcccttttgcctaccaccatgattgtaagtt

SEQ ID NO: 905815 - DNA, 120 bp, Artificial Sequence
  ENSG00000253807_1 (sequence is synthesized)
tcctgaggcctccccagccatggctcctgtaaagactgcagaactttgtctccctttatccatgagggacatcttccaaggcccccagtggatgtctgaaaccgcaggcttccgaggtga

SEQ ID NO: 905816 - DNA, 81 bp, Artificial Sequence
  ENSG00000253807_2 (sequence is synthesized)
tgggaaggagtcagtcagagagccgcagaatcataattctctaccagctgcttattttagagtcatctgggtctggggatg

SEQ ID NO: 905817 - DNA, 120 bp, Artificial Sequence
  ENSG00000253807_3 (sequence is synthesized)
taccagctgcttattttagagtcatctgggtctggggatggttctggacaaaaatacaaatttggagacccatcactggtttgtaggatcagtgagatcatgaaaactagaagtaatttc

SEQ ID NO: 905818 - DNA, 120 bp, Artificial Sequence
  ENSG00000253807_4 (sequence is synthesized)
aacgcgactttttttatttactttggaaatggttcagttggacacatgagtgataagaggtggacatttcaagttcaattgtgtttgatgactcattaggttaaagaagctgtcaggtgg

SEQ ID NO: 905819 - DNA, 120 bp, Artificial Sequence
  ENSG00000253807_5 (sequence is synthesized)
taaagtcaccccagagaaatgaagggtattctccagaaagtgtggaaaccctgccactgcaggctaatcaggtgtgttgacacatcagtgaggagctggctcacaacacctggagaagca

SEQ ID NO: 905820 - DNA, 120 bp, Artificial Sequence
  ENSG00000253807_6 (sequence is synthesized)
agccatggaggtggagcagaatcaaatgagcctcccacaaggcacaaagattctcagcaagtcaggacatgttacacatggaaattcctactcacccaagacagatgcctattgctgtgt

SEQ ID NO: 905821 - DNA, 120 bp, Artificial Sequence
  ENSG00000253807_7 (sequence is synthesized)
ctctctcttcccatactttcacattgtcttgaaatataagcaagatgtgagagcccacagtgctatggtaggagccatctgcagtgccatggtcacctgtgtcagtggtggaacaaagag

SEQ ID NO: 905822 - DNA, 120 bp, Artificial Sequence
  ENSG00000253807_8 (sequence is synthesized)
ggaaagatggcttccacatccagtggtgacttgagtggaaaaagaaaaaaaagagctcctatgcctgctggcagatgctactgatgggactatgagcaattagaggaggtttcacattta

SEQ ID NO: 905823 - DNA, 120 bp, Artificial Sequence
  ENSG00000253807_9 (sequence is synthesized)
ctcacaacttggaatttctaagcaaattttcacaacgcaaggcagccgtacattctgtgtacctaacactttgtgctttctcatcttgcttgatcattcaggaagcaggtggtccattct

SEQ ID NO: 905824 - DNA, 120 bp, Artificial Sequence
  ENSG00000253807_10 (sequence is synthesized)
ggttaagagttgcagagaagtctgacgtgatggataagttaaggaagagtcctaagaggccagaagtgatagagccctaaaaaccagaatgggctggtcatggcatggcagaagctgact

SEQ ID NO: 905825 - DNA, 120 bp, Artificial Sequence
  ENSG00000253807_11 (sequence is synthesized)
tattttttatctcatacagaatgggtgtctactagttcagtctgtgcttatttattaacaaaattattcacagcaattctcagagtccttcatcaaattcagtctgctcttgaatattca

SEQ ID NO: 905826 - DNA, 120 bp, Artificial Sequence
  ENSG00000253807_12 (sequence is synthesized)
gaagagattctttctgaataatgcacaataactttctttttttttccgagaggctccaatgtgtccacgcttcttttttcccccttattttagtttaatatagggttttctcagattttt

SEQ ID NO: 905827 - DNA, 120 bp, Artificial Sequence
  ENSG00000253807_13 (sequence is synthesized)
ttcctataatagtttactattttcctaaatctttccattttgtcatcaaattcaactatttctcacctcattcatcttacaggttgttaataaatataccagagaataatggtcctgcta

SEQ ID NO: 905828 - DNA, 120 bp, Artificial Sequence
  ENSG00000253807_14 (sequence is synthesized)
ttgatggatcccaagggagaattcctattaatcacttcaatcttagggtgagccatttattcttactctttgtattttccccattaatgaatgattcccctttccatgtgcagttttaag

SEQ ID NO: 905829 - DNA, 120 bp, Artificial Sequence
  ENSG00000253807_15 (sequence is synthesized)
tattcacactgtagtagtttatttttattatcttcttagcatttctcatgaaacagagatcccataattgatgtgtatcttggactctgaaactctgcctgtgtataatgaagggattgg

SEQ ID NO: 905830 - DNA, 120 bp, Artificial Sequence
  ENSG00000253807_16 (sequence is synthesized)
cctggatgacctccttcctctatcattctagaatctctctttgtcccaacttgaaaccaaacaggtgccagggtctgtcgcagagaagaataattagcacatccattaacatgggccctg

SEQ ID NO: 905831 - DNA, 120 bp, Artificial Sequence
  ENSG00000253807_17 (sequence is synthesized)
ttaacacatccagtgttgactctaattactggtagattttaactgagctctgctgtctataagtgactgttagcaaatgatagtatatttgatttgacatacatcatacgtactgaatag

SEQ ID NO: 905832 - DNA, 120 bp, Artificial Sequence
  ENSG00000253807_18 (sequence is synthesized)
taagcttcagtcaacttttacacaagtactcgtaaagaagctgaagattttaagctaacagattaaaagtgggaacaaatgatataagtgcaagagcatgaaattaaagcaattattgtt

SEQ ID NO: 905833 - DNA, 120 bp, Artificial Sequence
  ENSG00000253807_19 (sequence is synthesized)
gtttttgatgcttcaaaatgtgggatttatatgtagtcctttactttttatagtgtttatgaaagtggttcaatgtgtcttcttttaagagatcatatatcctagtattagtaacatgaa

SEQ ID NO: 905834 - DNA, 120 bp, Artificial Sequence
  ENSG00000253807_20 (sequence is synthesized)
acatcccgagatgtcaccctggcccgggccggtcaggcccttccaccgcagggctgccccatggcagccagtgacaccgctgagacaactttgccgtggccttactttcatttccttggt

SEQ ID NO: 905835 - DNA, 120 bp, Artificial Sequence
  ENSG00000253807_21 (sequence is synthesized)
tgttcagtttatggcaaaagaccctcagctgtgttttgtttactaattcccctaagcctgccttaaatccagactgccagggccacaggaaatctttcagacccctgacaggtacggtgt

SEQ ID NO: 905836 - DNA, 120 bp, Artificial Sequence
  ENSG00000253807_22 (sequence is synthesized)
cttcctttggctttggtatcaaggtaatgctggcctcataagaaccacagcagcaagtcacttcagagtgcactggggcaaatcacatcatgtcattatgtcatggatcataatgaagca

SEQ ID NO: 905837 - DNA, 120 bp, Artificial Sequence
  ENSG00000253807_23 (sequence is synthesized)
cagaggctaattgaaccaacaggcctcaacgctaatctccatgccagactagaggcttgagaagttttctgatggggataaaggagaggagattgaaagctgaagttaatgattaaagcc

SEQ ID NO: 905838 - DNA, 120 bp, Artificial Sequence
  ENSG00000253807_24 (sequence is synthesized)
gcttcctcttcataagggtaggaagtggaaatagtgacaggagtgaaggagtgcttgctggtggcgggtgagtgaggaggattggtggtggaaggaggagatgagagccgaaacgtcttt

SEQ ID NO: 905839 - DNA, 120 bp, Artificial Sequence
  ENSG00000253807_25 (sequence is synthesized)
ccaaactgctcctggctgaggagcctcggcctgccgcaatcctgccacccctgcaaagcccagaatgcagcaggcagacagggctttgggaagccgctctgaagccacaggtttgacctt

SEQ ID NO: 905840 - DNA, 120 bp, Artificial Sequence
  ENSG00000253807_26 (sequence is synthesized)
ttctttggccacgtcagtcaaatccagagaaggaaaagagacaattctcatttcatcagcccaaaagtgtcttcctttggctttggtatcaaggtaatgctggcctcataagatatgggg

SEQ ID NO: 905841 - DNA, 72 bp, Artificial Sequence
  ENSG00000253807_27 (sequence is synthesized)
cacaaaggaaaggccatgcgaggacacagggagaagacaggcccctaccagtcaggaagggagccctcacca

SEQ ID NO: 905842 - DNA, 120 bp, Artificial Sequence
  ENSG00000253807_28 (sequence is synthesized)
gaagacaggcccctaccagtcaggaagggagccctcaccagaaactgagctggccagcacaatggtcttggacttgtagctccagaactgtgaggaaataaatttctgttgttgaagcca

SEQ ID NO: 905843 - DNA, 120 bp, Artificial Sequence
  ENSG00000253807_29 (sequence is synthesized)
ttacagaacagtttcccaagcagcagcctgcctgatccacccttaattcagctgtgcgtctgacaacatgttctacaggaaagataaccttgtacatcaggtgtttcctgtttccagtac

SEQ ID NO: 905844 - DNA, 120 bp, Artificial Sequence
  ENSG00000253807_30 (sequence is synthesized)
ataagttgtctccctttatccatgagggacatcttccaaggcccccagtggatgtctgaaaccgcagcatacttttgtccataaagcaaaatccgaagattagtgttaagaaacaggatt

SEQ ID NO: 905845 - DNA, 120 bp, Artificial Sequence
  ENSG00000253807_31 (sequence is synthesized)
agaaacaggatttggaactctcagaacaaggccattgggggtggagatttcttacctatggcttaaagaggcttccgaggtgatcgggcagcatcagtcttcagctgctaagccgagaag

SEQ ID NO: 905846 - DNA, 120 bp, Artificial Sequence
  ENSG00000260701_0 (sequence is synthesized)
tccaggtgaatataagagccagccagatgagaaccaaccatcatctagcctctctgtgatcagcatgtagtccccagaccatcaacagcagcgtcacctgggagcacattagatatgcaa

SEQ ID NO: 905847 - DNA, 120 bp, Artificial Sequence
  ENSG00000260701_1 (sequence is synthesized)
agtctcaggtgacctactgcttcctgcattggagccagacccccagggtcccaccgtcccctgtgattggatggagtgtctcgcattttacattgtccctgagaggagaggagccctttg

SEQ ID NO: 905848 - DNA, 120 bp, Artificial Sequence
  ENSG00000260701_2 (sequence is synthesized)
gaaaagtctgaaaagctaacattgaactgggacataacagcagccttgggacatcagagcctgcttgtgcctgctctgcactattggatgtttttatgtgtactacattaagagcttcca

SEQ ID NO: 905849 - DNA, 120 bp, Artificial Sequence
  ENSG00000260701_3 (sequence is synthesized)
tctctctggacaaaggggagaagcgcttccgtggtgggtggccccaattaaaccctgtgcctagtgagtttccgcccaggctgactggaagtcagccagggctgattagagagcaggtac

SEQ ID NO: 905850 - DNA, 120 bp, Artificial Sequence
  ENSG00000260701_4 (sequence is synthesized)
ctcaaatggcccagcacggccataatgaaatagtcctggaaaattgctaaatgacatagaggaaaatcattacaattgaaatgcctccctcccccttaccctctataacataaagaaaca

SEQ ID NO: 905851 - DNA, 120 bp, Artificial Sequence
  ENSG00000260701_5 (sequence is synthesized)
cttcagaattgcctaaatattgctttgcccagtgagttaactgtatagtaaatgaaagatctctcacaaacacacagctttgagcatactgctttaattatgaaatgtttattttgttta

SEQ ID NO: 905852 - DNA, 120 bp, Artificial Sequence
  ENSG00000260701_6 (sequence is synthesized)
aaagcacataaagaagacaaaaacagaataaagaggaaacaaaagcaactttccccttctccacccctaaaaaacaaataaattgtcacatacactatagaatcgactagtaggcttaat

SEQ ID NO: 905853 - DNA, 120 bp, Artificial Sequence
  ENSG00000260701_7 (sequence is synthesized)
atggaaggattttagatatttcttcacttaaaatagtaataagtatttgctttttatgacaaaatcaatacaagctcttcctgaaaacattgaaaaacacagaaaagtataatgagagac

SEQ ID NO: 905854 - DNA, 72 bp, Artificial Sequence
  ENSG00000260701_8 (sequence is synthesized)
accctgtctctttttttaaaaatcttggctcagtgcaacctccatctctcgggttcaagcaattctcctgcc

SEQ ID NO: 905855 - DNA, 120 bp, Artificial Sequence
  ENSG00000260701_9 (sequence is synthesized)
gggattataggagtgagccaccgcacccagcctctgtctcttaaaaaaaaaaaaaagtaactccgcagccattcatccacccctcagaaataaccagagtgaacatgatgtggtatatct

SEQ ID NO: 905856 - DNA, 120 bp, Artificial Sequence
  ENSG00000260701_10 (sequence is synthesized)
cagaaataaccagagtgaacatgatgtggtatatcttccttctgtaaacactgttttacatagttgagaatgcattgtgtatacttttgtgttctaccttgactagtactatatatggaa

SEQ ID NO: 905857 - DNA, 120 bp, Artificial Sequence
  ENSG00000260701_11 (sequence is synthesized)
tatgttgcagatgttaagattccctgaacaattatcattaatggctgggacataatccattaaaggagtgtaacgtaatgcacttagcaaaaatttggatgtccctttgtcatggggcta

SEQ ID NO: 905858 - DNA, 120 bp, Artificial Sequence
  ENSG00000260701_12 (sequence is synthesized)
ctaagctatgataagcagtagcaacatctgcaccatataatggggaaaggaaatggggactcatgttccatagggtccccaatccttcaatcctccaccaacaccgtaagggggttatta

SEQ ID NO: 905859 - DNA, 120 bp, Artificial Sequence
  ENSG00000260701_13 (sequence is synthesized)
ctcatccactttaatagataaggaaactggggctcactgataggtgagatcactggctgaggtcacagagcaaggaggcagagccaggatgatgacctaagtctgtcagattcttttttc

SEQ ID NO: 905860 - DNA, 120 bp, Artificial Sequence
  ENSG00000260701_14 (sequence is synthesized)
atctgtattcctcatccatgtgtagacacagaacagtgaagtcaaaagagcatggttttggagtccaggtatgatttgtcttataccttgcaaatgttaggtgcccgataaatacctgtt

SEQ ID NO: 905861 - DNA, 120 bp, Artificial Sequence
  ENSG00000260701_15 (sequence is synthesized)
atagggagggagggaccgaccgccatgagaaggaggggagcgcccagggtcaggcttggaaaacgtaatttaagcgcactgggagatgagttcggaagacgaaaggctcagaggtgaaca

SEQ ID NO: 905862 - DNA, 120 bp, Artificial Sequence
  ENSG00000260701_16 (sequence is synthesized)
aggctgtcggttacattcggttcttgatggaagaagggcagtcagtgtcccctgtaaagagtgatctctgattgaccacttcaggagggtcccaccgtcccctgtgattggatggagtgt

SEQ ID NO: 905863 - DNA, 120 bp, Artificial Sequence
  ENSG00000260701_17 (sequence is synthesized)
ggaccgaccgccatgagaaggaggggagcgcccagggtcaggcttggaaaacgtaatttaagcgcactgggagatgagttcggaagacgaaaggctcagggtcccaccgtcccctgtgat

SEQ ID NO: 905864 - DNA, 120 bp, Artificial Sequence
  ENSG00000260701_18 (sequence is synthesized)
tttttattctaattaaaattttatgcatgctatcactcacagacctggtgattccacctgctaaatgttacatttggaaggccttatcttttcacaagcactacaatttagaattcagct

SEQ ID NO: 905865 - DNA, 120 bp, Artificial Sequence
  ENSG00000260701_19 (sequence is synthesized)
ttacatatgaagggtatcttaactttcattgataatgtagaaccaggaaaatagaagcaagacaaggcatgactatatctcagaaagttccatagtaggggagagagaccctagttcggt

SEQ ID NO: 905866 - DNA, 120 bp, Artificial Sequence
  ENSG00000260701_20 (sequence is synthesized)
ttagaaatgaagagtagtgataacgattaaacatactctcattcattgattgcttccctggaatggggccaaattttacattaccatttaaggaaaataagcatcaaattagttttctaa

SEQ ID NO: 905867 - DNA, 120 bp, Artificial Sequence
  ENSG00000260701_21 (sequence is synthesized)
tctggaaaatgaaagcaagactgtctaatgtgcaaagaagtaattaccagctgacataatttggataagaggcaatggtagaatatgaaactagatctgagtctgttgtattctagaaac

SEQ ID NO: 905868 - DNA, 120 bp, Artificial Sequence
  ENSG00000260701_22 (sequence is synthesized)
acatgctaggttcatctccccgttctttattgggtagcctgaggcattggaccagtgggtgtgaaccacccccagtcatgccagcagtcatttcaggtttctaggtgctctaatgtagga

SEQ ID NO: 905869 - DNA, 120 bp, Artificial Sequence
  ENSG00000260701_23 (sequence is synthesized)
agagaagccccttgtactccaggaaactgccaacagatgtctgtatagccatccctgaaggcttgaccagaaaacacctcagtggaaatgggtttggaagtcatccctaatagtcagaat

SEQ ID NO: 905870 - DNA, 120 bp, Artificial Sequence
  ENSG00000260701_24 (sequence is synthesized)
tacatgaaaaaagtaccttcacagttcacatgggctatccccgttgccagtcacaagcctgacccaaaatggcatgtatatgcttaaattctagggaaaaggagttaaaggaagcagaaa

SEQ ID NO: 905871 - DNA, 120 bp, Artificial Sequence
  ENSG00000260701_25 (sequence is synthesized)
tcaagacatgccagcgggaggagaaaatttacgaaggaaaaaaaaccttagagagcaaaaatcaaagccaacaaccatcaaagggatgtaacacaatgtaaaataaaccattaatagtat

SEQ ID NO: 905872 - DNA, 120 bp, Artificial Sequence
  ENSG00000260701_26 (sequence is synthesized)
gtgaaaaggtagcatggagtaatataagttggtatgtattaaattggaatagctaactcctttgacccttacaacagccctctgagacaggtaatataaatatgtaaatgattgttgata

SEQ ID NO: 905873 - DNA, 120 bp, Artificial Sequence
  ENSG00000260704_0 (sequence is synthesized)
actaatcatggaagcccagaggcgaaatcagcttcccggggacccagaaaattgctggagtctggcgaggggcaaatcaggaagtgtctttgtcggagatgggacggaacccggcttcgg

SEQ ID NO: 905874 - DNA, 120 bp, Artificial Sequence
  ENSG00000260704_1 (sequence is synthesized)
ggcgcaaccgggctctgggggagaccgcgtttgtccaggtggcaggccgcgccttctgatggctgtgaagagaaggagcgggggttttaagagccacagcgccaccgagagagtggaaag

SEQ ID NO: 905875 - DNA, 120 bp, Artificial Sequence
  ENSG00000260704_2 (sequence is synthesized)
gagtagattagctcgcgcctgctatgcgaggcgactccccccgagacccacccgcagcccagcgcccttggccaggaggcccggaaagccaccgaggcggccgaaaggggccgcggggca

SEQ ID NO: 905876 - DNA, 120 bp, Artificial Sequence
  ENSG00000260704_3 (sequence is synthesized)
cccctcagcccctcctgcggcggctccggctgcccctgctcagcctcccgctccccgcccggagtcccagctctcagatcggccgcagagctgggaacagaggccgcggggtccaggccg

SEQ ID NO: 905877 - DNA, 120 bp, Artificial Sequence
  ENSG00000260704_4 (sequence is synthesized)
ttccgcccgctcagccggagcagcagcgccgcctgccgggggcctcgcgcaggcgagacaggccagacgccggaggccgcgggcggctgcagctttgacgggccgaacacaccagcgctc

SEQ ID NO: 905878 - DNA, 120 bp, Artificial Sequence
  ENSG00000260704_5 (sequence is synthesized)
ccgttccgccttttgaaaatcaaatcccttgggcctggtgccaccatcgctcagcccaggtcttcgacgacgggtcgaaggccagtgctccaggccttcttcaccgagtggcttcggcgc

SEQ ID NO: 905879 - DNA, 120 bp, Artificial Sequence
  ENSG00000260704_6 (sequence is synthesized)
ttgcggcccaggttccccgcacctccgcgccgtagttgcgcgcaccttttgaaaagcttggcgtcttcaggtataaggacaaaaacaaccgcggacatcacaccattccaaagaagaaaa

SEQ ID NO: 905880 - DNA, 120 bp, Artificial Sequence
  ENSG00000260704_7 (sequence is synthesized)
ggcggcggagaggcgctccccgggcttcctacccggcaggaggccgcggcgccgggacctcgcctgccctcaccgcgcgccacctctcgggagacgccgcgaatctctccagggaatccc

SEQ ID NO: 905881 - DNA, 120 bp, Artificial Sequence
  ENSG00000260704_8 (sequence is synthesized)
gggcagcggcgcagacccagcaaggaccggcagcaggccgagaccggccgtcttgggcgagagcagcgggacacgagcccccgggcgcccgctgggagcgcggggaggctctgggctcag

SEQ ID NO: 905882 - DNA, 120 bp, Artificial Sequence
  ENSG00000260704_9 (sequence is synthesized)
tcagggaagctgcgctccgagtggccttggaggacggtcaaggagcccgggccccgcggcggccgggagtggacgcgactggtccgcgccggccgcaggggaaggggcgggtcggcgctg

SEQ ID NO: 905883 - DNA, 120 bp, Artificial Sequence
  ENSG00000260704_10 (sequence is synthesized)
agctctatctgctctaatggctggggtagatccgcggagatacttgaataccaggccgaacgcttccccaaggcgtgttgtagacaacgggcccatttgagcatgtgcaaagaacaaatt

SEQ ID NO: 905884 - DNA, 120 bp, Artificial Sequence
  ENSG00000260704_11 (sequence is synthesized)
tcatccatttttctgtctaaaacattcaaagactcaaatctagacaatagtttctctgaggtagaagtgttgggggtggggggtgggtgggaataaactaaaagttggggtaatgagctt

SEQ ID NO: 905885 - DNA, 120 bp, Artificial Sequence
  ENSG00000260704_12 (sequence is synthesized)
gtttcttgtctattttgtctgactatagatttacaaaaggagcaccctgctttactcagtaataccaggccctcctagaaacttacccaccagcttcacatggcatgatcatttgatgaa

SEQ ID NO: 905886 - DNA, 120 bp, Artificial Sequence
  ENSG00000260704_13 (sequence is synthesized)
tcgctttttagtttcccattccggacaaatatccacccaagagaaccaatcataacactggatgtattaacgcatgtcaagactctcacttctctgtagaaatgagaaataaatgtcgat

SEQ ID NO: 905887 - DNA, 120 bp, Artificial Sequence
  ENSG00000260704_14 (sequence is synthesized)
tgttggttttctgtagacttgtgatcacgcccaggaactgtcattttccagttaccagaatctgaatcattgtctaatgtgccacgtatataacaatatatcactaacagcgatctaaaa

SEQ ID NO: 905888 - DNA, 120 bp, Artificial Sequence
  ENSG00000261673_0 (sequence is synthesized)
atggataaagtatggtggagcaaagaacactggaccagaagttggggaggtcgccttagctccaccactgtgtctcaccgttaaattcatctacagggatcctggaatctcgggaggtga

SEQ ID NO: 905889 - DNA, 120 bp, Artificial Sequence
  ENSG00000261673_1 (sequence is synthesized)
gtgtaagagacaatatgaaattgctatgagcaagttgattcagtcactcaacaagtattcacaggcactgtgtgaactctaaaagcaaattacttctctctgaggcaggcgaggcaaggt

SEQ ID NO: 905890 - DNA, 120 bp, Artificial Sequence
  ENSG00000261673_2 (sequence is synthesized)
cacagaagctttatggaactgagcatttgggctggtgtttgaagaagaggttaaaatttgtcaggcagagcagaagggaggcaggtgtgacaaaggtcatgtgggagtcaaaggcgtggg

SEQ ID NO: 905891 - DNA, 120 bp, Artificial Sequence
  ENSG00000260708_0 (sequence is synthesized)
tcgttattaaagggcgacgccgcgcaacgcacgttacacgcatcgcggagggagcggaggtggttgggtttctgagtttgagtctgtcgctcctggctctcccgacacaacagcggcgcc

SEQ ID NO: 905892 - DNA, 120 bp, Artificial Sequence
  ENSG00000260708_1 (sequence is synthesized)
cacctgcccgcaacggactcccaggagcctcgagctcctcatttccaaagctgaactgccccgtgtctgattccgatttctcttgagcgcgtttcggagccggcccagaacagagggaag

SEQ ID NO: 905893 - DNA, 120 bp, Artificial Sequence
  ENSG00000260708_2 (sequence is synthesized)
actgagtgacgatcagcaaatactcagtggacgaaatatttgcagtgcagtgaggtgaggggcataaccgcggagcgtattcgaagagatgagagagactggggattaggccaggcttga

SEQ ID NO: 905894 - DNA, 120 bp, Artificial Sequence
  ENSG00000260708_3 (sequence is synthesized)
agggaagaatggtttgagcaccgaggacaagaattaattccccaggcctgggttccagccttgtgcggctatcacgtgcttgaaacctggctagtccggagtgagatgcgctttacgtgt

SEQ ID NO: 905895 - DNA, 120 bp, Artificial Sequence
  ENSG00000260708_4 (sequence is synthesized)
aaaatacaggattccaaagacgtcgtataaaataatttgtatattgtttgcatgttaggtaacatttttaatgtattggattaaataaaatgcattaaaattatttttacattcctttta

SEQ ID NO: 905896 - DNA, 120 bp, Artificial Sequence
  ENSG00000251018_0 (sequence is synthesized)
agtcagcagctgacagaataatccacacattggtttccttacctatggagtgagggctattatggtggaaaaggccaagtagaagccactagaactatctgtacttaggaaaatagtaaa

SEQ ID NO: 905897 - DNA, 120 bp, Artificial Sequence
  ENSG00000251018_1 (sequence is synthesized)
ccaaaagcaatgctcaattcctatagggactgaagagattagtgccaccataagtacttgaaggaaggcggggtggtgattcctaccatatgtccattcaactcgcctatttagcctggg

SEQ ID NO: 905898 - DNA, 120 bp, Artificial Sequence
  ENSG00000251018_2 (sequence is synthesized)
ggttcctggtatgcagctacctggaatcttgattgccttttctttccacatcacattggtccattacattgacgacattatgctcactggacctaatgagtgagacatagcaactactcc

SEQ ID NO: 905899 - DNA, 120 bp, Artificial Sequence
  ENSG00000251018_3 (sequence is synthesized)
agacctattggaactgacttcacctgcaacagagcttggagaagctgaagcctaagggtgctctaaagcaggggtccccaacctccgggctacagaccaatacccatccaaggcctgtta

SEQ ID NO: 905900 - DNA, 120 bp, Artificial Sequence
  ENSG00000251018_4 (sequence is synthesized)
ggaacccggctgcagagcaggagcttttctgcatggaagaattaaattgagaaaaacatagttatttaaaaaatcacatcgtaactgagttaacaaggcactcaggttctaatcatagat

SEQ ID NO: 905901 - DNA, 120 bp, Artificial Sequence
  ENSG00000251018_5 (sequence is synthesized)
tcagggcatatcaactcaccagccctgtcctaattttgttcacaggaatcttgattgccttttctttccacatcacattggtccattacattgacgacattatgctcactggacctaatg

SEQ ID NO: 905902 - DNA, 120 bp, Artificial Sequence
  ENSG00000251018_6 (sequence is synthesized)
agtgagacatagcaactactccagacctattgcttttctgcatggaagaattaaattgagaaaaacatagttatttaaaaaatcacatcgtaactgagttaacaaggcactcaggttcta

SEQ ID NO: 905903 - DNA, 120 bp, Artificial Sequence
  ENSG00000251018_7 (sequence is synthesized)
atcatagattaccttccttcttcatcttccagctgttttctaaagtcttcctcctgttgcttgagttggttctgcaaatcagttattttttgaagaaaagaaactgtgatttctttaatt

SEQ ID NO: 905904 - DNA, 120 bp, Artificial Sequence
  ENSG00000259222_0 (sequence is synthesized)
gagtcctgagccagcagagctcaggccacagcacctgcacccgttttctgctgctgcacacaagggctctgtgcattccgcatccagaagatcttagattagtaagatcatgttggccat

SEQ ID NO: 905905 - DNA, 120 bp, Artificial Sequence
  ENSG00000259222_1 (sequence is synthesized)
ggcatggagaatgggctggaggtggagagactggaggttggaagtccagttaggagattgctcctgcgctggggagttggtgttaggacagaagatccaagacgcgtttcagagagcccc

SEQ ID NO: 905906 - DNA, 120 bp, Artificial Sequence
  ENSG00000259222_2 (sequence is synthesized)
tcttcttgggcctgcgattcctcacctggaagggagaagagtggacttcctgcctagagaacaccttggtaaactctttgtggttcctgtcatgagaaggtgtgcagcttagggaaaaag

SEQ ID NO: 905907 - DNA, 120 bp, Artificial Sequence
  ENSG00000259222_3 (sequence is synthesized)
gttgcccaggctgatctcaaactcctgttctcaagcgatcctcctaccccagcttcccaaagtgctggcattcaagtgatggaatagaagtttggagagctcaagaaccttgtctaagat

SEQ ID NO: 905908 - DNA, 120 bp, Artificial Sequence
  ENSG00000259222_4 (sequence is synthesized)
cttgtctaagatcacataattagcaggtggtggagctggtggagctgggatttgaaccctggtctatgtggcttccaataggccactcccctatgctgagatgctttgaaattgcaactg

SEQ ID NO: 905909 - DNA, 120 bp, Artificial Sequence
  ENSG00000259222_5 (sequence is synthesized)
tcaagatcttgccccttgtgcattttgatgcccccatgagggtggactcagggcaacatttcagatgttattcccaaatctctccctgctccccttggctgaatccctgaacttctgaaa

SEQ ID NO: 905910 - DNA, 120 bp, Artificial Sequence
  ENSG00000259222_6 (sequence is synthesized)
caaggcctgtctgtggttcctgttgtggccttgaggtaggatttgacaagttgtcaagtcccgaggtgctgaccaacatgctcatctcaagctgaaataataaaataaaaaatctctcct

SEQ ID NO: 905911 - DNA, 120 bp, Artificial Sequence
  ENSG00000259223_0 (sequence is synthesized)
cacaaccccgagctggttgcactaacacacaggctgggggaaatgagtacactggccagtgttgggatcagggaggagagattctgtgtgttctggggtgccgatgagcagaagctggct

SEQ ID NO: 905912 - DNA, 120 bp, Artificial Sequence
  ENSG00000259223_1 (sequence is synthesized)
gctctgggcaccagcttaagtcagctgagtagaaaataacaggtttcaacacaaacatctgtacagacctcactctggagaaattactttgcgtggaacccaggaaattagttggaagaa

SEQ ID NO: 905913 - DNA, 120 bp, Artificial Sequence
  ENSG00000259223_2 (sequence is synthesized)
tttgttcactgtctctttcaagttttaacagctttacttaagaactcaactagcagatgatttctttccattgctttctaaatcaatcacaaatgtctctttgagaaaagaccaatgaaa

SEQ ID NO: 905914 - DNA, 120 bp, Artificial Sequence
  ENSG00000259223_3 (sequence is synthesized)
aaagtggagaggctggcttccctctgttatggactggattctgtacccccaaattcataggtaaaccctaactctcaatgtgatggtatttggagatagggccttgaaggagataattga

SEQ ID NO: 905915 - DNA, 120 bp, Artificial Sequence
  ENSG00000259223_4 (sequence is synthesized)
ggtgaaaggaaatcataaaggtggagccctgagccaatatgactagtgtgctcatgagaagaggaagagacaccagggatgcgcacacccagagaaaaggccatgggaggacacagcaaa

SEQ ID NO: 905916 - DNA, 120 bp, Artificial Sequence
  ENSG00000259223_5 (sequence is synthesized)
aaggtggccatctgcaagccaaggagagaggcctcaggagaaatcaaacctgccgaccccttgatcttggacttccagccaccagaactgtgagaaaataaatgtctgtagtttaaaacc

SEQ ID NO: 905917 - DNA, 120 bp, Artificial Sequence
  ENSG00000259221_0 (sequence is synthesized)
gggccttcagccacagactgaaggctgtactgtcagcttccctacttttgagattttgggacacgtactggcttcctggctcctcagcttgcagacggcctatcatggtacttcaccttg

SEQ ID NO: 905918 - DNA, 120 bp, Artificial Sequence
  ENSG00000259221_1 (sequence is synthesized)
ctggtatagcttgcctggtggtggacttggaggataccattgcatcagggcatttctccacatgatagctcctgcctgctggacaggtcctctcttgactatgtgtattctccagagaag

SEQ ID NO: 905919 - DNA, 120 bp, Artificial Sequence
  ENSG00000259221_2 (sequence is synthesized)
cagcatttataaaattggattaaaataaactaacgaattaaatatgaatatgaaaataaacagctgttttcatggaaattgcattgatgtggattcttctgaaggcatgtccctaaagaa

SEQ ID NO: 905920 - DNA, 120 bp, Artificial Sequence
  ENSG00000259221_3 (sequence is synthesized)
cctgccaacaaattctgtaaaggcagaatgaacattctggaaaatttatgtccttgtgtagaaggctagaaaaaaaaaagaagaaaaaagaaactctcagcctgaaggcctacgtaaaac

SEQ ID NO: 905921 - DNA, 120 bp, Artificial Sequence
  ENSG00000259221_4 (sequence is synthesized)
tggctgatgtggatctcatctccttgcacctgggctgtgctgcacagaattcccacaaagactttcacagaaaagaaatacctcaggttgtactgctggcatatttggtttcccatcaag

SEQ ID NO: 905922 - DNA, 120 bp, Artificial Sequence
  ENSG00000259221_5 (sequence is synthesized)
gattaacatttgagtcagtggactgggagctgcagatccaccctcaatctgggtgagcacgggctaatcaactgccagtgcagctaggataaaggcaggcagaggaatgcggaaggacta

SEQ ID NO: 905923 - DNA, 120 bp, Artificial Sequence
  ENSG00000259221_6 (sequence is synthesized)
aaactctcagcctgaaggcctacgtaaaacacaaagcacttctgaaatctttttggggggccaaaatcacaccaagcaatgcctgtggaagtgaatgtaatcaagtattgccctaccatc

SEQ ID NO: 905924 - DNA, 120 bp, Artificial Sequence
  ENSG00000259221_7 (sequence is synthesized)
tttcagcacaaccacattagaatctcctttaaagtttttcccaccttccccagctctaattgatcccctcaaaactatgctaaatttttagtattcctagtcaccttccgtaagattgga

SEQ ID NO: 905925 - DNA, 120 bp, Artificial Sequence
  ENSG00000259221_8 (sequence is synthesized)
gctaattctgacaaataatctctgaatgaaaagccattctaccagaaataccacatttctggtagaaatgttgggagcattttttttcttttgctttctcttttttctactttcgttctt

SEQ ID NO: 905926 - DNA, 120 bp, Artificial Sequence
  ENSG00000259221_9 (sequence is synthesized)
tcagtgaacttagtagatattaatccctggagagattattttagttggtatctgaattttaaggtaactttcagtgcttgaaatctatcataactatgtcttctaatttcgtagaatctt

SEQ ID NO: 905927 - DNA, 120 bp, Artificial Sequence
  ENSG00000259221_10 (sequence is synthesized)
ggtctcagaaccttaagtttttacacgcattctgcttcattgctagagagctgaagaaagaggaatccctactctgtcgccccacactttctatgtcccaggcaaatagcaacagctcag

SEQ ID NO: 905928 - DNA, 120 bp, Artificial Sequence
  ENSG00000263050_0 (sequence is synthesized)
gttttgttttgttttttttaattttggacagctaatctctgtagtgaggaacccagaactttcggtaatgtaagggatattagtctggttgtcagaaaaatgggctggagtatttgtgct

SEQ ID NO: 905929 - DNA, 120 bp, Artificial Sequence
  ENSG00000263050_1 (sequence is synthesized)
ccagaaaaagaacaggcttcttgtcttgcagaggcaggaagtcagaaaacaagagtgtgtgtgtgtgtgtcagggggtggggggtgtcaggcctccttcccttcagtttgggacttaaaa

SEQ ID NO: 905930 - DNA, 120 bp, Artificial Sequence
  ENSG00000263050_2 (sequence is synthesized)
cttccaccaataacgtgagtatgtgcacccatgcagcagcctgtccgaggactcacaactggagacacctccctgcttggcgctgcccagaaaactatgtagatggccaagaaaccgact

SEQ ID NO: 905931 - DNA, 120 bp, Artificial Sequence
  ENSG00000263051_0 (sequence is synthesized)
atcacgaggtcaggagttcaaccaactgctagactgccttctaaatacctaacaaaatataaaaggtacagtctttcaacagacatttcttcctcagatacagtcctacaaggacttaga

SEQ ID NO: 905932 - DNA, 120 bp, Artificial Sequence
  ENSG00000226208_0 (sequence is synthesized)
aaaagggctgtacatatctgtgggctcttcctcctgctcctgtcaccacaacaactagtgtgtggagcacaactagcctgaccctctagcatggctgctcacatctgtaatcccagcact

SEQ ID NO: 905933 - DNA, 120 bp, Artificial Sequence
  ENSG00000226208_1 (sequence is synthesized)
aagaactccatctctagaaatatatatatatatatataaaatgcatatatgagccaggcatgatgttgcatgcctatagtgccaactactcaggaggctgaggtgggagaatcccttgag

SEQ ID NO: 905934 - DNA, 120 bp, Artificial Sequence
  ENSG00000226208_2 (sequence is synthesized)
gggagaatcccttgagcccagaagtgtgcagctgcagtgagccatgattactccactgcactttagcctgagcaacactgtaagaccctatttcaaaaaaataaaaataaaataaaataa

SEQ ID NO: 905935 - DNA, 120 bp, Artificial Sequence
  ENSG00000226206_0 (sequence is synthesized)
ctccctgaaaagcatggagcagaggtgtagacgtttgattaagtgcttcctaagcttgatggtcgagccttgtttcagctgctgaatttgctgtgtgcagcctggcattgttctcaggag

SEQ ID NO: 905936 - DNA, 120 bp, Artificial Sequence
  ENSG00000226206_1 (sequence is synthesized)
ggtctttcatatgtgtctgaggacataaggacagatgagaagcaggccaggggagaagtgatctctgcctccccacctcacacccacatggcacaggaggacagggttgactgcatcggt

SEQ ID NO: 905937 - DNA, 120 bp, Artificial Sequence
  ENSG00000226206_2 (sequence is synthesized)
gtccctgtgggaagtgcttgctcccatcaacttgcttcttcttggaaagctagaatcctgcagctggattgaccagcacaaagacctttgtgctggctgaatagcaagggaccttcatgt

SEQ ID NO: 905938 - DNA, 120 bp, Artificial Sequence
  ENSG00000226206_3 (sequence is synthesized)
tgccatcacaacggcagagccgcagttcacacccaggcacgttctccccaagacctgtggctgcaaccactgctatgcatggaatgtgagacggacggtgctcgcctagccaacagttga

SEQ ID NO: 905939 - DNA, 120 bp, Artificial Sequence
  ENSG00000226206_4 (sequence is synthesized)
tgctgaatacatcttcatctgtgtattgaccatctacccttttcccatgatttgtttgtcaaaattccttgctaatttccttattaaaaatggtcagtattttaattctcctgattcatg

SEQ ID NO: 905940 - DNA, 120 bp, Artificial Sequence
  ENSG00000226206_5 (sequence is synthesized)
ataatttctttgacaaggaaattaatactttgttaaatgagtacaaatatttttaaacaatctgttttacttttaatctttgtttatggtgatattttgggcatacaaaggtctttaata

SEQ ID NO: 905941 - DNA, 120 bp, Artificial Sequence
  ENSG00000226206_6 (sequence is synthesized)
tccatgttattaaattcacaaatatttccctttgtggattttgggtttcagtttataattctaaacatattctccactccatgattacaaaataaaaataaaacaacactggtattttaa

SEQ ID NO: 905942 - DNA, 120 bp, Artificial Sequence
  ENSG00000226204_0 (sequence is synthesized)
gtgtcctgtccatggctgcagtcattggccccatctcccactgatgttctctgaagccatgaggaagcagtgggactgcaaacatcccagcgctgtttttagtaatctaatgtttgcctg

SEQ ID NO: 905943 - DNA, 120 bp, Artificial Sequence
  ENSG00000226204_1 (sequence is synthesized)
aagtccattctctacaaactttgaaacaaaattatattgttaggtttaagaaatatgatatacaataaagaggaagatgatagaattgttttggaggattttgcctaggctactctgtta

SEQ ID NO: 905944 - DNA, 120 bp, Artificial Sequence
  ENSG00000226204_2 (sequence is synthesized)
ttaatgtggctgatatattaaatcgataagaactgataacaaaagtaatgttcataaaataaacttggctaagcataaaaaatgtaaaagaaattaataaagcaattctgtagaagataa

SEQ ID NO: 905945 - DNA, 120 bp, Artificial Sequence
  ENSG00000226203_0 (sequence is synthesized)
gagtgtaggccaatcccagcaaccatacttcaaccactcttacactactgagtgttcaaactgtgctcaactaagatggtgtcagaagtaggatctgaagaagagacttaacaatcccca

SEQ ID NO: 905946 - DNA, 120 bp, Artificial Sequence
  ENSG00000226203_1 (sequence is synthesized)
ggagtgctgagtgaacaagcaaggtacctgcaaggacctacttttgtcccttgatctctcaaagtggctggggatcatggatggatacatgtgaccaagcattgcaagttaaagatattt

SEQ ID NO: 905947 - DNA, 120 bp, Artificial Sequence
  ENSG00000226203_2 (sequence is synthesized)
ctgaatcttggacctcttatttacagtgaagccccctcatgcatagtaaagcagagaggaatgtaaaaggttgctgcatggataatcaatttctgatggagtctcactctgttgcccaag

SEQ ID NO: 905948 - DNA, 89 bp, Artificial Sequence
  ENSG00000226203_3 (sequence is synthesized)
agccaggatggtcttaatctgctgacctcttagattactggcatgagccattgcaccaggtcttatttatctttttgagacaggtttta

SEQ ID NO: 905949 - DNA, 79 bp, Artificial Sequence
  ENSG00000226203_4 (sequence is synthesized)
accttgccctcccaaagtgcttagattactggcatgagccattgcaccaggtcttatttatctttttgagacaggatgg

SEQ ID NO: 905950 - DNA, 120 bp, Artificial Sequence
  ENSG00000226203_5 (sequence is synthesized)
tcagcttcctgagtagctgggaccacaagcgtgtgtcaccatacctgacacatttcttagacctcagaaaagatgctcaacaccataagtcactaggaatattcagtattcaaatagagg

SEQ ID NO: 905951 - DNA, 120 bp, Artificial Sequence
  ENSG00000226203_6 (sequence is synthesized)
gaggcttcaatgggctccgaactatcccctcctgaactctataaaaagcgtgtttccaaccggctgaatgaaaacaaaggtttacatctgtgagatgaattcacacatcagaaagcattt

SEQ ID NO: 905952 - DNA, 120 bp, Artificial Sequence
  ENSG00000226203_7 (sequence is synthesized)
tcaccaagaacttttctagttttatagcaagatgttcattttttcaatattggtctcaatgggctccaaaatgtccctttgtacagtctacaaaaatttttgccaaagtactgaatcaaa

SEQ ID NO: 905953 - DNA, 120 bp, Artificial Sequence
  ENSG00000226203_8 (sequence is synthesized)
acaaatgtttaacactgtgagatgaattttcaagtcaccaaacatttttacagatagtttgtatctactttttaatcacaaaacttagaattgttcactataagcctcaaagggctctaa

SEQ ID NO: 905954 - DNA, 120 bp, Artificial Sequence
  ENSG00000226203_9 (sequence is synthesized)
attgtcccccttagcttctactaaaagagagttttgaacctagtgtgtagaaacaaaagtttaagtctgtgaaataaatccccacattgcaaagctatttcacagatagcttgcttctag

SEQ ID NO: 905955 - DNA, 120 bp, Artificial Sequence
  ENSG00000226203_10 (sequence is synthesized)
tttttatcatgaattattcaacttttcactacaggcctcaatgggctctgaaatgtcccttcatacattctacaaaaagagtgtttccaacttagctgaatcaaaaggaagtttaaactg

SEQ ID NO: 905956 - DNA, 120 bp, Artificial Sequence
  ENSG00000226203_11 (sequence is synthesized)
tatgagatgaaaccgcaaattgcaaagcattttcacatatagcttctatagtttctatcatataatattcagtttttcactgtaggcctccatgggctatgaaatgtcccctcataggtt

SEQ ID NO: 905957 - DNA, 120 bp, Artificial Sequence
  ENSG00000226203_12 (sequence is synthesized)
ctacagaaaggtgtttccaacatgctgaatgaaaacaaagatttaactttgtgagatgaacccacacatcacaaaacatttttatggatggattttctctagtttttattgcagaatatt

SEQ ID NO: 905958 - DNA, 120 bp, Artificial Sequence
  ENSG00000226203_13 (sequence is synthesized)
tgatttcatgctgtaggtctcaattttctccaaaatttccccttgtagattctacaaaaagaatatttccaatctgctgaatcaaaaccgatgttcaattctgtgagatgatatgcaaag

SEQ ID NO: 905959 - DNA, 120 bp, Artificial Sequence
  ENSG00000226203_14 (sequence is synthesized)
ctttttcacagatagcctgtttctagtttttattgtgggatatttggtttttcactataagcatcagtgggctctgaaattgtccctttgtagattctacaaaaagagggtttccaacct

SEQ ID NO: 905960 - DNA, 120 bp, Artificial Sequence
  ENSG00000226203_15 (sequence is synthesized)
gttgaatcaaaataaagttttaactttgtaagatgaacccacacatcgcaaagcattttcacccatagcttgtttctaatttttaccatgggttattggtttttcactaaatgcctcagt

SEQ ID NO: 905961 - DNA, 120 bp, Artificial Sequence
  ENSG00000226203_16 (sequence is synthesized)
ggactaggaattgttgccttgtagattgtacaaccaaagagtttccaacctgctgaagcaaaacacaggtttaactttgtaagatgaatctacacattgcaaagcatttttacagatagg

SEQ ID NO: 905962 - DNA, 120 bp, Artificial Sequence
  ENSG00000226203_17 (sequence is synthesized)
ttgctttgagtttttatcaagagatatttgatttttcacagtatgcttcaatgggttatgaaatctccccttgtagattctacaaaaaaagtttccaaactgatgaatcaaaagaaaagt

SEQ ID NO: 905963 - DNA, 88 bp, Artificial Sequence
  ENSG00000226203_18 (sequence is synthesized)
cacattacaaagtattttcagaaatagcttctttatagtatttctcgcaggatattagattttccaatattagcctcaacgagctctg

SEQ ID NO: 905964 - DNA, 120 bp, Artificial Sequence
  ENSG00000226203_19 (sequence is synthesized)
gagataaatccacacatcacaaagcatcttcacagatggcttgtttctaatttttattgtgggatattcggtttttcactaaaggcctcaagcactccgaaatgtccttttgtagattct

SEQ ID NO: 905965 - DNA, 120 bp, Artificial Sequence
  ENSG00000226203_20 (sequence is synthesized)
ataacaagagtgttttaaaactgctgaatcaaaacaaacgtgtaactctttgagaggaacccacacatcacaaagcatattttcagatcacttgtttctagtttttaaagcatgatattc

SEQ ID NO: 905966 - DNA, 120 bp, Artificial Sequence
  ENSG00000226203_21 (sequence is synthesized)
ggtttttcactatatgcctcatcagactcagaaatgtctcatagtagattttacaaaaacagtgtttcctacctgctgaatcaaaacaacagtttaaatctgtgagatgactccaaacct

SEQ ID NO: 905967 - DNA, 120 bp, Artificial Sequence
  ENSG00000226203_22 (sequence is synthesized)
cgcaaagcattttcacagatagttttttcctagtttttttcgcaggatatttggtttttcagtataggcctcaatgaactctgaaatgtccattcataggttctataaaagtgtgttccc

SEQ ID NO: 905968 - DNA, 120 bp, Artificial Sequence
  ENSG00000226203_23 (sequence is synthesized)
aactccctgtataatagcaaaggtttaactctgtgaaatgaatctatacattggaaaacattttcacaaatagcttgttcctagcttttatgatgagacatttgattttttactattggc

SEQ ID NO: 905969 - DNA, 120 bp, Artificial Sequence
  ENSG00000226203_24 (sequence is synthesized)
ctcaatgggttcagaaatgtctctttgcagattctacaaaaaaaaaagtttttcatttttctgaacaaaaataaaggtttaactctttgatatgaaatcagacatcacaaagaattttca

SEQ ID NO: 905970 - DNA, 120 bp, Artificial Sequence
  ENSG00000226203_25 (sequence is synthesized)
cacatagcttgtttctagggttcatcactggatattgtgtttttcattataggcttcaaaggagtcttaattgtaacttcctaattctacaaaaagagtgtcccccaacctgctgtatgt

SEQ ID NO: 905971 - DNA, 120 bp, Artificial Sequence
  ENSG00000226203_26 (sequence is synthesized)
aaataaaggtttacctctgtgagataaatcttcacattgcaaagcattttccccgatagcttgtttctagtttttatatcgggatattgatttttcactataggcttcaatgggctttga

SEQ ID NO: 905972 - DNA, 120 bp, Artificial Sequence
  ENSG00000226203_27 (sequence is synthesized)
aagattcctctgtagattgtacaaaaagagtgttttaacctgctgaatcaaaacaacgtttaactttttgagatacatccacacatcacaaagtattttcacggataggtttttatttta

SEQ ID NO: 905973 - DNA, 120 bp, Artificial Sequence
  ENSG00000226203_28 (sequence is synthesized)
gcgtgagccaccatgcctggccaatagcttttttttacttttattgtggaatattggtttttcactacaggctgatattggcttcaaattgtaccctcacagattctacaaacagtgaat

SEQ ID NO: 905974 - DNA, 120 bp, Artificial Sequence
  ENSG00000226203_29 (sequence is synthesized)
agattctacaaacagtgaattttcaagcttctgaagcaaaataaaggtttaaccttgtaagatgaatctgcacattattgctggatattcggtttttcaccgtaggcatcgattttctct

SEQ ID NO: 905975 - DNA, 120 bp, Artificial Sequence
  ENSG00000226203_30 (sequence is synthesized)
gaaatgtcctattgaagattttgccaaaagagtgtttctaccctgctgaatcaaaagaatggtttaattctgtgagatgaaatcacccatcgtaaattattttcagagacatcttcatat

SEQ ID NO: 905976 - DNA, 120 bp, Artificial Sequence
  ENSG00000226203_31 (sequence is synthesized)
agtttttacctcagaatattcggtttttcactataagcctcaatgggctttgaaatgtctcccataaattgtacaaaaaaaaaaaggaatttccaacctgttgaatcaaaacaaatattt

SEQ ID NO: 905977 - DNA, 120 bp, Artificial Sequence
  ENSG00000226203_32 (sequence is synthesized)
aatgttgtgagataaattcaaatatcgcaaagcattttcacagattttttttctactttttatcacggaatatttggtttttcactatagtcctcagtgggctcagaaatgccccttgta

SEQ ID NO: 905978 - DNA, 120 bp, Artificial Sequence
  ENSG00000226203_33 (sequence is synthesized)
gattctacaaaaagaatgtttctaacctgctgaaccaaaacaatactttaactctttgaggtgaatccacacattgcaaacattttcacagatagcttgtttttagttttgatcacgtaa

SEQ ID NO: 905979 - DNA, 120 bp, Artificial Sequence
  ENSG00000226203_34 (sequence is synthesized)
tattggatgttttacaataggcctcaacgggctcagaattgtcccctcttagattctactaaaagagtgtttccaaaatgctgtgtaaaaataaaggcttaacactgtgagatgaatcga

SEQ ID NO: 905980 - DNA, 120 bp, Artificial Sequence
  ENSG00000226200_0 (sequence is synthesized)
gccccctccgagcccggatcccggccgccggacctccccgctgtgaccacccacgggagcagcagctctggaggactgcccgccagaaaaaaaaagcctctggcgacgcctgggagcgcg

SEQ ID NO: 905981 - DNA, 120 bp, Artificial Sequence
  ENSG00000226200_1 (sequence is synthesized)
acggaggcgcaagagctctaaccgcgcgaggtgaaaactccgactgcgtcagagccgccccgccccgcctggggcccaccttccgccgcccctccgagctgcggcgaaaacccggagagc

SEQ ID NO: 905982 - DNA, 120 bp, Artificial Sequence
  ENSG00000226200_2 (sequence is synthesized)
ggctaggccggggtcggagcccgcgcatgcccagtagccccacgtggtgcaagtcgcctgaaggaaggttttcctctgctccccgagcgaagccccagcgcccaagttaggatggacagc

SEQ ID NO: 905983 - DNA, 120 bp, Artificial Sequence
  ENSG00000226200_3 (sequence is synthesized)
agttaggatggacagcggggagagctggccttcccgccccgatgcccgccgtccctggccggcccgcgccgcacctcggtggcctacaggcagcccgaggccgtgcctcccgcggggtcg

SEQ ID NO: 905984 - DNA, 120 bp, Artificial Sequence
  ENSG00000226200_4 (sequence is synthesized)
gggaaggggcgcggctacgggcccggcgtaccacgtgactgtccgcggcgctccgggcagccatcttccgcccggccatcgggccgcgggcgctcggaaccgacctgggagctggcggga

SEQ ID NO: 905985 - DNA, 120 bp, Artificial Sequence
  ENSG00000226200_5 (sequence is synthesized)
ccgtcctcccccgccacgccctcccatcgggctttgggcgccggactctggccaccgctcggcacctgcctccgcctcgccttggggtataggagtcctgtaccgacccctggcttgccc

SEQ ID NO: 905986 - DNA, 120 bp, Artificial Sequence
  ENSG00000226200_6 (sequence is synthesized)
agaggacaggttctcgcccgggccagaagcaaactgcggcgaaatcgagacaacagaactcaggtggcggagggtccccgcttttccccagaggcggaagttggcgagggagtcctcttc

SEQ ID NO: 905987 - DNA, 120 bp, Artificial Sequence
  ENSG00000226200_7 (sequence is synthesized)
cgttatccagcgagagcgctgctctggctgcctcccggttctaacctagtccctgcagaggagtgatgtaccggcagggacattggacagaggccgtgctcttccctgcagcgcataccc

SEQ ID NO: 905988 - DNA, 120 bp, Artificial Sequence
  ENSG00000226200_8 (sequence is synthesized)
cgcggcccctgctggtgggccgcttcgatggtgctgaggttcatagtgaatatttattgagcgcctgcctcgagtcccttgggtttcctgttgtctcgggacctgccgcgtcactatcac

SEQ ID NO: 905989 - DNA, 120 bp, Artificial Sequence
  ENSG00000226200_9 (sequence is synthesized)
ccgggtagttgtcatggacgcctctatatttcagctaagcagtccattttaataagctaggcagtgaaaatttccatagttttccccaaagcacagtgaggagtcagggattcaaaatga

SEQ ID NO: 905990 - DNA, 120 bp, Artificial Sequence
  ENSG00000226200_10 (sequence is synthesized)
ggcaatctgccccaatgcaggcgttttattgcaccctccactcctggctcctctggttttttcgcccgtaagacacagtactgctcttctcaggaagattaggaaagtacatttgtcaca

SEQ ID NO: 905991 - DNA, 120 bp, Artificial Sequence
  ENSG00000226200_11 (sequence is synthesized)
tacgcttttcaagcacggctttaaaataacaactgaaattcagttcaactgcatgttttgagtatctactgggagcaaggctctgtgaagtatagtagccctactggttatgtttatcag

SEQ ID NO: 905992 - DNA, 120 bp, Artificial Sequence
  ENSG00000226200_12 (sequence is synthesized)
tttgcacctaaaaggtgaaaggaaggcttgctttcttgtgatgtaaattttttcaaactaagggagtgccagaaaactgctggctgctttctctcccgtgttggtttctctccagtgcta

SEQ ID NO: 905993 - DNA, 120 bp, Artificial Sequence
  ENSG00000226200_13 (sequence is synthesized)
tccagaatatgctgtaagctctggacttcctgaaacaaaggtccaagtaagcatctggtctttgatgtactttaaaatgcaccccacccccacatgaaagataactaaatttttcaaaat

SEQ ID NO: 905994 - DNA, 120 bp, Artificial Sequence
  ENSG00000226200_14 (sequence is synthesized)
attaatacttcttgaatgtaaatcgtgtgtctaaggtactggcataattttttttttcaaattttctatatgtttgaaatgtttcataataaaatccttttaaatttttttccatgtgta

SEQ ID NO: 905995 - DNA, 120 bp, Artificial Sequence
  ENSG00000226200_15 (sequence is synthesized)
attttaggatgatatatatatagcacatggaaaaaagcagggcatagaagtatttccactttaatttcagtttcataaaatcagagagaaaaagtcatagatatatacaccatacataaa

SEQ ID NO: 905996 - DNA, 120 bp, Artificial Sequence
  ENSG00000226200_16 (sequence is synthesized)
aaataaaagcgtaaataaatacagaaagaaatctaaagagaaatcaccatagcagtaaaagtaaattctgtgtgaagtggttataagagacactaagagttgcccctccttgaaattata

SEQ ID NO: 905997 - DNA, 120 bp, Artificial Sequence
  ENSG00000226200_17 (sequence is synthesized)
tttagttatggtccttaagtcactattatttgtaaccaaaaaaaaaaattgaataaaaatagttctccctctttagtccatccaatcctaaagaatttttatcagtgccctttctttttc

SEQ ID NO: 905998 - DNA, 74 bp, Artificial Sequence
  ENSG00000226200_18 (sequence is synthesized)
ttcagacctgcagccttgacttacagggctccagtgatcctccaccctcagcctcctgagtatctgagaccaca

SEQ ID NO: 905999 - DNA, 120 bp, Artificial Sequence
  ENSG00000226200_19 (sequence is synthesized)
cctgaggacaccaaaatcctcagatgctcaagtccctgataaaaaaataaaagcagtggtgccctcgggttcaaaaacctgaacggtggtcttcagttgttcccccaagctcctctatca

SEQ ID NO: 906000 - DNA, 120 bp, Artificial Sequence
  ENSG00000226200_20 (sequence is synthesized)
gaggcccagacactccaagaggctgggaagaggcaagtggctttccctgactggcatcagactcctggatggctgtgtttctgcatactccaccatcaacaatcagaagggcactgcttt

SEQ ID NO: 906001 - DNA, 120 bp, Artificial Sequence
  ENSG00000226200_21 (sequence is synthesized)
cttcaagaaggggaccttgcaaagaactgtctcagatggactatctttgagttcatcttgttctgaatgtgagtctgagtctttgtttccagatgacacagtgctgtctgagtcctctga

SEQ ID NO: 906002 - DNA, 120 bp, Artificial Sequence
  ENSG00000226200_22 (sequence is synthesized)
atcacctgcctcagagctgcagcaaagtttctgctgcccagaaactgaatgggctgcttgtaatgcagattcttcctcctggacaagaagtgctgctgcttctagttcttccagttctaa

SEQ ID NO: 906003 - DNA, 120 bp, Artificial Sequence
  ENSG00000226200_23 (sequence is synthesized)
ccccaactgggcctttgtaagggagacttcctttaaggcttctgcaagagctgccaacgttttggatttgactttctgagtccacacacagtagtatgagatgtagagatcattcagtat

SEQ ID NO: 906004 - DNA, 120 bp, Artificial Sequence
  ENSG00000226200_24 (sequence is synthesized)
gtatgctgggtcgttttcctgaaaaattttgtgaatatccaggagacactttaaaactgcacttttacttaattgcagtatctttatagtctccccgtaggccttcatcgccagtttgaa

SEQ ID NO: 906005 - DNA, 120 bp, Artificial Sequence
  ENSG00000226200_25 (sequence is synthesized)
atggcgatagagcaggtaacacaatacccttcttccaaaagacaccatgatatcatgaacattagtccaagtctcaaaccagcatagtattggactcaagtttcgtgatattccatgcag

SEQ ID NO: 906006 - DNA, 120 bp, Artificial Sequence
  ENSG00000226200_26 (sequence is synthesized)
attcaacgttcttgtctccttcagtgacacgggtttcttagcaatatgccagaaggatatcaatcgaactgtagtacacttgacgacaggctctgttgtctagcagataagatttattga

SEQ ID NO: 906007 - DNA, 120 bp, Artificial Sequence
  ENSG00000226200_27 (sequence is synthesized)
caaattcttgtagctgatatttctcttcttcagaaaaagacactaatgcagcatgattttcttgcttctgactcttttccaaaaaggccgtcattttttaatatttgtcagtccaccaag

SEQ ID NO: 906008 - DNA, 120 bp, Artificial Sequence
  ENSG00000226200_28 (sequence is synthesized)
gattatacttcaaaatctgttcaactgcctcatcttcaaaaaagtcagctagataatgatcaggatcaaacttggccagctcggcggccaggtgcttttgttttcgttctgctgcaggga

SEQ ID NO: 906009 - DNA, 120 bp, Artificial Sequence
  ENSG00000226200_29 (sequence is synthesized)
tgaaatctggatccttaataacatcactcaattcatcctgtaactgctgaaacactcctgatcgtaagtttccaaacccatagtggcatgaggattcaaagcactttctgttacctcttc

SEQ ID NO: 906010 - DNA, 120 bp, Artificial Sequence
  ENSG00000226200_30 (sequence is synthesized)
atagggtgtctgctcaatttcccaatcaaactcttcatcgtcaactacttcctcaggaatttcagaatcacctattgcttccacaagtggttttgctgtcccggattttcctggtgccag

SEQ ID NO: 906011 - DNA, 120 bp, Artificial Sequence
  ENSG00000226200_31 (sequence is synthesized)
aagagcaacacatgttcagcccctcaaaatgctggccaggggtttctctgggcaggcgagtggtaaaaattcctttatctgcatcataggacccttgctcgcttccgtatccatattcta

SEQ ID NO: 906012 - DNA, 120 bp, Artificial Sequence
  ENSG00000226200_32 (sequence is synthesized)
caattcttccaggaggggttaatctgagaaagtacggcttggcatagtagtctaggccgacccctcgaagtagacgttgaactcggaggccggggcatagggcacgcggatggcgatggt

SEQ ID NO: 906013 - DNA, 120 bp, Artificial Sequence
  ENSG00000226200_33 (sequence is synthesized)
caggaaatccggctcctggctgaggctgaacgccggggtcagcatcgcggcaccagacgcaggggccagcgcggctcgccctcgctgccgcggcggtcccaccaagcaactctctccaat

SEQ ID NO: 906014 - DNA, 70 bp, Artificial Sequence
  ENSG00000226200_34 (sequence is synthesized)
ctgacctgaggtcaggagttcaagatcagccccgccgacatgacgaaactccgtctctactaaaaataca

SEQ ID NO: 906015 - DNA, 120 bp, Artificial Sequence
  ENSG00000226200_35 (sequence is synthesized)
gacctgaggtcaggagttcaagatcagccccgccgacatgacgaaactccgtctctactaaaaatacaaacatcagccggacgtggtggtgggcgcctgtaatccccactactcgggagg

SEQ ID NO: 906016 - DNA, 120 bp, Artificial Sequence
  ENSG00000226200_36 (sequence is synthesized)
gaagcctcctatacacacattttggcacttgattatgttatgtcttttacagttctctgcatgtttcttgcaggtaagtcttgattcttcaattacatattaaatttctattgaggatat

SEQ ID NO: 906017 - DNA, 120 bp, Artificial Sequence
  ENSG00000226200_37 (sequence is synthesized)
atatctagctttcatctttcagagtacctagcataggacttggcaccaagtagcccatagtaaacagttattcaaccataatgtatgattttcttttctacttttcactggtatgttttt

SEQ ID NO: 906018 - DNA, 120 bp, Artificial Sequence
  ENSG00000226200_38 (sequence is synthesized)
gtttaaaaagggtaaaccaccagggatggaaatgtccttgctatgttatccttcttctctaattagcaaccacccttcacaatctgccacattacatttaaaaaggattttcaaattaga

SEQ ID NO: 906019 - DNA, 120 bp, Artificial Sequence
  ENSG00000226200_39 (sequence is synthesized)
catttatgcctgggcattaaccagggactgatgaatcagtgccatcagcagaacactgccctgactggcagacatggcaccattgtcaagacttgtaatttactcctggcttttcaaata

SEQ ID NO: 906020 - DNA, 120 bp, Artificial Sequence
  ENSG00000226200_40 (sequence is synthesized)
gtcagtgtgtaactccaggcaaggtttaattatctcctgttaaaatgggaataatatgacccacccccactttgcttcccatgggtatcatgagaattaattaattattgaataagaata

SEQ ID NO: 906021 - DNA, 120 bp, Artificial Sequence
  ENSG00000226200_41 (sequence is synthesized)
tatgtctataaaatattttatagttcattagaggtaaacaaatgcaaacgtaagatattgttcaatgtattatgaatgttcattgttgctgtatttagtacaaagtacctgtattatatc

SEQ ID NO: 906022 - DNA, 120 bp, Artificial Sequence
  ENSG00000226200_42 (sequence is synthesized)
aacagtggtagtacacaaaataatgaatacatgttgggtcagcacctcctccaattaccacttgcaaacaagtcctggatggccagaactaattggaaggttgagacaaaaattatatct

SEQ ID NO: 906023 - DNA, 120 bp, Artificial Sequence
  ENSG00000226200_43 (sequence is synthesized)
cgcacactaaagaaggggagattgatacagcgcgctcacctaaatttcgtagtgccttcatgaactcttcaaaagcttcaaatctaggctaggctacaggaagaacagcagcaactgaag

SEQ ID NO: 906024 - DNA, 120 bp, Artificial Sequence
  ENSG00000226200_44 (sequence is synthesized)
actggcaccttttctggaacctcagcagcaccttccttgtttcgtaagatttcgaagaagcatatcaaaattcttccacccattccttcacagtataataggagaaaacatctatcctcc

SEQ ID NO: 906025 - DNA, 120 bp, Artificial Sequence
  ENSG00000226200_45 (sequence is synthesized)
gttgacacctggaagaatgagattccaactcactccaggacatggccagaaaaattcaacaaaagatttgctaaatcctctgcactattatctagaccaggatttctcaacctcagctct

SEQ ID NO: 906026 - DNA, 120 bp, Artificial Sequence
  ENSG00000226200_46 (sequence is synthesized)
gtggacatttgggccagataattctttgttaccagaggctgtcctgtacatcatcaggtgtttagcagcattcctggcctcaaccaaatggatgccagtagcacctcccccacccacttg

SEQ ID NO: 906027 - DNA, 120 bp, Artificial Sequence
  ENSG00000226200_47 (sequence is synthesized)
tgacagccaaagatatctccagacattgccaaatgtcccctgttatggagaatcatcctcagttgagaatcactggtttaggcaatgatcaaagtggggcaactaaatcaaaaggcactg

SEQ ID NO: 906028 - DNA, 120 bp, Artificial Sequence
  ENSG00000226200_48 (sequence is synthesized)
caatcttaagttgatcaagcatccttctttgaaatcactcagcactttcatatattgcatttatatcttaggtattcatattctaacaattcagccaatgttttttgagttcgcaatgga

SEQ ID NO: 906029 - DNA, 120 bp, Artificial Sequence
  ENSG00000226200_49 (sequence is synthesized)
caaggtacaagatcaagtaagtaattctgtgtatccataaaacagaaatggatatggtatgtcccagttctccacagtaggcatttatgttattcccatcccaatatttagccctgatca

SEQ ID NO: 906030 - DNA, 120 bp, Artificial Sequence
  ENSG00000226200_50 (sequence is synthesized)
gggttgtcaaacattgcatgggacatacttatcctaaaaaattattcattatttatctgaaattgaaatttaactggatgtcctatgtgtgtgcatgtgtatgtttgtttgtttgtttct

SEQ ID NO: 906031 - DNA, 120 bp, Artificial Sequence
  ENSG00000226200_51 (sequence is synthesized)
ttttctaaatctgattaccctatcctaacagactcaaggttttttccctgttccacaaactttatgacttgacttcattaaaaataataaagaggaataactgcaaaggctttaaaaatg

SEQ ID NO: 906032 - DNA, 120 bp, Artificial Sequence
  ENSG00000226200_52 (sequence is synthesized)
ctgttagaatgagtagcacaactgaatttgaggatacattttctttgaaggatgtctattttcctactgaaaatagtggcaaactccttagaactcattcaaagcctgatgggattcatt

SEQ ID NO: 906033 - DNA, 120 bp, Artificial Sequence
  ENSG00000226200_53 (sequence is synthesized)
gcctgatttatttaaaaacacttctgatgctcacagactatttatcatttacacagcaaatgatgttcttctagtattcttgttgggtgagttagcattgtggaaggacatagaggagaa

SEQ ID NO: 906034 - DNA, 120 bp, Artificial Sequence
  ENSG00000226200_54 (sequence is synthesized)
tcagacacaaacttcttataacctcataaacaggaagaaagggagcagaagcatagactgactttactttcactcagcttaccttcctagttctccaggtgtggtcctcagaagaggaat

SEQ ID NO: 906035 - DNA, 120 bp, Artificial Sequence
  ENSG00000226200_55 (sequence is synthesized)
atcatgtgacctgggaacttgctagaaatgcacatccttgggacccaccccggacctactgaatcagaaactctgagagtgggtcctagcaaccagtgttttcacaggccttccaggtga

SEQ ID NO: 906036 - DNA, 120 bp, Artificial Sequence
  ENSG00000226200_56 (sequence is synthesized)
ttcttccgcatgttcgagtttgagaacaactgctttagagccctggttcttgaccctggctacagggtaaaacacctggggagtttttaaaatactgatgcatggggtccattccaaggg

SEQ ID NO: 906037 - DNA, 120 bp, Artificial Sequence
  ENSG00000226200_57 (sequence is synthesized)
agtctgatataattactatggggtgcagcccaggcgtaaacattttttaaaaactcctcaaccagaataacggctctacagaaattttatcaaatgccaaagaaagagttccttattttg

SEQ ID NO: 906038 - DNA, 120 bp, Artificial Sequence
  ENSG00000226200_58 (sequence is synthesized)
caactatagtgctttctactctggccctaatcaactttcataaaggcagaatggacagacattacgtgttttaatttgaagactaccaaaaggccggccattaaactaggtatatgggct

SEQ ID NO: 906039 - DNA, 120 bp, Artificial Sequence
  ENSG00000226200_59 (sequence is synthesized)
cgtcctcaaatccctaaatctactccttaggacctactatagccagtgtcatataatagaaaagtcacttattgtccaccagaccctgccctaatatttgataacctcttggggcctcat

SEQ ID NO: 906040 - DNA, 120 bp, Artificial Sequence
  ENSG00000226200_60 (sequence is synthesized)
tttcttgtgtctacactggggatgatattaactcttcacaggatttggggaattataaagaaagaccatgtagtaaaggcaggaagatcaataatcaataatcacatcagaacctgaagg

SEQ ID NO: 906041 - DNA, 120 bp, Artificial Sequence
  ENSG00000226200_61 (sequence is synthesized)
gacttcgtaccattgaagtgaggcagaggagagagaaatttagaaggacaaattcacaaatttcaatgtgtttctataataactacttaaattattttctctttgaattgcctcactgtt

SEQ ID NO: 906042 - DNA, 120 bp, Artificial Sequence
  ENSG00000226200_62 (sequence is synthesized)
gtgtgtgtatgtccccactcccacctgtcccattattttcctgttttcacttgtaccttggcaacccatctgtggttttggccaagctgttttaatggcattgaacctggtagttttttt

SEQ ID NO: 906043 - DNA, 120 bp, Artificial Sequence
  ENSG00000226200_63 (sequence is synthesized)
aaaagagtgtggtagtagttatatatggctcgataactcctggggctacaacaaggttaatgcgacagtttttgttgtttaaaaaacatgcttgtctgacaagtcaatcattttaagccc

SEQ ID NO: 906044 - DNA, 120 bp, Artificial Sequence
  ENSG00000226200_64 (sequence is synthesized)
cttgttcacttcaggatggttgctaaaggcttctctgtgagctaaaagctctcgctgttaaggggctgcctgccctgactgtatgcattaaatggaacagttctctacatggtttcttac

SEQ ID NO: 906045 - DNA, 120 bp, Artificial Sequence
  ENSG00000226200_65 (sequence is synthesized)
gtcctctcccagggtactgctgagacctaagggcttaaatgctcaccaaaccaagtgaccttggagggctggtcatggtgggcatctgggagctgggaaagagcattggagaacttcata

SEQ ID NO: 906046 - DNA, 120 bp, Artificial Sequence
  ENSG00000226200_66 (sequence is synthesized)
gggaaacctagtaggcaaaaatgaaagaacccataagggccattggcatgagccatagctaaaggccactgggttagctctcaaagaaaactgcaagattgaagcataaattccttcatc

SEQ ID NO: 906047 - DNA, 120 bp, Artificial Sequence
  ENSG00000226200_67 (sequence is synthesized)
atgaaccagaagtcatggagtggagccaggggcaagaaagagaaagatgaagaggtagaaccaccaggataaaggtgccaagaaaaacagtgagagcaacactcagggaaccagagacag

SEQ ID NO: 906048 - DNA, 120 bp, Artificial Sequence
  ENSG00000226200_68 (sequence is synthesized)
gaacacagctgggaactaggaggagaaaccaccacagctggagcgcaaagtggccaggtcagaaaagcctcatggaatcctggttaactgaatgtttctattgactgaggccactgctta

SEQ ID NO: 906049 - DNA, 120 bp, Artificial Sequence
  ENSG00000226200_69 (sequence is synthesized)
agccctgtattcttttttatttcaatccccatggttagaaaaatagtcctaaaatgggttcataccctttcctatcctgcaagatcttaaacatcactatcttttcctgcagtagttaaa

SEQ ID NO: 906050 - DNA, 120 bp, Artificial Sequence
  ENSG00000226200_70 (sequence is synthesized)
agcatgggctttggaatcagaaactgggcacaaatctgagccctgctacttattaactgtgtaacattggtcaaatgaataaacttcctggagcctcagtttccttgcctgtaaaatgtg

SEQ ID NO: 906051 - DNA, 120 bp, Artificial Sequence
  ENSG00000226200_71 (sequence is synthesized)
agtaacaataccaacttattttcaggttgtgagcatttctccataataatccacataaaacacttaccagagcccttggcatactgtgtgagcatgtaataatgttagctgtcattccaa

SEQ ID NO: 906052 - DNA, 120 bp, Artificial Sequence
  ENSG00000226200_72 (sequence is synthesized)
gacaacatgttggaataatctactttttccatcactatatatctcattttccttctttttcttctccctcaaacctgtccccattccaacagatgttttggcctgtgttcctagcctcca

SEQ ID NO: 906053 - DNA, 120 bp, Artificial Sequence
  ENSG00000226200_73 (sequence is synthesized)
gtgacagcagaaagcctgttagatttcctgcctttgtttcccaaaatttgagccccaagaaactgggacaagatattttcctgagacaagatatctcaggaaggggaatgagtggagctt

SEQ ID NO: 906054 - DNA, 120 bp, Artificial Sequence
  ENSG00000226200_74 (sequence is synthesized)
cttttcaccccacactagaaagccattctgtttagaaaaaggagacggaagggaaagaaaagggtgctataccagttttccagtatcaccgtcagggagaaagcaaggccggagagtatc

SEQ ID NO: 906055 - DNA, 120 bp, Artificial Sequence
  ENSG00000226200_75 (sequence is synthesized)
tgggcagatgtaactataagcagcctaataaaggttcccaagtccaaaccatgaatccaaacggcagagctgccagacatgaaaggccttgctgcccttccaccccacaatacttcacct

SEQ ID NO: 906056 - DNA, 120 bp, Artificial Sequence
  ENSG00000226200_76 (sequence is synthesized)
ctggaagccttgacaattccagggagtatttgcaaaaccctgcccccacccaaaatttttaaaatactgcatatgagtgagtaaaatgatgccgagatttttaaaaggacaagcttacca

SEQ ID NO: 906057 - DNA, 120 bp, Artificial Sequence
  ENSG00000226200_77 (sequence is synthesized)
tcagataggtagaatgagtagtagtggcagcggtggtggtagtgatatagagataaaagagttaagtggagttactgaaatgtgtagttatatttctcacactctggtgtttgtggattt

SEQ ID NO: 906058 - DNA, 120 bp, Artificial Sequence
  ENSG00000226200_78 (sequence is synthesized)
gtgggctgagattcttatcaaattccggaacttgcaatgtctcaaggtaattgtttaaaatattaattgttttactcacactgcaaatgttgatatagatgctggggtggaggtggggca

SEQ ID NO: 906059 - DNA, 120 bp, Artificial Sequence
  ENSG00000226200_79 (sequence is synthesized)
ataggccagaataagcccaagaataccttggaatttgctgaatttctttctttttgcataatcttattcacacattaacataatatgaaccactctggctccatgagcagcacagaagag

SEQ ID NO: 906060 - DNA, 120 bp, Artificial Sequence
  ENSG00000226200_80 (sequence is synthesized)
actttctgcaaatgtgattattagggcaaaagttaggagattttttgcccccagcttttctcctctcctaaaatctttttttttttttcatttctttgtcagtgtctttaatttttttag

SEQ ID NO: 906061 - DNA, 120 bp, Artificial Sequence
  ENSG00000226200_81 (sequence is synthesized)
ctgcatttaaaaggctttctattatttctgcatgagtaagagcatgtgtcatgtcagcctccttgtcagcttctgtttcactttcattaaatttgttgattgagtgtaaagaaggaggca

SEQ ID NO: 906062 - DNA, 120 bp, Artificial Sequence
  ENSG00000226200_82 (sequence is synthesized)
ctgtcatcatttccagatttcatagctgtaggttagatctctctcggagcaatgccatgattactgctgcaattttgtaatggagccctggagagacagggatgaaaccagggaaggctc

SEQ ID NO: 906063 - DNA, 120 bp, Artificial Sequence
  ENSG00000226200_83 (sequence is synthesized)
cttatccctttcgtgggtccagggaggcagaaagagaggggaggaggatgtttctgtttcacctctattcattcattcattcatttgcttcacaaatattgagcacctcctgagtgacag

SEQ ID NO: 906064 - DNA, 120 bp, Artificial Sequence
  ENSG00000226200_84 (sequence is synthesized)
acactgatttgggtgctggaaagcataagcagccctggtgcctgtcctcacagagcctatggtctgctggtgagacggacttaatcagataaacacactaatgaatgtatagttgcacca

SEQ ID NO: 906065 - DNA, 120 bp, Artificial Sequence
  ENSG00000226200_85 (sequence is synthesized)
acagatcctcatttaattgagctggactaggacctaggcatcagtattttttttataagcttcataggtaactctgccaggcctgggaatcactgggctagaccatgcaagttctaatca

SEQ ID NO: 906066 - DNA, 120 bp, Artificial Sequence
  ENSG00000226200_86 (sequence is synthesized)
tataggctctactcaagcattaagcattttgattttatctttcaagctgtggtgaaaacgttactgaagagaggtgatatagtaagatgctcacggtttttaaaattaagcttttttatt

SEQ ID NO: 906067 - DNA, 120 bp, Artificial Sequence
  ENSG00000226200_87 (sequence is synthesized)
ttgaaataattatagactcatatgcagttgtaagaaataatacaggggaatcccatatatcctttatccagtttccccaatggtaacatcttgcaaaactatggtacaatatcacaacca

SEQ ID NO: 906068 - DNA, 120 bp, Artificial Sequence
  ENSG00000226200_88 (sequence is synthesized)
ggatattgaccttggtgcagtcaagataaagcattttcaacaccacatgaatccctcctgttgtccttggatagccctccccactttactcctggtgaccactaatatgttctccatttc

SEQ ID NO: 906069 - DNA, 120 bp, Artificial Sequence
  ENSG00000226200_89 (sequence is synthesized)
tataatcttgtcttttcaacagttatataagtggaatcatatagtatagaacctcatgggattggctgttttctctcagcatcattttctggacattcattcaggttgtttcacgtgtca

SEQ ID NO: 906070 - DNA, 120 bp, Artificial Sequence
  ENSG00000226200_90 (sequence is synthesized)
atagtttgttcctttttagagggctgactagcggtgttccatgtataggggtgccatagtttgtttaaccattcacatgttgaaggacatctgggtctgctccaatgttcagagatttta

SEQ ID NO: 906071 - DNA, 120 bp, Artificial Sequence
  ENSG00000226200_91 (sequence is synthesized)
aatagagctgctatacacatttgtgtataggtttttgtgtgaacatgaagtctttgtttctctgggatacatgcccaagtgtgcaattgctgagttatatgatagttgcatgtagaaact

SEQ ID NO: 906072 - DNA, 120 bp, Artificial Sequence
  ENSG00000226200_92 (sequence is synthesized)
atcatgcataaagaaactgtcaaactatttccagagtatctgcaccattttacattctcaacagtaatgtaccagtgatccagtttctcctcattctcatcagaatttaatgttgccact

SEQ ID NO: 906073 - DNA, 120 bp, Artificial Sequence
  ENSG00000226200_93 (sequence is synthesized)
gttttttatttcagccattctgataggtatgtggtaattgcttgttgtggtttgctttgagtttctctaatggccaacgatgctgaacatcttttcatgtgcttagttgccatctgtata

SEQ ID NO: 906074 - DNA, 120 bp, Artificial Sequence
  ENSG00000226200_94 (sequence is synthesized)
ttacctttggtgaagtgtctcttcatgtctttggcctattttctaattggattattagccttaatgttgagttttgagagtttacttttatattccaaatactagtcccttttgtcaaat

SEQ ID NO: 906075 - DNA, 120 bp, Artificial Sequence
  ENSG00000226200_95 (sequence is synthesized)
atggggtttgcaatttttttcccactctccaatttgttttttatcctgtttacagggtctttcacagagcaaagttttttaattgtgatgcagtctaatttatcagcttttccttttatg

SEQ ID NO: 906076 - DNA, 120 bp, Artificial Sequence
  ENSG00000226200_96 (sequence is synthesized)
gaccatatttttggtgtcgagtctaagtcgtctttgctgagtcctacatcatgaagattttttcttactaaaatttgatagttttaaatgttctctatttaagtccgtgagttattttga

SEQ ID NO: 906077 - DNA, 120 bp, Artificial Sequence
  ENSG00000226200_97 (sequence is synthesized)
gttaatttttgcataaggtataaatcttaggttgaggctcactttttaatcttaaggattgctcagcatcatttattgaaaaggctatcttccctccattgaatttcttttgtacctgtg

SEQ ID NO: 906078 - DNA, 120 bp, Artificial Sequence
  ENSG00000226200_98 (sequence is synthesized)
tcaaaacatcagttgcatatatttgtgtgtatcaatttctgggtcttctgttctgttcagtggatctatgtgtctatttctctgccaataccatatagttttgactatagtagctgtata

SEQ ID NO: 906079 - DNA, 120 bp, Artificial Sequence
  ENSG00000226200_99 (sequence is synthesized)
ataagtcttgaaacccttgaaaccaggtaagactggtccctttcatattagccttccttttcaaaattgttttagctattctagttcctttgcttttctgtatacattgtagaatagtgt

SEQ ID NO: 906080 - DNA, 120 bp, Artificial Sequence
  ENSG00000226200_100 (sequence is synthesized)
tgtctatatctatttttaaaacttgctggaatttttttttaagagacagagtcttgcactgttggccaggttggagtacaggggtatgatcatagctcactacagcaccaaactcctggg

SEQ ID NO: 906081 - DNA, 120 bp, Artificial Sequence
  ENSG00000226200_101 (sequence is synthesized)
ctctagcaatcttcctgcctcagtctcccaagtaggtagaactacatgcaactgccactacaatcgtatttaaaagtaaagttaaaaaaattttttttgagagaagatctcactctgttg

SEQ ID NO: 906082 - DNA, 120 bp, Artificial Sequence
  ENSG00000226200_102 (sequence is synthesized)
actagtctggtcttgaacacctagcctccagcaatcctcttgcctcccaaagcactggaattgcaagagtgagctaccaggcccaaccagtatgttatgtgtgcagttttttgtagatat

SEQ ID NO: 906083 - DNA, 120 bp, Artificial Sequence
  ENSG00000226200_103 (sequence is synthesized)
tatttattatgttgaggaaactcccctctattgccatttttctgatagtttttaagatcattcatgggtgttgaagtttgtcagagtctttctgtatccattgattgttatgatcaagaa

SEQ ID NO: 906084 - DNA, 120 bp, Artificial Sequence
  ENSG00000226200_104 (sequence is synthesized)
ttttttctttagcctgttaatacgatgtattaaatagcttcattttcaactactgagccagcctgaaataaacctcgcttggtcatgatatattattacatatgctgctgaattctattt

SEQ ID NO: 906085 - DNA, 120 bp, Artificial Sequence
  ENSG00000226200_105 (sequence is synthesized)
tctcttttactggtcttttggctggagagagtaggcttttgttggggctttacttgtacgtgcacattgttatttctgggttgtcagcctccttctctccaagtctgggatatatgggac

SEQ ID NO: 906086 - DNA, 120 bp, Artificial Sequence
  ENSG00000226200_106 (sequence is synthesized)
aaaaacataatccagggagcccaccaccttgttagactttgagtccctagatccctaggtggtctggcttctttttttcacctttgaaaatcttatgtttgttttatacataatgttgag

SEQ ID NO: 906087 - DNA, 120 bp, Artificial Sequence
  ENSG00000226200_107 (sequence is synthesized)
agtttttcgttgttcttagtggcagaagtatagaaagatactccatcttctcaaaaatagaagttcagattatgttttgaaaggcactgtaggcaggccagggaaggcttgtaaaaggct

SEQ ID NO: 906088 - DNA, 120 bp, Artificial Sequence
  ENSG00000226200_108 (sequence is synthesized)
actgcactggtccaggtgaggggagttagtctggtagaaggctgtttcttccaccattctcccctcacattccactgccccatttgcatggagctggggttctactaccccagtagggca

SEQ ID NO: 906089 - DNA, 120 bp, Artificial Sequence
  ENSG00000226200_109 (sequence is synthesized)
gcaagagagaaggagcaggcaatatcttggagcattacaccatgataaagggacaccaataccctccagatgctagctgtttctttctagagcttttaaacattctccttcagcagaaga

SEQ ID NO: 906090 - DNA, 120 bp, Artificial Sequence
  ENSG00000226200_110 (sequence is synthesized)
aataagtcactcctgaaagcatcctaacaatgtgcatttctccaaagtttccttaacacttcacatttaacatgactccaggtataagcaacattaaacaagtcatatcttatgttacaa

SEQ ID NO: 906091 - DNA, 120 bp, Artificial Sequence
  ENSG00000226200_111 (sequence is synthesized)
cttgagtgaaactttaatgatgctgaatttgctaatttgctctggtataatgtatttcctgtttataatcccttttggctaatagcactaatcaacagaaaacactgacagactgcacaa

SEQ ID NO: 906092 - DNA, 120 bp, Artificial Sequence
  ENSG00000226200_112 (sequence is synthesized)
tggcaacagtaattctggacagagatagttttattatctacagatgaatccatgtttctaaaacattatttactataatgtaaaatatgggttgggcgtggtggctcacacctgtaatct

SEQ ID NO: 906093 - DNA, 60 bp, Artificial Sequence
  ENSG00000226200_113 (sequence is synthesized)
gcagatcacctgaggtcagcagttcaagccagtggtgcatgcttgtaatcccagctactt

SEQ ID NO: 906094 - DNA, 61 bp, Artificial Sequence
  ENSG00000226200_114 (sequence is synthesized)
taggaggacctgggcaacagaaggagactctatctcaaaaaataaaaataaaaataaaaat

SEQ ID NO: 906095 - DNA, 120 bp, Artificial Sequence
  ENSG00000226200_115 (sequence is synthesized)
aaaaataaaaataaaaataaaaataaaatgtagtagataaaggtcataatttctatgcaccaaagcttttataggaggcctgtattttagcaatcaacctgtccttattctgttcaaatt

SEQ ID NO: 906096 - DNA, 120 bp, Artificial Sequence
  ENSG00000226200_116 (sequence is synthesized)
tctgttcaaattcaagggcacttgaatcactttagatggtgtcacctacattgggaagcaatcacagtatagatattttttcttattatgtttgcaaaataaacttcacaaaattgtcta

SEQ ID NO: 906097 - DNA, 120 bp, Artificial Sequence
  ENSG00000266664_0 (sequence is synthesized)
catttcacgtgcattgttttagtaaacagacacaaccttggcttcaggtcttttttgttttctgtcacccaggcggagtttgcagtgagctgacatcgcatcactgcactccagcctggg

SEQ ID NO: 906098 - DNA, 120 bp, Artificial Sequence
  ENSG00000266667_0 (sequence is synthesized)
atgcttaccaaggaggggctcttgtcggctgtgggaggggcatctgcttcccatggctgatgagaagattcaatgcaggcagtaataatggcaattctggttgtttctgtttattgaatg

SEQ ID NO: 906099 - DNA, 120 bp, Artificial Sequence
  ENSG00000266667_1 (sequence is synthesized)
ctcactatctgccaggcactgctctcaaccagttagtgtgtatgacttcaatcaatcgtcacaaaacctggatttgatgtagaaagagctgcagaaggcatctcatccatcattggcata

SEQ ID NO: 906100 - DNA, 120 bp, Artificial Sequence
  ENSG00000266667_2 (sequence is synthesized)
caccgtgattttcatgctactctctagccatacacatcagtttgcaaattcaatcttatgaaaaggagtttatttattctctaagaaaatggaattgtgatgtggatgaggtgtcatctg

SEQ ID NO: 906101 - DNA, 120 bp, Artificial Sequence
  ENSG00000266667_3 (sequence is synthesized)
atggtggttcttctgctacatggtccagactataaggcagaattacataaggatattttaggcacctgagacacagtgaccaacagatgacgtctactatgatggtgacaacgacaacat

SEQ ID NO: 906102 - DNA, 120 bp, Artificial Sequence
  ENSG00000245750_0 (sequence is synthesized)
gggagaggagggaacagggattagtaaggaagagggctaagagactgccaaaggtctccctgttttgccagggttctggctggtgggaagctgggccagggaggtagggacaggagtaat

SEQ ID NO: 906103 - DNA, 120 bp, Artificial Sequence
  ENSG00000245750_1 (sequence is synthesized)
caccctctatgattgcagggcactctacagtgtgcagatgccttccacttcttccatctgccctgtctctccaagaacccctatggccccggtctcagaacagagctgagtgcagaaatg

SEQ ID NO: 906104 - DNA, 120 bp, Artificial Sequence
  ENSG00000245750_2 (sequence is synthesized)
aaaatctatggctctgtgttccaaaacgatgaagaatttcaagatggtggcagtggtaaaatctttctccaggaaaaatctgtccttggcccaatgtgtaaacacttgctgaggtactgt

SEQ ID NO: 906105 - DNA, 120 bp, Artificial Sequence
  ENSG00000245750_3 (sequence is synthesized)
gcccaatgtgtaaacacttgctgaggtactgtggagcttcataatgctgatgatattgatgatgatgataagtatataagcttcacattaggacagtttttgtttttgtttttttgagac

SEQ ID NO: 906106 - DNA, 120 bp, Artificial Sequence
  ENSG00000245750_4 (sequence is synthesized)
agtggcaccatcatggctcacagcagcctcgacctcccaggcttaagcgatcctctcacctcagtctaccgagtagctgggactacaggaacttggaataacttgcagtgtcttgcagta

SEQ ID NO: 906107 - DNA, 120 bp, Artificial Sequence
  ENSG00000245750_5 (sequence is synthesized)
ttgtgaaaccagcaacttgttcacaattcttctgaatttcttgggaaatttgaagtggagtacctgtaccaacatgaaatgacacgaatttaagtgacgctcaacaacgaaaagcaaaaa

SEQ ID NO: 906108 - DNA, 120 bp, Artificial Sequence
  ENSG00000245750_6 (sequence is synthesized)
tttaaaaatatacaatgcctccaaaatcaggtgtcattaatgaaaattctgaagaaatgccaccggacatagccaacgcacctacgctgttgttattcatttcctgcttttcacagaaaa

SEQ ID NO: 906109 - DNA, 120 bp, Artificial Sequence
  ENSG00000245750_7 (sequence is synthesized)
caattttgttgcatggaagatcgtgaacttcaaagggcagaggggaaactgtcccttggcctctacccctccaaggccccacttttttgtcaacactccttggacgcagcagaagtatga

SEQ ID NO: 906110 - DNA, 120 bp, Artificial Sequence
  ENSG00000245750_8 (sequence is synthesized)
acataatatggtcctgaatgaggctgagtctttgggcgcagaagacccgggttaataaaaataggaaggtaagaaaagaaaagaaaaatcaagacacatcataggactaaattcctatta

SEQ ID NO: 906111 - DNA, 120 bp, Artificial Sequence
  ENSG00000245750_9 (sequence is synthesized)
tttatccactcaggattgaccacccctttgggccagatagttgtacccccatgtaccaggtgggcacatgaagacacaagaagtgctgtgatggttcattttgcacgtcaccttgcgtgg

SEQ ID NO: 906112 - DNA, 120 bp, Artificial Sequence
  ENSG00000245750_10 (sequence is synthesized)
agtatgccaactcattgtttggtcaaacactagtctggacatggtggtaaaggtattttttagatgagattaacacttaaatcagtaaagcaggttacccaccatactacgggtgggccc

SEQ ID NO: 906113 - DNA, 120 bp, Artificial Sequence
  ENSG00000245750_11 (sequence is synthesized)
tgtccaatcagttgaaggcattaagaacaaagattgaggtttcctaaagaagatggaattctccttgagactacaacatagaaaccctatctgagtttccagcctgttgccctgtggaat

SEQ ID NO: 906114 - DNA, 120 bp, Artificial Sequence
  ENSG00000245750_12 (sequence is synthesized)
tcaaactcaggactccggtctatgacattaaccctcacttaacttttcagcctgccagcctgccctatggatttcggacttgccagccacacaattccttaaaataaatctctccgtctc

SEQ ID NO: 906115 - DNA, 120 bp, Artificial Sequence
  ENSG00000245750_13 (sequence is synthesized)
attataggcgtgagccaccgagcccggccagaactactacaatttttttagggtcatttggtcctctctctcaaaagtgcgcttaccctctatccaggaatttcatttgtaggaacctat

SEQ ID NO: 906116 - DNA, 120 bp, Artificial Sequence
  ENSG00000245750_14 (sequence is synthesized)
tctatccaggaatttcatttgtaggaacctatgctatgtacaatttcactgaagtattgcttgtattagaaaaaaagtatggatgataggcaggttgaataaatgttaatgttttcatgt

SEQ ID NO: 906117 - DNA, 120 bp, Artificial Sequence
  ENSG00000245750_15 (sequence is synthesized)
agctatgtataggaatgccgctatggaaagacatccaggacaccttgttaagtgaaaaaagacatgccaccattagggcttcatttccctgcagtcttctttaaataccaaaactgccct

SEQ ID NO: 906118 - DNA, 120 bp, Artificial Sequence
  ENSG00000245750_16 (sequence is synthesized)
gggaaggataagacatcagtttcttcatacttcagagcaaatgggattgattcccaggacctcctttctgtggactgggtttttgcctcctcaccaagagactgggctccctgggcgagc

SEQ ID NO: 906119 - DNA, 120 bp, Artificial Sequence
  ENSG00000245750_17 (sequence is synthesized)
agaggctgctgggttcagtatctgaacacttttgctaaaggtctctggaaagctccctgtgttaattctcgatgagactacgtctgtgccggccgcttcctgagcctccttccatgtgca

SEQ ID NO: 906120 - DNA, 120 bp, Artificial Sequence
  ENSG00000245750_18 (sequence is synthesized)
taggcctgctgcatgctggagacctgcggcacagctgccaagtgccccgtgtggttctgtgatcttgggacagtcacttcctctctgtggttgtcagtcttctcatccctaagatggaat

SEQ ID NO: 906121 - DNA, 120 bp, Artificial Sequence
  ENSG00000245750_19 (sequence is synthesized)
aaaaaggcctacctcattgggctcgtgtgggtgaggagaactgaagagtctgagagcgcggcacgagccagaggctacggaaaacactgccctcctacactccaccttggagagacccag

SEQ ID NO: 906122 - DNA, 120 bp, Artificial Sequence
  ENSG00000245750_20 (sequence is synthesized)
gagaccctgaaaggaagcactaaagaaatgaagacagaggaataccaggagagaaaggaggtccagttagacctaaaggtgggcaagaagaagaagaagaggagtttggatgcttcatct

SEQ ID NO: 906123 - DNA, 120 bp, Artificial Sequence
  ENSG00000245750_21 (sequence is synthesized)
ccatctgctaaactggatctatgatgacagaagccgaggaatgtgaggttcatctagagagttcttgtgaattttccaagggaggcacctgttgaattcaggcatcggcatgtgacttga

SEQ ID NO: 906124 - DNA, 120 bp, Artificial Sequence
  ENSG00000245750_22 (sequence is synthesized)
tttggtcaatgaaatgtgagagaagtgacatccactttgaggcaggcactttccgagttgccccgacggccactctccatactgctgccagaagaaccttgaaatatcgctctttttaat

SEQ ID NO: 906125 - DNA, 120 bp, Artificial Sequence
  ENSG00000245750_23 (sequence is synthesized)
gggctgctgggaagatacaatgttggcaaacagggagctggttccaggaaagaagggcacatgagcaaacatgatggcccctttatgagaggtaatttactgaaatgcacagcgattacc

SEQ ID NO: 906126 - DNA, 120 bp, Artificial Sequence
  ENSG00000245750_24 (sequence is synthesized)
tgctcacccagccctgatgtaattaaaaatggcaggctaggggctctgtttcccccggctctggcagagaaacctgggtttcgacttgtgaagcttgaggttggatgtgggaattggctt

SEQ ID NO: 906127 - DNA, 120 bp, Artificial Sequence
  ENSG00000245750_25 (sequence is synthesized)
catatatacatatatatatgtatgcatctatatatttatatctaatctcgtattgcttattggttctgtttctctgtagaactctgcctaatacagctgaagatgtattctctttagaaa

SEQ ID NO: 906128 - DNA, 120 bp, Artificial Sequence
  ENSG00000245750_26 (sequence is synthesized)
agttcatataggtcagtgacccgggctcctagcctccctgtgtagtggactctgcctccagtgcttgagctgagagttttcacgtgagaagcagtggctggaagttgtactcctaggagc

SEQ ID NO: 906129 - DNA, 120 bp, Artificial Sequence
  ENSG00000245750_27 (sequence is synthesized)
atgcctccacgcctctccatctcctcatgaagatctctctccagatagagaccatttcctccctagaggaatccttgtactatccgtaggtgagaacacttcacctcattacctggatgt

SEQ ID NO: 906130 - DNA, 120 bp, Artificial Sequence
  ENSG00000245750_28 (sequence is synthesized)
ggagtgttgaagctggaagggatcccagagatctggaaactccccaggagtttggatgcttcatctctgctgagacccagtgcctggcactgaaggtgctcaggaaataccttctgaatg

SEQ ID NO: 906131 - DNA, 120 bp, Artificial Sequence
  ENSG00000245750_29 (sequence is synthesized)
ttttgtttggcgcagttttctgtgagagagcagaggtgggagatgaggggacctctgccccagtgtttctgcatccaagctccagccttgttgaagtaagtggtcattgaatgctgctgt

SEQ ID NO: 906132 - DNA, 120 bp, Artificial Sequence
  ENSG00000245750_30 (sequence is synthesized)
ccagaaggggattctctctcctcggctgcttcctgagtaataatcaaggccaagatggagtctctgcaattccaaatacatcctgctctacctggatcactgccttgagctgggtggaaa

SEQ ID NO: 906133 - DNA, 120 bp, Artificial Sequence
  ENSG00000245750_31 (sequence is synthesized)
tagcataccttgagatctactcagaaatggcagactgggagagatggcactcccacttattccacgtgctctcctacacttcccagcctcctaggtgagggctgtgtggcttgttctgac

SEQ ID NO: 906134 - DNA, 120 bp, Artificial Sequence
  ENSG00000245750_32 (sequence is synthesized)
caacgcaggcacaccttggggatatgcaggttccattccagaccacccccaacaaaatgatgaaatggagactcctggagacaaagcagaaaggatgcttggggcggattgcctaggatt

SEQ ID NO: 906135 - DNA, 120 bp, Artificial Sequence
  ENSG00000245750_33 (sequence is synthesized)
atattccatctccagcacttaccagctgtgtgatcttgggcaagtggtttaccttctctgtgcttcaagttgctggagaaaggtggggagaaaaataagagctggaaaacacatggccct

SEQ ID NO: 906136 - DNA, 120 bp, Artificial Sequence
  ENSG00000245750_34 (sequence is synthesized)
aaacagagccaacaggctgattgcaggcccaccctcagaggctgggcccagggcacctctcagcaggcaagcagatcccctgggggaaactcagagcggcagaactccttcacccaaact

SEQ ID NO: 906137 - DNA, 120 bp, Artificial Sequence
  ENSG00000245750_35 (sequence is synthesized)
gtgcccggcagcagatgaactttcaatcggagcaatgcgaaatgcagaaatgataatgcctcacaagctggttgtacagattgaataacaatgtgaacagagcaccgagtataatccctg

SEQ ID NO: 906138 - DNA, 120 bp, Artificial Sequence
  ENSG00000245750_36 (sequence is synthesized)
aagtcaggagctgattagtggttgaaggcagctgatctgtttcgaatcctgtgtgtccggagaggccaacgctttcattagccagcaggaatgggctggggcgcgtttgtagttgggaat

SEQ ID NO: 906139 - DNA, 120 bp, Artificial Sequence
  ENSG00000245750_37 (sequence is synthesized)
agcccctggttggacttgcagattgggcacagccctggacgtatactacaggtgctcatcaaggcttgcctcatctgtttaccctccaggtcatgcccctttctacctctacaccctgtt

SEQ ID NO: 906140 - DNA, 120 bp, Artificial Sequence
  ENSG00000245750_38 (sequence is synthesized)
ctgggcttccagcttccaagccttctacctgtggaatgcttggtccaatgtctggggcacccactcttactccaaactcctccagatctgcagagtggcccagcatattctcttcttgaa

SEQ ID NO: 906141 - DNA, 120 bp, Artificial Sequence
  ENSG00000245750_39 (sequence is synthesized)
tctccatactgctgccagaagaaccttgaaatatcgctctttttaattaaaaagcaaaactcttcaattgtttttgttgcatttaaagttcaaacttcttaccacggagtgaaaggcccc

SEQ ID NO: 906142 - DNA, 120 bp, Artificial Sequence
  ENSG00000245750_40 (sequence is synthesized)
acacaattggccctgtcttcttctccaacttccatttttctttggtccaccgtgttctagccgcatgggccctgtcttgattccttgtacatgtcaagcttactcttgctccagagcctg

SEQ ID NO: 906143 - DNA, 120 bp, Artificial Sequence
  ENSG00000245750_41 (sequence is synthesized)
tgtggtagttgttccctctgcctggaatggccttccctagaacctgccttggctggttcttcttgctattcaaacctcagctcccacatcacctcctgtgttaggcctccctggaccact

SEQ ID NO: 906144 - DNA, 120 bp, Artificial Sequence
  ENSG00000245750_42 (sequence is synthesized)
ctaattaaattagtactggagacatcagtccacctggcttcaggggccaggccttcctcttgcagcctagaggctctttgcagactgctcaaagctccctttgcacaactcaacctggca

SEQ ID NO: 906145 - DNA, 120 bp, Artificial Sequence
  ENSG00000245750_43 (sequence is synthesized)
gtggggccttactttctatttttatgatctcagggatgtctagagacctcgttggcctggctacagtacatcctaaccgggcattgagttggaggaactcaggagcttataatctggcct

SEQ ID NO: 906146 - DNA, 120 bp, Artificial Sequence
  ENSG00000245750_44 (sequence is synthesized)
agctcctccaagttagtcagttaccaagtggagaagagaagccctttaccattgaatttttaattgtactggaaactgcctaaccctttggtagaacaataaagggaaatttggtgactt

SEQ ID NO: 906147 - DNA, 120 bp, Artificial Sequence
  ENSG00000245750_45 (sequence is synthesized)
ggtctagaggcctggggcaagtagcaacagagatgaggttagaaagatttttaacatgtgggctttcttttgtcattaaaagagaaaaacaagctcttacaatgtttgaaggaaaccgtc

SEQ ID NO: 906148 - DNA, 120 bp, Artificial Sequence
  ENSG00000245750_46 (sequence is synthesized)
atgcaatttccaagtagttattggattctgtctgtgaccaagacattgaaggacttgggctgagctttggggccactggagtatgaagaggccccttttgtcatggagctgacttctagg

SEQ ID NO: 906149 - DNA, 120 bp, Artificial Sequence
  ENSG00000245750_47 (sequence is synthesized)
aagggagacagggcagaggcaaagggcgcagggactacaccatggagtgccatgctgcatcaggcactgtgtttgggtttccatacacacagagcaattaacacacagcaggctgtgtgt

SEQ ID NO: 906150 - DNA, 120 bp, Artificial Sequence
  ENSG00000245750_48 (sequence is synthesized)
acctggacccaaggggctggccaggcagagaggtctgggactgcccaggaaggggagcaggtgatgtctgaggagcagaggggatgagaaaaggcttcctgcaggagatggacttggaac

SEQ ID NO: 906151 - DNA, 120 bp, Artificial Sequence
  ENSG00000245750_49 (sequence is synthesized)
tggctccaggtgcaccgtgggctctgaacacacactactgaaataatgggccatgaaattcattcctccagcactattctgcttctctgtcacttctcctttccccatcatttccttccc

SEQ ID NO: 906152 - DNA, 120 bp, Artificial Sequence
  ENSG00000245750_50 (sequence is synthesized)
cggctggagagcactcaggaatgccttgctgtgcccagtcaggcctctggagtccaccctacctagctgatgtattattatcaccagcaaacacacaccagaggctgtatcttggctggg

SEQ ID NO: 906153 - DNA, 120 bp, Artificial Sequence
  ENSG00000245750_51 (sequence is synthesized)
aagcacattagcaccttggaagcccttcttggaaaaagtaaaagattggcatttgagcctcctcattgattcctttggatgaggcagaaaaccgctgcccagaaggatgaaggggtgaag

SEQ ID NO: 906154 - DNA, 120 bp, Artificial Sequence
  ENSG00000245750_52 (sequence is synthesized)
tggaaaaacatgggctggcttcaaagtggagcacaggaggctaggaatagttctgctttgtgaacaaagtcgtgcaaaaggcagagagagagagagagagagacaaagatagagagcgca

SEQ ID NO: 906155 - DNA, 120 bp, Artificial Sequence
  ENSG00000245750_53 (sequence is synthesized)
ggagagcgaggagggagggagtcagctttggctaatttgaattttgaattgccttgaaaatcaccgtgcagcagtatccaattctgcctttgatggtcgaaagaaaccagctgcttttat

SEQ ID NO: 906156 - DNA, 120 bp, Artificial Sequence
  ENSG00000245750_54 (sequence is synthesized)
tcctcttcaggtcttgttttccccccagcagtgaagcaaattaagcaaagaaacagtgaaagttgtagttggtataatatctcaggccaaggtcaggctaattgttggtgggaggggcgg

SEQ ID NO: 906157 - DNA, 120 bp, Artificial Sequence
  ENSG00000245750_55 (sequence is synthesized)
tagagacaagggacacactctaggtgttgatatttctcactcctgctccattctgctccccataatgtcactttggcatttccaaacacgaccaccttggcaggctttctttacaaacta

SEQ ID NO: 906158 - DNA, 120 bp, Artificial Sequence
  ENSG00000245750_56 (sequence is synthesized)
aggcccttgttctaaccaccagcattcctatactatgccatgcattcgggcaggtaagatatggtccctttgcccaagtcgggctaaaggagtggcaaaccttgaaacacaccccaagat

SEQ ID NO: 906159 - DNA, 120 bp, Artificial Sequence
  ENSG00000245750_57 (sequence is synthesized)
atcccataatgctgttcttaatttgcaacatcagcagggcaggtatttgctagtgagcgtagcctcattttttcctgctgcctcatttttatcaactcagttgtaaaaattaatatcatg

SEQ ID NO: 906160 - DNA, 120 bp, Artificial Sequence
  ENSG00000245750_58 (sequence is synthesized)
gaggcttccttgaaagatatgaaatgcgtacttctccctagacagtctaaaatgtacctttgtatcaaatttaagcagccatctgggaagcttgcctgtgctgttttgggccctggtaga

SEQ ID NO: 906161 - DNA, 120 bp, Artificial Sequence
  ENSG00000245750_59 (sequence is synthesized)
gctcttttgaatgtgtggcatgctggcaggatgccagctgcctgagaggaggaaccgggagtgcttgaccccgtgatgggtagaagatggaaaaattgtcatttcaaaacagcaggtggt

SEQ ID NO: 906162 - DNA, 120 bp, Artificial Sequence
  ENSG00000245750_60 (sequence is synthesized)
tcctctcttgatagaggtggagattttcaccttttgggcaaacatttcctttgtgtggttgaaattatcagaatggacccttggggacaactgggcagtagtctgaatgctgatgtttta

SEQ ID NO: 906163 - DNA, 120 bp, Artificial Sequence
  ENSG00000245750_61 (sequence is synthesized)
gatgggaatatgggggattaatttgttgcgtgtggttatgccagagcaaggtctctcctttttgtctccttctctcccttccttccttgtttttgattgtgctctgctcacctcctcctg

SEQ ID NO: 906164 - DNA, 120 bp, Artificial Sequence
  ENSG00000245750_62 (sequence is synthesized)
gtccacacaccttagtaagtggtcattgaatgctgctgtccagaaggggattctctctcctcggctgcttcctgagtaataatcaaggtaaaagtgatgaagtggaaggggcgggtaatt

SEQ ID NO: 906165 - DNA, 120 bp, Artificial Sequence
  ENSG00000245750_63 (sequence is synthesized)
ggacctattttgaaaactcaagattctgtcctgaccattcctaggcttgacacatcttcctttcccttaaaagcaaccccaggctagcccaaagaaggcctggaagaggtaaatgtaatt

SEQ ID NO: 906166 - DNA, 120 bp, Artificial Sequence
  ENSG00000245750_64 (sequence is synthesized)
ctggtttggccacctggattcttttgttggattgacctgaccttaggtcattaggatagtgaccacttgtcttagtacacagctcattcagcaccctattgtgggccacaacaacaaaag

SEQ ID NO: 906167 - DNA, 120 bp, Artificial Sequence
  ENSG00000245750_65 (sequence is synthesized)
ttggggatataatggatctctccatgttttatgaaaatgcttttgtcactcttgcaatggaaacttctggattaaagatgtacatatgagtaggagattattgggaaaagggtgatgtta

SEQ ID NO: 906168 - DNA, 120 bp, Artificial Sequence
  ENSG00000245750_66 (sequence is synthesized)
catttattggaagggcagttgaggaaggacattgaccatggcacccacagagggaataccttagcctgtacttgtacttagaggtacagggaagggagggacactgatgaaatttgtctt

SEQ ID NO: 906169 - DNA, 120 bp, Artificial Sequence
  ENSG00000245750_67 (sequence is synthesized)
tcagaaccgcttctggagtcttcctcccaagagcgaggcactggtgctgctctgtcaaactgttcaagtgccttcatgtaactgcttgctgtctctgctggcccctcccactggctccaa

SEQ ID NO: 906170 - DNA, 120 bp, Artificial Sequence
  ENSG00000245750_68 (sequence is synthesized)
ccatggcttggtccccactccccttaaccccagctcctgcacttcccatgcaaagcacctgccagcacctctggataactttcccaaccacattctcatactatttgctcaatcattcca

SEQ ID NO: 906171 - DNA, 120 bp, Artificial Sequence
  ENSG00000245750_69 (sequence is synthesized)
tggggcaagagaatgtcacccgactaggagtgtagacagacaggacaagttggacagacagccctcaggcagaatctttgaaaacagggactccattattggcactgaaaaccctaagtc

SEQ ID NO: 906172 - DNA, 120 bp, Artificial Sequence
  ENSG00000245750_70 (sequence is synthesized)
ttaccacccatggagaggccatattggagccaatcaacctgtgcccctagctgatgtcccatttggggatccccaacaactgtggacaatacttcctttctaggggcaccatatgcatcc

SEQ ID NO: 906173 - DNA, 120 bp, Artificial Sequence
  ENSG00000245750_71 (sequence is synthesized)
cagggactgtaattgtgaattgtgtggaagccagatgttacattgtctccctactgtaaacacagtgaccttcccagacagataactgagtcattatttatgggtaccctatgaactgtt

SEQ ID NO: 906174 - DNA, 120 bp, Artificial Sequence
  ENSG00000245750_72 (sequence is synthesized)
gggacccctgcaattagaaaaggaggcatgaaatttgaccctgacttcagccgaccccaccgtggcctgggacctggaaagcattcatgtcagcctcccctcactgaccagggttgtgat

SEQ ID NO: 906175 - DNA, 120 bp, Artificial Sequence
  ENSG00000245750_73 (sequence is synthesized)
tgacgacaatagaattaccctacactttttccttgtaggccaagatggagtctctgcaattccaaatacatcctgctctacctggatcactgccttgagctgggtggaaaggtcagtaga

SEQ ID NO: 906176 - DNA, 120 bp, Artificial Sequence
  ENSG00000245750_74 (sequence is synthesized)
caaatgtatccacctggctttctaacgtagacccaggttgttgatggcatccgttcacctggctggatgcaggaccctggggaggtcatggctgaagccagtgctgcaggttagtcttgt

SEQ ID NO: 906177 - DNA, 120 bp, Artificial Sequence
  ENSG00000245750_75 (sequence is synthesized)
ctcgctgcatggatcctgttggtagtaaccttaattaaatgctataggagactaactaaatcgattttgtccccccttctattggtcaaattaatcagagtggctgatagagtgatgcat

SEQ ID NO: 906178 - DNA, 120 bp, Artificial Sequence
  ENSG00000245750_76 (sequence is synthesized)
tcatgggaggatttgccagaagctaaggctataaaaaccagggctagagttggtttgagacaattctccgtgggtctttcaagtttctgcatggtttgtgagcagagctactgactgcct

SEQ ID NO: 906179 - DNA, 120 bp, Artificial Sequence
  ENSG00000245750_77 (sequence is synthesized)
ttgttccagatgatctttccaaggatgttgtactacaagtatgagagatagtatctctctctgaaaccaagagcaggcaggcttagtgttccttaggaaagattcaccttccctccactt

SEQ ID NO: 906180 - DNA, 120 bp, Artificial Sequence
  ENSG00000245750_78 (sequence is synthesized)
ggggtttctctcctgtagtgcaggtgtgtgcaggagccttgtggcccttcctatgctgctctgtaagatttggagcttagggagccaatgcaaaaaagcactgcttctggatcctgctac

SEQ ID NO: 906181 - DNA, 120 bp, Artificial Sequence
  ENSG00000245750_79 (sequence is synthesized)
ttctgtgagtcatgaaatctttgatctctgacccaggagtcttgtgtcttctgctagcctccaagcagggtaaagtcatctcagacacctcacagttcttgatcaccatgtctggccaga

SEQ ID NO: 906182 - DNA, 120 bp, Artificial Sequence
  ENSG00000245750_80 (sequence is synthesized)
accatgcttgagtgtggcatgtctgtgaacatcatccatcgtgtatgcatcataggaagataaaagtcagccgctcttgacatcaccagaccatactggatgataggtgtgggggtcacc

SEQ ID NO: 906183 - DNA, 120 bp, Artificial Sequence
  ENSG00000245750_81 (sequence is synthesized)
acccaccactttccatgcaggcgatcagttctacataaagatccaggaggctggctggagagggctggaggggcctcaggagtcagaccatgtgggtttctatcatgatcctccataccc

SEQ ID NO: 906184 - DNA, 120 bp, Artificial Sequence
  ENSG00000245750_82 (sequence is synthesized)
tacagcctctgttttcccatctttcaagcagggataacaacagcacctactttggaggggttttgtggggattcaatagtatggctccgcccaggaaagccctgatgaaggtagaacctg

SEQ ID NO: 906185 - DNA, 120 bp, Artificial Sequence
  ENSG00000245750_83 (sequence is synthesized)
ttatttgtgtttaccattgttattatcatccatatcattattctgcccacctggacttattctttgtaaggcttgcctctccctctgaacagcctgtatataatctaagtctatcttttc

SEQ ID NO: 906186 - DNA, 120 bp, Artificial Sequence
  ENSG00000245750_84 (sequence is synthesized)
tgcaccaaaattggccaatttatgtggcacccctcaccaccatcactggatgtgcctctaatctaattagactaatttcaatttcctggatttaattacttttaatttaattaatttaga

SEQ ID NO: 906187 - DNA, 120 bp, Artificial Sequence
  ENSG00000245750_85 (sequence is synthesized)
atgcagtatactaggtgattaattaggagacgttactgagggattcggaaggggaattgcagtatgtaagtgtttaaatattattgtggccatagccaccagttgtcactttacacagga

SEQ ID NO: 906188 - DNA, 120 bp, Artificial Sequence
  ENSG00000245750_86 (sequence is synthesized)
ggccgctgaggccctgggaggggcagagcttggagaactgggatgggacagggactcaaacagaagtctcctggcagcaagcacagagctctttcctttcactgcttttggcaactccca

SEQ ID NO: 906189 - DNA, 120 bp, Artificial Sequence
  ENSG00000245750_87 (sequence is synthesized)
ggggaggcaaagaagaggcagctgattccagtgaccagcaagttggaactaagtcatgaattgtgggaggtgagaacacacttggtcttttaatagagtgatattttactgggtttttca

SEQ ID NO: 906190 - DNA, 120 bp, Artificial Sequence
  ENSG00000245750_88 (sequence is synthesized)
tgtacatagtaaataaccataggtctccctctgagctatcacacacttctgttatttttcttttttgctacacacatttactgagtacctggaataatgaatagtcatcaccatcatcat

SEQ ID NO: 906191 - DNA, 120 bp, Artificial Sequence
  ENSG00000245750_89 (sequence is synthesized)
catcttaacaaacatgtatgtggtgctacatgccagatgttgttctgagtgcttttatattgattagctcatttaattgtcatcggagttaagtactgtaagtgaagtactgttgcttcc

SEQ ID NO: 906192 - DNA, 120 bp, Artificial Sequence
  ENSG00000245750_90 (sequence is synthesized)
attgtactattgcttccattgtctagaggactattgcttccattgtctacagtactattgcttccattgtctagaggagggatctgaggcacagagttagctctgtcaggaatatctatt

SEQ ID NO: 906193 - DNA, 120 bp, Artificial Sequence
  ENSG00000245750_91 (sequence is synthesized)
atttgtgttgtacaaagggacaagtcctagtgaatttcaggcttgtgccaggcaggtgggggagacagtctagggctgggccctttaggtcacacaggtttacctactccacctctgaga

SEQ ID NO: 906194 - DNA, 120 bp, Artificial Sequence
  ENSG00000245750_92 (sequence is synthesized)
ggtaataataacaccagcaaacacctgcagagccctgactgtgtgccaggtctgcttctaaatcatgttgtgtattgactctggacacacctgccctactcactactccctgagggtaga

SEQ ID NO: 906195 - DNA, 120 bp, Artificial Sequence
  ENSG00000245750_93 (sequence is synthesized)
ttgagctatggctttctccatatctctgtttgtcaatcaggacttgagactacagttctgatggacccttggaggcagagctgggccagaccctctatcctgagcgaatcctgcagcatg

SEQ ID NO: 906196 - DNA, 120 bp, Artificial Sequence
  ENSG00000245750_94 (sequence is synthesized)
agctagatccttcactctgaaatccagctccaattccaaggttactcatttaccaaatgagcccattgggcattttcagggctttgacccctgttctcttggaatgttgggttaggattc

SEQ ID NO: 906197 - DNA, 120 bp, Artificial Sequence
  ENSG00000245750_95 (sequence is synthesized)
aggtaagaagcctgtgtggtgtaggacttcactctgatgcatgagcaatgcctgctaggccgggaccctcttgcaaggagaagtaaagacacaagagctggcttcaatatattccctgtg

SEQ ID NO: 906198 - DNA, 120 bp, Artificial Sequence
  ENSG00000245750_96 (sequence is synthesized)
tggggactaggaccacagtgagactttcctctttataaatgaattttctaatagtctgagctgtcttagctgcaatgggcttgtcaacaggccatcactgggggtatccaaacagaaacc

SEQ ID NO: 906199 - DNA, 120 bp, Artificial Sequence
  ENSG00000245750_97 (sequence is synthesized)
gattgacaacaatttgctcacttggtcttctcttcctggaaggctcatctctatcctttttgtcagttaactcctattcaacttttaagactcagtccaggtgtcacttcttctggaaag

SEQ ID NO: 906200 - DNA, 120 bp, Artificial Sequence
  ENSG00000245750_98 (sequence is synthesized)
gcttccctgtaaaccccaacccagccccagactgggccagatgtcctttgtgttcccataatgtctcaggcatatctttatcattacacccactatatattgcaatgacctgcttatgag

SEQ ID NO: 906201 - DNA, 120 bp, Artificial Sequence
  ENSG00000245750_99 (sequence is synthesized)
tttgtctcctctaggttctgtctatgtcaccaccctcttcaataaccaggtgaggcagacatgatttccatttggaggatggagaaccgaggctcaggacctcgcccgtgcagccaagag

SEQ ID NO: 906202 - DNA, 120 bp, Artificial Sequence
  ENSG00000245750_100 (sequence is synthesized)
gagacaaagatggctaggtctggttcccaagcctaaagaccatgatctgtccagtgtggaacactgcaggcccccaagttctgtcatttgtaaagtcatgggcttgtgtgagtcccgagc

SEQ ID NO: 906203 - DNA, 120 bp, Artificial Sequence
  ENSG00000245750_101 (sequence is synthesized)
aatcaaagcagcagaagcaatgctcccaaggggtgcacgagggccatgtttggagccatgccagcttgccaatccttggcatactctgtacatagccagataactacacaagctcacctc

SEQ ID NO: 906204 - DNA, 120 bp, Artificial Sequence
  ENSG00000245750_102 (sequence is synthesized)
atctgcacaaactcactctctgaacacttctaaggtcaccgagaagtcagggaaaaatgagaaccaggacagtcaaagcctttgcctctcctgaagctatggggcttgttgccagagcca

SEQ ID NO: 906205 - DNA, 120 bp, Artificial Sequence
  ENSG00000245750_103 (sequence is synthesized)
aagcccctcttagcactcttattacttcatttaacaaacataaggagagcccggccctctgcttttaagggtggattccattactattaagacttctgcggcccctgaaagattaactca

SEQ ID NO: 906206 - DNA, 120 bp, Artificial Sequence
  ENSG00000245750_104 (sequence is synthesized)
acagtcacccctgtgaaagctgatccaagtggaaaatcgagttagaaaattccaccttcccttccctcacacctcagcagattaaggggaaggcctgatgctgagttatggggatttatg

SEQ ID NO: 906207 - DNA, 120 bp, Artificial Sequence
  ENSG00000245750_105 (sequence is synthesized)
ggaatgtgcagttgctggcttttaaacgctcactctttggaatgttggcaaccttgcttcctataaatcgttgctggtatttcttagcctttccttgccagcaacgcggaggcctgcaac

SEQ ID NO: 906208 - DNA, 120 bp, Artificial Sequence
  ENSG00000245750_106 (sequence is synthesized)
accttttccgtgcagtagcctgtgaaaatattgaagtcaggcccagaaaaacaccagcattgaaaggggaaactttgatgtttgctagttcttttcagacaactcttgccaaatcttaat

SEQ ID NO: 906209 - DNA, 120 bp, Artificial Sequence
  ENSG00000245750_107 (sequence is synthesized)
ttttccagtttacaagtaagggattctgaccatctgtctgctgtcaaccgatgtttgtttggatgaagattttatttttttctcccaatctagcactcctgttcttacaagtagtttatt

SEQ ID NO: 906210 - DNA, 120 bp, Artificial Sequence
  ENSG00000245750_108 (sequence is synthesized)
ggacttcataaatgtcagctttttgcaggcattttgtaagcagcttatgatttagtatttaatcaaaattgagcagtcagcgtctgtaatcaatctgaagcaggagtaacaatgagattg

SEQ ID NO: 906211 - DNA, 120 bp, Artificial Sequence
  ENSG00000245750_109 (sequence is synthesized)
aagcttaaaatgcaccaggaccacaatttatgtctcccaactatcgttgtaagaactaagtttgcacttgaaggtctggggtggggagatgatgcaggaaataaacacttattgagtacc

SEQ ID NO: 906212 - DNA, 120 bp, Artificial Sequence
  ENSG00000245750_110 (sequence is synthesized)
aaccattaagtggaacatggtgtctaggttacacagctcactcatctgctaatcactggggcacactgctggttattattacctgagaccctgaaaggaagcactaaagaaatgaagaca

SEQ ID NO: 906213 - DNA, 120 bp, Artificial Sequence
  ENSG00000245750_111 (sequence is synthesized)
gaggaataccaggagagaaaggaggtccagttagacctaaaggtgggcaagaagaagaagaagagagtgctttgcctgtagcatttgaggcaggcggctgggacactgaatgaagagcct

SEQ ID NO: 906214 - DNA, 120 bp, Artificial Sequence
  ENSG00000245750_112 (sequence is synthesized)
gggggaggcaggttcagcatgccaccgtttcctggtcatgaagatgccagctccagctccaagcaggtgacaaggctgggtggccaggggacatgggagtgtggttcgaggtctcagagc

SEQ ID NO: 906215 - DNA, 120 bp, Artificial Sequence
  ENSG00000245750_113 (sequence is synthesized)
attttaaaaaacttccgttgtctttctaccttggatttcaggagcaccagggtaatgttctaaacttctttgtgaggtttaaagtcttccctcccttggtctaaaatgttgaagtgggtg

SEQ ID NO: 906216 - DNA, 120 bp, Artificial Sequence
  ENSG00000245750_114 (sequence is synthesized)
gtggaacagagaggtgacatgaagatgagagttgagccagaggaataggattctccatctttggggacgtcatttaattttggaaacactcagtttctgtttaagcagtgtaaccatata

SEQ ID NO: 906217 - DNA, 120 bp, Artificial Sequence
  ENSG00000245750_115 (sequence is synthesized)
atttgttgaacacttttgaaggggtgaatgttaaattggatagcatgttgggaaaatgggcttaaactggagataaggtcgacctatgaataaagaagggattaggccacatagcggggg

SEQ ID NO: 906218 - DNA, 120 bp, Artificial Sequence
  ENSG00000245750_116 (sequence is synthesized)
tcaggggtggtaaataggtttcatacccatggtaattatggaagagccatcaggctttctggactgcattgtggaggggatggtgcagctgcttttgagcaccatggaagagtttcctga

SEQ ID NO: 906219 - DNA, 120 bp, Artificial Sequence
  ENSG00000245750_117 (sequence is synthesized)
ttgattagcaatgtctgctctagtctctgggaaggatggctgcacccttgcgggtattcaccattcctggattggatgtcttcaagagccttttcaattctatttttgaaataagaataa

SEQ ID NO: 906220 - DNA, 120 bp, Artificial Sequence
  ENSG00000245750_118 (sequence is synthesized)
cagtgcttttccaactgaatgtgtacacttgaatcttgtcaaaatgcagattctgaatcagaagtctgggctaaggcccaatagcctcaatttctgatgagttcccaggtgataccgatg

SEQ ID NO: 906221 - DNA, 120 bp, Artificial Sequence
  ENSG00000245750_119 (sequence is synthesized)
ctgctggtctgtgggccacactttgagcaacaaagacctaaggcagcatcctgaacctgggccagtgccccttcactgcaggctcatagcctgcagaagaacctgtatatatgctacttt

SEQ ID NO: 906222 - DNA, 120 bp, Artificial Sequence
  ENSG00000245750_120 (sequence is synthesized)
ccaaagatttttttccgcaggtcatttaagtgattcctccagacagccttttaatgtttgatagattatttcccgcccccatcacccagtttttttttcctaaatgtgcttttcaggtgc

SEQ ID NO: 906223 - DNA, 120 bp, Artificial Sequence
  ENSG00000245750_121 (sequence is synthesized)
agcaggtttaagtgcctagcccaagagctataaatggcagagctgagactcacatttaagtctttgcccttccccaggtggccctttgagcacctatctggcaggcctaattatagaggt

SEQ ID NO: 906224 - DNA, 120 bp, Artificial Sequence
  ENSG00000245750_122 (sequence is synthesized)
aatgttgtgagtgccctcagctcaaatggggcagctcttggagcagtgccaagggattgtactgatgctaaatatgccttcagatcacgtcagaagcctaagattgccttgtgaccccca

SEQ ID NO: 906225 - DNA, 120 bp, Artificial Sequence
  ENSG00000245750_123 (sequence is synthesized)
gctccaccattccagccagtcattaaggcaggcagacaacatcttacagtcttgggttcatgggagccttttttgttcttatgagggttttagagccagatagacctggatcagaatctt

SEQ ID NO: 906226 - DNA, 120 bp, Artificial Sequence
  ENSG00000245750_124 (sequence is synthesized)
cctggatcagaatctttccatgtcatttgaccttaagcaagttacttaatctcccaaattaaaatcccttcacctgtaaaaaggcacattcttggctgagcgcggtggctcacgcctgta

SEQ ID NO: 906227 - DNA, 120 bp, Artificial Sequence
  ENSG00000245750_125 (sequence is synthesized)
aatcagatgctgcccttgtggccagttgggttcccacccacctgattctggagccctggaccagagccctacgttcaccatgggaagagaccttgtgataagccactcctgaaggcatgg

SEQ ID NO: 906228 - DNA, 120 bp, Artificial Sequence
  ENSG00000245750_126 (sequence is synthesized)
cctaactctggacacaggtggacagtgggtcaccaccaggcttggccaccacccagatccccttggaccaggagatcaaggcttcgtgctccatcaaggacatgaaacaaaacaatgggg

SEQ ID NO: 906229 - DNA, 68 bp, Artificial Sequence
  ENSG00000245750_127 (sequence is synthesized)
gaaggaaggaaaaggtagaagagaaagagagagaggagacaaaggaggaaaaaggtggtagagaatga

SEQ ID NO: 906230 - DNA, 120 bp, Artificial Sequence
  ENSG00000245750_128 (sequence is synthesized)
gctgtgtgcatgtctgaccctgggcgtgaggaacaccagccaagtccttctggctgcggttaaaagggctcaccagcctctccctgaagtcttggcccgggagcctgtgtcctccaggta

SEQ ID NO: 906231 - DNA, 120 bp, Artificial Sequence
  ENSG00000245750_129 (sequence is synthesized)
gctgtgctgtggggagctggagaggactgaagagctgaggaggcgaaatgcagaaatgataatgcctcacaagctggttgtacagattgaataacaatgtgaacagagcaccgagtataa

SEQ ID NO: 906232 - DNA, 120 bp, Artificial Sequence
  ENSG00000245750_130 (sequence is synthesized)
tccctgaaacagcaaaccagaggtcccgtctggctggcatgaatggaagggcaaacgctccgaccaaattgctctgggaatgtcattctaattattggatcctgacccagcagcatgctg

SEQ ID NO: 906233 - DNA, 120 bp, Artificial Sequence
  ENSG00000245750_131 (sequence is synthesized)
ataagctctgggttggagacgccctatctcagaggagctccaaacctgctcaaggccttttcttgccctctgcaactttcctgccaagcaattagcctccaggggtatctgagagcggga

SEQ ID NO: 906234 - DNA, 120 bp, Artificial Sequence
  ENSG00000245750_132 (sequence is synthesized)
gactgggaggagcggggtccctcggggttgaagtggggagggctaacgggctggggatgccccctgttgtgtttccagggaaagcctgtccagattgccgttgccttctttaccttcagt

SEQ ID NO: 906235 - DNA, 120 bp, Artificial Sequence
  ENSG00000245750_133 (sequence is synthesized)
gtcagagttggggtccagcctgtattgtggggagtaggaaaagcttttcttgttgagccctgggcttctgttaggggttgaattatgtccctccccacactccacattcatatgttgaag

SEQ ID NO: 906236 - DNA, 120 bp, Artificial Sequence
  ENSG00000245750_134 (sequence is synthesized)
ccctaacccctagttcctcagaatgtaactgtatttggagatacagtctttaaagaggtcattacattaaaatgaggtcactggggtgggtccttatccagtaaaactggtgtccttaga

SEQ ID NO: 906237 - DNA, 120 bp, Artificial Sequence
  ENSG00000245750_135 (sequence is synthesized)
atggccaacgacaagccgaggaacagggtctcagaggaccccaaccctgctgacaccttgatctcgggctttcagcttccagcactgtggcaaaattcatttctactgtttaggcctccc

SEQ ID NO: 906238 - DNA, 120 bp, Artificial Sequence
  ENSG00000245750_136 (sequence is synthesized)
ggtctgtgacatgttgtcacggtggccactgaagactcagacagcttccttctagctctggttcttctaccggtgtgctttcaggtgctccggagggcccggtggcagggaaagccaggt

SEQ ID NO: 906239 - DNA, 120 bp, Artificial Sequence
  ENSG00000245750_137 (sequence is synthesized)
ctccaggctcctggcccagggcgtgtttaggaggcagggccttctctgacacaagtatgaggagcagagaggtttctcttcttcagtctccactaggtcctggcctccatggcttctata

SEQ ID NO: 906240 - DNA, 120 bp, Artificial Sequence
  ENSG00000245750_138 (sequence is synthesized)
ggcagggacctggccagggcattcaccagagactttgacagggagtccaggcccagaccccataggcagagccaggagccctgtgccagcttcccagggagcaccggggcccaacgtaga

SEQ ID NO: 906241 - DNA, 120 bp, Artificial Sequence
  ENSG00000245750_139 (sequence is synthesized)
gtcaagagctggcatcagcacaggtgcaaggtggggttgggaagggcatggcagcttgggggtctgcagtgcacaggtggcctggcatgaggtaggtgggccggcttgaaggtctagaag

SEQ ID NO: 906242 - DNA, 120 bp, Artificial Sequence
  ENSG00000245750_140 (sequence is synthesized)
atggatagacaccagagacttgtagtctatgtctccttcttgctgtcccctggatgtcacctcccctctgcccccagtgctgaactaacccccttcatcttttacttgggactccatcag

SEQ ID NO: 906243 - DNA, 120 bp, Artificial Sequence
  ENSG00000245750_141 (sequence is synthesized)
tgactcatcattgcttttggtgtgacttaccagcggccgctccgtctgcctcttccttcccctccagggtcattttgaacactcttccttcctgacaactaaacttttcactgtttccca

SEQ ID NO: 906244 - DNA, 120 bp, Artificial Sequence
  ENSG00000245750_142 (sequence is synthesized)
actagttcaggaagagaagaggaggtgggcgacagaagtagaggcagcgctctgagggaccttgggcaggtggaagccacaaaactggatggccatgagggcaagtggaaactccccagg

SEQ ID NO: 906245 - DNA, 120 bp, Artificial Sequence
  ENSG00000245750_143 (sequence is synthesized)
ctttgaggcaggcactttccgactggaactaacattccacatggaatgggaactgactttgagacactttctggataagtcactggactggagagagaaacttggagggcaaatgcccca

SEQ ID NO: 906246 - DNA, 120 bp, Artificial Sequence
  ENSG00000245750_144 (sequence is synthesized)
gctggactcccagagaataagctagcttgttgctgaagatggaaaccttctcacttttgctcctgagaggggagattagaaaaaaaaatagaaaggaaacaaaaaacagagaaaaagaag

SEQ ID NO: 906247 - DNA, 120 bp, Artificial Sequence
  ENSG00000245750_145 (sequence is synthesized)
atgccggagaactttgtcttcaaaccccacagccttctctttgcgctgagggcagggctactggtcgatgcaggaggaggaggccttggagaggtccctctgatgaggaagcccatccga

SEQ ID NO: 906248 - DNA, 120 bp, Artificial Sequence
  ENSG00000245750_146 (sequence is synthesized)
cctctacaccctgttgcattgcgggcatggcctccggaaaagtcaagcatggcgaaaggaagcgtggcccagagctggcacgccacaggcaaagggctggagacacacttgctgttcttt

SEQ ID NO: 906249 - DNA, 120 bp, Artificial Sequence
  ENSG00000245750_147 (sequence is synthesized)
tgggaaaagaggcatggtagtcaaacaataggattgaggagcatttgcagagtcagctgtcttctccagccacagcacgcatgttccaccctagctggggcagaactgtgggctggcctg

SEQ ID NO: 906250 - DNA, 120 bp, Artificial Sequence
  ENSG00000245750_148 (sequence is synthesized)
gctgtgagccttgtgggactacgagaagcctccagcttaggactcagagtctcagatgccccaggagagaggaggagactggagaggccagcacgcacagtgacttaatccaagaaggta

SEQ ID NO: 906251 - DNA, 120 bp, Artificial Sequence
  ENSG00000245750_149 (sequence is synthesized)
gatcggatattgacttggagaggtcttggagaaaggctgatgaaggtgatcgacagcctaaatctctgaagccgtctcctgatgcaacctctgacccaacaatctctgggtcttgctgtt

SEQ ID NO: 906252 - DNA, 120 bp, Artificial Sequence
  ENSG00000245750_150 (sequence is synthesized)
cccagagagaggaagaaattcattcacccaaggtcacagagctttcagcagagctgggacagacctcctctgactcccaggctggggcagtttcctccagggctcctcacccaaccacga

SEQ ID NO: 906253 - DNA, 120 bp, Artificial Sequence
  ENSG00000245750_151 (sequence is synthesized)
gttgttcttcggtgaccccaggcaccttcacagctccaaacatcaccaccaagagctgccttgacttttcagacgtcatcgagaacaataacaacaaaaaagcatgaaagaaaaaagaaa

SEQ ID NO: 906254 - DNA, 120 bp, Artificial Sequence
  ENSG00000245750_152 (sequence is synthesized)
gatggcggcagagcagggaggaaacttttgcttgagtttctctcttccagtgtgggcactatttgttatagttaaaaagtcccccaattctttgaccttgcttccaaaggtggagcccat

SEQ ID NO: 906255 - DNA, 120 bp, Artificial Sequence
  ENSG00000245750_153 (sequence is synthesized)
ttcccctcctgctgagcgtgggccacacttagcgactggctttcaatgaagagaatgtaacagaggtgaaagtgtgtgacattcgaggaaaggccataaaagacattggtgcttcagctt

SEQ ID NO: 906256 - DNA, 120 bp, Artificial Sequence
  ENSG00000245750_154 (sequence is synthesized)
tgctctcgcggctgtctgactctgggggaagccagccaccacgtcatgaggacacccaaacagcctacggagaggcccacgtagggaggagctgaggccccctgccagcaagcagcccta

SEQ ID NO: 906257 - DNA, 120 bp, Artificial Sequence
  ENSG00000245750_155 (sequence is synthesized)
gcccgccagctgtgtgagtgagcgagcctttttggaagtgcatcctcctgtcccagtccagccctcagatggctgcagccctgctagcatcttgactgccgcctcatgagggacctcaag

SEQ ID NO: 906258 - DNA, 120 bp, Artificial Sequence
  ENSG00000245750_156 (sequence is synthesized)
ccagaaccaacagccacgtggtgccagaattcctcatctgcagcagccgtgtgagatcataactgtttattgcctttttaagccactgagttttggggtcgtttgttactcagcagtaga

SEQ ID NO: 906259 - DNA, 120 bp, Artificial Sequence
  ENSG00000245750_157 (sequence is synthesized)
agaagattctagctgttcagggtctgtgaggaggagtcaaggtctggggtttgtgtcctctggcatagcaatggcactgcaatgggggagcctgttgctgggctgggccatctcgccact

SEQ ID NO: 906260 - DNA, 120 bp, Artificial Sequence
  ENSG00000245750_158 (sequence is synthesized)
gtcacctgcctgttgaggggtgacggtggttgttgagaggctggatcagaccccagaggtgacatggatgtggcatatttgttggacttacacagccttgcattttattttcatctctgt

SEQ ID NO: 906261 - DNA, 120 bp, Artificial Sequence
  ENSG00000245750_159 (sequence is synthesized)
atagtggccaatcctgggaagggctactggggttgaccccttcacgctagagtgcttctaggctagggtgtgagttccacagtcagagctgcctggctgcttggccgaaggatgaacatg

SEQ ID NO: 906262 - DNA, 120 bp, Artificial Sequence
  ENSG00000245750_160 (sequence is synthesized)
tctagaggattaaaacccatatcacagaggaagagattgaaaattaaacatcacacctacaacccatacttcggagcactgacccaaattgtctatttttaagtcccattccatttccaa

SEQ ID NO: 906263 - DNA, 80 bp, Artificial Sequence
  ENSG00000245750_161 (sequence is synthesized)
tatttactaaccattgtctggagcattgggcccattcattcctcttaaaaatcatttgctgggccaggaagcgggaggat

SEQ ID NO: 906264 - DNA, 87 bp, Artificial Sequence
  ENSG00000245750_162 (sequence is synthesized)
ttattttctacccctcaaaacagccactttctcctccatctcctcttccctgatgaagaaaggcgtatgagcatctggacctcattg

SEQ ID NO: 906265 - DNA, 120 bp, Artificial Sequence
  ENSG00000245750_163 (sequence is synthesized)
ccctgatgaagaaaggcgtatgagcatctggacctcattgggtttaggtcatcatgttcttgcaattcctgtgtgcttatgcacattaaatgaatttgtatgccttttcctcttattaat

SEQ ID NO: 906266 - DNA, 120 bp, Artificial Sequence
  ENSG00000245750_164 (sequence is synthesized)
ctggactggggtgaagggaggcatggttttgccacagcctgccctgtactgctgaattctcctgcgcgtgctcaagtgcttgcaaatgaaaggtcatctgggccttgatcagtcgtgtgg

SEQ ID NO: 906267 - DNA, 120 bp, Artificial Sequence
  ENSG00000245750_165 (sequence is synthesized)
cctaaggtaaggggacgctgtctccacgctcatctcctcagctagactggggcctcaggcctgagcccagggcctaagagccctaaaaaatgtttgctgaataaatgaatgaataagcca

SEQ ID NO: 906268 - DNA, 120 bp, Artificial Sequence
  ENSG00000245750_166 (sequence is synthesized)
gagctgcccagccaaccctgggttgcctattttgggactttttgttacatgagctgataagaacccttaattcattgttagtctggggttccattatttgtaaacagctttttactgcct

SEQ ID NO: 906269 - DNA, 87 bp, Artificial Sequence
  ENSG00000245750_167 (sequence is synthesized)
cccatcataacatgttattttatacttcatttaactatccacccacctatccatttatccacccacctacccacctatccatccacg

SEQ ID NO: 906270 - DNA, 120 bp, Artificial Sequence
  ENSG00000245750_168 (sequence is synthesized)
cccgggctgttgcttggaggactcgggagcagcagtggatttcggcgttaccaggagaggtctcgagcaccagatccctcttccttcacttcccagtagtgggttctagccgttcccagc

SEQ ID NO: 906271 - DNA, 120 bp, Artificial Sequence
  ENSG00000259482_0 (sequence is synthesized)
atagtattctgccaggaatccagctgaccgaattacccacacttgcccaccttaggccttcattcgcagcaggcatgtgtgcctgggtttgttaccagcagccattttctcacccttaaa

SEQ ID NO: 906272 - DNA, 120 bp, Artificial Sequence
  ENSG00000259482_1 (sequence is synthesized)
tgagggatgggtctccccttttctttttctcattttcctagaggttacaagattcctgtttttctcaccaggaggagaggtcagcctcagtgagctcatagcagtcatacattgccagtg

SEQ ID NO: 906273 - DNA, 120 bp, Artificial Sequence
  ENSG00000259482_2 (sequence is synthesized)
tttttcctcaagtggaaggagaaaggccttcagaaaaaaaatcgtatgcaaacctagtgctaccaccagcagtagctctgaatcgagatttttgggagaattaggcttactaaagataaa

SEQ ID NO: 906274 - DNA, 120 bp, Artificial Sequence
  ENSG00000259482_3 (sequence is synthesized)
gctatagctgcagcccccaaagtcgaagctaccagaacaggttggatgaggatggcccaaagattatggagttgctggccccaaagcaagtcagacactatgggaagtttgcatgaatca

SEQ ID NO: 906275 - DNA, 120 bp, Artificial Sequence
  ENSG00000259482_4 (sequence is synthesized)
tgcccttggatagacaacctaaatcatacctcatcgagcatggatcctggtcagcataccaagtcaaggcaagtaaagactgaagaaatatcacctggtctgcagctccccccagaacga

SEQ ID NO: 906276 - DNA, 120 bp, Artificial Sequence
  ENSG00000259482_5 (sequence is synthesized)
agtctgctactgatggcagaagcatagatagaccaagggtatcactatgtaatgatggaagaaggaaaaaccccatgcattcactcatgtcttgaatcacctagagaagagagggaatct

SEQ ID NO: 906277 - DNA, 120 bp, Artificial Sequence
  ENSG00000259482_6 (sequence is synthesized)
gccaaagtggacacaatagaaattcagttctaaatttggaggaaatgaggcccactctcagataagatgaaaagtaaaagccctaggatccaatggggtattaaacaaatatttaaaagt

SEQ ID NO: 906278 - DNA, 120 bp, Artificial Sequence
  ENSG00000259482_7 (sequence is synthesized)
atgaggaatccaagaataaaggcagctcttaagaccaagtactctgactagaaaatatcctcatatttgatggaagacagcatgagacggagaaccaagttccttaaagtacggaagtga

SEQ ID NO: 906279 - DNA, 120 bp, Artificial Sequence
  ENSG00000259483_0 (sequence is synthesized)
aacatcgagatgctccgcagcgggtgacgagaggtttgcttctaaatagacaggtgcctgcaccgccaaagccgagaccatctctccatttccacacacaatggcaccttcagaaagcag

SEQ ID NO: 906280 - DNA, 120 bp, Artificial Sequence
  ENSG00000259483_1 (sequence is synthesized)
ggagaggatgtacctccctgccaaaatcaatcctggtcaactccaagagctgctcattaagggataagctgcaagccaatcatttgtcaaagataattctcattcggtttcataccaagg

SEQ ID NO: 906281 - DNA, 120 bp, Artificial Sequence
  ENSG00000259483_2 (sequence is synthesized)
aaaaacaaaaagaacaacaaaaaaagaacaaagaagccgcctcgcatcctacaaatacaagtggtgtttggttatatgatgttcactttatttaatgacaagtaaaagtgtaaggaaatt

SEQ ID NO: 906282 - DNA, 120 bp, Artificial Sequence
  ENSG00000259483_3 (sequence is synthesized)
gagctatgttgtcacattgtggaaaacatctcaaggcagcaagaaactggataatcctgaatatttttacctgaaggactaagtaaagatcatagcatggtggtttctaagacacaaact

SEQ ID NO: 906283 - DNA, 120 bp, Artificial Sequence
  ENSG00000259488_0 (sequence is synthesized)
gccgcgtggattccttccagacggccggagcccctcccccgcctttcctacccggccccggcgccgggcttccccccgccttaggaagctcgcccttccagccagcggccccgactgtac

SEQ ID NO: 906284 - DNA, 120 bp, Artificial Sequence
  ENSG00000259488_1 (sequence is synthesized)
gactgtactggctccgcggcagccttggctcaggcggccagcgctggacagcggccggggaatcccgtgctgcgcggcgcggccgaggggcgggcctggcccggagagtaccgcggcttc

SEQ ID NO: 906285 - DNA, 120 bp, Artificial Sequence
  ENSG00000259488_2 (sequence is synthesized)
gccgtgcgcctcgcgcgttttgcatcgctgagcgaagcagagacgtaaggaaatggtagcagagcgcggggcgagggcagaggggagtcatttcccccagagtttgggctggttgggtcc

SEQ ID NO: 906286 - DNA, 120 bp, Artificial Sequence
  ENSG00000259488_3 (sequence is synthesized)
tcggcacctccggacgtgcgccaggcttccaccctgaagacgcgcccgtcctgggaacatgacctcggaagcagtcgcagccgccgccggacgaggggcgtggagaggcggtgccccggc

SEQ ID NO: 906287 - DNA, 120 bp, Artificial Sequence
  ENSG00000259488_4 (sequence is synthesized)
agcccagggatggcgcaggccctggggccccaggaagacggcgccgttggcgtcttgagtcttgctgccgcctctggctgcctagccctcttgctttcgctcttcttgtttgctctggcc

SEQ ID NO: 906288 - DNA, 120 bp, Artificial Sequence
  ENSG00000259488_5 (sequence is synthesized)
cccatttttccgagagtgtacgccaggcccgggccctgctcctggactgatttacctggggcggcaccgcccgcagccatgactcccgggctctgagtttagcggcgccctaagcgccgg

SEQ ID NO: 906289 - DNA, 120 bp, Artificial Sequence
  ENSG00000259488_6 (sequence is synthesized)
aaccgcatctcggcgccggtgacaacaccgcgcccgatttcctttcagcaccgagtgtcagacgttgtagtgtttattcgaccggaggcagggagggcgctactatcctatcacaggttt

SEQ ID NO: 906290 - DNA, 120 bp, Artificial Sequence
  ENSG00000259488_7 (sequence is synthesized)
gggataacccaacagaaacgcagtgggaaccccttggctaggagtcgaacaaggatcccgggtcgtggtagtatagtttacagtgggggataaagcagtaactttctagatagttgttaa

SEQ ID NO: 906291 - DNA, 120 bp, Artificial Sequence
  ENSG00000259488_8 (sequence is synthesized)
taattttttctgagctgcaagtatctccttatttctcacaaaaatctgcgagctgaattgaatggttttgaattttcaaaattaaaaaagctgtggggcagttttagagtattattgggg

SEQ ID NO: 906292 - DNA, 120 bp, Artificial Sequence
  ENSG00000259488_9 (sequence is synthesized)
aaattttacattcgttgctatgcctttccatacaggcccccccttttcggtctccttaactggttcgtcttcgtagttggaattcctttgcatgaggctatggaatatacactaccttct

SEQ ID NO: 906293 - DNA, 120 bp, Artificial Sequence
  ENSG00000259488_10 (sequence is synthesized)
ctggacgttaactattagctacagcttgaggactcccaaatttatgcctttagcaacacgatccgagccctgcaacttttcgacctcattttgagccaacattattttgctcccttattt

SEQ ID NO: 906294 - DNA, 120 bp, Artificial Sequence
  ENSG00000259488_11 (sequence is synthesized)
tgttgaagtactttctccagttatttacttaaaatgttcacatgagagacatactatttgattccttgcttgtactaagatgtaatgattgtaacgacttcattttcctagacccagata

SEQ ID NO: 906295 - DNA, 120 bp, Artificial Sequence
  ENSG00000259488_12 (sequence is synthesized)
aaagtctcgcttcattcatgaaactttttacaatcagtagtgacctctgccccatcttatctcttttaacacttactatatcattcattagtcgttagccatatactttcattgtgtaat

SEQ ID NO: 906296 - DNA, 120 bp, Artificial Sequence
  ENSG00000259488_13 (sequence is synthesized)
cttctgatgtatatgcattttatctctcacatgaattagagtcataaacttttatgaattcttcaaagcacttacttcagtgtttacacaaaagttacttgtttggcttattacaatatc

SEQ ID NO: 906297 - DNA, 120 bp, Artificial Sequence
  ENSG00000259488_14 (sequence is synthesized)
taacaccaagcaggttaccttctattttttgttgttaatctgtatacataaagtgtttattgttacttttcagctgagtttattttagactaaaagagaaacggccataatctaactggc

SEQ ID NO: 906298 - DNA, 120 bp, Artificial Sequence
  ENSG00000259488_15 (sequence is synthesized)
aaaaagtaataggattctgagccagtaagcatttaatagaacgttctttatgacaatagaaatataacttgttatgaacatacaccttaaatgcaagatactgcagttaagaactaaaca

SEQ ID NO: 906299 - DNA, 120 bp, Artificial Sequence
  ENSG00000259488_16 (sequence is synthesized)
ccttaaatgcaagatactgcagttaagaactaaacatgtttcaaccataatttacttcatagtttttgtttttttttttgagacagagccttgctggagtgcaatggctcgatctcggct

SEQ ID NO: 906300 - DNA, 120 bp, Artificial Sequence
  ENSG00000259488_17 (sequence is synthesized)
aggcgtgagccaccgcaccctgcccttcatggtgttttctttatcagactatagttatcctatcagtcatgctgattaattcaattacctaagtctagtgccaatttgaaccttctgaaa

SEQ ID NO: 906301 - DNA, 120 bp, Artificial Sequence
  ENSG00000259488_18 (sequence is synthesized)
atgcaagtcagtacttgaaaagcatggttgtttttcctatctttgccattttggggatttctctctcattttaacaaagatacacattgttactactttatgtcaggtgtattctaagtg

SEQ ID NO: 906302 - DNA, 62 bp, Artificial Sequence
  ENSG00000259488_19 (sequence is synthesized)
ggaggcggagacgtcgcaaaaaaaaaaaaaaaaaaaaaattggctgggtgcagtggctcaca

SEQ ID NO: 906303 - DNA, 120 bp, Artificial Sequence
  ENSG00000259488_20 (sequence is synthesized)
ggagttcgagaccagcctgggcaacgtaggcagaccccatctctacaaaacatatacaaaattagccaggcatggtgggtggcaggcacatgtagccctagctactcaggaggcagaggt

SEQ ID NO: 906304 - DNA, 77 bp, Artificial Sequence
  ENSG00000259488_21 (sequence is synthesized)
ctctacaaaacatatacaaaattagccaggcatggtgggtggcaggcacatgtagccctagctgggaggctgcagac

SEQ ID NO: 906305 - DNA, 120 bp, Artificial Sequence
  ENSG00000259488_22 (sequence is synthesized)
gtgagaccctgtctcaaaaaaaaaaactcgtttaatcatgacaactagaggaaacaaattctttatccccattttacagatgaggataccaaagcacagagtgattaaataacttaccca

SEQ ID NO: 906306 - DNA, 120 bp, Artificial Sequence
  ENSG00000259488_23 (sequence is synthesized)
agatcacacagatcacaactagaaggaggttaaaccacaattcagatagtctggcctcagaacccttgcgtttagccactgtgcgctgtagatttatatgtcccctgttgagtctatggt

SEQ ID NO: 906307 - DNA, 120 bp, Artificial Sequence
  ENSG00000259488_24 (sequence is synthesized)
aactcttttgcagttgttgatgttgagacaaggtcttactctgtcaccaaggctggagtacaggtggtccttccaccccagccttccagatagctgggactacaggcacgtgcaaccacg

SEQ ID NO: 906308 - DNA, 120 bp, Artificial Sequence
  ENSG00000259488_25 (sequence is synthesized)
cctggctaatttttcgtacattttgtagagatgcaatttcaccatgttgcccatggcgggtctcttgaactcctgggctcaagcaatccgcctttcttggcctgcccaagtgctaggatt

SEQ ID NO: 906309 - DNA, 120 bp, Artificial Sequence
  ENSG00000259488_26 (sequence is synthesized)
acaggcatcagccactgtgcctggccttgtggtaacttaatactgaccttgctactggctgtgtttccaggtctgggagagatgtttgtagtaaataagccaagcattcttaatttcaca

SEQ ID NO: 906310 - DNA, 120 bp, Artificial Sequence
  ENSG00000259488_27 (sequence is synthesized)
gttgatcataccatccttcttgaaacacttcctcccatttcactggctgtctcctcagtctccttggctcctcttcccttctcaacctgttattgctcacgataaaaacccttggagtct

SEQ ID NO: 906311 - DNA, 120 bp, Artificial Sequence
  ENSG00000259488_28 (sequence is synthesized)
tacttacctcctctttctatcttaggtcttcccttacctaaaaatagtctcctcctaggcagcatctaatgctttaccctgttgggtttttctgcatagtatatattgctatgtaaaatt

SEQ ID NO: 906312 - DNA, 120 bp, Artificial Sequence
  ENSG00000259488_29 (sequence is synthesized)
acatgtatattcacttgactcgttagctgtttgtttcctccactatcatataaccttcatgatggatttaaacctatcttaatttgggtttcagatgttcctttttaaaaccttttcctg

SEQ ID NO: 906313 - DNA, 120 bp, Artificial Sequence
  ENSG00000259488_30 (sequence is synthesized)
cctgccttctgtgaaatttactaaatgttttttatttcacctttcccctctaatttagatgttttactctttagttttattattttaaataaattaaaacatacagtgtctaaaatataa

SEQ ID NO: 906314 - DNA, 120 bp, Artificial Sequence
  ENSG00000259488_31 (sequence is synthesized)
aatcaaaatgattgtcttctggataactcaaggaccttagactgctttaacaccattaacccttcttttgacaaatatgctattactgtctagtgtattaaatgtatcttttaatctcaa

SEQ ID NO: 906315 - DNA, 79 bp, Artificial Sequence
  ENSG00000259488_32 (sequence is synthesized)
tggcctaacatctttaaatacctgttatttcttactcctctgaacttctcactttccctgagaataattttaccacctc

SEQ ID NO: 906316 - DNA, 120 bp, Artificial Sequence
  ENSG00000259488_33 (sequence is synthesized)
ctgaacttctcactttccctgagaataattttaccacctctttgttgggcagaagtgcaataggaacatcagaaagtgcaagtacataataacagagaagtcagtctctttttcttcatc

SEQ ID NO: 906317 - DNA, 120 bp, Artificial Sequence
  ENSG00000259488_34 (sequence is synthesized)
tcttgggcatcgaaaagagcagatgatccagatttgaaagtctgggaaagccatgctgtgtgagaacaggggcttgcatgacaacagagggttgggcttgagcccccagggtctgcagca

SEQ ID NO: 906318 - DNA, 120 bp, Artificial Sequence
  ENSG00000250764_0 (sequence is synthesized)
gcattgatctttttatgtactgattcacgaggacttaagcctatgatgcagttgttttcccagtcttgggagctggcagatgccattacccaggtcaggagatagaaccttgccagctat

SEQ ID NO: 906319 - DNA, 120 bp, Artificial Sequence
  ENSG00000250764_1 (sequence is synthesized)
accctgaagctgttcaagtctttctcccaattacagtcttcataagagttgttagaaggactgaatgagatgaagtagaggaaagtcttctaggacaggggtcctcaacccttgggccac

SEQ ID NO: 906320 - DNA, 90 bp, Artificial Sequence
  ENSG00000250764_2 (sequence is synthesized)
gagattctacgtgatgcagttttcacagatttgtggccagatgctagagacaaaggctgagaagttgtccaggacgtcatattcttgctt

SEQ ID NO: 906321 - DNA, 120 bp, Artificial Sequence
  ENSG00000250764_3 (sequence is synthesized)
ccagccgatgtgctgctttagtcagcgtctgccctggtccttcggttcgcaggctcacacgcttttttgggttgtgtccctttggactgcagaggctacgtgtcctgtgaccaaccacga

SEQ ID NO: 906322 - DNA, 120 bp, Artificial Sequence
  ENSG00000250764_4 (sequence is synthesized)
aggcggccactcccgctcccctcaggagtgtcttaaaatacctccattttagctaccctattgaatgacaggttagctgggtgctgggttttcaggtgatggacattttccctcagtcct

SEQ ID NO: 906323 - DNA, 120 bp, Artificial Sequence
  ENSG00000250764_5 (sequence is synthesized)
ctgaaggtgttgctggcttcaggcattgatgccgccactctgattgttgtatgcagtgagcaaactagaattttctcttggctttctagattttcttctttatattctgaaactttatta

SEQ ID NO: 906324 - DNA, 120 bp, Artificial Sequence
  ENSG00000250761_0 (sequence is synthesized)
attatctctgctattgaaagcacaaggaggaggaattgcagctggccactagagggagcctcattcacggatcttatggaatcaagtttaggaggaccaagtgtcgccacgtctaggctt

SEQ ID NO: 906325 - DNA, 120 bp, Artificial Sequence
  ENSG00000250761_1 (sequence is synthesized)
cctgggcactttgacaccatccaggcttcttgtgaggaggaggtatcaacagctgtgcccactgggaggctttcagatgcagcatccaccaaggaatacaccgactaacacacatgacag

SEQ ID NO: 906326 - DNA, 120 bp, Artificial Sequence
  ENSG00000250761_2 (sequence is synthesized)
tgcatttcaactgctcatttaataagtatttgaattcataattacaaaacatcttctgtaattaaaccaccatatgcatttaaaatattttggggacaaagagtagcaaagaattatatt

SEQ ID NO: 906327 - DNA, 120 bp, Artificial Sequence
  ENSG00000250761_3 (sequence is synthesized)
ggatattgactaaaaacacttatgaatatcaataatttgctcctcctcccttttcatcatagactctttacaatgatactgaccttggggttgatcacaaagtaggttttcaccaggtgc

SEQ ID NO: 906328 - DNA, 120 bp, Artificial Sequence
  ENSG00000258573_0 (sequence is synthesized)
agagaactagaaaatgaaactcagctgaaaaacggccacctaagatggaagaagccatgagatgagtaagcgttgcctactcacaaggttgcaaactgtccttcacttacgattatcccc

SEQ ID NO: 906329 - DNA, 120 bp, Artificial Sequence
  ENSG00000258573_1 (sequence is synthesized)
caacgccccctcctaaatctgatcaatcgcatggaacttgatggttacaaaagacagagctaacaactagcaaaatggccgaaaggttttggcaagcaaccttcttgggagaaatgcaaa

SEQ ID NO: 906330 - DNA, 120 bp, Artificial Sequence
  ENSG00000258573_2 (sequence is synthesized)
taccattgatttttcgaggcctctcatggatgaagacatgctcctttttacaagtgtggtcaggttccctgataactctttgtatgatcatgtggttgcagtaccttgcaggaacgggaa

SEQ ID NO: 906331 - DNA, 120 bp, Artificial Sequence
  ENSG00000258573_3 (sequence is synthesized)
cgtcattctgagggtagtccacatgcaagtgttctaaagttgacatcactgcttcatcattcacctcattttcccagaacagaagcaccaagaaaattatcaccattattatcatcagag

SEQ ID NO: 906332 - DNA, 120 bp, Artificial Sequence
  ENSG00000258573_4 (sequence is synthesized)
attaagaagcagcaatgcccctcttgtggcaagagttggcagcgtgcggttggtatgtcaatgcatccaaggtccaagggcctggattgtctgccaaatgcttgggagttgtttgatcag

SEQ ID NO: 906333 - DNA, 120 bp, Artificial Sequence
  ENSG00000258573_5 (sequence is synthesized)
gttgacatgctccaacagcattgtggactgggcccacacctacgctgaggtgaccaatgtctccaactgttggatctgctccaccttccagcagcagctgcggagagtttgccctggaac

SEQ ID NO: 906334 - DNA, 120 bp, Artificial Sequence
  ENSG00000258573_6 (sequence is synthesized)
gcgtatcctgcttctgttaagaactggacatggctagaagcttggggtcccacggacaatgggtgggatgccacagggcgggctttggataggaggcatcacaaaacccatggcaaacct

SEQ ID NO: 906335 - DNA, 120 bp, Artificial Sequence
  ENSG00000258573_7 (sequence is synthesized)
ggcccttggctgactcatagtgtccatgatggatggagctggctaatgggagaacacgtggtgcccccattgcaggtatcacaatgtatagagcagcactggggtaaagtcactgtggga

SEQ ID NO: 906336 - DNA, 120 bp, Artificial Sequence
  ENSG00000258573_8 (sequence is synthesized)
aacaagcggccttacgaaggccaggcccccatggactttgtgccccctgggagtttatgggtctgtggggacacaggatggccatatctcccagccaactggactggacattgtacctgg

SEQ ID NO: 906337 - DNA, 120 bp, Artificial Sequence
  ENSG00000258573_9 (sequence is synthesized)
ggttggccctatgtgcctgccactgggcttcccacattgcctagtcgccacataactgggagccactgtgttcctgctttttcccagtgcagcaggccctctagtggttctatcccttag

SEQ ID NO: 906338 - DNA, 120 bp, Artificial Sequence
  ENSG00000258573_10 (sequence is synthesized)
caatgactatccctggagcaggcgtcattactatagaaaagcaagttgcagcctttgcagaccacacagctcggtcccgagttgccctccttttgttaactgatgaagttgatcagatca

SEQ ID NO: 906339 - DNA, 120 bp, Artificial Sequence
  ENSG00000258573_11 (sequence is synthesized)
ggaaggtggtgctgcaaaaccagatggccttagacatagtcgcagctgcccaaggtggcacctgtgcccttgtagggacacaaggttgtacatttatccctgacaaccactggaatataa

SEQ ID NO: 906340 - DNA, 120 bp, Artificial Sequence
  ENSG00000258573_12 (sequence is synthesized)
tggcagcttcacaaggggtgtcataggagattaaggtgattgagcaccttactgatgaccccctgcagagatggtgggcgtctttgggatctggcctacaatgggctctcataatcatag

SEQ ID NO: 906341 - DNA, 120 bp, Artificial Sequence
  ENSG00000258573_13 (sequence is synthesized)
gtagcatagcaggaatattagtggtaggttgttgctgtctgtgttgttgctgtggcctatgggtccagggtgctgccacatgtgcatgggtccccaccaagaggattccctggcctagag

SEQ ID NO: 906342 - DNA, 120 bp, Artificial Sequence
  ENSG00000258573_14 (sequence is synthesized)
ggtggagtgtaaggaacatggctgtgtgcaggcaagcaggcataggccaaggtaaacagcctagatgactcagtgggattggggcacaagtgcacagtcccatatcttatataatcatag

SEQ ID NO: 906343 - DNA, 120 bp, Artificial Sequence
  ENSG00000258573_15 (sequence is synthesized)
ccgtgtaggcacaacataaagaagctccccacctggctctcagtcactatcgtttgtgtagtgtataaatgtaacactgaccctgtgaaggggctgctgaataaagccatgtctcattta

SEQ ID NO: 906344 - DNA, 120 bp, Artificial Sequence
  ENSG00000258573_16 (sequence is synthesized)
ctaagtccaaatgagcaatgaacagctgaagtctctcaactgaaaagatcaggacagagagtgctctccaaagcctgtgacccacccatgcctgctctaggtcactgtatgagtctctag

SEQ ID NO: 906345 - DNA, 120 bp, Artificial Sequence
  ENSG00000258573_17 (sequence is synthesized)
ccccttatttcttactacctcacaatacaaattctcccctccaacaatggctataatatagccattttctgtactacttaagaaatagaattatagactaatagacttggaaagaacttg

SEQ ID NO: 906346 - DNA, 120 bp, Artificial Sequence
  ENSG00000258573_18 (sequence is synthesized)
aaagattatctaattcaagatcctcactttacagacaaggaaactaatgaatagagaagaagaggacttcatgaaatccccagaattagaaatctctctttctcgtccttctccttctag

SEQ ID NO: 906347 - DNA, 120 bp, Artificial Sequence
  ENSG00000258573_19 (sequence is synthesized)
ctgtaaggatactatgcccatagctgaatgtggggaaactaagcagcattgccccatgtccacggtccaggtctgcctcaggcacagccagctccaatgccattgagagaagagatctca

SEQ ID NO: 906348 - DNA, 120 bp, Artificial Sequence
  ENSG00000258573_20 (sequence is synthesized)
gcagatccttttttaatagcgagaacatttaaaacctactcttcgaataattttgaaatctacaaaatggcagcatggcccaggagtgtgactggcagtgaaggagctgggaagaccttg

SEQ ID NO: 906349 - DNA, 120 bp, Artificial Sequence
  ENSG00000258572_0 (sequence is synthesized)
gctctgctctcccaggcactactgagcgcgctcgcggtcgccaggagcggattgggcccccgccgcgcgcaagccttggtgacaggggatggcgcggagctgcctctccgggaaagttgg

SEQ ID NO: 906350 - DNA, 120 bp, Artificial Sequence
  ENSG00000258572_1 (sequence is synthesized)
atctgtgcgcccagacatggaaaagggattaggacaccggcagatcttgccctcacagagcggaggtgggggccttggaaggggcacaccgcccgtaggcgcgaaatccaagaagaaaat

SEQ ID NO: 906351 - DNA, 120 bp, Artificial Sequence
  ENSG00000258572_2 (sequence is synthesized)
gacactcatcagccagcctcgcgcggggagaaagggcggggtggggggtagtggcaccctgcccgtcctctcccacccccacagtccgggcccacagtccaggagtcacaagggatgtga

SEQ ID NO: 906352 - DNA, 120 bp, Artificial Sequence
  ENSG00000258572_3 (sequence is synthesized)
atccccaggcataatgtgaacccccaacaaacccaaggcctcagaatgcgcctcacctctccctccccaccagcagaaacatcctcccactctcccaacccctgctccagccacgccaac

SEQ ID NO: 906353 - DNA, 120 bp, Artificial Sequence
  ENSG00000258572_4 (sequence is synthesized)
tctgcctctgtgcctgtgcacatgaagttgccttggcccggcgtttgctccacagccttctgccaaactcctactgcttgatggctggaagccttcgcaccctggcgctctcctcccagg

SEQ ID NO: 906354 - DNA, 120 bp, Artificial Sequence
  ENSG00000258572_5 (sequence is synthesized)
tcagcagtcactggccttcctgtgcatccagcccagctttgaacagtcctgggccccaacccttatctttttccgagtaattacatggttgcatgattggcttcaccgcctctggatcag

SEQ ID NO: 906355 - DNA, 120 bp, Artificial Sequence
  ENSG00000258572_6 (sequence is synthesized)
atgagcgctactaatgaaggatacaagttgtaaaactaggttttatgtgaactccagtcatcacagtttaggtgcggctagcgattttacagatgcggggttagtaactggcccaaatcc

SEQ ID NO: 906356 - DNA, 120 bp, Artificial Sequence
  ENSG00000258572_7 (sequence is synthesized)
agggcttccgggatgctgttttccttttttgtttcttagcagggatggcagatgtttgtagaacagatccgtgtaaaagtcagtatcctaagagattaaattgtaaagcaggacaagata

SEQ ID NO: 906357 - DNA, 120 bp, Artificial Sequence
  ENSG00000267780_0 (sequence is synthesized)
gagaatgaacgtgtccgaaagacagacagaagcccggggactgacgtccgtgggagctcctcccgcactgcagaagatgaacatctaagactcgtttagacaaactgatgtagagaaaaa

SEQ ID NO: 906358 - DNA, 120 bp, Artificial Sequence
  ENSG00000267780_1 (sequence is synthesized)
taagaaacatcaaaacataccgtgccctgacctgggctttaatcctcatgaggccacactgttcagaatcggctgagggactctgtggcatttcggggtgtccttgctgacagggtattt

SEQ ID NO: 906359 - DNA, 120 bp, Artificial Sequence
  ENSG00000267780_2 (sequence is synthesized)
tgcagcagctgtagtggtgtgggacttggtagcggggtcctgacggcggaggacccagcacgtctgttctcagcggagcggctgcccatctccccctcccctcccctcccctcccccttc

SEQ ID NO: 906360 - DNA, 120 bp, Artificial Sequence
  ENSG00000267780_3 (sequence is synthesized)
tctgccctctgggggctccgctctgggtgggggtggcaccccagccctgcacgggcgctcttttccctttcctgtatgccttgatgattgttaataaaacttcttcaaagttggttttcc

SEQ ID NO: 906361 - DNA, 120 bp, Artificial Sequence
  ENSG00000267782_0 (sequence is synthesized)
ctaggggagaatctctgcgtgggaatgtcagaggtgacatgccttctgatgcttctcatctgcccaggtcaaacttactgacttgcttctaacgaatagaatgtggcggaagtgatgaca

SEQ ID NO: 906362 - DNA, 120 bp, Artificial Sequence
  ENSG00000267782_1 (sequence is synthesized)
aggtctgcagggagaggaaccaaggcctcccaccaacagccagcaccagtgtgccagctgtgtgagtccaccatcttggaagcattttccagccccagtcaagcctccagatggctgcag

SEQ ID NO: 906363 - DNA, 120 bp, Artificial Sequence
  ENSG00000267782_2 (sequence is synthesized)
ccccagccagcatatgactgtaacttcatgaaagaccataagccagagccacccagccaaaccactcccaaatttctgttctggtgtgagataataaaacactattgtttgagctgctaa

SEQ ID NO: 906364 - DNA, 120 bp, Artificial Sequence
  ENSG00000225730_0 (sequence is synthesized)
gtggggcagggtggcctggagtgggggtgggtagtcagtcaggaatgagaggtggctttttattcatgaagaagaaaattcccagggaacaggatggcaaacgagaaggaaggctattgt

SEQ ID NO: 906365 - DNA, 120 bp, Artificial Sequence
  ENSG00000225730_1 (sequence is synthesized)
gtatgagtgtacaggttgtactctgcacactggggtttggaagaggagacacaccatatatattccccaagtcatgaaagaaataaagaaaagacaaagataacctaggtcaaacaatga

SEQ ID NO: 906366 - DNA, 120 bp, Artificial Sequence
  ENSG00000225730_2 (sequence is synthesized)
aagaaccaaaaatggaaagaggaagaaagtacatgaagtcgtgaaacaaaatcctgaagagttttctgagactcgaatgagattaaaaggcatgaagaactccagaaatgcaggctgcaa

SEQ ID NO: 906367 - DNA, 120 bp, Artificial Sequence
  ENSG00000225730_3 (sequence is synthesized)
gctgcagtgttgcagggagcgccagattgcaagccaaaagaaatggagatgtaggaaggatgctaccacggggaggcgggtgttctctggatgcagaagatgatatacagtcatcagtta

SEQ ID NO: 906368 - DNA, 120 bp, Artificial Sequence
  ENSG00000225730_4 (sequence is synthesized)
cacacaaatgtcagggattcttcactcaaaagaaaggagaaagccaccactttgaaagaaaggaaatagtcaatatatttgacaacctgtatggaatggacctgaccaatgggaacagtg

SEQ ID NO: 906369 - DNA, 120 bp, Artificial Sequence
  ENSG00000225730_5 (sequence is synthesized)
acacgagctgaaattcacttcagcttttggggttgctgccacacttgggtagagacctaaagatcaacttttctttaacctgcatcattaatcgtataaaccttccagctcacaggtatc

SEQ ID NO: 906370 - DNA, 120 bp, Artificial Sequence
  ENSG00000267529_0 (sequence is synthesized)
gtaacctttctgccaacattaaggccaagtaggtgcaaattaagcttaaatgacttcttttatctgctggctcgtgggccagccccgtccagtggctgaatgaaaaggaggaaggccagt

SEQ ID NO: 906371 - DNA, 120 bp, Artificial Sequence
  ENSG00000267529_1 (sequence is synthesized)
gctgtcccatttgcaggcttcaatgagctcgacagccctgggatctcagagagcagagagctgatctggttgcagggacttcaaagacaacaggcgcaggagcccacactgcctcagact

SEQ ID NO: 906372 - DNA, 120 bp, Artificial Sequence
  ENSG00000267529_2 (sequence is synthesized)
tgggaggtgggcagcgtcttccagtggtgaagatgaagtcacccaaacgaaacccttctgcctacaattaagagtgcagtttctctgcacagaaggtggaaatcgtgtttttatgaccag

SEQ ID NO: 906373 - DNA, 120 bp, Artificial Sequence
  ENSG00000267529_3 (sequence is synthesized)
agcttccttcttcccatgacttccccttataagattgtgtcttctctgggaacaattagatattaattatgcggtaaatgctttttatagtgccaaagattctatatatgcctgaaagaa

SEQ ID NO: 906374 - DNA, 120 bp, Artificial Sequence
  ENSG00000267529_4 (sequence is synthesized)
gaaatcattttattgcacttgaccttaaactgtctctccgtaacctttctgccaacattaaggccaagtaggtgcaaattaaggtaagaagacagagtggatgggagtgggtgggtgaac

SEQ ID NO: 906375 - DNA, 120 bp, Artificial Sequence
  ENSG00000267529_5 (sequence is synthesized)
aggacagaggaggccgccaggtggatttctcattggcggagaggacgcccaaaccctcagacctggcacccagcctggacagggtcgggatcctgcaggctccacggagcagcccctttg

SEQ ID NO: 906376 - DNA, 120 bp, Artificial Sequence
  ENSG00000267529_6 (sequence is synthesized)
tttgtattctaatgtgttttgcagcacagaacagaagctgcactgttatgctggagcatttcatgaacctcaagtcttttatctgaaatcaaagcttaaatgacttcttttatctgctgg

SEQ ID NO: 906377 - DNA, 120 bp, Artificial Sequence
  ENSG00000267529_7 (sequence is synthesized)
tgtgagctgctccatcctgcctccggcacctcctcttcacccggcacctccttgtgccatcccgaggccgtcatccctccaccctccccagctccacggagccctccagtgctccaggcc

SEQ ID NO: 906378 - DNA, 120 bp, Artificial Sequence
  ENSG00000267529_8 (sequence is synthesized)
actgactctccgagtgggtccctgaaccagcagcatcagcattactctctgcaaacttgtcagaaatgcaaattctcagaacaccccagaccttctgaatctcaggacagtgaccggatg

SEQ ID NO: 906379 - DNA, 120 bp, Artificial Sequence
  ENSG00000267529_9 (sequence is synthesized)
tacaagagttggagaaccagtgcctgggccttttcttcccctcttctctccattacgaaagaaaaacaatgctacatcccttccagtggggagcccatgcgcactgtgacacgctgtgct

SEQ ID NO: 906380 - DNA, 120 bp, Artificial Sequence
  ENSG00000267529_10 (sequence is synthesized)
gtgtgcattccaccgccacttctgctcagtgtcccgacacagcagacagtgagagcagcaggacagggcaaaggtacagccagtgctcacgctgctgtgatctacacacagcctcagcca

SEQ ID NO: 906381 - DNA, 120 bp, Artificial Sequence
  ENSG00000267529_11 (sequence is synthesized)
gacccagcgcatgggtctaactctcaggtatctattcagacatggtctcacggagggccaggcagccttggggcccaatcacaagccagttagaaaggccacggagtacaacaatcactg

SEQ ID NO: 906382 - DNA, 120 bp, Artificial Sequence
  ENSG00000267529_12 (sequence is synthesized)
gttaatgatgtcataacactttgagtgctgcctactaattatgacatcattaacaatctccagcactttgcaaagagatccccaagtttgctctttcacccacagtaaagacactcccac

SEQ ID NO: 906383 - DNA, 120 bp, Artificial Sequence
  ENSG00000267537_0 (sequence is synthesized)
gaaaatatcccagcaagaataaatggacaggcacagaccacccagagaaaggctggcaaaaaaaaaatagccgtccctgacctgtccctgaaaatgacacctggtcctttgggctgctgt

SEQ ID NO: 906384 - DNA, 120 bp, Artificial Sequence
  ENSG00000258689_0 (sequence is synthesized)
aatgctatggaagttgccagaaaaagaatcctaaggaattggttcttggcaaatcctaaggaatttggctcaggcatttgtcttcctaatgaactggtggggaggtagctgtgttggtac

SEQ ID NO: 906385 - DNA, 120 bp, Artificial Sequence
  ENSG00000258689_1 (sequence is synthesized)
atcatctccaaggcaggatcctgccctctgaagcttgagtggctcccaaagtctcaagcccactgtgctgatttgagcatttggctcagccttttctggtcatcaccaacgttcacctgg

SEQ ID NO: 906386 - DNA, 120 bp, Artificial Sequence
  ENSG00000258689_2 (sequence is synthesized)
atgctgatggcagcacgcatggatctggccattcccacagcctggtcaccccatggtggcccttgattgagcttgccatggcacggaagggggcctctcctactcaccgatctccttatt

SEQ ID NO: 906387 - DNA, 78 bp, Artificial Sequence
  ENSG00000258689_3 (sequence is synthesized)
actcctgggctcaagattatgagcaggaaccattgcttaagaaatactcaccatcaagcagaatcatgagggacagag

SEQ ID NO: 906388 - DNA, 120 bp, Artificial Sequence
  ENSG00000258689_4 (sequence is synthesized)
aagaaatactcaccatcaagcagaatcatgagggacagagcaccatgaactcagggagcaaagagaacactgtgggggtattcttagggatggaatctccacatcaaatctattggcaag

SEQ ID NO: 906389 - DNA, 120 bp, Artificial Sequence
  ENSG00000267532_0 (sequence is synthesized)
attgcagctgcctctcccgccgagttggagacggatgggctgggacgggttttgggggggtgtccccaattctgactgggagtggaggaacccctcctgagatctcttgtgggggtgccc

SEQ ID NO: 906390 - DNA, 120 bp, Artificial Sequence
  ENSG00000267532_1 (sequence is synthesized)
cctccccagggcactccccagtccctgagccagccgagaggaaggaggccagcgatgcgactggggcggctcctttctcctgcaccccaaatgtgagggatgcaccctaaattttgctct

SEQ ID NO: 906391 - DNA, 120 bp, Artificial Sequence
  ENSG00000267532_2 (sequence is synthesized)
tttcaaaataggggaccaggatctcaggggagagtagctgaggtaagtggggagggaagtgtcctctgttttcaggagagacgtggcggttgggggggaggtttggaggtgcgtgctggg

SEQ ID NO: 906392 - DNA, 120 bp, Artificial Sequence
  ENSG00000267532_3 (sequence is synthesized)
gtggggttggctttgtcagtcttggaattggggggatgattggagaggctttctcttatacccctaaactgcagccccccagacggaaaccaaaggctgagaccagagagccccccaaca

SEQ ID NO: 906393 - DNA, 120 bp, Artificial Sequence
  ENSG00000267532_4 (sequence is synthesized)
tccccagccgttaggatagtgtttaatttctctttcaccccccacaaaggctctgccgaggtaggagctgggggcaactgttagtttgggggctatggagggtggtggaggagcaggagg

SEQ ID NO: 906394 - DNA, 120 bp, Artificial Sequence
  ENSG00000267532_5 (sequence is synthesized)
ccttggcaagatttgatggagggcagataggggtgtccgggaggggtctggcatcttcgggggcctaaaaagactgcttacatacaccaccttggatctttcagattgctaagagttttg

SEQ ID NO: 906395 - DNA, 120 bp, Artificial Sequence
  ENSG00000267532_6 (sequence is synthesized)
gggggtgtgtcggaagagggggtggtaaaagatgcgatgggatataggaagataacttctggattttagggggtcatattttgatttgcaaaaggagttttggcccttggattttgcttt

SEQ ID NO: 906396 - DNA, 120 bp, Artificial Sequence
  ENSG00000267532_7 (sequence is synthesized)
ctgaggggtgtttttaaaaaatcaagtcctggacaggagaaaagggctgagggaaggcctggagttgggggtggggagaggcatgtttgtctcagcttaaacgtggctctctggggtggg

SEQ ID NO: 906397 - DNA, 120 bp, Artificial Sequence
  ENSG00000267532_8 (sequence is synthesized)
cccgcctgccctggcctggtggatgggctgatggaggttgctgtgggggccggctcgggtcctcaggggccctggggagtgggaacagcactgggggttgaatacctggccccccaggtc

SEQ ID NO: 906398 - DNA, 120 bp, Artificial Sequence
  ENSG00000267532_9 (sequence is synthesized)
cagatggccctcttcctgggctctgctgctccccttccccctggtctccatttcctgcctttggcctccatcttgtggcaggcccagggcccagggcgacttccggcccccctctcccaa

SEQ ID NO: 906399 - DNA, 120 bp, Artificial Sequence
  ENSG00000267532_10 (sequence is synthesized)
ccatgttccggccccaccacctctggactgccaactcccaaccctgctggccttggccctctgtctctccttgcttttctcttgggttctgacccagggagaggaaggacggacacagga

SEQ ID NO: 906400 - DNA, 120 bp, Artificial Sequence
  ENSG00000267532_11 (sequence is synthesized)
agccttgggtccctgcccttgctgagacaggaggcagtgtgttggcccctccagtcattccctatttcttctgcctctgaccccaccctagggatcccctgagctgagttcctacagagg

SEQ ID NO: 906401 - DNA, 120 bp, Artificial Sequence
  ENSG00000267532_12 (sequence is synthesized)
gaagatggtccaatcttactacactgtgagctcatccccatggtccgtcgccttccagttgcctgctcagcccgtccctggttcctcccaaacgtttttgggggccatgtttgcctttta

SEQ ID NO: 906402 - DNA, 120 bp, Artificial Sequence
  ENSG00000267532_13 (sequence is synthesized)
aggcttctctatccccccgctcctggaggtggtgctggggtcttcccagcactgctatgtgctctcttcctttcaacccaccccggtcctgctcccgccccagcagcacactgtggtttg

SEQ ID NO: 906403 - DNA, 120 bp, Artificial Sequence
  ENSG00000267532_14 (sequence is synthesized)
tacggcactgtggccacgtccaaaccacactgtggtgttagagcgagggtgggggaggcaccgccgaggcttggccctgggaggccatcctggagaagtgacacaaaaaacatctggggc

SEQ ID NO: 906404 - DNA, 120 bp, Artificial Sequence
  ENSG00000267532_15 (sequence is synthesized)
gcctcaagagaacaaagtggagtctttgttgcccacacccagcttccctggctctagcagcacagaaatattggcacagggaagcgagtctgccaatattggctgtgctgctccaggcag

SEQ ID NO: 906405 - DNA, 120 bp, Artificial Sequence
  ENSG00000267532_16 (sequence is synthesized)
ggtggtgaaaactaccgaggaggggctgagcccccatgggccgaggagagaagagggaacaggcctctcctgctaataatgttaagcagacagcacgaagctgagagggaaatctttatt

SEQ ID NO: 906406 - DNA, 120 bp, Artificial Sequence
  ENSG00000267532_17 (sequence is synthesized)
gttttctgtataaaaatgtccatcagatgaaggtcaaaggggttgggggcagatgcttatgcgggaatagcgaggtggcagccccagcagcctttcagccctctctcgtgcaggccttgc

SEQ ID NO: 906407 - DNA, 120 bp, Artificial Sequence
  ENSG00000267532_18 (sequence is synthesized)
tcggagtcccaggagatccacaggtccggcatgaacagtgagaggtcagaggtggaaggctcagcaggagaggagaggaggatcagcagaggtcatgagaaggccagaatccagggtcag

SEQ ID NO: 906408 - DNA, 120 bp, Artificial Sequence
  ENSG00000267532_19 (sequence is synthesized)
gctgtctggaacaggaagtaaaatgggccgagatggagcgagcccccagtgtgcttccaaggccactcccacctccctgaaacaccctgctacgtactgatccaatgccctgcgctgtgt

SEQ ID NO: 906409 - DNA, 120 bp, Artificial Sequence
  ENSG00000267532_20 (sequence is synthesized)
atgagagcaccttctcttctgaaacccctatacaagggaggggcccctgcggagaccgtgccctgccatccaggtgagccctttctccccaaccccgtcagctgtgtgggaggaggagga

SEQ ID NO: 906410 - DNA, 120 bp, Artificial Sequence
  ENSG00000267532_21 (sequence is synthesized)
ctcctaccctggtcgaagttgagtttcttagctggaggagtttctcctagcccttcaatatccaccacgtcactgttggcatcggagtcgttcagagcactgagtgtcacatctgggaag

SEQ ID NO: 906411 - DNA, 120 bp, Artificial Sequence
  ENSG00000267532_22 (sequence is synthesized)
ggggcataagctaggttctaggttcccctgacagcctctcccccagccccaagcttcccaaagctttgtgcctcctctcccctcccctctgcccctctctgggaacctccacagggacag

SEQ ID NO: 906412 - DNA, 120 bp, Artificial Sequence
  ENSG00000267532_23 (sequence is synthesized)
gaagagagactgacccttctttgacccaggcccaattctctcactaaacctcagatgggacctttaacccctaggcagcaactccacagccctcaccagccttctgtttctttatggggg

SEQ ID NO: 906413 - DNA, 120 bp, Artificial Sequence
  ENSG00000267532_24 (sequence is synthesized)
gacccccggcctcagggacactggagctgctgggaggaggggcagctggaggaggtgacaagacaccagatgccaccttcttgggccctttcttgggtgactcagctggaagggggatgc

SEQ ID NO: 906414 - DNA, 120 bp, Artificial Sequence
  ENSG00000267532_25 (sequence is synthesized)
cagaatcttcatataccttgcgtttcacagtggcctttatctgggccctgaagaaaagagagaagaggttaggaaaggagtcatcagagagactaacagaagaggggacgggaggggaag

SEQ ID NO: 906415 - DNA, 120 bp, Artificial Sequence
  ENSG00000267532_26 (sequence is synthesized)
gggttctgggagtcccttcataagaatccaggtcggggccccaacccattggtagggttctcactttctcgaagttttacactcactcaggatggatggagtgtggagagtggagtccct

SEQ ID NO: 906416 - DNA, 120 bp, Artificial Sequence
  ENSG00000267532_27 (sequence is synthesized)
gaactgagtagtgggaaaggcccatctcctaattctcttctgggagagacatcaggtagagcttggtgatttacaggtggattgagatttactgatcaactagttcagggtcaccatatc

SEQ ID NO: 906417 - DNA, 120 bp, Artificial Sequence
  ENSG00000267532_28 (sequence is synthesized)
cctggaaacactgcagtggggtcctcaaacatttatataaataaccaggggacttccatcatcaaatacaataacagcatctcaggcaacctaaattcacattcttggaaggattaccac

SEQ ID NO: 906418 - DNA, 120 bp, Artificial Sequence
  ENSG00000267532_29 (sequence is synthesized)
agcattttaggaacttctgaccaactgtgacaattctattctttcagtcctcaaggggattctaaaaaactagtgacaaagtagggaagcagctgagctggaaaggagttctgaggacga

SEQ ID NO: 906419 - DNA, 120 bp, Artificial Sequence
  ENSG00000267532_30 (sequence is synthesized)
tggaaccttgggtaaggaggaagaaggctgcccacccgcccttttctggcagccaccctccctcacactgtccgttccttgatgacacagctgatgtgattaagatcgtccccaaatcgc

SEQ ID NO: 906420 - DNA, 120 bp, Artificial Sequence
  ENSG00000267530_0 (sequence is synthesized)
ggtcccccaaggacccacgtccaggagccaacagcctctctgtgcaaaccagacaaccctgcaggaactgtgcttgaagaaaccgtggaaactgcccccaaccctcccgtctctatttct

SEQ ID NO: 906421 - DNA, 120 bp, Artificial Sequence
  ENSG00000267530_1 (sequence is synthesized)
ttctctgttttattatctcattcttggctgtgaggtaaacaggagaaaatgagaaggtggttctggaggacccgaccgaatttgctttcgtgacagggtcaagcgccctttcctcgccgg

SEQ ID NO: 906422 - DNA, 120 bp, Artificial Sequence
  ENSG00000267530_2 (sequence is synthesized)
ccgcagccctcaccaaaggggatttgggggcctccggacaggggtcctgaaggttttgaattgttcaatctctgggggtacaggaacccctgcaggaggtttcaaaggcaagagtttcgc

SEQ ID NO: 906423 - DNA, 120 bp, Artificial Sequence
  ENSG00000267530_3 (sequence is synthesized)
gcaggttggtggcggaatctggtgatttaagaaaacgtgtttaagcctcggccgggccgcgcctgggctgtctgcggtgctcttccggaattctctacaatatctggaagtgaccaagaa

SEQ ID NO: 906424 - DNA, 120 bp, Artificial Sequence
  ENSG00000267530_4 (sequence is synthesized)
tatctggaagtgaccaagaaaattccagaacccggaggctgcgccgtggagataaacatgggcacctggccgggcctggtggctcacgcctgtgataccagcactttgggaggctgaggt

SEQ ID NO: 906425 - DNA, 120 bp, Artificial Sequence
  ENSG00000267530_5 (sequence is synthesized)
cgtggagataaacatgggcacctgggaaggaactgctggaccagcagaatgaggggccaacgccaggggcagcactgcccggccacagaggactgtggccccacagatgacaccctcagc

SEQ ID NO: 906426 - DNA, 120 bp, Artificial Sequence
  ENSG00000267530_6 (sequence is synthesized)
taccagctcctgcatctggaagatgaccaggaggaggaaggacggtctgcaagtgttcaaagtgatgtttccaggccgggcgcgcttgtaataccagcatttgggaggctgaggcaggcg

SEQ ID NO: 906427 - DNA, 120 bp, Artificial Sequence
  ENSG00000267530_7 (sequence is synthesized)
gggttttgccatgttggccaggatggtcaggaactccccaactcttatttttaaatgttgggccacacaagtctgggaaatgttagttttcaaacacatcagggaataaatggatacaaa

SEQ ID NO: 906428 - DNA, 120 bp, Artificial Sequence
  ENSG00000267530_8 (sequence is synthesized)
caaaagtcttgaggaccacttaagaaatgaacaatagcagatgtgtaacagttatactacgctgctaccttgtaaaacattttagaaacatctgtttccagccgggcctggtggctcacg

SEQ ID NO: 906429 - DNA, 120 bp, Artificial Sequence
  ENSG00000258683_0 (sequence is synthesized)
agcagtttatggagttgagcacacaggcaggtgctggaccagaaaggacacacttttccaggcttggctcggggtcttcatgatgctttaaagtttgatggtctggagcggaaatgccag

SEQ ID NO: 906430 - DNA, 120 bp, Artificial Sequence
  ENSG00000258683_1 (sequence is synthesized)
agcaacctgcaggtgataaagaagaacaggtcatacagtcagaagtccaaaatcaaggtgtccactggattggttccttctgagggccctgctggagaaactgatccatgcctctctcct

SEQ ID NO: 906431 - DNA, 120 bp, Artificial Sequence
  ENSG00000258683_2 (sequence is synthesized)
tatctgcctccatcttcacatggcattctcttttgtgcgtatgtgtctcctctgtgtccatctccaaatctttacaaggacattgccattcaggattagggcccactctaacctaggatg

SEQ ID NO: 906432 - DNA, 120 bp, Artificial Sequence
  ENSG00000258683_3 (sequence is synthesized)
acctcattttaacttgattacatatgtaaaaaccctacttccaaatactgttcataggtacagatgttaggatttcaaaatatattttcgagagatgcaattcaaaccacataagccaat

SEQ ID NO: 906433 - DNA, 120 bp, Artificial Sequence
  ENSG00000258682_0 (sequence is synthesized)
acttattagtgcttggcatttatacaatgctaagttctagaaccccctataaaacctaatttgtttcgtattttagtaaagctgacaaaaggatcttagaggtcatttagcccaagctca

SEQ ID NO: 906434 - DNA, 120 bp, Artificial Sequence
  ENSG00000258682_1 (sequence is synthesized)
actgcagattaaacacactgcataggaccacagaatcagctggttctgaacagtatccagaccttatgagtcttagacctatgttcttttccattgcacacttactagtatgatgctagg

SEQ ID NO: 906435 - DNA, 120 bp, Artificial Sequence
  ENSG00000258682_2 (sequence is synthesized)
cccctgtaatcctaccagtttggtaggccaagttgggaggactgcttgagcccagtagttccaagaccaggctgggcaaaagagtaagaccctatctcccaaaacaaaatgttagcgagt

SEQ ID NO: 906436 - DNA, 75 bp, Artificial Sequence
  ENSG00000258682_3 (sequence is synthesized)
agagtaagaccctatctcccaaaacaaaatgttagcgagtagttgggactacaggcctatgttcaccatgttggc

SEQ ID NO: 906437 - DNA, 120 bp, Artificial Sequence
  ENSG00000258687_0 (sequence is synthesized)
ccaggccatgtgaagataatgaagtcccgcctcgggctaccggacaccgtttgtaccatcaggccatcctgtccaagtctcctggggtctttgcctgcttgtttaaacactgaaggccaa

SEQ ID NO: 906438 - DNA, 120 bp, Artificial Sequence
  ENSG00000282977_0 (sequence is synthesized)
agtgggctctgtaggggttcaacttaatcccacactgaccaggagctggcatcagctctgttgccccaccccttcattcttattgaaaatagcccaattgtgcagtgtgaaatctgccac

SEQ ID NO: 906439 - DNA, 120 bp, Artificial Sequence
  ENSG00000282977_1 (sequence is synthesized)
taggtaacttttttttttaattcactgattacagctcgtttcaaattgtgtctgagctcctttttaaaggaaaaaggaaaaaaataaacaactttttttgtgtgaatttcatgctggtga

SEQ ID NO: 906440 - DNA, 120 bp, Artificial Sequence
  ENSG00000282977_2 (sequence is synthesized)
gcctcaaccctgacctggagggaccacctctagaggtgagaggggatgttcagtctccaaggctcactcaatccttccgcctcagccgagactgccaacacacggggggccagtggcgct

SEQ ID NO: 906441 - DNA, 120 bp, Artificial Sequence
  ENSG00000282977_3 (sequence is synthesized)
ggtgatttttggtgctgtggacaccacctgtccacggggacctggactgacccccccaacctcatttcacccaggccgcgtagcccaccagatggtaacaccaacttttttttttttttt

SEQ ID NO: 906442 - DNA, 120 bp, Artificial Sequence
  ENSG00000282975_0 (sequence is synthesized)
gatgtcttctaactcattttacccttgcagcaaccacacaatataagagctactgtctccaattaacacttggggacactgaggcaaagagcctggctgaatattgtgcccgtgaagaca

SEQ ID NO: 906443 - DNA, 120 bp, Artificial Sequence
  ENSG00000282975_1 (sequence is synthesized)
gagggacagcctattttgtttgctgctaaaacagtttgaccagggagacagcgttcactcatgaatttaagaaaaaaaaaatccctgatccctactttttgccaacttcaatgctgattt

SEQ ID NO: 906444 - DNA, 120 bp, Artificial Sequence
  ENSG00000282975_2 (sequence is synthesized)
ctagtggtaccaagaaaaatgcaactgagcctccatcctcaaggggctcacagtcttgtgtggagataaaaaatgcaggcctgctgcagatccaagtcctgtgaccggggtcctgcccaa

SEQ ID NO: 906445 - DNA, 120 bp, Artificial Sequence
  ENSG00000282975_3 (sequence is synthesized)
tctcgaccagagcctgagagtagacacctgccggtttatctgtcccttcatgtagcaggtgacagaggtgccaggggcatggcaggggtactctgacacagcactgccccacggagccca

SEQ ID NO: 906446 - DNA, 120 bp, Artificial Sequence
  ENSG00000282975_4 (sequence is synthesized)
tgtcccagggcagaagacccacgatgcacagccagccaggtggcctcatccgatcagtcaaaggcctcaatagaaccaagactgacctctgccaaagagagaattctttcagcagacggc

SEQ ID NO: 906447 - DNA, 120 bp, Artificial Sequence
  ENSG00000282975_5 (sequence is synthesized)
cttcggacttgagctatgacggcaactcttccccgggcccacctgacggactgggtttctcagcctccacagtcgtgtgagccaattccgtaagataaatctctctctcttctctctcaa

SEQ ID NO: 906448 - DNA, 120 bp, Artificial Sequence
  ENSG00000243694_0 (sequence is synthesized)
ggcacaaccattaagaccctcatctatagtggactggaacaaagcacagcaagttttaataaaagaaatctgaggcctggaattccatgtctaccattcctcacagcaaacctgtgactg

SEQ ID NO: 906449 - DNA, 120 bp, Artificial Sequence
  ENSG00000243694_1 (sequence is synthesized)
taacacagattgatgaaagattctgcaggacgacaaaggttaaagatgtagacccggagctagaagccagcactgacactgatggagtggactgcgatgagaatgcccacattattgtcc

SEQ ID NO: 906450 - DNA, 120 bp, Artificial Sequence
  ENSG00000243694_2 (sequence is synthesized)
tatcctctgataaccaatgtaatatgaaaaccgactacagaagaaaggaacaaattaaatccattaatcaagcatatctctgctaaacagttgttcgaaactgatgaacaaatgaaaaat

SEQ ID NO: 906451 - DNA, 120 bp, Artificial Sequence
  ENSG00000243694_3 (sequence is synthesized)
ttataaggtactggccacactatcagtaaagtttttcttgaggaaactattgctttgtcaaaggacaaatgaacctcattagggagattagtttcagctggtagttttgcattagtacaa

SEQ ID NO: 906452 - DNA, 120 bp, Artificial Sequence
  ENSG00000243694_4 (sequence is synthesized)
actaataatacacacttcaaaagataccctgagtaagattatgaaaattgaaatccatttgttacttcttaatttactaactgttagaaaatgaccactctattacttatcatgaaacca

SEQ ID NO: 906453 - DNA, 120 bp, Artificial Sequence
  ENSG00000243694_5 (sequence is synthesized)
gaaggaaatcaaacactgctcacctttcaactaagtgcctgaaagagaactgttgcagtgtgggctttgtgagtgctgcgatgatgaacttacgcatacaggggttataacttggccacg

SEQ ID NO: 906454 - DNA, 120 bp, Artificial Sequence
  ENSG00000243694_6 (sequence is synthesized)
gcattttactcttaggttgaagcatgtcatgcagagctccatgccaaacgcaatttttgataagcttctttgaaatccttttcttttcaaatgttttaaatgaattggacaaatagcaaa

SEQ ID NO: 906455 - DNA, 120 bp, Artificial Sequence
  ENSG00000243694_7 (sequence is synthesized)
ggagtgaaattgtgataactcctggcacaaccattaagaccctcatctatagtggactggaacaaagcacagtccatgttacacttaggttaaaaagaagaatgaaaacccctcaagcca

SEQ ID NO: 906456 - DNA, 120 bp, Artificial Sequence
  ENSG00000243694_8 (sequence is synthesized)
tatcaatcctgtatggccagtgcactgaggctcctaagctggccacagtgagtgcagtccagcttcaatgttcattgaatccctggcctttctgtcaaggcagctaagaacagagccaat

SEQ ID NO: 906457 - DNA, 120 bp, Artificial Sequence
  ENSG00000243694_9 (sequence is synthesized)
cactgctctcggtgacggggagtgcttggctgcagacacacgtcttccaaaacctggagtgagaccagtctcattccaaagagtgtataaatcagctgtgaaataataatgacttttttg

SEQ ID NO: 906458 - DNA, 120 bp, Artificial Sequence
  ENSG00000243694_10 (sequence is synthesized)
ggttctactgacccggcctggattcagactgctgacccagaaaagaaaggcttcacacatcccattagcagtcctttcagccattgaagacatccccatccaattctgactttctttcct

SEQ ID NO: 906459 - DNA, 120 bp, Artificial Sequence
  ENSG00000243694_11 (sequence is synthesized)
ttacagcagtcttgctcttttttacgggcatgtaaaccaaattgacgtttacttactgcttttgtttggttccttgatgtaacttctctaatttaacagcagctttccaggcatagcgtt

SEQ ID NO: 906460 - DNA, 120 bp, Artificial Sequence
  ENSG00000243694_12 (sequence is synthesized)
tgaatgaatcaggccaaataacattaaagttcactttctcaaagcttaaactctgttaccgagaaaagatgggggtagagttttaaagtattcttcttagtataaaactaaacgtttttc

SEQ ID NO: 906461 - DNA, 120 bp, Artificial Sequence
  ENSG00000243694_13 (sequence is synthesized)
tctagacatattgtctcgtgatatttttaaaagccagcattatttttttttcaggaaagttaagtcagtctataacagtgattccacggtttaccctgttgtcctggagtgggtaggagc

SEQ ID NO: 906462 - DNA, 120 bp, Artificial Sequence
  ENSG00000243694_14 (sequence is synthesized)
tttcaggagtagctaagggttttctttttccaaagtaagtgtgtcaagttgaaagaaaattacaggttgtgggactgagaagttagataatataagggctcttctaatgaaaaaaaaaaa

SEQ ID NO: 906463 - DNA, 120 bp, Artificial Sequence
  ENSG00000243694_15 (sequence is synthesized)
acggagtgaaattgtgataactcctggcacaaccattaagaccctcatctatagtggactggaacaaagcacaggaatgtttgcatgggatatgtgttacatagggcgtcatcaggaaaa

SEQ ID NO: 906464 - DNA, 120 bp, Artificial Sequence
  ENSG00000243694_16 (sequence is synthesized)
gaaatcatgaagtggtgacatggagacggaagaaagccaataaaagggtggtaaacaatgaggaataccactctgagcaattggggctcagtcttgctgtggggccctctggaagacatt

SEQ ID NO: 906465 - DNA, 120 bp, Artificial Sequence
  ENSG00000243694_17 (sequence is synthesized)
ttagataacgcctcagggtgccaaaccaggaggcaaacactggagtgtatactactcctattcctaacagactgaggattgttcctgggggtagtaatttcccagcatttccagccttct

SEQ ID NO: 906466 - DNA, 120 bp, Artificial Sequence
  ENSG00000243694_18 (sequence is synthesized)
ctgtctttgcatatgttcatgggcagtgtatattccttagaaaaccctaaggaagggaaaggcttaggtggaagccatagacgtgtacaggagccatccagcaaagcccccgttgagctc

SEQ ID NO: 906467 - DNA, 120 bp, Artificial Sequence
  ENSG00000243694_19 (sequence is synthesized)
cagtgtaagcttagggtagagaaggatactagaaacatgtgacagcttctccactagatatcaaattgaatatttaattaaataaatcacaacaaatcccaaatattaaaagatgacaaa

SEQ ID NO: 906468 - DNA, 120 bp, Artificial Sequence
  ENSG00000243694_20 (sequence is synthesized)
ggaataaaattgaatgatgtgaacaggaatgagaagaatgccattcaggacataggcatgggcagagacttcatgacaaaacaccaaaagcaatggaaacgaagccaaaattgacaaatg

SEQ ID NO: 906469 - DNA, 120 bp, Artificial Sequence
  ENSG00000243694_21 (sequence is synthesized)
atatagctccattctaagaggaggggccataaaaactcttcaggtgttcaggtatccatgtcaactcacattctctgtgtaataattctttgaatatataagcatgctgattttctcaat

SEQ ID NO: 906470 - DNA, 120 bp, Artificial Sequence
  ENSG00000243694_22 (sequence is synthesized)
gagcagtcaccttagaaaactttcaccatggctttgacaattaccagtctccttgatcatgagcttatagttccttacccttgcctcaaataactgcttattaaggtgtaacaaaaatgt

SEQ ID NO: 906471 - DNA, 120 bp, Artificial Sequence
  ENSG00000243694_23 (sequence is synthesized)
gcttcattctttgtttcccctcaactccagaatcatggctacctcttcttgcttttcactctctttcctttcttgatttcaggcttgtatgtatttcaagcatctaccccaacccttccc

SEQ ID NO: 906472 - DNA, 120 bp, Artificial Sequence
  ENSG00000243694_24 (sequence is synthesized)
ccatattttgctcctaaacattattttagcttcccaattctggctttctcactgacactatgatgctcctttgttcatgctttctgttccaactagccttcccagcaagaatatcccaca

SEQ ID NO: 906473 - DNA, 120 bp, Artificial Sequence
  ENSG00000243694_25 (sequence is synthesized)
gcttcacagctgaaattcccactcgttttacactttcaaactctctaatcttcccttcccacggttgaacttattatttctctgaagtatcaataaacatttacttcttaattaaccaaa

SEQ ID NO: 906474 - DNA, 120 bp, Artificial Sequence
  ENSG00000242190_0 (sequence is synthesized)
ccagaagctaggagagaggcatggaataattctccttcagagcccccagaaagaaccaaacctgtggacaccttgatttttagcccctagaactaggagtatgacaactgggacttgtct

SEQ ID NO: 906475 - DNA, 120 bp, Artificial Sequence
  ENSG00000242190_1 (sequence is synthesized)
tacgtgggaaaatggccggcacatgggacttcaataaatatgtgctcaatggtgaaccacctagtgctttatattttacaaatgtctgcagcagttttttgtcatctttatggaaaacaa

SEQ ID NO: 906476 - DNA, 120 bp, Artificial Sequence
  ENSG00000242190_2 (sequence is synthesized)
ggcacgtcttaaagtcgttcaagtccttcactttttcacactgaggtctgtcttcatatccacttatctttcaagtctatgaaaccccttataaaaactttcctttgaaatattttaaaa

SEQ ID NO: 906477 - DNA, 120 bp, Artificial Sequence
  ENSG00000262831_0 (sequence is synthesized)
gtaaaatttcaactttatttggccaatgtgttcaattcgattgtgaaatagaaatgcctgaagaactgtcagcgtctgattcagctccagcatccttggccacctccccacccgggagtc

SEQ ID NO: 906478 - DNA, 120 bp, Artificial Sequence
  ENSG00000262831_1 (sequence is synthesized)
aagggtcgtggttctgccttgaacaggccacaggccgtgctgtagagaggcctggccaaggtggaacaaataccctgatgtcgaaaaatgtctaaaaatcccacagacggaattttcaaa

SEQ ID NO: 906479 - DNA, 120 bp, Artificial Sequence
  ENSG00000262831_2 (sequence is synthesized)
tagcaagcactctggacagactcatgtatgaaaaagtacatcatggtttcaggaaacaagccccaccagggtgggctgcctggagatggatccctttccaaaaaccgaaaagcagaagga

SEQ ID NO: 906480 - DNA, 120 bp, Artificial Sequence
  ENSG00000262831_3 (sequence is synthesized)
agagacgggggtgaacggacggtgtgtaggggtgaggtgtcacttcagagaggttccctgggtttccggcgacgccctccttcaagcgaggccgcaggcttcggaggcgtgcgctgctgc

SEQ ID NO: 906481 - DNA, 120 bp, Artificial Sequence
  ENSG00000262833_0 (sequence is synthesized)
atgtttatttttgaagcacttctgcaaaacagattttctgtgggcttcccggtgtcagggccgaccttcagacagacctttcctgagaggcagctgcaggagtcacatgggagaagccac

SEQ ID NO: 906482 - DNA, 120 bp, Artificial Sequence
  ENSG00000262833_1 (sequence is synthesized)
ctccaagcagagtctcctgagaagctgctgaaaggcctgccacatcgagaaaagcagctcctaaaataaggggaagcaggacgggctccagcagagccggggttggggagcacttccctc

SEQ ID NO: 906483 - DNA, 120 bp, Artificial Sequence
  ENSG00000262833_2 (sequence is synthesized)
cggaggcactggccgcctccaggctgtctccagacgccactctcacctgcacgctgcatctcatcagggagcttctctgcaaaaatctggcctaaagagggtgggaggggaggagggtga

SEQ ID NO: 906484 - DNA, 120 bp, Artificial Sequence
  ENSG00000262833_3 (sequence is synthesized)
gcttccaggatggggcgtggagctctcctgctgtggaagtatcttcaacgaacactccacggttctgacagagattgccaccaccttcccccgactgtcctgagctcatctggatctttc

SEQ ID NO: 906485 - DNA, 120 bp, Artificial Sequence
  ENSG00000262833_4 (sequence is synthesized)
tgtctctgaaaagatgctgaaatcccagagtcacttcctagcctggttgtaaattgtgtcttcctgtgaatttgttaaaacaccctaggaaagacagtttccaaatacaggcagccttgt

SEQ ID NO: 906486 - DNA, 120 bp, Artificial Sequence
  ENSG00000262833_5 (sequence is synthesized)
gtggttatgcctgatttctgggataatcctctgaggttttcctggtgggcatgcatcacacagaaggtccacatggaacccgccctttgagaccaggcatcttgatgcagaaaactcatg

SEQ ID NO: 906487 - DNA, 120 bp, Artificial Sequence
  ENSG00000262833_6 (sequence is synthesized)
ccactttcctcagaatcgcactcacaaacacgcagagggacgtgaagggatggacgtccttccacacgccagccgatgcagagttgggggtggcatcacacagacccggctctgtcctcc

SEQ ID NO: 906488 - DNA, 120 bp, Artificial Sequence
  ENSG00000262833_7 (sequence is synthesized)
aggctcggccactcctagctgtgcgactttgggcagggaaacagaaggcaggaaaggagctctcttgcacttgcttcttaattgtcttcagcccaacaattcttcatatttcggggaggc

SEQ ID NO: 906489 - DNA, 120 bp, Artificial Sequence
  ENSG00000262833_8 (sequence is synthesized)
acattctggtctccagaaacagctagaagacacagcagctacacacgcagccacactaaatctgtttgggtcatcatccatggaaataatcgtagagatctcttagcctcttctagcaaa

SEQ ID NO: 906490 - DNA, 120 bp, Artificial Sequence
  ENSG00000262833_9 (sequence is synthesized)
aggagtgctcgcccgccttctcaggatgtaagttaacgagcaaggacttggctccagagcctcggacaggccctagcacacagccagtccgcagcagatgtctgctgaatgaacggtgaa

SEQ ID NO: 906491 - DNA, 120 bp, Artificial Sequence
  ENSG00000262833_10 (sequence is synthesized)
tgaacaaacgtgctgagaaacacacgcggggtctgaaaagtgcgctcgagcctggaacccgaggccccgctgacgagctggccactcacgcaaaacatactggcatcgaggtcagaagac

SEQ ID NO: 906492 - DNA, 120 bp, Artificial Sequence
  ENSG00000262833_11 (sequence is synthesized)
aacacacgcacatcagaacggggaggcctttctctgaagggccacagggcacagcgaccaggctctgacagaggggactgtgcagcacggagcagcaaactgagaagccagcagcggcgg

SEQ ID NO: 906493 - DNA, 120 bp, Artificial Sequence
  ENSG00000262833_12 (sequence is synthesized)
ctgggggcagacacagcaggacgggtgggggcggacacaggctccgccaccgacaggggaccctcgtgtgactctctgtgaccctgagcaagtctctccacctcccttgcctcggtttcc

SEQ ID NO: 906494 - DNA, 120 bp, Artificial Sequence
  ENSG00000262833_13 (sequence is synthesized)
cccggttatgctggcgcctcacgccacactgctttatcaccgattgcaagtctgcagccacgcacataggaacaacggcagggcactgaatcctgcaggataaacagatccaaggaggca

SEQ ID NO: 906495 - DNA, 120 bp, Artificial Sequence
  ENSG00000262833_14 (sequence is synthesized)
cccctgccagaggaggcactccaggcaccccaccagaaccaggggttgtgaggaaccgaagggccgtgcgggcaatggagctggagcaacagactctcagggaaggttaaggagaaatgg

SEQ ID NO: 906496 - DNA, 120 bp, Artificial Sequence
  ENSG00000262833_15 (sequence is synthesized)
cagactggacggagggaggtgcacctgctgaactacgatgcgtctagagaagaggcatcaatgggggctgagcctcatcccggttatgcgaccgcagtgacgtgtgcctccataggtact

SEQ ID NO: 906497 - DNA, 120 bp, Artificial Sequence
  ENSG00000262833_16 (sequence is synthesized)
gagccgtctgagatgactcctacacaagagcaaaggccaacatcagaaaggacggccaaggggcactgaccaggcacacgctcagcctcactgcggcctcttcctcgctctgcacctggg

SEQ ID NO: 906498 - DNA, 120 bp, Artificial Sequence
  ENSG00000262833_17 (sequence is synthesized)
agcctgccttcaaggaacggaagctgccctccaatcaagctgtgctcctgcatctccgcagagcgagggcttcctttagagatatccagacacatgcattttcttttccttttctttttt

SEQ ID NO: 906499 - DNA, 120 bp, Artificial Sequence
  ENSG00000262833_18 (sequence is synthesized)
aggtgtgagccactgcgcccagcccacgttttctttaggatgctgggaggtgcagagccgtgaggaggtggagcgaatgccacagatgttacagctccgtgctctgtggcgcaggccttt

SEQ ID NO: 906500 - DNA, 120 bp, Artificial Sequence
  ENSG00000262833_19 (sequence is synthesized)
ccgtgctctgtggcgcaggcctttgttttgatgacaaataccagggtttgggtaccactgtgaaggaaacggaagatctccgtgctgtgtgcaggttccctggggtggcctctgaacctc

SEQ ID NO: 906501 - DNA, 120 bp, Artificial Sequence
  ENSG00000262833_20 (sequence is synthesized)
tcacattcccccttggctgcacgtctgcaatttcatctcagaaccaagcctcctccacccctaccaatccggatgagctaaggaggccttgctggggtgcacatcgaacacgaaggggac

SEQ ID NO: 906502 - DNA, 120 bp, Artificial Sequence
  ENSG00000262833_21 (sequence is synthesized)
ccggtgcccgtcttccctctgcccgtggggggaccttaatgagaggcgcccgggcataaggacccccgtgcagcaccgtgcgccctggcgtggcgcgcacgggaacgctgaggtggctgt

SEQ ID NO: 906503 - DNA, 120 bp, Artificial Sequence
  ENSG00000262833_22 (sequence is synthesized)
gctcgggcaggcaggggtgatctgctaggtggcggcggtcccccgtttccgccaatcactcacctccccctcgctcggcgatctctcgggttttgcttccacctcttcatttctaaatca

SEQ ID NO: 906504 - DNA, 120 bp, Artificial Sequence
  ENSG00000262833_23 (sequence is synthesized)
gcgtctagtgcctcgttactcatctcagcagtgactggcagacgttaatgaattactgattttcacctttaccagccaatattgtatatttatgttggaaagaaaggtattttttgaatc

SEQ ID NO: 906505 - DNA, 120 bp, Artificial Sequence
  ENSG00000256357_0 (sequence is synthesized)
agttcttggattgagggtcagtttcctgaggaaggaactcaaagcaatgcaagaatggactaatacgtctactgaaggacatcttggttggtcccagattttggcaattatgaaaaatct

SEQ ID NO: 906506 - DNA, 120 bp, Artificial Sequence
  ENSG00000256357_1 (sequence is synthesized)
gctatagatgtatgcaggttttctgtggacgtacgttttccactcctgctggccagacaacacatctacagggtgcagatgacctatgggcagccacactgtgatgcctgtgtgagggcc

SEQ ID NO: 906507 - DNA, 120 bp, Artificial Sequence
  ENSG00000256357_2 (sequence is synthesized)
ggatggcttcggaacatttgtgtgaagagggataacagatgctgcatgccagagggatggtggccataggccgcaagattcggttcttctggccgcagaagaccctgacttcacctttca

SEQ ID NO: 906508 - DNA, 120 bp, Artificial Sequence
  ENSG00000256357_3 (sequence is synthesized)
ggcctctgtttccttatcaacgaaataagagcatgtgattaattctgcaggtgcttccagcttggacttttttgcaaatattttcattcaactcactttagaaacctgcagggagtctct

SEQ ID NO: 906509 - DNA, 120 bp, Artificial Sequence
  ENSG00000286563_0 (sequence is synthesized)
cccgggcagtgaacatagtatccaatagaagaatctctgtacctgctgggtgaaagggaagaatttgaagcaggagacccaatagaaggctgtagcaatggttctggtggaagaagatgg

SEQ ID NO: 906510 - DNA, 120 bp, Artificial Sequence
  ENSG00000286563_1 (sequence is synthesized)
tgccctggacaagagtggttggggtggaagtgcagagaagttgtcagattctgaatgtgttgtgaagattgacttgcccatggactgcatgagacaggtgagataatgacaactccttac

SEQ ID NO: 906511 - DNA, 120 bp, Artificial Sequence
  ENSG00000286563_2 (sequence is synthesized)
tgtctctttttcagaataacagtaactcatatttgtttacccccttacaattttcgacatggtttatacatttattttctcattagaattccctacaacctttttatatatatcattatt

SEQ ID NO: 906512 - DNA, 120 bp, Artificial Sequence
  ENSG00000286563_3 (sequence is synthesized)
ttacatgtattttacatagacaagactggaagatcagagaggtgatttcttctagtgatttgatttttagttgttttgagccaagtttttttttttttgaaattgtcttgaaatatgctt

SEQ ID NO: 906513 - DNA, 120 bp, Artificial Sequence
  ENSG00000286563_4 (sequence is synthesized)
gatgggttttaagcacagaaattactaggtaagtttatactggtgatgaagggaaactggtgtcctctgatgtcacctatgttttataaataaattcacaaattccaaagccagagatag

SEQ ID NO: 906514 - DNA, 120 bp, Artificial Sequence
  ENSG00000286563_5 (sequence is synthesized)
ttccatatttagtttggtgaggattaaatgagtttatatatacaaagagtttagaacattgtctggtacatgtaagccctatataataataatcatgacaattattatttactattagag

SEQ ID NO: 906515 - DNA, 120 bp, Artificial Sequence
  ENSG00000286563_6 (sequence is synthesized)
tcagtacttccaaaagatatttgaaatggctattttaaaaaggcaaaacaaaacaaagaaaaaaatacaggaaaaatttgcattttgagttcctagaataaatcagttgctgcagttaaa

SEQ ID NO: 906516 - DNA, 120 bp, Artificial Sequence
  ENSG00000286563_7 (sequence is synthesized)
tcttgttgatttgtaattgaaatcaaattaggtcatctaaagaaatgaactttttatgaaattctaatcataattaaatgtgcagatccttgtacaaaggggctttgaaacaatattttg

SEQ ID NO: 906517 - DNA, 120 bp, Artificial Sequence
  ENSG00000286563_8 (sequence is synthesized)
gactttcttaaaagtcttaaagaaggcctttcaggcatgacgttaaatcttaatgcaaagaagtattgtatgcatgtgctaaacccacatattctaggtgtttattttttataagtgtcc

SEQ ID NO: 906518 - DNA, 120 bp, Artificial Sequence
  ENSG00000286563_9 (sequence is synthesized)
attttccctcctgttgccagagtgacttttaaaaatgcaaacacgatcatgtcactcccctgcttaaaattcttccctgactcttcattgcccacagtggtggtctcaagcttattttta

SEQ ID NO: 906519 - DNA, 120 bp, Artificial Sequence
  ENSG00000286563_10 (sequence is synthesized)
gtcatggaaccatttcttcaaattagaacttacacagaaattcaatatgtaaataaaatataggctgagttgctctggatgaagtacaggtgaggacctggcatctgcatttccagcttc

SEQ ID NO: 906520 - DNA, 120 bp, Artificial Sequence
  ENSG00000286563_11 (sequence is synthesized)
atctacctctctgctcgtgcaccttgttccatcctccaaccatcaggatataatcagaacccttcagtgtggtctaaacaacttccattcaacccataagttgccatgctggctgcactt

SEQ ID NO: 906521 - DNA, 120 bp, Artificial Sequence
  ENSG00000286563_12 (sequence is synthesized)
agtttgagcttagatgagaatctaacttactaaccaaactggtacaattttgaaaatgagttgttaaaaaattaacattatatgagttttgaaatatttacttattgttcaacaaactgg

SEQ ID NO: 906522 - DNA, 120 bp, Artificial Sequence
  ENSG00000286563_13 (sequence is synthesized)
caaactggttttatgttattgttaagcatataaaacaattccattaaaactgttttaaaaggtctctctaaaaatattaaagcaaaaataaaaaacaaagatcaaaaataaaaacaaaaa

SEQ ID NO: 906523 - DNA, 89 bp, Artificial Sequence
  ENSG00000262837_0 (sequence is synthesized)
ccaggctccagctatcctcccacctcaacctccagagtagttgagaccacaggcgtgcactaccacgcccggctacgccgtgttgccca

SEQ ID NO: 906524 - DNA, 120 bp, Artificial Sequence
  ENSG00000262837_1 (sequence is synthesized)
gattacaggcatgagccgctgcgcccaaccttcttctgctgtcgagatactgctcatcacctgcctgctccagaattcatgtggcttctcattgctcaatggattaagttcatgtttatc

SEQ ID NO: 906525 - DNA, 120 bp, Artificial Sequence
  ENSG00000262837_2 (sequence is synthesized)
ctggctttcaagtctttccgaagtgctgaatgaaagaacttgtaaggcatttcgggaatgccaaggagggaatggacgagtgtttcctgggctggaaaacctttacagagaaatggatct

SEQ ID NO: 906526 - DNA, 120 bp, Artificial Sequence
  ENSG00000260086_0 (sequence is synthesized)
gccggggccacccgcagcacgcagagcttctgggagccggtggcaaggccgaattgggatgcaaaccaaatggacgtgggtgactggcagaaaacgcctcccacaaatgggagggatttc

SEQ ID NO: 906527 - DNA, 120 bp, Artificial Sequence
  ENSG00000260086_1 (sequence is synthesized)
ggagggaaccgaaagaaagttgtaggcaatttgtgcgagcaaggggctcttctccacacagacactcagggaccacagtctccaccatcttatagaggcacttccttgaacatgtggtcc

SEQ ID NO: 906528 - DNA, 120 bp, Artificial Sequence
  ENSG00000260086_2 (sequence is synthesized)
tgaactactacagccaccccaaccttgagcaaccatcactctgatcaatcagcagccatcaacattgagacaagactctccaccagcaaaaagattatgacttgtccgggtgcggtggct

SEQ ID NO: 906529 - DNA, 120 bp, Artificial Sequence
  ENSG00000260086_3 (sequence is synthesized)
aaacctacgtgagcttatctgataccttcaagccctgttttgtggccccatctcctcttcagatggcaatgtgcctagctacactacatttcctgcctcccttgcagctagaggtggcca

SEQ ID NO: 906530 - DNA, 120 bp, Artificial Sequence
  ENSG00000260086_4 (sequence is synthesized)
atgagatataaacagatgctgtaagacatgatgtctagatccctagcagtcatcccagaccatgagataactttgagaaggaacaccatgtacaaaggactgtgcagaagagggttggca

SEQ ID NO: 906531 - DNA, 120 bp, Artificial Sequence
  ENSG00000260086_5 (sequence is synthesized)
ggagcctggatctctgatgacttcacccttgactgcccacctcaccaggctgtacaagccactgttactggcagatgaatgcaagttctaaaacatacaactactgacctactgaatttt

SEQ ID NO: 906532 - DNA, 120 bp, Artificial Sequence
  ENSG00000260086_6 (sequence is synthesized)
ccaaggagcacatttccactggagacatttggtgcctgcagaaaatacttactgaggaatttctatgggaccagcctgaagtagaagccactgaagagaggccctgaagcagcttttctt

SEQ ID NO: 906533 - DNA, 120 bp, Artificial Sequence
  ENSG00000260086_7 (sequence is synthesized)
ccttatcccagagaccaacatggttaccccagcccagagtcaccctccttcctctaagctgtcaaaaccctggctgcctttacaatgattctgacaatgaatcccaccctgctggtgatg

SEQ ID NO: 906534 - DNA, 120 bp, Artificial Sequence
  ENSG00000260086_8 (sequence is synthesized)
tctattgctttactgttaaactttttaagggttaaaattcctttttatttttctttttaaattgattaataatagttgtaccaatttggatggtacctgtaatattttgatacctacata

SEQ ID NO: 906535 - DNA, 120 bp, Artificial Sequence
  ENSG00000260086_9 (sequence is synthesized)
caatgtgtgatgaacaaatcagagtaattgggctagccatcacctcacacatttatctagggctgaaatccctgaaggacaggattgtgtcttacaaattgtgtattctaatctgcattt

SEQ ID NO: 906536 - DNA, 120 bp, Artificial Sequence
  ENSG00000260086_10 (sequence is synthesized)
agtggtgaatagggccttgggactgatgttaaaagccctggaacacaatagggagactcctgaactaggaagaagtcaaaagctctggtagcagcccccacaaattaagaaacctactca

SEQ ID NO: 906537 - DNA, 120 bp, Artificial Sequence
  ENSG00000260086_11 (sequence is synthesized)
gagtaaaagaaacaggccatggtgggtggccggggagcaaggaatatttgtgagtaaccccagatggtggcaatcatttaatgccctccatccctctcagtgtatattaggttatgtttt

SEQ ID NO: 906538 - DNA, 120 bp, Artificial Sequence
  ENSG00000260086_12 (sequence is synthesized)
aggttatgttttttttttagaaaatggaggaagggttttactatgttgcctaggccagtctcaaactcctaggctcaagcgattcacctgcattggcctcctaaattgctgggattacag

SEQ ID NO: 906539 - DNA, 120 bp, Artificial Sequence
  ENSG00000260086_13 (sequence is synthesized)
gtgcctggcccaagaagtctgagccagacgttgctgcataggtcagaactctgtgggctatgaatgtaagatattcacgagtcacatctattccattcattggcaaacacttacctgaaa

SEQ ID NO: 906540 - DNA, 120 bp, Artificial Sequence
  ENSG00000260086_14 (sequence is synthesized)
ccatacagcaaaagagattctggaaaatgtaccttccagccttagaagaaagtgatggtggtgcccagttgaccccaggcaagccggcccaggaatgcagacattttggactgctcatct

SEQ ID NO: 906541 - DNA, 120 bp, Artificial Sequence
  ENSG00000260086_15 (sequence is synthesized)
tttactactttgtgtagcctttcacagaagaattacacaagaacttgactcttgattccaaggattctggaagaatgccaaccaaactgaagtctacaagcctaaccatgttatgaaaag

SEQ ID NO: 906542 - DNA, 120 bp, Artificial Sequence
  ENSG00000260086_16 (sequence is synthesized)
gctggatgtgacatggtgaatcctccttagatgtgttaactagggttagggtaccagtgacatgcaaggggttggccatttgattaagtagaggaggcatgagtgaaagcagcacacctc

SEQ ID NO: 906543 - DNA, 120 bp, Artificial Sequence
  ENSG00000260086_17 (sequence is synthesized)
caccctgctcaatggccatcatcacctagccaggctgtgagcctccatggagtgggtagctgagaacccacaacccacaatatatcttctttctggccctgttaacatggacctgtctct

SEQ ID NO: 906544 - DNA, 120 bp, Artificial Sequence
  ENSG00000260086_18 (sequence is synthesized)
atgaggtgatggttgatatccagctaagtatggccctcttaatagtaatgtgggtggctttattcatattggcttcatgataaatggtatcactgagctgacttctctatgttttagata

SEQ ID NO: 906545 - DNA, 120 bp, Artificial Sequence
  ENSG00000260086_19 (sequence is synthesized)
gcactggagagtgcctgtccttggaattagttcttcttccctaattagagtacctcctaacatggtgccttcacccttcagcccaataagtgttcacaaaactgaccagaccacggaaat

SEQ ID NO: 906546 - DNA, 120 bp, Artificial Sequence
  ENSG00000260086_20 (sequence is synthesized)
caactgaagaagaggataaagagaaagaaaggaggcttgaatgttttcctttcaaggcaatatgttacttacttaatattagaattaactaattaaaaaacctcttagcttctcctatgg

SEQ ID NO: 906547 - DNA, 120 bp, Artificial Sequence
  ENSG00000260086_21 (sequence is synthesized)
gcagacattcttcaaagttaccatatcaggactggaggcaaataataaatatctaatggtacaacaggccacagtttttactatcctagtgaaatctgcatactttcaaaattaaatctg

SEQ ID NO: 906548 - DNA, 120 bp, Artificial Sequence
  ENSG00000260086_22 (sequence is synthesized)
cttgattccacccactagagtttgcaggtaacaacaatgacataatgatgatgtcgacagcaatgggtcttgctgattcagtgcttactattacctgtcacaatactaactgcaatgtac

SEQ ID NO: 906549 - DNA, 120 bp, Artificial Sequence
  ENSG00000260086_23 (sequence is synthesized)
tgctcatttctcacaacaaaccagaggatgagatgttattcctctccattttgtagataagctgactggggtacagagaggtaaagcggcttacctaaagacacacagcaagtgacaggc

SEQ ID NO: 906550 - DNA, 120 bp, Artificial Sequence
  ENSG00000260084_0 (sequence is synthesized)
tgacctggagtttccccgcttagacaatttcatatggttcaacttatccgcactttgtccagtaggtcacatgataggagatggcagtctcctgccatctggcaaaggtcagaaggcagg

SEQ ID NO: 906551 - DNA, 120 bp, Artificial Sequence
  ENSG00000260084_1 (sequence is synthesized)
gacttgtccctgcatgcaggaaacctggagaaaggcacgcagccaagcttgtacccacgctgtgccactcagaaggaagcgaaaactcagcactgcacatggccgagcagaccaaaagcg

SEQ ID NO: 906552 - DNA, 120 bp, Artificial Sequence
  ENSG00000260084_2 (sequence is synthesized)
actgcgagggaagacgttcagcccagaagtggaagtgagctgctgctaaggctttcggggaacgtagtccctagctgtgccacatgtccctgcgttcaggaggtgctctcttgacatgtg

SEQ ID NO: 906553 - DNA, 120 bp, Artificial Sequence
  ENSG00000260083_0 (sequence is synthesized)
ggacggagagcgggagttgcgaccggacgcgcgaggcagggccgaggccgtgtgttcagaccacgtgggcgcggggtgcgcgacagggtctgtgtcctgcgctgcgtgagccgcggtggg

SEQ ID NO: 906554 - DNA, 120 bp, Artificial Sequence
  ENSG00000260083_1 (sequence is synthesized)
tgtccgcgaaacgctgtgtgtggagtgcgtgcgtgtgtccgccctcgccaggctgttggtctacaccgcccaacttactcagtcatccattcattcaacagtcttgttaactgagtgcca

SEQ ID NO: 906555 - DNA, 120 bp, Artificial Sequence
  ENSG00000260083_2 (sequence is synthesized)
attacgctccaggcgctgcgaatacgagtgggtctccaccaccagaatggctaaagtgaaaaagaccgcaccgtgtggaggcgagaaagtagagcgactggacctctcttgtatttctgg

SEQ ID NO: 906556 - DNA, 120 bp, Artificial Sequence
  ENSG00000260083_3 (sequence is synthesized)
tccactcctaggctgtcaacacccagcagaaatgtgtaggtgtgagcatcaagagggtgcatgggaatgttcagagccctttcataacagccccaaactggaaataacccatcaacagaa

SEQ ID NO: 906557 - DNA, 120 bp, Artificial Sequence
  ENSG00000260083_4 (sequence is synthesized)
tggaaaatgaatgatgccctactcactaccatgcacatagacacagcaacgggattgacatgcccggctacacacagcaacatagacaagtcgcatgatgaaatcttgagtgacagaagc

SEQ ID NO: 906558 - DNA, 120 bp, Artificial Sequence
  ENSG00000260083_5 (sequence is synthesized)
caaatgcaacagtacatactagatggttccaggtgtattacgttcagaaccagacaaaactaatttatagtgcaccaaagtcaagatagtgatcgcccttagggttgggaggggacgagg

SEQ ID NO: 906559 - DNA, 120 bp, Artificial Sequence
  ENSG00000260083_6 (sequence is synthesized)
ggagagcttctgggagctgatccagttctgttgtgtaatctggtgctggttccctgggcatatgtattctgtgaaaatccatcacatgacttaaataaaatgtacattacttaaataaaa

SEQ ID NO: 906560 - DNA, 120 bp, Artificial Sequence
  ENSG00000260083_7 (sequence is synthesized)
aggatgcagaggaagcaggcaccaaaaacaacaacgacagtgacactgtgtggaggaacgaacctgatatttgatatttctgaaaatgcctcgagtcccaagaacccagcccctaagcct

SEQ ID NO: 906561 - DNA, 120 bp, Artificial Sequence
  ENSG00000260083_8 (sequence is synthesized)
tcagctctgtcccaggtctgcctctcctccaggccctcaggacgcaggctccaagccttcgactgcccagatcccccattccctccaagacccaggagtccagccttctggcctctctca

SEQ ID NO: 906562 - DNA, 120 bp, Artificial Sequence
  ENSG00000260083_9 (sequence is synthesized)
gagcacagccctgagacaagggcccaggcgcccagcggggctggtttcactcagtccagccgcacctacccgtgccctcaccagatcttaagatacagacattaaaacctccaccgggcc

SEQ ID NO: 906563 - DNA, 120 bp, Artificial Sequence
  ENSG00000260083_10 (sequence is synthesized)
gcggcacaggacagcagttttactttctgtttttggcattgcattgcctccatttcctagagtgcacgtaataaataccgctggtgattccaaaatataaaggttgaaaatatttacttt

SEQ ID NO: 906564 - DNA, 120 bp, Artificial Sequence
  ENSG00000260083_11 (sequence is synthesized)
acaaaaatttggttcccatactgcttttaaggccatcctctgcacttggttcccgctgctcctgatgtggttgaaagatggatgaccccaaagacgaggaaaagattattggctccattt

SEQ ID NO: 906565 - DNA, 120 bp, Artificial Sequence
  ENSG00000260083_12 (sequence is synthesized)
tttagatgcggcagccagctaaggtctagacaggggaagggacttgccccaaatcacagttagagcaaatcagtctgaatcaggaataactccattcctatcccgcatcctgccctttca

SEQ ID NO: 906566 - DNA, 120 bp, Artificial Sequence
  ENSG00000260083_13 (sequence is synthesized)
gagtttcccgccgcagaccaggcgaggccacgcgacatatcccctacccgcttactgcaggccgcagacggagacagtgcagccctgcgcactgctgaggttgcccgaggtctcagcctc

SEQ ID NO: 906567 - DNA, 120 bp, Artificial Sequence
  ENSG00000260083_14 (sequence is synthesized)
ggcgggtcgggaacacgcggcgcgcgcccgcgccccaaccggaagtccgccaccggccgctctagcacgcgcagggctgcgtctgtggccttaacccttcccaaggctgcgccgccggcc

SEQ ID NO: 906568 - DNA, 120 bp, Artificial Sequence
  ENSG00000260083_15 (sequence is synthesized)
ctttgtctccgcggagcgtcacaaagctgcctggctgcctggaggaacaaaggagggccgggcaagaacgccattaccaactgcaaatccacaggcaaatgcaagaggacagaaagcgct

SEQ ID NO: 906569 - DNA, 120 bp, Artificial Sequence
  ENSG00000286565_0 (sequence is synthesized)
gaacagaaggcattttgggctaaggacgctcacaacccggtttcctgtcccgcgtggttcatggggcttgccctgggcctgggaggccggtggcgggagcctcccctacagtgagcatcc

SEQ ID NO: 906570 - DNA, 120 bp, Artificial Sequence
  ENSG00000286565_1 (sequence is synthesized)
agacatgtattagtctgttcttgcactgtcataaagaaatacctgagactggaagtgcctttgggaggagaggaggcaaccgcagtccctgctgtgcagaaggcagtaagaaaatcgttt

SEQ ID NO: 906571 - DNA, 120 bp, Artificial Sequence
  ENSG00000286565_2 (sequence is synthesized)
gatcacctgttacgggaggcggaagggtggagagtgagcccattttgaaagagagactggaaccgatgatgagtagataaggccatgggagtctgctggattatggtggaactggaggtg

SEQ ID NO: 906572 - DNA, 120 bp, Artificial Sequence
  ENSG00000286565_3 (sequence is synthesized)
ggccttggaagatgagttaaagcaaacacgggaggagcatcttaggcattggccagggggcgtatgataagcaaagctacagataaatattcacaggaaagtgattcaaaacacatcaca

SEQ ID NO: 906573 - DNA, 120 bp, Artificial Sequence
  ENSG00000286565_4 (sequence is synthesized)
gttgcttaaattgagagaagactaaaacatatagcagcagaaattgcagtggagtgtgtcctagaaggaaggactcacatcttcttgggtatatgtctgaggcattatcatagcaggtga

SEQ ID NO: 906574 - DNA, 120 bp, Artificial Sequence
  ENSG00000286565_5 (sequence is synthesized)
ctgtctcaccccacccagcctaaaactgtgccagacctcagagaaaaagtccatgagaaaagagacctcaggaaaaattattcgctcacttccaaatcctttcacattagatcagctctg

SEQ ID NO: 906575 - DNA, 120 bp, Artificial Sequence
  ENSG00000286565_6 (sequence is synthesized)
ctgacaaatacaagagaaacaaataaagccctgccctgtggtagtgtccctcatgatggtgcgcattgggtataatgcaactagctgttgctcaggctgttctcccaagaggtgtactga

SEQ ID NO: 906576 - DNA, 120 bp, Artificial Sequence
  ENSG00000286565_7 (sequence is synthesized)
actcttggtccctgacttccctttcttacagcatttactttagaaaacttgtaaattgtccgtctgcccatttgagcctcttgtcagttttacaacccaggaatgcctttctccaggacc

SEQ ID NO: 906577 - DNA, 120 bp, Artificial Sequence
  ENSG00000286565_8 (sequence is synthesized)
tgggagccatccctttgacatgtgattgtaggagaagatagcattcctatctttagtttccctgggaaggtgggagtctaacttctgcaggtaccttgctccaagttgtaaactactaac

SEQ ID NO: 906578 - DNA, 120 bp, Artificial Sequence
  ENSG00000286565_9 (sequence is synthesized)
tgtcatgaggatatgagagtttcctttcccttagagtaaaggtgattagcaaacacagatggcccgggtcttccccttgtccaactcttttttctttttttttttttttttagacagaat

SEQ ID NO: 906579 - DNA, 77 bp, Artificial Sequence
  ENSG00000286565_10 (sequence is synthesized)
ccaactcttttttctttttttttttttttttagacagaatctctgtcacatgcctcccgggttcaagtgattctcct

SEQ ID NO: 906580 - DNA, 79 bp, Artificial Sequence
  ENSG00000286565_11 (sequence is synthesized)
gggactacaggcatgcaccactacacgtgcacctggctttgtttttttttttttgagaaagagtctcaaactgcaacat

SEQ ID NO: 906581 - DNA, 78 bp, Artificial Sequence
  ENSG00000286565_12 (sequence is synthesized)
tctcctgtcctcaagttgtctgcctgccttggcctcccaaagcactggggttacaggcatgagccactgtgcccgtcc

SEQ ID NO: 906582 - DNA, 120 bp, Artificial Sequence
  ENSG00000260088_0 (sequence is synthesized)
gtgcactggcgggccctcccctcgggcgttgcctcccacccacgcccggcggcaccgcaccccgaggcgcttcacgtcacggagctgctaggagacgggcggggctccggttccggacgg

SEQ ID NO: 906583 - DNA, 60 bp, Artificial Sequence
  ENSG00000260088_1 (sequence is synthesized)
tctcagctcactgcaacctcggagttttgctcttgtcgccccggctggagtgcagtggtg

SEQ ID NO: 906584 - DNA, 120 bp, Artificial Sequence
  ENSG00000260088_2 (sequence is synthesized)
agcctcccaagtagctgggattacagatggagttttgctcttgtcgccccggctggagtgcagtggtgcgacctcagcgatctcagcgatctcagcgatctcagctcactacaacctctg

SEQ ID NO: 906585 - DNA, 120 bp, Artificial Sequence
  ENSG00000260088_3 (sequence is synthesized)
caggcgtgagccaccatgcccagcctacacttgggcttcttaggcacaagatccagtaagccctccctcctcctccccaccccttttttctttacactagtgttttctgtaatcctgcaa

SEQ ID NO: 906586 - DNA, 120 bp, Artificial Sequence
  ENSG00000260088_4 (sequence is synthesized)
ctagtgttttctgtaatcctgcaacagaaagagtcctaactgatatatttgtgaccatttctaaaatctccaaaatgtaaaattatacaattaagaattaaaataattttttaaaaccaa

SEQ ID NO: 906587 - DNA, 120 bp, Artificial Sequence
  ENSG00000254844_0 (sequence is synthesized)
gtgctcttacttctcctggggtgggccacaggtctgaataccccctcttcctgtttgccttgctgctgcatccaagaggctttgggagcctccctcctcctgaaagcccccctggctaga

SEQ ID NO: 906588 - DNA, 120 bp, Artificial Sequence
  ENSG00000254844_1 (sequence is synthesized)
cctgccccattcaagttcatttctcccaccctcgagggagagctcaagtgtgtgcctctatctcctgcaaagaaaactgaattccatttaagggtttggcctacaccaatgagtccacat

SEQ ID NO: 906589 - DNA, 120 bp, Artificial Sequence
  ENSG00000254844_2 (sequence is synthesized)
cccttggccatcattttaaacacacgatgggtgacagaccacctggctgatgtgtggacgaccctaaaattcttatttaccgagtccaggagccagaattcttccctgttgctcccaagc

SEQ ID NO: 906590 - DNA, 120 bp, Artificial Sequence
  ENSG00000254844_3 (sequence is synthesized)
ctgccctgccctccccgcaccttccccaggccctcctagcatacctgctgttacggctcatcttcattgatttgcctggtgggggaaggaaaagcaacagaacactccgagtctgcactg

SEQ ID NO: 906591 - DNA, 120 bp, Artificial Sequence
  ENSG00000254847_0 (sequence is synthesized)
ggtgagcttgcctggggaatgcgtgggtgtttggaacccttgccttcctgcctaaagagtttcctgcaatcagttaagaaaagccccaccactccccctccgtcaattaactagataaat

SEQ ID NO: 906592 - DNA, 120 bp, Artificial Sequence
  ENSG00000254847_1 (sequence is synthesized)
acataaagtcaagaggaaacagtatttgtgatggtaaaaggaattttgattcacagttggaatcaaacctcgttgacactgatcatgacctcacctctagcctgtgtggtgttggggagc

SEQ ID NO: 906593 - DNA, 120 bp, Artificial Sequence
  ENSG00000254847_2 (sequence is synthesized)
gagaatgaagacttcagagtcagacagagctagatttgaagccagctggcgaacctctgttttctcttctgtaaaatgggtaactatagcacctacctgacaggttagcatctacatgat

SEQ ID NO: 906594 - DNA, 120 bp, Artificial Sequence
  ENSG00000254847_3 (sequence is synthesized)
ggataggtttctgtgcatggtacatggctggagtccaacaagaatttatttcaagtctgtctttttccactggagatcatcactgagttgcggtctcctgagcagaaagggggttggcag

SEQ ID NO: 906595 - DNA, 120 bp, Artificial Sequence
  ENSG00000232086_0 (sequence is synthesized)
aaaaaataaactggatcaaagctatactcaacttcaagatgactgttcactgagaaatgtgaaattaatatgaaatatgaaagaaaactcttactatgtaaatgaatcacagaatccaag

SEQ ID NO: 906596 - DNA, 120 bp, Artificial Sequence
  ENSG00000232086_1 (sequence is synthesized)
gtaaaagtagcctgcagcccacaccctggggtctgatgaaaggactcacactccagtctgcattcctgctgcacctgccagaccctgctgacaaaatttctgtttctccattgaccaaat

SEQ ID NO: 906597 - DNA, 120 bp, Artificial Sequence
  ENSG00000254842_0 (sequence is synthesized)
gcacggctgagaatgcagtcctgggcatattccacatccacagttctcagtggacacagggtctgatgcccgaggctccaagccgtgctccaggaagtgtatttcaagttgagctcacgt

SEQ ID NO: 906598 - DNA, 120 bp, Artificial Sequence
  ENSG00000254842_1 (sequence is synthesized)
tcccaagatgctgagattcttatgtagctgacaccggagctgaggctgagccccagccagggatatccaacgattgccagtaacaccacggaactgagtgaagattcaggggctgagtgt

SEQ ID NO: 906599 - DNA, 120 bp, Artificial Sequence
  ENSG00000254842_2 (sequence is synthesized)
gttcctgagtgcttcaaaccgggggacctggaaaccagaggactcctggggaaaggctgtcaactccagcctgctcttcctaaatggccttgttagtagtgacttcagccctggcggtga

SEQ ID NO: 906600 - DNA, 120 bp, Artificial Sequence
  ENSG00000254842_3 (sequence is synthesized)
ggcatgtgggtcagaataacattccctttcttttcccttcacctcttttttctccacggttccttttcataacttctttatttgctgcctagaggagctttctggacattttgtctccag

SEQ ID NO: 906601 - DNA, 120 bp, Artificial Sequence
  ENSG00000254842_4 (sequence is synthesized)
ggagcgtgacatgtcacctgtttctcacctcatatgcctctgatcttctacaccaaggtagctataaaggcttgctttctaggctgggtttccctgcacaggcccactgaaccactcaaa

SEQ ID NO: 906602 - DNA, 120 bp, Artificial Sequence
  ENSG00000254842_5 (sequence is synthesized)
cctcagaggtggaagtgcccagcgggcctcatggtcagctggggataacggagtcattttcgcagcccaacttctgaaattccacaagagggcgcccaaggtctcccaagtccggccacg

SEQ ID NO: 906603 - DNA, 120 bp, Artificial Sequence
  ENSG00000254842_6 (sequence is synthesized)
cccggtggccttgaggccggaaggtggcgctgttgctttagccatcaagaaaggcaaggctggggacgccgcatccccgggtgcggagggcgatgcctaggggcgatgctgtgcctgtgg

SEQ ID NO: 906604 - DNA, 120 bp, Artificial Sequence
  ENSG00000254842_7 (sequence is synthesized)
cggccaaacagtgccacccactccgggaaacaaagccaagcgccggacgctagcttcctaggtcttccacgtgttcaacggaaattcacaaattctctagtagcagaagccaagaacaag

SEQ ID NO: 906605 - DNA, 120 bp, Artificial Sequence
  ENSG00000254842_8 (sequence is synthesized)
ttctctggatcacataggctcctctgctgcttcctcagaaacagagatggtacttggtgccgaagaaagagacagagactgggaaggagaaggaagtcagcagaaagaagaaagacgcac

SEQ ID NO: 906606 - DNA, 120 bp, Artificial Sequence
  ENSG00000254842_9 (sequence is synthesized)
gttccaggagaagaaaagaaagtcagttgctttctgagatcaggtgggaagtttatcctgtcaactccacctttagagtgctagtctctggagccacaaggactgaaactctgcttcaga

SEQ ID NO: 906607 - DNA, 120 bp, Artificial Sequence
  ENSG00000254842_10 (sequence is synthesized)
gacccaccactgatgacaaccatcaggctcaggaactgaaaagaaatggtgcaaatgtggccgagggacttgggttttacatttattgccgagtctggttttcttgagtttcagatgata

SEQ ID NO: 906608 - DNA, 120 bp, Artificial Sequence
  ENSG00000254842_11 (sequence is synthesized)
aaattgaagcccagagaagcttgggagcctcaactattaatggaaaaaccataactagaactgagttttcctgagacattttttactattcattcccctgctcttgggccactccagggc

SEQ ID NO: 906609 - DNA, 120 bp, Artificial Sequence
  ENSG00000254842_12 (sequence is synthesized)
actgagcacacttgctttggctatttggagaagaggccaatagacacaactggcttcatcttcagggacacccaatatctggcagccctcagccccagcggagtctttattgaaagaact

SEQ ID NO: 906610 - DNA, 66 bp, Artificial Sequence
  ENSG00000254842_13 (sequence is synthesized)
ggcagccctcagccccagcggagtctttattgaaagaactgattcatagacggatctcagtcagga

SEQ ID NO: 906611 - DNA, 120 bp, Artificial Sequence
  ENSG00000254842_14 (sequence is synthesized)
tatgaaaagattcttatcatgattttcattttactagtccaaagatcactgagttaaactgcctattttagtagatgaacaaaagtgccttgaataaagacgtaattcaataaaaactta

SEQ ID NO: 906612 - DNA, 120 bp, Artificial Sequence
  ENSG00000226425_0 (sequence is synthesized)
gccctcgagcttctaggtgcctttctctcgccactccaaggtgaaagaactgggcttttctctcctttgctccgactatttcagggaaactgcagtcgtcgacgcctgcgttggcatcgc

SEQ ID NO: 906613 - DNA, 120 bp, Artificial Sequence
  ENSG00000226425_1 (sequence is synthesized)
tctcctccaggcagtgcaaaggcagtatctctctgaatcccgggacgtctcagccaaagcagggaagacaccccaagtacgctggaaggctgggtaaggcgcgaagggcagccccattcc

SEQ ID NO: 906614 - DNA, 120 bp, Artificial Sequence
  ENSG00000226425_2 (sequence is synthesized)
agtcttcaaagagagctagctgttcaccgctcctctcctccagatttcaccgtgcctgaagaactaccatgcttttcatgtaatatttttaaaaacattaaatactttggattaagagat

SEQ ID NO: 906615 - DNA, 120 bp, Artificial Sequence
  ENSG00000238122_0 (sequence is synthesized)
acaggcgtgagacaccgcgcccggccggaaagtggctattttaagaagattgagaacatgtttcgttgggtcgcattattctgcgtgacgaggctcacagaggagaaccccacccttact

SEQ ID NO: 906616 - DNA, 120 bp, Artificial Sequence
  ENSG00000238122_1 (sequence is synthesized)
cgaggctcacagaggagaaccccacccttactccaaaggcctttgaaagcagctctggaaagggcagggtttgcttctccctctgcccaacgtctccccaggctgcctgtgccaccttcc

SEQ ID NO: 906617 - DNA, 120 bp, Artificial Sequence
  ENSG00000238122_2 (sequence is synthesized)
ggtctcacctcctcggagttggggtcaaacgcggagctccagtttctcagcccctcctggagctcaatgatgtccaccacgccgtccccattgcaatccaggtcttcgaagaggatcccg

SEQ ID NO: 906618 - DNA, 120 bp, Artificial Sequence
  ENSG00000238122_3 (sequence is synthesized)
tagcgtaagtagtcatcgttatcctggcaggccaccgcctccagcacgaagccctgcatccagagcagcatggctgggtccagaggctgcggggaccactcggccacccagccagcaccg

SEQ ID NO: 906619 - DNA, 120 bp, Artificial Sequence
  ENSG00000238122_4 (sequence is synthesized)
cagcactcgccgccgcctcctcgacgcctggctgcgcaaggcagggggtcccggccgtccgccagcttctgcaactgtctagcggagccgccgcagttcggagcccacgcgggccaagcc

SEQ ID NO: 906620 - DNA, 120 bp, Artificial Sequence
  ENSG00000238122_5 (sequence is synthesized)
acccgcgcctgcgggctcttgggcgccacggaaaggctgcgccaccttgtgggacctctggccgaggcgccacgcgacagttgagacgccagatgtgagttgaggtgccagacgtgagtt

SEQ ID NO: 906621 - DNA, 120 bp, Artificial Sequence
  ENSG00000238122_6 (sequence is synthesized)
gaggtgccagacgtggcggcgttgggtacccaggaccctcggacgggtctgctgcggcttgctgggggtccactccagaccctgttcgcctgggtatcaccagtggagtttgcagaacag

SEQ ID NO: 906622 - DNA, 120 bp, Artificial Sequence
  ENSG00000238122_7 (sequence is synthesized)
caaagattgctgcttgctccttcctccagaagcttcttcccacagtggcatcaacctgattgatgtcagccggaactctcctgcatgaggtgtctggcgacccctgatgggaagtctcac

SEQ ID NO: 906623 - DNA, 120 bp, Artificial Sequence
  ENSG00000238122_8 (sequence is synthesized)
ccagtcaagaagcacgggactggaagggggacctccttacggaggcagactgactgtcccttagcagagctggtgcactgtattggaggaataaccctccttgggatcagctggtctctt

SEQ ID NO: 906624 - DNA, 120 bp, Artificial Sequence
  ENSG00000238122_9 (sequence is synthesized)
agattagagttcttgtctgtaagcccctgactgtagctactggaattcctgcagggatgccctccaggtgaggagggatggcttcgggtcccacctaggaagcagtctggccacgatctg

SEQ ID NO: 906625 - DNA, 120 bp, Artificial Sequence
  ENSG00000238122_10 (sequence is synthesized)
caacagccactttgctgcgttgtggggaattccacccagtccaaacctcctagtctccttagcactgtcaggggaaaacctccaactaaagcctcagtaatgacggtcgcccctccccct

SEQ ID NO: 906626 - DNA, 120 bp, Artificial Sequence
  ENSG00000238122_11 (sequence is synthesized)
gggaactgagttgtcccaggcggactccagactgctgtgccggcagcggggatttcaagccagtggttcttagcttgcggggtttccgtgggagtgggaccctctgagcgagaccacttg

SEQ ID NO: 906627 - DNA, 120 bp, Artificial Sequence
  ENSG00000238122_12 (sequence is synthesized)
gctccctggctacagccccctttccacagaagtggacatttctcctgcctcactggagttccaggtgctgccggagtatgtaaaaattcctgcagctcagtgcctgcccaaacagccgcc

SEQ ID NO: 906628 - DNA, 120 bp, Artificial Sequence
  ENSG00000238122_13 (sequence is synthesized)
gacgggagcagctgtcattggtctgcccagttttgtatttgagacccagggcactggtggttgtaggctcccgaggggatctgctgatctgtggattgcaaaaatctgtgggaaaagctt

SEQ ID NO: 906629 - DNA, 120 bp, Artificial Sequence
  ENSG00000238122_14 (sequence is synthesized)
agtacccttggtgggtagcactgtccctcaccacttcccttggctggggagggaggtccccctgccctgtgcagttcctgggtgaagcaataccctgcttcttctcgctctctgtgggtc

SEQ ID NO: 906630 - DNA, 120 bp, Artificial Sequence
  ENSG00000238122_15 (sequence is synthesized)
atctcagttggaaatgcagaaatcacccacattcctcgttcctctcgctggcagctgcagaccagagctgcttctagtcggcagtcttggcccctccccgccgaggtaagtttaataagt

SEQ ID NO: 906631 - DNA, 120 bp, Artificial Sequence
  ENSG00000238122_16 (sequence is synthesized)
gcagtcttggcccctccccgccgaggtaagtttaataagtcttctaaatttgtccttgccataatgatcagtgatgatctgtcttttaataagttaaatgctttccagacttcaagactc

SEQ ID NO: 906632 - DNA, 120 bp, Artificial Sequence
  ENSG00000238122_17 (sequence is synthesized)
tcacccacatcaaaaataaaattatatatcggccatattaccaggattttagaatgttgtattttatcctctaattataggtcaaataactaaggtagaaaggagtaaagcaacttccat

SEQ ID NO: 906633 - DNA, 120 bp, Artificial Sequence
  ENSG00000238122_18 (sequence is synthesized)
gtatgtagtgaggatgttggggggtctgggactaaaattctgccttgggattcccaagaggttggtgattatgatttttgtactcttagacacaaaataaaataacattctgttttgttc

SEQ ID NO: 906634 - DNA, 120 bp, Artificial Sequence
  ENSG00000261082_0 (sequence is synthesized)
ggagctcctcaggctcacagaaaattcacagcaaaactaaagtgaaccccataaagcttgttctgggttttcttctgcagaaaagattaaaggaaaattgttttagcagaaagaaagctc

SEQ ID NO: 906635 - DNA, 120 bp, Artificial Sequence
  ENSG00000261082_1 (sequence is synthesized)
catcctcaggaaaggcaagcaagggagctgcagctaagggaagggcaatgaagaaggtggcagccagactgaagggaagaggggctgcaagacttggagttggtgatggcaaccctggag

SEQ ID NO: 906636 - DNA, 120 bp, Artificial Sequence
  ENSG00000261082_2 (sequence is synthesized)
ttgggattcatgctagatcaagaaggaagaacccagaagcagcccagaggcttcacagctacataagaaaaaaaagggggccaggcacgatgcctcatgcctgtaatccagcactttggg

SEQ ID NO: 906637 - DNA, 75 bp, Artificial Sequence
  ENSG00000261082_3 (sequence is synthesized)
aggaggcggaactgcggtgggcagagatcacgccactgtactctattctgggtgacagagtaagactccatctca

SEQ ID NO: 906638 - DNA, 120 bp, Artificial Sequence
  ENSG00000238124_0 (sequence is synthesized)
tggctacagatgtgaattctcgaattctttcaaactgcagactaggagtgaaagctgacgagtaaggatgaatcactggccttacttctaacacaaggaagggagccttgaaaggtaaga

SEQ ID NO: 906639 - DNA, 120 bp, Artificial Sequence
  ENSG00000228317_0 (sequence is synthesized)
ggccggcctcctcaccaaggggtaggcaggtgcccagaatgctggaggatgcccggtaagggcacccgagtcgccagcggtacctgtctgaaggcgcccacccatccccgggtaccgacc

SEQ ID NO: 906640 - DNA, 120 bp, Artificial Sequence
  ENSG00000228317_1 (sequence is synthesized)
tgagcctcccgtaccttacctcactcaacagcaggctgcagccgctccgctttacggcactcacagcaaccgccgcaaaagccgccgtcaagtgctgagcggcggaggctggcttggttc

SEQ ID NO: 906641 - DNA, 120 bp, Artificial Sequence
  ENSG00000228317_2 (sequence is synthesized)
ctgctgggacgttcccacggtccagccccagcctcggctttcctgtgactcttgtcgcatcctcaccgccagaagttcactgagccctggcgattcctcgcttttataatctagccactt

SEQ ID NO: 906642 - DNA, 120 bp, Artificial Sequence
  ENSG00000228317_3 (sequence is synthesized)
gtttaagttctgaaacgctttcgacagcggaagatgaactggaggcagcagctgagccgttttccaagcccgttaaatgtgaacttctgataaacgagtggtttttttaaaatttcctat

SEQ ID NO: 906643 - DNA, 120 bp, Artificial Sequence
  ENSG00000228317_4 (sequence is synthesized)
gcacatacaagcttactgttgaagtcctctcatccaatgcactcagaacgggactgtaagtccagctgctgtgtatcatcacctcagcccgattggtcctcggccacacttcacttcagc

SEQ ID NO: 906644 - DNA, 120 bp, Artificial Sequence
  ENSG00000228317_5 (sequence is synthesized)
ttctgataggtcctgggccaagctaagcagcatctatgaatcatttcacctcctgactggtcccgggccaagccgagtcacgcattcgccaagacagcccccagactaagcacattcctt

SEQ ID NO: 906645 - DNA, 120 bp, Artificial Sequence
  ENSG00000228317_6 (sequence is synthesized)
ccccttccgtccataaaaacctggaccccagcctcatgatgggcactcccgttcgggaccccctctctgctggcagagagctttcttctttcaccttattaaactttcactctaacctca

SEQ ID NO: 906646 - DNA, 120 bp, Artificial Sequence
  ENSG00000261087_0 (sequence is synthesized)
gaacaagaacatcaatctttgaaatgatgccaagtataagcctctgtgtgtgtgtctccccactccaatttgtccaacagactgcttccaaagaaatcttcctaaaacactgaccatctt

SEQ ID NO: 906647 - DNA, 120 bp, Artificial Sequence
  ENSG00000261087_1 (sequence is synthesized)
ttttttttttttttttggctgcaaaatctttcatttcctcatcccctcacataacttccaatcttcttggcctggcactaaggacctactacagactggcactgaaatatcttccctacc

SEQ ID NO: 906648 - DNA, 120 bp, Artificial Sequence
  ENSG00000261087_2 (sequence is synthesized)
ttatcattccttgtgcttctccacaagcccactcttccccttcatcatacatgtgccgacctttcctgtctcttttactttgcagcaccaaatgctttctactttgtggtctaggaggaa

SEQ ID NO: 906649 - DNA, 120 bp, Artificial Sequence
  ENSG00000261087_3 (sequence is synthesized)
cacatgtcacttttgtaagctgctcgaaagcaggggccacaccttcatccttgttttccacacaacaccaagcacttagtagacacccaataaatcattgctgaatgaatgtattcagcc

SEQ ID NO: 906650 - DNA, 120 bp, Artificial Sequence
  ENSG00000261087_4 (sequence is synthesized)
tggaattgcactaggattttttggccaacacattgtattcttaactgataccagacttccaatcaaataaaatccttaagcctttttcatagtctttaattaaactacttctcttccatt

SEQ ID NO: 906651 - DNA, 120 bp, Artificial Sequence
  ENSG00000261087_5 (sequence is synthesized)
atttccctttgcctacttttgaactgatattcagaacttttctgttaatgtttaattttcatccattattcttgtctgtacagatctttttgatttttgactctcttatctagttttttt

SEQ ID NO: 906652 - DNA, 120 bp, Artificial Sequence
  ENSG00000261087_6 (sequence is synthesized)
tttttttttttggcttcccgttgtgttatccacaggcacaatgggtatattgactatcgttcattgaagttgttgatacaaatgttgaacaggagaaaaaccagtagcttgccaacttgg

SEQ ID NO: 906653 - DNA, 120 bp, Artificial Sequence
  ENSG00000261087_7 (sequence is synthesized)
cacctcattctctagcttgacagtaatctcttatctagtagtttttagatatggttatttaatcaaatatcactagcttctaattttgttataattcattcatgtatacagacaatgaag

SEQ ID NO: 906654 - DNA, 120 bp, Artificial Sequence
  ENSG00000261087_8 (sequence is synthesized)
aatcatctttcttcattcaacacatttattgggaaccaatcattgtccaaggcaatatgctaggcattgtgtaatagaaagcgattaagcttttacccctgtcctctttggcctgcaaag

SEQ ID NO: 906655 - DNA, 120 bp, Artificial Sequence
  ENSG00000261087_9 (sequence is synthesized)
agcaggtaagattcatgcacagacaaatgtagtaccaggtaaatagtgaggccaaacacaagaggcaggtcaaagggctttggattcagaggatggagaagctctttctaggctggtgaa

SEQ ID NO: 906656 - DNA, 120 bp, Artificial Sequence
  ENSG00000261087_10 (sequence is synthesized)
atatttgcagaatgagtaggctcataagtggaggtgaggtacaggctaagctgctgtaagaaagagtccaaaatgcaaaggatttaccacaatgcagttaatttttctcacaacggtcga

SEQ ID NO: 906657 - DNA, 120 bp, Artificial Sequence
  ENSG00000261087_11 (sequence is synthesized)
caggatgaccgctccagttctcatcatctcccaggcagaaaaacgggagaaagagaactagacgtaccacccagtcattttaaggacatagccaggccaggtgcagtgactcacatctgt

SEQ ID NO: 906658 - DNA, 120 bp, Artificial Sequence
  ENSG00000261087_12 (sequence is synthesized)
aatccaagcactttgggaggtcgaggctggaggatagcttgaagccaggagtttgagaccagcttggataagaaagcaagaccttgtctctacaaaaaatttaaaaattaaccatgtgtg

SEQ ID NO: 906659 - DNA, 75 bp, Artificial Sequence
  ENSG00000261087_13 (sequence is synthesized)
aggctgaggtggaaggatcacttgagcacaggagttggaggatacagtgagccatgatcacaccacctcaaaaca

SEQ ID NO: 906660 - DNA, 120 bp, Artificial Sequence
  ENSG00000261087_14 (sequence is synthesized)
agtgagaccccatctctttaaaaaacaaaacaaaaaaacatcaccaggaagttgcttacatgtcttctattcctataacatcggcctgagcttagtcacatggccacacccagcagaaag

SEQ ID NO: 906661 - DNA, 120 bp, Artificial Sequence
  ENSG00000261087_15 (sequence is synthesized)
aactctaggaaatatggtcttatgctaggtaaccccaaacccagctaaaactgttgcttttgaagaagggtgaaacagacaatgtggaggagaattaccagtctgccacaaagagaaaga

SEQ ID NO: 906662 - DNA, 120 bp, Artificial Sequence
  ENSG00000261087_16 (sequence is synthesized)
attctatgtgaggaaaacgctctagaagagggagctgattaattagttatatctcagccgagaggatgttatgagaaacacagatttgggtttaatagaaaaacttagaacccttcaaga

SEQ ID NO: 906663 - DNA, 120 bp, Artificial Sequence
  ENSG00000261087_17 (sequence is synthesized)
aggaatgggcggacttgagagtgtcctccgcttctgaaaatgatcaagaaaaatggtaagaatgtacacctcaagggtggatggtaaaggtcagcctttaagcctcaatggcggtgtggt

SEQ ID NO: 906664 - DNA, 120 bp, Artificial Sequence
  ENSG00000261087_18 (sequence is synthesized)
tgtaggtggggtgggggtggaggccccgaagacaggcagactaccacagtagccccgatggaagcagtgagaatgaactggaaggagcggctgtgggagcgacaacgtgatgagaataaa

SEQ ID NO: 906665 - DNA, 120 bp, Artificial Sequence
  ENSG00000261087_19 (sequence is synthesized)
cccggcttggctctgccctgtgcacacacaggtgagctgtgtgctcccggatgtgtcagctggtatatgcgtctgtcagaaggcagctggggagcactgttagctcagagactaagaggc

SEQ ID NO: 906666 - DNA, 120 bp, Artificial Sequence
  ENSG00000261087_20 (sequence is synthesized)
agacccaggaagcccttctttgcattggtcagggtttgctgcattttcccaagcccaggaaatggaacccagttcttcttctttctgtgtaaaataataagcatcacaataggctgtgct

SEQ ID NO: 906667 - DNA, 120 bp, Artificial Sequence
  ENSG00000261087_21 (sequence is synthesized)
catgagaacgcattttgtttccacagaaatgttttttctcactctgtcctgattttgatttctgttaaactcagtaaacacattaccaaattttaaaataaggtgacttgttttccccaa

SEQ ID NO: 906668 - DNA, 120 bp, Artificial Sequence
  ENSG00000261087_22 (sequence is synthesized)
ctcacagttcaccaaaggtatttcatctgtttgttctgaaaatgcagctgctgtctagatttatgtgtgctctgacaagaaatgttttgtgtaacaataaaaatcatttcctttgatgaa

SEQ ID NO: 906669 - DNA, 120 bp, Artificial Sequence
  ENSG00000228318_0 (sequence is synthesized)
gtccaccctttgagtgctacgggccagatgtctttggatcagccttgggggagtgaagaaggaagtgcataaggcccagggtcccttttttgaccatgacatgtgcttctccagctccat

SEQ ID NO: 906670 - DNA, 120 bp, Artificial Sequence
  ENSG00000228318_1 (sequence is synthesized)
gcagctggcaacactcacatctatcaggaagaacattttttcattttcgtcttccggtatgtcgacaccatacttttgtagctcctctgttattctctgaccacattgctttctgcatcc

SEQ ID NO: 906671 - DNA, 120 bp, Artificial Sequence
  ENSG00000228318_2 (sequence is synthesized)
atccatcaatggacactgaatcatctcatcttctggcaattgtgaatgtgcagaacaggatggcttcggacaggctcagctggtcctggatctcctgctggccccggcacttgacaatca

SEQ ID NO: 906672 - DNA, 120 bp, Artificial Sequence
  ENSG00000228318_3 (sequence is synthesized)
tgtaacccttcttcaggtggaacacgaggttccgcaccacgtccacaaccttgtcttcagttcctttgtccaccagatcaggcttcgtcaagattcctgcgagccagatgtatttgggga

SEQ ID NO: 906673 - DNA, 120 bp, Artificial Sequence
  ENSG00000228318_4 (sequence is synthesized)
caactgctcacgcccccggcctcccagggtttcctcccatccttgcttgaggacaggccatagcccctgcagaaccatgggggcagtggagccccgctccagaaaagaactccacgacaa

SEQ ID NO: 906674 - DNA, 120 bp, Artificial Sequence
  ENSG00000228318_5 (sequence is synthesized)
gccgcgtgaaggcagggatgcctcccagaacagcatgtggctctccccaagctccttcacccgggtccactgtagaacacgccacgttttgtttatcccttgagttatggacatcccatc

SEQ ID NO: 906675 - DNA, 120 bp, Artificial Sequence
  ENSG00000228318_6 (sequence is synthesized)
tcaaatgcattcttaatgagtaccatgtgcctcctgagtttgacctgcttccgagcccactgtgcctttctgagcaagtagataaggcttacaaggcaacctagccagtgagagtcaaaa

SEQ ID NO: 906676 - DNA, 120 bp, Artificial Sequence
  ENSG00000228318_7 (sequence is synthesized)
gcagctcatttcacttggccttggtgggcaccaaacctgctcccttagcaggtcttagtggaggcaggtccccactgagcaaagcccatggagactggagggacgcttgcccactggcag

SEQ ID NO: 906677 - DNA, 120 bp, Artificial Sequence
  ENSG00000228318_8 (sequence is synthesized)
accaccgagcacaggcgggctcccccattctcaccgagcacaggcgggctcccccattctcaccgagcacaggtgggctcccccattctcaccgagcacaggcgggctcccccattctca

SEQ ID NO: 906678 - DNA, 120 bp, Artificial Sequence
  ENSG00000285783_0 (sequence is synthesized)
gtagagatggggttttgccatgttgcctgggctgattgtgaacttctaggctcaagccatctgcctgccttggcctcctaggattacagggaggatctgtggagcagcagcattggaatt

SEQ ID NO: 906679 - DNA, 120 bp, Artificial Sequence
  ENSG00000285783_1 (sequence is synthesized)
aattacctgagaccttatgagaaatgcagactaccgggctccacttcattcttagtgagtcacaagactcactaagatcttaacaagatcctcagataactggaggtttgtgcagctaaa

SEQ ID NO: 906680 - DNA, 120 bp, Artificial Sequence
  ENSG00000285783_2 (sequence is synthesized)
atatctgactcctaaaatggagtttcctgaaattattccttactcatagtgtaatgaggtgtacgtgttggatctattataactttctttcactccatctctcagaatagatgatcatcc

SEQ ID NO: 906681 - DNA, 120 bp, Artificial Sequence
  ENSG00000285783_3 (sequence is synthesized)
tcatctttgcatcatattccaattagaaagggatgatacaacaagaaagctctcgtaagatgtcagctgcttgattttggacttcgcaaactctagaacttttctcttgcttgctcctgc

SEQ ID NO: 906682 - DNA, 120 bp, Artificial Sequence
  ENSG00000285783_4 (sequence is synthesized)
catgtaagaagtgcctttcgtttccggccatgattctgaggcctccccagctgtgtggaactaaattatatgttcattccaaggagttaagtctcaactgaccatggaaagaatatggca

SEQ ID NO: 906683 - DNA, 120 bp, Artificial Sequence
  ENSG00000285783_5 (sequence is synthesized)
gatataacagcacgtaatttccaaggcaaggtcataaaagacattgtagcttctgccttgtcccttcctcttggatctcttgctatggagtagcagccccatgaagacacccgtggtgga

SEQ ID NO: 906684 - DNA, 120 bp, Artificial Sequence
  ENSG00000285783_6 (sequence is synthesized)
agatcactgaggactcctgccaacagccacccagtgactgaggcctcttgcagaaatccatatgagtgggccagctgacaagaaaatcttccagctctagtcaagccttcaggtgagcaa

SEQ ID NO: 906685 - DNA, 120 bp, Artificial Sequence
  ENSG00000285783_7 (sequence is synthesized)
tctgtccacactctcagctactagaggatggagactggcaggagaaaagcagaaggttctggagtccagaaattgtgagcatatcagcattaagtaccactgaggtggcaatgcacactt

SEQ ID NO: 906686 - DNA, 120 bp, Artificial Sequence
  ENSG00000285783_8 (sequence is synthesized)
caacttcttcttcagtcacaaagagttacatctcatcacagacaaatgatacgcacaaacgggacacatatgcagccactcctagagctcatgaagtttcagaaatttctgttagaactg

SEQ ID NO: 906687 - DNA, 120 bp, Artificial Sequence
  ENSG00000285783_9 (sequence is synthesized)
tttaccctccagaagaggaaaccggagaaagggtacaacttgcccatcatttctctgaaccagagataacactcattatttttggggtgatggctggtgttattggaacgatcctcttaa

SEQ ID NO: 906688 - DNA, 120 bp, Artificial Sequence
  ENSG00000285783_10 (sequence is synthesized)
tttcttacggtattcgccgactgataaagaaaagcccatctgatgtaaaacctctcccctcacctgacacagacgtgcctttaagttctgttgaaatagaaaatccagagacaagtgatc

SEQ ID NO: 906689 - DNA, 120 bp, Artificial Sequence
  ENSG00000285783_11 (sequence is synthesized)
aatgagaatctgttcaccaaaccaaatgtggaaagaacacaaagaagacataagacttcagtcaagtgaaaaattaacatgtggactggacactccaataaattatatacctgcctaagt

SEQ ID NO: 906690 - DNA, 120 bp, Artificial Sequence
  ENSG00000285783_12 (sequence is synthesized)
tgtacaatttcagaatgcaattttcattataatgagttccagtgactcaatgatggggaaaaaaatctctgctcattaatatttcaagataaagaacaaatgtttccttgaatgcttgct

SEQ ID NO: 906691 - DNA, 120 bp, Artificial Sequence
  ENSG00000285783_13 (sequence is synthesized)
tttgtgtgttagcataatttttagaattgtttgagaattctgatccaaaactttagttgaattcatctacgtttgtttaatattaacttaacctattctattgtattataatgatgattc

SEQ ID NO: 906692 - DNA, 120 bp, Artificial Sequence
  ENSG00000285783_14 (sequence is synthesized)
cccaaagtgggatgcttgctttgctcacattgattgcgtctcccagtgcctccccgcgcctcatctctgtcgtcatcctttttctactgcaggctcatcagagaacacaagtagctcaca

SEQ ID NO: 906693 - DNA, 120 bp, Artificial Sequence
  ENSG00000286368_0 (sequence is synthesized)
acacagggagatcattttgtgaggatgaaggcagggatccgggtgatgcctctaccagccaaggaacaacaacgatgggcagcaaaccaccggaagccaggggagaagcctggaacgcat

SEQ ID NO: 906694 - DNA, 120 bp, Artificial Sequence
  ENSG00000286368_1 (sequence is synthesized)
tcgccctcaccggccccgaaaggaacagatcccataacgctttgatctcagacttccagcctccagaactgtgagacaatacatttctgttgttgaagccacacagtttgtggtatttta

SEQ ID NO: 906695 - DNA, 120 bp, Artificial Sequence
  ENSG00000286368_2 (sequence is synthesized)
acggtcagctttatgcttagagggaggtgtgagagtctcatagtaacacacagaaatctgcattatttatgactaaaagcaaaagcaaaatgtcttgtttgtcagtcactcccctctagg

SEQ ID NO: 906696 - DNA, 120 bp, Artificial Sequence
  ENSG00000286368_3 (sequence is synthesized)
agagcagacttcacggagcttgtccacaccttccagaggatttagagtcttgcggaaatttattcctattttccatctccttagctgacatctcaccctctgctatgatgtcaattaatg

SEQ ID NO: 906697 - DNA, 120 bp, Artificial Sequence
  ENSG00000246477_0 (sequence is synthesized)
cattctcttcattcaagtgtttaacagcacatttatcaaaggcagctctccgatgcaatgtttaacgagtgtcttctcaggagtgtatccgtgtcatttattcttctcatccagctctag

SEQ ID NO: 906698 - DNA, 120 bp, Artificial Sequence
  ENSG00000246477_1 (sequence is synthesized)
gttgaggagcatgaaacacacactgaaactccggcatggcaggacttaatccacagaacaaggatttcatcccatcacttatctctaagctccacaaggaggtttggtacaaagcaatta

SEQ ID NO: 906699 - DNA, 120 bp, Artificial Sequence
  ENSG00000246477_2 (sequence is synthesized)
aatcatccttcaggccacccagctcccaatgtgggttttctcccaaacagctacgctcatttcagttattaaatgtgacagtggctttaagtacattgtcccagaagtcctaaacaggaa

SEQ ID NO: 906700 - DNA, 120 bp, Artificial Sequence
  ENSG00000246477_3 (sequence is synthesized)
gaatactgtaacctctcgtttaagagatcatgaaccctgtactgactgtgacgacaatcacgaaagtaagcaaagagaagttctgagcagtcaccatcccttcacaaatcaaagcactaa

SEQ ID NO: 906701 - DNA, 120 bp, Artificial Sequence
  ENSG00000246477_4 (sequence is synthesized)
agctcacacccagaacctcaagaccatctaagaccatttccccacaatgctaactaggggacacttcaatagataagattagaagcatgaactgaggtggaaggaagccactaatggcag

SEQ ID NO: 906702 - DNA, 120 bp, Artificial Sequence
  ENSG00000246477_5 (sequence is synthesized)
ataagccaagaggaactagatgtgacagctgacatccagagaagagacagaaactgatttggtctcagactcagaagccaaagcaatctgagacccgtttccacaaagggcaaatagttt

SEQ ID NO: 906703 - DNA, 120 bp, Artificial Sequence
  ENSG00000246477_6 (sequence is synthesized)
tccacacgtgaactgcctttgagagtataacatactagaatacggcgtaacaactggcattaacggtaattcggtttaatttaacaaacagctaccattcttgtatgtatactttatgct

SEQ ID NO: 906704 - DNA, 120 bp, Artificial Sequence
  ENSG00000246477_7 (sequence is synthesized)
attaaacataaacatgaataaatgtgtgcttattatcttcaaaataactttaaaaattaaatggtattttagaggctttgtttaatgaaacactatatagttcagatagattttggttat

SEQ ID NO: 906705 - DNA, 120 bp, Artificial Sequence
  ENSG00000246477_8 (sequence is synthesized)
ttatttttatctttatttttatctttttgagaaagtctcgttgtgtcaccctggctaaagtgcagtagcatcatctctgctcactgcaacctttgcctcccagattcaagtgattctcct

SEQ ID NO: 906706 - DNA, 61 bp, Artificial Sequence
  ENSG00000246477_9 (sequence is synthesized)
tgcaaccttcccgcaccaccaaattggcctgtttaatttttgtattttcagtagagatggg

SEQ ID NO: 906707 - DNA, 89 bp, Artificial Sequence
  ENSG00000246477_10 (sequence is synthesized)
ttttggttatgttttaattaataagcttccatacttaaggggataagcttcaatagttggaaaaatcagtgcatataaaaaatctactt

SEQ ID NO: 906708 - DNA, 120 bp, Artificial Sequence
  ENSG00000246477_11 (sequence is synthesized)
tcaatagttggaaaaatcagtgcatataaaaaatctactttagaatagatttaaaaattaagcatatagtcccataagaacaatgaaatatctgtgttactgcactgatggtattttgtg

SEQ ID NO: 906709 - DNA, 120 bp, Artificial Sequence
  ENSG00000246477_12 (sequence is synthesized)
cccatttatagaaacttactggaatgcccagccatgtaactctttaataccatttaatacaagaacctatcctaatgactgcttcattaagggacagaaactctccctgatgagcttaca

SEQ ID NO: 906710 - DNA, 120 bp, Artificial Sequence
  ENSG00000246477_13 (sequence is synthesized)
atttattcatgtcccaactacttaccaactctcttaggcaaagagtaaggtactttcttatctagaaaaatatccaacataaacagcaatgtaaagaaacactgttaatttctcaatggt

SEQ ID NO: 906711 - DNA, 120 bp, Artificial Sequence
  ENSG00000246477_14 (sequence is synthesized)
aactgaaaaaaaaaaaaagtgtggctagataactgatttgaaagagaaaaacatgcccacactgagaatgacaattcacacaggtctgagggccacgtccagctcaccatcttcatacat

SEQ ID NO: 906712 - DNA, 120 bp, Artificial Sequence
  ENSG00000246477_15 (sequence is synthesized)
caccaacagcacacactcacaggcagccgcatgcacacctgaccgttaagaagtttgcaaaggatgcgtggtttaccttcccacagtggaagactctgcggagcaactgaaggccagatg

SEQ ID NO: 906713 - DNA, 120 bp, Artificial Sequence
  ENSG00000246477_16 (sequence is synthesized)
acaaggttgttggcttcaaagaggggattggtgaatttactcagctcactgggctgattaacccaggaccacaaagacatcgtcttctgctgtagcttcaacttacatctgatcaagaaa

SEQ ID NO: 906714 - DNA, 120 bp, Artificial Sequence
  ENSG00000246477_17 (sequence is synthesized)
gaacactgccattaaagtaattaatttataacaaccattattgagtgctcctcttacgaggacaatttcttctcagtatgaaagaagatagaatacaagacttttggtagagaaacaaag

SEQ ID NO: 906715 - DNA, 120 bp, Artificial Sequence
  ENSG00000246477_18 (sequence is synthesized)
tgttgaaaaatcaatagatttgtcaaaaagctcaatcggcattagaactctcaacaacaacaaaacaaagagtattttacaggcttccaagaagctggcaggaggataaaaacagaatct

SEQ ID NO: 906716 - DNA, 120 bp, Artificial Sequence
  ENSG00000246477_19 (sequence is synthesized)
ggtcacatcaggtttggtgttaaaccttaacccagagaacattactgtacacaaaagtcctttgttatatttgggattctattttaattaaaaatagctaagcataaaaaaactttctaa

SEQ ID NO: 906717 - DNA, 120 bp, Artificial Sequence
  ENSG00000246477_20 (sequence is synthesized)
cctttttgtttctgagaagcctataatataaacataaaaattatacactttttgacatttatgtcctatttatttttctagtttctttaagaaagggcttgttgtgcagaaacaaccagg

SEQ ID NO: 906718 - DNA, 120 bp, Artificial Sequence
  ENSG00000246477_21 (sequence is synthesized)
gaaacaaccaggatagcttacaaatatgaatgtctggaaagacccccagggtcttcattatttacattgtttgataaccactttctaattgtttttttttttaattttttattttaattt

SEQ ID NO: 906719 - DNA, 120 bp, Artificial Sequence
  ENSG00000246477_22 (sequence is synthesized)
tggtatttggttacatgagtaagttctgtagtggcgatttgtgagattctggtgcacccatcatccgagcagtatacaatgaaccctaattgtagtcttttatccctcgtcccccttctg

SEQ ID NO: 906720 - DNA, 120 bp, Artificial Sequence
  ENSG00000246477_23 (sequence is synthesized)
gtcccccttctgtccctcccccaagtccccaaagtccactgtatccttcttacgcccatactaatattaaaagtggaggttgagtcaaatctcaaacaaaacttaaaattttttagagac

SEQ ID NO: 906721 - DNA, 120 bp, Artificial Sequence
  ENSG00000246477_24 (sequence is synthesized)
atatccacatacaatgaacaggcttcataataattctaaaactctggaacactctttatcatgtgaataaactgttagagaaggataacagtcgatcggcatgttttagaaaaaaataca

SEQ ID NO: 906722 - DNA, 120 bp, Artificial Sequence
  ENSG00000246477_25 (sequence is synthesized)
ttttaacacagattgaaagacagtctgtggtaaaccttacatcaaccaaaaagataatacattcaattctcataagactcagtttaagctgagattttattataaaatcagttttgtctc

SEQ ID NO: 906723 - DNA, 120 bp, Artificial Sequence
  ENSG00000246477_26 (sequence is synthesized)
tgaaaccacatgattatttatgagctacgtgcaacttactgcattctttttgagctagcaataaaaataatccacataatcatagagcctatgtggcattggactttaactgctgggata

SEQ ID NO: 906724 - DNA, 120 bp, Artificial Sequence
  ENSG00000246477_27 (sequence is synthesized)
gcatgtcccacgctatgttcccaggaaccagggatgacaaggacaggacattattgcatccactgcctccagccctgtgccccctgcccatggccggccaaccactgaacttgctctggc

SEQ ID NO: 906725 - DNA, 120 bp, Artificial Sequence
  ENSG00000246477_28 (sequence is synthesized)
tgagcctgacaccacttcagaatccttcccatcagcattgctggcagcctctaccaactgggaaacagaatgggaatctattttgatcccttcttgaaagctagtcctgaggatattaac

SEQ ID NO: 906726 - DNA, 120 bp, Artificial Sequence
  ENSG00000246477_29 (sequence is synthesized)
aggtataacaccaaaaaaaattcatcatcaaacacatttcttaaatgctgaattaaacttatatacattgctttactgaagagtgtcttaaagcctttaatgattatgcgttaatcatta

SEQ ID NO: 906727 - DNA, 120 bp, Artificial Sequence
  ENSG00000246477_30 (sequence is synthesized)
aatcctcccttctaagtgggggagttaatcctcccctctaagtggggaggatattatgtcatattcaccaaacttccttggctatagaaattgccaatccctcctgtccctccctgccag

SEQ ID NO: 906728 - DNA, 120 bp, Artificial Sequence
  ENSG00000246477_31 (sequence is synthesized)
agtacagtccagggctaagcaacacatgcttcagaaaatggtggctgccagcaatgaggcaaggaaggctgctgattgtaccctgaagagattaccaggcaacctccctgaaagatcatt

SEQ ID NO: 906729 - DNA, 120 bp, Artificial Sequence
  ENSG00000246477_32 (sequence is synthesized)
ctgatgtgaatcttgtaaatgaacctatacacttgatggtgcctgggctgtaaggtgagcttgccactctgggcctgaggacagtttctaggtgtaacaaagtctggagcaggaggagga

SEQ ID NO: 906730 - DNA, 120 bp, Artificial Sequence
  ENSG00000246477_33 (sequence is synthesized)
agacctgtaatttaggccagggatccccaaaccccaggccatggaccagtaagggtccgtggcctgttaggaactggccacacagcaggaggtgagtggcagatgagcgcgtatttccac

SEQ ID NO: 906731 - DNA, 120 bp, Artificial Sequence
  ENSG00000246477_34 (sequence is synthesized)
ctcctgtcagatcagcatcagattctcagagaagcgcaaaccctactgtgagctgcgcatgtggggaatctagggtgcgcctttatgagaattctccttatgagaatctaatgcctgatg

SEQ ID NO: 906732 - DNA, 120 bp, Artificial Sequence
  ENSG00000246477_35 (sequence is synthesized)
atctgacatggaacagtttcaccccaaaaccatcaccaatcccgctgccacccaatccaaagaaaagttgttatccacaaaactggtccctggtgccaaaatggttggggatcgctgctc

SEQ ID NO: 906733 - DNA, 120 bp, Artificial Sequence
  ENSG00000246477_36 (sequence is synthesized)
taggccacacttttgatgaccaactgactctatgtcctgggaaaagtcacgtaacttctctggatcttactttcttaataaaattagagggaagacctgaattataaattaaggcttttt

SEQ ID NO: 906734 - DNA, 120 bp, Artificial Sequence
  ENSG00000246477_37 (sequence is synthesized)
ccacatgtaagatactatgatcctatgttaagaaattaacatttaaaatggttgccccttaattcacgtatggactaattttaacctaacagaacaaagtctaggacatgctctcataaa

SEQ ID NO: 906735 - DNA, 120 bp, Artificial Sequence
  ENSG00000246477_38 (sequence is synthesized)
agaatatacttcaggtcatttaaattataattaactgtagcctctacctttttataaataattttaatatagatccaaatcgtcgtctcctaggagattctggctacttaggaagtagcc

SEQ ID NO: 906736 - DNA, 120 bp, Artificial Sequence
  ENSG00000246477_39 (sequence is synthesized)
aaaacaacggaaaaggaaaggtccccatgtgagcagtgtactcacctttcactttcattgttgcccagaaatgttccaaactgtgaggcataagcatgctcaaagagcatgatgaggaaa

SEQ ID NO: 906737 - DNA, 120 bp, Artificial Sequence
  ENSG00000246477_40 (sequence is synthesized)
ttctcattaaactcaaaagaacagggaaactgacgaaggatctgccacacgcagtccaagaagagaagaaatacaggagcctcccacttctgcttggtgttacagtaggctgactgtgca

SEQ ID NO: 906738 - DNA, 120 bp, Artificial Sequence
  ENSG00000246477_41 (sequence is synthesized)
cagcgctgctggaatgggtgaccagcctagggggaagatggaggcgtgacagtcatatcctggtgagatcacatgacagagcattctaccgacaccactatacacaattacagtgacact

SEQ ID NO: 906739 - DNA, 120 bp, Artificial Sequence
  ENSG00000246477_42 (sequence is synthesized)
cctagtacctggaacatcatataattagggtagctgttgtacagattaatgatttcttggtataaaataaatagcggcagcaactaaggaaaaagacacacttccaaatccttaatgagg

SEQ ID NO: 906740 - DNA, 120 bp, Artificial Sequence
  ENSG00000246477_43 (sequence is synthesized)
ctgcgcggctaaggtgtgaccacaggaactgcactgcccttggaatatcccatggaagaataatgaacttaagcaataataaacttacaaaataaacctttctaggtctacaaaacctgg

SEQ ID NO: 906741 - DNA, 120 bp, Artificial Sequence
  ENSG00000246477_44 (sequence is synthesized)
agcaaagtcaaagaacataagctctcagtacaaagaagaatcatcacctctgtctaacactgtagattgtgctgtacactaaacaagcctcaccctaagtggagacagatatggaactct

SEQ ID NO: 906742 - DNA, 120 bp, Artificial Sequence
  ENSG00000246477_45 (sequence is synthesized)
gatcacctttataatgtcagctctgatagtaaatctctaattatatacgaaaagttattgtgttgaaagatctttatgagtacttttctacaggagataaagctgtcattaattaccctc

SEQ ID NO: 906743 - DNA, 120 bp, Artificial Sequence
  ENSG00000246477_46 (sequence is synthesized)
ttctcccaaaatgaacagcaagagtctgccatctactgaccaaagtaaatttaagactcatttgactgtcttgttcagaacccaaatgctgaccttaatacaaatcatactctgctagga

SEQ ID NO: 906744 - DNA, 120 bp, Artificial Sequence
  ENSG00000246477_47 (sequence is synthesized)
atttcacagatctgctttgtctctgggtccttctactactgtatgtgacaaaggtaatgacatagaaattttacagtggttcacagaattgtgatatccattaaaataacataaaaatca

SEQ ID NO: 906745 - DNA, 120 bp, Artificial Sequence
  ENSG00000284988_0 (sequence is synthesized)
aggccacatcacgaaatgtgacaggatagccttgaactcatcaattgctgggggcacctcaaactcaactccaaaattgatctaatgaactttgccaaaccacattcccttcttgcattt

SEQ ID NO: 906746 - DNA, 120 bp, Artificial Sequence
  ENSG00000284988_1 (sequence is synthesized)
ctgagagaatggattcccattcatctgactacagtgctaccctgaaagcagatccagagactaagattcacctgcaggtgattcatttgggtctcaactcaagcattcctttctcaagaa

SEQ ID NO: 906747 - DNA, 120 bp, Artificial Sequence
  ENSG00000284988_2 (sequence is synthesized)
atcatgttaggccttaatgtacctttcctttataacacttactgaatgattaatttggcatttatttacctggctattttattcagtgtttaggatttatactagattgtaagctcctca

SEQ ID NO: 906748 - DNA, 120 bp, Artificial Sequence
  ENSG00000284988_3 (sequence is synthesized)
agagtgttccaggtctagtttaggtcaccatgtatccctgattagtaccacacatcccagtgcaccatggttctcaacaaataacatgttatataaatcaataaatgacaggaacaaaga

SEQ ID NO: 906749 - DNA, 120 bp, Artificial Sequence
  ENSG00000280604_0 (sequence is synthesized)
ccagaactgggtgtttttaggaagcttagatagccggcgcgcaggcgctttctaggtgattttacgtctcacgttggaaacagcatggtgagaaccagggtcttgtttccactgacatcc

SEQ ID NO: 906750 - DNA, 120 bp, Artificial Sequence
  ENSG00000280604_1 (sequence is synthesized)
gtgttcccaaactcccaggatgtgcttgtagcagggacgtgcgagaggagggagctctgcactgaggaaggatgcatggcccgacgaccgggcgtctgtgccgctgtgtccggacctccg

SEQ ID NO: 906751 - DNA, 120 bp, Artificial Sequence
  ENSG00000280604_2 (sequence is synthesized)
tctgctgtgagcaggggcctcacaggcgccccataccccatacccagtctgcagatctggctcttttggtttcagcccttgagctctgtgttctcccgccagggatggcagcacctctgc

SEQ ID NO: 906752 - DNA, 120 bp, Artificial Sequence
  ENSG00000280604_3 (sequence is synthesized)
aggagagtggaggaggggagccctgccccagcccctcacctgagcccaaaccctggccagggcacagggaacacccacccactcagggccagtctgtggccaacagactttgaaggtgtc

SEQ ID NO: 906753 - DNA, 120 bp, Artificial Sequence
  ENSG00000280604_4 (sequence is synthesized)
cggcgggggttggcctggaagagctctgtgtccagtcggccgtgatgtgtgtctttgttcaagggagagttgagacagacgttcccacaggtgaccctggcaaggcagaacaggcctgag

SEQ ID NO: 906754 - DNA, 120 bp, Artificial Sequence
  ENSG00000280604_5 (sequence is synthesized)
gtttgactttaccatcaaaaaggagagaaggggcaaatgttagcacttttcctggtgcttttccttacggtgtaaaggaatcttatcagatctcccagttgtggcccgtgtttgagggag

SEQ ID NO: 906755 - DNA, 120 bp, Artificial Sequence
  ENSG00000280604_6 (sequence is synthesized)
agacagggagtgtgtgtccatcccttccctcccagggtcccgtgtgctcagggcagggtatgccttttccccacactggcctcgtctccacagcctggcacacaccccttcctgtcttgc

SEQ ID NO: 906756 - DNA, 120 bp, Artificial Sequence
  ENSG00000280604_7 (sequence is synthesized)
tgtggtcagggagcccccacatgcacatgccatccttacagcagccccagggcatggcacacccccattttatagccaggaaactgggcctggctagccagggatttgcctggtgtcaca

SEQ ID NO: 906757 - DNA, 120 bp, Artificial Sequence
  ENSG00000280604_8 (sequence is synthesized)
gccctgtgggcagcaggacatgtccttacctcgccgacctagggggctcaggtcacagggtcacacggagtcacacggcgggagaagtccctgtgcaaaactccatttcgctgctttccc

SEQ ID NO: 906758 - DNA, 120 bp, Artificial Sequence
  ENSG00000280604_9 (sequence is synthesized)
caaattcatggttaggtaaccggtttagtaacctctgtggactccacctttatgtttaaacaaatccatgatgatatcatgtggtaaaaggtaggatttttttcaaaaggaaggtgtgtt

SEQ ID NO: 906759 - DNA, 120 bp, Artificial Sequence
  ENSG00000280604_10 (sequence is synthesized)
tatacaaacacatgtggggtcttaaagccactgggggaggagtcacagctccagggaagagggggtgcagctgagccctgctcagccaccggccacacacctctcactcctgtaaagaag

SEQ ID NO: 906760 - DNA, 120 bp, Artificial Sequence
  ENSG00000280604_11 (sequence is synthesized)
gcagtagcacgccctccctactgcagcaggtgaagggccctgtgcagtgggtgctgtccgaaggttgatgctagaatgtcagccctttgagagctgggccctggggccctggggacagtc

SEQ ID NO: 906761 - DNA, 120 bp, Artificial Sequence
  ENSG00000280604_12 (sequence is synthesized)
tggtctggccagtggtcagccttggtggtggaggacagagtcgcagggagttacccaccctgaagtaacccaggggagctgccgaaatgcaaacccagaagtgtgggccggatacctgca

SEQ ID NO: 906762 - DNA, 120 bp, Artificial Sequence
  ENSG00000280604_13 (sequence is synthesized)
aggccactggcgtctccttgacgactcagacccacagtgcctagattaggacacacaacccaatacagaccctagagagctaacctggagggcccatccactttatttctgtccagttgg

SEQ ID NO: 906763 - DNA, 120 bp, Artificial Sequence
  ENSG00000280604_14 (sequence is synthesized)
agaaatcagggacctggaagatgccccaccactgtgagtgctctgggggcacccagcagcagctcctgtcagccaccaccgcgtttctagcacgacatggtcgtgagttaaatcagcaga

SEQ ID NO: 906764 - DNA, 120 bp, Artificial Sequence
  ENSG00000280604_15 (sequence is synthesized)
gcctgctaagggacgagcagatagaaaacataacagtaagaagatcagtcagaaaactcgcgtggcccaggatgcaggatgcttgagctcttgtggttcagctcagacagttggggctga

SEQ ID NO: 906765 - DNA, 120 bp, Artificial Sequence
  ENSG00000280604_16 (sequence is synthesized)
cctgggaccccgtgcgctgagggggcggctcccagcatgagttccagggcccctcaccttcggtgacacatgggaacgtgcctctggcagcacctttacaaaacacttgcaggtggccct

SEQ ID NO: 906766 - DNA, 120 bp, Artificial Sequence
  ENSG00000280604_17 (sequence is synthesized)
caagacactttgtacaggacagtgaggtccttggttcctgctctatctgataagattcttttacttcctcagctgacgcagcactgtggcctcacagccctggggcttgtttcaaagctg

SEQ ID NO: 906767 - DNA, 120 bp, Artificial Sequence
  ENSG00000280604_18 (sequence is synthesized)
ggctgcagccgggtccctgtctggaggttgactggcctttaactccgaggattgggttgtttatgatgaaaactcttggcagattcaaaacccatgggagggtttgggctgcacagaggt

SEQ ID NO: 906768 - DNA, 120 bp, Artificial Sequence
  ENSG00000280604_19 (sequence is synthesized)
gacacacatccttccctgaagtgtccctctctggtgcacagggtccccccacccccacgtgtggtcaccgcgaacaccgataccacgggtcctcatgggaagtggcgtggggcccgcaca

SEQ ID NO: 906769 - DNA, 120 bp, Artificial Sequence
  ENSG00000280604_20 (sequence is synthesized)
gctggtagccgctccctccacccccaggctgccaccaggcctggtgcagccctgtccatgtcccgagtcctgacagctgttcgtggtcttcactctcccttgactctgtgtggtccattt

SEQ ID NO: 906770 - DNA, 120 bp, Artificial Sequence
  ENSG00000280604_21 (sequence is synthesized)
gttgtctggccatgagtttctgaatcacctgaaagcgtctccactgacgggacctgtggggcaggtggggcctctctcacctgcccggatttcagagtcagggtgggtgggaagaggctg

SEQ ID NO: 906771 - DNA, 120 bp, Artificial Sequence
  ENSG00000280604_22 (sequence is synthesized)
caggtcggagtcactgttttgaaggcgagggaaatactgaagccaaaatgaggcctcaggagccccacacgatggcttgggaggggtgtattgctgcccccacgtcaggagggccacccc

SEQ ID NO: 906772 - DNA, 120 bp, Artificial Sequence
  ENSG00000280604_23 (sequence is synthesized)
ctccctgtcttcagggcggtcatgagaggcagcaagctgtgactgacgtagacccacttcctacgtagactggcttttggtgaattggttttggtcaccttttagagctttcttttgttg

SEQ ID NO: 906773 - DNA, 120 bp, Artificial Sequence
  ENSG00000280604_24 (sequence is synthesized)
tttggacttcttggggtaaattatttcccaaaagtatttactcagatgactgattaaattttcaaaaccgtaataattagtggagacctcttactgggcagatcactcttcgattctttt

SEQ ID NO: 906774 - DNA, 120 bp, Artificial Sequence
  ENSG00000280604_25 (sequence is synthesized)
gctttaagaaacttggagtcggaagcatcaaggctgaactgtttccctcccacccgctgaactggccagctcagctctgcccgcccagaggaagtgggcctacacaatccagggacagta

SEQ ID NO: 906775 - DNA, 120 bp, Artificial Sequence
  ENSG00000280604_26 (sequence is synthesized)
tgccatccctcacccggatgtgagtcttcactttgtcttcctctcacctttctcttctcatggttgtttacctacctgcatgctgctgttaattgctactaacattaatattacacaata

SEQ ID NO: 906776 - DNA, 120 bp, Artificial Sequence
  ENSG00000280604_27 (sequence is synthesized)
atattaatcaacttctcagcgttcctgacctgtgtcgtatccatatgacctcgaataaccttttaacctcttagcactaattctgcttgtgttgaggacttggcctgatgtcaaattgtc

SEQ ID NO: 906777 - DNA, 120 bp, Artificial Sequence
  ENSG00000280604_28 (sequence is synthesized)
tcaattctgccgcagtcctgggttttcctccctcccacggggcctgggagggaactgagacgggctctgtccccgtgcagggcagtgaggatgtgctcacccgccacaggcaggcgtcag

SEQ ID NO: 906778 - DNA, 120 bp, Artificial Sequence
  ENSG00000280604_29 (sequence is synthesized)
tgatactttctctgcgcctaagaagttgggtgacattatcaaacaggccacaaagataccttggcaagcacatttgagggcctggtgaaattaactccccctttcagagtccacatgaaa

SEQ ID NO: 906779 - DNA, 120 bp, Artificial Sequence
  ENSG00000280604_30 (sequence is synthesized)
acatagggtccatctacacacacagatccaggctgtggaaagccagtggaataggcctttgtcttcattccagaatcagtgggatgccaggcgggcatagcgtccttggctccgcccggg

SEQ ID NO: 906780 - DNA, 120 bp, Artificial Sequence
  ENSG00000280604_31 (sequence is synthesized)
ccatgcggagctgggtcccatgcagctccatgaccgggggctccgacacctcttttctgctcctgctgggtctaggtgtaattccagtgctggaggaagaagttaccctcagataaacgg

SEQ ID NO: 906781 - DNA, 120 bp, Artificial Sequence
  ENSG00000280604_32 (sequence is synthesized)
tcggtgtaattccagtgctgggggaagaagttaccctcagataaacggtcggtgtaattccagtgctgggggaagaagttactctcagataaaccgtcggtgtaattccagtgctggagg

SEQ ID NO: 906782 - DNA, 120 bp, Artificial Sequence
  ENSG00000280604_33 (sequence is synthesized)
aagaagttactctcagataaacggtcggtgtaattccagtgctgggggaagaagttactctcagataaacggtcggtgtaattccagtgctgggggaagaagttaccctcagataaacgg

SEQ ID NO: 906783 - DNA, 120 bp, Artificial Sequence
  ENSG00000280604_34 (sequence is synthesized)
tcggtgtaattccagtgctgggggaagaagttaccctcagataaaccgtcggtgtaattccagtgctgggggaagaattaccctcagataaaccactggtgtaattccagtgctggagga

SEQ ID NO: 906784 - DNA, 120 bp, Artificial Sequence
  ENSG00000280604_35 (sequence is synthesized)
agaagttactctcagataaaccgtcggtgtaattccagtgctggaggaagaagatactctcagatcatccatcggaggggaaccctgggcggctctgggctgtgcggctcagacccctta

SEQ ID NO: 906785 - DNA, 120 bp, Artificial Sequence
  ENSG00000280604_36 (sequence is synthesized)
ggggccaagagataaaaggtgcaaactgtgagcaaagggcctctctggaggcggctttagggcccccagggagtgacggccgcactggcaggcactggggagaggagaggggagagcaac

SEQ ID NO: 906786 - DNA, 120 bp, Artificial Sequence
  ENSG00000280604_37 (sequence is synthesized)
agagaacgagagacagacggccccaccggaagtgcttcgtgctgtcagcagatggggcaaacctggagttggttctgaggaggtttctcttctctaaaccattttgaacgtttgcccagc

SEQ ID NO: 906787 - DNA, 120 bp, Artificial Sequence
  ENSG00000280604_38 (sequence is synthesized)
tcagtagctgctcctcgtaacgcagttccagtctgtgtgctgctccctctgaactgcgagaggcgcctctgagctggttgggaggtggccgccaggtgagcgggctgctccagagccttc

SEQ ID NO: 906788 - DNA, 120 bp, Artificial Sequence
  ENSG00000280604_39 (sequence is synthesized)
tgcaaaccctgatgcttttgagttgggggcaaggacgtccatctgagtgagatgagaaggcaggtcaggagtgtttttaagagttaatgaacattaaataaatctttgatatagagatgc

SEQ ID NO: 906789 - DNA, 120 bp, Artificial Sequence
  ENSG00000240137_0 (sequence is synthesized)
gaggtgaacttctttggattccacatatgatcaagatcatgaggggtgatgaacatgatctagaattgattgtggtgttcttacacatctctgtgaacatactaaacaccactgaatggt

SEQ ID NO: 906790 - DNA, 120 bp, Artificial Sequence
  ENSG00000240137_1 (sequence is synthesized)
gagcaagtcttctttgtcatgctattaagaaaatacccagagtcacagcaccatgatctccttgtgaagcagaacaagtaatataaaactgatctaaagaggcctcccctctactcttat

SEQ ID NO: 906791 - DNA, 120 bp, Artificial Sequence
  ENSG00000240137_2 (sequence is synthesized)
ggcacgaacgtagaggtcaggctagggctgacgatgctggctaagcgggggcgcacgtctgggaagtcgtcgtcgtagtcaccgatgtccgtgaccttccagagcctctggtaaccactg

SEQ ID NO: 906792 - DNA, 120 bp, Artificial Sequence
  ENSG00000240137_3 (sequence is synthesized)
agccagaaactgccacttttaaaccatcagatctcattgagaactccctcactatcacgagaaccgcatgagggaaaccacccccatgatctgatcacctcccaccaggtcctgccctca

SEQ ID NO: 906793 - DNA, 120 bp, Artificial Sequence
  ENSG00000240137_4 (sequence is synthesized)
gggagggtgggaggactcatcactgggggcccaggcatcattggcatgtggcctcctgtgttagtttgttctcatgctgcaaataaagacaacttgagactggataatttataaaggaaa

SEQ ID NO: 906794 - DNA, 65 bp, Artificial Sequence
  ENSG00000240137_5 (sequence is synthesized)
gtattatatttattttgagacagggtcttaccctgtcgctcaggctggagtgcagtggtgctatc

SEQ ID NO: 906795 - DNA, 120 bp, Artificial Sequence
  ENSG00000240137_6 (sequence is synthesized)
gtgcagtggtgctatctcagctcaccgcaacctcctcctcccggctcaagctgatcctcccgcctcagcctcccgagtatctgggactactttttgtagagatggcgtcttgctatgttg

SEQ ID NO: 906796 - DNA, 120 bp, Artificial Sequence
  ENSG00000240137_7 (sequence is synthesized)
cccaggctggtctcaaactctcggtctcaagctcctgggctcaagagatcctcccatctgggcctcccaaagttcttaggattacagacgtgagctactgtgcctggctagggaatattt

SEQ ID NO: 906797 - DNA, 120 bp, Artificial Sequence
  ENSG00000240137_8 (sequence is synthesized)
ttgaaagtagagttcttgcaggctaaaggagcaggcagcacagatgagaggagacatctgagttgctttaaaaggaagggcaaaatgtggtgaccagagaggaaagtgaaaagctttcca

SEQ ID NO: 906798 - DNA, 120 bp, Artificial Sequence
  ENSG00000240137_9 (sequence is synthesized)
gcaggctcacggcaggaaaggagggtcaggacagggaactatgtgtacagatattgaggtacaaataaggtaagtgtaatttaaaaagagaaaataagaaaaagctcatttcttttctgg

SEQ ID NO: 906799 - DNA, 120 bp, Artificial Sequence
  ENSG00000240137_10 (sequence is synthesized)
acaatactaacagtttgatgctggaagctatcttagaagttaggaaattcaaccagggtcctcagagagcagactggaagtcaggatgtggggatgagacacggggctggcagacagcaa

SEQ ID NO: 906800 - DNA, 120 bp, Artificial Sequence
  ENSG00000240137_11 (sequence is synthesized)
gggtgacagtgcttgtgcttactccgcttgtgcctgctgtagctcagttctgtgactgccctggcattttctcaattgtgtggtgaattaatttgtttaagtactccttgtttagaccct

SEQ ID NO: 906801 - DNA, 120 bp, Artificial Sequence
  ENSG00000240137_12 (sequence is synthesized)
ctatttaagaccttttttgaacattttatggaatctccttcccttggatctacttactacggaaagaacagtcccttattttctcatgagttgatgccactcttgttttggccgttcaga

SEQ ID NO: 906802 - DNA, 120 bp, Artificial Sequence
  ENSG00000240137_13 (sequence is synthesized)
gataatatgatgctgggtcagtttatattttccccttctccattcctggtgtctagcttgactcaggaacttgagatttgagaaccaggcaccagccctgactaactgtgactttggggt

SEQ ID NO: 906803 - DNA, 120 bp, Artificial Sequence
  ENSG00000240137_14 (sequence is synthesized)
gggttactgagcctcagtttcttggtgtgttaaatggaaatatcagtacctttccacttaatttatggggctattttgagataaaatttaattattgtttattttcttcttctttttttt

SEQ ID NO: 906804 - DNA, 70 bp, Artificial Sequence
  ENSG00000240137_15 (sequence is synthesized)
aactcctggactctcctgtctggcctattttctgaggactgattttgtattttattattattattttagg

SEQ ID NO: 906805 - DNA, 120 bp, Artificial Sequence
  ENSG00000240137_16 (sequence is synthesized)
tctgaggactgattttgtattttattattattattttaggaccacataactctgtttagaaaatgtttctaatgtattgagtgcttcaaaggtatattagttcgatttcacactgctata

SEQ ID NO: 906806 - DNA, 120 bp, Artificial Sequence
  ENSG00000240137_17 (sequence is synthesized)
aggaattgcctgaggctgagtaatatataaaataaacaggtttaattgactcagttccatataactggggaggccgcaggaaacttacaatcatggctgaaggtgaaggggaagcaaggc

SEQ ID NO: 906807 - DNA, 120 bp, Artificial Sequence
  ENSG00000240137_18 (sequence is synthesized)
aaacttacaatcatggctgaaggtgaaggggaagcaaggcacatcttacttgttggcaggagagagagagtgcaggggaaactgccactttttcttttttttttttggagacagagtctc

SEQ ID NO: 906808 - DNA, 75 bp, Artificial Sequence
  ENSG00000240137_19 (sequence is synthesized)
tggcggaagacaaaggaagagcaaagggacatcttacatggcagcaggcaagagagcgtgtgcaggggaaggcga

SEQ ID NO: 906809 - DNA, 120 bp, Artificial Sequence
  ENSG00000240137_20 (sequence is synthesized)
tcccaccgtgtccctcccatgtcatgtgaagattattacaactcaaggtgagatctgagtggggacacagagccaaatgatatcacctccaatgggcagcctcattccaggagcacatcc

SEQ ID NO: 906810 - DNA, 120 bp, Artificial Sequence
  ENSG00000240137_21 (sequence is synthesized)
cattggcatcatccaggaggaggggggggccatcattggcatcatgggagggccccccagctggggtgctggcatcatacctggtgaggaacaggaagagactggggggaggttggatca

SEQ ID NO: 906811 - DNA, 120 bp, Artificial Sequence
  ENSG00000240137_22 (sequence is synthesized)
tcgctcctgcaggaggaggaacagagaacagagtaggaggtgttcttccttgttgagatgcagtctttgttctgtcagccaggctccgagcctgctcttctatccatttctggtagtagt

SEQ ID NO: 906812 - DNA, 120 bp, Artificial Sequence
  ENSG00000240137_23 (sequence is synthesized)
ctttcacattctctttgtgtttccttccactgcaatggtaggttctcacagatggagagtcgtgggtgaggtatgtattgcagaagtcacaacaaaacttaggcatgttgctctgtagcc

SEQ ID NO: 906813 - DNA, 120 bp, Artificial Sequence
  ENSG00000240137_24 (sequence is synthesized)
cgttaaccactctcttccctgattttgctttgttttgatgtgacattgaagcactgcacatgcgcagagcagctaatagttcttccctctttggattgttggatgaaatttttttgaatt

SEQ ID NO: 906814 - DNA, 120 bp, Artificial Sequence
  ENSG00000240137_25 (sequence is synthesized)
ttattttttattgatacataatagatatatgtgttttgggggtacatatgataatttaatatatttatataacttgttaagaacaaatcagtgtaattgggacagccaccaccttaaata

SEQ ID NO: 906815 - DNA, 120 bp, Artificial Sequence
  ENSG00000240137_26 (sequence is synthesized)
cttgtccttcctttttgctggaaacatttgtattattctcttagctattttgaaatatacaataggttattctaaactataatcaccctagtgatctatgaaacactacgtcttatttct

SEQ ID NO: 906816 - DNA, 120 bp, Artificial Sequence
  ENSG00000240137_27 (sequence is synthesized)
aattcaagatgagatttgggtcaggaaacagagccaaaccatatcaagagcctctggtaaccactgttctactcaatacttctatgaggtgaacttctttggattccacatatgatcaag

SEQ ID NO: 906817 - DNA, 120 bp, Artificial Sequence
  ENSG00000240137_28 (sequence is synthesized)
aaaaaattggaccattgattatgtttcaccatttaagtggctattgtttgcatgctttcgacagttctatcccatgccctatacatttactttcccccagacctccctcccctccatctt

SEQ ID NO: 906818 - DNA, 120 bp, Artificial Sequence
  ENSG00000240137_29 (sequence is synthesized)
caacctattacaacagggtgtaataatatagacgaacactagagggaagcatgcaattgcaatgaagaaaatcggcatcagcacacttgaaattcagacaagaagatagaagatgtctag

SEQ ID NO: 906819 - DNA, 120 bp, Artificial Sequence
  ENSG00000240137_30 (sequence is synthesized)
tatcaaaggaaagtgaaatgtcttcctttaatatagtgtcttgtagtattctcctataggagggaagtattattactctatcggatgagtattcctactggaaggatagctgcggcattt

SEQ ID NO: 906820 - DNA, 120 bp, Artificial Sequence
  ENSG00000240137_31 (sequence is synthesized)
taaaaaatcctgcctgtatgtgcctgccataaagatgtcacataaccatttcctcacgtgctgttcactccacaccccagctctcctgagagcacttagcttctcccgtgagccggttcc

SEQ ID NO: 906821 - DNA, 120 bp, Artificial Sequence
  ENSG00000240137_32 (sequence is synthesized)
tccgatgggaggcatttggaagcctacattagtatagtgctgccttacaacgcactttaatgtaatatctagtctctgggaggcccaggagtgcttcaaattctaggcttccctgagatg

SEQ ID NO: 906822 - DNA, 120 bp, Artificial Sequence
  ENSG00000240137_33 (sequence is synthesized)
tccagtgcatttctgttgaggtgtatatgggctcactcggcctgagtccctcaggggcaggaaacgtaccccatcttcacctttgcatccccagcagtttgcagtgctgggcatgcccta

SEQ ID NO: 906823 - DNA, 120 bp, Artificial Sequence
  ENSG00000240137_34 (sequence is synthesized)
gagaagctggataatgtctgttggactaaactgcttcatgagctgcagacagaaaaagagggaaatttatgctcactttatgcctgagcaatgggactctaaactgcacccctaaccagt

SEQ ID NO: 906824 - DNA, 120 bp, Artificial Sequence
  ENSG00000240137_35 (sequence is synthesized)
gaatatttttcattatttttctggattataaaagttcatgctcataatgtgaaaatcatgcaaaaagaacatctaaaatattcataatcccatccatccaatattaacctggggaatact

SEQ ID NO: 906825 - DNA, 120 bp, Artificial Sequence
  ENSG00000240137_36 (sequence is synthesized)
acagattcttttaaccttatgtcagagtataatatataaatatatgtgtgtgtgtacatatatatagtgtttacatttatggcagcatggaacacctatcttttaaaaattttttttgag

SEQ ID NO: 906826 - DNA, 83 bp, Artificial Sequence
  ENSG00000240137_37 (sequence is synthesized)
ggcagcatggaacacctatcttttaaaaattttttttgagatggtgtctatgactcgctgcaaccttggcctcatcctcccac

SEQ ID NO: 906827 - DNA, 120 bp, Artificial Sequence
  ENSG00000240137_38 (sequence is synthesized)
ggtgtgagccaccatgcccagccctacatctatcttttttttttttttaaaactaatccctttcttttgggaatttaagctgtttctcaatttttgctttttttaaagagcagtctggtg

SEQ ID NO: 906828 - DNA, 120 bp, Artificial Sequence
  ENSG00000240137_39 (sequence is synthesized)
ggtgaatattcgtgtagctaagtgtaagcccacattctttattagtgtcttaggataaattcccagaggcagaatttctgggtgatgggtaatttacattgtcaccaacagtgacagtgc

SEQ ID NO: 906829 - DNA, 120 bp, Artificial Sequence
  ENSG00000240137_40 (sequence is synthesized)
ccttgatcagatgaagagttttaattaaacgtcacaccagaactccataatcttgtctcagtcatgtcatcgctgctcaaaacatttggtgaactctgtttggtgatccaggctatgact

SEQ ID NO: 906830 - DNA, 120 bp, Artificial Sequence
  ENSG00000285789_0 (sequence is synthesized)
gcctatatgtatctccagaggtgagatgtgtttctggtgggcggcatacagtgagggggaagttgaaaatacatgagaaaacctccatagttgataccataggatttctgaaaggagccc

SEQ ID NO: 906831 - DNA, 120 bp, Artificial Sequence
  ENSG00000285789_1 (sequence is synthesized)
tatggagagagtgggctttaataggaagaacactttctcccctggaggaaaaagctgcatgtaaaccctggtagtttgtaggtgtggcaatggacaggaccatggcttctgtgctgaaga

SEQ ID NO: 906832 - DNA, 120 bp, Artificial Sequence
  ENSG00000285789_2 (sequence is synthesized)
aagcaaacaccagacgcatcaggccatggatacaggtcttttaaggaagcagtttctactctatgcatgaaacttgtttggattgaaacccagtttcaaagcatcctctgtgtaaactga

SEQ ID NO: 906833 - DNA, 120 bp, Artificial Sequence
  ENSG00000285789_3 (sequence is synthesized)
tgagcacagggttttggcactgtctccctgtgtgcttgatatccagatttactgtctgatcttggatatatttcaatgaaatgagacctctaatagtagaggaatagatatttgtgaaac

SEQ ID NO: 906834 - DNA, 120 bp, Artificial Sequence
  ENSG00000285789_4 (sequence is synthesized)
agtatgacagtgatagcaattattataaaaacaagaagcactgcataaatgccttatacagtaataattgcgagatttaatttggagtggcttttccttatttgcccaataagttctatt

SEQ ID NO: 906835 - DNA, 120 bp, Artificial Sequence
  ENSG00000285789_5 (sequence is synthesized)
taattatttgctgtggcattaaacttccaaggggagctaggcatggtctccacctgttttaaatactgtgtgtctcaatcacaaacttaaccttgtgaaacattagagtctcagtatcca

SEQ ID NO: 906836 - DNA, 120 bp, Artificial Sequence
  ENSG00000285789_6 (sequence is synthesized)
tgttaaagctaatgtttaactggaaaatgcatcagttaaatttatcttttagattttatgtaacatgcttgcatgctggcactttgcataccattaacagaaactagaatcctattcttc

SEQ ID NO: 906837 - DNA, 120 bp, Artificial Sequence
  ENSG00000285789_7 (sequence is synthesized)
gtgaatttcattgaaagagaagaaacatttaaaaacttttaagtcctttctgaattgcttatacatatattcagcaattcagtgatgcagcctggatgtgcacagacttgggtaattggt

SEQ ID NO: 906838 - DNA, 120 bp, Artificial Sequence
  ENSG00000285789_8 (sequence is synthesized)
atagcttcaagtggacattattcttcttataacaatactgcattttcctccctcaaacactaacctgctatatttacaattacatttgttgccaaatatattaagtggacaaatgggtca

SEQ ID NO: 906839 - DNA, 120 bp, Artificial Sequence
  ENSG00000285789_9 (sequence is synthesized)
ctgtctgcctgcatttttctgacccagtcacaattcatcaagaaaaacaaagtttggctgggattctgaaacaagcacactaagctgtaaatgtatacttatgtttgcatgttagaatac

SEQ ID NO: 906840 - DNA, 120 bp, Artificial Sequence
  ENSG00000285789_10 (sequence is synthesized)
atcttagttacacgataaaaaggagcaggggagaggtgggtgcttggaagtaaaaatgtgaccacaatgaaattttgactgcagcatttgaggaatggtggcagagcagttggcatcagc

SEQ ID NO: 906841 - DNA, 120 bp, Artificial Sequence
  ENSG00000285789_11 (sequence is synthesized)
tcttgtctgcagcagtaatcagggcaaagaagcaatcttctgtgaccccaaactaagaatggagtcttgctttgagaaactcatgcttaccagttcagaagtaacatgctatagagattt

SEQ ID NO: 906842 - DNA, 120 bp, Artificial Sequence
  ENSG00000285789_12 (sequence is synthesized)
tcagaatactaatctatctcagattagtgtattataaaataaaagtggacaaatataaataaataattttttcaagtctttataaaaatagtaggctattgcctcattttagggacataa

SEQ ID NO: 906843 - DNA, 120 bp, Artificial Sequence
  ENSG00000285789_13 (sequence is synthesized)
tttttaatgccaagtgaaaactatgtagaaattctaattacaaatttgtgtacagctttacaattattgtatgtgttagatgtgcatgtgttgaacgttactatatatcatgctttgtgc

SEQ ID NO: 906844 - DNA, 120 bp, Artificial Sequence
  ENSG00000285789_14 (sequence is synthesized)
tgctcatcgaacatatgaagttgcataaaacagtctttgcttttgggagactaagttcagtgtgaggggcagacactaaaagtaaatactccgataactgacgagagggtgaataccata

SEQ ID NO: 906845 - DNA, 67 bp, Artificial Sequence
  ENSG00000225882_0 (sequence is synthesized)
ttagtcctaacctaaaataaaatagaacatactgtgcttaaagcaaggggggaatcatgtaacaata

SEQ ID NO: 906846 - DNA, 120 bp, Artificial Sequence
  ENSG00000225882_1 (sequence is synthesized)
catactgtgcttaaagcaaggggggaatcatgtaacaataaaaccagtgaagaaaattctaatgctcaggtaaggcctcagaaaaagtggaaaacagctggtcctcaggatcctccagcc

SEQ ID NO: 906847 - DNA, 120 bp, Artificial Sequence
  ENSG00000225882_2 (sequence is synthesized)
caagtgagtgacttgctcacaggcggtaattcagggacccaggtttcttctacctggtagctctactgtccttcagaacctcagagccctgtgcattcagccagcaggagaaagaccact

SEQ ID NO: 906848 - DNA, 120 bp, Artificial Sequence
  ENSG00000225882_3 (sequence is synthesized)
actaaggtcattcactttgggagaagccagtcttcatgccatgaggacgttcaggcagccctgtggagagaaccacatggaaaggatctgaggtctctcaccagcaccaatttgccagct

SEQ ID NO: 906849 - DNA, 120 bp, Artificial Sequence
  ENSG00000225882_4 (sequence is synthesized)
atgggaatgggccaccttggaaggagactgtccagcccaagtgaaggctgcagataactgcagctttggccaacatttggctatattgctttgggaaatctcaagccagaaccatctggc

SEQ ID NO: 906850 - DNA, 120 bp, Artificial Sequence
  ENSG00000261029_0 (sequence is synthesized)
ttgcgcgcgggcgcggccactcagcgggcgctctgctgactgagaggctcgggtactagggaaaccacccccgccatgggtatgcccaagacaacgatatggatcctaagtactgtcata

SEQ ID NO: 906851 - DNA, 120 bp, Artificial Sequence
  ENSG00000261029_1 (sequence is synthesized)
aagtgacagctaagccgaaacctcaagatgagttacacgtttgtgagacaaaaaaatggaaaggggcatggaggagtgaagtccaatagaaaagggttaaagtgatgcttgttgtatagg

SEQ ID NO: 906852 - DNA, 120 bp, Artificial Sequence
  ENSG00000261029_2 (sequence is synthesized)
tgacaagtctggggaggcaagttacggccagatcttaaaggccatgtattaaattggtaggattttatctgaaagtttctgcaaggctattgaactgttttaagcagtagagtgacaccg

SEQ ID NO: 906853 - DNA, 120 bp, Artificial Sequence
  ENSG00000261028_0 (sequence is synthesized)
gcgccgagagcgagcgagggctgtgagggctgccctcatgctgtcacctctcacctgggtctggagctgcagctgtgcccagaagtgtgggctcccgctggccttgtggagcgcacaact

SEQ ID NO: 906854 - DNA, 120 bp, Artificial Sequence
  ENSG00000261028_1 (sequence is synthesized)
gctggccttgtggagcgcacaactctggccacaccccccacttcagccagtttcttctcagcagccactccagagggaccacctctggcatcttaaatacattaccagctctgctccaag

SEQ ID NO: 906855 - DNA, 120 bp, Artificial Sequence
  ENSG00000261028_2 (sequence is synthesized)
tggcatgatcatagctcactgtaacccccaactcctgggctcaagcaattccctcctcagcctcctgagtggctagaacttcagggatgtgtcaccacacccaggtctaagtcatcagaa

SEQ ID NO: 906856 - DNA, 120 bp, Artificial Sequence
  ENSG00000261028_3 (sequence is synthesized)
aagtcatcagaaaagaacattagaacattctcacagagccttacaatctgaaaacccactgcctttcgaaaggatcaggcaagtggttggactaaattacattcccgctgacagtacgaa

SEQ ID NO: 906857 - DNA, 120 bp, Artificial Sequence
  ENSG00000261028_4 (sequence is synthesized)
tttggaatagagatgtacaaagacacgagggaaatgcttggaagctctcaagtgcggagaattctttgcacagactccctctctctgcacagatgaacaccatgagcttgctggaagggg

SEQ ID NO: 906858 - DNA, 120 bp, Artificial Sequence
  ENSG00000261028_5 (sequence is synthesized)
ttcaaagaacagcccacagcagcactcgagtttgctaaagtgactgacgttggcttcagtttggaatccaaaggcgacaactgacaaggaagagcggaagggaagggagaagtgagattt

SEQ ID NO: 906859 - DNA, 120 bp, Artificial Sequence
  ENSG00000225884_0 (sequence is synthesized)
agaaaacagtgttattcagtggacctttatccagagaacagcttctctatgccacctgaattccttggcttgcagccccttcttccatcttcaaagcgagtagttgagtgtcttcaagta

SEQ ID NO: 906860 - DNA, 120 bp, Artificial Sequence
  ENSG00000225884_1 (sequence is synthesized)
tttctgattgttactctcctgcctccttcttttacgtataaggatctttgtgattacattggtcccaccaggaaaatctacacacctgcaaagtcccttttgccacatcatcggaagaaa

SEQ ID NO: 906861 - DNA, 120 bp, Artificial Sequence
  ENSG00000225884_2 (sequence is synthesized)
caaaaacaagctgtggtgaagaagaaacgttttctaaagcctcttttatccccaggatggttgagaagtcagaggcctgcaatgctaggaagagagggtctaaagtgtccttttcaccgt

SEQ ID NO: 906862 - DNA, 120 bp, Artificial Sequence
  ENSG00000225884_3 (sequence is synthesized)
agtcccagaagactttcacaagaagagtttcaacaacagaaaataagcctaagtgattgtgtgaatatcacagagcaacagagaaaatgtagatcactccagttctagcacaaggtcggg

SEQ ID NO: 906863 - DNA, 120 bp, Artificial Sequence
  ENSG00000225884_4 (sequence is synthesized)
gaggaaaaagaatcagagagtttggaatttctaaatgctcgtgtttgagaaatggggagcatcacaaactaacagcagaggtggacattttttacagggtaaaggattcccatggaacac

SEQ ID NO: 906864 - DNA, 120 bp, Artificial Sequence
  ENSG00000225884_5 (sequence is synthesized)
cactcgtcaaatgcaaataaaaattgtacaaagaaggtaacttctttctctgtccccacatctctccatctgaaacttcattcttccattaaaacagaattgtgctttgtgatgtataaa

SEQ ID NO: 906865 - DNA, 120 bp, Artificial Sequence
  ENSG00000225884_6 (sequence is synthesized)
aggcaagagaggagatagattggggagcagggagaaggatatggaagaatcacaggcatctagcctcgacctggaagaaaggcaggcttctctatgccacctgaattccttggcttgcag

SEQ ID NO: 906866 - DNA, 120 bp, Artificial Sequence
  ENSG00000182376_0 (sequence is synthesized)
tggatggagaccagagcatgcggagcgcccctgagcagccgtggctggggtgggagcagggccatgatggctctggagaaaagtggggcaggcagctgcctccctggggctgaggggctg

SEQ ID NO: 906867 - DNA, 120 bp, Artificial Sequence
  ENSG00000182376_1 (sequence is synthesized)
caaggagaagttgcatcccgatgcatggcctatgcatggtacccagtccccatggccaccctggcatttcaggcacctgctgtgcaccaggtcaggccccagaccggcatcctctctctc

SEQ ID NO: 906868 - DNA, 120 bp, Artificial Sequence
  ENSG00000182376_2 (sequence is synthesized)
tctgtgcacccacacctggcaggaagcggcagcaccatctggttgcctggcagccttgtcctgctcccagctgcctgtggccccactggactcagccccccagcagggaggccttcggct

SEQ ID NO: 906869 - DNA, 120 bp, Artificial Sequence
  ENSG00000182376_3 (sequence is synthesized)
gcagggcaggggctgggcgggcgcaccctgtggctgggggcactcaggagccctggcttcacctctgctctcggcgcacatgtggacagctcacccttcagcaggggtccggaccaaagt

SEQ ID NO: 906870 - DNA, 120 bp, Artificial Sequence
  ENSG00000182376_4 (sequence is synthesized)
ccttgacccaccgggttctgagtcctgacagggctgtggacagcttccctttccaccccggcacgtgctggcaggagcttccgggccctcaccctggggcagcaactcctgcaccaccag

SEQ ID NO: 906871 - DNA, 120 bp, Artificial Sequence
  ENSG00000182376_5 (sequence is synthesized)
ccacgcccggccacgagaaagtgcagaacagctcaggcccttctcacaacttcctggagctcagggacaggtagcatctgggtctgggtccaaggtggtgaatgtcaccaccacatctgc

SEQ ID NO: 906872 - DNA, 120 bp, Artificial Sequence
  ENSG00000182376_6 (sequence is synthesized)
cctctctcggcctcggggcgcaaactcagggcctgtgtccactctgttcagttttttgagcacaaatggtgttaggtgacagactcgggattggccttggacactcagccccctctttct

SEQ ID NO: 906873 - DNA, 120 bp, Artificial Sequence
  ENSG00000182376_7 (sequence is synthesized)
ccaggcagccgaggcaggtttggaccagcttctcacactcacaccttcctagggttgccccaggccctgacctgctgaccctgcagctatgacctctgacctgtggaggatgggaggggt

SEQ ID NO: 906874 - DNA, 120 bp, Artificial Sequence
  ENSG00000182376_8 (sequence is synthesized)
gagcagcagggagagtgggaaggaggaatggaaaaccgtccaggaagggaggctgcagccccgacacgaacaggagccaccaccagggggtgctgtgcagggctcccggaggacaggacc

SEQ ID NO: 906875 - DNA, 120 bp, Artificial Sequence
  ENSG00000182376_9 (sequence is synthesized)
ttccagggcctccctgccccgaacccataggtgccaggcttctcactgctcacgacctccgtgccgggctcatacctgccgcgccagcccctcttcagcagagcacaagtctggcagcag

SEQ ID NO: 906876 - DNA, 120 bp, Artificial Sequence
  ENSG00000182376_10 (sequence is synthesized)
gagggcaccagccaggggccccgcgcccccgcctctgtacagcagggtcaccgtggggtgacatgagaacaccgacccagggaatgggctcctgccacacctgcctgggaacctgggctg

SEQ ID NO: 906877 - DNA, 120 bp, Artificial Sequence
  ENSG00000182376_11 (sequence is synthesized)
tgagtcctgctcgctgcaccctctagcctgacgttgaagtaacctcgccagcggggccctctgtggcactgggcactcagggagagcacgtggcattggagaaggtcccacccccaaatg

SEQ ID NO: 906878 - DNA, 120 bp, Artificial Sequence
  ENSG00000182376_12 (sequence is synthesized)
caaagctgggaaaaccaggctgagccggggatcaggccacctccgcagggacccactgctgcctcttccaggagcccaggagacccagtgggtctcctgcccccgactccaactccctcc

SEQ ID NO: 906879 - DNA, 120 bp, Artificial Sequence
  ENSG00000182376_13 (sequence is synthesized)
tggcaggacacacccagctcacagtggcctttccatcctgggaaagggagtgagaggaggctcaggccagggacccgcccagctctggccggcaaccgcccttcagcctttcctgaacca

SEQ ID NO: 906880 - DNA, 120 bp, Artificial Sequence
  ENSG00000182376_14 (sequence is synthesized)
ctgtgtgggccccaacccatccgctgcctgccggagggagcccatggggaatggactattcttgccacccctatccatggcaggggaggggctcagcatggctcttgcccacccagaaga

SEQ ID NO: 906881 - DNA, 120 bp, Artificial Sequence
  ENSG00000225889_0 (sequence is synthesized)
gcggaaagcgcgcgccagctgcacgcagggaaacagttctcattttgtgtgctcggctgactgcacgtccagcctcgggccagctcgagacggccacattgcctggttgaagatggctga

SEQ ID NO: 906882 - DNA, 120 bp, Artificial Sequence
  ENSG00000225889_1 (sequence is synthesized)
gcgtaaaacagaatgcaagtcagctggagcacgtactactggaggcagagccccatgagaaggggccaagaacccgcacccatcaaaatcaagaagaaaggctgaacccggagagaaaag

SEQ ID NO: 906883 - DNA, 120 bp, Artificial Sequence
  ENSG00000225889_2 (sequence is synthesized)
gagcaactgatgttgccatgcagatcccttggttgctatgagatggtaacatcactctgccccaccattggccagtgcctcctcagctgcggtgcctcccaggctgtgtggttctcacgc

SEQ ID NO: 906884 - DNA, 120 bp, Artificial Sequence
  ENSG00000225889_3 (sequence is synthesized)
gggccactgacacagagctgttactatggtgaactttacaatttcctttgattggtggatttcagaaataggccatcagcggaattcattatattcagctaacctggctcagcttctcag

SEQ ID NO: 906885 - DNA, 120 bp, Artificial Sequence
  ENSG00000225889_4 (sequence is synthesized)
cttctcaggtggattggtgagtcctggccaattacgcttcagctcatctctactctcagcaaataggaaaagggagtgaaggactgagttttaactcttctaatttcgtaacctgactct

SEQ ID NO: 906886 - DNA, 120 bp, Artificial Sequence
  ENSG00000225889_5 (sequence is synthesized)
taggaaggagcctgatgtgctagaagcccagtgagggcgccagtgtggctagagcagttgagagaagcagacaatagcagcagatgggtcagctccctagccaaggtgtgtgaagccgtg

SEQ ID NO: 906887 - DNA, 120 bp, Artificial Sequence
  ENSG00000225889_6 (sequence is synthesized)
tagtcctgggaaggattgggcttttacattgagataggatgggaagtcattggagggttgtgagccaaggacttatgttttgcaagggtcactctggttgctgtgttgagaatagaccat

SEQ ID NO: 906888 - DNA, 120 bp, Artificial Sequence
  ENSG00000225889_7 (sequence is synthesized)
aggcaagcctacccaggaagcagggaaacgggttaggaggctattgcctctgcgtgacaggtggtggagtggaccagggtgtagctgtggaggtggtgagaaaaggctgaattctggaga

SEQ ID NO: 906889 - DNA, 120 bp, Artificial Sequence
  ENSG00000225889_8 (sequence is synthesized)
tagcttgaaggaagaatgaatagcatttctgatggagtggatgtgggtgtgagagaaagaaaataggagaactcagaggtttttggcctgaacaattggaagaattgtgtagctattaac

SEQ ID NO: 906890 - DNA, 120 bp, Artificial Sequence
  ENSG00000225889_9 (sequence is synthesized)
tgagatgggaaagccgggggaggaagggatgggagatagatggagaacttgatgataataataattttgccctgcctccctcacaggactaaatgtgatgatttatgtgtaatttacccc

SEQ ID NO: 906891 - DNA, 120 bp, Artificial Sequence
  ENSG00000225889_10 (sequence is synthesized)
gccaatatgctctgtggttactggtattcaaagggccctctccttcctatgcagaagcagtctgttccctggacatgctcctctctctcagtcctcaggtggtgccagttggtgggggag

SEQ ID NO: 906892 - DNA, 120 bp, Artificial Sequence
  ENSG00000225889_11 (sequence is synthesized)
aatgttcctggcatgtggacttgaatctggcaggtatcatctgagctatgtttaggtggatattttgggataggtcctcacaaatgtgactcaagtatgacttaacagttaatatcttta

SEQ ID NO: 906893 - DNA, 120 bp, Artificial Sequence
  ENSG00000225889_12 (sequence is synthesized)
ttcattatattcagctaagtaaaaatgaaaaataaatactataactttcccctcatcactaacatgaaggaaacgtgacccttcatgacataataaatcgctgttcggtaacttaggatc

SEQ ID NO: 906894 - DNA, 120 bp, Artificial Sequence
  ENSG00000225889_13 (sequence is synthesized)
cttcaggggactgaagcgggatgatcctcctatgccaaatttgggtgggaaagatattccctgtagctttgagtcgactcttcagagttaagggcagtgggccaaccagagttggaactt

SEQ ID NO: 906895 - DNA, 120 bp, Artificial Sequence
  ENSG00000225889_14 (sequence is synthesized)
cagagttgggaggaggtgtgggatggggcatgcattgaaatgtaaactctattgtctctgaagtgatgggtgatgctgggggcctgagtgtggagggcagttttacatctcaggacaatg

SEQ ID NO: 906896 - DNA, 120 bp, Artificial Sequence
  ENSG00000225889_15 (sequence is synthesized)
ttttctcagatgctcttccagaaagaaaagccaggagtactcctggctggaggcggcatgcctgaggtcagagtcaaagtagggtttgtgctgtctgaatcctttctcccactctcccca

SEQ ID NO: 906897 - DNA, 76 bp, Artificial Sequence
  ENSG00000225889_16 (sequence is synthesized)
agggtttgtgctgtctgaatcctttctcccactctccccagcctggctcagcttctcagcttctcaggtggattcc

SEQ ID NO: 906898 - DNA, 79 bp, Artificial Sequence
  ENSG00000225889_17 (sequence is synthesized)
ttatctccttttgctgactctcttttctgactcagcccgcctgcacccaggagattaaaagctttattgctcacacaaa

SEQ ID NO: 906899 - DNA, 120 bp, Artificial Sequence
  ENSG00000225889_18 (sequence is synthesized)
aggtgagcctgcggagggagatgggatgcagcggagggaattggggtgcagcggagggaattggggtgcagcggagggaattggggtgcagcggagggaattgggatgcagctgagaggg

SEQ ID NO: 906900 - DNA, 120 bp, Artificial Sequence
  ENSG00000225889_19 (sequence is synthesized)
gagcgccagtggggaggttttgggagccaagccattagaggaaggatcacacaatgtccagaggtaatgaacacagaactttttagtttgtttttaggtcagagtctcatatcctggtct

SEQ ID NO: 906901 - DNA, 120 bp, Artificial Sequence
  ENSG00000225889_20 (sequence is synthesized)
gcactcgatggattcttaaagcaattggaacctcaggctggtcctggagcaagagctggtcctttacttggggctctcaggttgagaagtttgagctctaggattctccactgaccacct

SEQ ID NO: 906902 - DNA, 120 bp, Artificial Sequence
  ENSG00000225889_21 (sequence is synthesized)
ctccctgtctttgctcacttcccatctttaaactcccattgaactggcatgctattcttagcatggcactcaggctcttgactccacccagtccttctagttatattggccatggtacct

SEQ ID NO: 906903 - DNA, 120 bp, Artificial Sequence
  ENSG00000225889_22 (sequence is synthesized)
acgttcttgtgtctcctagcactgtctacctaccctctctccacaacacatattacacccccaatccaacccataattcccattggtttccaggtatgccagtcttcttacggtttccta

SEQ ID NO: 906904 - DNA, 120 bp, Artificial Sequence
  ENSG00000225889_23 (sequence is synthesized)
aacatgtcatagtagggaaaatgctacatgttcactacctcatttcaccttcctaggcagatgagaagacatctcccagtttctttttgcagctaggttgggacactgaccaaatttttg

SEQ ID NO: 906905 - DNA, 120 bp, Artificial Sequence
  ENSG00000225889_24 (sequence is synthesized)
acaacaaaaaagtgagtggagggatatggcattctggttcaggaagactaagagggggtctgagttcttcatgcttattctcttttgtccatatgctaggatgtgcaaaactctaactca

SEQ ID NO: 906906 - DNA, 120 bp, Artificial Sequence
  ENSG00000225889_25 (sequence is synthesized)
gtgggttgtaaaatggaagcaggctgggtcctgaatttctgttgcaggaaagctgaccaattggcataagacatatatatatatttttttaatgagcaaaagccactgagattatggggt

SEQ ID NO: 906907 - DNA, 120 bp, Artificial Sequence
  ENSG00000225889_26 (sequence is synthesized)
tttatttgttacctcagcctgtcctattctatcctaacagcacacataccatgctttttcttattttggcatctctatagttacattatgtcacttggaatgcctccctgcattcctacc

SEQ ID NO: 906908 - DNA, 120 bp, Artificial Sequence
  ENSG00000225889_27 (sequence is synthesized)
tgaatcttggcaccagtaaggaaaaagaaagggaggaagaggtgtacatttggcagagagaaagaactctgtatgtgcactatgtgtttgagaatgggacatccagggatatatggatct

SEQ ID NO: 906909 - DNA, 120 bp, Artificial Sequence
  ENSG00000225889_28 (sequence is synthesized)
gaagctcaagagagaggtctgagctagagataggtagagggttgagagtcatgagcataggggaagaagtgggcaagattacccagcgaaagtatgtaaattaagataagagagtggaag

SEQ ID NO: 906910 - DNA, 120 bp, Artificial Sequence
  ENSG00000225889_29 (sequence is synthesized)
atggaaaggtgaatcttagtggaacaccatcctttaaaggaaggcagaagaagcagagcccttataaatttcacagagtccccctaaggacattcagaattgagcgtgaaacctgggaaa

SEQ ID NO: 906911 - DNA, 120 bp, Artificial Sequence
  ENSG00000225889_30 (sequence is synthesized)
gcagaactagtttattgatcaacatttacaaatgtgaaacttaattttgaggaaaacagggtatactgcaattgaagctgttgagtagacccaaaaatgcctttgaaggtggaattgctc

SEQ ID NO: 906912 - DNA, 120 bp, Artificial Sequence
  ENSG00000225889_31 (sequence is synthesized)
acctttgttactgagaaaactcccgggcaaaagtttagttttgatcatgttaaaggtaaattaaaagctgaccttggcttttatattcctggctttcctcaacctgaagtcttctgactt

SEQ ID NO: 906913 - DNA, 120 bp, Artificial Sequence
  ENSG00000225889_32 (sequence is synthesized)
ctctgaacctaaaggaatgagaaagttgcaaggatttgtaaccggctattggaattaattgtgctcactagcctatattttgttttgcttttttctccatgtgtttgctttttggatgta

SEQ ID NO: 906914 - DNA, 120 bp, Artificial Sequence
  ENSG00000225889_33 (sequence is synthesized)
attcttaaattgtctaaatggtcaccttttgttgttgttattctttaaatggtacctggacagctatgatgggtcaagagagagaattgctttatactacaaggctatcagaagatcact

SEQ ID NO: 906915 - DNA, 120 bp, Artificial Sequence
  ENSG00000225889_34 (sequence is synthesized)
actccagcctgggcgacagtgagactgtcgtgaggaagggaatgtgataatccaagagagagatgacaatggattggaacacagtggcagcagtggaggtagtgagaagtggttggatgc

SEQ ID NO: 906916 - DNA, 120 bp, Artificial Sequence
  ENSG00000225889_35 (sequence is synthesized)
agcagtggaggtagtgagaagtggttggatgcaggatatattttgaagaggaagccaataagattcggatgtgagaaaagaaaaaaaagtaagaggagtccagaaggactctaaaggttt

SEQ ID NO: 906917 - DNA, 120 bp, Artificial Sequence
  ENSG00000225889_36 (sequence is synthesized)
tgaatagagtcaccatcgactgagagagtgcagactgggagtggagctggcttcaaagggaagaacagaagtccaagtttggacttgttaagtttgatacatgaagcaggcatctggata

SEQ ID NO: 906918 - DNA, 120 bp, Artificial Sequence
  ENSG00000225889_37 (sequence is synthesized)
gagtctgtgggaggggttctaccgagacgaatggacttttctgaggcagggcccaggagctgtaattcgaggggcctcagatctccctgccacccacctgccagggcaagtgaaattcca

SEQ ID NO: 906919 - DNA, 120 bp, Artificial Sequence
  ENSG00000225889_38 (sequence is synthesized)
ctgagaaaaaatcaggcgtatctattctcttccaggagtttgtctcccttttaagaaacaaatgtcccttgtgtgaatgattggaggctttttatcctctggtggcgcctccttctttgc

SEQ ID NO: 906920 - DNA, 120 bp, Artificial Sequence
  ENSG00000225889_39 (sequence is synthesized)
aattatctacaatggagactgtttcttctcccttcttagtgattacaactgctacttgcattctttttttactttcaagatcatgaaggcatgttgtctctatctttcctctccttcatc

SEQ ID NO: 906921 - DNA, 120 bp, Artificial Sequence
  ENSG00000225889_40 (sequence is synthesized)
ctttacttagtagtaccgatagcacttttaacttacgtctagttaaaagccagacatcctggattcagattctagcttgaccacttataagcgccatgaatgtggcaagttagccttttt

SEQ ID NO: 906922 - DNA, 120 bp, Artificial Sequence
  ENSG00000225889_41 (sequence is synthesized)
tgcatctgtttctttatctgcataaagcaataacaataccacctacctcatggtttttttcctgagaataaataattatatacagtcatgcattgcttaagatcagagaaatgtgtcact

SEQ ID NO: 906923 - DNA, 120 bp, Artificial Sequence
  ENSG00000225889_42 (sequence is synthesized)
gggcgatcatgagtttgtgtgaacatcatagtgtgtacttacacagactcagatggtgtagccttctacacaccttggatatatggtatagcctattcctgctaggctacaaactcgtgc

SEQ ID NO: 906924 - DNA, 120 bp, Artificial Sequence
  ENSG00000225889_43 (sequence is synthesized)
agcatcactgcctttcccactattctcctgcagaagagcaggggaaggaagcaccagggtccatcatggagttgtgacaactgagattcagagatgtccaatctactcacataaatagcc

SEQ ID NO: 906925 - DNA, 120 bp, Artificial Sequence
  ENSG00000225889_44 (sequence is synthesized)
tttctagcccatgacagactgacgtatctaaaaatcatagattaggtaaagaatgtgtgcaaattaaaatccatgcacagaaacctatgtgagaagaaggagcgttgtcatcgcagacgt

SEQ ID NO: 906926 - DNA, 120 bp, Artificial Sequence
  ENSG00000225889_45 (sequence is synthesized)
tttttcactaagtctttagaggttttaagattcaaacactatgtaagaagaattatggtttgaactacgtaacaattacctagacatcttttggacttcagttaacctgtgtcaagcact

SEQ ID NO: 906927 - DNA, 120 bp, Artificial Sequence
  ENSG00000225889_46 (sequence is synthesized)
gcagtagattctgaagatacaaaaataaataaaacattcctgccctcaagacacttacactcttatgtgtaacactgtgtgaccattcatctgggccttcctgagacagtcttggtttac

SEQ ID NO: 906928 - DNA, 120 bp, Artificial Sequence
  ENSG00000225889_47 (sequence is synthesized)
cagggtccatcatggaggaagggtgttgccctgaacagctgacacaccctcagcaatgaagcttagttttgctggaacttttcagttgtgacaactgagattcagagatgtccaatctac

SEQ ID NO: 906929 - DNA, 120 bp, Artificial Sequence
  ENSG00000225889_48 (sequence is synthesized)
gacttcgggaaaatcatcaggaaagcaatggagatttcccacctgaattagcttgtgttaactagctaatctttttagaatagtagcttctgcccataatttaaagaaacgatgtagaaa

SEQ ID NO: 906930 - DNA, 120 bp, Artificial Sequence
  ENSG00000255079_0 (sequence is synthesized)
ggggctaaatgatgatcttgaaaagggccctcactcgtgagccttcgccatgtgccagtcactatgctgagcaccttgcaggagcttcaggtccaggccttgggggtcagcagggcaagc

SEQ ID NO: 906931 - DNA, 120 bp, Artificial Sequence
  ENSG00000255079_1 (sequence is synthesized)
ctgagccctgtggtgctgtgggaagacttggttcaagtgacactgagcctgggacaaagtgcggttgatggctcttgttttccctggcccttcagattgcctttgggaaaccacccaacc

SEQ ID NO: 906932 - DNA, 120 bp, Artificial Sequence
  ENSG00000255079_2 (sequence is synthesized)
ctcactcccctccacccacgtgcattgcatggggctaattctaccccaggccctgactccaagtatgatcacctgatccagacctggccaatcagcctgttctgtcccccaggccacagt

SEQ ID NO: 906933 - DNA, 120 bp, Artificial Sequence
  ENSG00000255079_3 (sequence is synthesized)
ctgatggtcagacagggaagaagcccacagacagatgcaagtgctggttaatgttctgattcttgtgttggatgaccaggtcttgggtgtttatttatataaataaacagaggagaaccg

SEQ ID NO: 906934 - DNA, 120 bp, Artificial Sequence
  ENSG00000255079_4 (sequence is synthesized)
tttatgaacctatggcaagaggatggcgtgaataagggatcatgattaatagaattcagagacaaagggagagaaaacaaacaaaaaacacctctggaacttgttggagctcttggaaaa

SEQ ID NO: 906935 - DNA, 120 bp, Artificial Sequence
  ENSG00000255079_5 (sequence is synthesized)
gaaaagctgtgagtggatgttcaagagggtaacctagggcctcatgcattggggcattcagaagtttcgtactggatcaaaaacaacgaatgaagcctgcagtgcagagaaaacattgtg

SEQ ID NO: 906936 - DNA, 120 bp, Artificial Sequence
  ENSG00000255076_0 (sequence is synthesized)
cccaactttttttttttttaatctacaatacagctgcactgttggtagaagtgagaatctaactggtggctggagtgaggtggcataatcacagctgaatgcagcctcaatctcccaggc

SEQ ID NO: 906937 - DNA, 120 bp, Artificial Sequence
  ENSG00000255076_1 (sequence is synthesized)
aactttttaaattttttttaagagatgggggtctcactgtgttactcaggctggtcttaaattcctgagctcaagctatcctcccacctcatcctcccaaagtgttggaattacaggcat

SEQ ID NO: 906938 - DNA, 120 bp, Artificial Sequence
  ENSG00000227929_0 (sequence is synthesized)
ctaaactacagcagacacagaggacaaatattgtatgagtccgctcacacgagatgcctagaggagccaaaaccacggaaacagaaagtagactggggcctcattgagatgccagattgc

SEQ ID NO: 906939 - DNA, 120 bp, Artificial Sequence
  ENSG00000227929_1 (sequence is synthesized)
ttcttcaagaccctccaagggggcacgtcaaattctgatgggcctcaccttggacaaggctggggtttttagaccagctttcacagcctggttgctccagtgtcaagactgacagtgatc

SEQ ID NO: 906940 - DNA, 120 bp, Artificial Sequence
  ENSG00000227929_2 (sequence is synthesized)
cagggacctttagggcagacaacttcattgtgacagaatgagacctgtggcctttggacctcggtggggccatatgtcacccctgcaggccccaggccccccaagccaccaagagtcaca

SEQ ID NO: 906941 - DNA, 120 bp, Artificial Sequence
  ENSG00000227929_3 (sequence is synthesized)
gaggcagggaggggacaggaggagatcttgcccccactgcatctggctctcctgccctcaccatccgcagcagggggtacactacagcttcggctttacaaacacagggaaaaagctaac

SEQ ID NO: 906942 - DNA, 120 bp, Artificial Sequence
  ENSG00000227929_4 (sequence is synthesized)
acaacctttaagccgcattaacaggatcaagggatgtattattagtcctgctagcctccgaaccattgagagtacttctgaaagacagtgcttacttagcttgggctccagattttaaga

SEQ ID NO: 906943 - DNA, 120 bp, Artificial Sequence
  ENSG00000227929_5 (sequence is synthesized)
ttattagcagactgcagatccaaaaatggtcctcctctatttgggaagatattgcaggaaacaatgctctaggagagaccacagctgggccagccagattggtcaaatccaccctagaaa

SEQ ID NO: 906944 - DNA, 120 bp, Artificial Sequence
  ENSG00000227929_6 (sequence is synthesized)
tgaattagggagaagagatggcagccagatggctttttaaatgttgataagctgaagtgtggccagaaaaagagaccagagaatgagggaataagtcacctaaagcatgatggcagaatc

SEQ ID NO: 906945 - DNA, 120 bp, Artificial Sequence
  ENSG00000227929_7 (sequence is synthesized)
taagcataaacgcttagcagagaaaataaacacaccgtccatatacaccatgcccagccccaagcccagggcagatctgatactctcctgctgaccctgacacagcctcagaatacttct

SEQ ID NO: 906946 - DNA, 120 bp, Artificial Sequence
  ENSG00000227929_8 (sequence is synthesized)
caacacagaccgccagctgtcactgcaatccagcacagttggcacatcaggagagaggcatcttgcagttccactcaagaaagactttcctagcaagactttccaacaatgcaaatagtc

SEQ ID NO: 906947 - DNA, 120 bp, Artificial Sequence
  ENSG00000227929_9 (sequence is synthesized)
tcatttctgaggtggtcagccccttactgcaggaagttccaatcagaagcctcatggttgtcgaggactctgcatcagatgagggggcttgagtaactttaccccatgaggaagcagaag

SEQ ID NO: 906948 - DNA, 120 bp, Artificial Sequence
  ENSG00000227925_0 (sequence is synthesized)
ctggggagtgatctgaagctggcgaggcaatgagaacaccctggcagggcagctgagctgggtggatccttgttctgtcaccaagcctttaagtcatatgctgacatgttacagtcctgc

SEQ ID NO: 906949 - DNA, 120 bp, Artificial Sequence
  ENSG00000227925_1 (sequence is synthesized)
ctgggaccctgcccacaaatacttaagatacacgactttgggaatcacccaactgatggaaagaaccaggaaaggggtcaggatctgcaccttggcaaactttgaagaacacccaatttg

SEQ ID NO: 906950 - DNA, 120 bp, Artificial Sequence
  ENSG00000227925_2 (sequence is synthesized)
atagctccaggtgtagggacagatcagaagattctggaaaaggcagatcaccaaagaactcaagatgtactgatattttgccagtttccttcatcaacaacttgtcttctttaccaacta

SEQ ID NO: 906951 - DNA, 120 bp, Artificial Sequence
  ENSG00000227925_3 (sequence is synthesized)
aaaaaaaaaaagaaaagaaaagaattaaataattaaacaaagaacttaaataagaagaaaggttgtacctgcctacaagattatcaacaccatgtgagaacatccactttgctgaactct

SEQ ID NO: 906952 - DNA, 120 bp, Artificial Sequence
  ENSG00000227925_4 (sequence is synthesized)
tgtgagaacatccactttgctgaactctttctcacatatcacctttagagatgttacatggtatgcttttaattatcatttaatcctttgctagttagattaaacatggcaagtttcact

SEQ ID NO: 906953 - DNA, 120 bp, Artificial Sequence
  ENSG00000227925_5 (sequence is synthesized)
tcacctttttccttcctgtttgccatagctccaggtaagagacactgtagtcaaaatgacaattttgatttcaatcttgaaatgtgcagcctaaatataaagctcatctatttggtttga

SEQ ID NO: 906954 - DNA, 120 bp, Artificial Sequence
  ENSG00000227927_0 (sequence is synthesized)
cctggactggaagagatgctagccaaagataagaagaattggcaagggatagtagaggatggagacaatgaatatcagctgtgaccttgagaccacctgtgttgggagctatagtttgtc

SEQ ID NO: 906955 - DNA, 120 bp, Artificial Sequence
  ENSG00000227927_1 (sequence is synthesized)
ccactaactttcctcttgtaaatttctacaggagaagagatagactagaatcctcgaggacctgctcccagagaacatttggagatgtcctaagacaattggctatgtggatagggagat

SEQ ID NO: 906956 - DNA, 120 bp, Artificial Sequence
  ENSG00000227927_2 (sequence is synthesized)
attccagctccaaagatagtgacaagagctgttcatcttcatcatcctctctgatctttatgaagttacatgccattgacaatctttgctgtgttgttgtaacttcaggtatgctactgc

SEQ ID NO: 906957 - DNA, 120 bp, Artificial Sequence
  ENSG00000227927_3 (sequence is synthesized)
aatgagcatgccagttggactcttagacaatggccatctgacatttaagcttacacccctgattgaggaccgtccctttcttagggactccagaagaaacacctgcaatgttgagacacg

SEQ ID NO: 906958 - DNA, 120 bp, Artificial Sequence
  ENSG00000227927_4 (sequence is synthesized)
ctcagacagctaagcgatttgccagggctgtgcaacccatctgtgattctccgttgggaagtgtgtttctaggtacataaaaacgagctatttttctgaaggtcaagtatacaccatgtt

SEQ ID NO: 906959 - DNA, 120 bp, Artificial Sequence
  ENSG00000227927_5 (sequence is synthesized)
tatacgtgactacctggtgcagctgagcaatattgactttgatgcaaaaagaccacagtcaggccttgggaggatttctcattagctgtatgctctggtgggtacccagatccccctttc

SEQ ID NO: 906960 - DNA, 120 bp, Artificial Sequence
  ENSG00000227927_6 (sequence is synthesized)
aaagatagtgacaagagctgttcatcttcatcatcctctctgtaggcatcttgaattagaagatactatttagtgtggtctcttacccaagataaataatctaagtttccgtaatctttc

SEQ ID NO: 906961 - DNA, 120 bp, Artificial Sequence
  ENSG00000227920_0 (sequence is synthesized)
gagtggaggccgggcttgaatgcaatgaggggacagagaggttgacacaatgtgcggctgggctgactggggaacacgggctggccctgcggggtttgggaagatagaggctggcagagg

SEQ ID NO: 906962 - DNA, 120 bp, Artificial Sequence
  ENSG00000227920_1 (sequence is synthesized)
actggggtagaaaaggaaggaagaatggaaggaggaatagcgggagacaggacagcctcagcgcaaactttcatttccttcccaccagagggcactaggatccccctctccccactgcag

SEQ ID NO: 906963 - DNA, 120 bp, Artificial Sequence
  ENSG00000227920_2 (sequence is synthesized)
tggccacagcacccagtccctctccttaggaagcagatgatgccaccaagaccctgatatgtgagatgacttgcccaaggtcccacagccagtaatttgaatgcaggcagtcaaaccaag

SEQ ID NO: 906964 - DNA, 120 bp, Artificial Sequence
  ENSG00000227920_3 (sequence is synthesized)
gaggaagcagggagcagctgtgcctggatgggcgagggtggaggactgcacaggtcagggagctcgttctggctcctgccaggggagtcgggtgagagcaaaggtccagagactgtgggg

SEQ ID NO: 906965 - DNA, 120 bp, Artificial Sequence
  ENSG00000227920_4 (sequence is synthesized)
taggggtggccccgcgtcccagtggggtgggctgtggctcctcatcaggagagactggttgtggtcctgagcatccctcgttgctgagggtaataaacctgcctctttaccccctccaaa

SEQ ID NO: 906966 - DNA, 120 bp, Artificial Sequence
  ENSG00000227920_5 (sequence is synthesized)
tagactcccagctttgctagcatgcatgttagcatgacctggggaatgaaaaggaatcaatgccctgctgccccaccaccagccaattgaaccagggtctctggtggtggagcctgggca

SEQ ID NO: 906967 - DNA, 120 bp, Artificial Sequence
  ENSG00000227920_6 (sequence is synthesized)
atcatcctagaagtcactgactggattggcaatggggctgatgctgagtgcctggcacgctatgtgctgggcactgggctacacaacggacactgaatactttccatagacaaccctgca

SEQ ID NO: 906968 - DNA, 120 bp, Artificial Sequence
  ENSG00000227920_7 (sequence is synthesized)
cgatgcatgaccttgggcaagttacttgacctttgtgggcctcagttgccttgtcagtaaattggggataataataggactcacttcccaggaataaatgactttctccaagtaaagcaa

SEQ ID NO: 906969 - DNA, 120 bp, Artificial Sequence
  ENSG00000276148_0 (sequence is synthesized)
gcactccaacctgggtggctgagcaagactcatctgaaagaaaaaaaaattggcaagacaactatatggttaagaatttaagaacttccagtatgaccacacccaataactgtattagat

SEQ ID NO: 906970 - DNA, 120 bp, Artificial Sequence
  ENSG00000276148_1 (sequence is synthesized)
ctcagtatagttactggtaccacagtgaggtgaataaaacaggatttttcagaagttagcctgaatttcactgtacttttaaatttaacctccattaactaagcatcttttctttgtggt

SEQ ID NO: 906971 - DNA, 120 bp, Artificial Sequence
  ENSG00000276148_2 (sequence is synthesized)
agggtctaccttctgcttccctggaaaggatgaacttacatcatttgacaagacctgttttcaagttatttgttgtttgtttgcttgtttttgtagcctaaaataaaaatttcaaataca

SEQ ID NO: 906972 - DNA, 120 bp, Artificial Sequence
  ENSG00000241269_0 (sequence is synthesized)
gaaaaatcaaagagagagcaaaatcggcgagctccgccgagcgggcggggcaaggccgaggtggcagctcctgagagaccccaaggaagaggggagcatcgagggctactctggaaattg

SEQ ID NO: 906973 - DNA, 120 bp, Artificial Sequence
  ENSG00000241269_1 (sequence is synthesized)
caaaaatccgaaactgcaattcgaacaggaggttcgggaccgcgatggtccggtttcggtgtccctgccgcacctccgcaccctctttcgcgctggaaaacaaggggtccccgagggccg

SEQ ID NO: 906974 - DNA, 120 bp, Artificial Sequence
  ENSG00000241269_2 (sequence is synthesized)
gtcaccgtactcccgcatcccccggcgtactcccgcatcccccggcgctcggtaactgccagggacccggctcggcgcgagtggtggagctgggaacagaacccaggagggcccacgagc

SEQ ID NO: 906975 - DNA, 120 bp, Artificial Sequence
  ENSG00000241269_3 (sequence is synthesized)
gccaaaagtagcgtttgccaagaaaaagattcgagctcggggagcgggtgtctcgcggggtgcgggggccggtttgttcttttctcgcccagattttgaaaactccagcccaggctcgtg

SEQ ID NO: 906976 - DNA, 120 bp, Artificial Sequence
  ENSG00000225279_0 (sequence is synthesized)
ttcccactgtactgccctggccctgggctcacctgagattgctggggaaaagaaagggtcaaccgggaggtttagacacgtggagaaggagtgtgcctggctctaccagttggaactggg

SEQ ID NO: 906977 - DNA, 120 bp, Artificial Sequence
  ENSG00000225279_1 (sequence is synthesized)
atcagaagtggagctgaggaggctggtccagggagaatgcagtgctaagaggtcagacctataccccacttgggaggtgacctcacatgtctgccaccttgcaagcccctgctcagagat

SEQ ID NO: 906978 - DNA, 120 bp, Artificial Sequence
  ENSG00000225279_2 (sequence is synthesized)
attacattactgaggcacactaggctaaggctgacaacaccaaatgctggcaggaatgtggagcaacaggaacaggaattcgtggctgatgggaatgcaaaatggtacagctactttgga

SEQ ID NO: 906979 - DNA, 120 bp, Artificial Sequence
  ENSG00000225279_3 (sequence is synthesized)
agaaagtgtggcagtttcctaaaaaactaaacatactcttaccatacgatccaggaatcatgctccttggtatctacccaaaggagatgaaaacttacgtccacatgaaaatctgccgat

SEQ ID NO: 906980 - DNA, 120 bp, Artificial Sequence
  ENSG00000225279_4 (sequence is synthesized)
ggatgtttatagcagctgtattcatcatggccaaatcttgaaagcaaccgagatgtccttcagtaggtaaatagataaataaaccatggccatcctgaaatggaatattattcagtgcca

SEQ ID NO: 906981 - DNA, 120 bp, Artificial Sequence
  ENSG00000225279_5 (sequence is synthesized)
aacgacatgacattctggaaaaggaaaattatggaaacaggaaaaagagcagttgttgccaggggttagggaagggggattgactaggcagagcatagaggacttttacagcaatgagac

SEQ ID NO: 906982 - DNA, 120 bp, Artificial Sequence
  ENSG00000225279_6 (sequence is synthesized)
tataatggtggatacacatcattatatatttgtccaaacccacagagtgtacaacaccaaaagtgaaccctaatgtcagctatggactttgggcgattatgatgtcaatgtagcttcatc

SEQ ID NO: 906983 - DNA, 120 bp, Artificial Sequence
  ENSG00000225279_7 (sequence is synthesized)
acttgtaacaaatgtgccattctggtggatgtgtggggacagggggcatacggaaaatctctataactttcctctcagttttgctctgaatctaaaactaccctttaagaagtcttcttt

SEQ ID NO: 906984 - DNA, 120 bp, Artificial Sequence
  ENSG00000225279_8 (sequence is synthesized)
taaaacaatttacaaagcatgaggtgatacagatgtgggagtttggctcctgtctctgcccaactctgtgacattcgataaattacttaacatgtctctgtttcagtttcctcatctata

SEQ ID NO: 906985 - DNA, 120 bp, Artificial Sequence
  ENSG00000225279_9 (sequence is synthesized)
actgggaaaaataacacctgtcttatagagttgccatggggatgacatgaggcatgtgtctcgttcatatcccatgctcagtgaattagtagcagcagccactgtgtgtttgtgtgtctt

SEQ ID NO: 906986 - DNA, 120 bp, Artificial Sequence
  ENSG00000225279_10 (sequence is synthesized)
tatccctcctgggttaatgagctccttgtgggcagggactcacccattctgtaaccaccccatctaacacactgcctggcacttgggctccgcagaagtttgccgagtgaatacttagta

SEQ ID NO: 906987 - DNA, 120 bp, Artificial Sequence
  ENSG00000225279_11 (sequence is synthesized)
actgctggtagagggtgaggggggcccaggactgagactaaggagatcttggcccacaggggctcccctgggggcactgcccaggagacaggggaggagactagactagggcctccaaac

SEQ ID NO: 906988 - DNA, 120 bp, Artificial Sequence
  ENSG00000282111_0 (sequence is synthesized)
agactttgtgagcctgtgtcttgcctgggcatgcacatggctttctaaattctctcgtaacagctgcttttgagtgtcctaatttcccaaagagtcttactccagcttctcatctgggcc

SEQ ID NO: 906989 - DNA, 120 bp, Artificial Sequence
  ENSG00000282111_1 (sequence is synthesized)
ttagatggtctactctatggctccactcaaaatctcttgcccaggccatgagcctatagtgatcttgcagcttttattaacagtgtccacttatttttccagctgtgttctgagttaggt

SEQ ID NO: 906990 - DNA, 120 bp, Artificial Sequence
  ENSG00000282111_2 (sequence is synthesized)
aagactgctgccacaccggggagaggatggggccagggctgctgtgtatcctgggaccatctgcaaggacactctactgcaggtgcctgatcagacttcaaactgatatttttgttgaga

SEQ ID NO: 906991 - DNA, 120 bp, Artificial Sequence
  ENSG00000282111_3 (sequence is synthesized)
agttgaaagagggagattgtaaacgggcccaaagtccttctggagaaaaactactgtgagggaaaattttagcaggaggaaagattttgtcaggctgaattgatccagttgtgtttccag

SEQ ID NO: 906992 - DNA, 120 bp, Artificial Sequence
  ENSG00000282111_4 (sequence is synthesized)
ggcatccaagcctctccctgcggccctggcccgcctcctccccatgcaccaggctctggctcccgggtactcctcctgccatggggcccacgcagcagctacaatgcatgctttgttcag

SEQ ID NO: 906993 - DNA, 120 bp, Artificial Sequence
  ENSG00000286601_0 (sequence is synthesized)
agagcaaaataaacaagaggcaggggatttgggaacttctttcacaaagggctgaaagaacaaacacatggaggaaaaacatgaaacttccaagagtacagtcctatgagcaaaaactca

SEQ ID NO: 906994 - DNA, 120 bp, Artificial Sequence
  ENSG00000286601_1 (sequence is synthesized)
gacatctttgagcgatagaagagacaactgggccgggggccagttcagtgcggacctacatttcaaccaccatgatgaaggagagttgtgtgtggtgccctgtggatggtgcaggtgaga

SEQ ID NO: 906995 - DNA, 120 bp, Artificial Sequence
  ENSG00000286601_2 (sequence is synthesized)
cgtccaaagacagcatcgctcacactgctcaggacggatgaggtactgaaggaggccagattggaggagccagcctgggcagggctgtggctgtttcagggcaaggtaaggggtccttct

SEQ ID NO: 906996 - DNA, 120 bp, Artificial Sequence
  ENSG00000286601_3 (sequence is synthesized)
tgccggccattaggaacattataaagtgcacccagtttttcttggtggaagttcccctttttgtgtcctttacccttttaaaaatatgtcttcccttgtttctccttatccttgatcacg

SEQ ID NO: 906997 - DNA, 120 bp, Artificial Sequence
  ENSG00000286601_4 (sequence is synthesized)
tcccttttttcagggagagaaattgtcaaaaaatttatactactaagagtaatttaaaccaccctagaaaggcttctatttaaaagaaagagccatgaggtgatggatatgttaattagc

SEQ ID NO: 906998 - DNA, 120 bp, Artificial Sequence
  ENSG00000286601_5 (sequence is synthesized)
ttgatttaatgactccacattgtattaataaatcataacactactttgtgcccataaatagatacaattacaaattgtcaatttgcaataaaataaaaataaataaaaatgaaaaaagga

SEQ ID NO: 906999 - DNA, 120 bp, Artificial Sequence
  ENSG00000286603_0 (sequence is synthesized)
aggcgctgggctggcagcacgaggggctgcatatccaccctgtggactcctcctcaccctgccacagtgccctctggtcttctacagaaggacgccacagacgtgcatctccccactgtc

SEQ ID NO: 907000 - DNA, 120 bp, Artificial Sequence
  ENSG00000286603_1 (sequence is synthesized)
cctttgactgtttgggaccatgctgtccaaaatttaacacacaattgagctcttttcctgtctcctcaaattctgactctgcatcctagatctggccagcgtttctctcccctgcagggt

SEQ ID NO: 907001 - DNA, 120 bp, Artificial Sequence
  ENSG00000286603_2 (sequence is synthesized)
acatctcctttgggcgtggcctcaggatccccacacaggaggactgaccttgccaaaggcctggcaagtaaggatgctctggctgactaacgttctcttttcggattcaattggacatgg

SEQ ID NO: 907002 - DNA, 120 bp, Artificial Sequence
  ENSG00000286603_3 (sequence is synthesized)
ttctccagtgcttcttggctctaattacggcggaatgtgcctgtgagttgtccaacagctgccacatccttgttaagacattaatgagagaagatcttgtgagaattgaaggaaaataga

SEQ ID NO: 907003 - DNA, 120 bp, Artificial Sequence
  ENSG00000286603_4 (sequence is synthesized)
aaaaaccagccacctcatttcttccccagaagaccataagcacatggcatctcactttgaggggcaaattctgagtttggcactttatttatattttattaatgtaaacaataacaaaac

SEQ ID NO: 907004 - DNA, 120 bp, Artificial Sequence
  ENSG00000286603_5 (sequence is synthesized)
acgttcaatcacaagcactctactcagccagctttatgtctacctctgaatcgaggcacttctgagatgcttctcagtgttagggaatgctggcctggaaggcttaggagccaactggca

SEQ ID NO: 907005 - DNA, 120 bp, Artificial Sequence
  ENSG00000286603_6 (sequence is synthesized)
agctcattagaggaccaagaattgcatcataaaacagtgggaccaaatgtgtgggcagttattttaaaacattataaaaacccaccactgtgtatttttctatgaattgttgacaaatgt

SEQ ID NO: 907006 - DNA, 120 bp, Artificial Sequence
  ENSG00000286603_7 (sequence is synthesized)
tatgaattgttgacaaatgtgcttagtaataggataagtgaagaaaaatgaatgaattagttgagatttacttacattttaacattaataataaaatacatgatgttagatgaataaaat

SEQ ID NO: 907007 - DNA, 120 bp, Artificial Sequence
  ENSG00000286607_0 (sequence is synthesized)
agatgtgacacgatgaacccaacttcgtggggctgggccaaaaggccggagcttggagaggggacatttctgcgcttgacttcgggctatggactctgcccggtggagaccattgtaccc

SEQ ID NO: 907008 - DNA, 120 bp, Artificial Sequence
  ENSG00000286607_1 (sequence is synthesized)
catacggatggagaggttacacctattgtatctgtatggtggtgatattataccatgaggtgcatctctttctggtgaaggaaatcccaaaatatttcaccccaaaatatggctccctgg

SEQ ID NO: 907009 - DNA, 120 bp, Artificial Sequence
  ENSG00000286607_2 (sequence is synthesized)
tatagtgagtattttgaattcaacacccttagagatcaataaactggaagaaactttcccccttctacaaaaagaaaggactgaatcaccaaggagaacagttgttcttgttcgcccgtt

SEQ ID NO: 907010 - DNA, 120 bp, Artificial Sequence
  ENSG00000286607_3 (sequence is synthesized)
atctcattacccttcacagcaaagaagacccagaatgtaaccacatctgaacagactctttcaagacagtgactgttgccaaggatcatataaattccaaagaattttacaagttacttt

SEQ ID NO: 907011 - DNA, 120 bp, Artificial Sequence
  ENSG00000286607_4 (sequence is synthesized)
ctcccataagcccccattctgtctgtaacctcgaggtagtatataagtttctggacttcactggagggggtctagtctttattctgaaggctgtcatgtatacctgttaagaatgataga

SEQ ID NO: 907012 - DNA, 120 bp, Artificial Sequence
  ENSG00000286607_5 (sequence is synthesized)
gaagatgtcttgggtgaatattatgatatataaattatatctcgatttttaaaaaattgaggccaggcacagtggctcacaactgtacagtctcggcactttgggaggccggggcgggtg

SEQ ID NO: 907013 - DNA, 120 bp, Artificial Sequence
  ENSG00000286608_0 (sequence is synthesized)
cccgggtccatagagatctggggagggtggggggagcaaggacgagtgcctgccgggacccccctggctcctcgctcccaaggagtcgaggggaacgtctctaccgcgctgcaaagccag

SEQ ID NO: 907014 - DNA, 120 bp, Artificial Sequence
  ENSG00000286608_1 (sequence is synthesized)
cagagatggagcaaagaaaccgtcatactccaaatggtggtgtttaacctcaagtttgttttaaatatacctgcctgactctgaccagagatcaaagtgaacatcacaaataacgggaca

SEQ ID NO: 907015 - DNA, 120 bp, Artificial Sequence
  ENSG00000286608_2 (sequence is synthesized)
aattgacattatgtgtcttctgatatgacgctctgagaggaacacagcaccataaggtggtatctgtgatatctctggccaaccataaggaaacaattacacaaacccaaactgagaagc

SEQ ID NO: 907016 - DNA, 120 bp, Artificial Sequence
  ENSG00000286608_3 (sequence is synthesized)
ctgcaaaataactggcatgaaatcttcaaaaatattgagatcatgaaagatatcctgaggactcactcctgctcagccactcacatcaaatttagtttcttgaaatgggctgctgaggca

SEQ ID NO: 907017 - DNA, 120 bp, Artificial Sequence
  ENSG00000286608_4 (sequence is synthesized)
atatacgctgtgtgcctactacaaactggaaaccgttctcagctgtaagatccatcaatgcggagttgcttaccaggggaagacatgtgtgaactgatgtatgtgtcagatggtaataag

SEQ ID NO: 907018 - DNA, 120 bp, Artificial Sequence
  ENSG00000286608_5 (sequence is synthesized)
tgcactggagaaaatgaagcctggcaaagggtcagggagtgaatggagggtcacttgggcagtcagggagggcacttctgaacaggtaccaggtgagcaaaggttgaatgttttaaggca

SEQ ID NO: 907019 - DNA, 120 bp, Artificial Sequence
  ENSG00000286608_6 (sequence is synthesized)
ttgatgcctgagggcagaaagttctaggcagaggaaatgtacagatgccctcaggagggaacactttgcttcttcaaagggttgcaaagaggccgctatggccagagggtggtgagtgag

SEQ ID NO: 907020 - DNA, 120 bp, Artificial Sequence
  ENSG00000286608_7 (sequence is synthesized)
gattattcaaggagaaggaaagggaagtttaaagaggagaagttgcgtcttggccttttactctggaatgggaagccctgaagtgttctgtgctgaagagccacgtgctttgactcaggc

SEQ ID NO: 907021 - DNA, 120 bp, Artificial Sequence
  ENSG00000286608_8 (sequence is synthesized)
ttttcaagaaccactgtggcccgctgtgcaagggtgacatcagggagaccagtcaggaggtgctatggtttggatatggttgtttggccccaccaagtctcatgttgaaatctgatccct

SEQ ID NO: 907022 - DNA, 120 bp, Artificial Sequence
  ENSG00000286609_0 (sequence is synthesized)
gcttaattgagaatgggataaggattacaatcatttcttgaaatgatattttgaagtaattactggatgaaaatgtggagaagtaaacatgctttctggaaggcagtttgagtttgtgag

SEQ ID NO: 907023 - DNA, 120 bp, Artificial Sequence
  ENSG00000286609_1 (sequence is synthesized)
caggcgttgaacattctacattgtttgagtcactgcttcttctcttgtttctacttccatctcaaagagacttttttaaaaagttgtttggcttgtatgtgttcctatgtctcaatgtgc

SEQ ID NO: 907024 - DNA, 120 bp, Artificial Sequence
  ENSG00000286609_2 (sequence is synthesized)
cagagcagtatgcctgatgtgttagacagtacaatacagctgggaagctgtggctctgtcccaaactggtttaggtcatctccaaatgctatgaagttgagcctggatcccatagcaaaa

SEQ ID NO: 907025 - DNA, 120 bp, Artificial Sequence
  ENSG00000286609_3 (sequence is synthesized)
ggaggactgacttccttcatcctgaaagaaaccatggcaaatagaagcttacacatttggcaaaggagcctgtcatcactatctctcaagattggatgcatgcagaagaattttatcagc

SEQ ID NO: 907026 - DNA, 120 bp, Artificial Sequence
  ENSG00000268555_0 (sequence is synthesized)
gggggcgggggacagtgtcttcagcaaaagtctgcggatagaaaggccccgctcctgtccggacagcaggaatgggagagccgcctccaaccccagccccatggagcagggcagaaacgc

SEQ ID NO: 907027 - DNA, 120 bp, Artificial Sequence
  ENSG00000268555_1 (sequence is synthesized)
tgcccactgccctgctcctgccaccaggaagggcgtgtggggggccactttctgtaaagaagaaaccgcctgaacaacaagtggctcaaggcacccttgtctaacgaccagggacactga

SEQ ID NO: 907028 - DNA, 120 bp, Artificial Sequence
  ENSG00000268555_2 (sequence is synthesized)
gcgccagggcccaagtcaccagcaagagaaaacccaggcggagcccagggtgtcccccactgcccaccagccactgcggtcaacgtgaagggcaagggtgcaagcgggatcgcgtcacag

SEQ ID NO: 907029 - DNA, 120 bp, Artificial Sequence
  ENSG00000268555_3 (sequence is synthesized)
ggagccgagtgagcccagaaagtaggagaaggacgtttccacccacctggagcgcagtccgtttgcagccggcggcagaatgctgctgtctccatcaataaagtccatgttagccaccta

SEQ ID NO: 907030 - DNA, 120 bp, Artificial Sequence
  ENSG00000268555_4 (sequence is synthesized)
gaggataaaataccacgaggaggagtagcaaggtgcccctgttgacagatcttgaagcacaagctcactcccagaagcacagctgcctagtcaacaaacagctgacaatacatgtctgaa

SEQ ID NO: 907031 - DNA, 120 bp, Artificial Sequence
  ENSG00000268555_5 (sequence is synthesized)
ggagctcagctgggaacagaagaatggccccactgagcctagcctaaatggcggaccatctcaattatgagctaataagttttggatgatttgttatgctgccatacctaactaatacat

SEQ ID NO: 907032 - DNA, 120 bp, Artificial Sequence
  ENSG00000268555_6 (sequence is synthesized)
gcacccagtgcagattgggtgtcaagatttaaagacagtttgattattagtcaccttctaacaatgggcaccctaaaggtactgacatttttcccgatttaaagttaaatgtcttgtaag

SEQ ID NO: 907033 - DNA, 120 bp, Artificial Sequence
  ENSG00000268555_7 (sequence is synthesized)
gcaatgttgactgatgcaggaatacttgtagacatgtatgcatgtgattggtgcttatatgcacacagtcccccacaccacaggaaaaaaccgatgaccagagcctgaccattatggcca

SEQ ID NO: 907034 - DNA, 120 bp, Artificial Sequence
  ENSG00000268555_8 (sequence is synthesized)
ttcttcatatctaaaaattggaggtcaatactgtggacaggtctgaagacatagagttttgttctcctgtggccccatcattcttcagtggtctacctgtggttattttattcttgttac

SEQ ID NO: 907035 - DNA, 120 bp, Artificial Sequence
  ENSG00000268555_9 (sequence is synthesized)
cttctgctctttctatgaccactatctgttccacccttgaaactgaagacagatgttagtagaaagaggctgttccctcatgtcgggcatgtgggatacgatgaggtttctcttcaaata

SEQ ID NO: 907036 - DNA, 120 bp, Artificial Sequence
  ENSG00000268555_10 (sequence is synthesized)
gcctgatcaatcttttattctttaattcatagtacccacacacacacccctttttttcctttttctcctttttcctttctgcctttgttagatgcccaggcacgccacagtaccaggcat

SEQ ID NO: 907037 - DNA, 120 bp, Artificial Sequence
  ENSG00000268555_11 (sequence is synthesized)
tatcagtaccagctcacatttcttcccttatttggaaagaggactaactttctagctcaatgcagacaccccttccccttcctctctgcattcttttgcatgcccaccttatctaaaaaa

SEQ ID NO: 907038 - DNA, 120 bp, Artificial Sequence
  ENSG00000268555_12 (sequence is synthesized)
atcaaatgtttagccaaccaggattagttcagattgtacgacccgaccctggccaatggggaaagggtacaggggcaggacttgtgtcaggaataaaggctcttgtgcccctttgttcag

SEQ ID NO: 907039 - DNA, 120 bp, Artificial Sequence
  ENSG00000268555_13 (sequence is synthesized)
gtgtgctctcatggtgactggacaagaacgcacccctctgtgcagaactaaaattgctttgctaggaatcctttgttcgagtgttcaatttccttatgattttgagcgttattcctaaca

SEQ ID NO: 907040 - DNA, 120 bp, Artificial Sequence
  ENSG00000268555_14 (sequence is synthesized)
ggaagaaaagggatattcaggcctttcacagacctgacaacagagctgcacttcaatgtgacaggtattgaccatgtgtgactcctgggagcctggaatgtggctggtctgagctgcaat

SEQ ID NO: 907041 - DNA, 120 bp, Artificial Sequence
  ENSG00000268555_15 (sequence is synthesized)
ctgagctgcaatttgcaagaaaggtaaaatgcagagttagtttcaaagatttagttccataaatataaaaatatacaacatatagataaaaatatctatatataatatggataaaaatac

SEQ ID NO: 907042 - DNA, 120 bp, Artificial Sequence
  ENSG00000268555_16 (sequence is synthesized)
cataattatacattgctcacatattaaaataatattttggatatattgctttaattaaattgttacaacagacggatgcagtgtctcacgcttgtaatctcaacactttgggaggccgag

SEQ ID NO: 907043 - DNA, 81 bp, Artificial Sequence
  ENSG00000268555_17 (sequence is synthesized)
actttgggaggccgaggtgggcgtatcacgaggtcaggagatcgagccatcctggctaacacggtgaaacgtgtctctacg

SEQ ID NO: 907044 - DNA, 120 bp, Artificial Sequence
  ENSG00000244161_0 (sequence is synthesized)
catggagacctcctcgcagggggtggtgggcccatggaccccgatcagcagcatgttggagcctaggaggcaaaaggtggttactccacccggatgcatcaggacaggcacaggaagaag

SEQ ID NO: 907045 - DNA, 120 bp, Artificial Sequence
  ENSG00000244161_1 (sequence is synthesized)
aggaaatatgagagccaaaggaaaggaagcagaggcacagtgaagtcagataattcatctggagtcacacagctggggaccagcagaactgggatttaaacataaagtctgtccaacttg

SEQ ID NO: 907046 - DNA, 120 bp, Artificial Sequence
  ENSG00000244161_2 (sequence is synthesized)
gagctaaagcacttacctgagagaagatggaaggaaaaaaatccacaagcagaagtctctcaccactgcctctagctataacctgtatctgacaccacaaaacatctctgggcgtggcgg

SEQ ID NO: 907047 - DNA, 120 bp, Artificial Sequence
  ENSG00000244161_3 (sequence is synthesized)
tcttcccccaccccctcaaatatgtccagctcagttcctgtgagtttaatgcatgttaaacgcagcactgcttgttcttcaaggcagttaaggaaggaggcccttctggtataccccgag

SEQ ID NO: 907048 - DNA, 120 bp, Artificial Sequence
  ENSG00000244161_4 (sequence is synthesized)
cacactggggttcctggaccatttcattaggaaaattgctcagcggctccaaagaatctggagctccctggtctatctcccagcctctcaagccgcctccagcagggtcccgccccaaat

SEQ ID NO: 907049 - DNA, 120 bp, Artificial Sequence
  ENSG00000244161_5 (sequence is synthesized)
tctccacattcccctactccaaaatctacagaatggaccatttaaagcttgagccaagagatacagcaaactcacccattaaaaacagagggaggtttgctttgttcagaaggtcaggat

SEQ ID NO: 907050 - DNA, 120 bp, Artificial Sequence
  ENSG00000244161_6 (sequence is synthesized)
actgggcgctctggcggccaagcacagataccttttcattccatgcacactgcagctgtgtaatctcagaatggatatttagggaaaggcttgggagcaggagggctggaaaaacaaggc

SEQ ID NO: 907051 - DNA, 120 bp, Artificial Sequence
  ENSG00000244161_7 (sequence is synthesized)
gccttccctgtgacaagagcaatatttacacagggtttgaagcaggcggttctgtacctctcccctcctggctaggagcttccctgcaagagcaactccttctctcagcagcgtccagca

SEQ ID NO: 907052 - DNA, 120 bp, Artificial Sequence
  ENSG00000244161_8 (sequence is synthesized)
cttgcagagcacagcctgaaacccaagctcccaaaaaggtgtgcgaacagccaaaaggaaatgggagagggcccaggcacagcggcatgagccagcaggagggtgagatgcttcctggcc

SEQ ID NO: 907053 - DNA, 120 bp, Artificial Sequence
  ENSG00000244161_9 (sequence is synthesized)
agtgtgggagaccccagcagctgctgtgaggcctggcctgaagcctgccacgcgctccaagtgccgagaggaccccacctgggccctcaaaggtgagtaccttgtcagggcccaagtgcc

SEQ ID NO: 907054 - DNA, 120 bp, Artificial Sequence
  ENSG00000244161_10 (sequence is synthesized)
agcactgctgcctggaaagtactcctgagtggctgggaggacaggggtcctggtttaggacatccccaaagtgggctggggatgcagtcactgcctctgggtgagccagccacttagaga

SEQ ID NO: 907055 - DNA, 120 bp, Artificial Sequence
  ENSG00000244161_11 (sequence is synthesized)
gggggccaagctcgggggttcagcgcataggctctgaggtcacggatgtagactgattcctggttctgcctcctcccagctgactgctttttgggggagtgttgtttggggagtgactca

SEQ ID NO: 907056 - DNA, 120 bp, Artificial Sequence
  ENSG00000244161_12 (sequence is synthesized)
acctctgcatctcactttccacatctgtaaaatggacatcacttacggtaaaatgataccatgcctttcacaaaaggcaagccgcaggcccagagttcagcgtggagccgggctggattt

SEQ ID NO: 907057 - DNA, 120 bp, Artificial Sequence
  ENSG00000244161_13 (sequence is synthesized)
gcctggggagtctggcagcactcacaccacccctgtgggtggctttgctgaggccactgctttggccagagtcccgggcagcctgccagcccaccagtcactcctgcacccggagagggc

SEQ ID NO: 907058 - DNA, 120 bp, Artificial Sequence
  ENSG00000244161_14 (sequence is synthesized)
cccttggccacacaggtcacttgctcctagggctggatgccaggcaaccatgcagccactcacccctcacccctgggaggcaagtctgctccatcccactctccttatgcggggtggggg

SEQ ID NO: 907059 - DNA, 120 bp, Artificial Sequence
  ENSG00000244161_15 (sequence is synthesized)
gcaaagactaaggactgactctccaccctggcagcctccataacagtgacgcactcactgcgcaccacccgatgccacctgttcaaataactgcgattcacagcaggaattctcactaca

SEQ ID NO: 907060 - DNA, 120 bp, Artificial Sequence
  ENSG00000244161_16 (sequence is synthesized)
gccaggaaaaggaggggaagatctgttctgacatggaaagatctttaagatgtcaaagcaaaaacacaagctataccacacagtggatacagtaagattctttctgtaagacaaaagcaa

SEQ ID NO: 907061 - DNA, 120 bp, Artificial Sequence
  ENSG00000244161_17 (sequence is synthesized)
aactctgtgtctgcttgtctaatgaaccaattagctaaccaacccagcaaccaagaatgaagacagacaatgagatgacagacagggtgaaggtcctcccttcccagagccgtttgcttc

SEQ ID NO: 907062 - DNA, 120 bp, Artificial Sequence
  ENSG00000244161_18 (sequence is synthesized)
cagacccaggtgggggaggaggagagaagatggagtgagtctcactttatttacttcttcactgcctgtatctttcataatcaaacatgtcccatctgtggcaaagaataaaagtaaatt

SEQ ID NO: 907063 - DNA, 120 bp, Artificial Sequence
  ENSG00000244161_19 (sequence is synthesized)
gtaacgggtctaaaaagcttcagaattctttgaacatttcagtcttttctcctcctccattaagatctgagagtaaaaagaggaggagataggctgggacaggtcttattgctgcttcag

SEQ ID NO: 907064 - DNA, 120 bp, Artificial Sequence
  ENSG00000244161_20 (sequence is synthesized)
tgcatttctgggagcctggtaccatgaaagaacagacgggtaggagcccacttggacgcatcatgaattctgtgcaggcaaagaaaccctcaaaattaatgacactgtgctgtgttccct

SEQ ID NO: 907065 - DNA, 120 bp, Artificial Sequence
  ENSG00000244161_21 (sequence is synthesized)
gactatcagcatcctgttctgaaagtcaagaaacttggcagaggaaggaatctgaatcacaactaacagtaatgaggtgtgataacacggccatcgagctctcactctggatttatcgtg

SEQ ID NO: 907066 - DNA, 120 bp, Artificial Sequence
  ENSG00000244161_22 (sequence is synthesized)
ggtcaaaccgcaactcccaaaacagctttggacagcaagcgcctccgaagtgtgcatgaccccagtttccacggggagtacgtgtaaaaagctttcatggggcttgaggatttccatctg

SEQ ID NO: 907067 - DNA, 120 bp, Artificial Sequence
  ENSG00000244161_23 (sequence is synthesized)
gcttggtccctggagctggttcagttaaggcttcaagaagcagaagagtgggttacctgtggtgcccccttcgagtcccgtgccataggcggacaccagggcagggttccccgcttgtcc

SEQ ID NO: 907068 - DNA, 120 bp, Artificial Sequence
  ENSG00000244161_24 (sequence is synthesized)
aggctccccaacgcgcactttgaaggggcttccaaccacgtggctcccattgaacttgacatcgatggtgtggacaccattctcatgagggatgaagcgaacagcatacttatctaggag

SEQ ID NO: 907069 - DNA, 120 bp, Artificial Sequence
  ENSG00000244161_25 (sequence is synthesized)
aatgagcaaaggcacagggtgaaatcaagcaaatggacacccctgagttcagtgaggataaaggatggaggccaagctgagatggcccatttaaaatcaacagttctacagggagcctgg

SEQ ID NO: 907070 - DNA, 120 bp, Artificial Sequence
  ENSG00000244161_26 (sequence is synthesized)
cactcagcatcctggatttcagaaccagacagaccccctgggtatccctcatcagccccaagggaaacgcatccacattgcaaatcctataaacacaggacaagactctgacccctgcct

SEQ ID NO: 907071 - DNA, 120 bp, Artificial Sequence
  ENSG00000244161_27 (sequence is synthesized)
cagaagaacacttcctttctttagaaaacctcacttcttcagtgtgaaattctgtgaatgctgttactaatcctgtcacgagatgaatctcatttcaccaaaattaaattatgtttttcc

SEQ ID NO: 907072 - DNA, 120 bp, Artificial Sequence
  ENSG00000244161_28 (sequence is synthesized)
actaaaatgatgatacaagttgaagacacagcactctgaaattggaagacctcaccacttaaggctccgcagcggcttactcagctgaactccaggttactactctttactttgttcacc

SEQ ID NO: 907073 - DNA, 120 bp, Artificial Sequence
  ENSG00000244161_29 (sequence is synthesized)
cattggggagttcagtttgtttttaaacattgggagatggccattctaactactgttcaatgtctctgttttgggaaggcataacaagaaataaaaaggaatatatatgaagggaaaaaa

SEQ ID NO: 907074 - DNA, 120 bp, Artificial Sequence
  ENSG00000273179_0 (sequence is synthesized)
cttgcgtttctccgcacagtcgcagagtgagcggcaagatgggatggcaccatagcaacctcggacacaacctagggactggagttgcgcgtttctacgtaagagccggagctgccgctc

SEQ ID NO: 907075 - DNA, 120 bp, Artificial Sequence
  ENSG00000273179_1 (sequence is synthesized)
agtaaggggcccctgggaaccccgtgggaaccccgggagagggcggacacccctgctgtagaaagctgctctgcccgagcctggacccagctgctacatttacccgaataacagacaggg

SEQ ID NO: 907076 - DNA, 120 bp, Artificial Sequence
  ENSG00000273179_2 (sequence is synthesized)
gcacctgattagctgtcttgcgggacctggaccccccacaggactcagaccttttcagtatcgttctcgtttccctgtgtcccatctggttccataattttcataaatttaaaaatcatc

SEQ ID NO: 907077 - DNA, 120 bp, Artificial Sequence
  ENSG00000255929_0 (sequence is synthesized)
aaaaaatcagagcataacccgttctaacccgattccctgctctgttatgttatgtctgccctcctctgatgcttgggaaatcgtttgttctgtgggcttctcctgaggagatggacgatt

SEQ ID NO: 907078 - DNA, 120 bp, Artificial Sequence
  ENSG00000255929_1 (sequence is synthesized)
ttcagagcttgcagaaaggcccgtgagaagagcaggggaggtatagtcatttcccttgttttacggcagaggaaactgaagataaagctatgaagtgaagctggctagtggctgcctcag

SEQ ID NO: 907079 - DNA, 120 bp, Artificial Sequence
  ENSG00000255929_2 (sequence is synthesized)
tcagaaatcaagactttgacccactccatattatgaatgcctcagcctacaaagagcttgcctaacccaacatcaaggggtggacacgtgatgctggacttccaggacaggggaacagat

SEQ ID NO: 907080 - DNA, 120 bp, Artificial Sequence
  ENSG00000255929_3 (sequence is synthesized)
agtacttgtgaaagaagtcagcggcccctcttggactgccctcctcacctttctcaggagccaaggctgtgaggaatccaaacaacaaagtcccacctgcagccacagtccttccactct

SEQ ID NO: 907081 - DNA, 120 bp, Artificial Sequence
  ENSG00000255929_4 (sequence is synthesized)
gttctgtgggcttctcctgaggagatggacgattttcagagcttgcagaaagaatttgagaccaccttcaaccagagaagcctctgtggaaatgtgccgtcactggccagttgttctgtc

SEQ ID NO: 907082 - DNA, 120 bp, Artificial Sequence
  ENSG00000255929_5 (sequence is synthesized)
gcggcagtcaaggagatgcacagtagaggatcaaaaagctgacaacttggcctcccctgggtcgcttccaggggagcgcggcttcaccgctcgaaccagctggccaagttccgtatgctc

SEQ ID NO: 907083 - DNA, 120 bp, Artificial Sequence
  ENSG00000255929_6 (sequence is synthesized)
ttgggccggtccccagccctctgtacagcctggcacacccggcaccaaggctcgtcccagaaggaggtgatgtggacagcgtagctccggcgccagtggaagtagcggcgatagaccgcg

SEQ ID NO: 907084 - DNA, 120 bp, Artificial Sequence
  ENSG00000255929_7 (sequence is synthesized)
gggttgcggtcgaggaaaagcaggtacgaggccagggaggaggcacttgggaagtcgtccacgtggatgaaggcgccgcggggcacaaagcgctcgtagttggcacggtctgggcccagc

SEQ ID NO: 907085 - DNA, 120 bp, Artificial Sequence
  ENSG00000255929_8 (sequence is synthesized)
accaccggcaccgccccagcgagcaacgcgttgcgccagagcttctcggtgatataatccaggtgctgcgagttctcgaaagccaggtagaacttgtagcgggccactgtgtgcaggagc

SEQ ID NO: 907086 - DNA, 90 bp, Artificial Sequence
  ENSG00000255928_0 (sequence is synthesized)
ctggctcaagcaatcctcttacaccctgcctaaagataatatctttatatgaaaaatcaatgcaatgttgataagtctttacatgttttt

SEQ ID NO: 907087 - DNA, 120 bp, Artificial Sequence
  ENSG00000255921_0 (sequence is synthesized)
aaggctgctcccccaggccgcccccagatggtggagtctctcccagcccgaagattcggagccagcgcccagacccgagcctcactcactgctcactcccggggtgcagggcagaggtgc

SEQ ID NO: 907088 - DNA, 120 bp, Artificial Sequence
  ENSG00000255921_1 (sequence is synthesized)
tcccggggtgcagggcagaggtgccagtgttgcaagcaaatgacacggttacccccgaatcagccactgtggagttttgctctttttgcccaggctgcaatggcgtgatcttggctcacc

SEQ ID NO: 907089 - DNA, 120 bp, Artificial Sequence
  ENSG00000255921_2 (sequence is synthesized)
agcctcccaagtagctggaattacagataaatgtttcagaatgctgccaccaaccatcctgcaaccatgagtggcaagcccaagaccaaaaaccaaatattgaggatggcaaagaaaaaa

SEQ ID NO: 907090 - DNA, 120 bp, Artificial Sequence
  ENSG00000255921_3 (sequence is synthesized)
agaaaaaagaaagagactggactgttggggacatcactgagccactttgccaaacctggagttgcctaccttcaaaagttttgttatatgacataattaatctttactgctttgccactt

SEQ ID NO: 907091 - DNA, 120 bp, Artificial Sequence
  ENSG00000255921_4 (sequence is synthesized)
ctggtggaatattttattactatcaccagaagcatttcttggcttcaataacacacatactccagtgtcacctgcttcaagagcactctactcataattctgactaatgtacatttccac

SEQ ID NO: 907092 - DNA, 120 bp, Artificial Sequence
  ENSG00000255921_5 (sequence is synthesized)
atgtctgacccaaaggaggaagaggcagagcaagacggctcaatagaagcctccactaattgtcctccccactggaacaccaaattgaacaactatccacacaaagaagcaccttcgtaa

SEQ ID NO: 907093 - DNA, 120 bp, Artificial Sequence
  ENSG00000255920_0 (sequence is synthesized)
agaaaggaagggaggaaggggccggtcattaccagcagctcctgaggcttgatggagttgtcggtgtaaatgcacagcttctccgcggtcagcgggctggtctctttgagtttggaggcc

SEQ ID NO: 907094 - DNA, 120 bp, Artificial Sequence
  ENSG00000255920_1 (sequence is synthesized)
aggaacatgcagacagcacccaggagttgcagatgggacttcggagtcgggaccccagccaagaaacggtccagaagaatctaccataaaaccaacagactcctcctgatctctacctgt

SEQ ID NO: 907095 - DNA, 120 bp, Artificial Sequence
  ENSG00000255920_2 (sequence is synthesized)
ggacactgagagctggtgccctgtggccacctcaagctggaaccctgcaagatcaccaagaagactgcatgcctcgctctagccttcctaagggaaagtagactcctgtttttgagagaa

SEQ ID NO: 907096 - DNA, 120 bp, Artificial Sequence
  ENSG00000255920_3 (sequence is synthesized)
attacctgatttcaagagaaacataaaggactttttttcccttaacattccactcgtaaaaatgaagtttggaagaacttctgcaaactctgagtgttttggtcaattgaccttttactg

SEQ ID NO: 907097 - DNA, 120 bp, Artificial Sequence
  ENSG00000255920_4 (sequence is synthesized)
tactaagcaaatctgaagccacaaatacattggggaggaaggtatacccttcacaaaagatccgtcacttagccagatactctgttgccatgcttctttaaataaagcacatttctggta

SEQ ID NO: 907098 - DNA, 120 bp, Artificial Sequence
  ENSG00000255920_5 (sequence is synthesized)
gaggaagagcgccgcagcctcggcagctggagtcggagcagggggggatggtttcaaaaaataattaaaaatcgaggaaatatcctagaaaagcccttttggcgtgaaaaccccaaagaa

SEQ ID NO: 907099 - DNA, 120 bp, Artificial Sequence
  ENSG00000255920_6 (sequence is synthesized)
ctcaggctagaatgcagtgatatgatcagagcttattacagccttgaactcctgggctcaagtaatctgcctgcctcagcctcacaattcattgggattacaagcatgagccaccgtgcc

SEQ ID NO: 907100 - DNA, 120 bp, Artificial Sequence
  ENSG00000255920_7 (sequence is synthesized)
atattttaaattgtttcatttccttgaaagtgagatttatctattactttcagaaaatctggcaggatatacctgattgcttgagatccctaaaaatcgtattacattaacattgaaagg

SEQ ID NO: 907101 - DNA, 120 bp, Artificial Sequence
  ENSG00000255920_8 (sequence is synthesized)
ggcatttgagtctcacattctcacttgaaagatgaagaaactgtggcttggagaggtgaagtgacttgtcttcatcacacagtcttgtgcgtagcaggctgcccagtgtccagctttgtc

SEQ ID NO: 907102 - DNA, 120 bp, Artificial Sequence
  ENSG00000255920_9 (sequence is synthesized)
ccgttactgtgcatcttccttgcatccaaagtatacagggaagctgaccctcccagtcaggcctctccacctggtcctcagctgccgtcacagatgtttaatcattgatccctcttttgg

SEQ ID NO: 907103 - DNA, 120 bp, Artificial Sequence
  ENSG00000255920_10 (sequence is synthesized)
atttcattgttattgcgttttccttttattatggaaacgtttcaaacataaaagtagatcatataaataactgccacgccccctcacccagcctctgcaattattagcacgtggccaatg

SEQ ID NO: 907104 - DNA, 120 bp, Artificial Sequence
  ENSG00000255920_11 (sequence is synthesized)
tgtttttctctatacctgacccccgttcccctccacccagatgaccttaaggcaaatccaaacatcgtgtcatttcatctgtgagtgctccgtgtgtgacagggtgtgacccctctccta

SEQ ID NO: 907105 - DNA, 120 bp, Artificial Sequence
  ENSG00000255920_12 (sequence is synthesized)
ggtccaagaaagagaatgagcatcttgaggtctccatcttcaacagccttacagtctggagggaagcagacacacacacagcttttacttagggagacgggggtcaattgaaggttaagg

SEQ ID NO: 907106 - DNA, 120 bp, Artificial Sequence
  ENSG00000255920_13 (sequence is synthesized)
gagtgcaaaaagagggagactgaggggttcagtcgaggggatgactgagaaggctgcctggaggaggtgtgcttgagtcctgggttcaagggttaaaaggctctgatacttggtctgcta

SEQ ID NO: 907107 - DNA, 120 bp, Artificial Sequence
  ENSG00000255920_14 (sequence is synthesized)
atctttcttatcgtatcgttgcctggcagtatgcctgttatttgagtggactcttcttggaccatttgcttggatgaacagtgggcagaagtggaaaggaagggtgctctggacaaaggt

SEQ ID NO: 907108 - DNA, 120 bp, Artificial Sequence
  ENSG00000255920_15 (sequence is synthesized)
gacaaagcccaggaacaaaagtcggaaggtgcacagtgtgcccagagggccaggaattgggtggagtgactggctccttggtcgcttgcaagtagcatgagaatagagagggctgggaga

SEQ ID NO: 907109 - DNA, 120 bp, Artificial Sequence
  ENSG00000255920_16 (sequence is synthesized)
tgcattaaaaagcaccaggacaaatttaggtttgcacagaaaaggacgtttcgtcagggtacgtgaggaaagttgagtagagaatttaggaatggagcagacgactctggttgggatgat

SEQ ID NO: 907110 - DNA, 120 bp, Artificial Sequence
  ENSG00000255920_17 (sequence is synthesized)
gagagcggagagacagatccatgttctttccaggtgccccagcagctccaggtctcgctgaacctgttactatggcagcgtctatgcttcacttttgaggattgcttctgctttgaaata

SEQ ID NO: 907111 - DNA, 120 bp, Artificial Sequence
  ENSG00000255920_18 (sequence is synthesized)
gccgtgtggaagaaaaactacaaagttttgagggggaaaaaacccacctaactttagctgccgttgtgtcttcatctgtaaaaatcttcttcatgtctcatggatttcaacatgcagttt

SEQ ID NO: 907112 - DNA, 120 bp, Artificial Sequence
  ENSG00000255920_19 (sequence is synthesized)
atcttggtttgttccataaaacatcagatgcaactttaatggcctaaccccaaaaagataacttggcagccatcaagcattcagcagcgttccaaatgccctcttgctggagccagcctt

SEQ ID NO: 907113 - DNA, 120 bp, Artificial Sequence
  ENSG00000255920_20 (sequence is synthesized)
ctacggggccatgtggatgtcaggcacacacaatttgagtcacgctgacatagctgggatgcctggattgcactggaatctggggggtaccaatcacaggccagagagaagccattggct

SEQ ID NO: 907114 - DNA, 120 bp, Artificial Sequence
  ENSG00000255920_21 (sequence is synthesized)
ggaaggaacaatgccagcgtgttcaccgtctctgcagaaggagggggtgttgatggtgaggggaatgacagttgcagccaaaggagcaaaatgaccccaaagcagggtgggcacatgtca

SEQ ID NO: 907115 - DNA, 120 bp, Artificial Sequence
  ENSG00000255920_22 (sequence is synthesized)
ttgatgctgggcagaagcactccaggggctcaggtcatgaccacaccccttttctcctgccccacaaccagaaaaactaagaaggtacaagattttccctaaaacttaatgtacagaatg

SEQ ID NO: 907116 - DNA, 120 bp, Artificial Sequence
  ENSG00000255920_23 (sequence is synthesized)
ttgggaaatccagggttgacaacaacagcccaaatatatgaagcacttacctctaccaggcactgtctgtatcttacaaataattcgtttaattctcacaactccttaatgaggtaagtt

SEQ ID NO: 907117 - DNA, 120 bp, Artificial Sequence
  ENSG00000255920_24 (sequence is synthesized)
ttacaatttccattttatgatgagggaaactgaggcttagaaagattaagaaacttgcccaaatcctgcagccagaaatgggcagaatcaagacatgaaccacagtctctcaaaagccaa

SEQ ID NO: 907118 - DNA, 120 bp, Artificial Sequence
  ENSG00000255920_25 (sequence is synthesized)
agcctgggcactcactactaccctcaacagcccggtggctggttcatgccatctctgccaccctcacacagccacctcttggatggtagaaccctgtgtgttgaacaagtagagtaacat

SEQ ID NO: 907119 - DNA, 120 bp, Artificial Sequence
  ENSG00000255920_26 (sequence is synthesized)
tctaaaaggattctttttcctcccctgttttcctgggggctgagtagacatgtttaaacatgctgttcatctgacacttgtttacttcagtggctatgatgtgcaagaccccagaccagg

SEQ ID NO: 907120 - DNA, 120 bp, Artificial Sequence
  ENSG00000255920_27 (sequence is synthesized)
aacagtaagagggcatgaggataacccagcgtggagaccactctggaggaggctgcagactggaggcgctgttgtagccagctgcattttggaggctgggttgcctgtcttagatctcta

SEQ ID NO: 907121 - DNA, 120 bp, Artificial Sequence
  ENSG00000255920_28 (sequence is synthesized)
atgagtttggtcattattttttcagccagggttttcttcctccctccctgtcttccttccctttctccttccttccttcattccttccttcctttcttccttccttctttcctccctccc

SEQ ID NO: 907122 - DNA, 120 bp, Artificial Sequence
  ENSG00000255920_29 (sequence is synthesized)
tccctccctccctcccttcctttctctctttccttctatcttttattttctctctttctctgtctctctctttctctctttcttcctccctccctccctttctctccttctttctttctc

SEQ ID NO: 907123 - DNA, 120 bp, Artificial Sequence
  ENSG00000255920_30 (sequence is synthesized)
cctccctcctctcctccctctcttggtctctctctctctcccttccttcctttgttctttcaagatttttctttctttctttctttcttttaaaggtgtaagcctttttctggttcacta

SEQ ID NO: 907124 - DNA, 120 bp, Artificial Sequence
  ENSG00000255920_31 (sequence is synthesized)
catgccaaggactgcgctaaatcattcacataaaaccaccagcgtgcatcacctcatttggtcctcccacagtctaacggaagaatctaccataaaaccaacagactcctcctgatctct

SEQ ID NO: 907125 - DNA, 120 bp, Artificial Sequence
  ENSG00000255920_32 (sequence is synthesized)
ttaacagtttaaaaacctaaataggatcatgccaaacatattgttctgtgacttgatttttttcagtgaataatcatctcttggagtcttgctatgccagtacatatacatctacttcat

SEQ ID NO: 907126 - DNA, 120 bp, Artificial Sequence
  ENSG00000255920_33 (sequence is synthesized)
tcattttaagtgcagaatgcttttcaatagcaaggatatgccagaattttacgacttcccataattaatggcatttgggggccctccttcaccagttgtttgcttgtatacataatgtgc

SEQ ID NO: 907127 - DNA, 120 bp, Artificial Sequence
  ENSG00000255920_34 (sequence is synthesized)
ctacatgccaaggactgcgctaaatcattcacataaaaccaccagcgtgcatcacctcatttggtcctcccacagtctaacggaatctaccataaaaccaacagactcctcctgatctct

SEQ ID NO: 907128 - DNA, 120 bp, Artificial Sequence
  ENSG00000268081_0 (sequence is synthesized)
gggggcctttgtctccggctgcagctggagttctacgtctagtcttcagaggcccagtctccgtgactttgtgacctgcaggtattgggagatccacagctaagatgccaggaccccctg

SEQ ID NO: 907129 - DNA, 120 bp, Artificial Sequence
  ENSG00000268081_1 (sequence is synthesized)
cagaaagcaacaacatcaacatcaacataaaggaccaccacacaaaaaccccatccaatgtcatcagcctcaaagatcaaaggtagataagtccatgaagatgagtaaaaaccagtgcaa

SEQ ID NO: 907130 - DNA, 120 bp, Artificial Sequence
  ENSG00000268081_2 (sequence is synthesized)
cagtgcaaaaacactgaaaattcaaaaaatgagaatgcctcttctccttcaaatgatcacaacccctctccagcaagggcacaaaactggatggagcaggctgggtgcagtggcttaagc

SEQ ID NO: 907131 - DNA, 120 bp, Artificial Sequence
  ENSG00000248942_0 (sequence is synthesized)
agtgtgctgtttctagatcaacaatttatgatatttattgagcacctgcaatgtgtccagctttgtgcttggtgatgtgaaggcaagagatgtaaggacctggtttctaatcttcaaaaa

SEQ ID NO: 907132 - DNA, 120 bp, Artificial Sequence
  ENSG00000248942_1 (sequence is synthesized)
agtctacactgtggttgaagtgaaacacaaagagagtttttgcctccgaaatgacaagcagagaaccacaaggcaatgttgagatgcagagggtggcagtttccctcctagcagagtgac

SEQ ID NO: 907133 - DNA, 120 bp, Artificial Sequence
  ENSG00000248942_2 (sequence is synthesized)
tcactcatgcctccactccagggtgcagggcttagattcatgacagggacctcatcaaataaccaggaaagattaatcacctgagaagagaagagactgggaatcttcaccctgcccaga

SEQ ID NO: 907134 - DNA, 120 bp, Artificial Sequence
  ENSG00000248942_3 (sequence is synthesized)
cagacttttcatctattctcctgagagcagctccaagagattacctgtgggactcaatttgcataataagatgacctttgttcctgtgcagttccacccctcaccttcccataatgtctg

SEQ ID NO: 907135 - DNA, 120 bp, Artificial Sequence
  ENSG00000248942_4 (sequence is synthesized)
cctcccacctcccagaaatcatactcagttggtttaatggtagagttaaaggccaaatctgccatatagttaaaggccaaatctgccgtgaagccaggagaaaggatccagcatacaaac

SEQ ID NO: 907136 - DNA, 120 bp, Artificial Sequence
  ENSG00000248942_5 (sequence is synthesized)
tgaggaccatcatgaagacatattaactgaaagaatacaaagcgatgtgaatagttcctaactattggagactatacaagaagcatgacaccaaactgtggttgtcttctggtgaagatc

SEQ ID NO: 907137 - DNA, 120 bp, Artificial Sequence
  ENSG00000248942_6 (sequence is synthesized)
tcagaagtttccactcatggcaaaaggtagataaagaaggagctaatgaagaaaaagaaacaagctgtcaagcggtgggaagggaaccaggaaaacacagcatcatgtcagacaataaaa

SEQ ID NO: 907138 - DNA, 120 bp, Artificial Sequence
  ENSG00000248942_7 (sequence is synthesized)
tagtgtaatttcaagaatgaacagtggccaatagcccattggctgcagaagaatcaaagagcaggagaaacaggaaaaggcctttaactttgtgattaggatgtcaaaggaccaaaatgg

SEQ ID NO: 907139 - DNA, 120 bp, Artificial Sequence
  ENSG00000248942_8 (sequence is synthesized)
catcttctggccttggcacctcagagacactgctcctcgcacagagtggcaggacaagaggacttcatcctgccatgggtccagattttgtgggaggggacaaaataaagctttgacagg

SEQ ID NO: 907140 - DNA, 120 bp, Artificial Sequence
  ENSG00000248942_9 (sequence is synthesized)
agttatgaggaagaaaataatcatcttaaagctcataatgagataagggaaaactggaatactttcccccttagtctattttagaagaaaataaagtgctttctaacaccctttaacaac

SEQ ID NO: 907141 - DNA, 120 bp, Artificial Sequence
  ENSG00000248942_10 (sequence is synthesized)
acatggcaagaggaagtgagagggagagaggagatacaagtgaaatcacaatgacatcaataatcctgaatttcttcttcacactcactcatgaaaagtctccgattttcccaccttgct

SEQ ID NO: 907142 - DNA, 120 bp, Artificial Sequence
  ENSG00000248942_11 (sequence is synthesized)
cagccaccttaagtgccttccttcaagatatttcctactgcttctaaagaggatctcccattggcttgggagcagcgtgagaagagacttgtacacagagaggctgggcaacttgtacat

SEQ ID NO: 907143 - DNA, 120 bp, Artificial Sequence
  ENSG00000248942_12 (sequence is synthesized)
ggttgcacagatgtccagaggcagtgctgagatgtgaacacaggaagactggattcagcatctgtgctactaaccaggacactatgaagtctctcatacctgtggtactaggaaaatcag

SEQ ID NO: 907144 - DNA, 120 bp, Artificial Sequence
  ENSG00000248942_13 (sequence is synthesized)
agaaaatttcaaggagggtggggcattagaagctgactatggaggaaccggtaggagttggatgtttggaaatagagggcagggcattgcaggtagagaatgggagtgtattctggatgc

SEQ ID NO: 907145 - DNA, 120 bp, Artificial Sequence
  ENSG00000248942_14 (sequence is synthesized)
caacacatctgtggcggtcctaagatcaggaatagatggtctgtatcttcagtatgacttaatgtttctgagtgtaagacttaatctccatttgaaaaaggataaaaagaaggaaaaaaa

SEQ ID NO: 907146 - DNA, 120 bp, Artificial Sequence
  ENSG00000204393_0 (sequence is synthesized)
tgcctgagctgtgactagcgccctgaacatgatctcaggaacacatatctccttttccagccggaagtacctgagagagaccccagaaggtggataagactgcagagagcagggagcatg

SEQ ID NO: 907147 - DNA, 120 bp, Artificial Sequence
  ENSG00000204393_1 (sequence is synthesized)
aagcaccttgcccaaggtctcaccaggcaagagaagggcggagaagggcggcttcttcatggattgtaaatccccaaagcgtgcaaacatctgcccccatctccctggaggtggcctgtt

SEQ ID NO: 907148 - DNA, 120 bp, Artificial Sequence
  ENSG00000204393_2 (sequence is synthesized)
ctccacgccaccctcacaggctgcctggcggactctcctcacagcactgtgcttcccggggcccacttgtacaggccccatgcgagaaggacctcgggcagtgtataatcctccaagggc

SEQ ID NO: 907149 - DNA, 120 bp, Artificial Sequence
  ENSG00000204393_3 (sequence is synthesized)
aagacatgctttgccctcacccctggagggcagcttccagccagggaggcaaatacctcctccccagactccttccacagatccccaaactctgcctctctccttcagatccctgctcag

SEQ ID NO: 907150 - DNA, 120 bp, Artificial Sequence
  ENSG00000204393_4 (sequence is synthesized)
atgtcaccagctctgtgcagcctccctgccaccaagtctaaaattgccatagtcccctcagttcctcacccctctccctgctttctttgtctgtctcatccatgaggatgtgccctctgg

SEQ ID NO: 907151 - DNA, 120 bp, Artificial Sequence
  ENSG00000204393_5 (sequence is synthesized)
gaagggcaggcaggagctggctattctgttccttgccctgtccccagcaccgaggacagtgccaggcatggaggaaataattgctgaataaagaaataaaatcgacattctatgagacat

SEQ ID NO: 907152 - DNA, 120 bp, Artificial Sequence
  ENSG00000283647_0 (sequence is synthesized)
aatagaaagaaaataaaagtcagattcaagatggcgaaaactaagagaagtcaataagaaaacgataactcttgggagagtccaggagggctggagtcctggtccttggtcttggaaaga

SEQ ID NO: 907153 - DNA, 120 bp, Artificial Sequence
  ENSG00000283647_1 (sequence is synthesized)
ctcggagaactgctagggagctgggagagaactgtgtggagccatactgggaacctggacccatctgcattttcacatatccaaaacagttccgttcccaagccacccaaatgtgtgagc

SEQ ID NO: 907154 - DNA, 120 bp, Artificial Sequence
  ENSG00000283647_2 (sequence is synthesized)
acacagctgtacctcaatttaaatcagtgattgctcttcactctgattctctatggtgcctacaatctatgacaatcaagctgttccacatagaatgaattcttgctgcttttctaggac

SEQ ID NO: 907155 - DNA, 120 bp, Artificial Sequence
  ENSG00000283647_3 (sequence is synthesized)
tgtgcctccactagatggaaagttaagcattccatcaaataattgcaatggggatggttggtggttgtggttgctagtcttaatctaccattgaaataaacatttggactgattactcaa

SEQ ID NO: 907156 - DNA, 120 bp, Artificial Sequence
  ENSG00000283646_0 (sequence is synthesized)
agtttgggctagaacctgacaattggcatcacgaacaggatcctaagcggctgcaagtgagcaggtggttagtggcagcgcaaggagaccacaccctgactgagtggctacaggcagcca

SEQ ID NO: 907157 - DNA, 120 bp, Artificial Sequence
  ENSG00000283646_1 (sequence is synthesized)
tatgaactgtgtggaataatgctggtgaaatgcccaaaactatttagaagcagtggcacccctcttgtggcaacatttggcagcatgcagttgggccatcaacaaatccaaggtccgagg

SEQ ID NO: 907158 - DNA, 120 bp, Artificial Sequence
  ENSG00000283646_2 (sequence is synthesized)
gcctggattacctgctaaattcttgggagttatctggtcggggctgaagttccaggctggacctgatgctccaaaccttgaatgaatggccatggaaaagcagcccagcccaggtggagg

SEQ ID NO: 907159 - DNA, 120 bp, Artificial Sequence
  ENSG00000283646_3 (sequence is synthesized)
ctttgttacatgggccaccacccctattcagttgcagatacacaccaagggtaaccgcctctgaccaggttaacatgctccaactgcattgtggactgggcccacacctacactgaagtg

SEQ ID NO: 907160 - DNA, 120 bp, Artificial Sequence
  ENSG00000283646_4 (sequence is synthesized)
accaatgtttccaactgttggatctgcaccgcccttctagcagctgcagatggcttgccttagcacatacattcagcatctgcagagaaccagacatggctggagacttggggtcccatg

SEQ ID NO: 907161 - DNA, 120 bp, Artificial Sequence
  ENSG00000283646_5 (sequence is synthesized)
gctgatgcctggaacgcaacgtggcaagttttggacaaaggatgccacaagacccacagcacagccattccctggctggcccatagcatttatgatgggtggggctggctagtgaggtaa

SEQ ID NO: 907162 - DNA, 120 bp, Artificial Sequence
  ENSG00000283646_6 (sequence is synthesized)
cgtgcagtacccctggcccaggcactgtggtgcatatagcaacactggggtaatagcactgtgggatgggtacccgtcacagtgtgtgtaagcataatacatgtcaccacaccaaaggta

SEQ ID NO: 907163 - DNA, 120 bp, Artificial Sequence
  ENSG00000283646_7 (sequence is synthesized)
tggtggaagacgcggccccaccaaggggcctcgatggactgtgtgccccctgggagtttatgggtctgtggggacacagggtggccttacctataagcaaactggactggacattatacc

SEQ ID NO: 907164 - DNA, 120 bp, Artificial Sequence
  ENSG00000283646_8 (sequence is synthesized)
tgagggtggcctcatgtacctgccactgttctcacattgcccagatgcctgcataactgggaggtgctacactctcggtttttgcaagtgtaatgagcaccctggtggttttaccccttg

SEQ ID NO: 907165 - DNA, 120 bp, Artificial Sequence
  ENSG00000283646_9 (sequence is synthesized)
acaggcactagccctggagtgtgtgtcacaactgtagaagccaagttactgctcttgcagagcatgctgctcaggctctgaattacacctgagtggccctcttcccattaatggatgagg

SEQ ID NO: 907166 - DNA, 120 bp, Artificial Sequence
  ENSG00000283646_10 (sequence is synthesized)
ttgatcagatcagaaaggtggtgttgcgaaaccgaatggtcttagacatagtaactgctgcctaaggaggcacctgtgcccttttaggaacacaatgttgtacctttatccctgacaatt

SEQ ID NO: 907167 - DNA, 120 bp, Artificial Sequence
  ENSG00000283646_11 (sequence is synthesized)
ggcagaacataacagcagccctgcaaggggtctcacaggagattaaggtagtcaagagccttactgatgaccccctgcagagatggtagacatccctgggctctggcctacgctgggccc

SEQ ID NO: 907168 - DNA, 120 bp, Artificial Sequence
  ENSG00000283646_12 (sequence is synthesized)
tggattcagggctccaccctacgggcacatgtccctacctggaggatgcccctggcctaggggtggagtgtaaggaagatggctgcgctttagtcaggagcaggctgaggccactttttg

SEQ ID NO: 907169 - DNA, 120 bp, Artificial Sequence
  ENSG00000283646_13 (sequence is synthesized)
gtgcaccatgactcagtgggtttggagcgtaggcacacgactccgcacattatgaaccatgccacttgaggtgcattaggtgaccactcacgtgagctcgtgattgcttcagagcctcta

SEQ ID NO: 907170 - DNA, 120 bp, Artificial Sequence
  ENSG00000283646_14 (sequence is synthesized)
ttgtctgtaaaaggtataattaccctgctgacactggacatatggctcgtgcccagagagaggataaggccatgttcaaactgcctatgattcctcgggtgttttttcagctacccctca

SEQ ID NO: 907171 - DNA, 120 bp, Artificial Sequence
  ENSG00000283646_15 (sequence is synthesized)
cccacccaccaactcccttcggacttcagtttgggctagaaccttacacccacataaactaaagctgtatggggtcctcagttttcaagcacataaaagtattctgtatccaaaaagttt

SEQ ID NO: 907172 - DNA, 120 bp, Artificial Sequence
  ENSG00000283646_16 (sequence is synthesized)
gtgaaccactgccctagagaaactttccatggcgtgcaagatgtatgtaagaatgcccagtagagacataataagaaaccagaaaaagtggaaatctcaatgcctgtcatcaagagagat

SEQ ID NO: 907173 - DNA, 120 bp, Artificial Sequence
  ENSG00000283646_17 (sequence is synthesized)
aaatgcagcgtggtctatttctgttctcctcacattgcccagatgcctgcttaactgggaggcgttatgttctcagtttttgcaagtgtcataaaggagtgaatggagcattacctgtca

SEQ ID NO: 907174 - DNA, 120 bp, Artificial Sequence
  ENSG00000283646_18 (sequence is synthesized)
ttatagacactgcaaaatgagctagtagcaggatttttaccacaggtacccataagcaacatgtggcatggttcaccatggttttacattgttgtgtaaataacttaaaattatgtgaat

SEQ ID NO: 907175 - DNA, 120 bp, Artificial Sequence
  ENSG00000283646_19 (sequence is synthesized)
aatgtaaaagcatggtgaacaatgccatgttttgcttatgggtacctgcggtaaaaagcaaaaatcatgaccctgaaggggtgagcaggcctacaggtgctgggcaggcactgtcttgca

SEQ ID NO: 907176 - DNA, 120 bp, Artificial Sequence
  ENSG00000283646_20 (sequence is synthesized)
aagagcacaaaatgtgcaggtccctctgggagtgttatagtgggtagctagtcagaaagagcagggcaggagagggctccccataccccacacaccaggagtgtcaggtgaccatcaggt

SEQ ID NO: 907177 - DNA, 120 bp, Artificial Sequence
  ENSG00000283646_21 (sequence is synthesized)
gatggtctggcggttgttgactgtctttctaaagtaataattggtcacacccggcaacagggaaaagccggctcctaatagatagaaaacactcgaaactggtgagcagtagtttcccta

SEQ ID NO: 907178 - DNA, 120 bp, Artificial Sequence
  ENSG00000283646_22 (sequence is synthesized)
taagatctcaggagttgagccagtgggctcaggcaggcacatgggacagcccaccccaagggaagaaccaggggagaaataacgcaagaccccgaaagcatgctgacgtataaaacccca

SEQ ID NO: 907179 - DNA, 120 bp, Artificial Sequence
  ENSG00000283646_23 (sequence is synthesized)
agtcaaaaggtcaaaccacgcacttgctttttaagtcgtccacttggccctcttccaagtgtactttccttccttttgttcctattctaaagcttttaaataaacttttactcctgtgct

SEQ ID NO: 907180 - DNA, 120 bp, Artificial Sequence
  ENSG00000204398_0 (sequence is synthesized)
aaggcttcaacctgtgaatttgcgggacaccattcagcccagagcactgactggtgctagttatatttgtgtgtctggctgtaccctgtgatcacctggttgatgtcatgttcctgaact

SEQ ID NO: 907181 - DNA, 120 bp, Artificial Sequence
  ENSG00000204398_1 (sequence is synthesized)
tttgtgagtgcaagagaagagaaggtatgtggactggccccgtcgccactctatggaataagccacacctcacagccgggaggagacgcaggtctgtggcatggatgaggagttccggac

SEQ ID NO: 907182 - DNA, 120 bp, Artificial Sequence
  ENSG00000204398_2 (sequence is synthesized)
atctcagcgtatctgggagggaatgtgcctttgggtggttaagtctgtgacatctgctgaatcagagtagaacctgttggctgaggaaggcttgacttctgccatgctgcaggtggtact

SEQ ID NO: 907183 - DNA, 120 bp, Artificial Sequence
  ENSG00000204398_3 (sequence is synthesized)
ccagctcaaatacaaacgctcacagccgatgcctgtgctttccacgcaccatgttttgttctgggcctagtggaagtgagcgagcctgagaggtgagagtttgaccatgcagctctgtag

SEQ ID NO: 907184 - DNA, 120 bp, Artificial Sequence
  ENSG00000204398_4 (sequence is synthesized)
ggagggaggtgtcctcatagtctcaccttgcaccgggtgctgtgttcttcgtggagtttagtcctcttatggagaactcctgatctcattgccggataagcacaccaaggcctaaagcag

SEQ ID NO: 907185 - DNA, 120 bp, Artificial Sequence
  ENSG00000204398_5 (sequence is synthesized)
tttgagtaatttactccaagcatcttagccaagtaccaggtgtcgaccatcagtctggggccctgagagctactgccagccacagtgctataaactctccccaccaaaaccgcaataaaa

SEQ ID NO: 907186 - DNA, 120 bp, Artificial Sequence
  ENSG00000204398_6 (sequence is synthesized)
atttcagaaggacgagttaacaatggcagagaggggacaggatgtctggggtgggtctggcgagggtgaagcaaaaggccagtggcaataatacaggtgcaaagtgatgagcttcgcagg

SEQ ID NO: 907187 - DNA, 120 bp, Artificial Sequence
  ENSG00000204398_7 (sequence is synthesized)
taaaggacggtcattggtgcatcctagtttatttacagctatcttaatttacaccatttagtattttctgtaaagaatccattgcatatgcatttaagatagagaaaacgtcgtgcaact

SEQ ID NO: 907188 - DNA, 120 bp, Artificial Sequence
  ENSG00000204398_8 (sequence is synthesized)
ttgcatgtggataaattcacaaacctgaaaaaaagttgccagatcttgtattctgccatctattttggtttagtgtagatcagttaacctaagtactggagaatgcagaccagagaagct

SEQ ID NO: 907189 - DNA, 120 bp, Artificial Sequence
  ENSG00000204398_9 (sequence is synthesized)
ttgagccttgaaggacagtcatacccccgccacagtgagcgagtgtggggacagactgacctaggaagaccccgccaggcctaggagcacagcctgtggtagacacccagcaccagcagg

SEQ ID NO: 907190 - DNA, 120 bp, Artificial Sequence
  ENSG00000204398_10 (sequence is synthesized)
tgcagagtgaccaaagctgaccttcaggatcaggtcagctgggagcacagctccagtgaagtgaagcccagtgcctgagaaatgggagcagctggaaaccagcagcaagtgggctgcctg

SEQ ID NO: 907191 - DNA, 120 bp, Artificial Sequence
  ENSG00000204398_11 (sequence is synthesized)
gaccctgagtgaggtcagaaggtcttgtgtattcagctggacatgacaactttgggcagcactggacacccagatgctgactctagccaataccctgcagaggctggcaggtacacctgt

SEQ ID NO: 907192 - DNA, 120 bp, Artificial Sequence
  ENSG00000204398_12 (sequence is synthesized)
ccctgagcgcagggcaggcacatcactgtacctcatgtatggagaatgtgactgtcaggaggggagctggttctggggcaattggtgagactaagcctgaaacagaggagatagcaaaca

SEQ ID NO: 907193 - DNA, 120 bp, Artificial Sequence
  ENSG00000204398_13 (sequence is synthesized)
cagctcaaaacttctcctgaaacatctcacaggacacatggtctgacaactctttaggtctgtgaatttattaatgtgccaagttgaatgatatttttagtcaccattaaatgcatatgt

SEQ ID NO: 907194 - DNA, 120 bp, Artificial Sequence
  ENSG00000204398_14 (sequence is synthesized)
atcacctggttgatgtcatgttcctgaacttttgtgagtgcaagagaagagaagaatagcagtatgaggtgggccatggcccaagaggtatccagcaggaagtggtggcggggaagaaat

SEQ ID NO: 907195 - DNA, 120 bp, Artificial Sequence
  ENSG00000204398_15 (sequence is synthesized)
aaacgttgaggagctgaacgtggtggcagcctggtgtggactaaacagagtcggttagaaaagtgttctgatgcagtcacagctttcaaggcctcagcttgcataattacaaggggcagg

SEQ ID NO: 907196 - DNA, 120 bp, Artificial Sequence
  ENSG00000204398_16 (sequence is synthesized)
agctgaaatttcatctgtgcgacatcagctcaaaaggagccgagactggaagaaaccgggagctatgatttgcactttgataacttaagtgaaataaatcgatgattccaaatggaaaaa

SEQ ID NO: 907197 - DNA, 120 bp, Artificial Sequence
  ENSG00000253189_0 (sequence is synthesized)
cttttcaccttgggaaggaggtctctttactttttatttgaaaaggaattgtttttattgttttcctaaagctggagagtgaaggaagccatccttgaggagtcaagataaacttcggat

SEQ ID NO: 907198 - DNA, 120 bp, Artificial Sequence
  ENSG00000253189_1 (sequence is synthesized)
ggcgctgctgctggaggctctgtgacacccgcacatcatcacttaacatgcaagggctgtccatggtcactgtctctttacagtctgaacggtcactgggtcacagaattccaccgggaa

SEQ ID NO: 907199 - DNA, 120 bp, Artificial Sequence
  ENSG00000253181_0 (sequence is synthesized)
agggacagagagactggcccagcaggggctctctgggccaactgagcaaggtgacagggcccaggaaaggagctgttgcctgcacaagggcagatggagtcaaggaatcagtgttcatgg

SEQ ID NO: 907200 - DNA, 120 bp, Artificial Sequence
  ENSG00000253181_1 (sequence is synthesized)
gatcctggctgtccccacagtgtcgtggctgaaccttacaagaacagaagcaagtgaagcacagtctctgtgcccagaatcactgtctgccaggctctggccaacctgtagcctctccgt

SEQ ID NO: 907201 - DNA, 120 bp, Artificial Sequence
  ENSG00000253181_2 (sequence is synthesized)
gctgaaaacgacccgctaaaaaagccaagagggaaggacccagcacacagccgtgaaccacatatacacgaagagggcctaaagtgaaaaagataaactttaaatcaaacggaaactttt

SEQ ID NO: 907202 - DNA, 120 bp, Artificial Sequence
  ENSG00000253181_3 (sequence is synthesized)
ccactcttgtgatactgaactgaactgaagcagaagattttaagagttgcctgaatcctttggacctgcttattggcttaaaaagtctaattgtgaaattgacttaaaaattcctaattg

SEQ ID NO: 907203 - DNA, 120 bp, Artificial Sequence
  ENSG00000253181_4 (sequence is synthesized)
tgaaagaaggggtctcttctttggcatggcactctcactaacaattttcttggtaagaggacccaacaaacagcaatagaaatagaaaactatggattgctaggtgagagtattttttaa

SEQ ID NO: 907204 - DNA, 120 bp, Artificial Sequence
  ENSG00000253181_5 (sequence is synthesized)
cctgcttcaatctacaactgcaaaatgaactggcccaatttaattagaaaaatttcagtttctgaccactgatctacattactgaaaggttacatgtgaaataaatgtggggtgtgtgtg

SEQ ID NO: 907205 - DNA, 120 bp, Artificial Sequence
  ENSG00000253181_6 (sequence is synthesized)
actcaaagcagcatagacatgggatgctgaggggccaagtgagcagagcagagagtgagtgctgcaagtcctcggaggggtcaaccgggacccaagcatccagaaaaggcagggaccatg

SEQ ID NO: 907206 - DNA, 120 bp, Artificial Sequence
  ENSG00000253181_7 (sequence is synthesized)
cattttctaactcattcactataaaaaagaaatagacgggatcatttgaactctgcctttgcaatttatcatcttcgtgatcttagacaatctcttaatttctctaagcttccactttct

SEQ ID NO: 907207 - DNA, 120 bp, Artificial Sequence
  ENSG00000253181_8 (sequence is synthesized)
cctctaaaatggagttgaactcaaagggctgacctaaagtttacataaaatgagaaaatgtaaggtactggggctgatacatagacagtattcaataaagctttatgaaatctgtattgt

SEQ ID NO: 907208 - DNA, 120 bp, Artificial Sequence
  ENSG00000253182_0 (sequence is synthesized)
attcttaaaagtaatgatttctcattaaggctcttgcacctgcttgtgaagaaaagacatctgacctttaaaaaatattccatgggtctgaatcatctaagtatattgtagctttattct

SEQ ID NO: 907209 - DNA, 120 bp, Artificial Sequence
  ENSG00000253182_1 (sequence is synthesized)
tgcagacaagggaaaccaagaatgatctggataatggagaaacctgttaatacaactggatttgaatcacactactggctgaaattcacacaaccggattgggatcccactgtgtaattt

SEQ ID NO: 907210 - DNA, 120 bp, Artificial Sequence
  ENSG00000253182_2 (sequence is synthesized)
ccaagaagtcagctgtgaagcccgctgagtcctcgggtggatgtctgccaccacatacatagcctttgctggtggcttggagagctggcaggtcagccacagaaagtgggcaagacctag

SEQ ID NO: 907211 - DNA, 120 bp, Artificial Sequence
  ENSG00000253182_3 (sequence is synthesized)
tcagtagcgacaggatatgttcccaggatggacagctgcctgatatgcgttcagttccagtgccaaagccaagggctgccagtgcccttccttcatgctaaggacttctctctctccagg

SEQ ID NO: 907212 - DNA, 120 bp, Artificial Sequence
  ENSG00000253184_0 (sequence is synthesized)
atctcttcggcagtggctctttgaccttttgtctgcttatcttattaccagacaaatttgcgctgcccttttaaaaccatcttctaataacaaaactaagtactacaactagctcacaag

SEQ ID NO: 907213 - DNA, 120 bp, Artificial Sequence
  ENSG00000253184_1 (sequence is synthesized)
acattttgattaataccttacctaaatatccagaacaaaggcagaagtgaagacgtccgtgaatgcttgcatgaaacattctcagctccttcaggtaccttctcatgtgatttacaatga

SEQ ID NO: 907214 - DNA, 120 bp, Artificial Sequence
  ENSG00000253184_2 (sequence is synthesized)
cccagaaatattctcattccttgcccttcaacattcttcaatttgattaaaagacctccaaagagacaagagtttcaccatgttacctaggctgctttcaaactcctggactcaagtgat

SEQ ID NO: 907215 - DNA, 120 bp, Artificial Sequence
  ENSG00000284513_0 (sequence is synthesized)
agagagatagagatggaagtcctctcagaggccggaattccaagccttccttttacagaggagaaaattttggcccagaaaaggaaagtgggctgctcaaagtcacgcagctagctagtg

SEQ ID NO: 907216 - DNA, 120 bp, Artificial Sequence
  ENSG00000284513_1 (sequence is synthesized)
gcagagctggactggagcccagccctcgggttcccagcccagcatgccttccgcagtgttggtgcggcagagagctggggaggtgtggctgcaggggcaccttgctgagtatggactgca

SEQ ID NO: 907217 - DNA, 120 bp, Artificial Sequence
  ENSG00000284513_2 (sequence is synthesized)
ggcccgggctggcagggctgctgggcggctgctgattatatccgtaattccgccttcttagaggcagagacccttgagccaacatgtgcccccccaggcccactgctgcccaaggcaggc

SEQ ID NO: 907218 - DNA, 120 bp, Artificial Sequence
  ENSG00000284513_3 (sequence is synthesized)
ttgggattgcagctttcctttggaggagtagatttgcttgttttgctcagattttccttctgcctctaaaagacacccccaaataaccctgtgttcgggaacaacattcattagcttaat

SEQ ID NO: 907219 - DNA, 120 bp, Artificial Sequence
  ENSG00000284513_4 (sequence is synthesized)
gaaatgtagtagcttccagtaggatggaagaaggggtctcttagtgagagtcccctgttgtgtgctctcatgcacgaatggaggggaggctccggttgggtgggtggcaggaggccggag

SEQ ID NO: 907220 - DNA, 120 bp, Artificial Sequence
  ENSG00000284513_5 (sequence is synthesized)
gtctattcttagctctgttgctatgtgatgttgtgcaggccactgaggcttcttgttcttcctggttcaatcagctctcagtattctgcctcctttgccccgccttgggcatcaccagcc

SEQ ID NO: 907221 - DNA, 120 bp, Artificial Sequence
  ENSG00000284513_6 (sequence is synthesized)
atgtctcttcaaagtgaggtgcctcagctgggtgggctggggagggaacaccggaatatctagaagtatcagtcagagtgcaggtgggaaacaaataccacactcaaatgaggtaattaa

SEQ ID NO: 907222 - DNA, 120 bp, Artificial Sequence
  ENSG00000284513_7 (sequence is synthesized)
taaatatcttcgaaggaggttattgggccttgggtacctaatggtctgagagtccctctatctcccctctagaggccttcttatcccttctagagaggaggctcgggggctgggtatctt

SEQ ID NO: 907223 - DNA, 120 bp, Artificial Sequence
  ENSG00000284513_8 (sequence is synthesized)
ccccttccttctctagattcactctccaggctcctccgtctgcagtggtaaggaatgcagccctgggccaccttgcctccagacaggcagcaggagcatggcactgggtctgattccctg

SEQ ID NO: 907224 - DNA, 120 bp, Artificial Sequence
  ENSG00000284513_9 (sequence is synthesized)
gccctccccacaggtcattgctggttggccatatttctccccgaggctacagctccttttgggtggctctttccacacagctgtccctctggttctgggagctcttctttcctgtgctcc

SEQ ID NO: 907225 - DNA, 120 bp, Artificial Sequence
  ENSG00000284513_10 (sequence is synthesized)
atttaggactaaggatatgatgaacacagtgctgtctcccttagggagcacagagtctaggggaggaggtatctgcacttgctggggaatcactgctcagtgagaaagatctgcagtgat

SEQ ID NO: 907226 - DNA, 120 bp, Artificial Sequence
  ENSG00000284513_11 (sequence is synthesized)
acagcttcccagcagccagcagaatggcagggacagaaggcttcttagaggcagaggcccttgatttgactcttggctagatctggtggacacagtctgcacagacactacacgcagcag

SEQ ID NO: 907227 - DNA, 120 bp, Artificial Sequence
  ENSG00000284513_12 (sequence is synthesized)
gaacagtgcatgcaggggcgccactgagaacgggaatgacaaggagaccggctgcgtcatctaagcacagagcaggatctgctggtactgaactgtcagtgggtgattggattagctggc

SEQ ID NO: 907228 - DNA, 120 bp, Artificial Sequence
  ENSG00000284513_13 (sequence is synthesized)
ccaagcctgaagagaggaggtgagaagctttctctgtggctgtggcctccaggacacatcctcatgaccagacttctttcttaccgtgaaattcccagcctgtttggaaggagtagagat

SEQ ID NO: 907229 - DNA, 120 bp, Artificial Sequence
  ENSG00000253452_0 (sequence is synthesized)
agctaaaaaatcatcatcccagagaagagagaggcaggaatttctctgcaagccagagagagatgaacatcagacatctggaaagaaaagctgagaattctaaacagtaaagagtagaga

SEQ ID NO: 907230 - DNA, 75 bp, Artificial Sequence
  ENSG00000253452_1 (sequence is synthesized)
gaaagaaaagctgagaattctaaacagtaaagagtagagatgaggtttcactatgttggttgggctggtctcaaa

SEQ ID NO: 907231 - DNA, 120 bp, Artificial Sequence
  ENSG00000253452_2 (sequence is synthesized)
ctacagatgctcagaggccccatgcctgatgagtcagtggacaggggacattgaatatgacctgcttctgccacccattccacaccaaacaactctgtgtgacctacaaaatcttaaagg

SEQ ID NO: 907232 - DNA, 120 bp, Artificial Sequence
  ENSG00000253452_3 (sequence is synthesized)
catcttttcaagatgtaagctgaaggaagatatgtcagatttcaggctgtcctcactctcaacatcccctccagccaactgctgttctgattttccctccagaaactgacttcaccaatt

SEQ ID NO: 907233 - DNA, 120 bp, Artificial Sequence
  ENSG00000253452_4 (sequence is synthesized)
caccaattctagaacttcatacaaatggatcacacggattttcatggtttcaggccttgtgtttaattctgtaatccatcttgtggtaagcccagccgaattctaccagaggtacaaaga

SEQ ID NO: 907234 - DNA, 85 bp, Artificial Sequence
  ENSG00000253452_5 (sequence is synthesized)
tacaaagaggagctggtaccatttcttcagaaactattccaaataatagaaatagagggattcctctctactcactgccagagat

SEQ ID NO: 907235 - DNA, 120 bp, Artificial Sequence
  ENSG00000253452_6 (sequence is synthesized)
tggttcaacatatgcaaatcaataaacggaatccatcacataaacagaaccaatgaccaaaaccacgattatctcaatagatccagaaaaggccttcaatgaaattcaacaccactttat

SEQ ID NO: 907236 - DNA, 120 bp, Artificial Sequence
  ENSG00000253452_7 (sequence is synthesized)
gaaattcaacaccactttatgctaaaaactctcaatgaactaggtattgatggaatgcatctgaaaataataagagctgtttatgacaaacccacagacaatatcataatgaatgggtaa

SEQ ID NO: 907237 - DNA, 79 bp, Artificial Sequence
  ENSG00000253452_8 (sequence is synthesized)
cattcctatacaccaataatagacaaaaagagagccaaatcattagtgaaccccccacttacaagggatatgaaggacc

SEQ ID NO: 907238 - DNA, 120 bp, Artificial Sequence
  ENSG00000253452_9 (sequence is synthesized)
aattctagaacttcatacaaatggatcacacggtaatttcaaggtccagagctgaagacatgagcctttgggagtaaccctactcttcctctgatattgttccctgcatttcctggatct

SEQ ID NO: 907239 - DNA, 120 bp, Artificial Sequence
  ENSG00000253452_10 (sequence is synthesized)
ccagccttctctgatattaggactttaccaacaacattgaacagagtggtctaaaccatgaatatcatatgtattggggaatcagaagtatcagccggtttggagtattgggaggacact

SEQ ID NO: 907240 - DNA, 120 bp, Artificial Sequence
  ENSG00000253452_11 (sequence is synthesized)
ggaagagcggaatttaagtcagaacacgtgaaaaccatgaagagctctcaaacaaggagcactgggaaggttcatctgtttgaattggaacttgagctcgtctcaagaagtctgcttacc

SEQ ID NO: 907241 - DNA, 120 bp, Artificial Sequence
  ENSG00000253452_12 (sequence is synthesized)
actatagggaaaagcaaacaatgattgtattctctgagaagcctctggcagaacacgaatttggaaaaaacaagcacattagtttcagtttctgttggtcaagatgaaaacagcggacaa

SEQ ID NO: 907242 - DNA, 120 bp, Artificial Sequence
  ENSG00000253452_13 (sequence is synthesized)
tgatgaaatttattattggtgttccacccatctcctacccacacttcaaggtccacttcaggccccagcccccaacaaagctgttcaggaccagtgactctacaatctgagacaatgtgt

SEQ ID NO: 907243 - DNA, 120 bp, Artificial Sequence
  ENSG00000253452_14 (sequence is synthesized)
acttgttggaaggaccttcacagcatatagtctatgaatccatgggtaagagacttcatcacagccatggaagaattaatgatgcttaataactctttgtggactcaactgaataaatga

SEQ ID NO: 907244 - DNA, 120 bp, Artificial Sequence
  ENSG00000253452_15 (sequence is synthesized)
ctgaccttatagcagttctgccatcatctccattcttttccactttggctcacaagaccctacaggaatctgaggccactgacaacaccaacctcacatgttctctgtgggatctcaaga

SEQ ID NO: 907245 - DNA, 120 bp, Artificial Sequence
  ENSG00000253452_16 (sequence is synthesized)
ctgcagatttaaccacctggtcctgaactcaacaacaacctgcctaccaattactttagtgattcaaacagaagctcttagctgcttgtatattatgtatgatttttctaccactgcatc

SEQ ID NO: 907246 - DNA, 120 bp, Artificial Sequence
  ENSG00000253452_17 (sequence is synthesized)
tttttattctttctaaatcaaattgattctgacttcgtgcctacactagtcatggaacttctttctcccaaagaaattcaaactctaatatttttggaaacaggtggcttatgtgagtat

SEQ ID NO: 907247 - DNA, 120 bp, Artificial Sequence
  ENSG00000253452_18 (sequence is synthesized)
ccagaaactgaggaaatgttctctaatcttcagtcaaccatgatggtctctgatatgtatgttgttcaagtacacatgatctattcacaatatgtagacctgttactactcaagcttggg

SEQ ID NO: 907248 - DNA, 120 bp, Artificial Sequence
  ENSG00000253452_19 (sequence is synthesized)
cataggggtcttactgtagtctggattcttaacacctggcatcaacctcaatagacatactaggaaggtccagggtgctatgaggaaattgtttcctggtaaaaccctgcttcgttgtca

SEQ ID NO: 907249 - DNA, 120 bp, Artificial Sequence
  ENSG00000253452_20 (sequence is synthesized)
gtctatatgacttctccttctttaggaccagcccttctgtctaactcactaggtatttctctctctttctttattttggggcaaattctgcctggtagtgtgaccatatgtcattcaaaa

SEQ ID NO: 907250 - DNA, 120 bp, Artificial Sequence
  ENSG00000253452_21 (sequence is synthesized)
cagaacacttctaagtctaaaagcaagtattagttacaactacattaggaaagcaggtggtataaaccaggatatatgattttcctatgtgtagatgtgatattgtgatataataaaaaa

SEQ ID NO: 907251 - DNA, 120 bp, Artificial Sequence
  ENSG00000253452_22 (sequence is synthesized)
aaaaatatgtatttggtctctgcccctggttcctggagtgcagctccaaaatccttagaatcttcctattgataagattgtcttttgtatgctaataagatgactggtggctggtggcca

SEQ ID NO: 907252 - DNA, 120 bp, Artificial Sequence
  ENSG00000253452_23 (sequence is synthesized)
ctagatagcttcaggatgggtgtggtcactagaaagacaaaggcataattacaaagttgggattttcagccctactctcccatcctcccaacatctagggacggagggaataggggctga

SEQ ID NO: 907253 - DNA, 120 bp, Artificial Sequence
  ENSG00000253452_24 (sequence is synthesized)
aggttgactttatcaccaatggtcaataatttaatgaactttgcctacataataaagcctccataaaatccctaaaggactgggttcagagagattctagattgttgaacacatggaggt

SEQ ID NO: 907254 - DNA, 120 bp, Artificial Sequence
  ENSG00000253452_25 (sequence is synthesized)
aaatggcattgggataactagctagccaatgtgtattgcatttttaagctccagaatttctgctttttaattatttcaatatctttgttaaatttagctgatagaattctgaattttttc

SEQ ID NO: 907255 - DNA, 120 bp, Artificial Sequence
  ENSG00000253452_26 (sequence is synthesized)
agtttcctcaacacagctattttgaattatctgacaggtcacatatctctttttctccagattttgtcccttgtgcctatttagttcatttctttagatcatgttttcctggatggtgtt

SEQ ID NO: 907256 - DNA, 120 bp, Artificial Sequence
  ENSG00000253452_27 (sequence is synthesized)
gatcatgttttcctggatggtgttgatgctatagatgttctttaatgtctggacattgaagagctaggtattaattgtagtcttcactgtctgggcttatttgtagccattcttcttgga

SEQ ID NO: 907257 - DNA, 120 bp, Artificial Sequence
  ENSG00000253452_28 (sequence is synthesized)
aaggctttccagaaatttgaaaaaacttgggtgttgtgatctaagctgtatctgctttagtgtgcactccaagcccagtaaaactggggttcttaaaaatttatagaggtaccaccttga

SEQ ID NO: 907258 - DNA, 120 bp, Artificial Sequence
  ENSG00000253452_29 (sequence is synthesized)
tggttttggacaagatctcggagaattctctgggttgctaggcagagacacttgttctctcccttactttctgccaaacatacagaatctctctatctctgttctgagccacctaagcct

SEQ ID NO: 907259 - DNA, 120 bp, Artificial Sequence
  ENSG00000253452_30 (sequence is synthesized)
gggggtgaagtgacatgaattaaacctgtggtcaccatgactatgcctgtgctcggtcaggcctgaaaccagcacagcactgggtcttgcccaaggtctgctgtagccactccatggcta

SEQ ID NO: 907260 - DNA, 120 bp, Artificial Sequence
  ENSG00000253452_31 (sequence is synthesized)
ctgtctatgttcactcaacgccctgggactgtacaatcagcaggtggcaaagccagccaggccatccttctcttcatgatgacaagtacccccaggccctggtgggtccagaagtgccat

SEQ ID NO: 907261 - DNA, 120 bp, Artificial Sequence
  ENSG00000253452_32 (sequence is synthesized)
agtgtagctgccaccaccctagccaacaatgatactgccggactaccactgatgttcccttaagtctcaaggcctcttaagtcagcttgccatgaatgctacctagcctgggactcaatt

SEQ ID NO: 907262 - DNA, 120 bp, Artificial Sequence
  ENSG00000253452_33 (sequence is synthesized)
tttggggcaatgggctcctcactggcccacagtaggtccagaaataccatctaggagtcatgtcttagaactcgggaccccaagagtccacttggtactctacccaccatggccatgctg

SEQ ID NO: 907263 - DNA, 120 bp, Artificial Sequence
  ENSG00000253452_34 (sequence is synthesized)
gtacctaaggtgcaagccaaagtctcctttacttttctttctgcttttctcaggcagaggaagttttgccctgtagctaccatagctggtaatgtgctgagtctcaacctgaaaccagca

SEQ ID NO: 907264 - DNA, 120 bp, Artificial Sequence
  ENSG00000253452_35 (sequence is synthesized)
agcctcagaggcttgcccaagtccctcgatgcagtacctgggtattgctgcttgttattcagggcccaagggctgttaagttcacaagtgatgaatgctgccagtactgagttctttctt

SEQ ID NO: 907265 - DNA, 120 bp, Artificial Sequence
  ENSG00000253452_36 (sequence is synthesized)
caagtgatgaatgctgccagtactgagttctttctttcaagacagcaggttcttttctgacccaaggtgtgtctagaaatgtcgtctggagactgggagcagtggctcatgcctgtaatc

SEQ ID NO: 907266 - DNA, 66 bp, Artificial Sequence
  ENSG00000253452_37 (sequence is synthesized)
cccaggaggtggaggttgaagtgagccgaagtcatgccactgctctccttctggaagctagggcca

SEQ ID NO: 907267 - DNA, 120 bp, Artificial Sequence
  ENSG00000253452_38 (sequence is synthesized)
ctggaagctagggccagaaaaaggggcctcatgacggtgattggtgctctattgtgctgtggctgaactggtattctagatccaagatgaagtcctccccactcttccctcttctttcct

SEQ ID NO: 907268 - DNA, 120 bp, Artificial Sequence
  ENSG00000253452_39 (sequence is synthesized)
ccagcaaatggaaggagtctcttttggagctgtgagctgtgcagcctggggttaggggaggagtgatgccagcactcttttggctgccccagttagtatcgcaatatgtcacatgccctc

SEQ ID NO: 907269 - DNA, 120 bp, Artificial Sequence
  ENSG00000253452_40 (sequence is synthesized)
cagcccactgtctctggacctagtttagcatgagggctcacataagagttgcagtatttatggcctagactgcctttcaagtttatttggagacatagagggctgtagcccttggtggag

SEQ ID NO: 907270 - DNA, 120 bp, Artificial Sequence
  ENSG00000253452_41 (sequence is synthesized)
aggttttcaggcactcaagtttggacctctgggatcagcacttcccctctggctagggctggtttccaagctctctctttgggtgggtgtcagctgagtttggtccagttttcctttctg

SEQ ID NO: 907271 - DNA, 120 bp, Artificial Sequence
  ENSG00000253452_42 (sequence is synthesized)
ctctaaaaggacagcactgagttcggtgtctcacaattgctgtgatctcccttcctctgtgcccagagatgctctctgcaccagattgctactgccgtgggtcagggagagtggcactgg

SEQ ID NO: 907272 - DNA, 120 bp, Artificial Sequence
  ENSG00000253452_43 (sequence is synthesized)
cgatttaaggcagctgtttttttctgtttcttcagtacttccttcagggataagaagttaaaaccaggaactcacctgatttttggttcttatgaaggtgggtttttttttttttcggtg

SEQ ID NO: 907273 - DNA, 120 bp, Artificial Sequence
  ENSG00000253452_44 (sequence is synthesized)
tagatacttattaacttggtgtccttgcagagtatgggacaatcagtggagtttttatttcatatagttcaacctaagagcatagctatctgaaatatttcttccctgctactactcttg

SEQ ID NO: 907274 - DNA, 120 bp, Artificial Sequence
  ENSG00000253452_45 (sequence is synthesized)
gaacacatttctccttgtacccaatcttttggctagtgtggtccaaaaaaaggaaatacatttacatggttatatgttatattactattccagaaacacagtttctttagtgtcatgttt

SEQ ID NO: 907275 - DNA, 120 bp, Artificial Sequence
  ENSG00000253452_46 (sequence is synthesized)
atttttgtaaccagtaaggaacagcgcatctttcattactataaatagaaaatcttatctgtgttactctgttccttaatatcaatgtgaaatactaagggtagttctaatgtattttct

SEQ ID NO: 907276 - DNA, 120 bp, Artificial Sequence
  ENSG00000253452_47 (sequence is synthesized)
aggggaaacttcagcatttttaggctaggctattctaaaaaaaaaaaaaatcagatgcaaagaaaagcactcgaagtatcttgagaggctgaataataaccctctaaaaaggtccaggtt

SEQ ID NO: 907277 - DNA, 120 bp, Artificial Sequence
  ENSG00000253452_48 (sequence is synthesized)
ctaatcttcagaacctgtgaacatggcactttacatggcaatgaggactttgcagatgtgattaaggaccttattggggttttaatttgcatttctcaagttttctttgggtatataccc

SEQ ID NO: 907278 - DNA, 120 bp, Artificial Sequence
  ENSG00000253452_49 (sequence is synthesized)
agtaatagaattgctgggttgatagttcttatttaaattctttgagaaatctccagactgctttccacaatggctgaactaatttgcattcccaccagcagtgtgtaagtgttccctttt

SEQ ID NO: 907279 - DNA, 79 bp, Artificial Sequence
  ENSG00000253452_50 (sequence is synthesized)
ctccataacaatctatgtgcacacacacatgtatatgctattcttgattgtacatttgtctgttatatacattgtaaat

SEQ ID NO: 907280 - DNA, 87 bp, Artificial Sequence
  ENSG00000253452_51 (sequence is synthesized)
ctggtatcattgagcttggaatggcctcttcaaaaactaactcaagaggatttctgactctctctaacctgctccataccctaagtt

SEQ ID NO: 907281 - DNA, 120 bp, Artificial Sequence
  ENSG00000253452_52 (sequence is synthesized)
ggatttctgactctctctaacctgctccataccctaagttcccacacccgaaaactcctgcctttggagtgcagcactcggctttgttgaatatatttttagagacaatattcctggaga

SEQ ID NO: 907282 - DNA, 120 bp, Artificial Sequence
  ENSG00000253452_53 (sequence is synthesized)
attggggaatcagaagtatcagccggtttggagtattgggaggacactggaagagcggaatttaaggttcatctgtttgaattggaacttgagctcgtctcaagaagtctgcttaccact

SEQ ID NO: 907283 - DNA, 120 bp, Artificial Sequence
  ENSG00000253452_54 (sequence is synthesized)
atagggaaaagcaaacaatgattgtatgtatttttccttggtggatagtacatggttagcattttttcaaactaataaagataatcattaccatttatagagtgcttacctaaaacagtc

SEQ ID NO: 907284 - DNA, 120 bp, Artificial Sequence
  ENSG00000253452_55 (sequence is synthesized)
attaagtccaaaatttttaattctcataatagccttaggaagtaggaatcactttacaaatgacataaccatagctcagaagtggttaactatttaaattcacacaaatgttaagtaatg

SEQ ID NO: 907285 - DNA, 120 bp, Artificial Sequence
  ENSG00000253452_56 (sequence is synthesized)
gagccaaagtttgatttctaatctcttttgaaccccaatactgaactttaatgttgacccttttaaggagtccatataactaacacactgatatgccacgcagtgcaaaatgtgtctaag

SEQ ID NO: 907286 - DNA, 120 bp, Artificial Sequence
  ENSG00000253452_57 (sequence is synthesized)
tctttgggcagtttaatggcaaatgaattaataaaaaataattaaatgtctgaagcatattaaacacaaaataactaggccatggttggatctccacatgaattcttcccgctgcagccc

SEQ ID NO: 907287 - DNA, 120 bp, Artificial Sequence
  ENSG00000253452_58 (sequence is synthesized)
tttctgctgtgacagaaataaagtgaagtctctcggtaattcgaagcatatacagcaattaattccacatttatatggtcttctatttagaactgtgttttaatttttaaagcacacttt

SEQ ID NO: 907288 - DNA, 120 bp, Artificial Sequence
  ENSG00000253452_59 (sequence is synthesized)
taatatctgtgctgtaactgataattatttggggaaaggggcaggagcaagaagattttagtggcagcacaacaatttttaatgcaacagctgcaatgctgaaatcaaccatgtgccaag

SEQ ID NO: 907289 - DNA, 120 bp, Artificial Sequence
  ENSG00000253452_60 (sequence is synthesized)
agctctgaagcctgtcagaggaaagatagtctatagttagaccctcccacttcaaggtcactgctttgaggctagccaaagttgattgtggcttaaggtcactttcatcaatggctcctt

SEQ ID NO: 907290 - DNA, 120 bp, Artificial Sequence
  ENSG00000253452_61 (sequence is synthesized)
ggtggcctcagtaaatgagagagtggacgtatccattttcctcctgggcaaccacccaggactaattatgaagactgtcactgcaaatgggaggaccaaccctgacatagacactcatca

SEQ ID NO: 907291 - DNA, 120 bp, Artificial Sequence
  ENSG00000253452_62 (sequence is synthesized)
tgttcaggaccagtaagtccatgatgtcccatgaattccaattgcttctgctatctatgggtcctattatggctcataatcacttatgacttcaaattgttttgtactctggttgtggat

SEQ ID NO: 907292 - DNA, 120 bp, Artificial Sequence
  ENSG00000253452_63 (sequence is synthesized)
gctcaagtgagaaatagcaggcaggacattaaaatcttccattggttcattgactcatgaaacttggcttgatataagccctcagatgtccttattggaacaaccatggcttgtttaaga

SEQ ID NO: 907293 - DNA, 120 bp, Artificial Sequence
  ENSG00000253452_64 (sequence is synthesized)
tttcaaggagtctttctctgaggccctccttaacatataaagtctaaaattgcctacagcagccatattccacctgtattcttaccttagaataaataaggcacatttatgctgtgtaag

SEQ ID NO: 907294 - DNA, 120 bp, Artificial Sequence
  ENSG00000253452_65 (sequence is synthesized)
aggtgagtactcactctctcaggctacttccttaataataacattctacttatgcctttgcattcttacattcattgaagaaagaggtagaacattaatcaattagctaattacattatt

SEQ ID NO: 907295 - DNA, 120 bp, Artificial Sequence
  ENSG00000253452_66 (sequence is synthesized)
atttaaatctttagttcccctggacatgtttccattatatctgtgttttaataatttattccaaatatatatttgctttttgttaggactttggttcttctcgtatttcagcctctctct

SEQ ID NO: 907296 - DNA, 120 bp, Artificial Sequence
  ENSG00000253452_67 (sequence is synthesized)
agtgctggaagataccctactgttataaccagctccccattccctcagctaaaaaatcatcatcccagagaagagagaggcaggaatttctctgcaagccagagagagatgaacatcaga

SEQ ID NO: 907297 - DNA, 120 bp, Artificial Sequence
  ENSG00000253452_68 (sequence is synthesized)
catctggaaagaaaagctgagaattctaaacagtaaagagttcctttgttcaacatgtcattcaggtgagtaataaactagaacgtctttcaataatcttttagggaagaaactataatt

SEQ ID NO: 907298 - DNA, 120 bp, Artificial Sequence
  ENSG00000253452_69 (sequence is synthesized)
taacttaatgataactgttcatcattgcatcttccttttaatgcttcatccaaatgcaaagacacaaaaaaattagtatataaaattaattaatacatatttttaaatagacttactagg

SEQ ID NO: 907299 - DNA, 120 bp, Artificial Sequence
  ENSG00000253452_70 (sequence is synthesized)
gcagttttgaaatagtaaagaaggtcctctttttttcgtttgaaaattatgcttcatgtcctctgtcaaggctcttaacgcaactcgtattttgtcattactttgtaatgtaatgtaaaa

SEQ ID NO: 907300 - DNA, 120 bp, Artificial Sequence
  ENSG00000253452_71 (sequence is synthesized)
tgccaacagcaaccagagaaagtgagcattagagactccagacatatattatgtcgatgttcctgacctaattaccaaacaactgtacataggaaaaggaaggaagcaaaggttaagtat

SEQ ID NO: 907301 - DNA, 120 bp, Artificial Sequence
  ENSG00000253452_72 (sequence is synthesized)
ttgcctttcagtaagttttaaacctggatgagctatgctgagccttaatgcaaaagcagaattggcccatgctaattcacaaatacaagtgttaacaacactatttcatgactattttat

SEQ ID NO: 907302 - DNA, 120 bp, Artificial Sequence
  ENSG00000253452_73 (sequence is synthesized)
tttttgctcagctgtgaagagagaacctctttctcattgaagatcaaaactgaagtgaactcaggaaatgaatgacgacataagccatcctccttttttgcaggtggaaagggatgcttt

SEQ ID NO: 907303 - DNA, 120 bp, Artificial Sequence
  ENSG00000253452_74 (sequence is synthesized)
ggagttggcgattacgcatgggccattttctttcctttattgtttcttgtctcatttggtcttcttttctctttcctttcctctctactttccttccttccgtcttttttcttgggtgga

SEQ ID NO: 907304 - DNA, 120 bp, Artificial Sequence
  ENSG00000253452_75 (sequence is synthesized)
aaaaaataaaacacaacaaaattatctgcatgggaatccatatcaattcaggaagtgaaaactgccaagttcaaaccttaagaaatctttggcaggattccccctgcaaacagctaaatt

SEQ ID NO: 907305 - DNA, 120 bp, Artificial Sequence
  ENSG00000253452_76 (sequence is synthesized)
cgtatgcctaatccagttggagttgggtctaatagaaaggttcacagaagattaagtttaatgcactgtaataggtaactgagcttttgccagtatgaattttataaatgtgactctcag

SEQ ID NO: 907306 - DNA, 120 bp, Artificial Sequence
  ENSG00000253452_77 (sequence is synthesized)
taaggaccagaaaattcggtttacaagcatcttgaagtgtttccttatggacttttgcatcttttcttttatgcggaaatctccaaagagaccatatgagtgttggaaataccaagtgaa

SEQ ID NO: 907307 - DNA, 120 bp, Artificial Sequence
  ENSG00000253452_78 (sequence is synthesized)
gagtcagagaaggcagcgagagaaagagactttgaagcctggtattttgaaactgttgtttcaagaggccgatggtgagattaaattgaattgatttatacaaaaattggatatggagca

SEQ ID NO: 907308 - DNA, 120 bp, Artificial Sequence
  ENSG00000253452_79 (sequence is synthesized)
tcaagtaaaatgtcagaggcaaaggaagaattacaaaatctgtaagagcaataattatacaaaagaataataatggttttcacagcaaggagctaagtgtgtgtgactttagcttattta

SEQ ID NO: 907309 - DNA, 120 bp, Artificial Sequence
  ENSG00000253452_80 (sequence is synthesized)
cctctgtggcagggcagaaattaagggccaatgaaggaagtgtaccaccctatgttatatctgaaagcctaaaaaacctggtgctaccagaactttgctgagcaaagaagccaacataaa

SEQ ID NO: 907310 - DNA, 120 bp, Artificial Sequence
  ENSG00000253452_81 (sequence is synthesized)
taatgataacgtaacctgaatgcatttagttttacgcttttcatagcattttcacttttacattttgaattaatattctctattattttgaaacatgggtaatgtaggtctcccatttct

SEQ ID NO: 907311 - DNA, 77 bp, Artificial Sequence
  ENSG00000253452_82 (sequence is synthesized)
tgaaacatgggtaatgtaggtctcccatttcgacgacatcttgctctgtctccaggctggagtgcaatggtgcaatc

SEQ ID NO: 907312 - DNA, 120 bp, Artificial Sequence
  ENSG00000253451_0 (sequence is synthesized)
atggcctgggctctgctcctcctcaccctcctcactcagggcacagtctgccctgactcagcctcactcagtacccgggtctcctggacagtcggtcaccatctcctgcactggaaccag

SEQ ID NO: 907313 - DNA, 120 bp, Artificial Sequence
  ENSG00000253451_1 (sequence is synthesized)
aagtcagttataggctctctggagtctctgatcacttctctggctcccagctctggcaacatggcctccatgaccatctctgggctccaggctgaggacgaggctgattattactgcagt

SEQ ID NO: 907314 - DNA, 120 bp, Artificial Sequence
  ENSG00000253456_0 (sequence is synthesized)
caggcagtccagcttcctaactcctagctcagtgtgtgtgagaagggcaggaggaagaaggtatgattccttgacttgggtgccaagaggacccatggaggtcagcactgtgcaacaaag

SEQ ID NO: 907315 - DNA, 120 bp, Artificial Sequence
  ENSG00000253456_1 (sequence is synthesized)
ctcctggagatggggtttcctaggctgactctggtgtttctcaggcaggggcctcaaactcaaatgcctacaggaacacacagaagtgctgcatccccagacacctatgaataaggaact

SEQ ID NO: 907316 - DNA, 120 bp, Artificial Sequence
  ENSG00000253456_2 (sequence is synthesized)
atcacacagctaggaggtgtcagagacaaatgtgaagttgaggttgtctaatttcagcttccacatttttaaccctacatctgctgtggagcttccaaccctagcactaacagatctgag

SEQ ID NO: 907317 - DNA, 120 bp, Artificial Sequence
  ENSG00000253456_3 (sequence is synthesized)
aaatatgagggagttagacagggacagcattcattcatctagttggagagataaagtagacatgtattcattaaaatccaggcttatgcatataccaaaccataagcccctgggcaaact

SEQ ID NO: 907318 - DNA, 120 bp, Artificial Sequence
  ENSG00000253455_0 (sequence is synthesized)
cctggcccagccctccgcagggtgtaaccctgctctggggtgaactttcattcactgtggagcagaaaatgcatctatgagcatcaatttactgtgtcctgcctggcttcagggcctcag

SEQ ID NO: 907319 - DNA, 120 bp, Artificial Sequence
  ENSG00000253455_1 (sequence is synthesized)
gctaagaactggtgatgtcacgcaggctggaagctgacaatttaagtcaattcactctccaaaatgttgcacccctgctgcgtgttaagctcattaaagttggagagttgaatgagctaa

SEQ ID NO: 907320 - DNA, 120 bp, Artificial Sequence
  ENSG00000253458_0 (sequence is synthesized)
gggaagaagctgaagtgggtcaggtgtgtaggtcacgaggaaacacacagtgcaacccgcttctcaagagtccagtcaccacctccagatccacattcagaaaacagtttttcctacagc

SEQ ID NO: 907321 - DNA, 120 bp, Artificial Sequence; identical to SEQ ID NO: 821210
  ENSG00000257563_0 (sequence is synthesized)

SEQ ID NO: 907322 - DNA, 120 bp, Artificial Sequence; identical to SEQ ID NO: 821211
  ENSG00000257563_1 (sequence is synthesized)

SEQ ID NO: 907323 - DNA, 120 bp, Artificial Sequence; identical to SEQ ID NO: 821212
  ENSG00000257563_2 (sequence is synthesized)

SEQ ID NO: 907324 - DNA, 120 bp, Artificial Sequence; identical to SEQ ID NO: 821213
  ENSG00000257563_3 (sequence is synthesized)

SEQ ID NO: 907325 - DNA, 120 bp, Artificial Sequence; identical to SEQ ID NO: 821214
  ENSG00000257563_4 (sequence is synthesized)

SEQ ID NO: 907326 - DNA, 120 bp, Artificial Sequence; identical to SEQ ID NO: 821215
  ENSG00000257563_5 (sequence is synthesized)

SEQ ID NO: 907327 - DNA, 120 bp, Artificial Sequence; identical to SEQ ID NO: 821216
  ENSG00000257563_6 (sequence is synthesized)

SEQ ID NO: 907328 - DNA, 62 bp, Artificial Sequence; identical to SEQ ID NO: 821217
  ENSG00000257563_7 (sequence is synthesized)

SEQ ID NO: 907329 - DNA, 120 bp, Artificial Sequence; identical to SEQ ID NO: 821218
  ENSG00000257563_8 (sequence is synthesized)

SEQ ID NO: 907330 - DNA, 120 bp, Artificial Sequence; identical to SEQ ID NO: 861762
  ENSG00000257563_9 (sequence is synthesized)

SEQ ID NO: 907331 - DNA, 120 bp, Artificial Sequence
  ENSG00000205041_0 (sequence is synthesized)
aacacaggctggctgtgaagatgaacattaatccatgcctggtgctttgtgagtgctcactgagtattagccttgatgcagacccactggtttctccttttgccactgggccctgccctg

SEQ ID NO: 907332 - DNA, 120 bp, Artificial Sequence
  ENSG00000205041_1 (sequence is synthesized)
gagctcccagggaggtggtggcgatgcagagcgacgtgggtcagggattccccatgcagtccaactggagggctcccgtgcatgcgtgcacatcaggggcggtaaggaagggctggccgg

SEQ ID NO: 907333 - DNA, 120 bp, Artificial Sequence
  ENSG00000205041_2 (sequence is synthesized)
ggtgtgggaggaggcgacacaagatgggaggtggccctgtctcttgggagcaaaggcagaaggaggtggaggcagctcagggctcggaggagaggggtccgggctccttggctgtgtccc

SEQ ID NO: 907334 - DNA, 120 bp, Artificial Sequence
  ENSG00000205041_3 (sequence is synthesized)
tgctgtctctcgctgtgggtattcaccgaatctctcccatcctcggttttcacatctgctgcatgcaggtcctcatggttctcaagtgaggcaggtggtgagcccatcaggccagtgccc

SEQ ID NO: 907335 - DNA, 120 bp, Artificial Sequence
  ENSG00000205041_4 (sequence is synthesized)
agggcttattctggggacagctcctggagaggaagggctgcctccctaaggactcctgccctgccctgggtgcaaggggttccacctgctgcccctcccccactccccagctcgcctcag

SEQ ID NO: 907336 - DNA, 120 bp, Artificial Sequence
  ENSG00000205041_5 (sequence is synthesized)
gcggatagttcccctctcactccaaataagagccacaatgctgacagtggcccccaaggccctgcccagcggtccccagcttcctctagctacatctcccggccctccccttcacccact

SEQ ID NO: 907337 - DNA, 120 bp, Artificial Sequence
  ENSG00000205041_6 (sequence is synthesized)
ctcagccctgctcctcccctgcctgcagcgttcctccccaggtctcccccggctctctcacctgcttccggttttgctcagactgcgctgcctcagtgcgcccttctgtcaccatcctgt

SEQ ID NO: 907338 - DNA, 120 bp, Artificial Sequence
  ENSG00000205041_7 (sequence is synthesized)
gtatagtcggaaacccctgctccctttccctgcactgaatcttccgtgtgctccttttctccatggcatttgttagctttggctatcctgtctaatttgcgtatgtatttattttttatt

SEQ ID NO: 907339 - DNA, 120 bp, Artificial Sequence
  ENSG00000205041_8 (sequence is synthesized)
ttgctgcctgttccctcattcccccaactccccaatggcagggagttctgttttggtcactgctgaatccctggtgacccgagcagtgatgatgcagagttgttgtgatatttgtggaat

SEQ ID NO: 907340 - DNA, 120 bp, Artificial Sequence
  ENSG00000205041_9 (sequence is synthesized)
gaatgaatgcaggattttttgttttaccttcacttggcacaaatgctgtggttctgttcaccactcccccctgaagtaatgaaagttatgggcccatccctgtgctgagtggagctgggg

SEQ ID NO: 907341 - DNA, 120 bp, Artificial Sequence
  ENSG00000205041_10 (sequence is synthesized)
acacagtgggggctaggacagactgtatccctgccttgtggaacccacagtccagtgggagaggcgacattacccacatagtcatgcaggtgacagagcctgcccacggcttcaacctgc

SEQ ID NO: 907342 - DNA, 120 bp, Artificial Sequence
  ENSG00000205041_11 (sequence is synthesized)
ctccagccccacctgctccaagcagacagatggggcgagtgtagggagtgtgtttaaaagaaaaaagaaacaaaaagtctctctcttttttttttttgaagtacccagaccttttcagga

SEQ ID NO: 907343 - DNA, 120 bp, Artificial Sequence
  ENSG00000257568_0 (sequence is synthesized)
aaaaaaaaaaaaaaaaagccagtttacctcttttccatgttcattattgaggcaagaacaaaaggcaccaaggaagagaaaggagtggactgggtagaaaagaaggatgccaaagagaaa

SEQ ID NO: 907344 - DNA, 120 bp, Artificial Sequence
  ENSG00000257568_1 (sequence is synthesized)
ctcctgaaaattcctccttgaaaatcaggttcaatcaagagaagagacaggatcttgctgtactgcccagcctggagtgcaatgccacaatcatggcttacagcagcctcaaactactgg

SEQ ID NO: 907345 - DNA, 120 bp, Artificial Sequence
  ENSG00000257568_2 (sequence is synthesized)
gctcaagtgatccttccaccaccgtcttccaaggagctggtactataggtacatgccaccatgtccagctaatttttcaatttttttggtagagacagggccttgctatattgcctaggc

SEQ ID NO: 907346 - DNA, 120 bp, Artificial Sequence
  ENSG00000257568_3 (sequence is synthesized)
aagtgctaagattacaagcatgagccactgcacctggcttctttttactttttaatgcagttaaaaattacgtatatgtattacatctgtagcccacattataattccattgaagagtgc

SEQ ID NO: 907347 - DNA, 120 bp, Artificial Sequence
  ENSG00000257568_4 (sequence is synthesized)
ttacatctgtagcccacattataattccattgaagagtgctgagatataatattgacatattatttccatcatagaaacttggaacatttttattatttagaaacatgctattttataca

SEQ ID NO: 907348 - DNA, 120 bp, Artificial Sequence
  ENSG00000257568_5 (sequence is synthesized)
tacactgttatctatacttccaaagatagtaagtacgtactcataagaagctatatgtacaagttttcttattaatttgcttgctacttggtcatttattttatctcttactgcttgcta

SEQ ID NO: 907349 - DNA, 120 bp, Artificial Sequence
  ENSG00000257568_6 (sequence is synthesized)
agggacaagtggtagcagtctctaaaggtttaaaaataattatgtaaaaacaccagtatgctatggcctgttagtctgacaaacaatgaattgatgtctaaaataaagaacacattgtaa

SEQ ID NO: 907350 - DNA, 120 bp, Artificial Sequence
  ENSG00000260253_0 (sequence is synthesized)
aggtgcagaaagcaagcctctttgttctatgggcattttcctccccctggatttgactgttatttactggccacgtgagcgccaggcgcgggtccggcggggaaggcgaccccagaacag

SEQ ID NO: 907351 - DNA, 120 bp, Artificial Sequence
  ENSG00000260253_1 (sequence is synthesized)
ggtagacaaaagctggcccagagcgcgacccgtgcgccccagggacgtctccccagctcctgcgacacgcgtgaaattggcccggacctgcctcctgagaggcttttcccagaaatgtct

SEQ ID NO: 907352 - DNA, 120 bp, Artificial Sequence
  ENSG00000260253_2 (sequence is synthesized)
tgttaaagcctttgtaaaggaatcagtgtttacttgcgccgggagagctccggccctgggtcctggcaggcggcggatttctgagctgctggagagcaacccgggaaagcaaaatcagcc

SEQ ID NO: 907353 - DNA, 120 bp, Artificial Sequence
  ENSG00000260253_3 (sequence is synthesized)
tccttatcgaaagcgagttattagatagacccccacagtcccattcagcagaatgggaaactggactcagacaccttttgccctccccacagggaggccacgccgtgcggctttgaccac

SEQ ID NO: 907354 - DNA, 120 bp, Artificial Sequence
  ENSG00000260253_4 (sequence is synthesized)
tgatctcccacccggagtgcccgacgcccagggtcctgccaccgggcagcctcggtcagtccacagttgtggctccttccagggcctggactagggtgagcacaagccttgagcgcaaca

SEQ ID NO: 907355 - DNA, 120 bp, Artificial Sequence
  ENSG00000260253_5 (sequence is synthesized)
tttaagaagggcgccgaaaagtcagtaatcaaaagaaatatcttgatgcaatgcctctttaaaagaaaaaaaaatgcaaaaaatccatgatgaataaaatactaaattttaaaaagagaa

SEQ ID NO: 907356 - DNA, 120 bp, Artificial Sequence
  ENSG00000276968_0 (sequence is synthesized)
actgactcagcacaagaagacagttttgacatccgtatggttttatccccaacccaacaaagcagcatttctcattccctagccccttgcttgtcaaaccatccttgaaaaaccctagcc

SEQ ID NO: 907357 - DNA, 120 bp, Artificial Sequence
  ENSG00000276968_1 (sequence is synthesized)
tctttctctgctacaactcctactgtctcagggtactggctttttctgggtggcaggcaagaagaacccaactgctgtgaaacaataattgttttatcagtgtaattatttaccgtaaat

SEQ ID NO: 907358 - DNA, 120 bp, Artificial Sequence
  ENSG00000276968_2 (sequence is synthesized)
ggatggtattaactctcctgcgcaggtgagaaaactgagtaaaacagataaaatattttccttaaaattactgcctgaaacaaaattaaacaataacaataaaacttactgtgttcacga

SEQ ID NO: 907359 - DNA, 120 bp, Artificial Sequence
  ENSG00000254574_0 (sequence is synthesized)
ccgagatcctaccttgcctctgagtgtcatagtctgagaagatgtgggctacagactcagatactgtagctgaggtacaggtacaggtactccaggtctcccctctctcctgctctggat

SEQ ID NO: 907360 - DNA, 120 bp, Artificial Sequence
  ENSG00000254574_1 (sequence is synthesized)
caggtgtcatcactgaagcctgtgtaggggctctggaccctggacaccctcctttggccatcctcttcctcacagagggtctgtgtgattctggggccacaggcaccaaacagctctgag

SEQ ID NO: 907361 - DNA, 120 bp, Artificial Sequence
  ENSG00000254574_2 (sequence is synthesized)
gaaggagttgggaggcaggctgacctcacaatgaatgctgagcgagctgcaagctgggtttgttttcctttctcgcctcccttcttccctgattaataaagtctataggaatggtttcaa

SEQ ID NO: 907362 - DNA, 120 bp, Artificial Sequence
  ENSG00000254355_0 (sequence is synthesized)
atgtatgggtctccactgtggtctctcccccgccttctccttcactgcacagcgtcctgagcccagcctgtgctgacccagccacctgcagtgcatgcatctgtggggcaggtgggtacc

SEQ ID NO: 907363 - DNA, 120 bp, Artificial Sequence
  ENSG00000254355_1 (sequence is synthesized)
acccttaggggcataggcccaatgctgaggctccaggttggagaacatggcctctctgagcatctctggactccaggcagaggaaaaggctgatttttattctcagcttgggacacaagc

SEQ ID NO: 907364 - DNA, 120 bp, Artificial Sequence
  ENSG00000273306_0 (sequence is synthesized)
cagggcctacctgtgcatccacatctggccctttggaaacatgcaatcccatcaactgggtggaccaatcttatcttgccaggagtaactaattgtgggtatctgtcgccatacaagcat

SEQ ID NO: 907365 - DNA, 120 bp, Artificial Sequence
  ENSG00000273306_1 (sequence is synthesized)
atcagcattgccctttcccctagttttgcagccagtatttaacatctccttccgcctccttccatgcagggggagcagaggcacaaataaacttgcccaatatagcttaaggtgctacct

SEQ ID NO: 907366 - DNA, 120 bp, Artificial Sequence
  ENSG00000273306_2 (sequence is synthesized)
catgtacagcccacacacgctgaattaaaccatccaaatctccagagacctgtttgcaaatactgcaaaaacccttcgacataaggcctctacttcaccactaatcaccaaagctgcctt

SEQ ID NO: 907367 - DNA, 120 bp, Artificial Sequence
  ENSG00000273306_3 (sequence is synthesized)
gctgaatacagtaagtctgcatgatgaccactgtcacagacaatggcagtccacaggaggactgcctttcagctatgctttacaacttgcaagagtggcaaatctttgcaaaagcacttt

SEQ ID NO: 907368 - DNA, 120 bp, Artificial Sequence
  ENSG00000273306_4 (sequence is synthesized)
cactcaacccaaatattgcttatttagaatccaacatcatgatctacccaaacaagtggcccgttctccctttcttggttaaacggatgaagaaataaaaatgccattttcatttgtaaa

SEQ ID NO: 907369 - DNA, 120 bp, Artificial Sequence
  ENSG00000273301_0 (sequence is synthesized)
gcaaacggtattctgggatactgccatatgagtgtgtgcaggatggtgtgagctctacatttcttaatatgaagagggaggtcgactcggtcatatgataatgaactgttacatatcttt

SEQ ID NO: 907370 - DNA, 120 bp, Artificial Sequence
  ENSG00000273301_1 (sequence is synthesized)
tctgtgggagtggaatgccacgggaagctgtgcctattcgtggcaagttcaagataaaatgcatatgtccttgcaatgaaggcacacttatttatcccggattattttgaatccagaaga

SEQ ID NO: 907371 - DNA, 120 bp, Artificial Sequence
  ENSG00000273301_2 (sequence is synthesized)
actagtttatgggtgacatctgaaataatacacattatacgtatataaattacagaaatatcaagagtttactatatgatataatttcagtattaactggtttgttatctcttttatatg

SEQ ID NO: 907372 - DNA, 120 bp, Artificial Sequence
  ENSG00000273301_3 (sequence is synthesized)
tttgttatctcttttatatgtaatcccttgatgccttttattattaatttttgcatttaaaatgttttttttcccttgcccacatttggtttctgtacaagagctcacaactataaatca

SEQ ID NO: 907373 - DNA, 120 bp, Artificial Sequence
  ENSG00000273301_4 (sequence is synthesized)
tgttcaatcacgtaatatatgatctggtgctagtaacgtagaagttgaatatcatatttgttaagagcatctgtgctttttaagtttcaagggtttgacaggaaatgaatgcaaatgtga

SEQ ID NO: 907374 - DNA, 120 bp, Artificial Sequence
  ENSG00000273301_5 (sequence is synthesized)
tgcttaatttggacgtccaagttacattgacaacaatatttttgctacattggctttataagaatttctctttagcatcctctggcaatggttaggctaaccattagtctgacttagtaa

SEQ ID NO: 907375 - DNA, 120 bp, Artificial Sequence
  ENSG00000273301_6 (sequence is synthesized)
taactaagcaatggttagtcagactccagagaaagttactaggatatattggacatcccagcagaaaacatttccttcagaaatgactttagggacatgtgtccttgcatcattgatctg

SEQ ID NO: 907376 - DNA, 120 bp, Artificial Sequence
  ENSG00000273301_7 (sequence is synthesized)
attggaggagaccagggttcactgtgacaatggaaggaacaaggaattaatagctcaagagcatgactgctttcaagaaagtgggaccagtggcattgtagccaccataatcactatatt

SEQ ID NO: 907377 - DNA, 120 bp, Artificial Sequence
  ENSG00000273301_8 (sequence is synthesized)
taagtaacttttcatgtgtatgcttgtttccccaagaaaatgagaaataaacattcaactagaccagtttacatattttaatacactaaatgccaatctttctaaaagtttagatctatt

SEQ ID NO: 907378 - DNA, 120 bp, Artificial Sequence
  ENSG00000273301_9 (sequence is synthesized)
aataaaatatgtatttcttgttaattttttcaaactggttatcaccacatttctgggtcataatcttctgtatgtgatcatcacacccattcttactgattatgacaccatgaccaaaga

SEQ ID NO: 907379 - DNA, 120 bp, Artificial Sequence
  ENSG00000273301_10 (sequence is synthesized)
attatgatcatgtttcatttcattttgtttcaagaaagagacaggaaatgcaggggatgagggatggggtggattcaattttatgtagtggtgaaatttaagttaaaaaaatcatatata

SEQ ID NO: 907380 - DNA, 120 bp, Artificial Sequence
  ENSG00000273301_11 (sequence is synthesized)
tcttttaagaagaacttgttagttgaatataaatattgccacgaatgaataaaaaagaaactatcgcatatattttgtatatttaaattactatttatgcctcctaaaattgatagtatg

SEQ ID NO: 907381 - DNA, 120 bp, Artificial Sequence
  ENSG00000273301_12 (sequence is synthesized)
tggttctttgttaacaatcaatttagtattatatttctgagagaaaagatgtgtttttgaagttattgttatagcagtttttcttgtaagggtattgacagcaatagttcagtgctgctc

SEQ ID NO: 907382 - DNA, 120 bp, Artificial Sequence
  ENSG00000273301_13 (sequence is synthesized)
aataaaaccaaatataacaggagttagagaatctttgtaatctatattgctacaaacctagtaatgctttatcagtaatagtttctttcaaaagccttttcaatgttataacatgatttt

SEQ ID NO: 907383 - DNA, 120 bp, Artificial Sequence
  ENSG00000273301_14 (sequence is synthesized)
ctaatgttttataattaatgtgtattttgatgtccaattcaaattctgaaaaaataaggaaaaaggtaagtgggagcagtgtatggttggtgtgtctgtgagcgtgcgtgcatgtgtgtg

SEQ ID NO: 907384 - DNA, 120 bp, Artificial Sequence
  ENSG00000273301_15 (sequence is synthesized)
tgtgtgagtgtgtgtgtacatgaacgaatactcagtgggagaactgtatacataaaacgcttactgaagttgcaggttctgcttgtataattgaggtggtagaaaaccgggatcacaaat

SEQ ID NO: 907385 - DNA, 120 bp, Artificial Sequence
  ENSG00000273301_16 (sequence is synthesized)
gcaggaaattaggaagggatcttaagtagcttaaataaaacccgccagcatgtttcaccagctatagattatgtttcaaaccaaataatctatgaagcacaaatctaagggtgatgaaaa

SEQ ID NO: 907386 - DNA, 120 bp, Artificial Sequence
  ENSG00000273301_17 (sequence is synthesized)
tgtgtttagataaaatcagaatggaaataaaatgtgtttatgacccaagttgttatcctgatttaagttattatgaccacatatactcaagcctatcagtcagacacaagatactaattc

SEQ ID NO: 907387 - DNA, 120 bp, Artificial Sequence
  ENSG00000273301_18 (sequence is synthesized)
tcagcatgtctatgattacgtatatattcaggctcagtatggtgatgattaaccctcccttaaaatttatatttagggaacatctttctgtggggagatgcaagtgtgtttttcagatgc

SEQ ID NO: 907388 - DNA, 120 bp, Artificial Sequence
  ENSG00000273301_19 (sequence is synthesized)
gtatctttcccatatcactctgatttaggcagaaagtttatttaatgttggccatttgtcaagaaggaaacaaaagtactaaaatgatctgtgttggattaaaccattcctgtttgttct

SEQ ID NO: 907389 - DNA, 120 bp, Artificial Sequence
  ENSG00000273301_20 (sequence is synthesized)
atcaaacttatgctagggccaggtttcatgcactcctttttcaaatgcattattttctgaggcggtaacttgtttgaaaatttgaccttaggcaaccattttcatttatttccgcaaatc

SEQ ID NO: 907390 - DNA, 120 bp, Artificial Sequence
  ENSG00000273301_21 (sequence is synthesized)
aataatcattccatgatcaatttcctttttgtgtagtgtttctctaaatggagaaaaggagatcattagtatgtagagaaaaataagctgactctctgaaagtaatcaactgggatactt

SEQ ID NO: 907391 - DNA, 120 bp, Artificial Sequence
  ENSG00000273301_22 (sequence is synthesized)
caatatattaatttggtcagaatatagcctacagatagccagaacactatgccatgataaagctcatatttctagcagtgccaaagaacaaatcatatcatggcctggttatcaggttga

SEQ ID NO: 907392 - DNA, 120 bp, Artificial Sequence
  ENSG00000273301_23 (sequence is synthesized)
aagagctcatacttatgaaaaatggtcctttcacagcaaatttcatagaaacagaattttattggatgtcacaagatgcttttatatgtgaaacactccttagcagagaagatataaatt

SEQ ID NO: 907393 - DNA, 120 bp, Artificial Sequence
  ENSG00000273301_24 (sequence is synthesized)
tctttagaattgatgaaaagaaaatataaaaatctgcatttatttcaatcgcagaagccagcatcctctgaggtataagagtagtctattacataaacaccgctcacatctctcccatgt

SEQ ID NO: 907394 - DNA, 120 bp, Artificial Sequence
  ENSG00000273301_25 (sequence is synthesized)
ttatgctactgaagcaagcttggcgccaaatgtgatggatttatgtaaatgaaggttaatactcacccatgtaaaataattagaaaagtaaaacaaaacgtccggagatttaaatttgta

SEQ ID NO: 907395 - DNA, 120 bp, Artificial Sequence
  ENSG00000273301_26 (sequence is synthesized)
gttttaaagtattatatattcaaatacatgccaattgtctggagacaactagatacaactttactttccaaagtagtgacaaaattttctttgaatgcttctagagaataaaagaatgtt

SEQ ID NO: 907396 - DNA, 120 bp, Artificial Sequence
  ENSG00000273301_27 (sequence is synthesized)
tttattactacattttgttggtaggtcttgcctatacatggaatttagtttgattcttttgagcaaatctagtgactacgtcaataaaactaaagccattgggttattattttaactaat

SEQ ID NO: 907397 - DNA, 120 bp, Artificial Sequence
  ENSG00000273301_28 (sequence is synthesized)
aaaataagacatcaacacaatgcacgtacaaatgcaattttaatatcacttccatgttaagacaagtagaaaagagcttgtaaaataactacactcacatgtgaaattaagaaacaattc

SEQ ID NO: 907398 - DNA, 120 bp, Artificial Sequence
  ENSG00000273301_29 (sequence is synthesized)
ctacgatttaagcagtaagttatccgagatgagagggaattcacacttgcaaagaaatagaagtagaatagatagcaattcacaattcattgtgtcccaaacttaagtggaaataaaaga

SEQ ID NO: 907399 - DNA, 120 bp, Artificial Sequence
  ENSG00000273301_30 (sequence is synthesized)
aaaatggtacctatagcatttaacattatgtcactacatcttccatgtatacaaaatagacagctaattgtagaatgtggaccattttttactaatctgttatttaacagttgattattg

SEQ ID NO: 907400 - DNA, 120 bp, Artificial Sequence
  ENSG00000273301_31 (sequence is synthesized)
agcaaacttatgtatcaggcatttaaaaattctaaagcacttggtgttaaacattgaaaaagatgttgtcccatccttcaaggagcttaattatgcaatcatcaatattttcaaaataaa

SEQ ID NO: 907401 - DNA, 120 bp, Artificial Sequence
  ENSG00000273301_32 (sequence is synthesized)
gccaattgtttttaagaagatatacaattgtgtttacatatggcattctcttttttttcagatcaagtgtatagtcaaggtaaaattctaaacatactaaacttaatgtctaagtataga

SEQ ID NO: 907402 - DNA, 120 bp, Artificial Sequence
  ENSG00000273301_33 (sequence is synthesized)
atatgtttatgtgtaagcctcgatgtgtgcatatataatatgtactgctgtctatgtaaatcattaaaagggtaacacattttgccatgttggacttgaacattgtgacttggggtttgg

SEQ ID NO: 907403 - DNA, 120 bp, Artificial Sequence
  ENSG00000273301_34 (sequence is synthesized)
atgatttaaaactctttgatatttgggtcaattacattgcagcaaaatgtgtgtaatatggaaaaaatgtcttattatatttccctttaaatattatgaagtttcaaatttaaggggaat

SEQ ID NO: 907404 - DNA, 120 bp, Artificial Sequence
  ENSG00000273301_35 (sequence is synthesized)
ttttttaaagaaatgctgttggatttgtctcaaccaaacatgaaaattcttttgaagtgttcaattgttcccaaatataactgggtttgcccaccctaaaagcatctacatttacacatg

SEQ ID NO: 907405 - DNA, 120 bp, Artificial Sequence
  ENSG00000273301_36 (sequence is synthesized)
tatacacccacgtacagtatacatactgtatataatatatatgaaaatgtttagtatgcacttcttttgattggaactccttaagttaacatttatagtgtagcaacttgtgtaaagtgc

SEQ ID NO: 907406 - DNA, 120 bp, Artificial Sequence
  ENSG00000273301_37 (sequence is synthesized)
actgtgattataaaaaacaaagcacagtaaagtcacaggtcttgttatcttgcactaaaaatgtgtttacgtatttagcagttgtatgtttactttcttgctctttcagacaattgaaac

SEQ ID NO: 907407 - DNA, 120 bp, Artificial Sequence
  ENSG00000273301_38 (sequence is synthesized)
aaatagctatgagaagatgatataaaaataatatgttttttagtggataacggcactacatttttaaaagacagggtttttaaagaaaaccatttaacatccattccaatataacatgtt

SEQ ID NO: 907408 - DNA, 120 bp, Artificial Sequence
  ENSG00000273301_39 (sequence is synthesized)
taccatatctaaaaatttgaatgtcatattgcatttttcataattcattagaaatgtcaggtatgtgcctgaaaatttgtgcaaataagcattagataacagatttctctactcatgtgt

SEQ ID NO: 907409 - DNA, 120 bp, Artificial Sequence
  ENSG00000273301_40 (sequence is synthesized)
ataataatataaacactgatgttttaatgtctcttaatttttgtacttgatttttttaggtaacatgtaattataaatgtactttgatactactaaagtaaccagatgttgtttgaaaat

SEQ ID NO: 907410 - DNA, 120 bp, Artificial Sequence
  ENSG00000273301_41 (sequence is synthesized)
accagatgttgtttgaaaataaattgttttctttagtgcattgacaatattttacaatactttttgtgattatttatttgtgctcccgtgtaattataataaaagcaatagtttaaatta

SEQ ID NO: 907411 - DNA, 120 bp, Artificial Sequence
  ENSG00000273300_0 (sequence is synthesized)
tcctgacccccatgctgcaagtcttctgtttcatacaccctacaccagctctacagaaaaaaacaggacaccagggagcagagggaccctaggaaagggaaaacatgacagacaccctca

SEQ ID NO: 907412 - DNA, 120 bp, Artificial Sequence
  ENSG00000273300_1 (sequence is synthesized)
ttaccacgtgttgtgggagggaccaggtgggaggtaactgagtcggtgggaggtaactgagtcatgagggcgggtcttttccgtgctgttatcatgatagtgaataagtctcatgagatc

SEQ ID NO: 907413 - DNA, 88 bp, Artificial Sequence
  ENSG00000273300_2 (sequence is synthesized)
tctcatgagatctgatggttttataagtaggtgtttccctgcaccagctttttctctcccctgccatgattgtgaggcctccccagcc

SEQ ID NO: 907414 - DNA, 120 bp, Artificial Sequence
  ENSG00000273302_0 (sequence is synthesized)
gtattttacacatcagcagtgccagtccctcttaccattgctctttttcgagagcttttttaggctaaacctgtgtgtgtgcgcatgcagagagacagggtctctctctgttgccctggc

SEQ ID NO: 907415 - DNA, 120 bp, Artificial Sequence
  ENSG00000273302_1 (sequence is synthesized)
gcgcatgcagagagacagggtctctctctgttgccctggctggagtatagtggtgtgatcacagctcactgcagctttgacttcctgggctaaagtgatccttccacctcagcctcctga

SEQ ID NO: 907416 - DNA, 120 bp, Artificial Sequence
  ENSG00000273302_2 (sequence is synthesized)
ttaaaaaaaatgtttttgtagagaaggggtctccccatgttgcccaggcttctgctgtttttaagtatcaaaatacttgccgacacagtttttttcagatggcagttggcagctttgttc

SEQ ID NO: 907417 - DNA, 120 bp, Artificial Sequence
  ENSG00000273302_3 (sequence is synthesized)
aaacactccaaccctctcgcttattatttagtatctgcaactctactgttctctgcaattcaaatctgtaattattatatatttctctttatcctctaaccaatcttaagatctgctcag

SEQ ID NO: 907418 - DNA, 120 bp, Artificial Sequence
  ENSG00000273302_4 (sequence is synthesized)
ttgcccatataaaaattaccacaaagacttttcctcataactggaaatgacttgcaatccattataggtcttgagatgttctcaccaatggtcacaatattttaatattgtggcccttgg
